United States Patent Application Publication US 2022/0090207 A1 - sequence listing, part 23

SEQ ID NO: 303583 - DNA, 246 bp, Homo sapiens; identical to SEQ ID NO: 199660
  chr4:157892475-157892721
  hypo

SEQ ID NO: 303584 - DNA, 465 bp, Homo sapiens; identical to SEQ ID NO: 282608
  chr4:157892762-157893227
  hypo

SEQ ID NO: 303585 - DNA, 76 bp, Homo sapiens; identical to SEQ ID NO: 254032
  chr4:157974483-157974559
  hypo

SEQ ID NO: 303586 - DNA, 41 bp, Homo sapiens
  chr4:158740621-158740662
  hypo
ccgtgcctgactggcggagagctccagcagggtgtcccctg

SEQ ID NO: 303587 - DNA, 34 bp, Homo sapiens; identical to SEQ ID NO: 254035
  chr4:159018075-159018109
  hypo

SEQ ID NO: 303588 - DNA, 104 bp, Homo sapiens; identical to SEQ ID NO: 254036
  chr4:159488285-159488389
  hypo

SEQ ID NO: 303589 - DNA, 45 bp, Homo sapiens; identical to SEQ ID NO: 254037
  chr4:159680339-159680384
  hypo

SEQ ID NO: 303590 - DNA, 737 bp, Homo sapiens; identical to SEQ ID NO: 282617
  chr4:159690017-159690754
  hypo

SEQ ID NO: 303591 - DNA, 41 bp, Homo sapiens; identical to SEQ ID NO: 254038
  chr4:159749469-159749510
  hypo

SEQ ID NO: 303592 - DNA, 195 bp, Homo sapiens; identical to SEQ ID NO: 254039
  chr4:159919845-159920040
  hypo

SEQ ID NO: 303593 - DNA, 46 bp, Homo sapiens
  chr4:159927208-159927254
  hypo
cctgaccctcttttaattttttaatgtggctgccagaaaatgttca

SEQ ID NO: 303594 - DNA, 32 bp, Homo sapiens; identical to SEQ ID NO: 254041
  chr4:162799090-162799122
  hypo

SEQ ID NO: 303595 - DNA, 111 bp, Homo sapiens; identical to SEQ ID NO: 209836
  chr4:164394802-164394913
  hypo

SEQ ID NO: 303596 - DNA, 568 bp, Homo sapiens; identical to SEQ ID NO: 254043
  chr4:165109363-165109931
  hypo

SEQ ID NO: 303597 - DNA, 321 bp, Homo sapiens; identical to SEQ ID NO: 254044
  chr4:165850787-165851108
  hypo

SEQ ID NO: 303598 - DNA, 42 bp, Homo sapiens
  chr4:165854268-165854310
  hypo
gttctgaggtccagcgcagagtcccagggctcccaagtcaga

SEQ ID NO: 303599 - DNA, 234 bp, Homo sapiens
  chr4:165854346-165854580
  hypo
gtcctgcagaggcaggggcgccggcacaccctcttcagccatcggaatctggcagaagatgaagtgagcagggaaagagaagcctctttagcagggttcagttccttgactggcagctggcactcgcccctggagggtggaggactctgcggctccacattcggtgcccatgagaggcgctggggtgaggctgggccctctgtgggctccgggagaggtcgaaagtgaagatct

SEQ ID NO: 303600 - DNA, 161 bp, Homo sapiens; identical to SEQ ID NO: 254046
  chr4:166035044-166035205
  hypo

SEQ ID NO: 303601 - DNA, 180 bp, Homo sapiens; identical to SEQ ID NO: 254047
  chr4:166337214-166337394
  hypo

SEQ ID NO: 303602 - DNA, 92 bp, Homo sapiens; identical to SEQ ID NO: 254048
  chr4:169105970-169106062
  hypo

SEQ ID NO: 303603 - DNA, 43 bp, Homo sapiens; identical to SEQ ID NO: 209837
  chr4:169198694-169198737
  hypo

SEQ ID NO: 303604 - DNA, 32 bp, Homo sapiens; identical to SEQ ID NO: 209838
  chr4:169224159-169224191
  hypo

SEQ ID NO: 303605 - DNA, 37 bp, Homo sapiens; identical to SEQ ID NO: 254051
  chr4:169315725-169315762
  hypo

SEQ ID NO: 303606 - DNA, 33 bp, Homo sapiens; identical to SEQ ID NO: 209839
  chr4:169358978-169359011
  hypo

SEQ ID NO: 303607 - DNA, 163 bp, Homo sapiens; identical to SEQ ID NO: 209840
  chr4:169377152-169377315
  hypo

SEQ ID NO: 303608 - DNA, 118 bp, Homo sapiens; identical to SEQ ID NO: 254054
  chr4:169459971-169460089
  hypo

SEQ ID NO: 303609 - DNA, 33 bp, Homo sapiens; identical to SEQ ID NO: 209841
  chr4:169562060-169562093
  hypo

SEQ ID NO: 303610 - DNA, 205 bp, Homo sapiens; identical to SEQ ID NO: 254056
  chr4:169667598-169667803
  hypo

SEQ ID NO: 303611 - DNA, 92 bp, Homo sapiens; identical to SEQ ID NO: 254057
  chr4:169744533-169744625
  hypo

SEQ ID NO: 303612 - DNA, 124 bp, Homo sapiens; identical to SEQ ID NO: 254058
  chr4:169751969-169752093
  hypo

SEQ ID NO: 303613 - DNA, 150 bp, Homo sapiens; identical to SEQ ID NO: 254059
  chr4:169952682-169952832
  hypo

SEQ ID NO: 303614 - DNA, 44 bp, Homo sapiens; identical to SEQ ID NO: 254060
  chr4:169957541-169957585
  hypo

SEQ ID NO: 303615 - DNA, 78 bp, Homo sapiens; identical to SEQ ID NO: 254061
  chr4:169978256-169978334
  hypo

SEQ ID NO: 303616 - DNA, 209 bp, Homo sapiens; identical to SEQ ID NO: 254062
  chr4:170037586-170037795
  hypo

SEQ ID NO: 303617 - DNA, 185 bp, Homo sapiens; identical to SEQ ID NO: 209842
  chr4:170043184-170043369
  hypo

SEQ ID NO: 303618 - DNA, 89 bp, Homo sapiens; identical to SEQ ID NO: 254064
  chr4:170064508-170064597
  hypo

SEQ ID NO: 303619 - DNA, 214 bp, Homo sapiens; identical to SEQ ID NO: 209843
  chr4:170105281-170105495
  hypo

SEQ ID NO: 303620 - DNA, 45 bp, Homo sapiens; identical to SEQ ID NO: 254066
  chr4:170125972-170126017
  hypo

SEQ ID NO: 303621 - DNA, 73 bp, Homo sapiens; identical to SEQ ID NO: 199677
  chr4:170192274-170192347
  hypo

SEQ ID NO: 303622 - DNA, 76 bp, Homo sapiens; identical to SEQ ID NO: 209845
  chr4:170566083-170566159
  hypo

SEQ ID NO: 303623 - DNA, 75 bp, Homo sapiens; identical to SEQ ID NO: 209846
  chr4:170566219-170566294
  hypo

SEQ ID NO: 303624 - DNA, 37 bp, Homo sapiens; identical to SEQ ID NO: 209847
  chr4:170612105-170612142
  hypo

SEQ ID NO: 303625 - DNA, 70 bp, Homo sapiens; identical to SEQ ID NO: 254070
  chr4:170641910-170641980
  hypo

SEQ ID NO: 303626 - DNA, 215 bp, Homo sapiens; identical to SEQ ID NO: 209848
  chr4:170652116-170652331
  hypo

SEQ ID NO: 303627 - DNA, 41 bp, Homo sapiens; identical to SEQ ID NO: 254072
  chr4:170845921-170845962
  hypo

SEQ ID NO: 303628 - DNA, 67 bp, Homo sapiens; identical to SEQ ID NO: 209849
  chr4:170865287-170865354
  hypo

SEQ ID NO: 303629 - DNA, 122 bp, Homo sapiens; identical to SEQ ID NO: 254074
  chr4:170937655-170937777
  hypo

SEQ ID NO: 303630 - DNA, 120 bp, Homo sapiens; identical to SEQ ID NO: 254075
  chr4:173298723-173298843
  hypo

SEQ ID NO: 303631 - DNA, 41 bp, Homo sapiens; identical to SEQ ID NO: 254076
  chr4:173467910-173467951
  hypo

SEQ ID NO: 303632 - DNA, 1703 bp, Homo sapiens; identical to SEQ ID NO: 282646
  chr4:174089734-174091437
  hypo

SEQ ID NO: 303633 - DNA, 51 bp, Homo sapiens; identical to SEQ ID NO: 209851
  chr4:174136653-174136704
  hypo

SEQ ID NO: 303634 - DNA, 52 bp, Homo sapiens; identical to SEQ ID NO: 209852
  chr4:175940748-175940800
  hypo

SEQ ID NO: 303635 - DNA, 99 bp, Homo sapiens; identical to SEQ ID NO: 199694
  chr4:177240753-177240852
  hypo

SEQ ID NO: 303636 - DNA, 48 bp, Homo sapiens; identical to SEQ ID NO: 222534
  chr4:179699960-179700008
  hypo

SEQ ID NO: 303637 - DNA, 184 bp, Homo sapiens; identical to SEQ ID NO: 254079
  chr4:181454371-181454555
  hypo

SEQ ID NO: 303638 - DNA, 198 bp, Homo sapiens; identical to SEQ ID NO: 254080
  chr4:183626526-183626724
  hypo

SEQ ID NO: 303639 - DNA, 92 bp, Homo sapiens; identical to SEQ ID NO: 254081
  chr4:183673079-183673171
  hypo

SEQ ID NO: 303640 - DNA, 274 bp, Homo sapiens; identical to SEQ ID NO: 254082
  chr4:183768991-183769265
  hypo

SEQ ID NO: 303641 - DNA, 159 bp, Homo sapiens; identical to SEQ ID NO: 254083
  chr4:183808104-183808263
  hypo

SEQ ID NO: 303642 - DNA, 39 bp, Homo sapiens; identical to SEQ ID NO: 254084
  chr4:183808323-183808362
  hypo

SEQ ID NO: 303643 - DNA, 195 bp, Homo sapiens; identical to SEQ ID NO: 209854
  chr4:183809396-183809591
  hypo

SEQ ID NO: 303644 - DNA, 317 bp, Homo sapiens; identical to SEQ ID NO: 209855
  chr4:183815957-183816274
  hypo

SEQ ID NO: 303645 - DNA, 203 bp, Homo sapiens; identical to SEQ ID NO: 209856
  chr4:183824599-183824802
  hypo

SEQ ID NO: 303646 - DNA, 206 bp, Homo sapiens; identical to SEQ ID NO: 199699
  chr4:184019900-184020106
  hypo

SEQ ID NO: 303647 - DNA, 32 bp, Homo sapiens; identical to SEQ ID NO: 209858
  chr4:184051481-184051513
  hypo

SEQ ID NO: 303648 - DNA, 41 bp, Homo sapiens; identical to SEQ ID NO: 209859
  chr4:184160138-184160179
  hypo

SEQ ID NO: 303649 - DNA, 82 bp, Homo sapiens; identical to SEQ ID NO: 209860
  chr4:184166102-184166184
  hypo

SEQ ID NO: 303650 - DNA, 179 bp, Homo sapiens; identical to SEQ ID NO: 254091
  chr4:184277759-184277938
  hypo

SEQ ID NO: 303651 - DNA, 179 bp, Homo sapiens; identical to SEQ ID NO: 254092
  chr4:184278167-184278346
  hypo

SEQ ID NO: 303652 - DNA, 150 bp, Homo sapiens; identical to SEQ ID NO: 209861
  chr4:184289435-184289585
  hypo

SEQ ID NO: 303653 - DNA, 321 bp, Homo sapiens; identical to SEQ ID NO: 282688
  chr4:184328290-184328611
  hypo

SEQ ID NO: 303654 - DNA, 109 bp, Homo sapiens; identical to SEQ ID NO: 254094
  chr4:184331205-184331314
  hypo

SEQ ID NO: 303655 - DNA, 37 bp, Homo sapiens; identical to SEQ ID NO: 254095
  chr4:184339996-184340033
  hypo

SEQ ID NO: 303656 - DNA, 223 bp, Homo sapiens; identical to SEQ ID NO: 254096
  chr4:184343147-184343370
  hypo

SEQ ID NO: 303657 - DNA, 133 bp, Homo sapiens; identical to SEQ ID NO: 254098
  chr4:184404652-184404785
  hypo

SEQ ID NO: 303658 - DNA, 32 bp, Homo sapiens; identical to SEQ ID NO: 254099
  chr4:184554620-184554652
  hypo

SEQ ID NO: 303659 - DNA, 139 bp, Homo sapiens; identical to SEQ ID NO: 209862
  chr4:184667665-184667804
  hypo

SEQ ID NO: 303660 - DNA, 200 bp, Homo sapiens; identical to SEQ ID NO: 254101
  chr4:184670515-184670715
  hypo

SEQ ID NO: 303661 - DNA, 180 bp, Homo sapiens; identical to SEQ ID NO: 254102
  chr4:184675874-184676054
  hypo

SEQ ID NO: 303662 - DNA, 325 bp, Homo sapiens; identical to SEQ ID NO: 209863
  chr4:184678229-184678554
  hypo

SEQ ID NO: 303663 - DNA, 146 bp, Homo sapiens; identical to SEQ ID NO: 254104
  chr4:184679181-184679327
  hypo

SEQ ID NO: 303664 - DNA, 81 bp, Homo sapiens; identical to SEQ ID NO: 254105
  chr4:184740848-184740929
  hypo

SEQ ID NO: 303665 - DNA, 35 bp, Homo sapiens; identical to SEQ ID NO: 254107
  chr4:185121434-185121469
  hypo

SEQ ID NO: 303666 - DNA, 245 bp, Homo sapiens; identical to SEQ ID NO: 254108
  chr4:185121499-185121744
  hypo

SEQ ID NO: 303667 - DNA, 37 bp, Homo sapiens; identical to SEQ ID NO: 209864
  chr4:185185202-185185239
  hypo

SEQ ID NO: 303668 - DNA, 386 bp, Homo sapiens; identical to SEQ ID NO: 254110
  chr4:185238062-185238448
  hypo

SEQ ID NO: 303669 - DNA, 124 bp, Homo sapiens; identical to SEQ ID NO: 209865
  chr4:185239992-185240116
  hypo

SEQ ID NO: 303670 - DNA, 36 bp, Homo sapiens; identical to SEQ ID NO: 209866
  chr4:185241303-185241339
  hypo

SEQ ID NO: 303671 - DNA, 89 bp, Homo sapiens; identical to SEQ ID NO: 254113
  chr4:185322205-185322294
  hypo

SEQ ID NO: 303672 - DNA, 228 bp, Homo sapiens; identical to SEQ ID NO: 254114
  chr4:185344286-185344514
  hypo

SEQ ID NO: 303673 - DNA, 156 bp, Homo sapiens; identical to SEQ ID NO: 209868
  chr4:185352799-185352955
  hypo

SEQ ID NO: 303674 - DNA, 280 bp, Homo sapiens; identical to SEQ ID NO: 209869
  chr4:185353277-185353557
  hypo

SEQ ID NO: 303675 - DNA, 170 bp, Homo sapiens; identical to SEQ ID NO: 254117
  chr4:185355394-185355564
  hypo

SEQ ID NO: 303676 - DNA, 181 bp, Homo sapiens; identical to SEQ ID NO: 209870
  chr4:185386797-185386978
  hypo

SEQ ID NO: 303677 - DNA, 57 bp, Homo sapiens; identical to SEQ ID NO: 254119
  chr4:185425792-185425849
  hypo

SEQ ID NO: 303678 - DNA, 89 bp, Homo sapiens; identical to SEQ ID NO: 209871
  chr4:185426628-185426717
  hypo

SEQ ID NO: 303679 - DNA, 47 bp, Homo sapiens; identical to SEQ ID NO: 209872
  chr4:185480839-185480886
  hypo

SEQ ID NO: 303680 - DNA, 196 bp, Homo sapiens; identical to SEQ ID NO: 254122
  chr4:185491195-185491391
  hypo

SEQ ID NO: 303681 - DNA, 165 bp, Homo sapiens; identical to SEQ ID NO: 254123
  chr4:185684718-185684883
  hypo

SEQ ID NO: 303682 - DNA, 162 bp, Homo sapiens; identical to SEQ ID NO: 254124
  chr4:185688832-185688994
  hypo

SEQ ID NO: 303683 - DNA, 159 bp, Homo sapiens; identical to SEQ ID NO: 254125
  chr4:185709701-185709860
  hypo

SEQ ID NO: 303684 - DNA, 381 bp, Homo sapiens; identical to SEQ ID NO: 222537
  chr4:185747618-185747999
  hypo

SEQ ID NO: 303685 - DNA, 148 bp, Homo sapiens; identical to SEQ ID NO: 254126
  chr4:185765456-185765604
  hypo

SEQ ID NO: 303686 - DNA, 145 bp, Homo sapiens; identical to SEQ ID NO: 254127
  chr4:185872174-185872319
  hypo

SEQ ID NO: 303687 - DNA, 211 bp, Homo sapiens; identical to SEQ ID NO: 254128
  chr4:185872523-185872734
  hypo

SEQ ID NO: 303688 - DNA, 69 bp, Homo sapiens; identical to SEQ ID NO: 209874
  chr4:185873079-185873148
  hypo

SEQ ID NO: 303689 - DNA, 44 bp, Homo sapiens; identical to SEQ ID NO: 254130
  chr4:185886250-185886294
  hypo

SEQ ID NO: 303690 - DNA, 402 bp, Homo sapiens; identical to SEQ ID NO: 282703
  chr4:185938975-185939377
  hypo

SEQ ID NO: 303691 - DNA, 230 bp, Homo sapiens; identical to SEQ ID NO: 282704
  chr4:185939443-185939673
  hypo

SEQ ID NO: 303692 - DNA, 78 bp, Homo sapiens; identical to SEQ ID NO: 254131
  chr4:186066016-186066094
  hypo

SEQ ID NO: 303693 - DNA, 68 bp, Homo sapiens; identical to SEQ ID NO: 199713
  chr4:186130483-186130551
  hypo

SEQ ID NO: 303694 - DNA, 130 bp, Homo sapiens; identical to SEQ ID NO: 254132
  chr4:186150229-186150359
  hypo

SEQ ID NO: 303695 - DNA, 158 bp, Homo sapiens; identical to SEQ ID NO: 254133
  chr4:186203943-186204101
  hypo

SEQ ID NO: 303696 - DNA, 330 bp, Homo sapiens; identical to SEQ ID NO: 254134
  chr4:186220274-186220604
  hypo

SEQ ID NO: 303697 - DNA, 37 bp, Homo sapiens; identical to SEQ ID NO: 254135
  chr4:186224524-186224561
  hypo

SEQ ID NO: 303698 - DNA, 157 bp, Homo sapiens; identical to SEQ ID NO: 254136
  chr4:186224801-186224958
  hypo

SEQ ID NO: 303699 - DNA, 95 bp, Homo sapiens; identical to SEQ ID NO: 209878
  chr4:186319410-186319505
  hypo

SEQ ID NO: 303700 - DNA, 136 bp, Homo sapiens; identical to SEQ ID NO: 209879
  chr4:186348209-186348345
  hypo

SEQ ID NO: 303701 - DNA, 37 bp, Homo sapiens; identical to SEQ ID NO: 209880
  chr4:186348628-186348665
  hypo

SEQ ID NO: 303702 - DNA, 501 bp, Homo sapiens; identical to SEQ ID NO: 282712
  chr4:186456226-186456727
  hypo

SEQ ID NO: 303703 - DNA, 34 bp, Homo sapiens; identical to SEQ ID NO: 254140
  chr4:186933526-186933560
  hypo

SEQ ID NO: 303704 - DNA, 190 bp, Homo sapiens; identical to SEQ ID NO: 282714
  chr4:187026478-187026668
  hypo

SEQ ID NO: 303705 - DNA, 42 bp, Homo sapiens; identical to SEQ ID NO: 254141
  chr4:187027798-187027840
  hypo

SEQ ID NO: 303706 - DNA, 41 bp, Homo sapiens; identical to SEQ ID NO: 254142
  chr4:187028080-187028121
  hypo

SEQ ID NO: 303707 - DNA, 179 bp, Homo sapiens; identical to SEQ ID NO: 254143
  chr4:187206902-187207081
  hypo

SEQ ID NO: 303708 - DNA, 103 bp, Homo sapiens; identical to SEQ ID NO: 254144
  chr4:187404906-187405009
  hypo

SEQ ID NO: 303709 - DNA, 36 bp, Homo sapiens; identical to SEQ ID NO: 254145
  chr4:187509900-187509936
  hypo

SEQ ID NO: 303710 - DNA, 199 bp, Homo sapiens; identical to SEQ ID NO: 254146
  chr4:187527079-187527278
  hypo

SEQ ID NO: 303711 - DNA, 177 bp, Homo sapiens; identical to SEQ ID NO: 209881
  chr4:187550654-187550831
  hypo

SEQ ID NO: 303712 - DNA, 393 bp, Homo sapiens; identical to SEQ ID NO: 199720
  chr4:187647669-187648062
  hypo

SEQ ID NO: 303713 - DNA, 254 bp, Homo sapiens; identical to SEQ ID NO: 282721
  chr4:187648119-187648373
  hypo

SEQ ID NO: 303714 - DNA, 35 bp, Homo sapiens; identical to SEQ ID NO: 254148
  chr4:187680708-187680743
  hypo

SEQ ID NO: 303715 - DNA, 267 bp, Homo sapiens; identical to SEQ ID NO: 254149
  chr4:187762170-187762437
  hypo

SEQ ID NO: 303716 - DNA, 42 bp, Homo sapiens; identical to SEQ ID NO: 209884
  chr4:187796040-187796082
  hypo

SEQ ID NO: 303717 - DNA, 302 bp, Homo sapiens; identical to SEQ ID NO: 254151
  chr4:187840652-187840954
  hypo

SEQ ID NO: 303718 - DNA, 383 bp, Homo sapiens; identical to SEQ ID NO: 254152
  chr4:188427932-188428315
  hypo

SEQ ID NO: 303719 - DNA, 94 bp, Homo sapiens; identical to SEQ ID NO: 209886
  chr4:189100360-189100454
  hypo

SEQ ID NO: 303720 - DNA, 523 bp, Homo sapiens; identical to SEQ ID NO: 209887
  chr4:189552365-189552888
  hypo

SEQ ID NO: 303721 - DNA, 223 bp, Homo sapiens; identical to SEQ ID NO: 254155
  chr4:189717745-189717968
  hypo

SEQ ID NO: 303722 - DNA, 284 bp, Homo sapiens; identical to SEQ ID NO: 209888
  chr4:189956760-189957044
  hypo

SEQ ID NO: 303723 - DNA, 224 bp, Homo sapiens; identical to SEQ ID NO: 209889
  chr4:190345362-190345586
  hypo

SEQ ID NO: 303724 - DNA, 171 bp, Homo sapiens; identical to SEQ ID NO: 254158
  chr4:190434295-190434466
  hypo

SEQ ID NO: 303725 - DNA, 743 bp, Homo sapiens; identical to SEQ ID NO: 209890
  chr4:190462467-190463210
  hypo

SEQ ID NO: 303726 - DNA, 149 bp, Homo sapiens; identical to SEQ ID NO: 254160
  chr4:190509469-190509618
  hypo

SEQ ID NO: 303727 - DNA, 43 bp, Homo sapiens; identical to SEQ ID NO: 209891
  chr4:190767154-190767197
  hypo

SEQ ID NO: 303728 - DNA, 285 bp, Homo sapiens; identical to SEQ ID NO: 254162
  chr5:110217-110502
  hypo

SEQ ID NO: 303729 - DNA, 344 bp, Homo sapiens; identical to SEQ ID NO: 254163
  chr5:110562-110906
  hypo

SEQ ID NO: 303730 - DNA, 69 bp, Homo sapiens
  chr5:139617-139686
  hypo
cttcctgcacccaggctggccgctgtgcgcccatgagaaggtggtggtgcagctggcgtccctgcacgg

SEQ ID NO: 303731 - DNA, 248 bp, Homo sapiens; identical to SEQ ID NO: 209893
  chr5:139745-139993
  hypo

SEQ ID NO: 303732 - DNA, 126 bp, Homo sapiens; identical to SEQ ID NO: 209894
  chr5:140023-140149
  hypo

SEQ ID NO: 303733 - DNA, 124 bp, Homo sapiens; identical to SEQ ID NO: 254165
  chr5:141500-141624
  hypo

SEQ ID NO: 303734 - DNA, 531 bp, Homo sapiens; identical to SEQ ID NO: 254166
  chr5:142773-143304
  hypo

SEQ ID NO: 303735 - DNA, 120 bp, Homo sapiens; identical to SEQ ID NO: 254167
  chr5:164483-164603
  hypo

SEQ ID NO: 303736 - DNA, 120 bp, Homo sapiens; identical to SEQ ID NO: 209895
  chr5:164903-165023
  hypo

SEQ ID NO: 303737 - DNA, 111 bp, Homo sapiens; identical to SEQ ID NO: 254169
  chr5:181712-181823
  hypo

SEQ ID NO: 303738 - DNA, 177 bp, Homo sapiens; identical to SEQ ID NO: 254170
  chr5:183414-183591
  hypo

SEQ ID NO: 303739 - DNA, 358 bp, Homo sapiens
  chr5:192307-192665
  hypo
gtgcacaacgtgcggctgcatgcgggccacgtgcagcagcttctggcccaggtgggcttcccccggctggcctcgctcaccctgcccaccaaggcctttgatgcaccccccacctacgcctccactcccgacggcgaggaccccctcctcgcctccatcgcccgggagctcagcaagatggcgcagctcactgagctcagtgtggccttctccacgctgaccgggaagatcccgacgctgcttgggtgagtcttggggaggggactgagggcgggctggtggctgcagaggcaaggagagatcgtccaggggcctgctcatgtccaaggccatgaggctacacggcctccagcctctc

SEQ ID NO: 303740 - DNA, 115 bp, Homo sapiens; identical to SEQ ID NO: 254172
  chr5:230941-231056
  hypo

SEQ ID NO: 303741 - DNA, 122 bp, Homo sapiens; identical to SEQ ID NO: 209897
  chr5:233693-233815
  hypo

SEQ ID NO: 303742 - DNA, 35 bp, Homo sapiens; identical to SEQ ID NO: 254174
  chr5:234921-234956
  hypo

SEQ ID NO: 303743 - DNA, 47 bp, Homo sapiens; identical to SEQ ID NO: 209898
  chr5:235348-235395
  hypo

SEQ ID NO: 303744 - DNA, 92 bp, Homo sapiens; identical to SEQ ID NO: 254176
  chr5:279481-279573
  hypo

SEQ ID NO: 303745 - DNA, 149 bp, Homo sapiens; identical to SEQ ID NO: 254177
  chr5:285688-285837
  hypo

SEQ ID NO: 303746 - DNA, 97 bp, Homo sapiens; identical to SEQ ID NO: 254178
  chr5:286140-286237
  hypo

SEQ ID NO: 303747 - DNA, 216 bp, Homo sapiens; identical to SEQ ID NO: 254179
  chr5:286417-286633
  hypo

SEQ ID NO: 303748 - DNA, 81 bp, Homo sapiens; identical to SEQ ID NO: 254180
  chr5:306772-306853
  hypo

SEQ ID NO: 303749 - DNA, 470 bp, Homo sapiens; identical to SEQ ID NO: 254181
  chr5:309029-309499
  hypo

SEQ ID NO: 303750 - DNA, 194 bp, Homo sapiens; identical to SEQ ID NO: 254182
  chr5:310508-310702
  hypo

SEQ ID NO: 303751 - DNA, 189 bp, Homo sapiens; identical to SEQ ID NO: 254183
  chr5:312943-313132
  hypo

SEQ ID NO: 303752 - DNA, 118 bp, Homo sapiens; identical to SEQ ID NO: 254184
  chr5:314539-314657
  hypo

SEQ ID NO: 303753 - DNA, 84 bp, Homo sapiens; identical to SEQ ID NO: 254185
  chr5:325119-325203
  hypo

SEQ ID NO: 303754 - DNA, 64 bp, Homo sapiens; identical to SEQ ID NO: 282726
  chr5:343971-344035
  hypo

SEQ ID NO: 303755 - DNA, 207 bp, Homo sapiens; identical to SEQ ID NO: 282727
  chr5:344297-344504
  hypo

SEQ ID NO: 303756 - DNA, 82 bp, Homo sapiens; identical to SEQ ID NO: 199724
  chr5:368381-368463
  hypo

SEQ ID NO: 303757 - DNA, 259 bp, Homo sapiens; identical to SEQ ID NO: 199725
  chr5:373104-373363
  hypo

SEQ ID NO: 303758 - DNA, 285 bp, Homo sapiens; identical to SEQ ID NO: 199726
  chr5:374579-374864
  hypo

SEQ ID NO: 303759 - DNA, 249 bp, Homo sapiens; identical to SEQ ID NO: 254186
  chr5:375541-375790
  hypo

SEQ ID NO: 303760 - DNA, 267 bp, Homo sapiens; identical to SEQ ID NO: 222548
  chr5:377105-377372
  hypo

SEQ ID NO: 303761 - DNA, 102 bp, Homo sapiens; identical to SEQ ID NO: 254187
  chr5:387246-387348
  hypo

SEQ ID NO: 303762 - DNA, 159 bp, Homo sapiens; identical to SEQ ID NO: 254188
  chr5:387838-387997
  hypo

SEQ ID NO: 303763 - DNA, 166 bp, Homo sapiens; identical to SEQ ID NO: 254189
  chr5:405762-405928
  hypo

SEQ ID NO: 303764 - DNA, 164 bp, Homo sapiens
  chr5:427991-428155
  hypo
tcccgccgcggctgtcgctgttctgcattgcggcacccgttctcctcccctccgcagcggagatgaaaatgaggagcgcgctcctgagggcaaaacccagagcagacaccgcagccaccgcggatgcaaagtgagtaagactcgcccttcacagccacatggtg

SEQ ID NO: 303765 - DNA, 163 bp, Homo sapiens; identical to SEQ ID NO: 254192
  chr5:447732-447895
  hypo

SEQ ID NO: 303766 - DNA, 372 bp, Homo sapiens; identical to SEQ ID NO: 209903
  chr5:453928-454300
  hypo

SEQ ID NO: 303767 - DNA, 44 bp, Homo sapiens; identical to SEQ ID NO: 209904
  chr5:457006-457050
  hypo

SEQ ID NO: 303768 - DNA, 164 bp, Homo sapiens; identical to SEQ ID NO: 254195
  chr5:458631-458795
  hypo

SEQ ID NO: 303769 - DNA, 190 bp, Homo sapiens; identical to SEQ ID NO: 209905
  chr5:462213-462403
  hypo

SEQ ID NO: 303770 - DNA, 59 bp, Homo sapiens; identical to SEQ ID NO: 209906
  chr5:463463-463522
  hypo

SEQ ID NO: 303771 - DNA, 76 bp, Homo sapiens; identical to SEQ ID NO: 209907
  chr5:463552-463628
  hypo

SEQ ID NO: 303772 - DNA, 104 bp, Homo sapiens; identical to SEQ ID NO: 254199
  chr5:464586-464690
  hypo

SEQ ID NO: 303773 - DNA, 772 bp, Homo sapiens
  chr5:465050-465822
  hypo
ccccactgagcccccgctcctcctctgcggtgagatgccagagccgtggcggagcgaggaggagtgggctcagagcctccggggagccaccgggagccccagcctgggtttcaatgagggtgctcctggccgccagagccgtggagcctgccgctgaccgcgcgtgtctccccagaggatgacggccgaggcgcaccggcgcgtggtggtggagtacctgcgggcggtcatgcagaagcgcatttccttccggagcccggaggagcgcaaggagggtgccgagaagatggttagggaggcagagcagctgcgcttcctgttccggaagctggcgtccgtgagtgtcgcgcaggtccgggctggagaaggcctgtcgctccgcggccctgttcagcctccaccccgggactcgggccagtagatgggagtgtgtcgtgtgtttgtcaggcggggggagcctgggtccaggtcctgcctgaccttgtggttggacacgaatgtccacagaggtagacgcgccggccccgccggcttcccgaggccgcccacagctccctgacggacgcttcccagtctgtcctgcgctgcgaggtgctggctgcctcccacggtctcgccctcaccccagacccctggccctgtcactgagctttcagagtagatcctgaggagtcaggtgaagagggaggttcccagtcaggaaggggctcagccagaatccagctgctcccagcgccgcgggacagccgagggcggctcctcacattgctgc

SEQ ID NO: 303774 - DNA, 279 bp, Homo sapiens
  chr5:465852-466131
  hypo
cggatactgcgacaccatcgtggctgtggccgaagtgatcaagctgacagacccttctctgctctacctggaggtctccactctggtcagcaagtatccagacatcaggtaagggatgcacgtcttagaatcctgccttagaatcctggagtggagcggcaggtccctccttctgtctggggcgggtggggctcctggttcgcaagttcagccctgcagcacggcaagggttcaggtgcggcacagcggggcccaggcgcagggagcagagctgcttct

SEQ ID NO: 303775 - DNA, 82 bp, Homo sapiens; identical to SEQ ID NO: 254201
  chr5:466515-466597
  hypo

SEQ ID NO: 303776 - DNA, 1687 bp, Homo sapiens; identical to SEQ ID NO: 282732
  chr5:472580-474267
  hypo

SEQ ID NO: 303777 - DNA, 396 bp, Homo sapiens; identical to SEQ ID NO: 254202
  chr5:476482-476878
  hypo

SEQ ID NO: 303778 - DNA, 93 bp, Homo sapiens; identical to SEQ ID NO: 254203
  chr5:480653-480746
  hypo

SEQ ID NO: 303779 - DNA, 371 bp, Homo sapiens
  chr5:488124-488495
  hypo
tgtgggtccaaagtcacagacgctctggggaccaggagggcgggatttcaacagcgccatcattaaccctgaagctatggagtgggcgggcagggcctgggaactgtggaagatacaaagaagcctcgcgaaagctgccagtcgttctgagctgggaggaaggaggtggagggacgggacgcccccgggaggggagtttgaggacagggtttcacgccctcctttgctgactgaccgatggggggtgagacggggcccaggcctcccacggctcgcccgctctggagcggtggctccgttgctcaccacggtgactgcgtcgttcagcagcgactccccgaagacgatgatgaacaggacctcgttgacat

SEQ ID NO: 303780 - DNA, 51 bp, Homo sapiens; identical to SEQ ID NO: 209912
  chr5:488553-488604
  hypo

SEQ ID NO: 303781 - DNA, 86 bp, Homo sapiens
  chr5:490616-490702
  hypo
ggggaccattgtgacgtggccacagagccacggagtgtgcccggctctcaaaggagcggccctgacggccagactgatcacaggct

SEQ ID NO: 303782 - DNA, 457 bp, Homo sapiens; identical to SEQ ID NO: 282733
  chr5:490766-491223
  hypo

SEQ ID NO: 303783 - DNA, 40 bp, Homo sapiens; identical to SEQ ID NO: 209914
  chr5:500465-500505
  hypo

SEQ ID NO: 303784 - DNA, 57 bp, Homo sapiens; identical to SEQ ID NO: 209915
  chr5:500535-500592
  hypo

SEQ ID NO: 303785 - DNA, 526 bp, Homo sapiens; identical to SEQ ID NO: 254209
  chr5:508111-508637
  hypo

SEQ ID NO: 303786 - DNA, 397 bp, Homo sapiens; identical to SEQ ID NO: 209916
  chr5:510012-510409
  hypo

SEQ ID NO: 303787 - DNA, 37 bp, Homo sapiens; identical to SEQ ID NO: 254211
  chr5:519702-519739
  hypo

SEQ ID NO: 303788 - DNA, 199 bp, Homo sapiens
  chr5:520018-520217
  hypo
cctacggctgcgcgaggcactgcagactccagatacccgtctcgctcctgcctgcccttccagccagggttcaccaagatgtggggcggcctgggcctccgccatcacatccctcagcaacacaagctccacttcgagagcctgcccccaccgcccccacccagccccactgtcctggtttccccgtgggcagtcactg

SEQ ID NO: 303789 - DNA, 164 bp, Homo sapiens; identical to SEQ ID NO: 254213
  chr5:532005-532169
  hypo

SEQ ID NO: 303790 - DNA, 36 bp, Homo sapiens; identical to SEQ ID NO: 209917
  chr5:537376-537412
  hypo

SEQ ID NO: 303791 - DNA, 60 bp, Homo sapiens; identical to SEQ ID NO: 209918
  chr5:554571-554631
  hypo

SEQ ID NO: 303792 - DNA, 60 bp, Homo sapiens; identical to SEQ ID NO: 209919
  chr5:554751-554811
  hypo

SEQ ID NO: 303793 - DNA, 240 bp, Homo sapiens; identical to SEQ ID NO: 209920
  chr5:554931-555171
  hypo

SEQ ID NO: 303794 - DNA, 162 bp, Homo sapiens
  chr5:559439-559601
  hypo
ttttgtatgtgtgcatctgtacatgcgttatgcacgcgggacacgcacacggagataccgagtttccgccgggtccctttgctcccatttctgtttccaacatcaaccatttgtgcttctcttttttcgtgccagcgtgtcgtgttgtctgtttcattattt

SEQ ID NO: 303795 - DNA, 392 bp, Homo sapiens; identical to SEQ ID NO: 254219
  chr5:569852-570244
  hypo

SEQ ID NO: 303796 - DNA, 265 bp, Homo sapiens; identical to SEQ ID NO: 254220
  chr5:572063-572328
  hypo

SEQ ID NO: 303797 - DNA, 90 bp, Homo sapiens
  chr5:583241-583331
  hypo
ggcaaaggctccaggtgttgaagtggtaaaatctcgaagctgcctggcccatctcttacccctgctctcctgtgccgcttcgtcctcagg

SEQ ID NO: 303798 - DNA, 197 bp, Homo sapiens
  chr5:595103-595300
  hypo
gcgagaacaccctttggaaacgaaggaaaaatcgatgcgagaacacccttcagaaatgaaaaatcaacgtgagaacacccttcggaaatgaaggaaaagtcgacgtgagaacacccttcggaaatgaaggaaaaatcgacgcgagaacacccttcagaaatgaagaaaagtcgacgcgagaacacccttcggaaacg

SEQ ID NO: 303799 - DNA, 114 bp, Homo sapiens
  chr5:595330-595444
  hypo
gaaacgaaggaaaaatcgacgcgagaacacccttcggaaatgaaagaaaaattgatgatctccagtgaggacgcactaagagaatttgttgccggcacacctgctttaaaagat

SEQ ID NO: 303800 - DNA, 180 bp, Homo sapiens; identical to SEQ ID NO: 209921
  chr5:600957-601137
  hypo

SEQ ID NO: 303801 - DNA, 262 bp, Homo sapiens
  chr5:601222-601484
  hypo
agaagtgaacggcgcggccctccctgagttccggcctggctctggataccaaggagcaaggtggtcaggggtcaggggctggagtggggagattgcctgggagggggctggagggtgtggtggaactgcaggttctctccttgacatgcctgtgggggagcctttcccggccctctctccgctggttttcaccctttctccggtgcagccacactgggcatcccaccccagggatccaggaagggggcgtgtcggccgagtg

SEQ ID NO: 303802 - DNA, 196 bp, Homo sapiens; identical to SEQ ID NO: 254224
  chr5:608783-608979
  hypo

SEQ ID NO: 303803 - DNA, 83 bp, Homo sapiens; identical to SEQ ID NO: 254225
  chr5:609241-609324
  hypo

SEQ ID NO: 303804 - DNA, 37 bp, Homo sapiens; identical to SEQ ID NO: 254226
  chr5:609577-609614
  hypo

SEQ ID NO: 303805 - DNA, 51 bp, Homo sapiens; identical to SEQ ID NO: 222554
  chr5:612241-612292
  hypo

SEQ ID NO: 303806 - DNA, 189 bp, Homo sapiens; identical to SEQ ID NO: 209923
  chr5:623330-623519
  hypo

SEQ ID NO: 303807 - DNA, 319 bp, Homo sapiens; identical to SEQ ID NO: 254228
  chr5:628859-629178
  hypo

SEQ ID NO: 303808 - DNA, 89 bp, Homo sapiens; identical to SEQ ID NO: 209924
  chr5:633969-634058
  hypo

SEQ ID NO: 303809 - DNA, 565 bp, Homo sapiens; identical to SEQ ID NO: 254230
  chr5:640118-640683
  hypo

SEQ ID NO: 303810 - DNA, 97 bp, Homo sapiens; identical to SEQ ID NO: 209926
  chr5:646057-646154
  hypo

SEQ ID NO: 303811 - DNA, 262 bp, Homo sapiens; identical to SEQ ID NO: 209927
  chr5:652921-653183
  hypo

SEQ ID NO: 303812 - DNA, 95 bp, Homo sapiens; identical to SEQ ID NO: 209928
  chr5:667282-667377
  hypo

SEQ ID NO: 303813 - DNA, 39 bp, Homo sapiens
  chr5:675592-675631
  hypo
ggccaggggtacattgtggccggggctgcagtgtgacca

SEQ ID NO: 303814 - DNA, 263 bp, Homo sapiens; identical to SEQ ID NO: 199729
  chr5:676505-676768
  hypo

SEQ ID NO: 303815 - DNA, 377 bp, Homo sapiens; identical to SEQ ID NO: 199730
  chr5:676926-677303
  hypo

SEQ ID NO: 303816 - DNA, 59 bp, Homo sapiens; identical to SEQ ID NO: 209931
  chr5:677571-677630
  hypo

SEQ ID NO: 303817 - DNA, 61 bp, Homo sapiens; identical to SEQ ID NO: 209932
  chr5:678094-678155
  hypo

SEQ ID NO: 303818 - DNA, 35 bp, Homo sapiens; identical to SEQ ID NO: 199731
  chr5:693798-693833
  hypo

SEQ ID NO: 303819 - DNA, 145 bp, Homo sapiens; identical to SEQ ID NO: 209934
  chr5:750521-750666
  hypo

SEQ ID NO: 303820 - DNA, 40 bp, Homo sapiens; identical to SEQ ID NO: 254240
  chr5:760084-760124
  hypo

SEQ ID NO: 303821 - DNA, 673 bp, Homo sapiens; identical to SEQ ID NO: 254241
  chr5:850086-850759
  hypo

SEQ ID NO: 303822 - DNA, 281 bp, Homo sapiens
  chr5:851407-851688
  hypo
ggaggttctgaacacgctgcggctgctcctggccagtcaggtggggagggcggcaggggtgggagggacgtggtgtcacagagcggcagtgaaagacactcaacggccgctacggggtggggggttgatcttgaggggctgggcggtctctacagaggagggttaggaagcttcgccacgttatgcctcgctcaaagtccttgttgtctctttgggaaaaaaccttcagaaaatgaagttgatattaaatgtatttctttgagaagagagacattgagaaa

SEQ ID NO: 303823 - DNA, 120 bp, Homo sapiens; identical to SEQ ID NO: 254243
  chr5:855237-855357
  hypo

SEQ ID NO: 303824 - DNA, 117 bp, Homo sapiens; identical to SEQ ID NO: 254244
  chr5:864283-864400
  hypo

SEQ ID NO: 303825 - DNA, 153 bp, Homo sapiens; identical to SEQ ID NO: 209935
  chr5:873761-873914
  hypo

SEQ ID NO: 303826 - DNA, 204 bp, Homo sapiens; identical to SEQ ID NO: 209936
  chr5:876062-876266
  hypo

SEQ ID NO: 303827 - DNA, 256 bp, Homo sapiens; identical to SEQ ID NO: 209937
  chr5:881857-882113
  hypo

SEQ ID NO: 303828 - DNA, 463 bp, Homo sapiens; identical to SEQ ID NO: 254248
  chr5:883801-884264
  hypo

SEQ ID NO: 303829 - DNA, 135 bp, Homo sapiens; identical to SEQ ID NO: 254249
  chr5:884916-885051
  hypo

SEQ ID NO: 303830 - DNA, 215 bp, Homo sapiens; identical to SEQ ID NO: 209938
  chr5:885339-885554
  hypo

SEQ ID NO: 303831 - DNA, 692 bp, Homo sapiens; identical to SEQ ID NO: 254251
  chr5:885757-886449
  hypo

SEQ ID NO: 303832 - DNA, 396 bp, Homo sapiens; identical to SEQ ID NO: 209940
  chr5:887038-887434
  hypo

SEQ ID NO: 303833 - DNA, 164 bp, Homo sapiens; identical to SEQ ID NO: 254253
  chr5:888864-889028
  hypo

SEQ ID NO: 303834 - DNA, 192 bp, Homo sapiens; identical to SEQ ID NO: 209941
  chr5:902318-902510
  hypo

SEQ ID NO: 303835 - DNA, 117 bp, Homo sapiens
  chr5:909087-909204
  hypo
gaaagaaaactcaggcatggtaagcattttacgtagcacagaaaagcataaaatgaagaactgctacgttcaggccttatcccacccacttctctcctatcccacccactgtcagca

SEQ ID NO: 303836 - DNA, 45 bp, Homo sapiens; identical to SEQ ID NO: 209942
  chr5:909638-909683
  hypo

SEQ ID NO: 303837 - DNA, 454 bp, Homo sapiens
  chr5:912352-912806
  hypo
gtaccagtcagtgtaggggacgtcagtgaccggctgtgtttacctggctggctgcacaaaccttagttctcagcttaccccgggcttttccaatgccctgcctctcgggggcctgtatccttacctgaaagaggaaacatcacgggcgtagtatgggcctggttttggtcacggggtccacatgacgtcacgttcttgagtcgcctgttgtgatgataggcaggaacactgttgccgtgggcagagcgacgcgtgcgggttgtgtgtgtgagtcaggaaggccgtcgccacgggcagagcgacgcgtgcggggagcgtgtgtgagtcaggagggccgtcgccacgggcacagtgacgtgcggtgagtgtgagtcaggagggccgtcgccacgggcacaatgacatgtgcggtgagtgtgagtcagtaaggccgtcgccatgggcacagtgacgc

SEQ ID NO: 303838 - DNA, 228 bp, Homo sapiens; identical to SEQ ID NO: 209944
  chr5:913180-913408
  hypo

SEQ ID NO: 303839 - DNA, 139 bp, Homo sapiens; identical to SEQ ID NO: 209945
  chr5:919456-919595
  hypo

SEQ ID NO: 303840 - DNA, 150 bp, Homo sapiens; identical to SEQ ID NO: 254261
  chr5:948029-948179
  hypo

SEQ ID NO: 303841 - DNA, 134 bp, Homo sapiens; identical to SEQ ID NO: 254262
  chr5:961624-961758
  hypo

SEQ ID NO: 303842 - DNA, 516 bp, Homo sapiens; identical to SEQ ID NO: 254263
  chr5:962518-963034
  hypo

SEQ ID NO: 303843 - DNA, 155 bp, Homo sapiens; identical to SEQ ID NO: 254264
  chr5:993134-993289
  hypo

SEQ ID NO: 303844 - DNA, 62 bp, Homo sapiens
  chr5:1003043-1003105
  hypo
ggactcctggaaggcagcttctcaccgtcactgccgtctgccctgctacatgtgacggctgt

SEQ ID NO: 303845 - DNA, 86 bp, Homo sapiens; identical to SEQ ID NO: 254266
  chr5:1026900-1026986
  hypo

SEQ ID NO: 303846 - DNA, 163 bp, Homo sapiens; identical to SEQ ID NO: 254267
  chr5:1027310-1027473
  hypo

SEQ ID NO: 303847 - DNA, 242 bp, Homo sapiens; identical to SEQ ID NO: 254268
  chr5:1027769-1028011
  hypo

SEQ ID NO: 303848 - DNA, 52 bp, Homo sapiens
  chr5:1028326-1028378
  hypo
ggcggggacgtggacggtggcctcggggtggttggctcacagaccagggtgg

SEQ ID NO: 303849 - DNA, 115 bp, Homo sapiens
  chr5:1028408-1028523
  hypo
cctgaagcaaaggctacctgttgttgacgccgtgtgacagacgcctgctgctcatgcagctgcgaggctatgggttctggtcccggaggcctccgtgggttggggtcagaccctc

SEQ ID NO: 303850 - DNA, 239 bp, Homo sapiens; identical to SEQ ID NO: 209947
  chr5:1029657-1029896
  hypo

SEQ ID NO: 303851 - DNA, 36 bp, Homo sapiens; identical to SEQ ID NO: 254271
  chr5:1031041-1031077
  hypo

SEQ ID NO: 303852 - DNA, 248 bp, Homo sapiens; identical to SEQ ID NO: 254272
  chr5:1031561-1031809
  hypo

SEQ ID NO: 303853 - DNA, 191 bp, Homo sapiens; identical to SEQ ID NO: 209949
  chr5:1032282-1032473
  hypo

SEQ ID NO: 303854 - DNA, 32 bp, Homo sapiens; identical to SEQ ID NO: 254274
  chr5:1032887-1032919
  hypo

SEQ ID NO: 303855 - DNA, 358 bp, Homo sapiens; identical to SEQ ID NO: 209950
  chr5:1033254-1033612
  hypo

SEQ ID NO: 303856 - DNA, 51 bp, Homo sapiens; identical to SEQ ID NO: 209951
  chr5:1033674-1033725
  hypo

SEQ ID NO: 303857 - DNA, 183 bp, Homo sapiens; identical to SEQ ID NO: 254277
  chr5:1036265-1036448
  hypo

SEQ ID NO: 303858 - DNA, 403 bp, Homo sapiens; identical to SEQ ID NO: 254278
  chr5:1036739-1037142
  hypo

SEQ ID NO: 303859 - DNA, 156 bp, Homo sapiens
  chr5:1037839-1037995
  hypo
gtgggccctgggccgtttctgaggagatgggaacctgagcctgcactcccagggcctcacactctgacctgtgtccgcagggtcccctcctgtgcaagcaaagcaggagccccagggcagggcctcgcacctccaggcccggtcccgctcccagga

SEQ ID NO: 303860 - DNA, 468 bp, Homo sapiens
  chr5:1038035-1038503
  hypo
ctggtggaacacgtcgtgccagcctcggagcctgctgcccgggccctggacacgcagccccggccgaaggggccggagaagcagttcctcaagtcccccaagggctccgggaagccgcctggggtgccagccagcagcaagtccgggaaagccttcagctactacctgccggccgtcctgccgccccaggcccctcaggacggccaccacctcccgcagcccccaccgccaccctacggccacaagcggtaccgccaaaagggcagggagggccactcgccactcaaggccccacacgctcagcctgccacagtggagcacgaggtggtgcgggacctgccgcccacgccagcaggagagggctacgcggtgccagtgatccagcggcacgagcaccaccaccaccacgagcaccaccaccaccaccaccaccaccacttccacccgtcctagcgccactgccaagca

SEQ ID NO: 303861 - DNA, 321 bp, Homo sapiens; identical to SEQ ID NO: 209952
  chr5:1039292-1039613
  hypo

SEQ ID NO: 303862 - DNA, 140 bp, Homo sapiens; identical to SEQ ID NO: 209953
  chr5:1039683-1039823
  hypo

SEQ ID NO: 303863 - DNA, 370 bp, Homo sapiens; identical to SEQ ID NO: 254281
  chr5:1039853-1040223
  hypo

SEQ ID NO: 303864 - DNA, 189 bp, Homo sapiens; identical to SEQ ID NO: 254282
  chr5:1045515-1045704
  hypo

SEQ ID NO: 303865 - DNA, 78 bp, Homo sapiens; identical to SEQ ID NO: 209955
  chr5:1046857-1046935
  hypo

SEQ ID NO: 303866 - DNA, 259 bp, Homo sapiens; identical to SEQ ID NO: 209956
  chr5:1049743-1050002
  hypo

SEQ ID NO: 303867 - DNA, 557 bp, Homo sapiens; identical to SEQ ID NO: 254285
  chr5:1050399-1050956
  hypo

SEQ ID NO: 303868 - DNA, 295 bp, Homo sapiens; identical to SEQ ID NO: 209958
  chr5:1051292-1051587
  hypo

SEQ ID NO: 303869 - DNA, 1256 bp, Homo sapiens; identical to SEQ ID NO: 254287
  chr5:1051902-1053158
  hypo

SEQ ID NO: 303870 - DNA, 1648 bp, Homo sapiens; identical to SEQ ID NO: 254288
  chr5:1053386-1055034
  hypo

SEQ ID NO: 303871 - DNA, 142 bp, Homo sapiens; identical to SEQ ID NO: 209961
  chr5:1055406-1055548
  hypo

SEQ ID NO: 303872 - DNA, 460 bp, Homo sapiens; identical to SEQ ID NO: 209962
  chr5:1055578-1056038
  hypo

SEQ ID NO: 303873 - DNA, 1876 bp, Homo sapiens; identical to SEQ ID NO: 209963
  chr5:1056068-1057944
  hypo

SEQ ID NO: 303874 - DNA, 128 bp, Homo sapiens; identical to SEQ ID NO: 209964
  chr5:1057974-1058102
  hypo

SEQ ID NO: 303875 - DNA, 244 bp, Homo sapiens; identical to SEQ ID NO: 254293
  chr5:1058147-1058391
  hypo

SEQ ID NO: 303876 - DNA, 347 bp, Homo sapiens; identical to SEQ ID NO: 209966
  chr5:1058827-1059174
  hypo

SEQ ID NO: 303877 - DNA, 98 bp, Homo sapiens; identical to SEQ ID NO: 209967
  chr5:1059425-1059523
  hypo

SEQ ID NO: 303878 - DNA, 338 bp, Homo sapiens; identical to SEQ ID NO: 209968
  chr5:1059556-1059894
  hypo

SEQ ID NO: 303879 - DNA, 182 bp, Homo sapiens; identical to SEQ ID NO: 209969
  chr5:1060413-1060595
  hypo

SEQ ID NO: 303880 - DNA, 111 bp, Homo sapiens; identical to SEQ ID NO: 209970
  chr5:1060667-1060778
  hypo

SEQ ID NO: 303881 - DNA, 395 bp, Homo sapiens; identical to SEQ ID NO: 209971
  chr5:1060818-1061213
  hypo

SEQ ID NO: 303882 - DNA, 219 bp, Homo sapiens; identical to SEQ ID NO: 199734
  chr5:1061582-1061801
  hypo

SEQ ID NO: 303883 - DNA, 840 bp, Homo sapiens; identical to SEQ ID NO: 209973
  chr5:1062887-1063727
  hypo

SEQ ID NO: 303884 - DNA, 1239 bp, Homo sapiens; identical to SEQ ID NO: 199735
  chr5:1064042-1065281
  hypo

SEQ ID NO: 303885 - DNA, 929 bp, Homo sapiens; identical to SEQ ID NO: 209975
  chr5:1065311-1066240
  hypo

SEQ ID NO: 303886 - DNA, 563 bp, Homo sapiens; identical to SEQ ID NO: 254302
  chr5:1066841-1067404
  hypo

SEQ ID NO: 303887 - DNA, 218 bp, Homo sapiens; identical to SEQ ID NO: 209977
  chr5:1068045-1068263
  hypo

SEQ ID NO: 303888 - DNA, 1478 bp, Homo sapiens; identical to SEQ ID NO: 209978
  chr5:1068563-1070041
  hypo

SEQ ID NO: 303889 - DNA, 820 bp, Homo sapiens
  chr5:1074389-1075209
  hypo
cagaggcttcccaaagatggcctttgcttcagcaggagccaccctctcccaccccaagcccagggctgtgctggcagaggggccggctccccacacccccaccctgcagcagggacacccccggcccccagctgcgccatccgctctgcaccaggcagtgttcacaccccagaccttgcctgagcggctgaaggtgagaggcccctgagactcaaaggtccccactcaaaggccgacctcagaaacagctcttctgtgcgtctgaggaccacggggcatgggcggtgctcacctccagttcttggtgtgggggggaccgtgctccacgcgcagcagggcgtagcgggcggcgttcagggataggccacggatgccatcgccccactccttctcggccctgtgggaaaggaagtcggggtttgtccagccgcgtacctggaggctcctctcccacctgggaaaggggacttctgggggcaggtgagttggggcaaacaggacccccaggaaaagtccctggatgaggagggaggcctccatgcccacccttgccctgaagggagcccgtcctaggagccaccgggtcagagggtgctgtggctgtggagggaacgaggtctacgtccagcatgcgtgaggtgccttcctcacaggacgggggacaggaggcccatgacagggaagtggctggaccccgggcacgaggcgggtgcaggtggagggagggtgggtgctggggcacggggaaggacgcctgtggctgccgagtgagtacagacacaacctggggacacctcgcgagacacgtagcaggaatagt

SEQ ID NO: 303890 - DNA, 4913 bp, Homo sapiens; identical to SEQ ID NO: 254308
  chr5:1075472-1080385
  hypo

SEQ ID NO: 303891 - DNA, 89 bp, Homo sapiens; identical to SEQ ID NO: 209981
  chr5:1080415-1080504
  hypo

SEQ ID NO: 303892 - DNA, 93 bp, Homo sapiens; identical to SEQ ID NO: 209982
  chr5:1081414-1081507
  hypo

SEQ ID NO: 303893 - DNA, 313 bp, Homo sapiens; identical to SEQ ID NO: 254311
  chr5:1081824-1082137
  hypo

SEQ ID NO: 303894 - DNA, 734 bp, Homo sapiens; identical to SEQ ID NO: 209983
  chr5:1083626-1084360
  hypo

SEQ ID NO: 303895 - DNA, 556 bp, Homo sapiens; identical to SEQ ID NO: 254313
  chr5:1084390-1084946
  hypo

SEQ ID NO: 303896 - DNA, 1658 bp, Homo sapiens; identical to SEQ ID NO: 209985
  chr5:1085200-1086858
  hypo

SEQ ID NO: 303897 - DNA, 2216 bp, Homo sapiens; identical to SEQ ID NO: 209986
  chr5:1087080-1089296
  hypo

SEQ ID NO: 303898 - DNA, 241 bp, Homo sapiens; identical to SEQ ID NO: 209987
  chr5:1090422-1090663
  hypo

SEQ ID NO: 303899 - DNA, 166 bp, Homo sapiens; identical to SEQ ID NO: 209988
  chr5:1091065-1091231
  hypo

SEQ ID NO: 303900 - DNA, 281 bp, Homo sapiens; identical to SEQ ID NO: 254318
  chr5:1091614-1091895
  hypo

SEQ ID NO: 303901 - DNA, 37 bp, Homo sapiens; identical to SEQ ID NO: 209989
  chr5:1092774-1092811
  hypo

SEQ ID NO: 303902 - DNA, 155 bp, Homo sapiens; identical to SEQ ID NO: 209990
  chr5:1094049-1094204
  hypo

SEQ ID NO: 303903 - DNA, 637 bp, Homo sapiens; identical to SEQ ID NO: 254321
  chr5:1094548-1095185
  hypo

SEQ ID NO: 303904 - DNA, 417 bp, Homo sapiens; identical to SEQ ID NO: 209991
  chr5:1095613-1096030
  hypo

SEQ ID NO: 303905 - DNA, 1020 bp, Homo sapiens; identical to SEQ ID NO: 222561
  chr5:1111381-1112401
  hypo

SEQ ID NO: 303906 - DNA, 78 bp, Homo sapiens; identical to SEQ ID NO: 254323
  chr5:1114068-1114146
  hypo

SEQ ID NO: 303907 - DNA, 253 bp, Homo sapiens; identical to SEQ ID NO: 254324
  chr5:1114643-1114896
  hypo

SEQ ID NO: 303908 - DNA, 664 bp, Homo sapiens; identical to SEQ ID NO: 209994
  chr5:1115142-1115806
  hypo

SEQ ID NO: 303909 - DNA, 630 bp, Homo sapiens; identical to SEQ ID NO: 254326
  chr5:1116660-1117290
  hypo

SEQ ID NO: 303910 - DNA, 42 bp, Homo sapiens; identical to SEQ ID NO: 254327
  chr5:1119925-1119967
  hypo

SEQ ID NO: 303911 - DNA, 209 bp, Homo sapiens; identical to SEQ ID NO: 209996
  chr5:1120339-1120548
  hypo

SEQ ID NO: 303912 - DNA, 123 bp, Homo sapiens; identical to SEQ ID NO: 209997
  chr5:1120578-1120701
  hypo

SEQ ID NO: 303913 - DNA, 31 bp, Homo sapiens; identical to SEQ ID NO: 209998
  chr5:1121007-1121038
  hypo

SEQ ID NO: 303914 - DNA, 222 bp, Homo sapiens; identical to SEQ ID NO: 254331
  chr5:1122179-1122401
  hypo

SEQ ID NO: 303915 - DNA, 195 bp, Homo sapiens; identical to SEQ ID NO: 209999
  chr5:1122644-1122839
  hypo

SEQ ID NO: 303916 - DNA, 159 bp, Homo sapiens; identical to SEQ ID NO: 254333
  chr5:1124659-1124818
  hypo

SEQ ID NO: 303917 - DNA, 813 bp, Homo sapiens; identical to SEQ ID NO: 254334
  chr5:1128888-1129701
  hypo

SEQ ID NO: 303918 - DNA, 70 bp, Homo sapiens; identical to SEQ ID NO: 254335
  chr5:1140155-1140225
  hypo

SEQ ID NO: 303919 - DNA, 940 bp, Homo sapiens; identical to SEQ ID NO: 254336
  chr5:1143150-1144090
  hypo

SEQ ID NO: 303920 - DNA, 322 bp, Homo sapiens; identical to SEQ ID NO: 254337
  chr5:1154638-1154960
  hypo

SEQ ID NO: 303921 - DNA, 284 bp, Homo sapiens; identical to SEQ ID NO: 254338
  chr5:1161169-1161453
  hypo

SEQ ID NO: 303922 - DNA, 86 bp, Homo sapiens; identical to SEQ ID NO: 210001
  chr5:1177291-1177377
  hypo

SEQ ID NO: 303923 - DNA, 231 bp, Homo sapiens; identical to SEQ ID NO: 254341
  chr5:1201777-1202008
  hypo

SEQ ID NO: 303924 - DNA, 414 bp, Homo sapiens; identical to SEQ ID NO: 254342
  chr5:1207166-1207580
  hypo

SEQ ID NO: 303925 - DNA, 52 bp, Homo sapiens
  chr5:1210303-1210355
  hypo
aggaaggtgtgagccgggaaggcgtgtgcagggcaggcgtgtgccaggaagg

SEQ ID NO: 303926 - DNA, 155 bp, Homo sapiens
  chr5:1210385-1210540
  hypo
ccacggcatcagctgcatgatcccggcctgcactgggtcggcccctcagattctggagtagcccatcccagccacaccctgtgccagccctgggacctcctgctcagagtggggatgggtggccagtggagggtgtgcctcggccccaagcctca

SEQ ID NO: 303927 - DNA, 236 bp, Homo sapiens; identical to SEQ ID NO: 254344
  chr5:1212420-1212656
  hypo

SEQ ID NO: 303928 - DNA, 287 bp, Homo sapiens; identical to SEQ ID NO: 210002
  chr5:1215723-1216010
  hypo

SEQ ID NO: 303929 - DNA, 162 bp, Homo sapiens; identical to SEQ ID NO: 254347
  chr5:1216578-1216740
  hypo

SEQ ID NO: 303930 - DNA, 147 bp, Homo sapiens; identical to SEQ ID NO: 210003
  chr5:1216988-1217135
  hypo

SEQ ID NO: 303931 - DNA, 266 bp, Homo sapiens
  chr5:1218542-1218808
  hypo
acaggagcagaaggcgtccgggtggttgcgccttggtggttcttacccgagagcctgtctgtgagcacagcctgctctaacccggccgttggccacctgccttccgagcacgtccagggtatgcgtttattaacaggtgactcgcgtaacaccttgggtacgtggctcagctgcactggatcagggctgtgcaggctgtgagatctcagaagctccctgtgttgggagagcccgtctgtgggcggaacggggctctgagtgccgct

SEQ ID NO: 303932 - DNA, 462 bp, Homo sapiens
  chr5:1218838-1219300
  hypo
gcatagttcggcttttgaaaatacactttgggcctaaaagacaagatctagctatttcatgacagctcagacctgcccgccccatgctgcgtggcttggcgacgcacgagacctcgggcggggaggagacggagcccacggagggcagaggccctggtgactgtgtgtcatccgtgcaggccgtggagggcacaggcctggccttcatcgtcttcaccgaggccatcaccaagatgccgttgtccccactgtggtctgtgctcttcttcattatgctcttctgcctggggctgtcatctatgtttgggaacatggagggcgtcgttgtgcccctgcaggacctcagagtcatccccccgaagtggcccaaggaggtgctcacaggtacgtgtgcagtcgggaggggtccccatggcaatggtgccacctgtgggatggcagcccccggctgtgtgaacagct

SEQ ID NO: 303933 - DNA, 527 bp, Homo sapiens; identical to SEQ ID NO: 254350
  chr5:1219330-1219857
  hypo

SEQ ID NO: 303934 - DNA, 129 bp, Homo sapiens; identical to SEQ ID NO: 254351
  chr5:1219887-1220016
  hypo

SEQ ID NO: 303935 - DNA, 118 bp, Homo sapiens; identical to SEQ ID NO: 254353
  chr5:1222816-1222934
  hypo

SEQ ID NO: 303936 - DNA, 75 bp, Homo sapiens
  chr5:1223196-1223271
  hypo
tgggcagttgctggcgattctgagaaaacttggccgcatccaccggggccctgcctccagtcggccgctgccgag

SEQ ID NO: 303937 - DNA, 84 bp, Homo sapiens; identical to SEQ ID NO: 254355
  chr5:1223582-1223666
  hypo

SEQ ID NO: 303938 - DNA, 295 bp, Homo sapiens; identical to SEQ ID NO: 210004
  chr5:1232524-1232819
  hypo

SEQ ID NO: 303939 - DNA, 51 bp, Homo sapiens; identical to SEQ ID NO: 210005
  chr5:1233291-1233342
  hypo

SEQ ID NO: 303940 - DNA, 105 bp, Homo sapiens; identical to SEQ ID NO: 210006
  chr5:1253819-1253924
  hypo

SEQ ID NO: 303941 - DNA, 228 bp, Homo sapiens; identical to SEQ ID NO: 254358
  chr5:1261770-1261998
  hypo

SEQ ID NO: 303942 - DNA, 303 bp, Homo sapiens; identical to SEQ ID NO: 210007
  chr5:1264407-1264710
  hypo

SEQ ID NO: 303943 - DNA, 54 bp, Homo sapiens; identical to SEQ ID NO: 254360
  chr5:1266473-1266527
  hypo

SEQ ID NO: 303944 - DNA, 399 bp, Homo sapiens; identical to SEQ ID NO: 254361
  chr5:1269045-1269444
  hypo

SEQ ID NO: 303945 - DNA, 421 bp, Homo sapiens; identical to SEQ ID NO: 254362
  chr5:1270694-1271115
  hypo

SEQ ID NO: 303946 - DNA, 192 bp, Homo sapiens; identical to SEQ ID NO: 210008
  chr5:1272061-1272253
  hypo

SEQ ID NO: 303947 - DNA, 100 bp, Homo sapiens
  chr5:1272283-1272383
  hypo
agggcagtgcccagacctgctcgatgacgacggcatccctcagcgggctggtctcctgcaggtgagccacgaactgtcgcatgtacggctggaggtctgt

SEQ ID NO: 303948 - DNA, 548 bp, Homo sapiens; identical to SEQ ID NO: 254364
  chr5:1277142-1277690
  hypo

SEQ ID NO: 303949 - DNA, 369 bp, Homo sapiens; identical to SEQ ID NO: 282750
  chr5:1279435-1279804
  hypo

SEQ ID NO: 303950 - DNA, 242 bp, Homo sapiens; identical to SEQ ID NO: 254366
  chr5:1282495-1282737
  hypo

SEQ ID NO: 303951 - DNA, 111 bp, Homo sapiens; identical to SEQ ID NO: 282751
  chr5:1294071-1294182
  hypo

SEQ ID NO: 303952 - DNA, 111 bp, Homo sapiens; identical to SEQ ID NO: 210010
  chr5:1318452-1318563
  hypo

SEQ ID NO: 303953 - DNA, 69 bp, Homo sapiens; identical to SEQ ID NO: 254369
  chr5:1319612-1319681
  hypo

SEQ ID NO: 303954 - DNA, 213 bp, Homo sapiens; identical to SEQ ID NO: 210011
  chr5:1326183-1326396
  hypo

SEQ ID NO: 303955 - DNA, 278 bp, Homo sapiens; identical to SEQ ID NO: 254371
  chr5:1330258-1330536
  hypo

SEQ ID NO: 303956 - DNA, 282 bp, Homo sapiens; identical to SEQ ID NO: 254372
  chr5:1331474-1331756
  hypo

SEQ ID NO: 303957 - DNA, 112 bp, Homo sapiens; identical to SEQ ID NO: 254373
  chr5:1335182-1335294
  hypo

SEQ ID NO: 303958 - DNA, 234 bp, Homo sapiens; identical to SEQ ID NO: 254374
  chr5:1342379-1342613
  hypo

SEQ ID NO: 303959 - DNA, 277 bp, Homo sapiens
  chr5:1346306-1346583
  hypo
ccattgcagtggtgtctgactacacccagtgcctctatcgttcccccctcagtctgttctcgcttcttggcaaacctgtccttggaaagccctctgctgactcctgttaccctgatcaaatgcatcctcctcaggaggctcgtgagccctttgcagggtggcccaagaggcatcacgccctgctctccagccactcttggggtcccctacagggccaggcgtcccacaccagcagcgggtgctggtcctgccacagtctgtgcgacacgtgaatgaa

SEQ ID NO: 303960 - DNA, 353 bp, Homo sapiens; identical to SEQ ID NO: 254378
  chr5:1409808-1410161
  hypo

SEQ ID NO: 303961 - DNA, 245 bp, Homo sapiens; identical to SEQ ID NO: 254379
  chr5:1416071-1416316
  hypo

SEQ ID NO: 303962 - DNA, 74 bp, Homo sapiens; identical to SEQ ID NO: 254380
  chr5:1416944-1417018
  hypo

SEQ ID NO: 303963 - DNA, 87 bp, Homo sapiens
  chr5:1431283-1431370
  hypo
gtggatggcacccgccagatccagattccgggaggggtccaggggaaacagggaacccctgggtgtcagtaacgacccttccaggct

SEQ ID NO: 303964 - DNA, 165 bp, Homo sapiens; identical to SEQ ID NO: 254382
  chr5:1432518-1432683
  hypo

SEQ ID NO: 303965 - DNA, 241 bp, Homo sapiens; identical to SEQ ID NO: 254383
  chr5:1439038-1439279
  hypo

SEQ ID NO: 303966 - DNA, 105 bp, Homo sapiens; identical to SEQ ID NO: 254384
  chr5:1462598-1462703
  hypo

SEQ ID NO: 303967 - DNA, 235 bp, Homo sapiens; identical to SEQ ID NO: 254385
  chr5:1462733-1462968
  hypo

SEQ ID NO: 303968 - DNA, 242 bp, Homo sapiens; identical to SEQ ID NO: 254386
  chr5:1463474-1463716
  hypo

SEQ ID NO: 303969 - DNA, 236 bp, Homo sapiens; identical to SEQ ID NO: 254387
  chr5:1467132-1467368
  hypo

SEQ ID NO: 303970 - DNA, 159 bp, Homo sapiens; identical to SEQ ID NO: 210014
  chr5:1468060-1468219
  hypo

SEQ ID NO: 303971 - DNA, 401 bp, Homo sapiens; identical to SEQ ID NO: 254389
  chr5:1476320-1476721
  hypo

SEQ ID NO: 303972 - DNA, 95 bp, Homo sapiens; identical to SEQ ID NO: 210016
  chr5:1490331-1490426
  hypo

SEQ ID NO: 303973 - DNA, 72 bp, Homo sapiens; identical to SEQ ID NO: 254391
  chr5:1497221-1497293
  hypo

SEQ ID NO: 303974 - DNA, 145 bp, Homo sapiens; identical to SEQ ID NO: 254392
  chr5:1510456-1510601
  hypo

SEQ ID NO: 303975 - DNA, 202 bp, Homo sapiens; identical to SEQ ID NO: 210017
  chr5:1517524-1517726
  hypo

SEQ ID NO: 303976 - DNA, 189 bp, Homo sapiens; identical to SEQ ID NO: 210018
  chr5:1546897-1547086
  hypo

SEQ ID NO: 303977 - DNA, 271 bp, Homo sapiens; identical to SEQ ID NO: 254395
  chr5:1548856-1549127
  hypo

SEQ ID NO: 303978 - DNA, 57 bp, Homo sapiens; identical to SEQ ID NO: 254396
  chr5:1549947-1550004
  hypo

SEQ ID NO: 303979 - DNA, 114 bp, Homo sapiens; identical to SEQ ID NO: 254397
  chr5:1550654-1550768
  hypo

SEQ ID NO: 303980 - DNA, 295 bp, Homo sapiens; identical to SEQ ID NO: 254398
  chr5:1551523-1551818
  hypo

SEQ ID NO: 303981 - DNA, 341 bp, Homo sapiens; identical to SEQ ID NO: 254399
  chr5:1553050-1553391
  hypo

SEQ ID NO: 303982 - DNA, 163 bp, Homo sapiens; identical to SEQ ID NO: 254400
  chr5:1554246-1554409
  hypo

SEQ ID NO: 303983 - DNA, 144 bp, Homo sapiens; identical to SEQ ID NO: 210019
  chr5:1641262-1641406
  hypo

SEQ ID NO: 303984 - DNA, 302 bp, Homo sapiens; identical to SEQ ID NO: 254402
  chr5:1702100-1702402
  hypo

SEQ ID NO: 303985 - DNA, 82 bp, Homo sapiens; identical to SEQ ID NO: 210020
  chr5:1704649-1704731
  hypo

SEQ ID NO: 303986 - DNA, 172 bp, Homo sapiens; identical to SEQ ID NO: 254404
  chr5:1707499-1707671
  hypo

SEQ ID NO: 303987 - DNA, 61 bp, Homo sapiens; identical to SEQ ID NO: 210021
  chr5:1729754-1729815
  hypo

SEQ ID NO: 303988 - DNA, 330 bp, Homo sapiens; identical to SEQ ID NO: 210022
  chr5:1729886-1730216
  hypo

SEQ ID NO: 303989 - DNA, 77 bp, Homo sapiens; identical to SEQ ID NO: 210023
  chr5:1730252-1730329
  hypo

SEQ ID NO: 303990 - DNA, 112 bp, Homo sapiens; identical to SEQ ID NO: 254406
  chr5:1745628-1745740
  hypo

SEQ ID NO: 303991 - DNA, 148 bp, Homo sapiens; identical to SEQ ID NO: 210024
  chr5:1747177-1747325
  hypo

SEQ ID NO: 303992 - DNA, 114 bp, Homo sapiens; identical to SEQ ID NO: 254409
  chr5:1752559-1752673
  hypo

SEQ ID NO: 303993 - DNA, 882 bp, Homo sapiens; identical to SEQ ID NO: 254410
  chr5:1769198-1770080
  hypo

SEQ ID NO: 303994 - DNA, 327 bp, Homo sapiens; identical to SEQ ID NO: 210025
  chr5:1786634-1786961
  hypo

SEQ ID NO: 303995 - DNA, 67 bp, Homo sapiens
  chr5:1787311-1787378
  hypo
caaagatttacaggcgcccaggctgctgggcaggctgaggctgggggaagcagagctcctgggcagg

SEQ ID NO: 303996 - DNA, 185 bp, Homo sapiens
  chr5:1787418-1787603
  hypo
tgcctgcattccccacgcagcccatggctttcccaggtgaggccgaggtaaacacaaggaaactcgctgtgcggcagtttcctttgccacgcactcttccatcagagatggcctccagcctacccccagccacctcccatcttccatatccctgtcctggagggctgcctcgccgcccacatctg

SEQ ID NO: 303997 - DNA, 132 bp, Homo sapiens
  chr5:1795101-1795233
  hypo
atcacttccaccatcgctgggggaagaacgaatgcaccgcgtggagtgcttccgccacaaagcagcacatcacctctgctcggagaccctgctggtgaccctcagccagcctcataggccacagcaggtctc

SEQ ID NO: 303998 - DNA, 226 bp, Homo sapiens; identical to SEQ ID NO: 210026
  chr5:1808311-1808537
  hypo

SEQ ID NO: 303999 - DNA, 629 bp, Homo sapiens; identical to SEQ ID NO: 254416
  chr5:1809067-1809696
  hypo

SEQ ID NO: 304000 - DNA, 243 bp, Homo sapiens; identical to SEQ ID NO: 254417
  chr5:1809726-1809969
  hypo

SEQ ID NO: 304001 - DNA, 116 bp, Homo sapiens; identical to SEQ ID NO: 254418
  chr5:1813758-1813874
  hypo

SEQ ID NO: 304002 - DNA, 164 bp, Homo sapiens; identical to SEQ ID NO: 254419
  chr5:1814740-1814904
  hypo

SEQ ID NO: 304003 - DNA, 185 bp, Homo sapiens; identical to SEQ ID NO: 210027
  chr5:1815267-1815452
  hypo

SEQ ID NO: 304004 - DNA, 98 bp, Homo sapiens; identical to SEQ ID NO: 254421
  chr5:1826983-1827081
  hypo

SEQ ID NO: 304005 - DNA, 173 bp, Homo sapiens; identical to SEQ ID NO: 254422
  chr5:1858632-1858805
  hypo

SEQ ID NO: 304006 - DNA, 53 bp, Homo sapiens; identical to SEQ ID NO: 254423
  chr5:1864431-1864484
  hypo

SEQ ID NO: 304007 - DNA, 197 bp, Homo sapiens
  chr5:1865341-1865538
  hypo
ggtcctgagagccgcgccatgtgtaaacatgcgccaggctccagatgatcgcagtgataaccgcgtgaccactccgggatcacgtgtgagtgcaccttctccacaggtcccaggaccacccatcggatcagggatcactccagactcctctcctagaggcgctgccaccctggaagcacatctggcactcagatcat

SEQ ID NO: 304008 - DNA, 42 bp, Homo sapiens; identical to SEQ ID NO: 254425
  chr5:1900863-1900905
  hypo

SEQ ID NO: 304009 - DNA, 369 bp, Homo sapiens; identical to SEQ ID NO: 254426
  chr5:1910374-1910743
  hypo

SEQ ID NO: 304010 - DNA, 282 bp, Homo sapiens; identical to SEQ ID NO: 254427
  chr5:1911955-1912237
  hypo

SEQ ID NO: 304011 - DNA, 174 bp, Homo sapiens; identical to SEQ ID NO: 210029
  chr5:1922813-1922987
  hypo

SEQ ID NO: 304012 - DNA, 69 bp, Homo sapiens; identical to SEQ ID NO: 210030
  chr5:1923074-1923143
  hypo

SEQ ID NO: 304013 - DNA, 154 bp, Homo sapiens; identical to SEQ ID NO: 254430
  chr5:1923520-1923674
  hypo

SEQ ID NO: 304014 - DNA, 95 bp, Homo sapiens; identical to SEQ ID NO: 254431
  chr5:1924125-1924220
  hypo

SEQ ID NO: 304015 - DNA, 125 bp, Homo sapiens
  chr5:1951386-1951511
  hypo
gtctgctgtgcgtgcgccgtctgctgtgcgtgagtcgtctgctgtgcgtgtgccgtctgctgtgcgtgagtcgtctgctgtgcgtgtgtcgtttgctgtgcgtgtgccgtctgctgtgcgtgtgt

SEQ ID NO: 304016 - DNA, 146 bp, Homo sapiens; identical to SEQ ID NO: 210032
  chr5:1951710-1951856
  hypo

SEQ ID NO: 304017 - DNA, 65 bp, Homo sapiens; identical to SEQ ID NO: 254434
  chr5:2006866-2006931
  hypo

SEQ ID NO: 304018 - DNA, 208 bp, Homo sapiens
  chr5:2007527-2007735
  hypo
tctcttgtttagaacgaggaatgacaatgaatgttggagagcctctcccgcagatgggtggcacggcctcagcctgagggaaacgtgttcccatcccgctccgggggcaagtccccgccggctcggaccccagggaggtggaggcaggcaccgtccccttgtccgggtgaccctgtgtggcctccctgctaagcccgcagcctgggct

SEQ ID NO: 304019 - DNA, 49 bp, Homo sapiens
  chr5:2007797-2007846
  hypo
gcaggcggggtcctccagtgacagctgatgtgtcgcggcctgagcctcc

SEQ ID NO: 304020 - DNA, 101 bp, Homo sapiens; identical to SEQ ID NO: 254436
  chr5:2041329-2041430
  hypo

SEQ ID NO: 304021 - DNA, 328 bp, Homo sapiens; identical to SEQ ID NO: 254437
  chr5:2052998-2053326
  hypo

SEQ ID NO: 304022 - DNA, 31 bp, Homo sapiens; identical to SEQ ID NO: 254438
  chr5:2054410-2054441
  hypo

SEQ ID NO: 304023 - DNA, 375 bp, Homo sapiens; identical to SEQ ID NO: 210033
  chr5:2111864-2112239
  hypo

SEQ ID NO: 304024 - DNA, 214 bp, Homo sapiens
  chr5:2112274-2112488
  hypo
gtgggagaacaaaggtgttctggcttgagctgaacaacttaactccttgtctcataaaatttaagctgctattgatcgcctccttgcattgtgtgaggattaaacacgtgcgcgtgcacatccaggcacacgcgcgcacacactcggggcgcccggccccgctcaggcagccgccccacctcctcgcctacccggaatcattcagcaacgtgga

SEQ ID NO: 304025 - DNA, 69 bp, Homo sapiens
  chr5:2136841-2136910
  hypo
tggacagaggtgaccgggtccacgtgcgtgcctggacagaggtgaccaggcccgcgtgtgtgcgtgggt

SEQ ID NO: 304026 - DNA, 165 bp, Homo sapiens; identical to SEQ ID NO: 210035
  chr5:2155744-2155909
  hypo

SEQ ID NO: 304027 - DNA, 154 bp, Homo sapiens; identical to SEQ ID NO: 254442
  chr5:2181762-2181916
  hypo

SEQ ID NO: 304028 - DNA, 119 bp, Homo sapiens; identical to SEQ ID NO: 254443
  chr5:2224967-2225086
  hypo

SEQ ID NO: 304029 - DNA, 75 bp, Homo sapiens; identical to SEQ ID NO: 210036
  chr5:2225364-2225439
  hypo

SEQ ID NO: 304030 - DNA, 154 bp, Homo sapiens; identical to SEQ ID NO: 210037
  chr5:2225469-2225623
  hypo

SEQ ID NO: 304031 - DNA, 297 bp, Homo sapiens
  chr5:2261313-2261610
  hypo
cctccagtgaggactcccaggggaccgagttttccacctgcgttctagatgttctccgtgaaagcatcacgtggtgtcccggtgaggggcctggctgagtgggcatcggcttgagcgcctggagcttgctggagaagagactcatgggcaccaccgggcccaccatgcagacttcagggaaagagagcagccggaatgcgttttaaatcctgcctgagagcgtggatgctacaggactcctggcgtggggaacccggcatctgtgtatgtgcccgtgggcatgtggtcagcgaggca

SEQ ID NO: 304032 - DNA, 45 bp, Homo sapiens; identical to SEQ ID NO: 254446
  chr5:2302693-2302738
  hypo

SEQ ID NO: 304033 - DNA, 325 bp, Homo sapiens; identical to SEQ ID NO: 254447
  chr5:2338565-2338890
  hypo

SEQ ID NO: 304034 - DNA, 77 bp, Homo sapiens
  chr5:2369537-2369614
  hypo
tgcaaacacatgcacgggtaggcatgcacagaacacacatgcaaacacatgcacaggcatgcatgcacagaacacac

SEQ ID NO: 304035 - DNA, 112 bp, Homo sapiens
  chr5:2369682-2369794
  hypo
ggccaatgacagcatcagttgtcgattcgcgtggatccctccactagcgaccattctcacaaccttcacatttaactttgaatttcttccccatgaacggggctgccagatg

SEQ ID NO: 304036 - DNA, 434 bp, Homo sapiens; identical to SEQ ID NO: 254449
  chr5:2371456-2371890
  hypo

SEQ ID NO: 304037 - DNA, 137 bp, Homo sapiens
  chr5:2412071-2412208
  hypo
ggcctcgctctggccggattcggccattctcatggaaaccaggggcccttcccagggcgcctcctcacttcatctccaagctgagaggcaattagtaggagtccgtctcagagtttctggagcctcagccatgatgg

SEQ ID NO: 304038 - DNA, 65 bp, Homo sapiens
  chr5:2412238-2412303
  hypo
gggagcacagtcagaagtgaggagcagccgtggtaacaaatctcatctgtcgccctcatctgctg

SEQ ID NO: 304039 - DNA, 55 bp, Homo sapiens; identical to SEQ ID NO: 254452
  chr5:2495120-2495175
  hypo

SEQ ID NO: 304040 - DNA, 169 bp, Homo sapiens; identical to SEQ ID NO: 254453
  chr5:2524943-2525112
  hypo

SEQ ID NO: 304041 - DNA, 46 bp, Homo sapiens; identical to SEQ ID NO: 210038
  chr5:2541643-2541689
  hypo

SEQ ID NO: 304042 - DNA, 48 bp, Homo sapiens; identical to SEQ ID NO: 254455
  chr5:2542212-2542260
  hypo

SEQ ID NO: 304043 - DNA, 67 bp, Homo sapiens
  chr5:2547095-2547162
  hypo
aaaatttcccaggtcttcctcggtgttagtgcccaccagcctccccggtcaccctgttagcccagac

SEQ ID NO: 304044 - DNA, 139 bp, Homo sapiens
  chr5:2547192-2547331
  hypo
gataaatgcagagatgatgaatcgaaatgcaaatgacggtgaagtgcctcagccatcagcgctgaatatcattaataccttcccactgttaaatcgatcactgtcatccccggatgccggcgtgcggcggggcacatgg

SEQ ID NO: 304045 - DNA, 163 bp, Homo sapiens; identical to SEQ ID NO: 254457
  chr5:2557178-2557341
  hypo

SEQ ID NO: 304046 - DNA, 68 bp, Homo sapiens; identical to SEQ ID NO: 254458
  chr5:2561183-2561251
  hypo

SEQ ID NO: 304047 - DNA, 45 bp, Homo sapiens; identical to SEQ ID NO: 254459
  chr5:2564558-2564603
  hypo

SEQ ID NO: 304048 - DNA, 113 bp, Homo sapiens; identical to SEQ ID NO: 254460
  chr5:2579041-2579154
  hypo

SEQ ID NO: 304049 - DNA, 118 bp, Homo sapiens; identical to SEQ ID NO: 254461
  chr5:2634150-2634268
  hypo

SEQ ID NO: 304050 - DNA, 300 bp, Homo sapiens; identical to SEQ ID NO: 254462
  chr5:2668651-2668951
  hypo

SEQ ID NO: 304051 - DNA, 86 bp, Homo sapiens; identical to SEQ ID NO: 254463
  chr5:2669179-2669265
  hypo

SEQ ID NO: 304052 - DNA, 200 bp, Homo sapiens; identical to SEQ ID NO: 254464
  chr5:2708350-2708550
  hypo

SEQ ID NO: 304053 - DNA, 126 bp, Homo sapiens; identical to SEQ ID NO: 254465
  chr5:2708903-2709029
  hypo

SEQ ID NO: 304054 - DNA, 109 bp, Homo sapiens; identical to SEQ ID NO: 254466
  chr5:2808978-2809087
  hypo

SEQ ID NO: 304055 - DNA, 119 bp, Homo sapiens; identical to SEQ ID NO: 254467
  chr5:2823299-2823418
  hypo

SEQ ID NO: 304056 - DNA, 186 bp, Homo sapiens; identical to SEQ ID NO: 254468
  chr5:2831543-2831729
  hypo

SEQ ID NO: 304057 - DNA, 166 bp, Homo sapiens
  chr5:2889747-2889913
  hypo
ttccaggaaaaagtgaggagacctcagctgaaacaagatttgaaagcctctgttccttttgccatcctgcggactccgagacgcctcttactccggtgacgccgtatccaggagtactgagcaggctgctgaggttccgtcaggtaagtcacgattctttattgaa

SEQ ID NO: 304058 - DNA, 52 bp, Homo sapiens
  chr5:2890917-2890969
  hypo
tggtgttaaccctacctttgaaaatacttacgtttgtgatctgtaattgatt

SEQ ID NO: 304059 - DNA, 389 bp, Homo sapiens; identical to SEQ ID NO: 254471
  chr5:2896879-2897268
  hypo

SEQ ID NO: 304060 - DNA, 52 bp, Homo sapiens; identical to SEQ ID NO: 254472
  chr5:2903649-2903701
  hypo

SEQ ID NO: 304061 - DNA, 115 bp, Homo sapiens; identical to SEQ ID NO: 254473
  chr5:2904033-2904148
  hypo

SEQ ID NO: 304062 - DNA, 32 bp, Homo sapiens; identical to SEQ ID NO: 210039
  chr5:2990179-2990211
  hypo

SEQ ID NO: 304063 - DNA, 230 bp, Homo sapiens
  chr5:3027111-3027341
  hypo
ttctagcccagaatcgaagggaagcaggtgatccactggactcctagggactgcacgctccagcccgcgccagggagcccctcaccagcttgtgtcggtctctgccatgcctatggctggttctccttcatcattgtcaccccagccttcatcctgccccggattcagagccccttgttggtcttgcatggcggggaggagcccccaagacagcgtgtgttgaaggtcac

SEQ ID NO: 304064 - DNA, 38 bp, Homo sapiens; identical to SEQ ID NO: 254476
  chr5:3028123-3028161
  hypo

SEQ ID NO: 304065 - DNA, 41 bp, Homo sapiens
  chr5:3028191-3028232
  hypo
catctggagccgcctcgcctccctgcgcactcgtggccatg

SEQ ID NO: 304066 - DNA, 45 bp, Homo sapiens; identical to SEQ ID NO: 254478
  chr5:3029916-3029961
  hypo

SEQ ID NO: 304067 - DNA, 52 bp, Homo sapiens
  chr5:3032074-3032126
  hypo
gttgatagaggggaggctctgcttgtgtggcgatgggggtgtgtgggagctc

SEQ ID NO: 304068 - DNA, 82 bp, Homo sapiens; identical to SEQ ID NO: 254481
  chr5:3042022-3042104
  hypo

SEQ ID NO: 304069 - DNA, 136 bp, Homo sapiens; identical to SEQ ID NO: 254482
  chr5:3051522-3051658
  hypo

SEQ ID NO: 304070 - DNA, 101 bp, Homo sapiens
  chr5:3078556-3078657
  hypo
ccatccacaggtgactccaccgcgtgccaggagggatccacaggggactccgccgcatgtccggagggatccacaggggactccgccgcgtgtccggaggg

SEQ ID NO: 304071 - DNA, 67 bp, Homo sapiens
  chr5:3078698-3078765
  hypo
gggactccgccgcgtgtctggagggatccacaggggactccgccgcgtgtctggagggatccacagg

SEQ ID NO: 304072 - DNA, 32 bp, Homo sapiens; identical to SEQ ID NO: 254484
  chr5:3098404-3098436
  hypo

SEQ ID NO: 304073 - DNA, 92 bp, Homo sapiens; identical to SEQ ID NO: 254485
  chr5:3114549-3114641
  hypo

SEQ ID NO: 304074 - DNA, 190 bp, Homo sapiens; identical to SEQ ID NO: 254486
  chr5:3143537-3143727
  hypo

SEQ ID NO: 304075 - DNA, 42 bp, Homo sapiens; identical to SEQ ID NO: 254487
  chr5:3152257-3152299
  hypo

SEQ ID NO: 304076 - DNA, 359 bp, Homo sapiens; identical to SEQ ID NO: 254488
  chr5:3155670-3156029
  hypo

SEQ ID NO: 304077 - DNA, 263 bp, Homo sapiens; identical to SEQ ID NO: 254489
  chr5:3188087-3188350
  hypo

SEQ ID NO: 304078 - DNA, 55 bp, Homo sapiens; identical to SEQ ID NO: 254490
  chr5:3203778-3203833
  hypo

SEQ ID NO: 304079 - DNA, 114 bp, Homo sapiens; identical to SEQ ID NO: 254491
  chr5:3212680-3212794
  hypo

SEQ ID NO: 304080 - DNA, 112 bp, Homo sapiens; identical to SEQ ID NO: 254492
  chr5:3213161-3213273
  hypo

SEQ ID NO: 304081 - DNA, 47 bp, Homo sapiens; identical to SEQ ID NO: 210040
  chr5:3221000-3221047
  hypo

SEQ ID NO: 304082 - DNA, 156 bp, Homo sapiens; identical to SEQ ID NO: 210041
  chr5:3221181-3221337
  hypo

SEQ ID NO: 304083 - DNA, 358 bp, Homo sapiens; identical to SEQ ID NO: 210042
  chr5:3282932-3283290
  hypo

SEQ ID NO: 304084 - DNA, 65 bp, Homo sapiens
  chr5:3324688-3324753
  hypo
tcctcctcctgacccggcgcggtggggctgggtcccaggctggctccccgccctccctcctactg

SEQ ID NO: 304085 - DNA, 297 bp, Homo sapiens
  chr5:3325333-3325630
  hypo
gccctagctgttcggcgtgtgtgtgtgtgtgtgtgagcgcgcgcgtgcgtggggttaagtgtttccataattgcatctctcttgaaaatcaaaacagaacaaaccgtgctttatgtacgagtaagagtcatgattcaacaatggggcctgcctgaaggagctgcctatttagtcacataccacagcaacctactggcttgtcattttatgatctggcacggagccgacggcgcacacggtgtcttgggcagccttgggagcccgtgacagtgctgtgaccagcgggggccagtcctg

SEQ ID NO: 304086 - DNA, 171 bp, Homo sapiens; identical to SEQ ID NO: 210044
  chr5:3326308-3326479
  hypo

SEQ ID NO: 304087 - DNA, 230 bp, Homo sapiens; identical to SEQ ID NO: 254497
  chr5:3339351-3339581
  hypo

SEQ ID NO: 304088 - DNA, 147 bp, Homo sapiens; identical to SEQ ID NO: 254498
  chr5:3346708-3346855
  hypo

SEQ ID NO: 304089 - DNA, 96 bp, Homo sapiens
  chr5:3454429-3454525
  hypo
cacgctcccgctagcacggtgggcgtcacccactaacacacacggcagccctggactcttctttcctggatgtccgagggaattccccagagggat

SEQ ID NO: 304090 - DNA, 45 bp, Homo sapiens; identical to SEQ ID NO: 254500
  chr5:3489720-3489765
  hypo

SEQ ID NO: 304091 - DNA, 149 bp, Homo sapiens
  chr5:3535478-3535627
  hypo
tctcagtgggaccttcctcccggaagagcgttcgcgtgtaaaatgtgttgtgtaccattcttcaccacgatactaaggcagagaatgcagtgagtggaagagagcgtgcaataagcataggcatgcacgtgtctcccctaatgcacatg

SEQ ID NO: 304092 - DNA, 612 bp, Homo sapiens; identical to SEQ ID NO: 210045
  chr5:3535785-3536397
  hypo

SEQ ID NO: 304093 - DNA, 208 bp, Homo sapiens; identical to SEQ ID NO: 282771
  chr5:3590903-3591111
  hypo

SEQ ID NO: 304094 - DNA, 94 bp, Homo sapiens; identical to SEQ ID NO: 199747
  chr5:3591458-3591552
  hypo

SEQ ID NO: 304095 - DNA, 257 bp, Homo sapiens; identical to SEQ ID NO: 254502
  chr5:3627873-3628130
  hypo

SEQ ID NO: 304096 - DNA, 149 bp, Homo sapiens; identical to SEQ ID NO: 254503
  chr5:3630989-3631138
  hypo

SEQ ID NO: 304097 - DNA, 218 bp, Homo sapiens; identical to SEQ ID NO: 254504
  chr5:3659551-3659769
  hypo

SEQ ID NO: 304098 - DNA, 113 bp, Homo sapiens
  chr5:3740590-3740703
  hypo
cggtgtgaggtgaccgcgtgctgtgctctgcagggccaggcctagaccccgacgtcccagtcccagtctctgtctgcccaagtgggcgggagaatctgggggagggagggaga

SEQ ID NO: 304099 - DNA, 327 bp, Homo sapiens
  chr5:3761240-3761567
  hypo
gaaaagctgtgtggaaaaacccgactgcgactttcaagcttgtgcttcacaacccaggagccgtgcattatgtccatgtgttcagatgcaagatgctcagaccccaggaaaaagggaattcggtgtaaagaaaaaaggactcttagcatggtccagtattaggacagtaacaccctgtgtgtgtgcacgtgccctccctccatctccctggcctttgcgtctctgtgtgggtgcacatgccctccctcctccctccatctccctggcctttgcgtctctgagtgggtgcacatgcgctccctccatctccgtggcctttgcgcctct

SEQ ID NO: 304100 - DNA, 322 bp, Homo sapiens; identical to SEQ ID NO: 210050
  chr5:3761623-3761945
  hypo

SEQ ID NO: 304101 - DNA, 156 bp, Homo sapiens; identical to SEQ ID NO: 254507
  chr5:3781374-3781530
  hypo

SEQ ID NO: 304102 - DNA, 67 bp, Homo sapiens; identical to SEQ ID NO: 254508
  chr5:3805791-3805858
  hypo

SEQ ID NO: 304103 - DNA, 160 bp, Homo sapiens; identical to SEQ ID NO: 254509
  chr5:3865173-3865333
  hypo

SEQ ID NO: 304104 - DNA, 221 bp, Homo sapiens; identical to SEQ ID NO: 254510
  chr5:3932150-3932371
  hypo

SEQ ID NO: 304105 - DNA, 49 bp, Homo sapiens
  chr5:4144250-4144299
  hypo
aaaaaaaaagaaagaaaaggtgactgtagtgaagaaatacatttccaag

SEQ ID NO: 304106 - DNA, 520 bp, Homo sapiens
  chr5:4144516-4145036
  hypo
acacagctaagtgtgttctgtgtggcatgctctagtgtgcgcatggaatgctgactgcacagcttactacgtgtgttctgtgttccgtgctctcacatgcatgcggaattctgacggcacagcttactaagtgtgttcggtatgccacacacttgtgtgcatgcggaatgctgactgcatagcttactatacgtgttctgtgtgccccactctcctgtgcatgtggaatgctgactgcatagcttactatgtatgctctgtgggctgtgctctcatgtgcacgtggaatgctgaccgcacagcttactaagggcgtcctacgtgcggtgctctcatgcacatgcacaatgccgatggcacagcttactaagtgtgtactgtgtgctctgctctcgtgtgcacgtggaatgctgactgcacagcttactacatgtgttctttgtgccacgctctcatgtgcgtgcacaatgatgactgcacagcttactacgtgtgttctgtgtgccgtgctcttgtgtgc

SEQ ID NO: 304107 - DNA, 160 bp, Homo sapiens
  chr5:4145066-4145226
  hypo
gtatgttctgtgtgccacactcttgcctgcacgtggaatgctgactgcacagcttactacctgtgttctgtgtgtgacgctcttgtgtgcatgtggaatgctgatggcacaacttactctgtgtgttatgtttgccacactctcgcgtgcacatggaatg

SEQ ID NO: 304108 - DNA, 35 bp, Homo sapiens; identical to SEQ ID NO: 254512
  chr5:4195642-4195677
  hypo

SEQ ID NO: 304109 - DNA, 116 bp, Homo sapiens; identical to SEQ ID NO: 210052
  chr5:4580998-4581114
  hypo

SEQ ID NO: 304110 - DNA, 267 bp, Homo sapiens; identical to SEQ ID NO: 210053
  chr5:4581329-4581596
  hypo

SEQ ID NO: 304111 - DNA, 237 bp, Homo sapiens; identical to SEQ ID NO: 254514
  chr5:4886500-4886737
  hypo

SEQ ID NO: 304112 - DNA, 390 bp, Homo sapiens; identical to SEQ ID NO: 254515
  chr5:5303189-5303579
  hypo

SEQ ID NO: 304113 - DNA, 71 bp, Homo sapiens; identical to SEQ ID NO: 254516
  chr5:5652238-5652309
  hypo

SEQ ID NO: 304114 - DNA, 60 bp, Homo sapiens
  chr5:6228485-6228545
  hypo
actgctgttccaccagtgaacgtgtgtccagccaagatcactgtccccgccaccctctgg

SEQ ID NO: 304115 - DNA, 42 bp, Homo sapiens
  chr5:6228575-6228617
  hypo
cactggaatagagcgatggccgggaacggctcctgtgcctgc

SEQ ID NO: 304116 - DNA, 31 bp, Homo sapiens; identical to SEQ ID NO: 254519
  chr5:6322027-6322058
  hypo

SEQ ID NO: 304117 - DNA, 507 bp, Homo sapiens; identical to SEQ ID NO: 254520
  chr5:6349464-6349971
  hypo

SEQ ID NO: 304118 - DNA, 115 bp, Homo sapiens; identical to SEQ ID NO: 254521
  chr5:6420112-6420227
  hypo

SEQ ID NO: 304119 - DNA, 51 bp, Homo sapiens; identical to SEQ ID NO: 254522
  chr5:6527276-6527327
  hypo

SEQ ID NO: 304120 - DNA, 87 bp, Homo sapiens; identical to SEQ ID NO: 210055
  chr5:6758954-6759041
  hypo

SEQ ID NO: 304121 - DNA, 76 bp, Homo sapiens; identical to SEQ ID NO: 254524
  chr5:6760002-6760078
  hypo

SEQ ID NO: 304122 - DNA, 72 bp, Homo sapiens; identical to SEQ ID NO: 254525
  chr5:6762500-6762572
  hypo

SEQ ID NO: 304123 - DNA, 215 bp, Homo sapiens; identical to SEQ ID NO: 210056
  chr5:6846210-6846425
  hypo

SEQ ID NO: 304124 - DNA, 34 bp, Homo sapiens; identical to SEQ ID NO: 254527
  chr5:6846845-6846879
  hypo

SEQ ID NO: 304125 - DNA, 47 bp, Homo sapiens; identical to SEQ ID NO: 254528
  chr5:6857839-6857886
  hypo

SEQ ID NO: 304126 - DNA, 42 bp, Homo sapiens; identical to SEQ ID NO: 254529
  chr5:6906771-6906813
  hypo

SEQ ID NO: 304127 - DNA, 36 bp, Homo sapiens; identical to SEQ ID NO: 210057
  chr5:7704693-7704729
  hypo

SEQ ID NO: 304128 - DNA, 42 bp, Homo sapiens; identical to SEQ ID NO: 254531
  chr5:7802432-7802474
  hypo

SEQ ID NO: 304129 - DNA, 147 bp, Homo sapiens; identical to SEQ ID NO: 210058
  chr5:7825240-7825387
  hypo

SEQ ID NO: 304130 - DNA, 139 bp, Homo sapiens; identical to SEQ ID NO: 254533
  chr5:7867953-7868092
  hypo

SEQ ID NO: 304131 - DNA, 78 bp, Homo sapiens; identical to SEQ ID NO: 254534
  chr5:8424507-8424585
  hypo

SEQ ID NO: 304132 - DNA, 92 bp, Homo sapiens; identical to SEQ ID NO: 210059
  chr5:8649803-8649895
  hypo

SEQ ID NO: 304133 - DNA, 120 bp, Homo sapiens; identical to SEQ ID NO: 254536
  chr5:8841451-8841571
  hypo

SEQ ID NO: 304134 - DNA, 160 bp, Homo sapiens; identical to SEQ ID NO: 254537
  chr5:8841691-8841851
  hypo

SEQ ID NO: 304135 - DNA, 195 bp, Homo sapiens; identical to SEQ ID NO: 254538
  chr5:9040384-9040579
  hypo

SEQ ID NO: 304136 - DNA, 42 bp, Homo sapiens; identical to SEQ ID NO: 254539
  chr5:9044652-9044694
  hypo

SEQ ID NO: 304137 - DNA, 199 bp, Homo sapiens; identical to SEQ ID NO: 254540
  chr5:9051992-9052191
  hypo

SEQ ID NO: 304138 - DNA, 166 bp, Homo sapiens; identical to SEQ ID NO: 254541
  chr5:9054171-9054337
  hypo

SEQ ID NO: 304139 - DNA, 155 bp, Homo sapiens; identical to SEQ ID NO: 210060
  chr5:9066591-9066746
  hypo

SEQ ID NO: 304140 - DNA, 255 bp, Homo sapiens; identical to SEQ ID NO: 210061
  chr5:9119015-9119270
  hypo

SEQ ID NO: 304141 - DNA, 402 bp, Homo sapiens; identical to SEQ ID NO: 210062
  chr5:9122692-9123094
  hypo

SEQ ID NO: 304142 - DNA, 155 bp, Homo sapiens; identical to SEQ ID NO: 254545
  chr5:9136512-9136667
  hypo

SEQ ID NO: 304143 - DNA, 70 bp, Homo sapiens; identical to SEQ ID NO: 254546
  chr5:9183702-9183772
  hypo

SEQ ID NO: 304144 - DNA, 106 bp, Homo sapiens; identical to SEQ ID NO: 254547
  chr5:9220793-9220899
  hypo

SEQ ID NO: 304145 - DNA, 41 bp, Homo sapiens; identical to SEQ ID NO: 254548
  chr5:9330247-9330288
  hypo

SEQ ID NO: 304146 - DNA, 42 bp, Homo sapiens; identical to SEQ ID NO: 254549
  chr5:9445440-9445482
  hypo

SEQ ID NO: 304147 - DNA, 179 bp, Homo sapiens; identical to SEQ ID NO: 210063
  chr5:9497476-9497655
  hypo

SEQ ID NO: 304148 - DNA, 42 bp, Homo sapiens; identical to SEQ ID NO: 254551
  chr5:9498629-9498671
  hypo

SEQ ID NO: 304149 - DNA, 42 bp, Homo sapiens; identical to SEQ ID NO: 254552
  chr5:9629931-9629973
  hypo

SEQ ID NO: 304150 - DNA, 144 bp, Homo sapiens; identical to SEQ ID NO: 254553
  chr5:9725136-9725280
  hypo

SEQ ID NO: 304151 - DNA, 216 bp, Homo sapiens; identical to SEQ ID NO: 254554
  chr5:10080575-10080791
  hypo

SEQ ID NO: 304152 - DNA, 217 bp, Homo sapiens; identical to SEQ ID NO: 254556
  chr5:10256073-10256290
  hypo

SEQ ID NO: 304153 - DNA, 78 bp, Homo sapiens; identical to SEQ ID NO: 254557
  chr5:10268930-10269008
  hypo

SEQ ID NO: 304154 - DNA, 190 bp, Homo sapiens; identical to SEQ ID NO: 254558
  chr5:10278515-10278705
  hypo

SEQ ID NO: 304155 - DNA, 40 bp, Homo sapiens; identical to SEQ ID NO: 254559
  chr5:10283590-10283630
  hypo

SEQ ID NO: 304156 - DNA, 56 bp, Homo sapiens; identical to SEQ ID NO: 254560
  chr5:10322104-10322160
  hypo

SEQ ID NO: 304157 - DNA, 157 bp, Homo sapiens; identical to SEQ ID NO: 254561
  chr5:10352280-10352437
  hypo

SEQ ID NO: 304158 - DNA, 902 bp, Homo sapiens; identical to SEQ ID NO: 282794
  chr5:10441403-10442305
  hypo

SEQ ID NO: 304159 - DNA, 498 bp, Homo sapiens; identical to SEQ ID NO: 254562
  chr5:10453378-10453876
  hypo

SEQ ID NO: 304160 - DNA, 150 bp, Homo sapiens; identical to SEQ ID NO: 254563
  chr5:10479715-10479865
  hypo

SEQ ID NO: 304161 - DNA, 106 bp, Homo sapiens; identical to SEQ ID NO: 210065
  chr5:10486101-10486207
  hypo

SEQ ID NO: 304162 - DNA, 40 bp, Homo sapiens; identical to SEQ ID NO: 210066
  chr5:10548513-10548553
  hypo

SEQ ID NO: 304163 - DNA, 183 bp, Homo sapiens; identical to SEQ ID NO: 282797
  chr5:10564288-10564471
  hypo

SEQ ID NO: 304164 - DNA, 36 bp, Homo sapiens; identical to SEQ ID NO: 210068
  chr5:10618606-10618642
  hypo

SEQ ID NO: 304165 - DNA, 107 bp, Homo sapiens; identical to SEQ ID NO: 210069
  chr5:10702260-10702367
  hypo

SEQ ID NO: 304166 - DNA, 100 bp, Homo sapiens; identical to SEQ ID NO: 210070
  chr5:10936742-10936842
  hypo

SEQ ID NO: 304167 - DNA, 60 bp, Homo sapiens; identical to SEQ ID NO: 254569
  chr5:10972031-10972091
  hypo

SEQ ID NO: 304168 - DNA, 39 bp, Homo sapiens; identical to SEQ ID NO: 254570
  chr5:11074314-11074353
  hypo

SEQ ID NO: 304169 - DNA, 75 bp, Homo sapiens; identical to SEQ ID NO: 254571
  chr5:11130332-11130407
  hypo

SEQ ID NO: 304170 - DNA, 152 bp, Homo sapiens; identical to SEQ ID NO: 254572
  chr5:11130729-11130881
  hypo

SEQ ID NO: 304171 - DNA, 400 bp, Homo sapiens; identical to SEQ ID NO: 210071
  chr5:12794952-12795352
  hypo

SEQ ID NO: 304172 - DNA, 36 bp, Homo sapiens; identical to SEQ ID NO: 254574
  chr5:13037956-13037992
  hypo

SEQ ID NO: 304173 - DNA, 32 bp, Homo sapiens; identical to SEQ ID NO: 254575
  chr5:13416579-13416611
  hypo

SEQ ID NO: 304174 - DNA, 80 bp, Homo sapiens; identical to SEQ ID NO: 254576
  chr5:13884614-13884694
  hypo

SEQ ID NO: 304175 - DNA, 240 bp, Homo sapiens; identical to SEQ ID NO: 254577
  chr5:13946864-13947104
  hypo

SEQ ID NO: 304176 - DNA, 99 bp, Homo sapiens; identical to SEQ ID NO: 210072
  chr5:14122606-14122705
  hypo

SEQ ID NO: 304177 - DNA, 1289 bp, Homo sapiens; identical to SEQ ID NO: 199764
  chr5:14142816-14144105
  hypo

SEQ ID NO: 304178 - DNA, 124 bp, Homo sapiens; identical to SEQ ID NO: 3833
  chr5:14144285-14144409
  hypo

SEQ ID NO: 304179 - DNA, 40 bp, Homo sapiens; identical to SEQ ID NO: 254579
  chr5:14173630-14173670
  hypo

SEQ ID NO: 304180 - DNA, 93 bp, Homo sapiens; identical to SEQ ID NO: 254580
  chr5:14253721-14253814
  hypo

SEQ ID NO: 304181 - DNA, 134 bp, Homo sapiens; identical to SEQ ID NO: 254581
  chr5:14269364-14269498
  hypo

SEQ ID NO: 304182 - DNA, 181 bp, Homo sapiens; identical to SEQ ID NO: 210075
  chr5:14273915-14274096
  hypo

SEQ ID NO: 304183 - DNA, 86 bp, Homo sapiens; identical to SEQ ID NO: 254583
  chr5:14286806-14286892
  hypo

SEQ ID NO: 304184 - DNA, 190 bp, Homo sapiens; identical to SEQ ID NO: 210076
  chr5:14303326-14303516
  hypo

SEQ ID NO: 304185 - DNA, 41 bp, Homo sapiens; identical to SEQ ID NO: 254585
  chr5:14315628-14315669
  hypo

SEQ ID NO: 304186 - DNA, 191 bp, Homo sapiens; identical to SEQ ID NO: 210077
  chr5:14319946-14320137
  hypo

SEQ ID NO: 304187 - DNA, 105 bp, Homo sapiens; identical to SEQ ID NO: 210078
  chr5:14325452-14325557
  hypo

SEQ ID NO: 304188 - DNA, 481 bp, Homo sapiens; identical to SEQ ID NO: 210079
  chr5:14328242-14328723
  hypo

SEQ ID NO: 304189 - DNA, 315 bp, Homo sapiens; identical to SEQ ID NO: 210080
  chr5:14332850-14333165
  hypo

SEQ ID NO: 304190 - DNA, 159 bp, Homo sapiens; identical to SEQ ID NO: 210081
  chr5:14338464-14338623
  hypo

SEQ ID NO: 304191 - DNA, 314 bp, Homo sapiens; identical to SEQ ID NO: 210082
  chr5:14348848-14349162
  hypo

SEQ ID NO: 304192 - DNA, 142 bp, Homo sapiens; identical to SEQ ID NO: 254592
  chr5:14369627-14369769
  hypo

SEQ ID NO: 304193 - DNA, 175 bp, Homo sapiens; identical to SEQ ID NO: 210083
  chr5:14378048-14378223
  hypo

SEQ ID NO: 304194 - DNA, 102 bp, Homo sapiens; identical to SEQ ID NO: 210084
  chr5:14381249-14381351
  hypo

SEQ ID NO: 304195 - DNA, 263 bp, Homo sapiens; identical to SEQ ID NO: 254595
  chr5:14390712-14390975
  hypo

SEQ ID NO: 304196 - DNA, 188 bp, Homo sapiens; identical to SEQ ID NO: 254596
  chr5:14405986-14406174
  hypo

SEQ ID NO: 304197 - DNA, 435 bp, Homo sapiens; identical to SEQ ID NO: 210086
  chr5:14409998-14410433
  hypo

SEQ ID NO: 304198 - DNA, 100 bp, Homo sapiens; identical to SEQ ID NO: 254598
  chr5:14414264-14414364
  hypo

SEQ ID NO: 304199 - DNA, 145 bp, Homo sapiens; identical to SEQ ID NO: 254599
  chr5:14420065-14420210
  hypo

SEQ ID NO: 304200 - DNA, 138 bp, Homo sapiens; identical to SEQ ID NO: 254600
  chr5:14426765-14426903
  hypo

SEQ ID NO: 304201 - DNA, 327 bp, Homo sapiens; identical to SEQ ID NO: 210087
  chr5:14427574-14427901
  hypo

SEQ ID NO: 304202 - DNA, 39 bp, Homo sapiens; identical to SEQ ID NO: 254602
  chr5:14431087-14431126
  hypo

SEQ ID NO: 304203 - DNA, 105 bp, Homo sapiens; identical to SEQ ID NO: 210088
  chr5:14435287-14435392
  hypo

SEQ ID NO: 304204 - DNA, 136 bp, Homo sapiens; identical to SEQ ID NO: 254604
  chr5:14441380-14441516
  hypo

SEQ ID NO: 304205 - DNA, 160 bp, Homo sapiens; identical to SEQ ID NO: 210089
  chr5:14454341-14454501
  hypo

SEQ ID NO: 304206 - DNA, 317 bp, Homo sapiens; identical to SEQ ID NO: 254606
  chr5:14459375-14459692
  hypo

SEQ ID NO: 304207 - DNA, 155 bp, Homo sapiens; identical to SEQ ID NO: 210090
  chr5:14460339-14460494
  hypo

SEQ ID NO: 304208 - DNA, 268 bp, Homo sapiens; identical to SEQ ID NO: 210091
  chr5:14461124-14461392
  hypo

SEQ ID NO: 304209 - DNA, 187 bp, Homo sapiens; identical to SEQ ID NO: 210092
  chr5:14485223-14485410
  hypo

SEQ ID NO: 304210 - DNA, 122 bp, Homo sapiens; identical to SEQ ID NO: 254610
  chr5:14487503-14487625
  hypo

SEQ ID NO: 304211 - DNA, 709 bp, Homo sapiens; identical to SEQ ID NO: 210093
  chr5:14487989-14488698
  hypo

SEQ ID NO: 304212 - DNA, 183 bp, Homo sapiens; identical to SEQ ID NO: 210094
  chr5:14489508-14489691
  hypo

SEQ ID NO: 304213 - DNA, 168 bp, Homo sapiens; identical to SEQ ID NO: 210095
  chr5:14492758-14492926
  hypo

SEQ ID NO: 304214 - DNA, 175 bp, Homo sapiens; identical to SEQ ID NO: 210096
  chr5:14493321-14493496
  hypo

SEQ ID NO: 304215 - DNA, 537 bp, Homo sapiens; identical to SEQ ID NO: 254615
  chr5:14498253-14498790
  hypo

SEQ ID NO: 304216 - DNA, 46 bp, Homo sapiens
  chr5:14501759-14501805
  hypo
ttggacatggtttaaggaaacgcattcccagtgacaacctggggag

SEQ ID NO: 304217 - DNA, 87 bp, Homo sapiens
  chr5:14501861-14501948
  hypo
tgcaggtcaggtgagcgggccgaaagaggggagaggaaactaagtggggagaggaggctggatgagtggggtcgggagggccaggct

SEQ ID NO: 304218 - DNA, 141 bp, Homo sapiens; identical to SEQ ID NO: 254617
  chr5:14502171-14502312
  hypo

SEQ ID NO: 304219 - DNA, 98 bp, Homo sapiens; identical to SEQ ID NO: 210098
  chr5:14504056-14504154
  hypo

SEQ ID NO: 304220 - DNA, 369 bp, Homo sapiens; identical to SEQ ID NO: 254619
  chr5:14507312-14507681
  hypo

SEQ ID NO: 304221 - DNA, 142 bp, Homo sapiens; identical to SEQ ID NO: 210100
  chr5:14508326-14508468
  hypo

SEQ ID NO: 304222 - DNA, 76 bp, Homo sapiens; identical to SEQ ID NO: 254621
  chr5:14523713-14523789
  hypo

SEQ ID NO: 304223 - DNA, 137 bp, Homo sapiens; identical to SEQ ID NO: 254622
  chr5:14681597-14681734
  hypo

SEQ ID NO: 304224 - DNA, 321 bp, Homo sapiens; identical to SEQ ID NO: 254623
  chr5:14725552-14725873
  hypo

SEQ ID NO: 304225 - DNA, 277 bp, Homo sapiens; identical to SEQ ID NO: 254624
  chr5:14726310-14726587
  hypo

SEQ ID NO: 304226 - DNA, 222 bp, Homo sapiens; identical to SEQ ID NO: 254625
  chr5:14734656-14734878
  hypo

SEQ ID NO: 304227 - DNA, 157 bp, Homo sapiens
  chr5:14756485-14756642
  hypo
gattagggcctactgttttcttgccttcaagtttgggcaggatctgacctgacactttgggagatgaggaggaagatgctacgaggggagcagacgaaaagcccgaggaacagcaggtctggagaaggtttcaagttcatgacgggctctgtttaag

SEQ ID NO: 304228 - DNA, 161 bp, Homo sapiens; identical to SEQ ID NO: 254629
  chr5:14780229-14780390
  hypo

SEQ ID NO: 304229 - DNA, 132 bp, Homo sapiens; identical to SEQ ID NO: 254630
  chr5:14780932-14781064
  hypo

SEQ ID NO: 304230 - DNA, 85 bp, Homo sapiens; identical to SEQ ID NO: 254631
  chr5:14789325-14789410
  hypo

SEQ ID NO: 304231 - DNA, 34 bp, Homo sapiens; identical to SEQ ID NO: 254632
  chr5:14839001-14839035
  hypo

SEQ ID NO: 304232 - DNA, 212 bp, Homo sapiens; identical to SEQ ID NO: 254633
  chr5:14846242-14846454
  hypo

SEQ ID NO: 304233 - DNA, 110 bp, Homo sapiens; identical to SEQ ID NO: 210101
  chr5:14849840-14849950
  hypo

SEQ ID NO: 304234 - DNA, 39 bp, Homo sapiens; identical to SEQ ID NO: 254635
  chr5:14934638-14934677
  hypo

SEQ ID NO: 304235 - DNA, 33 bp, Homo sapiens; identical to SEQ ID NO: 254636
  chr5:14959676-14959709
  hypo

SEQ ID NO: 304236 - DNA, 44 bp, Homo sapiens; identical to SEQ ID NO: 254637
  chr5:15343332-15343376
  hypo

SEQ ID NO: 304237 - DNA, 93 bp, Homo sapiens; identical to SEQ ID NO: 199768
  chr5:15499745-15499838
  hypo

SEQ ID NO: 304238 - DNA, 170 bp, Homo sapiens; identical to SEQ ID NO: 282812
  chr5:15499947-15500117
  hypo

SEQ ID NO: 304239 - DNA, 872 bp, Homo sapiens; identical to SEQ ID NO: 254638
  chr5:15936621-15937493
  hypo

SEQ ID NO: 304240 - DNA, 35 bp, Homo sapiens; identical to SEQ ID NO: 254641
  chr5:16488904-16488939
  hypo

SEQ ID NO: 304241 - DNA, 35 bp, Homo sapiens; identical to SEQ ID NO: 254642
  chr5:16503482-16503517
  hypo

SEQ ID NO: 304242 - DNA, 292 bp, Homo sapiens; identical to SEQ ID NO: 282813
  chr5:16616791-16617083
  hypo

SEQ ID NO: 304243 - DNA, 204 bp, Homo sapiens; identical to SEQ ID NO: 254643
  chr5:16668250-16668454
  hypo

SEQ ID NO: 304244 - DNA, 384 bp, Homo sapiens; identical to SEQ ID NO: 210104
  chr5:16670787-16671171
  hypo

SEQ ID NO: 304245 - DNA, 36 bp, Homo sapiens; identical to SEQ ID NO: 254645
  chr5:16671882-16671918
  hypo

SEQ ID NO: 304246 - DNA, 42 bp, Homo sapiens; identical to SEQ ID NO: 210105
  chr5:16674283-16674325
  hypo

SEQ ID NO: 304247 - DNA, 34 bp, Homo sapiens; identical to SEQ ID NO: 254647
  chr5:16680075-16680109
  hypo

SEQ ID NO: 304248 - DNA, 311 bp, Homo sapiens; identical to SEQ ID NO: 210106
  chr5:16681935-16682246
  hypo

SEQ ID NO: 304249 - DNA, 803 bp, Homo sapiens; identical to SEQ ID NO: 254649
  chr5:16701010-16701813
  hypo

SEQ ID NO: 304250 - DNA, 31 bp, Homo sapiens; identical to SEQ ID NO: 210108
  chr5:16729562-16729593
  hypo

SEQ ID NO: 304251 - DNA, 58 bp, Homo sapiens
  chr5:16744687-16744745
  hypo
gcccttggtgcaggacatgaaggactgagtcacccaggccctgcgggtaactaagcag

SEQ ID NO: 304252 - DNA, 148 bp, Homo sapiens; identical to SEQ ID NO: 254652
  chr5:16745035-16745183
  hypo

SEQ ID NO: 304253 - DNA, 134 bp, Homo sapiens; identical to SEQ ID NO: 254653
  chr5:16750563-16750697
  hypo

SEQ ID NO: 304254 - DNA, 161 bp, Homo sapiens; identical to SEQ ID NO: 254654
  chr5:16766144-16766305
  hypo

SEQ ID NO: 304255 - DNA, 311 bp, Homo sapiens; identical to SEQ ID NO: 210109
  chr5:16794680-16794991
  hypo

SEQ ID NO: 304256 - DNA, 42 bp, Homo sapiens; identical to SEQ ID NO: 254656
  chr5:16814253-16814295
  hypo

SEQ ID NO: 304257 - DNA, 42 bp, Homo sapiens; identical to SEQ ID NO: 254657
  chr5:16814535-16814577
  hypo

SEQ ID NO: 304258 - DNA, 32 bp, Homo sapiens; identical to SEQ ID NO: 210110
  chr5:16816658-16816690
  hypo

SEQ ID NO: 304259 - DNA, 54 bp, Homo sapiens; identical to SEQ ID NO: 254659
  chr5:16920451-16920505
  hypo

SEQ ID NO: 304260 - DNA, 98 bp, Homo sapiens; identical to SEQ ID NO: 199772
  chr5:16935458-16935556
  hypo

SEQ ID NO: 304261 - DNA, 266 bp, Homo sapiens; identical to SEQ ID NO: 199773
  chr5:16935617-16935883
  hypo

SEQ ID NO: 304262 - DNA, 33 bp, Homo sapiens; identical to SEQ ID NO: 199774
  chr5:16936321-16936354
  hypo

SEQ ID NO: 304263 - DNA, 70 bp, Homo sapiens; identical to SEQ ID NO: 199775
  chr5:16936514-16936584
  hypo

SEQ ID NO: 304264 - DNA, 33 bp, Homo sapiens; identical to SEQ ID NO: 210115
  chr5:16952528-16952561
  hypo

SEQ ID NO: 304265 - DNA, 120 bp, Homo sapiens; identical to SEQ ID NO: 254661
  chr5:16964573-16964693
  hypo

SEQ ID NO: 304266 - DNA, 88 bp, Homo sapiens; identical to SEQ ID NO: 254662
  chr5:16968119-16968207
  hypo

SEQ ID NO: 304267 - DNA, 120 bp, Homo sapiens; identical to SEQ ID NO: 210116
  chr5:16969886-16970006
  hypo

SEQ ID NO: 304268 - DNA, 37 bp, Homo sapiens; identical to SEQ ID NO: 254664
  chr5:17006738-17006775
  hypo

SEQ ID NO: 304269 - DNA, 32 bp, Homo sapiens; identical to SEQ ID NO: 210117
  chr5:17032024-17032056
  hypo

SEQ ID NO: 304270 - DNA, 35 bp, Homo sapiens; identical to SEQ ID NO: 254666
  chr5:17159691-17159726
  hypo

SEQ ID NO: 304271 - DNA, 35 bp, Homo sapiens; identical to SEQ ID NO: 210118
  chr5:17161190-17161225
  hypo

SEQ ID NO: 304272 - DNA, 48 bp, Homo sapiens; identical to SEQ ID NO: 199778
  chr5:17217633-17217681
  hypo

SEQ ID NO: 304273 - DNA, 236 bp, Homo sapiens; identical to SEQ ID NO: 210120
  chr5:17275349-17275585
  hypo

SEQ ID NO: 304274 - DNA, 401 bp, Homo sapiens
  chr5:17275617-17276018
  hypo
ctgagcccccgaaggcgcccgagcaggagcaggcggcccccggccccgctgcgggcggcgaggcccccaaagctgctgaggccgccgcggccccggccgagagcgcggcccctgccgccggggaggagcccagcaaggaggaaggggaacccaaaaagactgaggcgcccgcagctcctgccgcccaggagaccaaaagtgacggggccccagcttcagactcaaaacccggcagctcggaggctgccccctcttccaaggagacccccgcagccacggaagcgcctagttccacacccaaggcccagggccccgcagcctctgcagaagagcccaagccggtggaggccccggcagctaattccgaccaaaccgtaaccgtgaaagagtgacaaggacag

SEQ ID NO: 304275 - DNA, 44 bp, Homo sapiens; identical to SEQ ID NO: 254669
  chr5:17298136-17298180
  hypo

SEQ ID NO: 304276 - DNA, 378 bp, Homo sapiens; identical to SEQ ID NO: 210122
  chr5:17354380-17354758
  hypo

SEQ ID NO: 304277 - DNA, 183 bp, Homo sapiens; identical to SEQ ID NO: 254671
  chr5:17491366-17491549
  hypo

SEQ ID NO: 304278 - DNA, 42 bp, Homo sapiens; identical to SEQ ID NO: 254672
  chr5:17491985-17492027
  hypo

SEQ ID NO: 304279 - DNA, 48 bp, Homo sapiens
  chr5:17512144-17512192
  hypo
aaggtcagcttgtgcagaagcagctgcgtggacttatggtacttcctg

SEQ ID NO: 304280 - DNA, 159 bp, Homo sapiens; identical to SEQ ID NO: 210123
  chr5:17670364-17670523
  hypo

SEQ ID NO: 304281 - DNA, 42 bp, Homo sapiens; identical to SEQ ID NO: 254675
  chr5:17670808-17670850
  hypo

SEQ ID NO: 304282 - DNA, 34 bp, Homo sapiens; identical to SEQ ID NO: 254676
  chr5:17924526-17924560
  hypo

SEQ ID NO: 304283 - DNA, 34 bp, Homo sapiens; identical to SEQ ID NO: 254677
  chr5:17924800-17924834
  hypo

SEQ ID NO: 304284 - DNA, 76 bp, Homo sapiens; identical to SEQ ID NO: 199779
  chr5:17987028-17987104
  hypo

SEQ ID NO: 304285 - DNA, 137 bp, Homo sapiens; identical to SEQ ID NO: 254678
  chr5:18034128-18034265
  hypo

SEQ ID NO: 304286 - DNA, 66 bp, Homo sapiens; identical to SEQ ID NO: 254679
  chr5:18119293-18119359
  hypo

SEQ ID NO: 304287 - DNA, 31 bp, Homo sapiens; identical to SEQ ID NO: 254680
  chr5:18296459-18296490
  hypo

SEQ ID NO: 304288 - DNA, 36 bp, Homo sapiens; identical to SEQ ID NO: 254681
  chr5:18380066-18380102
  hypo

SEQ ID NO: 304289 - DNA, 110 bp, Homo sapiens; identical to SEQ ID NO: 210125
  chr5:18482130-18482240
  hypo

SEQ ID NO: 304290 - DNA, 226 bp, Homo sapiens; identical to SEQ ID NO: 254683
  chr5:18793520-18793746
  hypo

SEQ ID NO: 304291 - DNA, 31 bp, Homo sapiens; identical to SEQ ID NO: 254684
  chr5:19289324-19289355
  hypo

SEQ ID NO: 304292 - DNA, 94 bp, Homo sapiens; identical to SEQ ID NO: 254685
  chr5:23726883-23726977
  hypo

SEQ ID NO: 304293 - DNA, 42 bp, Homo sapiens; identical to SEQ ID NO: 254686
  chr5:24294250-24294292
  hypo

SEQ ID NO: 304294 - DNA, 42 bp, Homo sapiens; identical to SEQ ID NO: 254687
  chr5:26324223-26324265
  hypo

SEQ ID NO: 304295 - DNA, 33 bp, Homo sapiens; identical to SEQ ID NO: 210126
  chr5:27121727-27121760
  hypo

SEQ ID NO: 304296 - DNA, 33 bp, Homo sapiens; identical to SEQ ID NO: 210127
  chr5:27121940-27121973
  hypo

SEQ ID NO: 304297 - DNA, 137 bp, Homo sapiens; identical to SEQ ID NO: 254690
  chr5:27217838-27217975
  hypo

SEQ ID NO: 304298 - DNA, 138 bp, Homo sapiens
  chr5:27523815-27523953
  hypo
gatgatactggcctggactccgcacctgctgaggatgagcccctcgaggagcggcgcggggtgtgtgggagaacaatcacgggctccggccaccgtgcacagccacgcacaccggctagcacagtggggagggcagct

SEQ ID NO: 304299 - DNA, 121 bp, Homo sapiens; identical to SEQ ID NO: 199781
  chr5:29296854-29296975
  hypo

SEQ ID NO: 304300 - DNA, 55 bp, Homo sapiens; identical to SEQ ID NO: 254692
  chr5:29379762-29379817
  hypo

SEQ ID NO: 304301 - DNA, 32 bp, Homo sapiens; identical to SEQ ID NO: 210129
  chr5:30864345-30864377
  hypo

SEQ ID NO: 304302 - DNA, 99 bp, Homo sapiens; identical to SEQ ID NO: 254694
  chr5:31410341-31410440
  hypo

SEQ ID NO: 304303 - DNA, 160 bp, Homo sapiens; identical to SEQ ID NO: 254695
  chr5:31424609-31424769
  hypo

SEQ ID NO: 304304 - DNA, 160 bp, Homo sapiens; identical to SEQ ID NO: 254696
  chr5:31435824-31435984
  hypo

SEQ ID NO: 304305 - DNA, 46 bp, Homo sapiens; identical to SEQ ID NO: 254697
  chr5:31599717-31599763
  hypo

SEQ ID NO: 304306 - DNA, 31 bp, Homo sapiens; identical to SEQ ID NO: 210130
  chr5:31670494-31670525
  hypo

SEQ ID NO: 304307 - DNA, 31 bp, Homo sapiens; identical to SEQ ID NO: 210131
  chr5:31724694-31724725
  hypo

SEQ ID NO: 304308 - DNA, 63 bp, Homo sapiens
  chr5:31750713-31750776
  hypo
atttgggaaggtccgagtgggtgctgtgacgggcagatccacggatagtttcaggcagaggga

SEQ ID NO: 304309 - DNA, 42 bp, Homo sapiens; identical to SEQ ID NO: 254702
  chr5:31758533-31758575
  hypo

SEQ ID NO: 304310 - DNA, 42 bp, Homo sapiens; identical to SEQ ID NO: 254703
  chr5:31797549-31797591
  hypo

SEQ ID NO: 304311 - DNA, 41 bp, Homo sapiens; identical to SEQ ID NO: 254704
  chr5:31797711-31797752
  hypo

SEQ ID NO: 304312 - DNA, 498 bp, Homo sapiens; identical to SEQ ID NO: 199784
  chr5:31854442-31854940
  hypo

SEQ ID NO: 304313 - DNA, 57 bp, Homo sapiens; identical to SEQ ID NO: 210133
  chr5:31908394-31908451
  hypo

SEQ ID NO: 304314 - DNA, 92 bp, Homo sapiens; identical to SEQ ID NO: 254706
  chr5:32004111-32004203
  hypo

SEQ ID NO: 304315 - DNA, 32 bp, Homo sapiens; identical to SEQ ID NO: 254707
  chr5:32012491-32012523
  hypo

SEQ ID NO: 304316 - DNA, 35 bp, Homo sapiens; identical to SEQ ID NO: 254708
  chr5:32184016-32184051
  hypo

SEQ ID NO: 304317 - DNA, 34 bp, Homo sapiens; identical to SEQ ID NO: 254709
  chr5:32199875-32199909
  hypo

SEQ ID NO: 304318 - DNA, 101 bp, Homo sapiens; identical to SEQ ID NO: 210134
  chr5:32314457-32314558
  hypo

SEQ ID NO: 304319 - DNA, 44 bp, Homo sapiens; identical to SEQ ID NO: 210135
  chr5:32333128-32333172
  hypo

SEQ ID NO: 304320 - DNA, 228 bp, Homo sapiens; identical to SEQ ID NO: 210136
  chr5:32445349-32445577
  hypo

SEQ ID NO: 304321 - DNA, 33 bp, Homo sapiens; identical to SEQ ID NO: 210137
  chr5:32446098-32446131
  hypo

SEQ ID NO: 304322 - DNA, 43 bp, Homo sapiens
  chr5:32526515-32526558
  hypo
ttactcacttctaatcgtgtttctccctatttgtgaaataaca

SEQ ID NO: 304323 - DNA, 217 bp, Homo sapiens; identical to SEQ ID NO: 254715
  chr5:32584344-32584561
  hypo

SEQ ID NO: 304324 - DNA, 88 bp, Homo sapiens; identical to SEQ ID NO: 254716
  chr5:32640983-32641071
  hypo

SEQ ID NO: 304325 - DNA, 214 bp, Homo sapiens; identical to SEQ ID NO: 199785
  chr5:32709879-32710093
  hypo

SEQ ID NO: 304326 - DNA, 72 bp, Homo sapiens; identical to SEQ ID NO: 282839
  chr5:32713505-32713577
  hypo

SEQ ID NO: 304327 - DNA, 37 bp, Homo sapiens; identical to SEQ ID NO: 254717
  chr5:32754968-32755005
  hypo

SEQ ID NO: 304328 - DNA, 37 bp, Homo sapiens; identical to SEQ ID NO: 254718
  chr5:32755245-32755282
  hypo

SEQ ID NO: 304329 - DNA, 35 bp, Homo sapiens; identical to SEQ ID NO: 210139
  chr5:32764594-32764629
  hypo

SEQ ID NO: 304330 - DNA, 359 bp, Homo sapiens; identical to SEQ ID NO: 210140
  chr5:32782525-32782884
  hypo

SEQ ID NO: 304331 - DNA, 111 bp, Homo sapiens; identical to SEQ ID NO: 254721
  chr5:32793679-32793790
  hypo

SEQ ID NO: 304332 - DNA, 326 bp, Homo sapiens; identical to SEQ ID NO: 254723
  chr5:32934066-32934392
  hypo

SEQ ID NO: 304333 - DNA, 34 bp, Homo sapiens; identical to SEQ ID NO: 254724
  chr5:33035691-33035725
  hypo

SEQ ID NO: 304334 - DNA, 271 bp, Homo sapiens; identical to SEQ ID NO: 210141
  chr5:33162235-33162506
  hypo

SEQ ID NO: 304335 - DNA, 126 bp, Homo sapiens; identical to SEQ ID NO: 210142
  chr5:33162602-33162728
  hypo

SEQ ID NO: 304336 - DNA, 91 bp, Homo sapiens
  chr5:33297914-33298005
  hypo
tgctgttttaatgacggcctgggtgcaggcgggccccaagtgacgactgggcaaagttttatagtctcctgtaaacagtaagtgtcacagt

SEQ ID NO: 304337 - DNA, 61 bp, Homo sapiens
  chr5:33298177-33298238
  hypo
caccctgctggcgcaccctgctggcgcaccctgctggcgcaagttgcgccttgggactggg

SEQ ID NO: 304338 - DNA, 38 bp, Homo sapiens; identical to SEQ ID NO: 210143
  chr5:33311279-33311317
  hypo

SEQ ID NO: 304339 - DNA, 37 bp, Homo sapiens
  chr5:33442929-33442966
  hypo
cgctgtgaagtgggttctgttattatctccattatac

SEQ ID NO: 304340 - DNA, 179 bp, Homo sapiens; identical to SEQ ID NO: 210144
  chr5:33502053-33502232
  hypo

SEQ ID NO: 304341 - DNA, 40 bp, Homo sapiens; identical to SEQ ID NO: 210145
  chr5:33509454-33509494
  hypo

SEQ ID NO: 304342 - DNA, 119 bp, Homo sapiens; identical to SEQ ID NO: 254732
  chr5:33530561-33530680
  hypo

SEQ ID NO: 304343 - DNA, 39 bp, Homo sapiens; identical to SEQ ID NO: 254733
  chr5:33724926-33724965
  hypo

SEQ ID NO: 304344 - DNA, 38 bp, Homo sapiens; identical to SEQ ID NO: 199786
  chr5:33936115-33936153
  hypo

SEQ ID NO: 304345 - DNA, 359 bp, Homo sapiens; identical to SEQ ID NO: 210147
  chr5:33984387-33984746
  hypo

SEQ ID NO: 304346 - DNA, 91 bp, Homo sapiens; identical to SEQ ID NO: 254735
  chr5:34147860-34147951
  hypo

SEQ ID NO: 304347 - DNA, 39 bp, Homo sapiens; identical to SEQ ID NO: 254736
  chr5:34440316-34440355
  hypo

SEQ ID NO: 304348 - DNA, 126 bp, Homo sapiens; identical to SEQ ID NO: 254737
  chr5:34491443-34491569
  hypo

SEQ ID NO: 304349 - DNA, 182 bp, Homo sapiens; identical to SEQ ID NO: 254738
  chr5:34530162-34530344
  hypo

SEQ ID NO: 304350 - DNA, 83 bp, Homo sapiens; identical to SEQ ID NO: 210148
  chr5:34551767-34551850
  hypo

SEQ ID NO: 304351 - DNA, 38 bp, Homo sapiens; identical to SEQ ID NO: 210149
  chr5:34586707-34586745
  hypo

SEQ ID NO: 304352 - DNA, 163 bp, Homo sapiens; identical to SEQ ID NO: 254741
  chr5:34591003-34591166
  hypo

SEQ ID NO: 304353 - DNA, 33 bp, Homo sapiens; identical to SEQ ID NO: 254742
  chr5:34736210-34736243
  hypo

SEQ ID NO: 304354 - DNA, 34 bp, Homo sapiens; identical to SEQ ID NO: 254743
  chr5:34756421-34756455
  hypo

SEQ ID NO: 304355 - DNA, 218 bp, Homo sapiens; identical to SEQ ID NO: 254744
  chr5:36035944-36036162
  hypo

SEQ ID NO: 304356 - DNA, 147 bp, Homo sapiens; identical to SEQ ID NO: 254745
  chr5:36526936-36527083
  hypo

SEQ ID NO: 304357 - DNA, 42 bp, Homo sapiens; identical to SEQ ID NO: 254746
  chr5:37022498-37022540
  hypo

SEQ ID NO: 304358 - DNA, 79 bp, Homo sapiens; identical to SEQ ID NO: 254747
  chr5:37042504-37042583
  hypo

SEQ ID NO: 304359 - DNA, 106 bp, Homo sapiens; identical to SEQ ID NO: 254748
  chr5:37052539-37052645
  hypo

SEQ ID NO: 304360 - DNA, 76 bp, Homo sapiens; identical to SEQ ID NO: 254749
  chr5:37064066-37064142
  hypo

SEQ ID NO: 304361 - DNA, 36 bp, Homo sapiens; identical to SEQ ID NO: 254750
  chr5:37082175-37082211
  hypo

SEQ ID NO: 304362 - DNA, 55 bp, Homo sapiens; identical to SEQ ID NO: 254751
  chr5:37170189-37170244
  hypo

SEQ ID NO: 304363 - DNA, 31 bp, Homo sapiens; identical to SEQ ID NO: 254752
  chr5:37230262-37230293
  hypo

SEQ ID NO: 304364 - DNA, 38 bp, Homo sapiens; identical to SEQ ID NO: 254753
  chr5:37338512-37338550
  hypo

SEQ ID NO: 304365 - DNA, 37 bp, Homo sapiens; identical to SEQ ID NO: 254754
  chr5:37338790-37338827
  hypo

SEQ ID NO: 304366 - DNA, 33 bp, Homo sapiens; identical to SEQ ID NO: 254755
  chr5:37347339-37347372
  hypo

SEQ ID NO: 304367 - DNA, 65 bp, Homo sapiens; identical to SEQ ID NO: 254756
  chr5:37806566-37806631
  hypo

SEQ ID NO: 304368 - DNA, 33 bp, Homo sapiens; identical to SEQ ID NO: 254757
  chr5:38198897-38198930
  hypo

SEQ ID NO: 304369 - DNA, 31 bp, Homo sapiens; identical to SEQ ID NO: 254758
  chr5:38631851-38631882
  hypo

SEQ ID NO: 304370 - DNA, 36 bp, Homo sapiens; identical to SEQ ID NO: 254759
  chr5:38635820-38635856
  hypo

SEQ ID NO: 304371 - DNA, 42 bp, Homo sapiens; identical to SEQ ID NO: 210150
  chr5:39053667-39053709
  hypo

SEQ ID NO: 304372 - DNA, 213 bp, Homo sapiens; identical to SEQ ID NO: 254761
  chr5:39186060-39186273
  hypo

SEQ ID NO: 304373 - DNA, 102 bp, Homo sapiens; identical to SEQ ID NO: 210151
  chr5:39209363-39209465
  hypo

SEQ ID NO: 304374 - DNA, 87 bp, Homo sapiens; identical to SEQ ID NO: 254763
  chr5:39576392-39576479
  hypo

SEQ ID NO: 304375 - DNA, 228 bp, Homo sapiens; identical to SEQ ID NO: 254764
  chr5:39665680-39665908
  hypo

SEQ ID NO: 304376 - DNA, 369 bp, Homo sapiens; identical to SEQ ID NO: 254765
  chr5:39721486-39721855
  hypo

SEQ ID NO: 304377 - DNA, 129 bp, Homo sapiens; identical to SEQ ID NO: 210152
  chr5:39740632-39740761
  hypo

SEQ ID NO: 304378 - DNA, 40 bp, Homo sapiens; identical to SEQ ID NO: 254767
  chr5:39802883-39802923
  hypo

SEQ ID NO: 304379 - DNA, 40 bp, Homo sapiens; identical to SEQ ID NO: 254768
  chr5:39803163-39803203
  hypo

SEQ ID NO: 304380 - DNA, 223 bp, Homo sapiens; identical to SEQ ID NO: 210153
  chr5:39808822-39809045
  hypo

SEQ ID NO: 304381 - DNA, 214 bp, Homo sapiens; identical to SEQ ID NO: 210154
  chr5:40066713-40066927
  hypo

SEQ ID NO: 304382 - DNA, 148 bp, Homo sapiens; identical to SEQ ID NO: 210155
  chr5:40066955-40067103
  hypo

SEQ ID NO: 304383 - DNA, 42 bp, Homo sapiens; identical to SEQ ID NO: 254772
  chr5:40823270-40823312
  hypo

SEQ ID NO: 304384 - DNA, 42 bp, Homo sapiens; identical to SEQ ID NO: 254773
  chr5:40957872-40957914
  hypo

SEQ ID NO: 304385 - DNA, 50 bp, Homo sapiens; identical to SEQ ID NO: 254774
  chr5:41588037-41588087
  hypo

SEQ ID NO: 304386 - DNA, 796 bp, Homo sapiens; identical to SEQ ID NO: 282880
  chr5:41870078-41870874
  hypo

SEQ ID NO: 304387 - DNA, 39 bp, Homo sapiens; identical to SEQ ID NO: 210157
  chr5:41991877-41991916
  hypo

SEQ ID NO: 304388 - DNA, 39 bp, Homo sapiens; identical to SEQ ID NO: 210158
  chr5:41992156-41992195
  hypo

SEQ ID NO: 304389 - DNA, 81 bp, Homo sapiens; identical to SEQ ID NO: 254777
  chr5:42140523-42140604
  hypo

SEQ ID NO: 304390 - DNA, 278 bp, Homo sapiens; identical to SEQ ID NO: 199814
  chr5:42424337-42424615
  hypo

SEQ ID NO: 304391 - DNA, 567 bp, Homo sapiens; identical to SEQ ID NO: 254778
  chr5:42468532-42469099
  hypo

SEQ ID NO: 304392 - DNA, 36 bp, Homo sapiens; identical to SEQ ID NO: 210160
  chr5:42476009-42476045
  hypo

SEQ ID NO: 304393 - DNA, 140 bp, Homo sapiens; identical to SEQ ID NO: 254780
  chr5:42582811-42582951
  hypo

SEQ ID NO: 304394 - DNA, 37 bp, Homo sapiens; identical to SEQ ID NO: 254781
  chr5:42638260-42638297
  hypo

SEQ ID NO: 304395 - DNA, 93 bp, Homo sapiens; identical to SEQ ID NO: 254782
  chr5:42697695-42697788
  hypo

SEQ ID NO: 304396 - DNA, 34 bp, Homo sapiens; identical to SEQ ID NO: 254783
  chr5:42760113-42760147
  hypo

SEQ ID NO: 304397 - DNA, 42 bp, Homo sapiens; identical to SEQ ID NO: 254784
  chr5:42975839-42975881
  hypo

SEQ ID NO: 304398 - DNA, 31 bp, Homo sapiens; identical to SEQ ID NO: 210161
  chr5:42984043-42984074
  hypo

SEQ ID NO: 304399 - DNA, 34 bp, Homo sapiens; identical to SEQ ID NO: 254786
  chr5:43069386-43069420
  hypo

SEQ ID NO: 304400 - DNA, 43 bp, Homo sapiens; identical to SEQ ID NO: 254787
  chr5:43120111-43120154
  hypo

SEQ ID NO: 304401 - DNA, 105 bp, Homo sapiens; identical to SEQ ID NO: 210162
  chr5:43147787-43147892
  hypo

SEQ ID NO: 304402 - DNA, 36 bp, Homo sapiens; identical to SEQ ID NO: 210163
  chr5:43233244-43233280
  hypo

SEQ ID NO: 304403 - DNA, 52 bp, Homo sapiens; identical to SEQ ID NO: 210164
  chr5:43233310-43233362
  hypo

SEQ ID NO: 304404 - DNA, 89 bp, Homo sapiens; identical to SEQ ID NO: 254791
  chr5:43387666-43387755
  hypo

SEQ ID NO: 304405 - DNA, 344 bp, Homo sapiens; identical to SEQ ID NO: 199828
  chr5:43557421-43557765
  hypo

SEQ ID NO: 304406 - DNA, 222 bp, Homo sapiens; identical to SEQ ID NO: 282908
  chr5:43603563-43603785
  hypo

SEQ ID NO: 304407 - DNA, 34 bp, Homo sapiens; identical to SEQ ID NO: 254792
  chr5:43850518-43850552
  hypo

SEQ ID NO: 304408 - DNA, 31 bp, Homo sapiens; identical to SEQ ID NO: 254793
  chr5:43950021-43950052
  hypo

SEQ ID NO: 304409 - DNA, 48 bp, Homo sapiens; identical to SEQ ID NO: 254794
  chr5:44708954-44709002
  hypo

SEQ ID NO: 304410 - DNA, 98 bp, Homo sapiens; identical to SEQ ID NO: 254795
  chr5:44811149-44811247
  hypo

SEQ ID NO: 304411 - DNA, 79 bp, Homo sapiens; identical to SEQ ID NO: 210166
  chr5:45196607-45196686
  hypo

SEQ ID NO: 304412 - DNA, 44 bp, Homo sapiens; identical to SEQ ID NO: 210167
  chr5:45225672-45225716
  hypo

SEQ ID NO: 304413 - DNA, 51 bp, Homo sapiens; identical to SEQ ID NO: 199831
  chr5:49737299-49737350
  hypo

SEQ ID NO: 304414 - DNA, 33 bp, Homo sapiens; identical to SEQ ID NO: 210169
  chr5:49903305-49903338
  hypo

SEQ ID NO: 304415 - DNA, 31 bp, Homo sapiens; identical to SEQ ID NO: 254799
  chr5:51793955-51793986
  hypo

SEQ ID NO: 304416 - DNA, 119 bp, Homo sapiens; identical to SEQ ID NO: 254801
  chr5:52941754-52941873
  hypo

SEQ ID NO: 304417 - DNA, 46 bp, Homo sapiens; identical to SEQ ID NO: 254802
  chr5:53241084-53241130
  hypo

SEQ ID NO: 304418 - DNA, 78 bp, Homo sapiens; identical to SEQ ID NO: 210170
  chr5:53821871-53821949
  hypo

SEQ ID NO: 304419 - DNA, 40 bp, Homo sapiens; identical to SEQ ID NO: 254804
  chr5:53959228-53959268
  hypo

SEQ ID NO: 304420 - DNA, 139 bp, Homo sapiens; identical to SEQ ID NO: 210171
  chr5:54069074-54069213
  hypo

SEQ ID NO: 304421 - DNA, 107 bp, Homo sapiens; identical to SEQ ID NO: 199844
  chr5:54469036-54469143
  hypo

SEQ ID NO: 304422 - DNA, 98 bp, Homo sapiens; identical to SEQ ID NO: 210173
  chr5:54665639-54665737
  hypo

SEQ ID NO: 304423 - DNA, 32 bp, Homo sapiens; identical to SEQ ID NO: 210174
  chr5:54734440-54734472
  hypo

SEQ ID NO: 304424 - DNA, 32 bp, Homo sapiens; identical to SEQ ID NO: 254808
  chr5:54734712-54734744
  hypo

SEQ ID NO: 304425 - DNA, 44 bp, Homo sapiens; identical to SEQ ID NO: 254809
  chr5:54850288-54850332
  hypo

SEQ ID NO: 304426 - DNA, 40 bp, Homo sapiens; identical to SEQ ID NO: 254810
  chr5:54952935-54952975
  hypo

SEQ ID NO: 304427 - DNA, 284 bp, Homo sapiens; identical to SEQ ID NO: 254811
  chr5:55033681-55033965
  hypo

SEQ ID NO: 304428 - DNA, 165 bp, Homo sapiens; identical to SEQ ID NO: 254812
  chr5:55229393-55229558
  hypo

SEQ ID NO: 304429 - DNA, 95 bp, Homo sapiens
  chr5:55309217-55309312
  hypo
tgctgggattacaggagtgagccactgcacctggccagaattagagttataattaaggcaggacgtgccaaggtgatcacagccaaaggtcccac

SEQ ID NO: 304430 - DNA, 34 bp, Homo sapiens; identical to SEQ ID NO: 210175
  chr5:55330547-55330581
  hypo

SEQ ID NO: 304431 - DNA, 33 bp, Homo sapiens; identical to SEQ ID NO: 210176
  chr5:55330821-55330854
  hypo

SEQ ID NO: 304432 - DNA, 94 bp, Homo sapiens; identical to SEQ ID NO: 254816
  chr5:55379300-55379394
  hypo

SEQ ID NO: 304433 - DNA, 31 bp, Homo sapiens; identical to SEQ ID NO: 254817
  chr5:55705173-55705204
  hypo

SEQ ID NO: 304434 - DNA, 133 bp, Homo sapiens; identical to SEQ ID NO: 254818
  chr5:55789717-55789850
  hypo

SEQ ID NO: 304435 - DNA, 146 bp, Homo sapiens; identical to SEQ ID NO: 254819
  chr5:56011132-56011278
  hypo

SEQ ID NO: 304436 - DNA, 562 bp, Homo sapiens; identical to SEQ ID NO: 282956
  chr5:56112631-56113193
  hypo

SEQ ID NO: 304437 - DNA, 43 bp, Homo sapiens; identical to SEQ ID NO: 254820
  chr5:56487659-56487702
  hypo

SEQ ID NO: 304438 - DNA, 155 bp, Homo sapiens; identical to SEQ ID NO: 254821
  chr5:56568064-56568219
  hypo

SEQ ID NO: 304439 - DNA, 206 bp, Homo sapiens; identical to SEQ ID NO: 254822
  chr5:56718795-56719001
  hypo

SEQ ID NO: 304440 - DNA, 1274 bp, Homo sapiens; identical to SEQ ID NO: 282961
  chr5:57755330-57756604
  hypo

SEQ ID NO: 304441 - DNA, 203 bp, Homo sapiens; identical to SEQ ID NO: 199868
  chr5:60626141-60626344
  hypo

SEQ ID NO: 304442 - DNA, 252 bp, Homo sapiens; identical to SEQ ID NO: 282976
  chr5:60626723-60626975
  hypo

SEQ ID NO: 304443 - DNA, 45 bp, Homo sapiens; identical to SEQ ID NO: 210181
  chr5:60676638-60676683
  hypo

SEQ ID NO: 304444 - DNA, 39 bp, Homo sapiens; identical to SEQ ID NO: 254824
  chr5:60700056-60700095
  hypo

SEQ ID NO: 304445 - DNA, 200 bp, Homo sapiens; identical to SEQ ID NO: 210182
  chr5:60821632-60821832
  hypo

SEQ ID NO: 304446 - DNA, 136 bp, Homo sapiens; identical to SEQ ID NO: 254826
  chr5:60866394-60866530
  hypo

SEQ ID NO: 304447 - DNA, 161 bp, Homo sapiens; identical to SEQ ID NO: 254827
  chr5:61681252-61681413
  hypo

SEQ ID NO: 304448 - DNA, 83 bp, Homo sapiens; identical to SEQ ID NO: 210183
  chr5:61690791-61690874
  hypo

SEQ ID NO: 304449 - DNA, 39 bp, Homo sapiens; identical to SEQ ID NO: 254829
  chr5:61704349-61704388
  hypo

SEQ ID NO: 304450 - DNA, 31 bp, Homo sapiens; identical to SEQ ID NO: 254830
  chr5:61849887-61849918
  hypo

SEQ ID NO: 304451 - DNA, 342 bp, Homo sapiens; identical to SEQ ID NO: 254831
  chr5:61910224-61910566
  hypo

SEQ ID NO: 304452 - DNA, 42 bp, Homo sapiens; identical to SEQ ID NO: 254832
  chr5:62080933-62080975
  hypo

SEQ ID NO: 304453 - DNA, 387 bp, Homo sapiens; identical to SEQ ID NO: 41580
  chr5:63255315-63255702
  hypo

SEQ ID NO: 304454 - DNA, 132 bp, Homo sapiens; identical to SEQ ID NO: 282986
  chr5:63462119-63462251
  hypo

SEQ ID NO: 304455 - DNA, 156 bp, Homo sapiens; identical to SEQ ID NO: 254833
  chr5:64103541-64103697
  hypo

SEQ ID NO: 304456 - DNA, 138 bp, Homo sapiens; identical to SEQ ID NO: 210184
  chr5:64339982-64340120
  hypo

SEQ ID NO: 304457 - DNA, 39 bp, Homo sapiens; identical to SEQ ID NO: 254835
  chr5:64516272-64516311
  hypo

SEQ ID NO: 304458 - DNA, 38 bp, Homo sapiens; identical to SEQ ID NO: 254836
  chr5:64516551-64516589
  hypo

SEQ ID NO: 304459 - DNA, 41 bp, Homo sapiens; identical to SEQ ID NO: 210185
  chr5:65020927-65020968
  hypo

SEQ ID NO: 304460 - DNA, 40 bp, Homo sapiens; identical to SEQ ID NO: 210186
  chr5:65107351-65107391
  hypo

SEQ ID NO: 304461 - DNA, 77 bp, Homo sapiens; identical to SEQ ID NO: 210187
  chr5:65465907-65465984
  hypo

SEQ ID NO: 304462 - DNA, 42 bp, Homo sapiens; identical to SEQ ID NO: 254840
  chr5:65505217-65505259
  hypo

SEQ ID NO: 304463 - DNA, 205 bp, Homo sapiens; identical to SEQ ID NO: 210188
  chr5:65988337-65988542
  hypo

SEQ ID NO: 304464 - DNA, 186 bp, Homo sapiens; identical to SEQ ID NO: 210189
  chr5:66441263-66441449
  hypo

SEQ ID NO: 304465 - DNA, 119 bp, Homo sapiens; identical to SEQ ID NO: 254843
  chr5:66448539-66448658
  hypo

SEQ ID NO: 304466 - DNA, 622 bp, Homo sapiens; identical to SEQ ID NO: 254844
  chr5:66459032-66459654
  hypo

SEQ ID NO: 304467 - DNA, 761 bp, Homo sapiens; identical to SEQ ID NO: 254845
  chr5:66460859-66461620
  hypo

SEQ ID NO: 304468 - DNA, 212 bp, Homo sapiens; identical to SEQ ID NO: 254846
  chr5:66534133-66534345
  hypo

SEQ ID NO: 304469 - DNA, 58 bp, Homo sapiens; identical to SEQ ID NO: 254847
  chr5:66790234-66790292
  hypo

SEQ ID NO: 304470 - DNA, 34 bp, Homo sapiens; identical to SEQ ID NO: 210190
  chr5:66911431-66911465
  hypo

SEQ ID NO: 304471 - DNA, 162 bp, Homo sapiens; identical to SEQ ID NO: 210191
  chr5:66938604-66938766
  hypo

SEQ ID NO: 304472 - DNA, 37 bp, Homo sapiens; identical to SEQ ID NO: 254850
  chr5:66987570-66987607
  hypo

SEQ ID NO: 304473 - DNA, 36 bp, Homo sapiens; identical to SEQ ID NO: 210192
  chr5:67015513-67015549
  hypo

SEQ ID NO: 304474 - DNA, 35 bp, Homo sapiens; identical to SEQ ID NO: 254852
  chr5:67021470-67021505
  hypo

SEQ ID NO: 304475 - DNA, 37 bp, Homo sapiens; identical to SEQ ID NO: 254853
  chr5:67488205-67488242
  hypo

SEQ ID NO: 304476 - DNA, 125 bp, Homo sapiens
  chr5:67590943-67591068
  hypo
gataataacaaatacgtttcttttgcctgcaggattatgcataattatgataagttgaagtctcgaatcagtgaaattattgacagtagaagaagattggaagaagacttgaagaagcaggcagc

SEQ ID NO: 304477 - DNA, 114 bp, Homo sapiens
  chr5:67591157-67591271
  hypo
tatttgaaatggaatcctatacatgaataattggtgattgctacaattcaggatgagttaatgcgttctcttttcaaaactgtttttcaggtggttgactcaaaaaggtgttcg

SEQ ID NO: 304478 - DNA, 174 bp, Homo sapiens; identical to SEQ ID NO: 210193
  chr5:67617620-67617794
  hypo

SEQ ID NO: 304479 - DNA, 80 bp, Homo sapiens; identical to SEQ ID NO: 254856
  chr5:67708116-67708196
  hypo

SEQ ID NO: 304480 - DNA, 137 bp, Homo sapiens; identical to SEQ ID NO: 210194
  chr5:67717789-67717926
  hypo

SEQ ID NO: 304481 - DNA, 37 bp, Homo sapiens; identical to SEQ ID NO: 210195
  chr5:67753209-67753246
  hypo

SEQ ID NO: 304482 - DNA, 36 bp, Homo sapiens; identical to SEQ ID NO: 210196
  chr5:67753366-67753402
  hypo

SEQ ID NO: 304483 - DNA, 160 bp, Homo sapiens; identical to SEQ ID NO: 254860
  chr5:67771773-67771933
  hypo

SEQ ID NO: 304484 - DNA, 42 bp, Homo sapiens; identical to SEQ ID NO: 254861
  chr5:67845323-67845365
  hypo

SEQ ID NO: 304485 - DNA, 156 bp, Homo sapiens; identical to SEQ ID NO: 254862
  chr5:68238653-68238809
  hypo

SEQ ID NO: 304486 - DNA, 37 bp, Homo sapiens; identical to SEQ ID NO: 254863
  chr5:68337841-68337878
  hypo

SEQ ID NO: 304487 - DNA, 43 bp, Homo sapiens; identical to SEQ ID NO: 254864
  chr5:68363914-68363957
  hypo

SEQ ID NO: 304488 - DNA, 156 bp, Homo sapiens
  chr5:68370825-68370981
  hypo
aggcaccggggtaccgtgcccagcccccgggcacctccacagggctgccatgtggcagaggaagccggtgaactgacgcttggctgcagccaggcaggcctaagctctgttgccccgccgcatcccagctacacccacaggcctggatgccaacca

SEQ ID NO: 304489 - DNA, 181 bp, Homo sapiens
  chr5:68371030-68371211
  hypo
agctgcacctgtcccctaatatcttcacccgcctcttaggggcagccttctcggccctggcgtgcatggtgcaccacctccacctctctgaaaagctggcctgggtgcccgtggaggccttcgtggggctgcagatccaagtgaaccaatccgccaacccgtgaaactgggactgtgccct

SEQ ID NO: 304490 - DNA, 127 bp, Homo sapiens; identical to SEQ ID NO: 254868
  chr5:70945906-70946033
  hypo

SEQ ID NO: 304491 - DNA, 107 bp, Homo sapiens; identical to SEQ ID NO: 254869
  chr5:70958355-70958462
  hypo

SEQ ID NO: 304492 - DNA, 319 bp, Homo sapiens; identical to SEQ ID NO: 254870
  chr5:70994055-70994374
  hypo

SEQ ID NO: 304493 - DNA, 37 bp, Homo sapiens; identical to SEQ ID NO: 254871
  chr5:71313585-71313622
  hypo

SEQ ID NO: 304494 - DNA, 157 bp, Homo sapiens; identical to SEQ ID NO: 254872
  chr5:71714798-71714955
  hypo

SEQ ID NO: 304495 - DNA, 39 bp, Homo sapiens; identical to SEQ ID NO: 210197
  chr5:71780024-71780063
  hypo

SEQ ID NO: 304496 - DNA, 269 bp, Homo sapiens; identical to SEQ ID NO: 254874
  chr5:72197881-72198150
  hypo

SEQ ID NO: 304497 - DNA, 45 bp, Homo sapiens; identical to SEQ ID NO: 254876
  chr5:72242483-72242528
  hypo

SEQ ID NO: 304498 - DNA, 252 bp, Homo sapiens; identical to SEQ ID NO: 254877
  chr5:72292520-72292772
  hypo

SEQ ID NO: 304499 - DNA, 181 bp, Homo sapiens; identical to SEQ ID NO: 210198
  chr5:72388279-72388460
  hypo

SEQ ID NO: 304500 - DNA, 216 bp, Homo sapiens; identical to SEQ ID NO: 199888
  chr5:72744481-72744697
  hypo

SEQ ID NO: 304501 - DNA, 1143 bp, Homo sapiens; identical to SEQ ID NO: 199891
  chr5:72921423-72922566
  hypo

SEQ ID NO: 304502 - DNA, 196 bp, Homo sapiens; identical to SEQ ID NO: 254879
  chr5:72980654-72980850
  hypo

SEQ ID NO: 304503 - DNA, 194 bp, Homo sapiens; identical to SEQ ID NO: 210201
  chr5:73081113-73081307
  hypo

SEQ ID NO: 304504 - DNA, 38 bp, Homo sapiens; identical to SEQ ID NO: 254881
  chr5:73102526-73102564
  hypo

SEQ ID NO: 304505 - DNA, 41 bp, Homo sapiens; identical to SEQ ID NO: 254882
  chr5:73192671-73192712
  hypo

SEQ ID NO: 304506 - DNA, 87 bp, Homo sapiens; identical to SEQ ID NO: 210202
  chr5:73205664-73205751
  hypo

SEQ ID NO: 304507 - DNA, 136 bp, Homo sapiens; identical to SEQ ID NO: 254884
  chr5:73228902-73229038
  hypo

SEQ ID NO: 304508 - DNA, 45 bp, Homo sapiens; identical to SEQ ID NO: 210203
  chr5:73247793-73247838
  hypo

SEQ ID NO: 304509 - DNA, 176 bp, Homo sapiens; identical to SEQ ID NO: 254886
  chr5:73623643-73623819
  hypo

SEQ ID NO: 304510 - DNA, 178 bp, Homo sapiens; identical to SEQ ID NO: 210204
  chr5:73627934-73628112
  hypo

SEQ ID NO: 304511 - DNA, 35 bp, Homo sapiens; identical to SEQ ID NO: 210205
  chr5:73665486-73665521
  hypo

SEQ ID NO: 304512 - DNA, 31 bp, Homo sapiens; identical to SEQ ID NO: 254889
  chr5:73687766-73687797
  hypo

SEQ ID NO: 304513 - DNA, 193 bp, Homo sapiens; identical to SEQ ID NO: 199892
  chr5:73843885-73844078
  hypo

SEQ ID NO: 304514 - DNA, 191 bp, Homo sapiens; identical to SEQ ID NO: 254890
  chr5:73855841-73856032
  hypo

SEQ ID NO: 304515 - DNA, 222 bp, Homo sapiens; identical to SEQ ID NO: 254891
  chr5:73932084-73932306
  hypo

SEQ ID NO: 304516 - DNA, 264 bp, Homo sapiens; identical to SEQ ID NO: 199893
  chr5:73935724-73935988
  hypo

SEQ ID NO: 304517 - DNA, 516 bp, Homo sapiens; identical to SEQ ID NO: 41639
  chr5:73936032-73936548
  hypo

SEQ ID NO: 304518 - DNA, 285 bp, Homo sapiens; identical to SEQ ID NO: 283039
  chr5:73936774-73937059
  hypo

SEQ ID NO: 304519 - DNA, 103 bp, Homo sapiens; identical to SEQ ID NO: 199897
  chr5:74162616-74162719
  hypo

SEQ ID NO: 304520 - DNA, 260 bp, Homo sapiens; identical to SEQ ID NO: 199898
  chr5:74348635-74348895
  hypo

SEQ ID NO: 304521 - DNA, 590 bp, Homo sapiens; identical to SEQ ID NO: 199899
  chr5:74348906-74349496
  hypo

SEQ ID NO: 304522 - DNA, 39 bp, Homo sapiens; identical to SEQ ID NO: 254892
  chr5:74628696-74628735
  hypo

SEQ ID NO: 304523 - DNA, 37 bp, Homo sapiens; identical to SEQ ID NO: 210213
  chr5:74652649-74652686
  hypo

SEQ ID NO: 304524 - DNA, 90 bp, Homo sapiens; identical to SEQ ID NO: 254894
  chr5:74753658-74753748
  hypo

SEQ ID NO: 304525 - DNA, 89 bp, Homo sapiens; identical to SEQ ID NO: 254895
  chr5:74753808-74753897
  hypo

SEQ ID NO: 304526 - DNA, 373 bp, Homo sapiens; identical to SEQ ID NO: 199901
  chr5:75379694-75380067
  hypo

SEQ ID NO: 304527 - DNA, 37 bp, Homo sapiens; identical to SEQ ID NO: 283050
  chr5:75380974-75381011
  hypo

SEQ ID NO: 304528 - DNA, 50 bp, Homo sapiens; identical to SEQ ID NO: 283051
  chr5:75698194-75698244
  hypo

SEQ ID NO: 304529 - DNA, 1185 bp, Homo sapiens; identical to SEQ ID NO: 199902
  chr5:75698274-75699459
  hypo

SEQ ID NO: 304530 - DNA, 40 bp, Homo sapiens; identical to SEQ ID NO: 199903
  chr5:75700173-75700213
  hypo

SEQ ID NO: 304531 - DNA, 37 bp, Homo sapiens; identical to SEQ ID NO: 254897
  chr5:76159635-76159672
  hypo

SEQ ID NO: 304532 - DNA, 202 bp, Homo sapiens; identical to SEQ ID NO: 283063
  chr5:76250150-76250352
  hypo

SEQ ID NO: 304533 - DNA, 136 bp, Homo sapiens; identical to SEQ ID NO: 210217
  chr5:76327277-76327413
  hypo

SEQ ID NO: 304534 - DNA, 37 bp, Homo sapiens; identical to SEQ ID NO: 210218
  chr5:76328105-76328142
  hypo

SEQ ID NO: 304535 - DNA, 169 bp, Homo sapiens; identical to SEQ ID NO: 210219
  chr5:76372312-76372481
  hypo

SEQ ID NO: 304536 - DNA, 197 bp, Homo sapiens; identical to SEQ ID NO: 254901
  chr5:76399986-76400183
  hypo

SEQ ID NO: 304537 - DNA, 115 bp, Homo sapiens; identical to SEQ ID NO: 283067
  chr5:76506030-76506145
  hypo

SEQ ID NO: 304538 - DNA, 111 bp, Homo sapiens; identical to SEQ ID NO: 283068
  chr5:76507202-76507313
  hypo

SEQ ID NO: 304539 - DNA, 32 bp, Homo sapiens; identical to SEQ ID NO: 254902
  chr5:76738423-76738455
  hypo

SEQ ID NO: 304540 - DNA, 57 bp, Homo sapiens; identical to SEQ ID NO: 199916
  chr5:77268310-77268367
  hypo

SEQ ID NO: 304541 - DNA, 118 bp, Homo sapiens; identical to SEQ ID NO: 254903
  chr5:77288993-77289111
  hypo

SEQ ID NO: 304542 - DNA, 207 bp, Homo sapiens; identical to SEQ ID NO: 254905
  chr5:77291947-77292154
  hypo

SEQ ID NO: 304543 - DNA, 108 bp, Homo sapiens; identical to SEQ ID NO: 254906
  chr5:77300047-77300155
  hypo

SEQ ID NO: 304544 - DNA, 63 bp, Homo sapiens; identical to SEQ ID NO: 254907
  chr5:77425049-77425112
  hypo

SEQ ID NO: 304545 - DNA, 93 bp, Homo sapiens; identical to SEQ ID NO: 254908
  chr5:77655148-77655241
  hypo

SEQ ID NO: 304546 - DNA, 111 bp, Homo sapiens; identical to SEQ ID NO: 210222
  chr5:77816710-77816821
  hypo

SEQ ID NO: 304547 - DNA, 34 bp, Homo sapiens; identical to SEQ ID NO: 210223
  chr5:77848659-77848693
  hypo

SEQ ID NO: 304548 - DNA, 85 bp, Homo sapiens; identical to SEQ ID NO: 254912
  chr5:77912255-77912340
  hypo

SEQ ID NO: 304549 - DNA, 180 bp, Homo sapiens; identical to SEQ ID NO: 254913
  chr5:78068862-78069042
  hypo

SEQ ID NO: 304550 - DNA, 57 bp, Homo sapiens; identical to SEQ ID NO: 210224
  chr5:78105382-78105439
  hypo

SEQ ID NO: 304551 - DNA, 91 bp, Homo sapiens; identical to SEQ ID NO: 210225
  chr5:78105545-78105636
  hypo

SEQ ID NO: 304552 - DNA, 139 bp, Homo sapiens; identical to SEQ ID NO: 210226
  chr5:78264451-78264590
  hypo

SEQ ID NO: 304553 - DNA, 50 bp, Homo sapiens; identical to SEQ ID NO: 210227
  chr5:78264837-78264887
  hypo

SEQ ID NO: 304554 - DNA, 45 bp, Homo sapiens; identical to SEQ ID NO: 254917
  chr5:78445631-78445676
  hypo

SEQ ID NO: 304555 - DNA, 80 bp, Homo sapiens; identical to SEQ ID NO: 210228
  chr5:78469179-78469259
  hypo

SEQ ID NO: 304556 - DNA, 43 bp, Homo sapiens; identical to SEQ ID NO: 254919
  chr5:78535318-78535361
  hypo

SEQ ID NO: 304557 - DNA, 33 bp, Homo sapiens; identical to SEQ ID NO: 254920
  chr5:78812538-78812571
  hypo

SEQ ID NO: 304558 - DNA, 36 bp, Homo sapiens; identical to SEQ ID NO: 210229
  chr5:78882208-78882244
  hypo

SEQ ID NO: 304559 - DNA, 36 bp, Homo sapiens; identical to SEQ ID NO: 210230
  chr5:78949955-78949991
  hypo

SEQ ID NO: 304560 - DNA, 37 bp, Homo sapiens
  chr5:78985059-78985096
  hypo
aaagagagccgggacggaacactggttcaaaactggg

SEQ ID NO: 304561 - DNA, 214 bp, Homo sapiens; identical to SEQ ID NO: 254925
  chr5:78986242-78986456
  hypo

SEQ ID NO: 304562 - DNA, 119 bp, Homo sapiens; identical to SEQ ID NO: 254926
  chr5:79097421-79097540
  hypo

SEQ ID NO: 304563 - DNA, 95 bp, Homo sapiens; identical to SEQ ID NO: 254927
  chr5:79393212-79393307
  hypo

SEQ ID NO: 304564 - DNA, 86 bp, Homo sapiens; identical to SEQ ID NO: 254928
  chr5:79438045-79438131
  hypo

SEQ ID NO: 304565 - DNA, 38 bp, Homo sapiens; identical to SEQ ID NO: 254929
  chr5:79448991-79449029
  hypo

SEQ ID NO: 304566 - DNA, 118 bp, Homo sapiens; identical to SEQ ID NO: 210231
  chr5:79498689-79498807
  hypo

SEQ ID NO: 304567 - DNA, 291 bp, Homo sapiens; identical to SEQ ID NO: 283086
  chr5:79551152-79551443
  hypo

SEQ ID NO: 304568 - DNA, 78 bp, Homo sapiens; identical to SEQ ID NO: 254931
  chr5:79552929-79553007
  hypo

SEQ ID NO: 304569 - DNA, 54 bp, Homo sapiens
  chr5:79598627-79598681
  hypo
gccattgttgaatacgagagcagtgatatcgtcatgcatggtgagctggcagca

SEQ ID NO: 304570 - DNA, 33 bp, Homo sapiens
  chr5:79598759-79598792
  hypo
gtttgttttttgagatggagtttcgcttttgtt

SEQ ID NO: 304571 - DNA, 42 bp, Homo sapiens; identical to SEQ ID NO: 254934
  chr5:79785450-79785492
  hypo

SEQ ID NO: 304572 - DNA, 39 bp, Homo sapiens; identical to SEQ ID NO: 254935
  chr5:79786095-79786134
  hypo

SEQ ID NO: 304573 - DNA, 41 bp, Homo sapiens; identical to SEQ ID NO: 199922
  chr5:79865662-79865703
  hypo

SEQ ID NO: 304574 - DNA, 90 bp, Homo sapiens; identical to SEQ ID NO: 199923
  chr5:79865744-79865834
  hypo

SEQ ID NO: 304575 - DNA, 254 bp, Homo sapiens; identical to SEQ ID NO: 210235
  chr5:79911325-79911579
  hypo

SEQ ID NO: 304576 - DNA, 447 bp, Homo sapiens; identical to SEQ ID NO: 254937
  chr5:79974517-79974964
  hypo

SEQ ID NO: 304577 - DNA, 163 bp, Homo sapiens; identical to SEQ ID NO: 210236
  chr5:79986401-79986564
  hypo

SEQ ID NO: 304578 - DNA, 80 bp, Homo sapiens; identical to SEQ ID NO: 210237
  chr5:80076659-80076739
  hypo

SEQ ID NO: 304579 - DNA, 48 bp, Homo sapiens; identical to SEQ ID NO: 210238
  chr5:80550827-80550875
  hypo

SEQ ID NO: 304580 - DNA, 183 bp, Homo sapiens; identical to SEQ ID NO: 210239
  chr5:80652824-80653007
  hypo

SEQ ID NO: 304581 - DNA, 101 bp, Homo sapiens; identical to SEQ ID NO: 254942
  chr5:80717292-80717393
  hypo

SEQ ID NO: 304582 - DNA, 34 bp, Homo sapiens; identical to SEQ ID NO: 254943
  chr5:80728272-80728306
  hypo

SEQ ID NO: 304583 - DNA, 152 bp, Homo sapiens; identical to SEQ ID NO: 254944
  chr5:81058593-81058745
  hypo

SEQ ID NO: 304584 - DNA, 42 bp, Homo sapiens; identical to SEQ ID NO: 254945
  chr5:81067109-81067151
  hypo

SEQ ID NO: 304585 - DNA, 140 bp, Homo sapiens; identical to SEQ ID NO: 210240
  chr5:81570369-81570509
  hypo

SEQ ID NO: 304586 - DNA, 75 bp, Homo sapiens; identical to SEQ ID NO: 254947
  chr5:82808025-82808100
  hypo

SEQ ID NO: 304587 - DNA, 60 bp, Homo sapiens; identical to SEQ ID NO: 254948
  chr5:83095505-83095565
  hypo

SEQ ID NO: 304588 - DNA, 550 bp, Homo sapiens; identical to SEQ ID NO: 254949
  chr5:86547819-86548369
  hypo

SEQ ID NO: 304589 - DNA, 134 bp, Homo sapiens; identical to SEQ ID NO: 254950
  chr5:86672203-86672337
  hypo

SEQ ID NO: 304590 - DNA, 756 bp, Homo sapiens; identical to SEQ ID NO: 283108
  chr5:87436769-87437525
  hypo

SEQ ID NO: 304591 - DNA, 31 bp, Homo sapiens; identical to SEQ ID NO: 254951
  chr5:88097575-88097606
  hypo

SEQ ID NO: 304592 - DNA, 36 bp, Homo sapiens; identical to SEQ ID NO: 254952
  chr5:88139904-88139940
  hypo

SEQ ID NO: 304593 - DNA, 38 bp, Homo sapiens; identical to SEQ ID NO: 254953
  chr5:88161980-88162018
  hypo

SEQ ID NO: 304594 - DNA, 264 bp, Homo sapiens; identical to SEQ ID NO: 254954
  chr5:88233030-88233294
  hypo

SEQ ID NO: 304595 - DNA, 34 bp, Homo sapiens; identical to SEQ ID NO: 210242
  chr5:90257315-90257349
  hypo

SEQ ID NO: 304596 - DNA, 143 bp, Homo sapiens; identical to SEQ ID NO: 254956
  chr5:90670735-90670878
  hypo

SEQ ID NO: 304597 - DNA, 93 bp, Homo sapiens; identical to SEQ ID NO: 254957
  chr5:90672506-90672599
  hypo

SEQ ID NO: 304598 - DNA, 35 bp, Homo sapiens; identical to SEQ ID NO: 254958
  chr5:93032774-93032809
  hypo

SEQ ID NO: 304599 - DNA, 100 bp, Homo sapiens; identical to SEQ ID NO: 254959
  chr5:93076896-93076996
  hypo

SEQ ID NO: 304600 - DNA, 144 bp, Homo sapiens; identical to SEQ ID NO: 210243
  chr5:93077276-93077420
  hypo

SEQ ID NO: 304601 - DNA, 157 bp, Homo sapiens; identical to SEQ ID NO: 254961
  chr5:93143746-93143903
  hypo

SEQ ID NO: 304602 - DNA, 38 bp, Homo sapiens; identical to SEQ ID NO: 210244
  chr5:94762453-94762491
  hypo

SEQ ID NO: 304603 - DNA, 37 bp, Homo sapiens; identical to SEQ ID NO: 210245
  chr5:94762731-94762768
  hypo

SEQ ID NO: 304604 - DNA, 86 bp, Homo sapiens; identical to SEQ ID NO: 254964
  chr5:94776919-94777005
  hypo

SEQ ID NO: 304605 - DNA, 94 bp, Homo sapiens; identical to SEQ ID NO: 210246
  chr5:94981773-94981867
  hypo

SEQ ID NO: 304606 - DNA, 277 bp, Homo sapiens; identical to SEQ ID NO: 222646
  chr5:95066554-95066831
  hypo

SEQ ID NO: 304607 - DNA, 155 bp, Homo sapiens; identical to SEQ ID NO: 254967
  chr5:95213826-95213981
  hypo

SEQ ID NO: 304608 - DNA, 32 bp, Homo sapiens; identical to SEQ ID NO: 210247
  chr5:95290421-95290453
  hypo

SEQ ID NO: 304609 - DNA, 98 bp, Homo sapiens; identical to SEQ ID NO: 210248
  chr5:95515382-95515480
  hypo

SEQ ID NO: 304610 - DNA, 475 bp, Homo sapiens; identical to SEQ ID NO: 254970
  chr5:96111422-96111897
  hypo

SEQ ID NO: 304611 - DNA, 91 bp, Homo sapiens; identical to SEQ ID NO: 210250
  chr5:96114496-96114587
  hypo

SEQ ID NO: 304612 - DNA, 67 bp, Homo sapiens; identical to SEQ ID NO: 210251
  chr5:96114632-96114699
  hypo

SEQ ID NO: 304613 - DNA, 166 bp, Homo sapiens; identical to SEQ ID NO: 210252
  chr5:96121446-96121612
  hypo

SEQ ID NO: 304614 - DNA, 33 bp, Homo sapiens; identical to SEQ ID NO: 210253
  chr5:96173522-96173555
  hypo

SEQ ID NO: 304615 - DNA, 85 bp, Homo sapiens; identical to SEQ ID NO: 210254
  chr5:96362698-96362783
  hypo

SEQ ID NO: 304616 - DNA, 60 bp, Homo sapiens; identical to SEQ ID NO: 254975
  chr5:96378907-96378967
  hypo

SEQ ID NO: 304617 - DNA, 55 bp, Homo sapiens; identical to SEQ ID NO: 254976
  chr5:96397786-96397841
  hypo

SEQ ID NO: 304618 - DNA, 42 bp, Homo sapiens; identical to SEQ ID NO: 254977
  chr5:96742642-96742684
  hypo

SEQ ID NO: 304619 - DNA, 82 bp, Homo sapiens; identical to SEQ ID NO: 254978
  chr5:97912104-97912186
  hypo

SEQ ID NO: 304620 - DNA, 447 bp, Homo sapiens; identical to SEQ ID NO: 199958
  chr5:98109213-98109660
  hypo

SEQ ID NO: 304621 - DNA, 695 bp, Homo sapiens; identical to SEQ ID NO: 283177
  chr5:98109927-98110622
  hypo

SEQ ID NO: 304622 - DNA, 64 bp, Homo sapiens
  chr5:98200930-98200994
  hypo
aaaagtatgaatgccagtgtcgctggaaccaagtaagtcagagaagtggccggcaacgatggga

SEQ ID NO: 304623 - DNA, 132 bp, Homo sapiens; identical to SEQ ID NO: 210257
  chr5:98239920-98240052
  hypo

SEQ ID NO: 304624 - DNA, 76 bp, Homo sapiens; identical to SEQ ID NO: 210258
  chr5:98242969-98243045
  hypo

SEQ ID NO: 304625 - DNA, 39 bp, Homo sapiens; identical to SEQ ID NO: 254982
  chr5:100247924-100247963
  hypo

SEQ ID NO: 304626 - DNA, 518 bp, Homo sapiens; identical to SEQ ID NO: 222651
  chr5:102201407-102201925
  hypo

SEQ ID NO: 304627 - DNA, 80 bp, Homo sapiens; identical to SEQ ID NO: 254983
  chr5:103289777-103289857
  hypo

SEQ ID NO: 304628 - DNA, 298 bp, Homo sapiens; identical to SEQ ID NO: 199969
  chr5:107005685-107005983
  hypo

SEQ ID NO: 304629 - DNA, 449 bp, Homo sapiens; identical to SEQ ID NO: 199970
  chr5:107006260-107006709
  hypo

SEQ ID NO: 304630 - DNA, 102 bp, Homo sapiens; identical to SEQ ID NO: 199971
  chr5:107007963-107008065
  hypo

SEQ ID NO: 304631 - DNA, 206 bp, Homo sapiens; identical to SEQ ID NO: 199973
  chr5:107359033-107359239
  hypo

SEQ ID NO: 304632 - DNA, 343 bp, Homo sapiens; identical to SEQ ID NO: 254984
  chr5:107703569-107703912
  hypo

SEQ ID NO: 304633 - DNA, 215 bp, Homo sapiens; identical to SEQ ID NO: 254985
  chr5:108586386-108586601
  hypo

SEQ ID NO: 304634 - DNA, 38 bp, Homo sapiens; identical to SEQ ID NO: 210265
  chr5:108730038-108730076
  hypo

SEQ ID NO: 304635 - DNA, 43 bp, Homo sapiens; identical to SEQ ID NO: 254987
  chr5:109024574-109024617
  hypo

SEQ ID NO: 304636 - DNA, 332 bp, Homo sapiens; identical to SEQ ID NO: 283195
  chr5:109024677-109025009
  hypo

SEQ ID NO: 304637 - DNA, 41 bp, Homo sapiens; identical to SEQ ID NO: 254988
  chr5:109032071-109032112
  hypo

SEQ ID NO: 304638 - DNA, 42 bp, Homo sapiens; identical to SEQ ID NO: 254989
  chr5:109040408-109040450
  hypo

SEQ ID NO: 304639 - DNA, 289 bp, Homo sapiens; identical to SEQ ID NO: 210267
  chr5:109162076-109162365
  hypo

SEQ ID NO: 304640 - DNA, 1028 bp, Homo sapiens; identical to SEQ ID NO: 111805
  chr5:110074272-110075300
  hypo

SEQ ID NO: 304641 - DNA, 1030 bp, Homo sapiens; identical to SEQ ID NO: 199976
  chr5:110847625-110848655
  hypo

SEQ ID NO: 304642 - DNA, 122 bp, Homo sapiens; identical to SEQ ID NO: 210270
  chr5:111065740-111065862
  hypo

SEQ ID NO: 304643 - DNA, 78 bp, Homo sapiens; identical to SEQ ID NO: 283200
  chr5:111093930-111094008
  hypo

SEQ ID NO: 304644 - DNA, 123 bp, Homo sapiens; identical to SEQ ID NO: 254992
  chr5:111675709-111675832
  hypo

SEQ ID NO: 304645 - DNA, 226 bp, Homo sapiens; identical to SEQ ID NO: 283217
  chr5:114506295-114506521
  hypo

SEQ ID NO: 304646 - DNA, 35 bp, Homo sapiens; identical to SEQ ID NO: 283218
  chr5:114506551-114506586
  hypo

SEQ ID NO: 304647 - DNA, 180 bp, Homo sapiens; identical to SEQ ID NO: 283224
  chr5:114938164-114938344
  hypo

SEQ ID NO: 304648 - DNA, 241 bp, Homo sapiens; identical to SEQ ID NO: 210272
  chr5:115570379-115570620
  hypo

SEQ ID NO: 304649 - DNA, 100 bp, Homo sapiens; identical to SEQ ID NO: 254994
  chr5:115717687-115717787
  hypo

SEQ ID NO: 304650 - DNA, 559 bp, Homo sapiens; identical to SEQ ID NO: 254995
  chr5:115783167-115783726
  hypo

SEQ ID NO: 304651 - DNA, 61 bp, Homo sapiens; identical to SEQ ID NO: 254996
  chr5:115824596-115824657
  hypo

SEQ ID NO: 304652 - DNA, 38 bp, Homo sapiens; identical to SEQ ID NO: 254997
  chr5:116177882-116177920
  hypo

SEQ ID NO: 304653 - DNA, 33 bp, Homo sapiens; identical to SEQ ID NO: 254998
  chr5:116238695-116238728
  hypo

SEQ ID NO: 304654 - DNA, 156 bp, Homo sapiens; identical to SEQ ID NO: 210274
  chr5:118309319-118309475
  hypo

SEQ ID NO: 304655 - DNA, 35 bp, Homo sapiens; identical to SEQ ID NO: 210275
  chr5:118461528-118461563
  hypo

SEQ ID NO: 304656 - DNA, 34 bp, Homo sapiens; identical to SEQ ID NO: 210276
  chr5:118717629-118717663
  hypo

SEQ ID NO: 304657 - DNA, 41 bp, Homo sapiens; identical to SEQ ID NO: 255002
  chr5:119517817-119517858
  hypo

SEQ ID NO: 304658 - DNA, 131 bp, Homo sapiens; identical to SEQ ID NO: 255003
  chr5:121187431-121187562
  hypo

SEQ ID NO: 304659 - DNA, 149 bp, Homo sapiens; identical to SEQ ID NO: 210277
  chr5:121187995-121188144
  hypo

SEQ ID NO: 304660 - DNA, 165 bp, Homo sapiens; identical to SEQ ID NO: 255005
  chr5:121874457-121874622
  hypo

SEQ ID NO: 304661 - DNA, 203 bp, Homo sapiens; identical to SEQ ID NO: 255006
  chr5:121906794-121906997
  hypo

SEQ ID NO: 304662 - DNA, 41 bp, Homo sapiens; identical to SEQ ID NO: 255007
  chr5:122150760-122150801
  hypo

SEQ ID NO: 304663 - DNA, 54 bp, Homo sapiens; identical to SEQ ID NO: 210278
  chr5:122152701-122152755
  hypo

SEQ ID NO: 304664 - DNA, 43 bp, Homo sapiens; identical to SEQ ID NO: 255009
  chr5:122179759-122179802
  hypo

SEQ ID NO: 304665 - DNA, 38 bp, Homo sapiens; identical to SEQ ID NO: 255010
  chr5:122189087-122189125
  hypo

SEQ ID NO: 304666 - DNA, 31 bp, Homo sapiens; identical to SEQ ID NO: 255011
  chr5:122906339-122906370
  hypo

SEQ ID NO: 304667 - DNA, 88 bp, Homo sapiens; identical to SEQ ID NO: 255012
  chr5:123929400-123929488
  hypo

SEQ ID NO: 304668 - DNA, 298 bp, Homo sapiens; identical to SEQ ID NO: 222668
  chr5:123987437-123987735
  hypo

SEQ ID NO: 304669 - DNA, 57 bp, Homo sapiens; identical to SEQ ID NO: 200011
  chr5:124084138-124084195
  hypo

SEQ ID NO: 304670 - DNA, 74 bp, Homo sapiens; identical to SEQ ID NO: 200012
  chr5:124084302-124084376
  hypo

SEQ ID NO: 304671 - DNA, 125 bp, Homo sapiens; identical to SEQ ID NO: 200013
  chr5:124084646-124084771
  hypo

SEQ ID NO: 304672 - DNA, 85 bp, Homo sapiens; identical to SEQ ID NO: 200014
  chr5:124084977-124085062
  hypo

SEQ ID NO: 304673 - DNA, 39 bp, Homo sapiens; identical to SEQ ID NO: 210283
  chr5:125911666-125911705
  hypo

SEQ ID NO: 304674 - DNA, 200 bp, Homo sapiens; identical to SEQ ID NO: 210284
  chr5:126073559-126073759
  hypo

SEQ ID NO: 304675 - DNA, 152 bp, Homo sapiens; identical to SEQ ID NO: 210285
  chr5:126193333-126193485
  hypo

SEQ ID NO: 304676 - DNA, 264 bp, Homo sapiens; identical to SEQ ID NO: 255017
  chr5:126213744-126214008
  hypo

SEQ ID NO: 304677 - DNA, 303 bp, Homo sapiens; identical to SEQ ID NO: 210286
  chr5:126250500-126250803
  hypo

SEQ ID NO: 304678 - DNA, 40 bp, Homo sapiens; identical to SEQ ID NO: 255019
  chr5:126479575-126479615
  hypo

SEQ ID NO: 304679 - DNA, 42 bp, Homo sapiens; identical to SEQ ID NO: 255020
  chr5:127808517-127808559
  hypo

SEQ ID NO: 304680 - DNA, 179 bp, Homo sapiens; identical to SEQ ID NO: 283275
  chr5:129239558-129239737
  hypo

SEQ ID NO: 304681 - DNA, 34 bp, Homo sapiens; identical to SEQ ID NO: 200020
  chr5:129240901-129240935
  hypo

SEQ ID NO: 304682 - DNA, 143 bp, Homo sapiens; identical to SEQ ID NO: 200021
  chr5:129240962-129241105
  hypo

SEQ ID NO: 304683 - DNA, 273 bp, Homo sapiens; identical to SEQ ID NO: 200022
  chr5:129241140-129241413
  hypo

SEQ ID NO: 304684 - DNA, 298 bp, Homo sapiens; identical to SEQ ID NO: 255021
  chr5:130330814-130331112
  hypo

SEQ ID NO: 304685 - DNA, 422 bp, Homo sapiens; identical to SEQ ID NO: 255022
  chr5:130331393-130331815
  hypo

SEQ ID NO: 304686 - DNA, 97 bp, Homo sapiens; identical to SEQ ID NO: 210290
  chr5:130636510-130636607
  hypo

SEQ ID NO: 304687 - DNA, 65 bp, Homo sapiens; identical to SEQ ID NO: 210291
  chr5:130661706-130661771
  hypo

SEQ ID NO: 304688 - DNA, 42 bp, Homo sapiens; identical to SEQ ID NO: 210292
  chr5:130723958-130724000
  hypo

SEQ ID NO: 304689 - DNA, 43 bp, Homo sapiens; identical to SEQ ID NO: 255026
  chr5:130951290-130951333
  hypo

SEQ ID NO: 304690 - DNA, 55 bp, Homo sapiens; identical to SEQ ID NO: 200023
  chr5:130970375-130970430
  hypo

SEQ ID NO: 304691 - DNA, 189 bp, Homo sapiens; identical to SEQ ID NO: 210294
  chr5:131037383-131037572
  hypo

SEQ ID NO: 304692 - DNA, 197 bp, Homo sapiens; identical to SEQ ID NO: 200025
  chr5:131133198-131133395
  hypo

SEQ ID NO: 304693 - DNA, 40 bp, Homo sapiens; identical to SEQ ID NO: 255028
  chr5:131133935-131133975
  hypo

SEQ ID NO: 304694 - DNA, 55 bp, Homo sapiens; identical to SEQ ID NO: 255029
  chr5:131410606-131410661
  hypo

SEQ ID NO: 304695 - DNA, 82 bp, Homo sapiens; identical to SEQ ID NO: 255030
  chr5:131517613-131517695
  hypo

SEQ ID NO: 304696 - DNA, 278 bp, Homo sapiens; identical to SEQ ID NO: 41939
  chr5:131563558-131563836
  hypo

SEQ ID NO: 304697 - DNA, 431 bp, Homo sapiens
  chr5:131607799-131608230
  hypo
cgtggttacttctttctggacgagcggctctactgtgagagccacgccaaggcgcgcgtgaagccgcccgagggctacgacgtggtggcggtgtaccccaatgccaaggtggaactcgtctgagctgggaccctgctcccacgcctgcttcttaaggtccctgctcggccggtgtaaatatgtttcaccctgtccctctaataaagctcctctgctccaccttgaacctgtcacctggcctgccaccctcctgcgcaggccatgcatggctcccgagtacagtagtatctgcttaggtgccaggcatgtcctaggctctgggtgcagtagtgagcaggacgggtaccatgctgccctgaagggggccacagcctgggtggaaggcagacctgaatcacaacgggccagctctagtaatacgaaggtgaggt

SEQ ID NO: 304698 - DNA, 57 bp, Homo sapiens; identical to SEQ ID NO: 210298
  chr5:131608260-131608317
  hypo

SEQ ID NO: 304699 - DNA, 108 bp, Homo sapiens; identical to SEQ ID NO: 255032
  chr5:131608347-131608455
  hypo

SEQ ID NO: 304700 - DNA, 131 bp, Homo sapiens; identical to SEQ ID NO: 210300
  chr5:131609888-131610019
  hypo

SEQ ID NO: 304701 - DNA, 60 bp, Homo sapiens; identical to SEQ ID NO: 255034
  chr5:131628975-131629035
  hypo

SEQ ID NO: 304702 - DNA, 52 bp, Homo sapiens; identical to SEQ ID NO: 255035
  chr5:131629083-131629135
  hypo

SEQ ID NO: 304703 - DNA, 136 bp, Homo sapiens; identical to SEQ ID NO: 255036
  chr5:131701219-131701355
  hypo

SEQ ID NO: 304704 - DNA, 179 bp, Homo sapiens; identical to SEQ ID NO: 255037
  chr5:131712816-131712995
  hypo

SEQ ID NO: 304705 - DNA, 131 bp, Homo sapiens; identical to SEQ ID NO: 210301
  chr5:131725264-131725395
  hypo

SEQ ID NO: 304706 - DNA, 56 bp, Homo sapiens
  chr5:131787118-131787174
  hypo
cacctcggcggtaacgctagagccccaccaagcatgtgtttgtcctcccatcccct

SEQ ID NO: 304707 - DNA, 91 bp, Homo sapiens
  chr5:131787204-131787295
  hypo
taggagatcttgtaacccaaggctcatctgtcccagcttctgatgacaataaatgtgtgtagcctcttttagcggccgagacagcctgact

SEQ ID NO: 304708 - DNA, 238 bp, Homo sapiens; identical to SEQ ID NO: 200029
  chr5:131831522-131831760
  hypo

SEQ ID NO: 304709 - DNA, 37 bp, Homo sapiens; identical to SEQ ID NO: 255040
  chr5:131859639-131859676
  hypo

SEQ ID NO: 304710 - DNA, 101 bp, Homo sapiens; identical to SEQ ID NO: 210303
  chr5:131982464-131982565
  hypo

SEQ ID NO: 304711 - DNA, 45 bp, Homo sapiens; identical to SEQ ID NO: 255042
  chr5:131991177-131991222
  hypo

SEQ ID NO: 304712 - DNA, 159 bp, Homo sapiens; identical to SEQ ID NO: 210304
  chr5:132001670-132001829
  hypo

SEQ ID NO: 304713 - DNA, 316 bp, Homo sapiens; identical to SEQ ID NO: 255044
  chr5:132015482-132015798
  hypo

SEQ ID NO: 304714 - DNA, 40 bp, Homo sapiens
  chr5:132083826-132083866
  hypo
aggaactcagcctacgacgaaaagtgggcgcgaggggtgg

SEQ ID NO: 304715 - DNA, 109 bp, Homo sapiens
  chr5:132083964-132084073
  hypo
aggctcctgctgctgggggaccaggagtggccgctagcgaccttcctcgccccacctgctcttcttcctagcaggatgaaatctgcgacgccttcgaggaagtcgtgct

SEQ ID NO: 304716 - DNA, 219 bp, Homo sapiens; identical to SEQ ID NO: 255046
  chr5:132095767-132095986
  hypo

SEQ ID NO: 304717 - DNA, 68 bp, Homo sapiens; identical to SEQ ID NO: 210306
  chr5:132167162-132167230
  hypo

SEQ ID NO: 304718 - DNA, 160 bp, Homo sapiens; identical to SEQ ID NO: 255048
  chr5:132167447-132167607
  hypo

SEQ ID NO: 304719 - DNA, 38 bp, Homo sapiens; identical to SEQ ID NO: 210307
  chr5:132267350-132267388
  hypo

SEQ ID NO: 304720 - DNA, 829 bp, Homo sapiens; identical to SEQ ID NO: 283297
  chr5:132386958-132387787
  hypo

SEQ ID NO: 304721 - DNA, 42 bp, Homo sapiens; identical to SEQ ID NO: 255050
  chr5:132585271-132585313
  hypo

SEQ ID NO: 304722 - DNA, 281 bp, Homo sapiens; identical to SEQ ID NO: 255051
  chr5:132607918-132608199
  hypo

SEQ ID NO: 304723 - DNA, 206 bp, Homo sapiens; identical to SEQ ID NO: 255052
  chr5:132654500-132654706
  hypo

SEQ ID NO: 304724 - DNA, 197 bp, Homo sapiens; identical to SEQ ID NO: 255053
  chr5:132664450-132664647
  hypo

SEQ ID NO: 304725 - DNA, 92 bp, Homo sapiens; identical to SEQ ID NO: 210310
  chr5:133240405-133240497
  hypo

SEQ ID NO: 304726 - DNA, 42 bp, Homo sapiens; identical to SEQ ID NO: 255055
  chr5:133280965-133281007
  hypo

SEQ ID NO: 304727 - DNA, 190 bp, Homo sapiens; identical to SEQ ID NO: 255056
  chr5:133362904-133363094
  hypo

SEQ ID NO: 304728 - DNA, 100 bp, Homo sapiens; identical to SEQ ID NO: 255057
  chr5:133422878-133422978
  hypo

SEQ ID NO: 304729 - DNA, 549 bp, Homo sapiens; identical to SEQ ID NO: 283300
  chr5:133450702-133451251
  hypo

SEQ ID NO: 304730 - DNA, 198 bp, Homo sapiens; identical to SEQ ID NO: 210311
  chr5:133456100-133456298
  hypo

SEQ ID NO: 304731 - DNA, 90 bp, Homo sapiens; identical to SEQ ID NO: 210312
  chr5:133457288-133457378
  hypo

SEQ ID NO: 304732 - DNA, 141 bp, Homo sapiens; identical to SEQ ID NO: 255060
  chr5:133458996-133459137
  hypo

SEQ ID NO: 304733 - DNA, 207 bp, Homo sapiens; identical to SEQ ID NO: 210313
  chr5:133459375-133459582
  hypo

SEQ ID NO: 304734 - DNA, 77 bp, Homo sapiens; identical to SEQ ID NO: 210314
  chr5:133464194-133464271
  hypo

SEQ ID NO: 304735 - DNA, 207 bp, Homo sapiens; identical to SEQ ID NO: 210315
  chr5:133465710-133465917
  hypo

SEQ ID NO: 304736 - DNA, 110 bp, Homo sapiens; identical to SEQ ID NO: 210316
  chr5:133469215-133469325
  hypo

SEQ ID NO: 304737 - DNA, 379 bp, Homo sapiens; identical to SEQ ID NO: 255065
  chr5:133703366-133703745
  hypo

SEQ ID NO: 304738 - DNA, 32 bp, Homo sapiens; identical to SEQ ID NO: 255066
  chr5:133730848-133730880
  hypo

SEQ ID NO: 304739 - DNA, 240 bp, Homo sapiens; identical to SEQ ID NO: 255067
  chr5:133819200-133819440
  hypo

SEQ ID NO: 304740 - DNA, 266 bp, Homo sapiens; identical to SEQ ID NO: 255069
  chr5:133845348-133845614
  hypo

SEQ ID NO: 304741 - DNA, 902 bp, Homo sapiens; identical to SEQ ID NO: 200032
  chr5:133862723-133863625
  hypo

SEQ ID NO: 304742 - DNA, 61 bp, Homo sapiens; identical to SEQ ID NO: 255070
  chr5:133887785-133887846
  hypo

SEQ ID NO: 304743 - DNA, 318 bp, Homo sapiens; identical to SEQ ID NO: 210319
  chr5:133907414-133907732
  hypo

SEQ ID NO: 304744 - DNA, 135 bp, Homo sapiens; identical to SEQ ID NO: 255072
  chr5:133914459-133914594
  hypo

SEQ ID NO: 304745 - DNA, 47 bp, Homo sapiens; identical to SEQ ID NO: 255073
  chr5:134099605-134099652
  hypo

SEQ ID NO: 304746 - DNA, 91 bp, Homo sapiens; identical to SEQ ID NO: 255074
  chr5:134202026-134202117
  hypo

SEQ ID NO: 304747 - DNA, 60 bp, Homo sapiens
  chr5:134242242-134242302
  hypo
aagttgagtgcctactgtcacctaggcgtgtcttcaggcgtactctgccccaggtgctag

SEQ ID NO: 304748 - DNA, 146 bp, Homo sapiens; identical to SEQ ID NO: 255076
  chr5:134253080-134253226
  hypo

SEQ ID NO: 304749 - DNA, 39 bp, Homo sapiens; identical to SEQ ID NO: 210320
  chr5:134256617-134256656
  hypo

SEQ ID NO: 304750 - DNA, 85 bp, Homo sapiens; identical to SEQ ID NO: 255078
  chr5:134273246-134273331
  hypo

SEQ ID NO: 304751 - DNA, 76 bp, Homo sapiens; identical to SEQ ID NO: 255079
  chr5:134273877-134273953
  hypo

SEQ ID NO: 304752 - DNA, 157 bp, Homo sapiens; identical to SEQ ID NO: 210321
  chr5:134278932-134279089
  hypo

SEQ ID NO: 304753 - DNA, 166 bp, Homo sapiens; identical to SEQ ID NO: 210322
  chr5:134303558-134303724
  hypo

SEQ ID NO: 304754 - DNA, 185 bp, Homo sapiens; identical to SEQ ID NO: 200037
  chr5:134370268-134370453
  hypo

SEQ ID NO: 304755 - DNA, 36 bp, Homo sapiens; identical to SEQ ID NO: 112022
  chr5:134370508-134370544
  hypo

SEQ ID NO: 304756 - DNA, 81 bp, Homo sapiens; identical to SEQ ID NO: 255082
  chr5:134411890-134411971
  hypo

SEQ ID NO: 304757 - DNA, 223 bp, Homo sapiens; identical to SEQ ID NO: 210324
  chr5:134436703-134436926
  hypo

SEQ ID NO: 304758 - DNA, 186 bp, Homo sapiens; identical to SEQ ID NO: 210325
  chr5:134453700-134453886
  hypo

SEQ ID NO: 304759 - DNA, 42 bp, Homo sapiens; identical to SEQ ID NO: 255085
  chr5:134462416-134462458
  hypo

SEQ ID NO: 304760 - DNA, 219 bp, Homo sapiens; identical to SEQ ID NO: 200039
  chr5:134463605-134463824
  hypo

SEQ ID NO: 304761 - DNA, 154 bp, Homo sapiens; identical to SEQ ID NO: 210327
  chr5:134513710-134513864
  hypo

SEQ ID NO: 304762 - DNA, 203 bp, Homo sapiens; identical to SEQ ID NO: 255087
  chr5:134524776-134524979
  hypo

SEQ ID NO: 304763 - DNA, 298 bp, Homo sapiens; identical to SEQ ID NO: 255088
  chr5:134579600-134579898
  hypo

SEQ ID NO: 304764 - DNA, 84 bp, Homo sapiens; identical to SEQ ID NO: 210328
  chr5:134582958-134583042
  hypo

SEQ ID NO: 304765 - DNA, 76 bp, Homo sapiens; identical to SEQ ID NO: 210329
  chr5:134583162-134583238
  hypo

SEQ ID NO: 304766 - DNA, 204 bp, Homo sapiens; identical to SEQ ID NO: 255090
  chr5:134585645-134585849
  hypo

SEQ ID NO: 304767 - DNA, 151 bp, Homo sapiens; identical to SEQ ID NO: 210330
  chr5:134608288-134608439
  hypo

SEQ ID NO: 304768 - DNA, 152 bp, Homo sapiens; identical to SEQ ID NO: 255093
  chr5:134666319-134666471
  hypo

SEQ ID NO: 304769 - DNA, 38 bp, Homo sapiens; identical to SEQ ID NO: 210331
  chr5:134673488-134673526
  hypo

SEQ ID NO: 304770 - DNA, 432 bp, Homo sapiens; identical to SEQ ID NO: 210332
  chr5:135091170-135091602
  hypo

SEQ ID NO: 304771 - DNA, 237 bp, Homo sapiens; identical to SEQ ID NO: 255096
  chr5:135120902-135121139
  hypo

SEQ ID NO: 304772 - DNA, 149 bp, Homo sapiens; identical to SEQ ID NO: 255097
  chr5:135188296-135188445
  hypo

SEQ ID NO: 304773 - DNA, 230 bp, Homo sapiens; identical to SEQ ID NO: 200047
  chr5:135468336-135468566
  hypo

SEQ ID NO: 304774 - DNA, 749 bp, Homo sapiens; identical to SEQ ID NO: 210334
  chr5:135692313-135693062
  hypo

SEQ ID NO: 304775 - DNA, 34 bp, Homo sapiens; identical to SEQ ID NO: 210335
  chr5:135989645-135989679
  hypo

SEQ ID NO: 304776 - DNA, 131 bp, Homo sapiens; identical to SEQ ID NO: 210336
  chr5:136983257-136983388
  hypo

SEQ ID NO: 304777 - DNA, 35 bp, Homo sapiens; identical to SEQ ID NO: 210337
  chr5:137470416-137470451
  hypo

SEQ ID NO: 304778 - DNA, 81 bp, Homo sapiens; identical to SEQ ID NO: 210338
  chr5:137529621-137529702
  hypo

SEQ ID NO: 304779 - DNA, 220 bp, Homo sapiens; identical to SEQ ID NO: 255103
  chr5:137721787-137722007
  hypo

SEQ ID NO: 304780 - DNA, 77 bp, Homo sapiens; identical to SEQ ID NO: 255104
  chr5:137727077-137727154
  hypo

SEQ ID NO: 304781 - DNA, 285 bp, Homo sapiens; identical to SEQ ID NO: 70203
  chr5:137727661-137727946
  hypo

SEQ ID NO: 304782 - DNA, 161 bp, Homo sapiens; identical to SEQ ID NO: 283341
  chr5:137774493-137774654
  hypo

SEQ ID NO: 304783 - DNA, 192 bp, Homo sapiens; identical to SEQ ID NO: 222693
  chr5:137774864-137775056
  hypo

SEQ ID NO: 304784 - DNA, 141 bp, Homo sapiens; identical to SEQ ID NO: 255106
  chr5:137791022-137791163
  hypo

SEQ ID NO: 304785 - DNA, 95 bp, Homo sapiens; identical to SEQ ID NO: 222694
  chr5:137801267-137801362
  hypo

SEQ ID NO: 304786 - DNA, 134 bp, Homo sapiens; identical to SEQ ID NO: 255107
  chr5:137802660-137802794
  hypo

SEQ ID NO: 304787 - DNA, 466 bp, Homo sapiens; identical to SEQ ID NO: 210339
  chr5:137803075-137803541
  hypo

SEQ ID NO: 304788 - DNA, 42 bp, Homo sapiens; identical to SEQ ID NO: 255109
  chr5:137824665-137824707
  hypo

SEQ ID NO: 304789 - DNA, 96 bp, Homo sapiens; identical to SEQ ID NO: 210340
  chr5:137865653-137865749
  hypo

SEQ ID NO: 304790 - DNA, 216 bp, Homo sapiens; identical to SEQ ID NO: 255111
  chr5:137895657-137895873
  hypo

SEQ ID NO: 304791 - DNA, 64 bp, Homo sapiens; identical to SEQ ID NO: 210341
  chr5:137911812-137911876
  hypo

SEQ ID NO: 304792 - DNA, 119 bp, Homo sapiens; identical to SEQ ID NO: 210342
  chr5:137912556-137912675
  hypo

SEQ ID NO: 304793 - DNA, 101 bp, Homo sapiens; identical to SEQ ID NO: 210343
  chr5:137945777-137945878
  hypo

SEQ ID NO: 304794 - DNA, 81 bp, Homo sapiens; identical to SEQ ID NO: 200054
  chr5:138088596-138088677
  hypo

SEQ ID NO: 304795 - DNA, 302 bp, Homo sapiens; identical to SEQ ID NO: 283348
  chr5:138089642-138089944
  hypo

SEQ ID NO: 304796 - DNA, 35 bp, Homo sapiens; identical to SEQ ID NO: 255115
  chr5:138101350-138101385
  hypo

SEQ ID NO: 304797 - DNA, 92 bp, Homo sapiens; identical to SEQ ID NO: 210346
  chr5:138119912-138120004
  hypo

SEQ ID NO: 304798 - DNA, 33 bp, Homo sapiens; identical to SEQ ID NO: 210347
  chr5:138179955-138179988
  hypo

SEQ ID NO: 304799 - DNA, 92 bp, Homo sapiens; identical to SEQ ID NO: 255118
  chr5:138268302-138268394
  hypo

SEQ ID NO: 304800 - DNA, 61 bp, Homo sapiens
  chr5:138273756-138273817
  hypo
attgctgcatctccagctgcacagctgaagaagtgactaggggaggtgaagtcacactgcg

SEQ ID NO: 304801 - DNA, 390 bp, Homo sapiens
  chr5:138273854-138274244
  hypo
cttcctccagggcccccagctttgggccatccctcctggaccctctgagtaatggtgatgccagtggccactccctccctctcacaccttgtcgattcccacggttccctgcccgtcaccaatgcgtgtccctcgtctcccttaccagctccttctcctcgtggcccctgacattgaggtgctccagggctcccatctggagcctcctctccatgttcagtgacacccagcaggggcttgctggtcaatgttgagccaccggctctctagggccaggccagggaggatgcgaacagatgcacatctgtgcatttagaaaacacgggaccgctataaaggaattgcagcacaccattcacaaaaggagacgtacaggactctaactgggaa

SEQ ID NO: 304802 - DNA, 91 bp, Homo sapiens; identical to SEQ ID NO: 255120
  chr5:138280519-138280610
  hypo

SEQ ID NO: 304803 - DNA, 292 bp, Homo sapiens; identical to SEQ ID NO: 255121
  chr5:138280640-138280932
  hypo

SEQ ID NO: 304804 - DNA, 77 bp, Homo sapiens; identical to SEQ ID NO: 255122
  chr5:138286151-138286228
  hypo

SEQ ID NO: 304805 - DNA, 67 bp, Homo sapiens; identical to SEQ ID NO: 255123
  chr5:138290872-138290939
  hypo

SEQ ID NO: 304806 - DNA, 251 bp, Homo sapiens; identical to SEQ ID NO: 255124
  chr5:138441364-138441615
  hypo

SEQ ID NO: 304807 - DNA, 120 bp, Homo sapiens; identical to SEQ ID NO: 255125
  chr5:138627523-138627643
  hypo

SEQ ID NO: 304808 - DNA, 31 bp, Homo sapiens; identical to SEQ ID NO: 210349
  chr5:138659303-138659334
  hypo

SEQ ID NO: 304809 - DNA, 152 bp, Homo sapiens; identical to SEQ ID NO: 255127
  chr5:138668934-138669086
  hypo

SEQ ID NO: 304810 - DNA, 43 bp, Homo sapiens; identical to SEQ ID NO: 255129
  chr5:138741278-138741321
  hypo

SEQ ID NO: 304811 - DNA, 55 bp, Homo sapiens; identical to SEQ ID NO: 210350
  chr5:138928998-138929053
  hypo

SEQ ID NO: 304812 - DNA, 33 bp, Homo sapiens; identical to SEQ ID NO: 210351
  chr5:138945975-138946008
  hypo

SEQ ID NO: 304813 - DNA, 120 bp, Homo sapiens; identical to SEQ ID NO: 255132
  chr5:138959965-138960085
  hypo

SEQ ID NO: 304814 - DNA, 1166 bp, Homo sapiens; identical to SEQ ID NO: 283354
  chr5:139016856-139018022
  hypo

SEQ ID NO: 304815 - DNA, 64 bp, Homo sapiens; identical to SEQ ID NO: 200058
  chr5:139039951-139040015
  hypo

SEQ ID NO: 304816 - DNA, 51 bp, Homo sapiens; identical to SEQ ID NO: 210354
  chr5:139060689-139060740
  hypo

SEQ ID NO: 304817 - DNA, 498 bp, Homo sapiens; identical to SEQ ID NO: 222699
  chr5:139088832-139089330
  hypo

SEQ ID NO: 304818 - DNA, 144 bp, Homo sapiens; identical to SEQ ID NO: 283359
  chr5:139089534-139089678
  hypo

SEQ ID NO: 304819 - DNA, 33 bp, Homo sapiens; identical to SEQ ID NO: 255134
  chr5:139091838-139091871
  hypo

SEQ ID NO: 304820 - DNA, 227 bp, Homo sapiens; identical to SEQ ID NO: 255135
  chr5:139113841-139114068
  hypo

SEQ ID NO: 304821 - DNA, 235 bp, Homo sapiens; identical to SEQ ID NO: 283363
  chr5:139143822-139144057
  hypo

SEQ ID NO: 304822 - DNA, 91 bp, Homo sapiens; identical to SEQ ID NO: 283367
  chr5:139283459-139283550
  hypo

SEQ ID NO: 304823 - DNA, 122 bp, Homo sapiens; identical to SEQ ID NO: 200065
  chr5:139284463-139284585
  hypo

SEQ ID NO: 304824 - DNA, 291 bp, Homo sapiens; identical to SEQ ID NO: 283373
  chr5:139554293-139554584
  hypo

SEQ ID NO: 304825 - DNA, 105 bp, Homo sapiens; identical to SEQ ID NO: 210358
  chr5:139632450-139632555
  hypo

SEQ ID NO: 304826 - DNA, 164 bp, Homo sapiens; identical to SEQ ID NO: 255138
  chr5:139633303-139633467
  hypo

SEQ ID NO: 304827 - DNA, 38 bp, Homo sapiens; identical to SEQ ID NO: 255139
  chr5:139640453-139640491
  hypo

SEQ ID NO: 304828 - DNA, 63 bp, Homo sapiens; identical to SEQ ID NO: 222706
  chr5:139725675-139725738
  hypo

SEQ ID NO: 304829 - DNA, 151 bp, Homo sapiens; identical to SEQ ID NO: 200068
  chr5:139725997-139726148
  hypo

SEQ ID NO: 304830 - DNA, 274 bp, Homo sapiens; identical to SEQ ID NO: 283377
  chr5:139726430-139726704
  hypo

SEQ ID NO: 304831 - DNA, 32 bp, Homo sapiens; identical to SEQ ID NO: 255140
  chr5:139945503-139945535
  hypo

SEQ ID NO: 304832 - DNA, 120 bp, Homo sapiens; identical to SEQ ID NO: 255141
  chr5:140045562-140045682
  hypo

SEQ ID NO: 304833 - DNA, 32 bp, Homo sapiens; identical to SEQ ID NO: 210360
  chr5:140088250-140088282
  hypo

SEQ ID NO: 304834 - DNA, 32 bp, Homo sapiens; identical to SEQ ID NO: 210361
  chr5:140088522-140088554
  hypo

SEQ ID NO: 304835 - DNA, 168 bp, Homo sapiens; identical to SEQ ID NO: 255144
  chr5:140905568-140905736
  hypo

SEQ ID NO: 304836 - DNA, 34 bp, Homo sapiens; identical to SEQ ID NO: 210362
  chr5:141002378-141002412
  hypo

SEQ ID NO: 304837 - DNA, 60 bp, Homo sapiens; identical to SEQ ID NO: 200076
  chr5:141030747-141030807
  hypo

SEQ ID NO: 304838 - DNA, 216 bp, Homo sapiens; identical to SEQ ID NO: 200077
  chr5:141030884-141031100
  hypo

SEQ ID NO: 304839 - DNA, 80 bp, Homo sapiens; identical to SEQ ID NO: 200078
  chr5:141031150-141031230
  hypo

SEQ ID NO: 304840 - DNA, 144 bp, Homo sapiens; identical to SEQ ID NO: 210366
  chr5:141051473-141051617
  hypo

SEQ ID NO: 304841 - DNA, 93 bp, Homo sapiens; identical to SEQ ID NO: 210367
  chr5:141052407-141052500
  hypo

SEQ ID NO: 304842 - DNA, 68 bp, Homo sapiens; identical to SEQ ID NO: 255148
  chr5:141072799-141072867
  hypo

SEQ ID NO: 304843 - DNA, 265 bp, Homo sapiens; identical to SEQ ID NO: 255149
  chr5:141244706-141244971
  hypo

SEQ ID NO: 304844 - DNA, 723 bp, Homo sapiens; identical to SEQ ID NO: 255150
  chr5:141248096-141248819
  hypo

SEQ ID NO: 304845 - DNA, 881 bp, Homo sapiens; identical to SEQ ID NO: 283402
  chr5:141257149-141258030
  hypo

SEQ ID NO: 304846 - DNA, 58 bp, Homo sapiens; identical to SEQ ID NO: 255151
  chr5:141295480-141295538
  hypo

SEQ ID NO: 304847 - DNA, 85 bp, Homo sapiens; identical to SEQ ID NO: 255152
  chr5:141355858-141355943
  hypo

SEQ ID NO: 304848 - DNA, 32 bp, Homo sapiens; identical to SEQ ID NO: 255153
  chr5:141468242-141468274
  hypo

SEQ ID NO: 304849 - DNA, 41 bp, Homo sapiens; identical to SEQ ID NO: 255154
  chr5:141581708-141581749
  hypo

SEQ ID NO: 304850 - DNA, 31 bp, Homo sapiens; identical to SEQ ID NO: 255155
  chr5:141610129-141610160
  hypo

SEQ ID NO: 304851 - DNA, 244 bp, Homo sapiens; identical to SEQ ID NO: 255156
  chr5:141663282-141663526
  hypo

SEQ ID NO: 304852 - DNA, 34 bp, Homo sapiens; identical to SEQ ID NO: 210370
  chr5:141674168-141674202
  hypo

SEQ ID NO: 304853 - DNA, 34 bp, Homo sapiens; identical to SEQ ID NO: 210371
  chr5:141674502-141674536
  hypo

SEQ ID NO: 304854 - DNA, 265 bp, Homo sapiens; identical to SEQ ID NO: 200082
  chr5:141704448-141704713
  hypo

SEQ ID NO: 304855 - DNA, 341 bp, Homo sapiens; identical to SEQ ID NO: 200084
  chr5:141736299-141736640
  hypo

SEQ ID NO: 304856 - DNA, 317 bp, Homo sapiens; identical to SEQ ID NO: 255159
  chr5:141788585-141788902
  hypo

SEQ ID NO: 304857 - DNA, 33 bp, Homo sapiens; identical to SEQ ID NO: 210375
  chr5:141803864-141803897
  hypo

SEQ ID NO: 304858 - DNA, 150 bp, Homo sapiens; identical to SEQ ID NO: 210376
  chr5:141850813-141850963
  hypo

SEQ ID NO: 304859 - DNA, 37 bp, Homo sapiens; identical to SEQ ID NO: 255162
  chr5:141903297-141903334
  hypo

SEQ ID NO: 304860 - DNA, 147 bp, Homo sapiens; identical to SEQ ID NO: 255163
  chr5:142170486-142170633
  hypo

SEQ ID NO: 304861 - DNA, 171 bp, Homo sapiens; identical to SEQ ID NO: 255164
  chr5:142239513-142239684
  hypo

SEQ ID NO: 304862 - DNA, 57 bp, Homo sapiens; identical to SEQ ID NO: 255165
  chr5:142259164-142259221
  hypo

SEQ ID NO: 304863 - DNA, 216 bp, Homo sapiens; identical to SEQ ID NO: 255166
  chr5:142552917-142553133
  hypo

SEQ ID NO: 304864 - DNA, 188 bp, Homo sapiens; identical to SEQ ID NO: 255167
  chr5:142623955-142624143
  hypo

SEQ ID NO: 304865 - DNA, 45 bp, Homo sapiens; identical to SEQ ID NO: 210377
  chr5:142625530-142625575
  hypo

SEQ ID NO: 304866 - DNA, 624 bp, Homo sapiens; identical to SEQ ID NO: 283411
  chr5:142781875-142782499
  hypo

SEQ ID NO: 304867 - DNA, 124 bp, Homo sapiens; identical to SEQ ID NO: 283412
  chr5:142782625-142782749
  hypo

SEQ ID NO: 304868 - DNA, 409 bp, Homo sapiens; identical to SEQ ID NO: 112222
  chr5:142782794-142783203
  hypo

SEQ ID NO: 304869 - DNA, 1068 bp, Homo sapiens; identical to SEQ ID NO: 283414
  chr5:142783607-142784675
  hypo

SEQ ID NO: 304870 - DNA, 39 bp, Homo sapiens; identical to SEQ ID NO: 255169
  chr5:143182536-143182575
  hypo

SEQ ID NO: 304871 - DNA, 158 bp, Homo sapiens; identical to SEQ ID NO: 210380
  chr5:145379611-145379769
  hypo

SEQ ID NO: 304872 - DNA, 350 bp, Homo sapiens; identical to SEQ ID NO: 283421
  chr5:145718045-145718395
  hypo

SEQ ID NO: 304873 - DNA, 301 bp, Homo sapiens; identical to SEQ ID NO: 283422
  chr5:145718501-145718802
  hypo

SEQ ID NO: 304874 - DNA, 229 bp, Homo sapiens; identical to SEQ ID NO: 255171
  chr5:145887322-145887551
  hypo

SEQ ID NO: 304875 - DNA, 120 bp, Homo sapiens; identical to SEQ ID NO: 255172
  chr5:146085994-146086114
  hypo

SEQ ID NO: 304876 - DNA, 42 bp, Homo sapiens; identical to SEQ ID NO: 255173
  chr5:146685046-146685088
  hypo

SEQ ID NO: 304877 - DNA, 84 bp, Homo sapiens; identical to SEQ ID NO: 255174
  chr5:147015583-147015667
  hypo

SEQ ID NO: 304878 - DNA, 346 bp, Homo sapiens; identical to SEQ ID NO: 255175
  chr5:147040615-147040961
  hypo

SEQ ID NO: 304879 - DNA, 31 bp, Homo sapiens; identical to SEQ ID NO: 210384
  chr5:147055597-147055628
  hypo

SEQ ID NO: 304880 - DNA, 43 bp, Homo sapiens; identical to SEQ ID NO: 210385
  chr5:147274326-147274369
  hypo

SEQ ID NO: 304881 - DNA, 39 bp, Homo sapiens; identical to SEQ ID NO: 255178
  chr5:147439593-147439632
  hypo

SEQ ID NO: 304882 - DNA, 98 bp, Homo sapiens; identical to SEQ ID NO: 255179
  chr5:147439812-147439910
  hypo

SEQ ID NO: 304883 - DNA, 100 bp, Homo sapiens; identical to SEQ ID NO: 255180
  chr5:147610059-147610159
  hypo

SEQ ID NO: 304884 - DNA, 114 bp, Homo sapiens; identical to SEQ ID NO: 283431
  chr5:148206071-148206185
  hypo

SEQ ID NO: 304885 - DNA, 42 bp, Homo sapiens; identical to SEQ ID NO: 283432
  chr5:148206432-148206474
  hypo

SEQ ID NO: 304886 - DNA, 42 bp, Homo sapiens; identical to SEQ ID NO: 255181
  chr5:148222774-148222816
  hypo

SEQ ID NO: 304887 - DNA, 197 bp, Homo sapiens; identical to SEQ ID NO: 255182
  chr5:148409735-148409932
  hypo

SEQ ID NO: 304888 - DNA, 82 bp, Homo sapiens; identical to SEQ ID NO: 255183
  chr5:148520459-148520541
  hypo

SEQ ID NO: 304889 - DNA, 272 bp, Homo sapiens; identical to SEQ ID NO: 200103
  chr5:148650951-148651223
  hypo

SEQ ID NO: 304890 - DNA, 35 bp, Homo sapiens; identical to SEQ ID NO: 255184
  chr5:148686935-148686970
  hypo

SEQ ID NO: 304891 - DNA, 99 bp, Homo sapiens; identical to SEQ ID NO: 255185
  chr5:148695865-148695964
  hypo

SEQ ID NO: 304892 - DNA, 71 bp, Homo sapiens; identical to SEQ ID NO: 255186
  chr5:148702156-148702227
  hypo

SEQ ID NO: 304893 - DNA, 106 bp, Homo sapiens; identical to SEQ ID NO: 200104
  chr5:148724797-148724903
  hypo

SEQ ID NO: 304894 - DNA, 49 bp, Homo sapiens; identical to SEQ ID NO: 255187
  chr5:148754033-148754082
  hypo

SEQ ID NO: 304895 - DNA, 33 bp, Homo sapiens; identical to SEQ ID NO: 255188
  chr5:148772455-148772488
  hypo

SEQ ID NO: 304896 - DNA, 92 bp, Homo sapiens; identical to SEQ ID NO: 255189
  chr5:148772608-148772700
  hypo

SEQ ID NO: 304897 - DNA, 141 bp, Homo sapiens; identical to SEQ ID NO: 255190
  chr5:148821007-148821148
  hypo

SEQ ID NO: 304898 - DNA, 33 bp, Homo sapiens; identical to SEQ ID NO: 210388
  chr5:148868824-148868857
  hypo

SEQ ID NO: 304899 - DNA, 120 bp, Homo sapiens; identical to SEQ ID NO: 255192
  chr5:148925772-148925892
  hypo

SEQ ID NO: 304900 - DNA, 58 bp, Homo sapiens; identical to SEQ ID NO: 255193
  chr5:148938522-148938580
  hypo

SEQ ID NO: 304901 - DNA, 61 bp, Homo sapiens; identical to SEQ ID NO: 210389
  chr5:148980120-148980181
  hypo

SEQ ID NO: 304902 - DNA, 41 bp, Homo sapiens; identical to SEQ ID NO: 210390
  chr5:148981578-148981619
  hypo

SEQ ID NO: 304903 - DNA, 88 bp, Homo sapiens; identical to SEQ ID NO: 255196
  chr5:148982437-148982525
  hypo

SEQ ID NO: 304904 - DNA, 144 bp, Homo sapiens; identical to SEQ ID NO: 210391
  chr5:148989228-148989372
  hypo

SEQ ID NO: 304905 - DNA, 36 bp, Homo sapiens; identical to SEQ ID NO: 210392
  chr5:148999330-148999366
  hypo

SEQ ID NO: 304906 - DNA, 43 bp, Homo sapiens; identical to SEQ ID NO: 210393
  chr5:149006876-149006919
  hypo

SEQ ID NO: 304907 - DNA, 136 bp, Homo sapiens; identical to SEQ ID NO: 255200
  chr5:149144786-149144922
  hypo

SEQ ID NO: 304908 - DNA, 334 bp, Homo sapiens; identical to SEQ ID NO: 255201
  chr5:149189244-149189578
  hypo

SEQ ID NO: 304909 - DNA, 326 bp, Homo sapiens; identical to SEQ ID NO: 255202
  chr5:149230003-149230329
  hypo

SEQ ID NO: 304910 - DNA, 41 bp, Homo sapiens; identical to SEQ ID NO: 255203
  chr5:149262327-149262368
  hypo

SEQ ID NO: 304911 - DNA, 442 bp, Homo sapiens; identical to SEQ ID NO: 255204
  chr5:149323764-149324206
  hypo

SEQ ID NO: 304912 - DNA, 33 bp, Homo sapiens; identical to SEQ ID NO: 210396
  chr5:149375068-149375101
  hypo

SEQ ID NO: 304913 - DNA, 94 bp, Homo sapiens; identical to SEQ ID NO: 210397
  chr5:149375680-149375774
  hypo

SEQ ID NO: 304914 - DNA, 42 bp, Homo sapiens; identical to SEQ ID NO: 255207
  chr5:149405660-149405702
  hypo

SEQ ID NO: 304915 - DNA, 51 bp, Homo sapiens; identical to SEQ ID NO: 255208
  chr5:149449459-149449510
  hypo

SEQ ID NO: 304916 - DNA, 185 bp, Homo sapiens; identical to SEQ ID NO: 255209
  chr5:149497194-149497379
  hypo

SEQ ID NO: 304917 - DNA, 39 bp, Homo sapiens; identical to SEQ ID NO: 210398
  chr5:149501436-149501475
  hypo

SEQ ID NO: 304918 - DNA, 143 bp, Homo sapiens; identical to SEQ ID NO: 255211
  chr5:149502537-149502680
  hypo

SEQ ID NO: 304919 - DNA, 126 bp, Homo sapiens; identical to SEQ ID NO: 255212
  chr5:149503640-149503766
  hypo

SEQ ID NO: 304920 - DNA, 229 bp, Homo sapiens; identical to SEQ ID NO: 255213
  chr5:149523408-149523637
  hypo

SEQ ID NO: 304921 - DNA, 187 bp, Homo sapiens; identical to SEQ ID NO: 255214
  chr5:149573355-149573542
  hypo

SEQ ID NO: 304922 - DNA, 133 bp, Homo sapiens; identical to SEQ ID NO: 255215
  chr5:149637115-149637248
  hypo

SEQ ID NO: 304923 - DNA, 188 bp, Homo sapiens; identical to SEQ ID NO: 210399
  chr5:149725941-149726129
  hypo

SEQ ID NO: 304924 - DNA, 319 bp, Homo sapiens; identical to SEQ ID NO: 255217
  chr5:149754247-149754566
  hypo

SEQ ID NO: 304925 - DNA, 147 bp, Homo sapiens; identical to SEQ ID NO: 210400
  chr5:149800713-149800860
  hypo

SEQ ID NO: 304926 - DNA, 77 bp, Homo sapiens; identical to SEQ ID NO: 255220
  chr5:150014717-150014794
  hypo

SEQ ID NO: 304927 - DNA, 54 bp, Homo sapiens; identical to SEQ ID NO: 210401
  chr5:150028668-150028722
  hypo

SEQ ID NO: 304928 - DNA, 32 bp, Homo sapiens; identical to SEQ ID NO: 255222
  chr5:150060537-150060569
  hypo

SEQ ID NO: 304929 - DNA, 39 bp, Homo sapiens; identical to SEQ ID NO: 210402
  chr5:150066938-150066977
  hypo

SEQ ID NO: 304930 - DNA, 184 bp, Homo sapiens; identical to SEQ ID NO: 255224
  chr5:150446152-150446336
  hypo

SEQ ID NO: 304931 - DNA, 37 bp, Homo sapiens; identical to SEQ ID NO: 255225
  chr5:150452468-150452505
  hypo

SEQ ID NO: 304932 - DNA, 99 bp, Homo sapiens; identical to SEQ ID NO: 255226
  chr5:150834191-150834290
  hypo

SEQ ID NO: 304933 - DNA, 39 bp, Homo sapiens
  chr5:150911166-150911205
  hypo
gaacctgccttgctcgttcccgctgaccacgcggtagcc

SEQ ID NO: 304934 - DNA, 479 bp, Homo sapiens; identical to SEQ ID NO: 255228
  chr5:150945538-150946017
  hypo

SEQ ID NO: 304935 - DNA, 38 bp, Homo sapiens
  chr5:151082162-151082200
  hypo
tgggagggcagccacgggagtgggtctgggtggggccc

SEQ ID NO: 304936 - DNA, 42 bp, Homo sapiens; identical to SEQ ID NO: 151633
  chr5:151082218-151082260
  hypo

SEQ ID NO: 304937 - DNA, 293 bp, Homo sapiens; identical to SEQ ID NO: 200114
  chr5:151150270-151150563
  hypo

SEQ ID NO: 304938 - DNA, 237 bp, Homo sapiens; identical to SEQ ID NO: 283461
  chr5:151150681-151150918
  hypo

SEQ ID NO: 304939 - DNA, 39 bp, Homo sapiens; identical to SEQ ID NO: 255230
  chr5:153454424-153454463
  hypo

SEQ ID NO: 304940 - DNA, 145 bp, Homo sapiens; identical to SEQ ID NO: 255231
  chr5:153675965-153676110
  hypo

SEQ ID NO: 304941 - DNA, 213 bp, Homo sapiens; identical to SEQ ID NO: 255232
  chr5:153734233-153734446
  hypo

SEQ ID NO: 304942 - DNA, 49 bp, Homo sapiens; identical to SEQ ID NO: 210405
  chr5:153786052-153786101
  hypo

SEQ ID NO: 304943 - DNA, 36 bp, Homo sapiens; identical to SEQ ID NO: 210406
  chr5:153798341-153798377
  hypo

SEQ ID NO: 304944 - DNA, 34 bp, Homo sapiens; identical to SEQ ID NO: 210407
  chr5:154218388-154218422
  hypo

SEQ ID NO: 304945 - DNA, 43 bp, Homo sapiens; identical to SEQ ID NO: 255239
  chr5:155438698-155438741
  hypo

SEQ ID NO: 304946 - DNA, 42 bp, Homo sapiens; identical to SEQ ID NO: 210408
  chr5:156485285-156485327
  hypo

SEQ ID NO: 304947 - DNA, 102 bp, Homo sapiens; identical to SEQ ID NO: 210409
  chr5:156485567-156485669
  hypo

SEQ ID NO: 304948 - DNA, 68 bp, Homo sapiens
  chr5:156558376-156558444
  hypo
gtacctacgctatgcggagatgtgtattatgtttaccattgttaaggaaattgagttttatggaagtt

SEQ ID NO: 304949 - DNA, 155 bp, Homo sapiens; identical to SEQ ID NO: 255243
  chr5:156811486-156811641
  hypo

SEQ ID NO: 304950 - DNA, 33 bp, Homo sapiens; identical to SEQ ID NO: 283480
  chr5:156887016-156887049
  hypo

SEQ ID NO: 304951 - DNA, 253 bp, Homo sapiens; identical to SEQ ID NO: 210410
  chr5:156895563-156895816
  hypo

SEQ ID NO: 304952 - DNA, 287 bp, Homo sapiens; identical to SEQ ID NO: 200126
  chr5:157002817-157003104
  hypo

SEQ ID NO: 304953 - DNA, 339 bp, Homo sapiens
  chr5:157078068-157078407
  hypo
tgggcaacacagacgcagttttgaaaacccgactcccctgctgtctaatacctgcatctgagggcaacacggtgagcgggacatctttggtttcaatttttacagaaggctccagtagggactgcattttagtaggcactggtgtcagggggaccttggtcaatcttatcagctctgaaggcggagctccctgaaactggatccgggccccaggggggaccgtgtggagcgtcaaagggatcctaaggtcttgctggtgcggcccaaaggcaccggacgttggggccaagatgacctccgcgctgccatgaaccaggccattggacgcgggctccgcgc

SEQ ID NO: 304954 - DNA, 40 bp, Homo sapiens
  chr5:157078449-157078489
  hypo
tgatcacaccttctcggatggctgccgggcttttgcctgc

SEQ ID NO: 304955 - DNA, 142 bp, Homo sapiens; identical to SEQ ID NO: 255247
  chr5:158139222-158139364
  hypo

SEQ ID NO: 304956 - DNA, 1211 bp, Homo sapiens; identical to SEQ ID NO: 200129
  chr5:158634801-158636012
  hypo

SEQ ID NO: 304957 - DNA, 31 bp, Homo sapiens; identical to SEQ ID NO: 210413
  chr5:158884900-158884931
  hypo

SEQ ID NO: 304958 - DNA, 171 bp, Homo sapiens; identical to SEQ ID NO: 283495
  chr5:159343216-159343387
  hypo

SEQ ID NO: 304959 - DNA, 166 bp, Homo sapiens; identical to SEQ ID NO: 283496
  chr5:159343648-159343814
  hypo

SEQ ID NO: 304960 - DNA, 193 bp, Homo sapiens; identical to SEQ ID NO: 255249
  chr5:159489227-159489420
  hypo

SEQ ID NO: 304961 - DNA, 41 bp, Homo sapiens; identical to SEQ ID NO: 255250
  chr5:159658703-159658744
  hypo

SEQ ID NO: 304962 - DNA, 99 bp, Homo sapiens; identical to SEQ ID NO: 255251
  chr5:159659075-159659174
  hypo

SEQ ID NO: 304963 - DNA, 44 bp, Homo sapiens; identical to SEQ ID NO: 210415
  chr5:159669397-159669441
  hypo

SEQ ID NO: 304964 - DNA, 32 bp, Homo sapiens; identical to SEQ ID NO: 255253
  chr5:159670915-159670947
  hypo

SEQ ID NO: 304965 - DNA, 424 bp, Homo sapiens; identical to SEQ ID NO: 255254
  chr5:159679760-159680184
  hypo

SEQ ID NO: 304966 - DNA, 406 bp, Homo sapiens; identical to SEQ ID NO: 255255
  chr5:159686736-159687142
  hypo

SEQ ID NO: 304967 - DNA, 460 bp, Homo sapiens; identical to SEQ ID NO: 255256
  chr5:159691933-159692393
  hypo

SEQ ID NO: 304968 - DNA, 439 bp, Homo sapiens; identical to SEQ ID NO: 255257
  chr5:159707382-159707821
  hypo

SEQ ID NO: 304969 - DNA, 158 bp, Homo sapiens; identical to SEQ ID NO: 210417
  chr5:159776168-159776326
  hypo

SEQ ID NO: 304970 - DNA, 148 bp, Homo sapiens; identical to SEQ ID NO: 210418
  chr5:159776588-159776736
  hypo

SEQ ID NO: 304971 - DNA, 173 bp, Homo sapiens; identical to SEQ ID NO: 200134
  chr5:159826416-159826589
  hypo

SEQ ID NO: 304972 - DNA, 72 bp, Homo sapiens; identical to SEQ ID NO: 283509
  chr5:160974540-160974612
  hypo

SEQ ID NO: 304973 - DNA, 210 bp, Homo sapiens; identical to SEQ ID NO: 283510
  chr5:160974861-160975071
  hypo

SEQ ID NO: 304974 - DNA, 32 bp, Homo sapiens; identical to SEQ ID NO: 255259
  chr5:166374191-166374223
  hypo

SEQ ID NO: 304975 - DNA, 103 bp, Homo sapiens; identical to SEQ ID NO: 210420
  chr5:166477138-166477241
  hypo

SEQ ID NO: 304976 - DNA, 229 bp, Homo sapiens; identical to SEQ ID NO: 255261
  chr5:167531535-167531764
  hypo

SEQ ID NO: 304977 - DNA, 155 bp, Homo sapiens; identical to SEQ ID NO: 255262
  chr5:167536298-167536453
  hypo

SEQ ID NO: 304978 - DNA, 56 bp, Homo sapiens; identical to SEQ ID NO: 210421
  chr5:167652913-167652969
  hypo

SEQ ID NO: 304979 - DNA, 48 bp, Homo sapiens; identical to SEQ ID NO: 210422
  chr5:167671586-167671634
  hypo

SEQ ID NO: 304980 - DNA, 32 bp, Homo sapiens; identical to SEQ ID NO: 255265
  chr5:167680720-167680752
  hypo

SEQ ID NO: 304981 - DNA, 125 bp, Homo sapiens
  chr5:167689119-167689244
  hypo
gtcattactaaaaagctccacgccagcatccgagagaaagcaggtcactggtttgccaccaccacgcccatcattggcaaaggcatcatgtttgccatcaaagaagggcgggtgaccacgggcgt

SEQ ID NO: 304982 - DNA, 312 bp, Homo sapiens
  chr5:167689343-167689655
  hypo
ccactactttgtgaagattggctcagccgatggcgacctggtcacactaggcaccaccatcggccgcaaggtgctagagagcggggtgaacgtgaccgtgtcccagcccacgctgctggtcaacggcaggactcgaaggttcacgaacattgagttccagtactccacgctgctgctcagcatccgctatggcctcacccccgacaccctggacgaagagaaggcccgcgtcctggaccaggcgagacagagggccctgggcacggcctgggccaaggagcagcagaaagccagggacgggagagaggggag

SEQ ID NO: 304983 - DNA, 35 bp, Homo sapiens; identical to SEQ ID NO: 255267
  chr5:167698411-167698446
  hypo

SEQ ID NO: 304984 - DNA, 223 bp, Homo sapiens; identical to SEQ ID NO: 200143
  chr5:167718508-167718731
  hypo

SEQ ID NO: 304985 - DNA, 377 bp, Homo sapiens; identical to SEQ ID NO: 200144
  chr5:167718952-167719329
  hypo

SEQ ID NO: 304986 - DNA, 149 bp, Homo sapiens; identical to SEQ ID NO: 255268
  chr5:167729413-167729562
  hypo

SEQ ID NO: 304987 - DNA, 102 bp, Homo sapiens; identical to SEQ ID NO: 255269
  chr5:167825008-167825110
  hypo

SEQ ID NO: 304988 - DNA, 42 bp, Homo sapiens; identical to SEQ ID NO: 210425
  chr5:167847701-167847743
  hypo

SEQ ID NO: 304989 - DNA, 178 bp, Homo sapiens; identical to SEQ ID NO: 210426
  chr5:167853641-167853819
  hypo

SEQ ID NO: 304990 - DNA, 44 bp, Homo sapiens; identical to SEQ ID NO: 210427
  chr5:167897879-167897923
  hypo

SEQ ID NO: 304991 - DNA, 237 bp, Homo sapiens; identical to SEQ ID NO: 210428
  chr5:168112661-168112898
  hypo

SEQ ID NO: 304992 - DNA, 42 bp, Homo sapiens; identical to SEQ ID NO: 210429
  chr5:168124523-168124565
  hypo

SEQ ID NO: 304993 - DNA, 83 bp, Homo sapiens; identical to SEQ ID NO: 210430
  chr5:168184345-168184428
  hypo

SEQ ID NO: 304994 - DNA, 44 bp, Homo sapiens; identical to SEQ ID NO: 210431
  chr5:168189441-168189485
  hypo

SEQ ID NO: 304995 - DNA, 245 bp, Homo sapiens; identical to SEQ ID NO: 210432
  chr5:168189515-168189760
  hypo

SEQ ID NO: 304996 - DNA, 41 bp, Homo sapiens
  chr5:168192429-168192470
  hypo
tgtgatattttatacgagtgggagccagaaatgttaataac

SEQ ID NO: 304997 - DNA, 150 bp, Homo sapiens; identical to SEQ ID NO: 210433
  chr5:168195266-168195416
  hypo

SEQ ID NO: 304998 - DNA, 305 bp, Homo sapiens; identical to SEQ ID NO: 210434
  chr5:168199738-168200043
  hypo

SEQ ID NO: 304999 - DNA, 74 bp, Homo sapiens; identical to SEQ ID NO: 210435
  chr5:168244376-168244450
  hypo

SEQ ID NO: 305000 - DNA, 73 bp, Homo sapiens
  chr5:168250182-168250255
  hypo
ggtttgacaagcagcgtagagtgctgcactttgggcgtgaggtagggagaaaatgggagagatgcacagactt

SEQ ID NO: 305001 - DNA, 188 bp, Homo sapiens; identical to SEQ ID NO: 255283
  chr5:168273345-168273533
  hypo

SEQ ID NO: 305002 - DNA, 185 bp, Homo sapiens; identical to SEQ ID NO: 210436
  chr5:168284804-168284989
  hypo

SEQ ID NO: 305003 - DNA, 152 bp, Homo sapiens; identical to SEQ ID NO: 255285
  chr5:168296874-168297026
  hypo

SEQ ID NO: 305004 - DNA, 95 bp, Homo sapiens; identical to SEQ ID NO: 255286
  chr5:169116210-169116305
  hypo

SEQ ID NO: 305005 - DNA, 72 bp, Homo sapiens
  chr5:169157538-169157610
  hypo
tagcacgtataatacttgggtgacaagaagggtttgtgtcatggaccacacgtgtgtcgtaacctctacaag

SEQ ID NO: 305006 - DNA, 319 bp, Homo sapiens; identical to SEQ ID NO: 210437
  chr5:169484411-169484730
  hypo

SEQ ID NO: 305007 - DNA, 420 bp, Homo sapiens
  chr5:169659749-169660169
  hypo
ccgctatcctgtgcgactcaaatgcagataagggttgcaaaagcctggcacactgggggtaaggaatgtcagtgctttttccgccaacgtggccgcgcgagtcagttgtaacccggcatccagaaccttctccgtaggggccttgcctgggactacaactcccaggatgccgcaggcggagaagctggccaatcagggggcgcggcttcgccttcaccgtcggctccctgctcctgtcagaacctcggtgacggttggccaggtgggtagtgacggctgctcggtcttgaaggatcctaatctggtttgggagggtgaagaccgctgaaatttccaggctgcccgaggctccaccttccaccacccaacgggtgggcggtgggccgggctggcctcggagcctctccctgggtgtcggtt

SEQ ID NO: 305008 - DNA, 383 bp, Homo sapiens
  chr5:169660220-169660603
  hypo
cgtaggccggggtcactctgagggcattttacattaccctaatcctgtccacttggcaagaaacttagtaagccccaaaggttcattccaaatcctgtctgggagggcgaggactgtggaaacttccagatgcctcaggctccatctttagctgttgagcgggtggttgggccgctcatggccccaaagatctggggggtcttcatgggcagttgggtcgctgagggccctaaagatctggggctcctcccaggtgtcagttgggccaaggaggaggctgggctttcagagtagaacctgcggtgctaacgatggctctgcagggctgcgggctgagggcctgggcggcgtcctgtggcccggagatggcgctctagtggtat

SEQ ID NO: 305009 - DNA, 226 bp, Homo sapiens; identical to SEQ ID NO: 283530
  chr5:169930945-169931171
  hypo

SEQ ID NO: 305010 - DNA, 36 bp, Homo sapiens; identical to SEQ ID NO: 200147
  chr5:169931484-169931520
  hypo

SEQ ID NO: 305011 - DNA, 33 bp, Homo sapiens; identical to SEQ ID NO: 255290
  chr5:170060060-170060093
  hypo

SEQ ID NO: 305012 - DNA, 243 bp, Homo sapiens; identical to SEQ ID NO: 283532
  chr5:170171140-170171383
  hypo

SEQ ID NO: 305013 - DNA, 402 bp, Homo sapiens; identical to SEQ ID NO: 283533
  chr5:170171413-170171815
  hypo

SEQ ID NO: 305014 - DNA, 84 bp, Homo sapiens; identical to SEQ ID NO: 210440
  chr5:170863092-170863176
  hypo

SEQ ID NO: 305015 - DNA, 185 bp, Homo sapiens; identical to SEQ ID NO: 210441
  chr5:170883647-170883832
  hypo

SEQ ID NO: 305016 - DNA, 178 bp, Homo sapiens; identical to SEQ ID NO: 255293
  chr5:170894273-170894451
  hypo

SEQ ID NO: 305017 - DNA, 39 bp, Homo sapiens; identical to SEQ ID NO: 255294
  chr5:170937770-170937809
  hypo

SEQ ID NO: 305018 - DNA, 206 bp, Homo sapiens; identical to SEQ ID NO: 255295
  chr5:170972877-170973083
  hypo

SEQ ID NO: 305019 - DNA, 131 bp, Homo sapiens; identical to SEQ ID NO: 255296
  chr5:171095093-171095224
  hypo

SEQ ID NO: 305020 - DNA, 154 bp, Homo sapiens; identical to SEQ ID NO: 255297
  chr5:171209464-171209618
  hypo

SEQ ID NO: 305021 - DNA, 461 bp, Homo sapiens; identical to SEQ ID NO: 255298
  chr5:171351590-171352051
  hypo

SEQ ID NO: 305022 - DNA, 42 bp, Homo sapiens; identical to SEQ ID NO: 255299
  chr5:171395984-171396026
  hypo

SEQ ID NO: 305023 - DNA, 266 bp, Homo sapiens; identical to SEQ ID NO: 255300
  chr5:171470998-171471264
  hypo

SEQ ID NO: 305024 - DNA, 314 bp, Homo sapiens; identical to SEQ ID NO: 255301
  chr5:171478660-171478974
  hypo

SEQ ID NO: 305025 - DNA, 218 bp, Homo sapiens; identical to SEQ ID NO: 255302
  chr5:171479925-171480143
  hypo

SEQ ID NO: 305026 - DNA, 276 bp, Homo sapiens; identical to SEQ ID NO: 210442
  chr5:171523262-171523538
  hypo

SEQ ID NO: 305027 - DNA, 81 bp, Homo sapiens; identical to SEQ ID NO: 255304
  chr5:171529693-171529774
  hypo

SEQ ID NO: 305028 - DNA, 188 bp, Homo sapiens; identical to SEQ ID NO: 210443
  chr5:171533431-171533619
  hypo

SEQ ID NO: 305029 - DNA, 48 bp, Homo sapiens; identical to SEQ ID NO: 255306
  chr5:171533670-171533718
  hypo

SEQ ID NO: 305030 - DNA, 42 bp, Homo sapiens; identical to SEQ ID NO: 255307
  chr5:171534420-171534462
  hypo

SEQ ID NO: 305031 - DNA, 85 bp, Homo sapiens; identical to SEQ ID NO: 200154
  chr5:171541758-171541843
  hypo

SEQ ID NO: 305032 - DNA, 45 bp, Homo sapiens; identical to SEQ ID NO: 210445
  chr5:171724015-171724060
  hypo

SEQ ID NO: 305033 - DNA, 506 bp, Homo sapiens; identical to SEQ ID NO: 210446
  chr5:171766370-171766876
  hypo

SEQ ID NO: 305034 - DNA, 72 bp, Homo sapiens; identical to SEQ ID NO: 210447
  chr5:171769329-171769401
  hypo

SEQ ID NO: 305035 - DNA, 92 bp, Homo sapiens; identical to SEQ ID NO: 210448
  chr5:171777275-171777367
  hypo

SEQ ID NO: 305036 - DNA, 110 bp, Homo sapiens; identical to SEQ ID NO: 70538
  chr5:171808699-171808809
  hypo

SEQ ID NO: 305037 - DNA, 201 bp, Homo sapiens; identical to SEQ ID NO: 210449
  chr5:171821579-171821780
  hypo

SEQ ID NO: 305038 - DNA, 229 bp, Homo sapiens; identical to SEQ ID NO: 255314
  chr5:171846001-171846230
  hypo

SEQ ID NO: 305039 - DNA, 44 bp, Homo sapiens; identical to SEQ ID NO: 210450
  chr5:171858873-171858917
  hypo

SEQ ID NO: 305040 - DNA, 136 bp, Homo sapiens; identical to SEQ ID NO: 255316
  chr5:171859487-171859623
  hypo

SEQ ID NO: 305041 - DNA, 187 bp, Homo sapiens; identical to SEQ ID NO: 255317
  chr5:171867143-171867330
  hypo

SEQ ID NO: 305042 - DNA, 56 bp, Homo sapiens; identical to SEQ ID NO: 255318
  chr5:171890094-171890150
  hypo

SEQ ID NO: 305043 - DNA, 71 bp, Homo sapiens; identical to SEQ ID NO: 255319
  chr5:171909811-171909882
  hypo

SEQ ID NO: 305044 - DNA, 333 bp, Homo sapiens; identical to SEQ ID NO: 210451
  chr5:171916860-171917193
  hypo

SEQ ID NO: 305045 - DNA, 284 bp, Homo sapiens; identical to SEQ ID NO: 255321
  chr5:171981548-171981832
  hypo

SEQ ID NO: 305046 - DNA, 65 bp, Homo sapiens; identical to SEQ ID NO: 255322
  chr5:172016615-172016680
  hypo

SEQ ID NO: 305047 - DNA, 32 bp, Homo sapiens; identical to SEQ ID NO: 210452
  chr5:172062315-172062347
  hypo

SEQ ID NO: 305048 - DNA, 340 bp, Homo sapiens
  chr5:172074242-172074582
  hypo
cagagagggaagagggagggcgccaggtcgcagcccgacaggtagcacacgctcacctgggcagtgtcgcggggtggtccgagcttctgcacacctgccctgcactaggccctttattccatcccattgaagccgtcatgagagccttgcgaggcagtcttctcatgtcacagaaggggaaactgaggctcagaggggtagtgagacctgcccggcccaggtggccaggaagtggcagagtgaattggatcccaggcacgctgggctccacaccccttcccctccatcccacggggcactgcaccctggggcctcttgcggctcctcttgctgacttgct

SEQ ID NO: 305049 - DNA, 94 bp, Homo sapiens; identical to SEQ ID NO: 210454
  chr5:172097651-172097745
  hypo

SEQ ID NO: 305050 - DNA, 39 bp, Homo sapiens; identical to SEQ ID NO: 210455
  chr5:172105004-172105043
  hypo

SEQ ID NO: 305051 - DNA, 483 bp, Homo sapiens; identical to SEQ ID NO: 210456
  chr5:172113599-172114082
  hypo

SEQ ID NO: 305052 - DNA, 293 bp, Homo sapiens; identical to SEQ ID NO: 255328
  chr5:172117802-172118095
  hypo

SEQ ID NO: 305053 - DNA, 217 bp, Homo sapiens
  chr5:172123413-172123630
  hypo
acgcggcgcatccccggctcccaacacagggtctaccaaacaggagagtcttagtgtgtacacccctcacccacacccagcgtggaatttctggcattagcacacctcccttccacaaagaatgaaccggagtggtgatctgctggtggggtcgtgccaggcctcggggctggcccaggcccccgccccttgcttgtcttggttcccagtcaagagc

SEQ ID NO: 305054 - DNA, 124 bp, Homo sapiens; identical to SEQ ID NO: 255330
  chr5:172191067-172191191
  hypo

SEQ ID NO: 305055 - DNA, 199 bp, Homo sapiens; identical to SEQ ID NO: 210457
  chr5:172264179-172264378
  hypo

SEQ ID NO: 305056 - DNA, 97 bp, Homo sapiens; identical to SEQ ID NO: 255333
  chr5:172307699-172307796
  hypo

SEQ ID NO: 305057 - DNA, 208 bp, Homo sapiens; identical to SEQ ID NO: 210458
  chr5:172346278-172346486
  hypo

SEQ ID NO: 305058 - DNA, 254 bp, Homo sapiens
  chr5:172353789-172354043
  hypo
gcacagcagacgcacgcacgcagtggataccagctattaccattattgttgctctcatcacagccacatcatcatccttagttgaactaattacctaagatcccacagggagctatggcagaaccaggatctgttctgcctccaggtcgcaccgtgagaacaggtctgtgggtggcccagtcagctgtgaccacatggctgcctcccccacacctcactctcctcctgctcagactcctcccatcgatagtggc

SEQ ID NO: 305059 - DNA, 105 bp, Homo sapiens
  chr5:172354118-172354223
  hypo
gcagacaggagagcacgcatacctttcgtgcacaccaacacacatgagctcacatggccccagacacgtgcacagaatgggcccgggaggcctgtgtgctcaagc

SEQ ID NO: 305060 - DNA, 209 bp, Homo sapiens; identical to SEQ ID NO: 255336
  chr5:172366892-172367101
  hypo

SEQ ID NO: 305061 - DNA, 132 bp, Homo sapiens; identical to SEQ ID NO: 210459
  chr5:172367589-172367721
  hypo

SEQ ID NO: 305062 - DNA, 446 bp, Homo sapiens; identical to SEQ ID NO: 200158
  chr5:172385502-172385948
  hypo

SEQ ID NO: 305063 - DNA, 249 bp, Homo sapiens; identical to SEQ ID NO: 283551
  chr5:172386283-172386532
  hypo

SEQ ID NO: 305064 - DNA, 102 bp, Homo sapiens; identical to SEQ ID NO: 283553
  chr5:172444179-172444281
  hypo

SEQ ID NO: 305065 - DNA, 34 bp, Homo sapiens; identical to SEQ ID NO: 210461
  chr5:172454588-172454622
  hypo

SEQ ID NO: 305066 - DNA, 319 bp, Homo sapiens; identical to SEQ ID NO: 255339
  chr5:172461480-172461799
  hypo

SEQ ID NO: 305067 - DNA, 162 bp, Homo sapiens; identical to SEQ ID NO: 200164
  chr5:172665286-172665448
  hypo

SEQ ID NO: 305068 - DNA, 301 bp, Homo sapiens; identical to SEQ ID NO: 283561
  chr5:172665949-172666250
  hypo

SEQ ID NO: 305069 - DNA, 243 bp, Homo sapiens; identical to SEQ ID NO: 255340
  chr5:172724559-172724802
  hypo

SEQ ID NO: 305070 - DNA, 504 bp, Homo sapiens; identical to SEQ ID NO: 255341
  chr5:172744595-172745099
  hypo

SEQ ID NO: 305071 - DNA, 196 bp, Homo sapiens; identical to SEQ ID NO: 255342
  chr5:172765671-172765867
  hypo

SEQ ID NO: 305072 - DNA, 279 bp, Homo sapiens; identical to SEQ ID NO: 255343
  chr5:173180489-173180768
  hypo

SEQ ID NO: 305073 - DNA, 137 bp, Homo sapiens; identical to SEQ ID NO: 255344
  chr5:173383099-173383236
  hypo

SEQ ID NO: 305074 - DNA, 77 bp, Homo sapiens; identical to SEQ ID NO: 255345
  chr5:173389973-173390050
  hypo

SEQ ID NO: 305075 - DNA, 124 bp, Homo sapiens
  chr5:173396938-173397062
  hypo
tcaaaatacaggttgcgagtcagcagcgctgggagcctgagactacatctctaccaagctatccagtgggctccatgctactgcttctccatagaagttagttcttgagaaagccgtgaacgtt

SEQ ID NO: 305076 - DNA, 57 bp, Homo sapiens; identical to SEQ ID NO: 210466
  chr5:173415949-173416006
  hypo

SEQ ID NO: 305077 - DNA, 246 bp, Homo sapiens; identical to SEQ ID NO: 255348
  chr5:173416551-173416797
  hypo

SEQ ID NO: 305078 - DNA, 34 bp, Homo sapiens; identical to SEQ ID NO: 255349
  chr5:173539168-173539202
  hypo

SEQ ID NO: 305079 - DNA, 35 bp, Homo sapiens; identical to SEQ ID NO: 255350
  chr5:173978713-173978748
  hypo

SEQ ID NO: 305080 - DNA, 40 bp, Homo sapiens; identical to SEQ ID NO: 255351
  chr5:174029708-174029748
  hypo

SEQ ID NO: 305081 - DNA, 89 bp, Homo sapiens; identical to SEQ ID NO: 283586
  chr5:174220728-174220817
  hypo

SEQ ID NO: 305082 - DNA, 149 bp, Homo sapiens; identical to SEQ ID NO: 255352
  chr5:174350058-174350207
  hypo

SEQ ID NO: 305083 - DNA, 43 bp, Homo sapiens; identical to SEQ ID NO: 255353
  chr5:174667550-174667593
  hypo

SEQ ID NO: 305084 - DNA, 78 bp, Homo sapiens; identical to SEQ ID NO: 255354
  chr5:174920753-174920831
  hypo

SEQ ID NO: 305085 - DNA, 47 bp, Homo sapiens; identical to SEQ ID NO: 200180
  chr5:175084696-175084743
  hypo

SEQ ID NO: 305086 - DNA, 75 bp, Homo sapiens; identical to SEQ ID NO: 200181
  chr5:175084744-175084819
  hypo

SEQ ID NO: 305087 - DNA, 198 bp, Homo sapiens; identical to SEQ ID NO: 255355
  chr5:175110260-175110458
  hypo

SEQ ID NO: 305088 - DNA, 166 bp, Homo sapiens; identical to SEQ ID NO: 210469
  chr5:175139689-175139855
  hypo

SEQ ID NO: 305089 - DNA, 271 bp, Homo sapiens; identical to SEQ ID NO: 255357
  chr5:175329248-175329519
  hypo

SEQ ID NO: 305090 - DNA, 190 bp, Homo sapiens; identical to SEQ ID NO: 255358
  chr5:175387362-175387552
  hypo

SEQ ID NO: 305091 - DNA, 53 bp, Homo sapiens; identical to SEQ ID NO: 255359
  chr5:175559713-175559766
  hypo

SEQ ID NO: 305092 - DNA, 142 bp, Homo sapiens; identical to SEQ ID NO: 255360
  chr5:175578296-175578438
  hypo

SEQ ID NO: 305093 - DNA, 240 bp, Homo sapiens; identical to SEQ ID NO: 210470
  chr5:175777488-175777728
  hypo

SEQ ID NO: 305094 - DNA, 105 bp, Homo sapiens; identical to SEQ ID NO: 210471
  chr5:175831152-175831257
  hypo

SEQ ID NO: 305095 - DNA, 457 bp, Homo sapiens; identical to SEQ ID NO: 210472
  chr5:175831326-175831783
  hypo

SEQ ID NO: 305096 - DNA, 268 bp, Homo sapiens; identical to SEQ ID NO: 255363
  chr5:175832699-175832967
  hypo

SEQ ID NO: 305097 - DNA, 36 bp, Homo sapiens; identical to SEQ ID NO: 210473
  chr5:175871772-175871808
  hypo

SEQ ID NO: 305098 - DNA, 36 bp, Homo sapiens; identical to SEQ ID NO: 255365
  chr5:175872857-175872893
  hypo

SEQ ID NO: 305099 - DNA, 204 bp, Homo sapiens; identical to SEQ ID NO: 210474
  chr5:176003232-176003436
  hypo

SEQ ID NO: 305100 - DNA, 162 bp, Homo sapiens; identical to SEQ ID NO: 210475
  chr5:176012687-176012849
  hypo

SEQ ID NO: 305101 - DNA, 76 bp, Homo sapiens; identical to SEQ ID NO: 210476
  chr5:176016153-176016229
  hypo

SEQ ID NO: 305102 - DNA, 62 bp, Homo sapiens; identical to SEQ ID NO: 255371
  chr5:176035935-176035997
  hypo

SEQ ID NO: 305103 - DNA, 209 bp, Homo sapiens; identical to SEQ ID NO: 200186
  chr5:176057164-176057373
  hypo

SEQ ID NO: 305104 - DNA, 97 bp, Homo sapiens; identical to SEQ ID NO: 210478
  chr5:176066073-176066170
  hypo

SEQ ID NO: 305105 - DNA, 51 bp, Homo sapiens; identical to SEQ ID NO: 210479
  chr5:176077110-176077161
  hypo

SEQ ID NO: 305106 - DNA, 187 bp, Homo sapiens; identical to SEQ ID NO: 255374
  chr5:176081965-176082152
  hypo

SEQ ID NO: 305107 - DNA, 55 bp, Homo sapiens; identical to SEQ ID NO: 255375
  chr5:176175541-176175596
  hypo

SEQ ID NO: 305108 - DNA, 133 bp, Homo sapiens; identical to SEQ ID NO: 210480
  chr5:176225693-176225826
  hypo

SEQ ID NO: 305109 - DNA, 96 bp, Homo sapiens; identical to SEQ ID NO: 255377
  chr5:176285035-176285131
  hypo

SEQ ID NO: 305110 - DNA, 178 bp, Homo sapiens
  chr5:176295608-176295786
  hypo
ctggagcagggcatcgtgctgccctgccgtccaccggagggcatccctccagccgaggtgagggctcctctagtgcccacgtctggacctgggctcctgcctggtcaccctggcaggggccactctgggcagggccagcatgggctggcagtacatggcagggctccctcccctaggt

SEQ ID NO: 305111 - DNA, 44 bp, Homo sapiens
  chr5:176295892-176295936
  hypo
gccaactacacctgcgtggccaagaacatcgtggcacgtcgccg

SEQ ID NO: 305112 - DNA, 132 bp, Homo sapiens; identical to SEQ ID NO: 255379
  chr5:176296713-176296845
  hypo

SEQ ID NO: 305113 - DNA, 119 bp, Homo sapiens; identical to SEQ ID NO: 255380
  chr5:176314523-176314642
  hypo

SEQ ID NO: 305114 - DNA, 190 bp, Homo sapiens; identical to SEQ ID NO: 255382
  chr5:176520327-176520517
  hypo

SEQ ID NO: 305115 - DNA, 164 bp, Homo sapiens; identical to SEQ ID NO: 210481
  chr5:176544212-176544376
  hypo

SEQ ID NO: 305116 - DNA, 207 bp, Homo sapiens; identical to SEQ ID NO: 210482
  chr5:176558644-176558851
  hypo

SEQ ID NO: 305117 - DNA, 158 bp, Homo sapiens; identical to SEQ ID NO: 210483
  chr5:176558908-176559066
  hypo

SEQ ID NO: 305118 - DNA, 248 bp, Homo sapiens; identical to SEQ ID NO: 283604
  chr5:176560001-176560249
  hypo

SEQ ID NO: 305119 - DNA, 287 bp, Homo sapiens; identical to SEQ ID NO: 283605
  chr5:176560318-176560605
  hypo

SEQ ID NO: 305120 - DNA, 87 bp, Homo sapiens; identical to SEQ ID NO: 255385
  chr5:176596459-176596546
  hypo

SEQ ID NO: 305121 - DNA, 147 bp, Homo sapiens; identical to SEQ ID NO: 255386
  chr5:176602186-176602333
  hypo

SEQ ID NO: 305122 - DNA, 76 bp, Homo sapiens; identical to SEQ ID NO: 255387
  chr5:176611704-176611780
  hypo

SEQ ID NO: 305123 - DNA, 92 bp, Homo sapiens; identical to SEQ ID NO: 255388
  chr5:176613630-176613722
  hypo

SEQ ID NO: 305124 - DNA, 97 bp, Homo sapiens; identical to SEQ ID NO: 210484
  chr5:176663884-176663981
  hypo

SEQ ID NO: 305125 - DNA, 76 bp, Homo sapiens; identical to SEQ ID NO: 210485
  chr5:176674064-176674140
  hypo

SEQ ID NO: 305126 - DNA, 162 bp, Homo sapiens; identical to SEQ ID NO: 210486
  chr5:176694903-176695065
  hypo

SEQ ID NO: 305127 - DNA, 101 bp, Homo sapiens; identical to SEQ ID NO: 255392
  chr5:176698049-176698150
  hypo

SEQ ID NO: 305128 - DNA, 152 bp, Homo sapiens; identical to SEQ ID NO: 210487
  chr5:176757377-176757529
  hypo

SEQ ID NO: 305129 - DNA, 196 bp, Homo sapiens; identical to SEQ ID NO: 210488
  chr5:176764238-176764434
  hypo

SEQ ID NO: 305130 - DNA, 42 bp, Homo sapiens; identical to SEQ ID NO: 255395
  chr5:176780528-176780570
  hypo

SEQ ID NO: 305131 - DNA, 76 bp, Homo sapiens; identical to SEQ ID NO: 210489
  chr5:176795049-176795125
  hypo

SEQ ID NO: 305132 - DNA, 236 bp, Homo sapiens
  chr5:176795288-176795524
  hypo
acaagatgctctatgggctagagtcactactcaggcccatttacgtggtggccctcattccaagttgctgtccttactgcgtctcccagcttgctctgcgtagccaacccttcagcctccttacttgtctcactacattggtccccatatatgtcatgggtacacatcctcagttggcaaatgtgtgcacatgtgcagcacccaggtgtgtatacacagcacgtgtgtgggaatca

SEQ ID NO: 305133 - DNA, 90 bp, Homo sapiens; identical to SEQ ID NO: 222761
  chr5:176827093-176827183
  hypo

SEQ ID NO: 305134 - DNA, 288 bp, Homo sapiens; identical to SEQ ID NO: 222762
  chr5:176830417-176830705
  hypo

SEQ ID NO: 305135 - DNA, 147 bp, Homo sapiens; identical to SEQ ID NO: 222763
  chr5:176830933-176831080
  hypo

SEQ ID NO: 305136 - DNA, 31 bp, Homo sapiens; identical to SEQ ID NO: 255397
  chr5:176865066-176865097
  hypo

SEQ ID NO: 305137 - DNA, 149 bp, Homo sapiens; identical to SEQ ID NO: 210491
  chr5:176901647-176901796
  hypo

SEQ ID NO: 305138 - DNA, 135 bp, Homo sapiens
  chr5:176911172-176911307
  hypo
tcagggcgtgcatgatctcctggaaggaggtcccagtcactcggcaggctcaggcccctcctgccctgccctgggtcacgggaacacaggagggctggccgcaagccctgttccttctcgcggtaaacactacat

SEQ ID NO: 305139 - DNA, 856 bp, Homo sapiens; identical to SEQ ID NO: 255400
  chr5:176918898-176919754
  hypo

SEQ ID NO: 305140 - DNA, 86 bp, Homo sapiens; identical to SEQ ID NO: 255401
  chr5:176922892-176922978
  hypo

SEQ ID NO: 305141 - DNA, 279 bp, Homo sapiens; identical to SEQ ID NO: 210493
  chr5:176965874-176966153
  hypo

SEQ ID NO: 305142 - DNA, 43 bp, Homo sapiens; identical to SEQ ID NO: 210494
  chr5:176976123-176976166
  hypo

SEQ ID NO: 305143 - DNA, 43 bp, Homo sapiens; identical to SEQ ID NO: 210495
  chr5:177031060-177031103
  hypo

SEQ ID NO: 305144 - DNA, 39 bp, Homo sapiens; identical to SEQ ID NO: 210496
  chr5:177031565-177031604
  hypo

SEQ ID NO: 305145 - DNA, 186 bp, Homo sapiens; identical to SEQ ID NO: 255405
  chr5:177310252-177310438
  hypo

SEQ ID NO: 305146 - DNA, 265 bp, Homo sapiens; identical to SEQ ID NO: 210497
  chr5:177393139-177393404
  hypo

SEQ ID NO: 305147 - DNA, 120 bp, Homo sapiens; identical to SEQ ID NO: 255409
  chr5:177482544-177482664
  hypo

SEQ ID NO: 305148 - DNA, 201 bp, Homo sapiens; identical to SEQ ID NO: 210498
  chr5:177482724-177482925
  hypo

SEQ ID NO: 305149 - DNA, 94 bp, Homo sapiens; identical to SEQ ID NO: 255411
  chr5:177525841-177525935
  hypo

SEQ ID NO: 305150 - DNA, 130 bp, Homo sapiens; identical to SEQ ID NO: 210499
  chr5:177548899-177549029
  hypo

SEQ ID NO: 305151 - DNA, 103 bp, Homo sapiens; identical to SEQ ID NO: 255413
  chr5:177571342-177571445
  hypo

SEQ ID NO: 305152 - DNA, 48 bp, Homo sapiens; identical to SEQ ID NO: 210500
  chr5:177637070-177637118
  hypo

SEQ ID NO: 305153 - DNA, 307 bp, Homo sapiens; identical to SEQ ID NO: 255415
  chr5:177650747-177651054
  hypo

SEQ ID NO: 305154 - DNA, 409 bp, Homo sapiens; identical to SEQ ID NO: 255416
  chr5:177651332-177651741
  hypo

SEQ ID NO: 305155 - DNA, 213 bp, Homo sapiens; identical to SEQ ID NO: 210502
  chr5:177653975-177654188
  hypo

SEQ ID NO: 305156 - DNA, 90 bp, Homo sapiens
  chr5:177680784-177680874
  hypo
tttttatttttttaacatcatgccctgcatggactatggctgcccgctgcccatcaaactgagtcggcatctcagtctggcatccaaagt

SEQ ID NO: 305157 - DNA, 297 bp, Homo sapiens; identical to SEQ ID NO: 210503
  chr5:177708331-177708628
  hypo

SEQ ID NO: 305158 - DNA, 162 bp, Homo sapiens; identical to SEQ ID NO: 255420
  chr5:177735754-177735916
  hypo

SEQ ID NO: 305159 - DNA, 125 bp, Homo sapiens; identical to SEQ ID NO: 255421
  chr5:177737219-177737344
  hypo

SEQ ID NO: 305160 - DNA, 349 bp, Homo sapiens; identical to SEQ ID NO: 255422
  chr5:177746584-177746933
  hypo

SEQ ID NO: 305161 - DNA, 207 bp, Homo sapiens; identical to SEQ ID NO: 255423
  chr5:177749734-177749941
  hypo

SEQ ID NO: 305162 - DNA, 160 bp, Homo sapiens; identical to SEQ ID NO: 255424
  chr5:177778269-177778429
  hypo

SEQ ID NO: 305163 - DNA, 189 bp, Homo sapiens; identical to SEQ ID NO: 255425
  chr5:177794189-177794378
  hypo

SEQ ID NO: 305164 - DNA, 158 bp, Homo sapiens; identical to SEQ ID NO: 255426
  chr5:177802448-177802606
  hypo

SEQ ID NO: 305165 - DNA, 150 bp, Homo sapiens; identical to SEQ ID NO: 255427
  chr5:177808937-177809087
  hypo

SEQ ID NO: 305166 - DNA, 90 bp, Homo sapiens; identical to SEQ ID NO: 210504
  chr5:177852084-177852174
  hypo

SEQ ID NO: 305167 - DNA, 210 bp, Homo sapiens; identical to SEQ ID NO: 255429
  chr5:177852474-177852684
  hypo

SEQ ID NO: 305168 - DNA, 113 bp, Homo sapiens; identical to SEQ ID NO: 255430
  chr5:177853494-177853607
  hypo

SEQ ID NO: 305169 - DNA, 461 bp, Homo sapiens; identical to SEQ ID NO: 255431
  chr5:177862607-177863068
  hypo

SEQ ID NO: 305170 - DNA, 67 bp, Homo sapiens
  chr5:177868496-177868563
  hypo
aattcaaggcctctcggtacaggcgcacaggggcttgctgatgaagctgaccccaaattataaagac

SEQ ID NO: 305171 - DNA, 131 bp, Homo sapiens
  chr5:177868593-177868724
  hypo
aaagggctgccttaatggttcttaagatcccatttcaccctgatgtttggagaaagacaaacacaaacatgcttttgaaacaaacaaaatagtcaaggaacccctaacagacgacacggggtgacgacgcg

SEQ ID NO: 305172 - DNA, 53 bp, Homo sapiens; identical to SEQ ID NO: 210506
  chr5:177875102-177875155
  hypo

SEQ ID NO: 305173 - DNA, 37 bp, Homo sapiens; identical to SEQ ID NO: 255434
  chr5:177882256-177882293
  hypo

SEQ ID NO: 305174 - DNA, 95 bp, Homo sapiens
  chr5:177882638-177882733
  hypo
ggcatctccgccatcgcttctgtgtgtttcctctctgccacgcggacggaccgcacctcaaggccgagagctggcacctatcccctgcccaccca

SEQ ID NO: 305175 - DNA, 71 bp, Homo sapiens
  chr5:177882763-177882834
  hypo
ggaggaccagccctctacagtggccctatgtctgacactggctccctcagctcgcccgcccatcaggagga

SEQ ID NO: 305176 - DNA, 33 bp, Homo sapiens; identical to SEQ ID NO: 255436
  chr5:177883394-177883427
  hypo

SEQ ID NO: 305177 - DNA, 439 bp, Homo sapiens; identical to SEQ ID NO: 255438
  chr5:177892707-177893146
  hypo

SEQ ID NO: 305178 - DNA, 151 bp, Homo sapiens; identical to SEQ ID NO: 255439
  chr5:177961363-177961514
  hypo

SEQ ID NO: 305179 - DNA, 36 bp, Homo sapiens; identical to SEQ ID NO: 255440
  chr5:177964385-177964421
  hypo

SEQ ID NO: 305180 - DNA, 40 bp, Homo sapiens; identical to SEQ ID NO: 255441
  chr5:177969295-177969335
  hypo

SEQ ID NO: 305181 - DNA, 36 bp, Homo sapiens; identical to SEQ ID NO: 255442
  chr5:177970115-177970151
  hypo

SEQ ID NO: 305182 - DNA, 95 bp, Homo sapiens; identical to SEQ ID NO: 255443
  chr5:177981479-177981574
  hypo

SEQ ID NO: 305183 - DNA, 116 bp, Homo sapiens; identical to SEQ ID NO: 255444
  chr5:178002879-178002995
  hypo

SEQ ID NO: 305184 - DNA, 87 bp, Homo sapiens; identical to SEQ ID NO: 255445
  chr5:178039469-178039556
  hypo

SEQ ID NO: 305185 - DNA, 141 bp, Homo sapiens
  chr5:178108495-178108636
  hypo
agagcaaaactctgtcccctcaaaaaaaaaaaagtagtaagaacatttaacatgaaatctatcttcctgacaaatgtttaagcccacaacacagtattgtcaatataggcacggtgtcgtgcagcagctgtctagagcata

SEQ ID NO: 305186 - DNA, 34 bp, Homo sapiens; identical to SEQ ID NO: 255447
  chr5:178113316-178113350
  hypo

SEQ ID NO: 305187 - DNA, 34 bp, Homo sapiens; identical to SEQ ID NO: 255448
  chr5:178113590-178113624
  hypo

SEQ ID NO: 305188 - DNA, 214 bp, Homo sapiens; identical to SEQ ID NO: 255449
  chr5:178146440-178146654
  hypo

SEQ ID NO: 305189 - DNA, 31 bp, Homo sapiens; identical to SEQ ID NO: 210507
  chr5:178195542-178195573
  hypo

SEQ ID NO: 305190 - DNA, 85 bp, Homo sapiens; identical to SEQ ID NO: 255451
  chr5:178196657-178196742
  hypo

SEQ ID NO: 305191 - DNA, 317 bp, Homo sapiens; identical to SEQ ID NO: 255452
  chr5:178220778-178221095
  hypo

SEQ ID NO: 305192 - DNA, 37 bp, Homo sapiens; identical to SEQ ID NO: 255453
  chr5:178226974-178227011
  hypo

SEQ ID NO: 305193 - DNA, 184 bp, Homo sapiens; identical to SEQ ID NO: 255454
  chr5:178259507-178259691
  hypo

SEQ ID NO: 305194 - DNA, 564 bp, Homo sapiens; identical to SEQ ID NO: 200196
  chr5:178287036-178287600
  hypo

SEQ ID NO: 305195 - DNA, 166 bp, Homo sapiens; identical to SEQ ID NO: 210509
  chr5:178289146-178289312
  hypo

SEQ ID NO: 305196 - DNA, 84 bp, Homo sapiens; identical to SEQ ID NO: 255456
  chr5:178292218-178292302
  hypo

SEQ ID NO: 305197 - DNA, 45 bp, Homo sapiens; identical to SEQ ID NO: 210510
  chr5:178295550-178295595
  hypo

SEQ ID NO: 305198 - DNA, 376 bp, Homo sapiens; identical to SEQ ID NO: 210511
  chr5:178295949-178296325
  hypo

SEQ ID NO: 305199 - DNA, 43 bp, Homo sapiens; identical to SEQ ID NO: 255459
  chr5:178298335-178298378
  hypo

SEQ ID NO: 305200 - DNA, 37 bp, Homo sapiens; identical to SEQ ID NO: 255460
  chr5:178369101-178369138
  hypo

SEQ ID NO: 305201 - DNA, 134 bp, Homo sapiens; identical to SEQ ID NO: 255461
  chr5:178397976-178398110
  hypo

SEQ ID NO: 305202 - DNA, 116 bp, Homo sapiens; identical to SEQ ID NO: 255462
  chr5:178411213-178411329
  hypo

SEQ ID NO: 305203 - DNA, 114 bp, Homo sapiens
  chr5:178411761-178411875
  hypo
cccgaggcacgtggcgtgtgtggaacgaatagagaaggggctcgccgggagtggacagcaccgggagtgctccaaacgggtgagcaggtgttcgcactgaggccaccctccacc

SEQ ID NO: 305204 - DNA, 214 bp, Homo sapiens; identical to SEQ ID NO: 200197
  chr5:178423619-178423833
  hypo

SEQ ID NO: 305205 - DNA, 50 bp, Homo sapiens; identical to SEQ ID NO: 255465
  chr5:178426059-178426109
  hypo

SEQ ID NO: 305206 - DNA, 88 bp, Homo sapiens; identical to SEQ ID NO: 283634
  chr5:178450491-178450579
  hypo

SEQ ID NO: 305207 - DNA, 102 bp, Homo sapiens; identical to SEQ ID NO: 255467
  chr5:178540329-178540431
  hypo

SEQ ID NO: 305208 - DNA, 225 bp, Homo sapiens; identical to SEQ ID NO: 255468
  chr5:178551041-178551266
  hypo

SEQ ID NO: 305209 - DNA, 358 bp, Homo sapiens; identical to SEQ ID NO: 210513
  chr5:178551488-178551846
  hypo

SEQ ID NO: 305210 - DNA, 205 bp, Homo sapiens; identical to SEQ ID NO: 210514
  chr5:178551923-178552128
  hypo

SEQ ID NO: 305211 - DNA, 82 bp, Homo sapiens; identical to SEQ ID NO: 210515
  chr5:178564804-178564886
  hypo

SEQ ID NO: 305212 - DNA, 75 bp, Homo sapiens; identical to SEQ ID NO: 210516
  chr5:178576526-178576601
  hypo

SEQ ID NO: 305213 - DNA, 109 bp, Homo sapiens
  chr5:178580404-178580513
  hypo
tcctcacactgtcccgggagctgcccctacaccagcacgcctccccccagacctgggagggtcccggctgcagggctgcacactcaccgccgtgcacatcatgtagccc

SEQ ID NO: 305214 - DNA, 116 bp, Homo sapiens
  chr5:178580543-178580659
  hypo
atggagtagtgcagtcccgggagctggggcagcgccggccagtcgtgggcgaaggggtcatccagcaggcagtcataggagctgtgggggacacacggtgccgcgagcagccttca

SEQ ID NO: 305215 - DNA, 38 bp, Homo sapiens; identical to SEQ ID NO: 255473
  chr5:178585237-178585275
  hypo

SEQ ID NO: 305216 - DNA, 255 bp, Homo sapiens; identical to SEQ ID NO: 210517
  chr5:178585631-178585886
  hypo

SEQ ID NO: 305217 - DNA, 178 bp, Homo sapiens; identical to SEQ ID NO: 255475
  chr5:178589360-178589538
  hypo

SEQ ID NO: 305218 - DNA, 198 bp, Homo sapiens; identical to SEQ ID NO: 283636
  chr5:178594471-178594669
  hypo

SEQ ID NO: 305219 - DNA, 157 bp, Homo sapiens; identical to SEQ ID NO: 255476
  chr5:178650423-178650580
  hypo

SEQ ID NO: 305220 - DNA, 152 bp, Homo sapiens; identical to SEQ ID NO: 255477
  chr5:178651186-178651338
  hypo

SEQ ID NO: 305221 - DNA, 120 bp, Homo sapiens; identical to SEQ ID NO: 210519
  chr5:178652528-178652648
  hypo

SEQ ID NO: 305222 - DNA, 137 bp, Homo sapiens; identical to SEQ ID NO: 210520
  chr5:178665271-178665408
  hypo

SEQ ID NO: 305223 - DNA, 329 bp, Homo sapiens; identical to SEQ ID NO: 255480
  chr5:178734177-178734506
  hypo

SEQ ID NO: 305224 - DNA, 109 bp, Homo sapiens; identical to SEQ ID NO: 255481
  chr5:178735325-178735434
  hypo

SEQ ID NO: 305225 - DNA, 133 bp, Homo sapiens; identical to SEQ ID NO: 255482
  chr5:178742628-178742761
  hypo

SEQ ID NO: 305226 - DNA, 302 bp, Homo sapiens; identical to SEQ ID NO: 283637
  chr5:178770441-178770743
  hypo

SEQ ID NO: 305227 - DNA, 166 bp, Homo sapiens; identical to SEQ ID NO: 255483
  chr5:178801533-178801699
  hypo

SEQ ID NO: 305228 - DNA, 146 bp, Homo sapiens; identical to SEQ ID NO: 210522
  chr5:178854898-178855044
  hypo

SEQ ID NO: 305229 - DNA, 164 bp, Homo sapiens; identical to SEQ ID NO: 255485
  chr5:178857574-178857738
  hypo

SEQ ID NO: 305230 - DNA, 36 bp, Homo sapiens; identical to SEQ ID NO: 255486
  chr5:178882638-178882674
  hypo

SEQ ID NO: 305231 - DNA, 35 bp, Homo sapiens; identical to SEQ ID NO: 255487
  chr5:178975530-178975565
  hypo

SEQ ID NO: 305232 - DNA, 251 bp, Homo sapiens; identical to SEQ ID NO: 255488
  chr5:179004521-179004772
  hypo

SEQ ID NO: 305233 - DNA, 162 bp, Homo sapiens; identical to SEQ ID NO: 210523
  chr5:179023533-179023695
  hypo

SEQ ID NO: 305234 - DNA, 175 bp, Homo sapiens; identical to SEQ ID NO: 255490
  chr5:179026668-179026843
  hypo

SEQ ID NO: 305235 - DNA, 46 bp, Homo sapiens; identical to SEQ ID NO: 210524
  chr5:179030602-179030648
  hypo

SEQ ID NO: 305236 - DNA, 120 bp, Homo sapiens; identical to SEQ ID NO: 255492
  chr5:179064356-179064476
  hypo

SEQ ID NO: 305237 - DNA, 32 bp, Homo sapiens; identical to SEQ ID NO: 255493
  chr5:179076781-179076813
  hypo

SEQ ID NO: 305238 - DNA, 43 bp, Homo sapiens; identical to SEQ ID NO: 210525
  chr5:179106627-179106670
  hypo

SEQ ID NO: 305239 - DNA, 34 bp, Homo sapiens; identical to SEQ ID NO: 255495
  chr5:179110846-179110880
  hypo

SEQ ID NO: 305240 - DNA, 283 bp, Homo sapiens; identical to SEQ ID NO: 283640
  chr5:179223440-179223723
  hypo

SEQ ID NO: 305241 - DNA, 50 bp, Homo sapiens; identical to SEQ ID NO: 255496
  chr5:179225523-179225573
  hypo

SEQ ID NO: 305242 - DNA, 149 bp, Homo sapiens; identical to SEQ ID NO: 200200
  chr5:179234473-179234622
  hypo

SEQ ID NO: 305243 - DNA, 149 bp, Homo sapiens; identical to SEQ ID NO: 255497
  chr5:179234922-179235071
  hypo

SEQ ID NO: 305244 - DNA, 752 bp, Homo sapiens; identical to SEQ ID NO: 200201
  chr5:179245837-179246589
  hypo

SEQ ID NO: 305245 - DNA, 203 bp, Homo sapiens; identical to SEQ ID NO: 210528
  chr5:179293876-179294079
  hypo

SEQ ID NO: 305246 - DNA, 148 bp, Homo sapiens; identical to SEQ ID NO: 255499
  chr5:179343374-179343522
  hypo

SEQ ID NO: 305247 - DNA, 150 bp, Homo sapiens; identical to SEQ ID NO: 255500
  chr5:179358103-179358253
  hypo

SEQ ID NO: 305248 - DNA, 139 bp, Homo sapiens; identical to SEQ ID NO: 255501
  chr5:179393861-179394000
  hypo

SEQ ID NO: 305249 - DNA, 123 bp, Homo sapiens; identical to SEQ ID NO: 210529
  chr5:179401180-179401303
  hypo

SEQ ID NO: 305250 - DNA, 60 bp, Homo sapiens; identical to SEQ ID NO: 210530
  chr5:179401333-179401393
  hypo

SEQ ID NO: 305251 - DNA, 42 bp, Homo sapiens; identical to SEQ ID NO: 210531
  chr5:179401683-179401725
  hypo

SEQ ID NO: 305252 - DNA, 428 bp, Homo sapiens
  chr5:179401775-179402203
  hypo
cactggaaggagcagccagccaagagaacgaggccccgaggaagggagagagcaggcacgcagcggcgcggggaggagcggcatggaccgcagcagacggcctctccggcctgcgcacccgggtcagcacgctgagggaattaaacccattgcttcctctgggcagtcaatggtgaagcggtcctctgagagtgaagaacaagcgtgtgagttaaggtgttgaagtagagtgaacacacctgcaggtgctgctgtgccgaatgcggagcgccagccaggcggggaggctctgtcttgccaagtctgttcagagtcccgtgggaagacggtgagggaacagaaccgcttagcaacatgaggtacagaaagccacagcaggtaacaccgactctgggcttcaaagacaataggggcggggaggcgtccca

SEQ ID NO: 305253 - DNA, 345 bp, Homo sapiens; identical to SEQ ID NO: 210533
  chr5:179402748-179403093
  hypo

SEQ ID NO: 305254 - DNA, 205 bp, Homo sapiens
  chr5:179448886-179449091
  hypo
cccaggtccgagtcacatgctacactcagtcgtcacgtcatagccatctccgtcagtctgcaactgtctctcggtctttcttggtgtttgtgaccttggcactttcgaagactacattcggcccagttgatctgtcgaaggtatttccctgtggctagattcaggtcaggtgccgctggcagtaacaacacggaggtgaggctgc

SEQ ID NO: 305255 - DNA, 170 bp, Homo sapiens; identical to SEQ ID NO: 210534
  chr5:179473085-179473255
  hypo

SEQ ID NO: 305256 - DNA, 252 bp, Homo sapiens; identical to SEQ ID NO: 200202
  chr5:179498002-179498254
  hypo

SEQ ID NO: 305257 - DNA, 504 bp, Homo sapiens; identical to SEQ ID NO: 200203
  chr5:179498363-179498867
  hypo

SEQ ID NO: 305258 - DNA, 188 bp, Homo sapiens; identical to SEQ ID NO: 255507
  chr5:179503669-179503857
  hypo

SEQ ID NO: 305259 - DNA, 41 bp, Homo sapiens; identical to SEQ ID NO: 255508
  chr5:179545455-179545496
  hypo

SEQ ID NO: 305260 - DNA, 149 bp, Homo sapiens; identical to SEQ ID NO: 255509
  chr5:179546908-179547057
  hypo

SEQ ID NO: 305261 - DNA, 147 bp, Homo sapiens; identical to SEQ ID NO: 255510
  chr5:179547319-179547466
  hypo

SEQ ID NO: 305262 - DNA, 160 bp, Homo sapiens; identical to SEQ ID NO: 255511
  chr5:179564199-179564359
  hypo

SEQ ID NO: 305263 - DNA, 200 bp, Homo sapiens
  chr5:179564842-179565042
  hypo
cccactctcctgcccgctgggtggatcacccacctcggggtagtagtcggctgtgggcaccaggtgctggatcagtgtttccagggaggctgaggatggcgctccatccaggaggggctgcccagcctgttcgccatctgtgggctcggtggggggtgggctgaggctgcctggggtgaccatgtcggaggcactcagcg

SEQ ID NO: 305264 - DNA, 115 bp, Homo sapiens; identical to SEQ ID NO: 210537
  chr5:179643356-179643471
  hypo

SEQ ID NO: 305265 - DNA, 105 bp, Homo sapiens; identical to SEQ ID NO: 255514
  chr5:179666255-179666360
  hypo

SEQ ID NO: 305266 - DNA, 123 bp, Homo sapiens; identical to SEQ ID NO: 255515
  chr5:179708845-179708968
  hypo

SEQ ID NO: 305267 - DNA, 164 bp, Homo sapiens; identical to SEQ ID NO: 210538
  chr5:179726331-179726495
  hypo

SEQ ID NO: 305268 - DNA, 193 bp, Homo sapiens; identical to SEQ ID NO: 255517
  chr5:179731619-179731812
  hypo

SEQ ID NO: 305269 - DNA, 31 bp, Homo sapiens; identical to SEQ ID NO: 255518
  chr5:179742137-179742168
  hypo

SEQ ID NO: 305270 - DNA, 183 bp, Homo sapiens; identical to SEQ ID NO: 255519
  chr5:179743760-179743943
  hypo

SEQ ID NO: 305271 - DNA, 311 bp, Homo sapiens; identical to SEQ ID NO: 255520
  chr5:179762746-179763057
  hypo

SEQ ID NO: 305272 - DNA, 94 bp, Homo sapiens; identical to SEQ ID NO: 255521
  chr5:179796987-179797081
  hypo

SEQ ID NO: 305273 - DNA, 132 bp, Homo sapiens; identical to SEQ ID NO: 255522
  chr5:179806435-179806567
  hypo

SEQ ID NO: 305274 - DNA, 157 bp, Homo sapiens; identical to SEQ ID NO: 255523
  chr5:179824174-179824331
  hypo

SEQ ID NO: 305275 - DNA, 152 bp, Homo sapiens
  chr5:179824636-179824788
  hypo
tttaaggctgaatgatactcgatcgtggctctgtgccacctttgtttattcgttcacctgtggacagacacgtgggctgcttccaccttttggctattgtgaagaacgctgctgtgaatgcgggcttacacgtatctcttttggatcctgct

SEQ ID NO: 305276 - DNA, 160 bp, Homo sapiens; identical to SEQ ID NO: 255525
  chr5:179855729-179855889
  hypo

SEQ ID NO: 305277 - DNA, 234 bp, Homo sapiens; identical to SEQ ID NO: 255526
  chr5:179866444-179866678
  hypo

SEQ ID NO: 305278 - DNA, 60 bp, Homo sapiens; identical to SEQ ID NO: 255527
  chr5:179923390-179923450
  hypo

SEQ ID NO: 305279 - DNA, 141 bp, Homo sapiens; identical to SEQ ID NO: 200208
  chr5:180018679-180018820
  hypo

SEQ ID NO: 305280 - DNA, 38 bp, Homo sapiens; identical to SEQ ID NO: 255528
  chr5:180030298-180030336
  hypo

SEQ ID NO: 305281 - DNA, 314 bp, Homo sapiens; identical to SEQ ID NO: 210540
  chr5:180036577-180036891
  hypo

SEQ ID NO: 305282 - DNA, 384 bp, Homo sapiens; identical to SEQ ID NO: 255530
  chr5:180038083-180038467
  hypo

SEQ ID NO: 305283 - DNA, 216 bp, Homo sapiens; identical to SEQ ID NO: 255531
  chr5:180039813-180040029
  hypo

SEQ ID NO: 305284 - DNA, 112 bp, Homo sapiens; identical to SEQ ID NO: 255532
  chr5:180043366-180043478
  hypo

SEQ ID NO: 305285 - DNA, 83 bp, Homo sapiens; identical to SEQ ID NO: 255533
  chr5:180043957-180044040
  hypo

SEQ ID NO: 305286 - DNA, 379 bp, Homo sapiens; identical to SEQ ID NO: 283654
  chr5:180046947-180047326
  hypo

SEQ ID NO: 305287 - DNA, 70 bp, Homo sapiens
  chr5:180047650-180047720
  hypo
gaagacagcgatgacgccggtaccgacaaggatcacgatctccatgctgcccttatcctcggagcctgcg

SEQ ID NO: 305288 - DNA, 221 bp, Homo sapiens
  chr5:180047750-180047971
  hypo
tgtgtgtaagagcgtgcacctgcaggcagcaccccttctggtggccacgacttgcccaaggtggccacaagaaagcgttaactggggacgggaagggagttgaggggtgcagcctgaggccagaccttccacggccacgctggcggaggagttgacgcagcccttggcgttgcacacgctgcacagatagcgtcccgcatcctcctcgcgcacgcgctgga

SEQ ID NO: 305289 - DNA, 378 bp, Homo sapiens; identical to SEQ ID NO: 255536
  chr5:180055790-180056168
  hypo

SEQ ID NO: 305290 - DNA, 152 bp, Homo sapiens; identical to SEQ ID NO: 255537
  chr5:180056384-180056536
  hypo

SEQ ID NO: 305291 - DNA, 64 bp, Homo sapiens; identical to SEQ ID NO: 210542
  chr5:180057671-180057735
  hypo

SEQ ID NO: 305292 - DNA, 42 bp, Homo sapiens; identical to SEQ ID NO: 255539
  chr5:180093828-180093870
  hypo

SEQ ID NO: 305293 - DNA, 35 bp, Homo sapiens; identical to SEQ ID NO: 255540
  chr5:180098113-180098148
  hypo

SEQ ID NO: 305294 - DNA, 610 bp, Homo sapiens; identical to SEQ ID NO: 255542
  chr5:180218495-180219105
  hypo

SEQ ID NO: 305295 - DNA, 444 bp, Homo sapiens; identical to SEQ ID NO: 255543
  chr5:180219601-180220045
  hypo

SEQ ID NO: 305296 - DNA, 142 bp, Homo sapiens; identical to SEQ ID NO: 210545
  chr5:180255234-180255376
  hypo

SEQ ID NO: 305297 - DNA, 415 bp, Homo sapiens; identical to SEQ ID NO: 210546
  chr5:180326156-180326571
  hypo

SEQ ID NO: 305298 - DNA, 596 bp, Homo sapiens; identical to SEQ ID NO: 200211
  chr5:180479642-180480238
  hypo

SEQ ID NO: 305299 - DNA, 828 bp, Homo sapiens; identical to SEQ ID NO: 200212
  chr5:180480302-180481130
  hypo

SEQ ID NO: 305300 - DNA, 78 bp, Homo sapiens; identical to SEQ ID NO: 255546
  chr5:180502178-180502256
  hypo

SEQ ID NO: 305301 - DNA, 104 bp, Homo sapiens; identical to SEQ ID NO: 210549
  chr5:180657110-180657214
  hypo

SEQ ID NO: 305302 - DNA, 153 bp, Homo sapiens; identical to SEQ ID NO: 210550
  chr5:180661378-180661531
  hypo

SEQ ID NO: 305303 - DNA, 182 bp, Homo sapiens; identical to SEQ ID NO: 210551
  chr5:180661628-180661810
  hypo

SEQ ID NO: 305304 - DNA, 338 bp, Homo sapiens; identical to SEQ ID NO: 200216
  chr5:180673932-180674270
  hypo

SEQ ID NO: 305305 - DNA, 43 bp, Homo sapiens; identical to SEQ ID NO: 255549
  chr5:180680861-180680904
  hypo

SEQ ID NO: 305306 - DNA, 120 bp, Homo sapiens; identical to SEQ ID NO: 210553
  chr5:180681264-180681384
  hypo

SEQ ID NO: 305307 - DNA, 139 bp, Homo sapiens; identical to SEQ ID NO: 255552
  chr6:223799-223938
  hypo

SEQ ID NO: 305308 - DNA, 176 bp, Homo sapiens; identical to SEQ ID NO: 255553
  chr6:226031-226207
  hypo

SEQ ID NO: 305309 - DNA, 60 bp, Homo sapiens; identical to SEQ ID NO: 255554
  chr6:356759-356819
  hypo

SEQ ID NO: 305310 - DNA, 42 bp, Homo sapiens; identical to SEQ ID NO: 255555
  chr6:358267-358309
  hypo

SEQ ID NO: 305311 - DNA, 76 bp, Homo sapiens; identical to SEQ ID NO: 4514
  chr6:393764-393840
  hypo

SEQ ID NO: 305312 - DNA, 160 bp, Homo sapiens; identical to SEQ ID NO: 255557
  chr6:394827-394987
  hypo

SEQ ID NO: 305313 - DNA, 213 bp, Homo sapiens; identical to SEQ ID NO: 255558
  chr6:402006-402219
  hypo

SEQ ID NO: 305314 - DNA, 131 bp, Homo sapiens; identical to SEQ ID NO: 255559
  chr6:504235-504366
  hypo

SEQ ID NO: 305315 - DNA, 148 bp, Homo sapiens; identical to SEQ ID NO: 255560
  chr6:550598-550746
  hypo

SEQ ID NO: 305316 - DNA, 78 bp, Homo sapiens; identical to SEQ ID NO: 255561
  chr6:625318-625396
  hypo

SEQ ID NO: 305317 - DNA, 399 bp, Homo sapiens; identical to SEQ ID NO: 283674
  chr6:710654-711053
  hypo

SEQ ID NO: 305318 - DNA, 136 bp, Homo sapiens; identical to SEQ ID NO: 210556
  chr6:736613-736749
  hypo

SEQ ID NO: 305319 - DNA, 148 bp, Homo sapiens; identical to SEQ ID NO: 255563
  chr6:968511-968659
  hypo

SEQ ID NO: 305320 - DNA, 115 bp, Homo sapiens; identical to SEQ ID NO: 255564
  chr6:972333-972448
  hypo

SEQ ID NO: 305321 - DNA, 39 bp, Homo sapiens; identical to SEQ ID NO: 255565
  chr6:999947-999986
  hypo

SEQ ID NO: 305322 - DNA, 577 bp, Homo sapiens; identical to SEQ ID NO: 210557
  chr6:1080628-1081205
  hypo

SEQ ID NO: 305323 - DNA, 224 bp, Homo sapiens; identical to SEQ ID NO: 255567
  chr6:1082985-1083209
  hypo

SEQ ID NO: 305324 - DNA, 255 bp, Homo sapiens; identical to SEQ ID NO: 255568
  chr6:1097959-1098214
  hypo

SEQ ID NO: 305325 - DNA, 113 bp, Homo sapiens; identical to SEQ ID NO: 200228
  chr6:1379978-1380091
  hypo

SEQ ID NO: 305326 - DNA, 105 bp, Homo sapiens; identical to SEQ ID NO: 255569
  chr6:1408644-1408749
  hypo

SEQ ID NO: 305327 - DNA, 285 bp, Homo sapiens; identical to SEQ ID NO: 255570
  chr6:1446292-1446577
  hypo

SEQ ID NO: 305328 - DNA, 158 bp, Homo sapiens
  chr6:1515495-1515653
  hypo
atgggtccctcatgcagagacgttgccacgttcatcccggggctggagctgctgcttcacactgacttacacggtgagcagcggcggcaggggaggaggtggaacccgcggcgagctgctgcttcacactgacttacaccgtgagcagcggcggcagg

SEQ ID NO: 305329 - DNA, 144 bp, Homo sapiens
  chr6:1515702-1515846
  hypo
cacacactcacgcacttgcacacgctccaaggcccggaaggaagctgaggccggcccgcctcccgccaaagggccgaggaatcccgccacctaacggcaggggcaggggccacagctggcaacgcctactttaattttaaaaat

SEQ ID NO: 305330 - DNA, 323 bp, Homo sapiens; identical to SEQ ID NO: 255572
  chr6:1523633-1523956
  hypo

SEQ ID NO: 305331 - DNA, 74 bp, Homo sapiens; identical to SEQ ID NO: 255573
  chr6:1574420-1574494
  hypo

SEQ ID NO: 305332 - DNA, 100 bp, Homo sapiens; identical to SEQ ID NO: 255574
  chr6:1587933-1588033
  hypo

SEQ ID NO: 305333 - DNA, 633 bp, Homo sapiens; identical to SEQ ID NO: 283692
  chr6:1610183-1610816
  hypo

SEQ ID NO: 305334 - DNA, 334 bp, Homo sapiens; identical to SEQ ID NO: 200232
  chr6:1610864-1611198
  hypo

SEQ ID NO: 305335 - DNA, 65 bp, Homo sapiens; identical to SEQ ID NO: 283694
  chr6:1612131-1612196
  hypo

SEQ ID NO: 305336 - DNA, 186 bp, Homo sapiens; identical to SEQ ID NO: 112753
  chr6:1612300-1612486
  hypo

SEQ ID NO: 305337 - DNA, 172 bp, Homo sapiens; identical to SEQ ID NO: 255575
  chr6:1631279-1631451
  hypo

SEQ ID NO: 305338 - DNA, 73 bp, Homo sapiens; identical to SEQ ID NO: 255576
  chr6:1666397-1666470
  hypo

SEQ ID NO: 305339 - DNA, 159 bp, Homo sapiens; identical to SEQ ID NO: 255577
  chr6:1679665-1679824
  hypo

SEQ ID NO: 305340 - DNA, 34 bp, Homo sapiens
  chr6:1702254-1702288
  hypo
tctcaaatgacgcacgcctctcttgggtattatc

SEQ ID NO: 305341 - DNA, 70 bp, Homo sapiens; identical to SEQ ID NO: 152413
  chr6:1702366-1702436
  hypo

SEQ ID NO: 305342 - DNA, 195 bp, Homo sapiens; identical to SEQ ID NO: 210564
  chr6:1708418-1708613
  hypo

SEQ ID NO: 305343 - DNA, 102 bp, Homo sapiens; identical to SEQ ID NO: 210565
  chr6:1708643-1708745
  hypo

SEQ ID NO: 305344 - DNA, 116 bp, Homo sapiens
  chr6:1726568-1726684
  hypo
ggcaccaggcattccatgagcgcatttgcccagccagccagccaaatgtggccacgcactgggtggccagagagtccttaccacttcagttggccggtagtacttgagatccacag

SEQ ID NO: 305345 - DNA, 62 bp, Homo sapiens
  chr6:1726859-1726921
  hypo
accacagcagcacaggctgatgctccagctgattattaaagcaacggcgactttcaaagcct

SEQ ID NO: 305346 - DNA, 101 bp, Homo sapiens; identical to SEQ ID NO: 255581
  chr6:1874237-1874338
  hypo

SEQ ID NO: 305347 - DNA, 150 bp, Homo sapiens; identical to SEQ ID NO: 255582
  chr6:1923749-1923899
  hypo

SEQ ID NO: 305348 - DNA, 281 bp, Homo sapiens; identical to SEQ ID NO: 210566
  chr6:1953249-1953530
  hypo

SEQ ID NO: 305349 - DNA, 179 bp, Homo sapiens; identical to SEQ ID NO: 210567
  chr6:2108903-2109082
  hypo

SEQ ID NO: 305350 - DNA, 96 bp, Homo sapiens; identical to SEQ ID NO: 210568
  chr6:2233026-2233122
  hypo

SEQ ID NO: 305351 - DNA, 68 bp, Homo sapiens; identical to SEQ ID NO: 255586
  chr6:2244787-2244855
  hypo

SEQ ID NO: 305352 - DNA, 121 bp, Homo sapiens; identical to SEQ ID NO: 255587
  chr6:2377321-2377442
  hypo

SEQ ID NO: 305353 - DNA, 573 bp, Homo sapiens; identical to SEQ ID NO: 255588
  chr6:2434635-2435208
  hypo

SEQ ID NO: 305354 - DNA, 167 bp, Homo sapiens; identical to SEQ ID NO: 255589
  chr6:2447382-2447549
  hypo

SEQ ID NO: 305355 - DNA, 40 bp, Homo sapiens
  chr6:2510117-2510157
  hypo
tcaccatgtggaccccaggacgccaccgcgtgatgcttct

SEQ ID NO: 305356 - DNA, 81 bp, Homo sapiens
  chr6:2510187-2510268
  hypo
ttaccagccgagcgttgccgcctagcttgatgacagaggcttaaacaatatcagaatgacgtggtaatgctgaatcataag

SEQ ID NO: 305357 - DNA, 140 bp, Homo sapiens; identical to SEQ ID NO: 255591
  chr6:2530903-2531043
  hypo

SEQ ID NO: 305358 - DNA, 385 bp, Homo sapiens; identical to SEQ ID NO: 210569
  chr6:2559179-2559564
  hypo

SEQ ID NO: 305359 - DNA, 67 bp, Homo sapiens; identical to SEQ ID NO: 255593
  chr6:2697706-2697773
  hypo

SEQ ID NO: 305360 - DNA, 395 bp, Homo sapiens; identical to SEQ ID NO: 255594
  chr6:2701264-2701659
  hypo

SEQ ID NO: 305361 - DNA, 56 bp, Homo sapiens; identical to SEQ ID NO: 255595
  chr6:2780602-2780658
  hypo

SEQ ID NO: 305362 - DNA, 79 bp, Homo sapiens; identical to SEQ ID NO: 255596
  chr6:2870699-2870778
  hypo

SEQ ID NO: 305363 - DNA, 289 bp, Homo sapiens; identical to SEQ ID NO: 255597
  chr6:2891875-2892164
  hypo

SEQ ID NO: 305364 - DNA, 33 bp, Homo sapiens; identical to SEQ ID NO: 210570
  chr6:2906982-2907015
  hypo

SEQ ID NO: 305365 - DNA, 92 bp, Homo sapiens; identical to SEQ ID NO: 210571
  chr6:2907135-2907227
  hypo

SEQ ID NO: 305366 - DNA, 63 bp, Homo sapiens; identical to SEQ ID NO: 255600
  chr6:2907533-2907596
  hypo

SEQ ID NO: 305367 - DNA, 218 bp, Homo sapiens; identical to SEQ ID NO: 210572
  chr6:2920938-2921156
  hypo

SEQ ID NO: 305368 - DNA, 180 bp, Homo sapiens; identical to SEQ ID NO: 255602
  chr6:2939519-2939699
  hypo

SEQ ID NO: 305369 - DNA, 134 bp, Homo sapiens
  chr6:2985173-2985307
  hypo
tcccaggactttgccgaagggagtggcgtccatttgcatgaggagctcaggaaaactgctcctcaggtgccgagttagagacacctagtgagcttcaccagagtagttttgaccagggatacaacaaagctcct

SEQ ID NO: 305370 - DNA, 43 bp, Homo sapiens; identical to SEQ ID NO: 210573
  chr6:2986010-2986053
  hypo

SEQ ID NO: 305371 - DNA, 208 bp, Homo sapiens; identical to SEQ ID NO: 283705
  chr6:2999193-2999401
  hypo

SEQ ID NO: 305372 - DNA, 38 bp, Homo sapiens
  chr6:3053001-3053039
  hypo
cctgaccccacgggcgtggcttggccaggcagctcagg

SEQ ID NO: 305373 - DNA, 230 bp, Homo sapiens
  chr6:3053069-3053299
  hypo
ctcaggtcgctctcaatctatggggaacctagagggaaggaggctgcccatggcgcacaccgtggagggaccctgaggacagcggagagcaggtctaaggtgaggcaggtgctctcaggttaaagataggggaagaatctgaagcactattgcagacgggcccccaggagggttaaaggtcaaggtggaggcgaaactaagattggaaggtgagtatgcagcccagagtc

SEQ ID NO: 305374 - DNA, 46 bp, Homo sapiens
  chr6:3065504-3065550
  hypo
aaaaaaaaaaaaaaaaaaaaagacacggctttctgaggtgccgtgc

SEQ ID NO: 305375 - DNA, 383 bp, Homo sapiens; identical to SEQ ID NO: 210574
  chr6:3115566-3115949
  hypo

SEQ ID NO: 305376 - DNA, 128 bp, Homo sapiens; identical to SEQ ID NO: 255608
  chr6:3132220-3132348
  hypo

SEQ ID NO: 305377 - DNA, 254 bp, Homo sapiens; identical to SEQ ID NO: 200241
  chr6:3162842-3163096
  hypo

SEQ ID NO: 305378 - DNA, 40 bp, Homo sapiens; identical to SEQ ID NO: 255609
  chr6:3177387-3177427
  hypo

SEQ ID NO: 305379 - DNA, 40 bp, Homo sapiens; identical to SEQ ID NO: 210576
  chr6:3179684-3179724
  hypo

SEQ ID NO: 305380 - DNA, 215 bp, Homo sapiens; identical to SEQ ID NO: 255611
  chr6:3193808-3194023
  hypo

SEQ ID NO: 305381 - DNA, 44 bp, Homo sapiens; identical to SEQ ID NO: 255612
  chr6:3194436-3194480
  hypo

SEQ ID NO: 305382 - DNA, 352 bp, Homo sapiens; identical to SEQ ID NO: 255613
  chr6:3195390-3195742
  hypo

SEQ ID NO: 305383 - DNA, 218 bp, Homo sapiens; identical to SEQ ID NO: 255614
  chr6:3218509-3218727
  hypo

SEQ ID NO: 305384 - DNA, 149 bp, Homo sapiens; identical to SEQ ID NO: 255615
  chr6:3250843-3250992
  hypo

SEQ ID NO: 305385 - DNA, 178 bp, Homo sapiens; identical to SEQ ID NO: 210578
  chr6:3263636-3263814
  hypo

SEQ ID NO: 305386 - DNA, 44 bp, Homo sapiens; identical to SEQ ID NO: 255617
  chr6:3263844-3263888
  hypo

SEQ ID NO: 305387 - DNA, 90 bp, Homo sapiens; identical to SEQ ID NO: 255618
  chr6:3267969-3268059
  hypo

SEQ ID NO: 305388 - DNA, 68 bp, Homo sapiens; identical to SEQ ID NO: 255619
  chr6:3269488-3269556
  hypo

SEQ ID NO: 305389 - DNA, 248 bp, Homo sapiens; identical to SEQ ID NO: 255620
  chr6:3273206-3273454
  hypo

SEQ ID NO: 305390 - DNA, 96 bp, Homo sapiens; identical to SEQ ID NO: 210579
  chr6:3281277-3281373
  hypo

SEQ ID NO: 305391 - DNA, 280 bp, Homo sapiens
  chr6:3285535-3285815
  hypo
tttttgttaggaagacaggagtgagaccctgctggcctcagagcctgaggagaaaatggaaccttcacagtgagaccccagcaggtgcaaagggtgagcttccttgcatgtaaagtcacccacaggtcactgccgcctgcattcaagctgcgtcaagtgctgtggggtgcccctgccagccccagctctgctcctcacggctgcttggtgttcgcctggggctcctgtgcattcctgctcagggccaaaggggcaccacaacacccgggggctgaggcac

SEQ ID NO: 305392 - DNA, 36 bp, Homo sapiens; identical to SEQ ID NO: 210581
  chr6:3289595-3289631
  hypo

SEQ ID NO: 305393 - DNA, 152 bp, Homo sapiens; identical to SEQ ID NO: 255624
  chr6:3290703-3290855
  hypo

SEQ ID NO: 305394 - DNA, 120 bp, Homo sapiens; identical to SEQ ID NO: 255625
  chr6:3302110-3302230
  hypo

SEQ ID NO: 305395 - DNA, 69 bp, Homo sapiens; identical to SEQ ID NO: 255627
  chr6:3312767-3312836
  hypo

SEQ ID NO: 305396 - DNA, 69 bp, Homo sapiens; identical to SEQ ID NO: 255628
  chr6:3315028-3315097
  hypo

SEQ ID NO: 305397 - DNA, 157 bp, Homo sapiens; identical to SEQ ID NO: 255629
  chr6:3315694-3315851
  hypo

SEQ ID NO: 305398 - DNA, 76 bp, Homo sapiens; identical to SEQ ID NO: 210582
  chr6:3316815-3316891
  hypo

SEQ ID NO: 305399 - DNA, 200 bp, Homo sapiens; identical to SEQ ID NO: 255631
  chr6:3321383-3321583
  hypo

SEQ ID NO: 305400 - DNA, 178 bp, Homo sapiens; identical to SEQ ID NO: 255632
  chr6:3322742-3322920
  hypo

SEQ ID NO: 305401 - DNA, 527 bp, Homo sapiens; identical to SEQ ID NO: 255633
  chr6:3328432-3328959
  hypo

SEQ ID NO: 305402 - DNA, 203 bp, Homo sapiens; identical to SEQ ID NO: 210583
  chr6:3333155-3333358
  hypo

SEQ ID NO: 305403 - DNA, 210 bp, Homo sapiens; identical to SEQ ID NO: 255635
  chr6:3346366-3346576
  hypo

SEQ ID NO: 305404 - DNA, 169 bp, Homo sapiens; identical to SEQ ID NO: 210584
  chr6:3405476-3405645
  hypo

SEQ ID NO: 305405 - DNA, 92 bp, Homo sapiens; identical to SEQ ID NO: 210585
  chr6:3405713-3405805
  hypo

SEQ ID NO: 305406 - DNA, 556 bp, Homo sapiens; identical to SEQ ID NO: 255637
  chr6:3441846-3442402
  hypo

SEQ ID NO: 305407 - DNA, 46 bp, Homo sapiens; identical to SEQ ID NO: 255638
  chr6:3445257-3445303
  hypo

SEQ ID NO: 305408 - DNA, 43 bp, Homo sapiens; identical to SEQ ID NO: 255639
  chr6:3450542-3450585
  hypo

SEQ ID NO: 305409 - DNA, 42 bp, Homo sapiens; identical to SEQ ID NO: 255640
  chr6:3450825-3450867
  hypo

SEQ ID NO: 305410 - DNA, 1366 bp, Homo sapiens; identical to SEQ ID NO: 283714
  chr6:3455898-3457264
  hypo

SEQ ID NO: 305411 - DNA, 706 bp, Homo sapiens; identical to SEQ ID NO: 200247
  chr6:3457537-3458243
  hypo

SEQ ID NO: 305412 - DNA, 216 bp, Homo sapiens; identical to SEQ ID NO: 255641
  chr6:3468953-3469169
  hypo

SEQ ID NO: 305413 - DNA, 96 bp, Homo sapiens; identical to SEQ ID NO: 255642
  chr6:3471226-3471322
  hypo

SEQ ID NO: 305414 - DNA, 272 bp, Homo sapiens; identical to SEQ ID NO: 255643
  chr6:3515169-3515441
  hypo

SEQ ID NO: 305415 - DNA, 139 bp, Homo sapiens; identical to SEQ ID NO: 255644
  chr6:3540898-3541037
  hypo

SEQ ID NO: 305416 - DNA, 100 bp, Homo sapiens; identical to SEQ ID NO: 255645
  chr6:3543266-3543366
  hypo

SEQ ID NO: 305417 - DNA, 140 bp, Homo sapiens; identical to SEQ ID NO: 255646
  chr6:3572618-3572758
  hypo

SEQ ID NO: 305418 - DNA, 256 bp, Homo sapiens; identical to SEQ ID NO: 255647
  chr6:3578544-3578800
  hypo

SEQ ID NO: 305419 - DNA, 221 bp, Homo sapiens; identical to SEQ ID NO: 210589
  chr6:3579860-3580081
  hypo

SEQ ID NO: 305420 - DNA, 71 bp, Homo sapiens; identical to SEQ ID NO: 255649
  chr6:3590114-3590185
  hypo

SEQ ID NO: 305421 - DNA, 446 bp, Homo sapiens
  chr6:3593169-3593615
  hypo
ccagagcccactaacgcagtgggggccccggggttttaccaactggtccacttggccctattatttctcttcattctttgtgagccatgtggctcctcactggtggctgctgctaatattttagacccaccatttgtgtcctacaccttcgaaactgcaggaaagtctccgggggagtgggggcaacgggctctcccccccgcaccccattaatcgtatcttgctggaaggggctgcaaagcggtgcttagggaaacctctatttccaccgataaccctttccctcaaaaatacatactccttattttgctgatgatgaaaaccaagtttcaggttgttgaagagatttgccttagatttcctcttgagaagacagtagacgggaaataaatccagccggaaacccattcaactaaccaacactgcctctttgcatgtttgtgcat

SEQ ID NO: 305422 - DNA, 517 bp, Homo sapiens; identical to SEQ ID NO: 210590
  chr6:3618095-3618612
  hypo

SEQ ID NO: 305423 - DNA, 43 bp, Homo sapiens; identical to SEQ ID NO: 255652
  chr6:3633705-3633748
  hypo

SEQ ID NO: 305424 - DNA, 34 bp, Homo sapiens; identical to SEQ ID NO: 255653
  chr6:3646462-3646496
  hypo

SEQ ID NO: 305425 - DNA, 390 bp, Homo sapiens; identical to SEQ ID NO: 210591
  chr6:3646960-3647350
  hypo

SEQ ID NO: 305426 - DNA, 132 bp, Homo sapiens; identical to SEQ ID NO: 255655
  chr6:3654812-3654944
  hypo

SEQ ID NO: 305427 - DNA, 198 bp, Homo sapiens; identical to SEQ ID NO: 255656
  chr6:3711994-3712192
  hypo

SEQ ID NO: 305428 - DNA, 339 bp, Homo sapiens; identical to SEQ ID NO: 210592
  chr6:3724299-3724638
  hypo

SEQ ID NO: 305429 - DNA, 577 bp, Homo sapiens; identical to SEQ ID NO: 255658
  chr6:3724871-3725448
  hypo

SEQ ID NO: 305430 - DNA, 432 bp, Homo sapiens; identical to SEQ ID NO: 210594
  chr6:3725748-3726180
  hypo

SEQ ID NO: 305431 - DNA, 115 bp, Homo sapiens; identical to SEQ ID NO: 255660
  chr6:3734363-3734478
  hypo

SEQ ID NO: 305432 - DNA, 129 bp, Homo sapiens; identical to SEQ ID NO: 255661
  chr6:3738059-3738188
  hypo

SEQ ID NO: 305433 - DNA, 715 bp, Homo sapiens; identical to SEQ ID NO: 222803
  chr6:3750700-3751415
  hypo

SEQ ID NO: 305434 - DNA, 127 bp, Homo sapiens; identical to SEQ ID NO: 255662
  chr6:3784841-3784968
  hypo

SEQ ID NO: 305435 - DNA, 52 bp, Homo sapiens; identical to SEQ ID NO: 210595
  chr6:3821400-3821452
  hypo

SEQ ID NO: 305436 - DNA, 35 bp, Homo sapiens; identical to SEQ ID NO: 255664
  chr6:3850718-3850753
  hypo

SEQ ID NO: 305437 - DNA, 325 bp, Homo sapiens; identical to SEQ ID NO: 255665
  chr6:3880043-3880368
  hypo

SEQ ID NO: 305438 - DNA, 67 bp, Homo sapiens; identical to SEQ ID NO: 255666
  chr6:3900289-3900356
  hypo

SEQ ID NO: 305439 - DNA, 36 bp, Homo sapiens; identical to SEQ ID NO: 255667
  chr6:4008152-4008188
  hypo

SEQ ID NO: 305440 - DNA, 187 bp, Homo sapiens; identical to SEQ ID NO: 210596
  chr6:4020369-4020556
  hypo

SEQ ID NO: 305441 - DNA, 154 bp, Homo sapiens; identical to SEQ ID NO: 210597
  chr6:4061559-4061713
  hypo

SEQ ID NO: 305442 - DNA, 101 bp, Homo sapiens; identical to SEQ ID NO: 255670
  chr6:4189172-4189273
  hypo

SEQ ID NO: 305443 - DNA, 187 bp, Homo sapiens; identical to SEQ ID NO: 210598
  chr6:4254744-4254931
  hypo

SEQ ID NO: 305444 - DNA, 201 bp, Homo sapiens; identical to SEQ ID NO: 210599
  chr6:4494278-4494479
  hypo

SEQ ID NO: 305445 - DNA, 368 bp, Homo sapiens; identical to SEQ ID NO: 255673
  chr6:4549977-4550345
  hypo

SEQ ID NO: 305446 - DNA, 433 bp, Homo sapiens; identical to SEQ ID NO: 255674
  chr6:4559571-4560004
  hypo

SEQ ID NO: 305447 - DNA, 68 bp, Homo sapiens; identical to SEQ ID NO: 255675
  chr6:4563333-4563401
  hypo

SEQ ID NO: 305448 - DNA, 42 bp, Homo sapiens; identical to SEQ ID NO: 255676
  chr6:4689095-4689137
  hypo

SEQ ID NO: 305449 - DNA, 95 bp, Homo sapiens; identical to SEQ ID NO: 255677
  chr6:4724690-4724785
  hypo

SEQ ID NO: 305450 - DNA, 95 bp, Homo sapiens; identical to SEQ ID NO: 200248
  chr6:4775543-4775638
  hypo

SEQ ID NO: 305451 - DNA, 358 bp, Homo sapiens; identical to SEQ ID NO: 200249
  chr6:4775639-4775997
  hypo

SEQ ID NO: 305452 - DNA, 83 bp, Homo sapiens; identical to SEQ ID NO: 112795
  chr6:4776187-4776270
  hypo

SEQ ID NO: 305453 - DNA, 61 bp, Homo sapiens; identical to SEQ ID NO: 255678
  chr6:4782240-4782301
  hypo

SEQ ID NO: 305454 - DNA, 124 bp, Homo sapiens
  chr6:4836458-4836582
  hypo
ctccccaaggcttaggtttctaagtcagccacaaatgctacccaaaactacataaagaagaaaaaagttgcatagaaccaaaaagtgagttttaattatttattttatacgtgtgctttcagaa

SEQ ID NO: 305455 - DNA, 112 bp, Homo sapiens; identical to SEQ ID NO: 255680
  chr6:4854165-4854277
  hypo

SEQ ID NO: 305456 - DNA, 70 bp, Homo sapiens; identical to SEQ ID NO: 255681
  chr6:4854537-4854607
  hypo

SEQ ID NO: 305457 - DNA, 91 bp, Homo sapiens
  chr6:4858682-4858773
  hypo
cagcactgctattgtccagccgtccagtcacctggatgagcaaaccagagctcacggagcttaaggaacctgcccagagccacacagcccc

SEQ ID NO: 305458 - DNA, 42 bp, Homo sapiens; identical to SEQ ID NO: 255683
  chr6:4872578-4872620
  hypo

SEQ ID NO: 305459 - DNA, 116 bp, Homo sapiens; identical to SEQ ID NO: 210605
  chr6:4874011-4874127
  hypo

SEQ ID NO: 305460 - DNA, 110 bp, Homo sapiens; identical to SEQ ID NO: 210606
  chr6:4874532-4874642
  hypo

SEQ ID NO: 305461 - DNA, 41 bp, Homo sapiens; identical to SEQ ID NO: 210607
  chr6:4889732-4889773
  hypo

SEQ ID NO: 305462 - DNA, 573 bp, Homo sapiens; identical to SEQ ID NO: 255687
  chr6:4905023-4905596
  hypo

SEQ ID NO: 305463 - DNA, 198 bp, Homo sapiens; identical to SEQ ID NO: 210609
  chr6:4909052-4909250
  hypo

SEQ ID NO: 305464 - DNA, 91 bp, Homo sapiens; identical to SEQ ID NO: 210610
  chr6:4909755-4909846
  hypo

SEQ ID NO: 305465 - DNA, 31 bp, Homo sapiens; identical to SEQ ID NO: 255690
  chr6:4910086-4910117
  hypo

SEQ ID NO: 305466 - DNA, 112 bp, Homo sapiens; identical to SEQ ID NO: 210611
  chr6:4910947-4911059
  hypo

SEQ ID NO: 305467 - DNA, 202 bp, Homo sapiens; identical to SEQ ID NO: 255692
  chr6:4932008-4932210
  hypo

SEQ ID NO: 305468 - DNA, 48 bp, Homo sapiens; identical to SEQ ID NO: 255693
  chr6:4936320-4936368
  hypo

SEQ ID NO: 305469 - DNA, 506 bp, Homo sapiens; identical to SEQ ID NO: 200251
  chr6:4948976-4949482
  hypo

SEQ ID NO: 305470 - DNA, 277 bp, Homo sapiens; identical to SEQ ID NO: 210613
  chr6:4950659-4950936
  hypo

SEQ ID NO: 305471 - DNA, 113 bp, Homo sapiens; identical to SEQ ID NO: 255697
  chr6:4954218-4954331
  hypo

SEQ ID NO: 305472 - DNA, 33 bp, Homo sapiens; identical to SEQ ID NO: 210614
  chr6:5003274-5003307
  hypo

SEQ ID NO: 305473 - DNA, 206 bp, Homo sapiens; identical to SEQ ID NO: 255699
  chr6:5107468-5107674
  hypo

SEQ ID NO: 305474 - DNA, 149 bp, Homo sapiens; identical to SEQ ID NO: 210615
  chr6:5108213-5108362
  hypo

SEQ ID NO: 305475 - DNA, 83 bp, Homo sapiens; identical to SEQ ID NO: 255701
  chr6:5413099-5413182
  hypo

SEQ ID NO: 305476 - DNA, 223 bp, Homo sapiens; identical to SEQ ID NO: 210616
  chr6:5507940-5508163
  hypo

SEQ ID NO: 305477 - DNA, 132 bp, Homo sapiens; identical to SEQ ID NO: 210617
  chr6:5510683-5510815
  hypo

SEQ ID NO: 305478 - DNA, 126 bp, Homo sapiens; identical to SEQ ID NO: 255704
  chr6:5537758-5537884
  hypo

SEQ ID NO: 305479 - DNA, 141 bp, Homo sapiens; identical to SEQ ID NO: 255705
  chr6:5556543-5556684
  hypo

SEQ ID NO: 305480 - DNA, 154 bp, Homo sapiens; identical to SEQ ID NO: 255706
  chr6:5663764-5663918
  hypo

SEQ ID NO: 305481 - DNA, 156 bp, Homo sapiens; identical to SEQ ID NO: 255707
  chr6:5746473-5746629
  hypo

SEQ ID NO: 305482 - DNA, 440 bp, Homo sapiens; identical to SEQ ID NO: 255708
  chr6:5783577-5784017
  hypo

SEQ ID NO: 305483 - DNA, 128 bp, Homo sapiens; identical to SEQ ID NO: 255709
  chr6:5784047-5784175
  hypo

SEQ ID NO: 305484 - DNA, 73 bp, Homo sapiens; identical to SEQ ID NO: 255710
  chr6:5839914-5839987
  hypo

SEQ ID NO: 305485 - DNA, 399 bp, Homo sapiens; identical to SEQ ID NO: 283730
  chr6:5999609-6000008
  hypo

SEQ ID NO: 305486 - DNA, 93 bp, Homo sapiens; identical to SEQ ID NO: 283731
  chr6:6000046-6000139
  hypo

SEQ ID NO: 305487 - DNA, 101 bp, Homo sapiens; identical to SEQ ID NO: 283732
  chr6:6009552-6009653
  hypo

SEQ ID NO: 305488 - DNA, 147 bp, Homo sapiens
  chr6:6045510-6045657
  hypo
aaatgagagttgggacgtgctaagcagcacgctggtagcatccttcttacctacgtgcactgaagccctggatgcacctatcaatcatgcttctttacctactggtgcgccttacttaagtcaactaagaaataaagcaaaattaac

SEQ ID NO: 305489 - DNA, 113 bp, Homo sapiens; identical to SEQ ID NO: 255712
  chr6:6167628-6167741
  hypo

SEQ ID NO: 305490 - DNA, 90 bp, Homo sapiens
  chr6:6199260-6199350
  hypo
gtgttgtggctggagcatagcgtgtttgaacattcaggttcataggagaacggtgatggcaggcaatgcacgaaactaacaaatacatat

SEQ ID NO: 305491 - DNA, 87 bp, Homo sapiens; identical to SEQ ID NO: 210620
  chr6:6199380-6199467
  hypo

SEQ ID NO: 305492 - DNA, 57 bp, Homo sapiens; identical to SEQ ID NO: 255714
  chr6:6250343-6250400
  hypo

SEQ ID NO: 305493 - DNA, 133 bp, Homo sapiens; identical to SEQ ID NO: 283733
  chr6:6546387-6546520
  hypo

SEQ ID NO: 305494 - DNA, 97 bp, Homo sapiens; identical to SEQ ID NO: 283734
  chr6:6547222-6547319
  hypo

SEQ ID NO: 305495 - DNA, 340 bp, Homo sapiens; identical to SEQ ID NO: 255715
  chr6:6614432-6614772
  hypo

SEQ ID NO: 305496 - DNA, 128 bp, Homo sapiens; identical to SEQ ID NO: 255716
  chr6:6737010-6737138
  hypo

SEQ ID NO: 305497 - DNA, 122 bp, Homo sapiens
  chr6:6745316-6745438
  hypo
taatagtaggttcacgctctcactgactcaatagccaagccgcagaccttcatggtgtgcgttacagctcataaagggaacatagacctaaacagcaaacaacaacaagatttaccgcagaa

SEQ ID NO: 305498 - DNA, 56 bp, Homo sapiens
  chr6:6745468-6745524
  hypo
cacaccacaaaagaaaaccgaccaggttataattgctagcgcggcagcctgctttt

SEQ ID NO: 305499 - DNA, 92 bp, Homo sapiens; identical to SEQ ID NO: 255718
  chr6:6753685-6753777
  hypo

SEQ ID NO: 305500 - DNA, 136 bp, Homo sapiens; identical to SEQ ID NO: 210621
  chr6:6780550-6780686
  hypo

SEQ ID NO: 305501 - DNA, 193 bp, Homo sapiens; identical to SEQ ID NO: 255720
  chr6:6824564-6824757
  hypo

SEQ ID NO: 305502 - DNA, 197 bp, Homo sapiens; identical to SEQ ID NO: 210622
  chr6:6898399-6898596
  hypo

SEQ ID NO: 305503 - DNA, 130 bp, Homo sapiens; identical to SEQ ID NO: 210623
  chr6:6901361-6901491
  hypo

SEQ ID NO: 305504 - DNA, 38 bp, Homo sapiens; identical to SEQ ID NO: 255723
  chr6:6934020-6934058
  hypo

SEQ ID NO: 305505 - DNA, 98 bp, Homo sapiens; identical to SEQ ID NO: 255724
  chr6:6969970-6970068
  hypo

SEQ ID NO: 305506 - DNA, 85 bp, Homo sapiens; identical to SEQ ID NO: 210624
  chr6:6971301-6971386
  hypo

SEQ ID NO: 305507 - DNA, 93 bp, Homo sapiens; identical to SEQ ID NO: 255726
  chr6:6982819-6982912
  hypo

SEQ ID NO: 305508 - DNA, 136 bp, Homo sapiens; identical to SEQ ID NO: 255727
  chr6:6984868-6985004
  hypo

SEQ ID NO: 305509 - DNA, 739 bp, Homo sapiens; identical to SEQ ID NO: 283735
  chr6:7051921-7052660
  hypo

SEQ ID NO: 305510 - DNA, 94 bp, Homo sapiens; identical to SEQ ID NO: 255728
  chr6:7058379-7058473
  hypo

SEQ ID NO: 305511 - DNA, 98 bp, Homo sapiens; identical to SEQ ID NO: 255729
  chr6:7132660-7132758
  hypo

SEQ ID NO: 305512 - DNA, 147 bp, Homo sapiens; identical to SEQ ID NO: 210625
  chr6:7204388-7204535
  hypo

SEQ ID NO: 305513 - DNA, 117 bp, Homo sapiens; identical to SEQ ID NO: 210626
  chr6:7204766-7204883
  hypo

SEQ ID NO: 305514 - DNA, 82 bp, Homo sapiens; identical to SEQ ID NO: 210627
  chr6:7230353-7230435
  hypo

SEQ ID NO: 305515 - DNA, 192 bp, Homo sapiens; identical to SEQ ID NO: 210628
  chr6:7237796-7237988
  hypo

SEQ ID NO: 305516 - DNA, 156 bp, Homo sapiens; identical to SEQ ID NO: 210629
  chr6:7246886-7247042
  hypo

SEQ ID NO: 305517 - DNA, 209 bp, Homo sapiens; identical to SEQ ID NO: 255735
  chr6:7247340-7247549
  hypo

SEQ ID NO: 305518 - DNA, 112 bp, Homo sapiens; identical to SEQ ID NO: 255736
  chr6:7267437-7267549
  hypo

SEQ ID NO: 305519 - DNA, 180 bp, Homo sapiens; identical to SEQ ID NO: 255737
  chr6:7268060-7268240
  hypo

SEQ ID NO: 305520 - DNA, 134 bp, Homo sapiens; identical to SEQ ID NO: 210630
  chr6:7269314-7269448
  hypo

SEQ ID NO: 305521 - DNA, 55 bp, Homo sapiens; identical to SEQ ID NO: 255739
  chr6:7271971-7272026
  hypo

SEQ ID NO: 305522 - DNA, 102 bp, Homo sapiens; identical to SEQ ID NO: 210631
  chr6:7294551-7294653
  hypo

SEQ ID NO: 305523 - DNA, 170 bp, Homo sapiens; identical to SEQ ID NO: 255741
  chr6:7415147-7415317
  hypo

SEQ ID NO: 305524 - DNA, 1835 bp, Homo sapiens; identical to SEQ ID NO: 200259
  chr6:7541428-7543263
  hypo

SEQ ID NO: 305525 - DNA, 202 bp, Homo sapiens; identical to SEQ ID NO: 255742
  chr6:7691935-7692137
  hypo

SEQ ID NO: 305526 - DNA, 37 bp, Homo sapiens; identical to SEQ ID NO: 255743
  chr6:7767221-7767258
  hypo

SEQ ID NO: 305527 - DNA, 79 bp, Homo sapiens; identical to SEQ ID NO: 255744
  chr6:7879856-7879935
  hypo

SEQ ID NO: 305528 - DNA, 322 bp, Homo sapiens; identical to SEQ ID NO: 255745
  chr6:7880271-7880593
  hypo

SEQ ID NO: 305529 - DNA, 389 bp, Homo sapiens; identical to SEQ ID NO: 210633
  chr6:7882610-7882999
  hypo

SEQ ID NO: 305530 - DNA, 559 bp, Homo sapiens; identical to SEQ ID NO: 210634
  chr6:7883236-7883795
  hypo

SEQ ID NO: 305531 - DNA, 534 bp, Homo sapiens; identical to SEQ ID NO: 255748
  chr6:7884119-7884653
  hypo

SEQ ID NO: 305532 - DNA, 203 bp, Homo sapiens; identical to SEQ ID NO: 210636
  chr6:7885608-7885811
  hypo

SEQ ID NO: 305533 - DNA, 355 bp, Homo sapiens; identical to SEQ ID NO: 210637
  chr6:7887534-7887889
  hypo

SEQ ID NO: 305534 - DNA, 890 bp, Homo sapiens; identical to SEQ ID NO: 210638
  chr6:7888466-7889356
  hypo

SEQ ID NO: 305535 - DNA, 69 bp, Homo sapiens; identical to SEQ ID NO: 210639
  chr6:7889726-7889795
  hypo

SEQ ID NO: 305536 - DNA, 217 bp, Homo sapiens; identical to SEQ ID NO: 210640
  chr6:7890517-7890734
  hypo

SEQ ID NO: 305537 - DNA, 151 bp, Homo sapiens; identical to SEQ ID NO: 255754
  chr6:7891503-7891654
  hypo

SEQ ID NO: 305538 - DNA, 122 bp, Homo sapiens; identical to SEQ ID NO: 255755
  chr6:7891859-7891981
  hypo

SEQ ID NO: 305539 - DNA, 195 bp, Homo sapiens; identical to SEQ ID NO: 255757
  chr6:7893046-7893241
  hypo

SEQ ID NO: 305540 - DNA, 271 bp, Homo sapiens; identical to SEQ ID NO: 210641
  chr6:7893706-7893977
  hypo

SEQ ID NO: 305541 - DNA, 210 bp, Homo sapiens; identical to SEQ ID NO: 255759
  chr6:7898572-7898782
  hypo

SEQ ID NO: 305542 - DNA, 137 bp, Homo sapiens; identical to SEQ ID NO: 210642
  chr6:7919989-7920126
  hypo

SEQ ID NO: 305543 - DNA, 90 bp, Homo sapiens; identical to SEQ ID NO: 210643
  chr6:7976897-7976987
  hypo

SEQ ID NO: 305544 - DNA, 46 bp, Homo sapiens; identical to SEQ ID NO: 210644
  chr6:7986658-7986704
  hypo

SEQ ID NO: 305545 - DNA, 180 bp, Homo sapiens; identical to SEQ ID NO: 255764
  chr6:9041150-9041330
  hypo

SEQ ID NO: 305546 - DNA, 492 bp, Homo sapiens; identical to SEQ ID NO: 210645
  chr6:10319602-10320094
  hypo

SEQ ID NO: 305547 - DNA, 43 bp, Homo sapiens; identical to SEQ ID NO: 255766
  chr6:10491329-10491372
  hypo

SEQ ID NO: 305548 - DNA, 99 bp, Homo sapiens; identical to SEQ ID NO: 255767
  chr6:10527664-10527763
  hypo

SEQ ID NO: 305549 - DNA, 148 bp, Homo sapiens; identical to SEQ ID NO: 210646
  chr6:10538235-10538383
  hypo

SEQ ID NO: 305550 - DNA, 41 bp, Homo sapiens; identical to SEQ ID NO: 210647
  chr6:10539696-10539737
  hypo

SEQ ID NO: 305551 - DNA, 35 bp, Homo sapiens; identical to SEQ ID NO: 255771
  chr6:10549001-10549036
  hypo

SEQ ID NO: 305552 - DNA, 257 bp, Homo sapiens; identical to SEQ ID NO: 255772
  chr6:10560601-10560858
  hypo

SEQ ID NO: 305553 - DNA, 180 bp, Homo sapiens; identical to SEQ ID NO: 210648
  chr6:10693035-10693215
  hypo

SEQ ID NO: 305554 - DNA, 120 bp, Homo sapiens; identical to SEQ ID NO: 210649
  chr6:10693275-10693395
  hypo

SEQ ID NO: 305555 - DNA, 35 bp, Homo sapiens; identical to SEQ ID NO: 255776
  chr6:10700561-10700596
  hypo

SEQ ID NO: 305556 - DNA, 87 bp, Homo sapiens; identical to SEQ ID NO: 210650
  chr6:10735102-10735189
  hypo

SEQ ID NO: 305557 - DNA, 250 bp, Homo sapiens; identical to SEQ ID NO: 255778
  chr6:10785248-10785498
  hypo

SEQ ID NO: 305558 - DNA, 83 bp, Homo sapiens; identical to SEQ ID NO: 255779
  chr6:11029460-11029543
  hypo

SEQ ID NO: 305559 - DNA, 85 bp, Homo sapiens; identical to SEQ ID NO: 200282
  chr6:11043616-11043701
  hypo

SEQ ID NO: 305560 - DNA, 90 bp, Homo sapiens; identical to SEQ ID NO: 255780
  chr6:11052342-11052432
  hypo

SEQ ID NO: 305561 - DNA, 464 bp, Homo sapiens; identical to SEQ ID NO: 255781
  chr6:11273700-11274164
  hypo

SEQ ID NO: 305562 - DNA, 65 bp, Homo sapiens; identical to SEQ ID NO: 255783
  chr6:11324665-11324730
  hypo

SEQ ID NO: 305563 - DNA, 608 bp, Homo sapiens; identical to SEQ ID NO: 112888
  chr6:11538299-11538907
  hypo

SEQ ID NO: 305564 - DNA, 63 bp, Homo sapiens; identical to SEQ ID NO: 255784
  chr6:11633530-11633593
  hypo

SEQ ID NO: 305565 - DNA, 105 bp, Homo sapiens; identical to SEQ ID NO: 255785
  chr6:11711665-11711770
  hypo

SEQ ID NO: 305566 - DNA, 47 bp, Homo sapiens; identical to SEQ ID NO: 255786
  chr6:11789746-11789793
  hypo

SEQ ID NO: 305567 - DNA, 73 bp, Homo sapiens; identical to SEQ ID NO: 255787
  chr6:11789823-11789896
  hypo

SEQ ID NO: 305568 - DNA, 116 bp, Homo sapiens; identical to SEQ ID NO: 255788
  chr6:11926204-11926320
  hypo

SEQ ID NO: 305569 - DNA, 37 bp, Homo sapiens; identical to SEQ ID NO: 255789
  chr6:12029574-12029611
  hypo

SEQ ID NO: 305570 - DNA, 593 bp, Homo sapiens
  chr6:12222894-12223487
  hypo
actacaagcaccttgtcattagggttttatcgtgctatggatatgctaacgatacatttataaacaaagtttctaagtagtgcaattgccgaggaaaaactgattgatttatacaagtgtggattttttttagacatcccgttccatgccttagggtttctagtgttctctagctgggcaagtccagactcactttggtcttgttctgggtgttttccgaggctgtgctcgctctgtgtggatgacatgagtgtgtgtggagtttatggctgtgataaaatacagctctggcatttgctgtggttccctatcgaaagccacgctttctcggcactggttgcctcccactgtagaatctgaaaatctcagataatcacattcctggtgtgtttgtagctcagcagaggaatggcacccaatcctgggcaaaggaatgtgaaggtttctggaaaacaggttttcttccccaattttcaaagagaggtttcttccggtccctgccttcgttcgagggagcacgtgatacttggcactgcaaccacagtcttgtgaacctgtgggagcagcaccaaggaccacgaagaggctgcccc

SEQ ID NO: 305571 - DNA, 95 bp, Homo sapiens; identical to SEQ ID NO: 210652
  chr6:12287832-12287927
  hypo

SEQ ID NO: 305572 - DNA, 265 bp, Homo sapiens; identical to SEQ ID NO: 255794
  chr6:12338229-12338494
  hypo

SEQ ID NO: 305573 - DNA, 82 bp, Homo sapiens; identical to SEQ ID NO: 255795
  chr6:12456683-12456765
  hypo

SEQ ID NO: 305574 - DNA, 105 bp, Homo sapiens; identical to SEQ ID NO: 255796
  chr6:12965812-12965917
  hypo

SEQ ID NO: 305575 - DNA, 296 bp, Homo sapiens; identical to SEQ ID NO: 255797
  chr6:13295931-13296227
  hypo

SEQ ID NO: 305576 - DNA, 183 bp, Homo sapiens; identical to SEQ ID NO: 210653
  chr6:13296596-13296779
  hypo

SEQ ID NO: 305577 - DNA, 258 bp, Homo sapiens; identical to SEQ ID NO: 255799
  chr6:13318558-13318816
  hypo

SEQ ID NO: 305578 - DNA, 135 bp, Homo sapiens; identical to SEQ ID NO: 210654
  chr6:13333029-13333164
  hypo

SEQ ID NO: 305579 - DNA, 100 bp, Homo sapiens; identical to SEQ ID NO: 255801
  chr6:13351756-13351856
  hypo

SEQ ID NO: 305580 - DNA, 172 bp, Homo sapiens; identical to SEQ ID NO: 255802
  chr6:13386517-13386689
  hypo

SEQ ID NO: 305581 - DNA, 83 bp, Homo sapiens; identical to SEQ ID NO: 210655
  chr6:13397453-13397536
  hypo

SEQ ID NO: 305582 - DNA, 389 bp, Homo sapiens; identical to SEQ ID NO: 210656
  chr6:13456727-13457116
  hypo

SEQ ID NO: 305583 - DNA, 380 bp, Homo sapiens
  chr6:13510021-13510401
  hypo
gtcgtgattaaaagcgataaagtgtattcactcagtgggatactaagtagcaatgagaacgaattaactacaactactagagatgatagacaaatctcacaatcagtgaaagaagccaaacacaaaagagttcatactgtgtgatttcatttataggaaaccaatttatggcgacatgggtcagaatcacatgcgaaacacagggctgattgggaggagttttgagcttcccttctggggtgctagtcgtgtttttttcatctggattattagtcacacgggcgtatttactttgtaatagtttgccaaggtgtgatgattggtgcacttttctgttacatacatacgtattttagacaatctccctctgtcctccaggg

SEQ ID NO: 305584 - DNA, 146 bp, Homo sapiens; identical to SEQ ID NO: 200285
  chr6:13574018-13574164
  hypo

SEQ ID NO: 305585 - DNA, 37 bp, Homo sapiens; identical to SEQ ID NO: 210658
  chr6:13631319-13631356
  hypo

SEQ ID NO: 305586 - DNA, 84 bp, Homo sapiens; identical to SEQ ID NO: 255807
  chr6:13780584-13780668
  hypo

SEQ ID NO: 305587 - DNA, 126 bp, Homo sapiens; identical to SEQ ID NO: 210659
  chr6:14002319-14002445
  hypo

SEQ ID NO: 305588 - DNA, 54 bp, Homo sapiens; identical to SEQ ID NO: 210660
  chr6:14002475-14002529
  hypo

SEQ ID NO: 305589 - DNA, 89 bp, Homo sapiens; identical to SEQ ID NO: 255809
  chr6:14002889-14002978
  hypo

SEQ ID NO: 305590 - DNA, 100 bp, Homo sapiens; identical to SEQ ID NO: 210661
  chr6:14099382-14099482
  hypo

SEQ ID NO: 305591 - DNA, 41 bp, Homo sapiens; identical to SEQ ID NO: 255811
  chr6:14116492-14116533
  hypo

SEQ ID NO: 305592 - DNA, 292 bp, Homo sapiens; identical to SEQ ID NO: 283782
  chr6:14117386-14117678
  hypo

SEQ ID NO: 305593 - DNA, 40 bp, Homo sapiens; identical to SEQ ID NO: 255812
  chr6:14130664-14130704
  hypo

SEQ ID NO: 305594 - DNA, 94 bp, Homo sapiens; identical to SEQ ID NO: 255813
  chr6:14139162-14139256
  hypo

SEQ ID NO: 305595 - DNA, 111 bp, Homo sapiens; identical to SEQ ID NO: 210663
  chr6:14203412-14203523
  hypo

SEQ ID NO: 305596 - DNA, 128 bp, Homo sapiens; identical to SEQ ID NO: 200288
  chr6:14211103-14211231
  hypo

SEQ ID NO: 305597 - DNA, 172 bp, Homo sapiens; identical to SEQ ID NO: 255815
  chr6:14273201-14273373
  hypo

SEQ ID NO: 305598 - DNA, 144 bp, Homo sapiens; identical to SEQ ID NO: 255816
  chr6:14274907-14275051
  hypo

SEQ ID NO: 305599 - DNA, 434 bp, Homo sapiens; identical to SEQ ID NO: 210665
  chr6:14282463-14282897
  hypo

SEQ ID NO: 305600 - DNA, 148 bp, Homo sapiens; identical to SEQ ID NO: 210666
  chr6:14324570-14324718
  hypo

SEQ ID NO: 305601 - DNA, 36 bp, Homo sapiens; identical to SEQ ID NO: 255819
  chr6:14726132-14726168
  hypo

SEQ ID NO: 305602 - DNA, 136 bp, Homo sapiens; identical to SEQ ID NO: 255820
  chr6:14772274-14772410
  hypo

SEQ ID NO: 305603 - DNA, 36 bp, Homo sapiens; identical to SEQ ID NO: 255821
  chr6:14777340-14777376
  hypo

SEQ ID NO: 305604 - DNA, 36 bp, Homo sapiens; identical to SEQ ID NO: 255822
  chr6:14916087-14916123
  hypo

SEQ ID NO: 305605 - DNA, 31 bp, Homo sapiens; identical to SEQ ID NO: 255823
  chr6:14930077-14930108
  hypo

SEQ ID NO: 305606 - DNA, 32 bp, Homo sapiens; identical to SEQ ID NO: 255824
  chr6:14934115-14934147
  hypo

SEQ ID NO: 305607 - DNA, 81 bp, Homo sapiens; identical to SEQ ID NO: 255825
  chr6:14941362-14941443
  hypo

SEQ ID NO: 305608 - DNA, 87 bp, Homo sapiens; identical to SEQ ID NO: 210667
  chr6:14966820-14966907
  hypo

SEQ ID NO: 305609 - DNA, 102 bp, Homo sapiens; identical to SEQ ID NO: 255827
  chr6:14986858-14986960
  hypo

SEQ ID NO: 305610 - DNA, 39 bp, Homo sapiens; identical to SEQ ID NO: 210668
  chr6:15083849-15083888
  hypo

SEQ ID NO: 305611 - DNA, 209 bp, Homo sapiens; identical to SEQ ID NO: 210669
  chr6:15227670-15227879
  hypo

SEQ ID NO: 305612 - DNA, 42 bp, Homo sapiens; identical to SEQ ID NO: 255830
  chr6:15263032-15263074
  hypo

SEQ ID NO: 305613 - DNA, 43 bp, Homo sapiens; identical to SEQ ID NO: 210670
  chr6:15282318-15282361
  hypo

SEQ ID NO: 305614 - DNA, 43 bp, Homo sapiens; identical to SEQ ID NO: 210671
  chr6:15282481-15282524
  hypo

SEQ ID NO: 305615 - DNA, 120 bp, Homo sapiens; identical to SEQ ID NO: 210672
  chr6:15283483-15283603
  hypo

SEQ ID NO: 305616 - DNA, 38 bp, Homo sapiens; identical to SEQ ID NO: 255834
  chr6:15469670-15469708
  hypo

SEQ ID NO: 305617 - DNA, 149 bp, Homo sapiens; identical to SEQ ID NO: 255835
  chr6:15501255-15501404
  hypo

SEQ ID NO: 305618 - DNA, 128 bp, Homo sapiens; identical to SEQ ID NO: 255836
  chr6:15503289-15503417
  hypo

SEQ ID NO: 305619 - DNA, 152 bp, Homo sapiens; identical to SEQ ID NO: 210673
  chr6:15512506-15512658
  hypo

SEQ ID NO: 305620 - DNA, 409 bp, Homo sapiens; identical to SEQ ID NO: 210674
  chr6:15513371-15513780
  hypo

SEQ ID NO: 305621 - DNA, 62 bp, Homo sapiens; identical to SEQ ID NO: 210675
  chr6:15513981-15514043
  hypo

SEQ ID NO: 305622 - DNA, 41 bp, Homo sapiens; identical to SEQ ID NO: 210676
  chr6:15518530-15518571
  hypo

SEQ ID NO: 305623 - DNA, 53 bp, Homo sapiens; identical to SEQ ID NO: 210677
  chr6:15523495-15523548
  hypo

SEQ ID NO: 305624 - DNA, 300 bp, Homo sapiens; identical to SEQ ID NO: 255841
  chr6:15525179-15525479
  hypo

SEQ ID NO: 305625 - DNA, 41 bp, Homo sapiens; identical to SEQ ID NO: 255842
  chr6:15530495-15530536
  hypo

SEQ ID NO: 305626 - DNA, 31 bp, Homo sapiens; identical to SEQ ID NO: 210678
  chr6:15907074-15907105
  hypo

SEQ ID NO: 305627 - DNA, 146 bp, Homo sapiens; identical to SEQ ID NO: 255845
  chr6:16197607-16197753
  hypo

SEQ ID NO: 305628 - DNA, 146 bp, Homo sapiens; identical to SEQ ID NO: 255847
  chr6:16298907-16299053
  hypo

SEQ ID NO: 305629 - DNA, 139 bp, Homo sapiens; identical to SEQ ID NO: 210679
  chr6:16322047-16322186
  hypo

SEQ ID NO: 305630 - DNA, 45 bp, Homo sapiens; identical to SEQ ID NO: 255849
  chr6:16733498-16733543
  hypo

SEQ ID NO: 305631 - DNA, 42 bp, Homo sapiens; identical to SEQ ID NO: 255850
  chr6:16841589-16841631
  hypo

SEQ ID NO: 305632 - DNA, 65 bp, Homo sapiens; identical to SEQ ID NO: 200293
  chr6:17281262-17281327
  hypo

SEQ ID NO: 305633 - DNA, 89 bp, Homo sapiens; identical to SEQ ID NO: 200294
  chr6:17281328-17281417
  hypo

SEQ ID NO: 305634 - DNA, 564 bp, Homo sapiens; identical to SEQ ID NO: 200295
  chr6:17281534-17282098
  hypo

SEQ ID NO: 305635 - DNA, 204 bp, Homo sapiens; identical to SEQ ID NO: 255852
  chr6:17508425-17508629
  hypo

SEQ ID NO: 305636 - DNA, 120 bp, Homo sapiens; identical to SEQ ID NO: 255853
  chr6:17756939-17757059
  hypo

SEQ ID NO: 305637 - DNA, 42 bp, Homo sapiens; identical to SEQ ID NO: 210683
  chr6:17761882-17761924
  hypo

SEQ ID NO: 305638 - DNA, 76 bp, Homo sapiens; identical to SEQ ID NO: 210684
  chr6:17788886-17788962
  hypo

SEQ ID NO: 305639 - DNA, 95 bp, Homo sapiens; identical to SEQ ID NO: 210685
  chr6:17797155-17797250
  hypo

SEQ ID NO: 305640 - DNA, 254 bp, Homo sapiens; identical to SEQ ID NO: 255857
  chr6:17799566-17799820
  hypo

SEQ ID NO: 305641 - DNA, 67 bp, Homo sapiens; identical to SEQ ID NO: 210686
  chr6:17800168-17800235
  hypo

SEQ ID NO: 305642 - DNA, 94 bp, Homo sapiens; identical to SEQ ID NO: 255859
  chr6:17801739-17801833
  hypo

SEQ ID NO: 305643 - DNA, 51 bp, Homo sapiens; identical to SEQ ID NO: 255860
  chr6:17837137-17837188
  hypo

SEQ ID NO: 305644 - DNA, 36 bp, Homo sapiens; identical to SEQ ID NO: 255861
  chr6:17934558-17934594
  hypo

SEQ ID NO: 305645 - DNA, 329 bp, Homo sapiens; identical to SEQ ID NO: 210687
  chr6:17940369-17940698
  hypo

SEQ ID NO: 305646 - DNA, 38 bp, Homo sapiens; identical to SEQ ID NO: 255863
  chr6:18024631-18024669
  hypo

SEQ ID NO: 305647 - DNA, 120 bp, Homo sapiens; identical to SEQ ID NO: 210688
  chr6:18030874-18030994
  hypo

SEQ ID NO: 305648 - DNA, 104 bp, Homo sapiens; identical to SEQ ID NO: 255866
  chr6:18129286-18129390
  hypo

SEQ ID NO: 305649 - DNA, 40 bp, Homo sapiens; identical to SEQ ID NO: 255867
  chr6:18205884-18205924
  hypo

SEQ ID NO: 305650 - DNA, 87 bp, Homo sapiens; identical to SEQ ID NO: 255868
  chr6:18220400-18220487
  hypo

SEQ ID NO: 305651 - DNA, 77 bp, Homo sapiens; identical to SEQ ID NO: 255869
  chr6:18220965-18221042
  hypo

SEQ ID NO: 305652 - DNA, 76 bp, Homo sapiens; identical to SEQ ID NO: 255870
  chr6:18247862-18247938
  hypo

SEQ ID NO: 305653 - DNA, 98 bp, Homo sapiens; identical to SEQ ID NO: 210689
  chr6:18250345-18250443
  hypo

SEQ ID NO: 305654 - DNA, 41 bp, Homo sapiens; identical to SEQ ID NO: 210690
  chr6:18259258-18259299
  hypo

SEQ ID NO: 305655 - DNA, 1474 bp, Homo sapiens; identical to SEQ ID NO: 200300
  chr6:18263766-18265240
  hypo

SEQ ID NO: 305656 - DNA, 33 bp, Homo sapiens; identical to SEQ ID NO: 210692
  chr6:18275933-18275966
  hypo

SEQ ID NO: 305657 - DNA, 39 bp, Homo sapiens; identical to SEQ ID NO: 200302
  chr6:18278043-18278082
  hypo

SEQ ID NO: 305658 - DNA, 38 bp, Homo sapiens; identical to SEQ ID NO: 255874
  chr6:18294411-18294449
  hypo

SEQ ID NO: 305659 - DNA, 251 bp, Homo sapiens; identical to SEQ ID NO: 210694
  chr6:18368662-18368913
  hypo

SEQ ID NO: 305660 - DNA, 43 bp, Homo sapiens; identical to SEQ ID NO: 210695
  chr6:18458440-18458483
  hypo

SEQ ID NO: 305661 - DNA, 180 bp, Homo sapiens; identical to SEQ ID NO: 210696
  chr6:19676997-19677177
  hypo

SEQ ID NO: 305662 - DNA, 42 bp, Homo sapiens; identical to SEQ ID NO: 210697
  chr6:19677237-19677279
  hypo

SEQ ID NO: 305663 - DNA, 38 bp, Homo sapiens; identical to SEQ ID NO: 255879
  chr6:19828887-19828925
  hypo

SEQ ID NO: 305664 - DNA, 83 bp, Homo sapiens; identical to SEQ ID NO: 255880
  chr6:19892212-19892295
  hypo

SEQ ID NO: 305665 - DNA, 35 bp, Homo sapiens; identical to SEQ ID NO: 255882
  chr6:19967405-19967440
  hypo

SEQ ID NO: 305666 - DNA, 66 bp, Homo sapiens; identical to SEQ ID NO: 255883
  chr6:20124517-20124583
  hypo

SEQ ID NO: 305667 - DNA, 1153 bp, Homo sapiens; identical to SEQ ID NO: 283808
  chr6:20211953-20213106
  hypo

SEQ ID NO: 305668 - DNA, 41 bp, Homo sapiens; identical to SEQ ID NO: 255884
  chr6:20228878-20228919
  hypo

SEQ ID NO: 305669 - DNA, 32 bp, Homo sapiens; identical to SEQ ID NO: 255885
  chr6:20239105-20239137
  hypo

SEQ ID NO: 305670 - DNA, 120 bp, Homo sapiens; identical to SEQ ID NO: 255886
  chr6:20239437-20239557
  hypo

SEQ ID NO: 305671 - DNA, 43 bp, Homo sapiens; identical to SEQ ID NO: 255887
  chr6:20395766-20395809
  hypo

SEQ ID NO: 305672 - DNA, 362 bp, Homo sapiens; identical to SEQ ID NO: 255888
  chr6:20479819-20480181
  hypo

SEQ ID NO: 305673 - DNA, 91 bp, Homo sapiens; identical to SEQ ID NO: 210699
  chr6:20640182-20640273
  hypo

SEQ ID NO: 305674 - DNA, 205 bp, Homo sapiens; identical to SEQ ID NO: 210700
  chr6:20686905-20687110
  hypo

SEQ ID NO: 305675 - DNA, 141 bp, Homo sapiens
  chr6:20691377-20691518
  hypo
ctgccatttgtaaacggccattcattgtcctgtctcttgcctttggctctttccagtttttcttcccaaatctttggactagttcctgcagaaaatatgaattcacagtggtgccctctgggcctgggcatctctgggccg

SEQ ID NO: 305676 - DNA, 102 bp, Homo sapiens
  chr6:20691548-20691650
  hypo
gcaggtgtgtgtacagatggcatggtggggccagcctgccttctgcttggtgatgttggagagggtgattgataatagagcttacaccgagtaatggtctga

SEQ ID NO: 305677 - DNA, 150 bp, Homo sapiens; identical to SEQ ID NO: 255892
  chr6:20745519-20745669
  hypo

SEQ ID NO: 305678 - DNA, 180 bp, Homo sapiens; identical to SEQ ID NO: 255893
  chr6:21202326-21202506
  hypo

SEQ ID NO: 305679 - DNA, 181 bp, Homo sapiens; identical to SEQ ID NO: 210701
  chr6:21277794-21277975
  hypo

SEQ ID NO: 305680 - DNA, 280 bp, Homo sapiens; identical to SEQ ID NO: 255895
  chr6:21342661-21342941
  hypo

SEQ ID NO: 305681 - DNA, 95 bp, Homo sapiens; identical to SEQ ID NO: 255896
  chr6:21406919-21407014
  hypo

SEQ ID NO: 305682 - DNA, 87 bp, Homo sapiens; identical to SEQ ID NO: 255897
  chr6:21423807-21423894
  hypo

SEQ ID NO: 305683 - DNA, 206 bp, Homo sapiens; identical to SEQ ID NO: 255898
  chr6:21423954-21424160
  hypo

SEQ ID NO: 305684 - DNA, 33 bp, Homo sapiens; identical to SEQ ID NO: 255899
  chr6:21494919-21494952
  hypo

SEQ ID NO: 305685 - DNA, 93 bp, Homo sapiens; identical to SEQ ID NO: 210702
  chr6:21570592-21570685
  hypo

SEQ ID NO: 305686 - DNA, 1131 bp, Homo sapiens; identical to SEQ ID NO: 200308
  chr6:21594475-21595606
  hypo

SEQ ID NO: 305687 - DNA, 187 bp, Homo sapiens; identical to SEQ ID NO: 210704
  chr6:21602324-21602511
  hypo

SEQ ID NO: 305688 - DNA, 120 bp, Homo sapiens; identical to SEQ ID NO: 255902
  chr6:21622714-21622834
  hypo

SEQ ID NO: 305689 - DNA, 44 bp, Homo sapiens; identical to SEQ ID NO: 255903
  chr6:21633880-21633924
  hypo

SEQ ID NO: 305690 - DNA, 54 bp, Homo sapiens; identical to SEQ ID NO: 255904
  chr6:21918789-21918843
  hypo

SEQ ID NO: 305691 - DNA, 34 bp, Homo sapiens; identical to SEQ ID NO: 210705
  chr6:22037569-22037603
  hypo

SEQ ID NO: 305692 - DNA, 263 bp, Homo sapiens; identical to SEQ ID NO: 200314
  chr6:22146853-22147116
  hypo

SEQ ID NO: 305693 - DNA, 70 bp, Homo sapiens; identical to SEQ ID NO: 255906
  chr6:22294673-22294743
  hypo

SEQ ID NO: 305694 - DNA, 36 bp, Homo sapiens; identical to SEQ ID NO: 210707
  chr6:22331079-22331115
  hypo

SEQ ID NO: 305695 - DNA, 254 bp, Homo sapiens; identical to SEQ ID NO: 210708
  chr6:22349413-22349667
  hypo

SEQ ID NO: 305696 - DNA, 367 bp, Homo sapiens; identical to SEQ ID NO: 255909
  chr6:22569529-22569896
  hypo

SEQ ID NO: 305697 - DNA, 32 bp, Homo sapiens; identical to SEQ ID NO: 255910
  chr6:24035312-24035344
  hypo

SEQ ID NO: 305698 - DNA, 43 bp, Homo sapiens; identical to SEQ ID NO: 255911
  chr6:24343551-24343594
  hypo

SEQ ID NO: 305699 - DNA, 161 bp, Homo sapiens; identical to SEQ ID NO: 210709
  chr6:24425299-24425460
  hypo

SEQ ID NO: 305700 - DNA, 230 bp, Homo sapiens; identical to SEQ ID NO: 255913
  chr6:24432978-24433208
  hypo

SEQ ID NO: 305701 - DNA, 34 bp, Homo sapiens; identical to SEQ ID NO: 255914
  chr6:24476567-24476601
  hypo

SEQ ID NO: 305702 - DNA, 125 bp, Homo sapiens; identical to SEQ ID NO: 210711
  chr6:24523039-24523164
  hypo

SEQ ID NO: 305703 - DNA, 138 bp, Homo sapiens; identical to SEQ ID NO: 210712
  chr6:24647204-24647342
  hypo

SEQ ID NO: 305704 - DNA, 120 bp, Homo sapiens; identical to SEQ ID NO: 210713
  chr6:24662784-24662904
  hypo

SEQ ID NO: 305705 - DNA, 51 bp, Homo sapiens
  chr6:24761555-24761606
  hypo
tatcccatgcccccaaggggagcgtggttcgggggagggaacatcccaggc

SEQ ID NO: 305706 - DNA, 79 bp, Homo sapiens; identical to SEQ ID NO: 255919
  chr6:24847769-24847848
  hypo

SEQ ID NO: 305707 - DNA, 41 bp, Homo sapiens; identical to SEQ ID NO: 255920
  chr6:25023690-25023731
  hypo

SEQ ID NO: 305708 - DNA, 69 bp, Homo sapiens; identical to SEQ ID NO: 255921
  chr6:25103772-25103841
  hypo

SEQ ID NO: 305709 - DNA, 173 bp, Homo sapiens; identical to SEQ ID NO: 210714
  chr6:25153408-25153581
  hypo

SEQ ID NO: 305710 - DNA, 280 bp, Homo sapiens
  chr6:25218581-25218861
  hypo
gagaaaacgcagcggtggtcacggggaggggcgccaccatgcagcacccaggcctggattccagctagcagtatcagccttctctcactttcgggcagcgacaccgctggtgtagaccgtctcaggtgcgtcttcgttcagctctactgtcctcagccccagcttgggctcgccctcagcctgctggagctgttggatgtgttcaggcctccaggcaccctggcctccccccacccgccccgcgaagaccgagggaaagcagacgcgtctccgcggcaac

SEQ ID NO: 305711 - DNA, 432 bp, Homo sapiens; identical to SEQ ID NO: 210715
  chr6:25726843-25727275
  hypo

SEQ ID NO: 305712 - DNA, 267 bp, Homo sapiens; identical to SEQ ID NO: 210716
  chr6:25727391-25727658
  hypo

SEQ ID NO: 305713 - DNA, 54 bp, Homo sapiens; identical to SEQ ID NO: 255926
  chr6:26018520-26018574
  hypo

SEQ ID NO: 305714 - DNA, 221 bp, Homo sapiens; identical to SEQ ID NO: 210717
  chr6:26025541-26025762
  hypo

SEQ ID NO: 305715 - DNA, 505 bp, Homo sapiens; identical to SEQ ID NO: 200317
  chr6:26027158-26027663
  hypo

SEQ ID NO: 305716 - DNA, 52 bp, Homo sapiens
  chr6:26047741-26047793
  hypo
caacgaatgaagtacacatgatcacatatgcaaatcacgtaacttattatcc

SEQ ID NO: 305717 - DNA, 36 bp, Homo sapiens; identical to SEQ ID NO: 255929
  chr6:26095303-26095339
  hypo

SEQ ID NO: 305718 - DNA, 213 bp, Homo sapiens; identical to SEQ ID NO: 200330
  chr6:26198924-26199137
  hypo

SEQ ID NO: 305719 - DNA, 125 bp, Homo sapiens; identical to SEQ ID NO: 283866
  chr6:26241269-26241394
  hypo

SEQ ID NO: 305720 - DNA, 96 bp, Homo sapiens; identical to SEQ ID NO: 255933
  chr6:26294597-26294693
  hypo

SEQ ID NO: 305721 - DNA, 160 bp, Homo sapiens; identical to SEQ ID NO: 255934
  chr6:26386083-26386243
  hypo

SEQ ID NO: 305722 - DNA, 110 bp, Homo sapiens; identical to SEQ ID NO: 255935
  chr6:26423339-26423449
  hypo

SEQ ID NO: 305723 - DNA, 120 bp, Homo sapiens; identical to SEQ ID NO: 255936
  chr6:26549975-26550095
  hypo

SEQ ID NO: 305724 - DNA, 72 bp, Homo sapiens; identical to SEQ ID NO: 210720
  chr6:26970361-26970433
  hypo

SEQ ID NO: 305725 - DNA, 34 bp, Homo sapiens; identical to SEQ ID NO: 255938
  chr6:27102663-27102697
  hypo

SEQ ID NO: 305726 - DNA, 615 bp, Homo sapiens; identical to SEQ ID NO: 200371
  chr6:27218980-27219595
  hypo

SEQ ID NO: 305727 - DNA, 171 bp, Homo sapiens; identical to SEQ ID NO: 200372
  chr6:27219656-27219827
  hypo

SEQ ID NO: 305728 - DNA, 133 bp, Homo sapiens; identical to SEQ ID NO: 255939
  chr6:27428733-27428866
  hypo

SEQ ID NO: 305729 - DNA, 533 bp, Homo sapiens; identical to SEQ ID NO: 283917
  chr6:27440466-27440999
  hypo

SEQ ID NO: 305730 - DNA, 159 bp, Homo sapiens; identical to SEQ ID NO: 210724
  chr6:27441962-27442121
  hypo

SEQ ID NO: 305731 - DNA, 216 bp, Homo sapiens; identical to SEQ ID NO: 200375
  chr6:27447357-27447573
  hypo

SEQ ID NO: 305732 - DNA, 42 bp, Homo sapiens; identical to SEQ ID NO: 255941
  chr6:27631247-27631289
  hypo

SEQ ID NO: 305733 - DNA, 120 bp, Homo sapiens; identical to SEQ ID NO: 210726
  chr6:27770799-27770919
  hypo

SEQ ID NO: 305734 - DNA, 153 bp, Homo sapiens; identical to SEQ ID NO: 200392
  chr6:27805754-27805907
  hypo

SEQ ID NO: 305735 - DNA, 575 bp, Homo sapiens; identical to SEQ ID NO: 42819
  chr6:27805936-27806511
  hypo

SEQ ID NO: 305736 - DNA, 43 bp, Homo sapiens; identical to SEQ ID NO: 255943
  chr6:28031402-28031445
  hypo

SEQ ID NO: 305737 - DNA, 109 bp, Homo sapiens; identical to SEQ ID NO: 255944
  chr6:28192714-28192823
  hypo

SEQ ID NO: 305738 - DNA, 155 bp, Homo sapiens; identical to SEQ ID NO: 210729
  chr6:28327739-28327894
  hypo

SEQ ID NO: 305739 - DNA, 233 bp, Homo sapiens; identical to SEQ ID NO: 255946
  chr6:28397694-28397927
  hypo

SEQ ID NO: 305740 - DNA, 188 bp, Homo sapiens; identical to SEQ ID NO: 200407
  chr6:28414754-28414942
  hypo

SEQ ID NO: 305741 - DNA, 31 bp, Homo sapiens; identical to SEQ ID NO: 255947
  chr6:33549226-33549257
  hypo

SEQ ID NO: 305742 - DNA, 289 bp, Homo sapiens
  chr6:33578945-33579234
  hypo
catccattcccagctttggccgggcagccagggcaaggactggctgggagggccttagtcctgccaaggtggggtggggtgcggctagaggccaggcccagcccaggtggacttgacgtcatgcttttcacctctgtctctgtcagacaaagcctgctccttcgtgcctggccctgcccccggggaagttttccatgctgctctcctttctcaacaggatcacagggctgatgcttcccctcccaacccacctttcttgttggcaggtgaagtgccaaggcctgcgcac

SEQ ID NO: 305743 - DNA, 98 bp, Homo sapiens
  chr6:33579264-33579362
  hypo
cgtgcagggtcccccttcggagtctggagaaaggaagaatggccagaggccactccctctccttgggagctcctgccgggatgccaacctgggcttca

SEQ ID NO: 305744 - DNA, 40 bp, Homo sapiens; identical to SEQ ID NO: 255949
  chr6:33597878-33597918
  hypo

SEQ ID NO: 305745 - DNA, 76 bp, Homo sapiens; identical to SEQ ID NO: 255950
  chr6:33606110-33606186
  hypo

SEQ ID NO: 305746 - DNA, 178 bp, Homo sapiens; identical to SEQ ID NO: 210731
  chr6:33609019-33609197
  hypo

SEQ ID NO: 305747 - DNA, 38 bp, Homo sapiens; identical to SEQ ID NO: 210732
  chr6:33609227-33609265
  hypo

SEQ ID NO: 305748 - DNA, 266 bp, Homo sapiens; identical to SEQ ID NO: 210733
  chr6:33638299-33638565
  hypo

SEQ ID NO: 305749 - DNA, 37 bp, Homo sapiens; identical to SEQ ID NO: 255953
  chr6:33645952-33645989
  hypo

SEQ ID NO: 305750 - DNA, 124 bp, Homo sapiens; identical to SEQ ID NO: 210734
  chr6:33653397-33653521
  hypo

SEQ ID NO: 305751 - DNA, 245 bp, Homo sapiens; identical to SEQ ID NO: 210735
  chr6:33674159-33674404
  hypo

SEQ ID NO: 305752 - DNA, 67 bp, Homo sapiens; identical to SEQ ID NO: 255956
  chr6:33684640-33684707
  hypo

SEQ ID NO: 305753 - DNA, 139 bp, Homo sapiens; identical to SEQ ID NO: 255957
  chr6:33687282-33687421
  hypo

SEQ ID NO: 305754 - DNA, 253 bp, Homo sapiens; identical to SEQ ID NO: 255958
  chr6:33694498-33694751
  hypo

SEQ ID NO: 305755 - DNA, 141 bp, Homo sapiens; identical to SEQ ID NO: 255959
  chr6:33701973-33702114
  hypo

SEQ ID NO: 305756 - DNA, 41 bp, Homo sapiens; identical to SEQ ID NO: 255960
  chr6:33740514-33740555
  hypo

SEQ ID NO: 305757 - DNA, 152 bp, Homo sapiens; identical to SEQ ID NO: 255961
  chr6:33745239-33745391
  hypo

SEQ ID NO: 305758 - DNA, 97 bp, Homo sapiens; identical to SEQ ID NO: 255962
  chr6:33745989-33746086
  hypo

SEQ ID NO: 305759 - DNA, 130 bp, Homo sapiens; identical to SEQ ID NO: 210737
  chr6:33748502-33748632
  hypo

SEQ ID NO: 305760 - DNA, 83 bp, Homo sapiens; identical to SEQ ID NO: 210738
  chr6:33771001-33771084
  hypo

SEQ ID NO: 305761 - DNA, 343 bp, Homo sapiens; identical to SEQ ID NO: 255965
  chr6:33802493-33802836
  hypo

SEQ ID NO: 305762 - DNA, 78 bp, Homo sapiens; identical to SEQ ID NO: 255966
  chr6:33871408-33871486
  hypo

SEQ ID NO: 305763 - DNA, 107 bp, Homo sapiens; identical to SEQ ID NO: 210739
  chr6:33907853-33907960
  hypo

SEQ ID NO: 305764 - DNA, 170 bp, Homo sapiens; identical to SEQ ID NO: 255968
  chr6:33914100-33914270
  hypo

SEQ ID NO: 305765 - DNA, 65 bp, Homo sapiens
  chr6:33955752-33955817
  hypo
ttgcccaggtctggagctctggtctgtcagggtcctggacaccagagcttcgggatcagctggag

SEQ ID NO: 305766 - DNA, 40 bp, Homo sapiens; identical to SEQ ID NO: 210740
  chr6:33962224-33962264
  hypo

SEQ ID NO: 305767 - DNA, 35 bp, Homo sapiens; identical to SEQ ID NO: 210741
  chr6:33985261-33985296
  hypo

SEQ ID NO: 305768 - DNA, 116 bp, Homo sapiens; identical to SEQ ID NO: 210742
  chr6:33995832-33995948
  hypo

SEQ ID NO: 305769 - DNA, 104 bp, Homo sapiens; identical to SEQ ID NO: 210743
  chr6:34100884-34100988
  hypo

SEQ ID NO: 305770 - DNA, 47 bp, Homo sapiens; identical to SEQ ID NO: 210744
  chr6:34170821-34170868
  hypo

SEQ ID NO: 305771 - DNA, 256 bp, Homo sapiens; identical to SEQ ID NO: 255975
  chr6:34208661-34208917
  hypo

SEQ ID NO: 305772 - DNA, 114 bp, Homo sapiens; identical to SEQ ID NO: 210745
  chr6:34219816-34219930
  hypo

SEQ ID NO: 305773 - DNA, 41 bp, Homo sapiens; identical to SEQ ID NO: 210746
  chr6:34231475-34231516
  hypo

SEQ ID NO: 305774 - DNA, 249 bp, Homo sapiens; identical to SEQ ID NO: 200412
  chr6:34359487-34359736
  hypo

SEQ ID NO: 305775 - DNA, 32 bp, Homo sapiens; identical to SEQ ID NO: 255978
  chr6:34395946-34395978
  hypo

SEQ ID NO: 305776 - DNA, 76 bp, Homo sapiens; identical to SEQ ID NO: 200413
  chr6:34405060-34405136
  hypo

SEQ ID NO: 305777 - DNA, 39 bp, Homo sapiens; identical to SEQ ID NO: 200414
  chr6:34405256-34405295
  hypo

SEQ ID NO: 305778 - DNA, 213 bp, Homo sapiens; identical to SEQ ID NO: 255982
  chr6:34503446-34503659
  hypo

SEQ ID NO: 305779 - DNA, 243 bp, Homo sapiens; identical to SEQ ID NO: 255983
  chr6:34507099-34507342
  hypo

SEQ ID NO: 305780 - DNA, 243 bp, Homo sapiens; identical to SEQ ID NO: 210750
  chr6:34512043-34512286
  hypo

SEQ ID NO: 305781 - DNA, 42 bp, Homo sapiens; identical to SEQ ID NO: 255985
  chr6:34513308-34513350
  hypo

SEQ ID NO: 305782 - DNA, 200 bp, Homo sapiens; identical to SEQ ID NO: 255986
  chr6:34513709-34513909
  hypo

SEQ ID NO: 305783 - DNA, 72 bp, Homo sapiens; identical to SEQ ID NO: 210751
  chr6:34518768-34518840
  hypo

SEQ ID NO: 305784 - DNA, 91 bp, Homo sapiens; identical to SEQ ID NO: 210752
  chr6:34518870-34518961
  hypo

SEQ ID NO: 305785 - DNA, 591 bp, Homo sapiens; identical to SEQ ID NO: 255988
  chr6:34519689-34520280
  hypo

SEQ ID NO: 305786 - DNA, 146 bp, Homo sapiens; identical to SEQ ID NO: 255989
  chr6:34520752-34520898
  hypo

SEQ ID NO: 305787 - DNA, 115 bp, Homo sapiens; identical to SEQ ID NO: 255990
  chr6:34524257-34524372
  hypo

SEQ ID NO: 305788 - DNA, 89 bp, Homo sapiens; identical to SEQ ID NO: 255992
  chr6:34563973-34564062
  hypo

SEQ ID NO: 305789 - DNA, 43 bp, Homo sapiens
  chr6:34618577-34618620
  hypo
agctattgggacaactatatgcgattcctatcagtctcatctg

SEQ ID NO: 305790 - DNA, 100 bp, Homo sapiens; identical to SEQ ID NO: 210753
  chr6:34683317-34683417
  hypo

SEQ ID NO: 305791 - DNA, 206 bp, Homo sapiens; identical to SEQ ID NO: 255995
  chr6:34690600-34690806
  hypo

SEQ ID NO: 305792 - DNA, 37 bp, Homo sapiens; identical to SEQ ID NO: 255997
  chr6:34726098-34726135
  hypo

SEQ ID NO: 305793 - DNA, 36 bp, Homo sapiens; identical to SEQ ID NO: 255998
  chr6:34854519-34854555
  hypo

SEQ ID NO: 305794 - DNA, 35 bp, Homo sapiens; identical to SEQ ID NO: 255999
  chr6:34870302-34870337
  hypo

SEQ ID NO: 305795 - DNA, 88 bp, Homo sapiens; identical to SEQ ID NO: 256000
  chr6:34953050-34953138
  hypo

SEQ ID NO: 305796 - DNA, 204 bp, Homo sapiens; identical to SEQ ID NO: 256001
  chr6:35019282-35019486
  hypo

SEQ ID NO: 305797 - DNA, 108 bp, Homo sapiens; identical to SEQ ID NO: 256002
  chr6:35027133-35027241
  hypo

SEQ ID NO: 305798 - DNA, 81 bp, Homo sapiens; identical to SEQ ID NO: 210754
  chr6:35033867-35033948
  hypo

SEQ ID NO: 305799 - DNA, 201 bp, Homo sapiens; identical to SEQ ID NO: 256004
  chr6:35044731-35044932
  hypo

SEQ ID NO: 305800 - DNA, 95 bp, Homo sapiens; identical to SEQ ID NO: 256005
  chr6:35045149-35045244
  hypo

SEQ ID NO: 305801 - DNA, 180 bp, Homo sapiens; identical to SEQ ID NO: 256006
  chr6:35045559-35045739
  hypo

SEQ ID NO: 305802 - DNA, 44 bp, Homo sapiens; identical to SEQ ID NO: 256007
  chr6:35048225-35048269
  hypo

SEQ ID NO: 305803 - DNA, 324 bp, Homo sapiens; identical to SEQ ID NO: 256008
  chr6:35048591-35048915
  hypo

SEQ ID NO: 305804 - DNA, 85 bp, Homo sapiens; identical to SEQ ID NO: 210755
  chr6:35109282-35109367
  hypo

SEQ ID NO: 305805 - DNA, 146 bp, Homo sapiens; identical to SEQ ID NO: 210756
  chr6:35109423-35109569
  hypo

SEQ ID NO: 305806 - DNA, 33 bp, Homo sapiens; identical to SEQ ID NO: 256011
  chr6:35357350-35357383
  hypo

SEQ ID NO: 305807 - DNA, 696 bp, Homo sapiens; identical to SEQ ID NO: 256012
  chr6:35374508-35375204
  hypo

SEQ ID NO: 305808 - DNA, 488 bp, Homo sapiens
  chr6:35454054-35454542
  hypo
ttagggggcgagcccggcttgtttatgaggaggagcgcggaggaggatccagacacacaggcttgcgcgcccagactcgcccggccagcggctggcggcctccgacgtcaccaaaccggttgggtgagagggcagagagcagggggaagggccgcagtcccgcccgcgccccccggcacgcaccgtacatcttgccctcgtctgacaggatgatcttccgccggccgcagggcgggtagatggccagggcctcctggaagctctgctcgatgtccgggctccacacgccctccgcatcgttgtccagccccttgtccaggccctcgggcccatcctcccgggcctccccggggctgctgctggcgttccagctgttggacgctattgtgctggttgctctgggctctgggcctgagcccactgggcggctgagcctgggggacagacagacaggaactgggaccagggtcctcctcgaccacagcaat

SEQ ID NO: 305809 - DNA, 326 bp, Homo sapiens
  chr6:35454589-35454915
  hypo
gcccaccctaggagcaggtgctccaggtggaacggaggtaaccagaggaacaaccacagcttgttcagagctgtgtgacctgggatgcacgcgctacttcacctctctaggcctcagtcctgtaaaacgagaaaagggtctccttgaggagacctccttgaggttgtgagggttaaaatgtaaatgagctcatgacaaagtaccaaccacatgcccagctcataatactcaagaaataggtaatcggtaacaacaatgcctcataccaacacagcacttttgtagggaaaaggcattttcatattcattcaaacctcacaaaacta

SEQ ID NO: 305810 - DNA, 1265 bp, Homo sapiens; identical to SEQ ID NO: 283980
  chr6:35655508-35656773
  hypo

SEQ ID NO: 305811 - DNA, 54 bp, Homo sapiens; identical to SEQ ID NO: 256015
  chr6:35911713-35911767
  hypo

SEQ ID NO: 305812 - DNA, 38 bp, Homo sapiens; identical to SEQ ID NO: 210760
  chr6:35944304-35944342
  hypo

SEQ ID NO: 305813 - DNA, 50 bp, Homo sapiens; identical to SEQ ID NO: 256017
  chr6:36060522-36060572
  hypo

SEQ ID NO: 305814 - DNA, 35 bp, Homo sapiens; identical to SEQ ID NO: 256018
  chr6:36092696-36092731
  hypo

SEQ ID NO: 305815 - DNA, 130 bp, Homo sapiens; identical to SEQ ID NO: 210761
  chr6:36165692-36165822
  hypo

SEQ ID NO: 305816 - DNA, 258 bp, Homo sapiens; identical to SEQ ID NO: 256021
  chr6:36198230-36198488
  hypo

SEQ ID NO: 305817 - DNA, 60 bp, Homo sapiens; identical to SEQ ID NO: 210763
  chr6:36214794-36214854
  hypo

SEQ ID NO: 305818 - DNA, 104 bp, Homo sapiens
  chr6:36238215-36238319
  hypo
agaaagtcagaggccgaggagatggaagaacaggtgttcaagggggacccggacacccctcactccatctccttctcgggcagtggattcctctccttctacca

SEQ ID NO: 305819 - DNA, 81 bp, Homo sapiens; identical to SEQ ID NO: 256024
  chr6:36314473-36314554
  hypo

SEQ ID NO: 305820 - DNA, 64 bp, Homo sapiens; identical to SEQ ID NO: 256025
  chr6:36336750-36336814
  hypo

SEQ ID NO: 305821 - DNA, 145 bp, Homo sapiens; identical to SEQ ID NO: 256026
  chr6:36339126-36339271
  hypo

SEQ ID NO: 305822 - DNA, 83 bp, Homo sapiens; identical to SEQ ID NO: 256027
  chr6:36343600-36343683
  hypo

SEQ ID NO: 305823 - DNA, 71 bp, Homo sapiens
  chr6:36344553-36344624
  hypo
agaaaaaaaaaaaaaaaaaaggaagggatgttattgtttcccaaatgaggcagtgaggctcccagaggtta

SEQ ID NO: 305824 - DNA, 120 bp, Homo sapiens; identical to SEQ ID NO: 210765
  chr6:36392402-36392522
  hypo

SEQ ID NO: 305825 - DNA, 38 bp, Homo sapiens; identical to SEQ ID NO: 210766
  chr6:36406489-36406527
  hypo

SEQ ID NO: 305826 - DNA, 80 bp, Homo sapiens; identical to SEQ ID NO: 256031
  chr6:36545729-36545809
  hypo

SEQ ID NO: 305827 - DNA, 102 bp, Homo sapiens; identical to SEQ ID NO: 210767
  chr6:36599663-36599765
  hypo

SEQ ID NO: 305828 - DNA, 41 bp, Homo sapiens; identical to SEQ ID NO: 256033
  chr6:36600065-36600106
  hypo

SEQ ID NO: 305829 - DNA, 130 bp, Homo sapiens; identical to SEQ ID NO: 256034
  chr6:36657808-36657938
  hypo

SEQ ID NO: 305830 - DNA, 229 bp, Homo sapiens; identical to SEQ ID NO: 210768
  chr6:36713048-36713277
  hypo

SEQ ID NO: 305831 - DNA, 45 bp, Homo sapiens; identical to SEQ ID NO: 210769
  chr6:36831606-36831651
  hypo

SEQ ID NO: 305832 - DNA, 45 bp, Homo sapiens; identical to SEQ ID NO: 256037
  chr6:36897107-36897152
  hypo

SEQ ID NO: 305833 - DNA, 148 bp, Homo sapiens; identical to SEQ ID NO: 256038
  chr6:36926814-36926962
  hypo

SEQ ID NO: 305834 - DNA, 177 bp, Homo sapiens; identical to SEQ ID NO: 256039
  chr6:36936701-36936878
  hypo

SEQ ID NO: 305835 - DNA, 257 bp, Homo sapiens; identical to SEQ ID NO: 256040
  chr6:36937179-36937436
  hypo

SEQ ID NO: 305836 - DNA, 111 bp, Homo sapiens; identical to SEQ ID NO: 256041
  chr6:36939067-36939178
  hypo

SEQ ID NO: 305837 - DNA, 97 bp, Homo sapiens; identical to SEQ ID NO: 256042
  chr6:36992805-36992902
  hypo

SEQ ID NO: 305838 - DNA, 327 bp, Homo sapiens; identical to SEQ ID NO: 210770
  chr6:37023812-37024139
  hypo

SEQ ID NO: 305839 - DNA, 94 bp, Homo sapiens; identical to SEQ ID NO: 210771
  chr6:37033766-37033860
  hypo

SEQ ID NO: 305840 - DNA, 118 bp, Homo sapiens; identical to SEQ ID NO: 256045
  chr6:37060659-37060777
  hypo

SEQ ID NO: 305841 - DNA, 40 bp, Homo sapiens; identical to SEQ ID NO: 210772
  chr6:37100545-37100585
  hypo

SEQ ID NO: 305842 - DNA, 31 bp, Homo sapiens; identical to SEQ ID NO: 256047
  chr6:37102029-37102060
  hypo

SEQ ID NO: 305843 - DNA, 44 bp, Homo sapiens; identical to SEQ ID NO: 256048
  chr6:37131659-37131703
  hypo

SEQ ID NO: 305844 - DNA, 629 bp, Homo sapiens; identical to SEQ ID NO: 283995
  chr6:37138570-37139199
  hypo

SEQ ID NO: 305845 - DNA, 111 bp, Homo sapiens; identical to SEQ ID NO: 210773
  chr6:37275483-37275594
  hypo

SEQ ID NO: 305846 - DNA, 38 bp, Homo sapiens; identical to SEQ ID NO: 256050
  chr6:37340458-37340496
  hypo

SEQ ID NO: 305847 - DNA, 86 bp, Homo sapiens; identical to SEQ ID NO: 210774
  chr6:37352725-37352811
  hypo

SEQ ID NO: 305848 - DNA, 74 bp, Homo sapiens; identical to SEQ ID NO: 210775
  chr6:37358449-37358523
  hypo

SEQ ID NO: 305849 - DNA, 335 bp, Homo sapiens; identical to SEQ ID NO: 210776
  chr6:37358553-37358888
  hypo

SEQ ID NO: 305850 - DNA, 99 bp, Homo sapiens; identical to SEQ ID NO: 256053
  chr6:37450275-37450374
  hypo

SEQ ID NO: 305851 - DNA, 187 bp, Homo sapiens; identical to SEQ ID NO: 210777
  chr6:37450650-37450837
  hypo

SEQ ID NO: 305852 - DNA, 597 bp, Homo sapiens; identical to SEQ ID NO: 256055
  chr6:37460887-37461484
  hypo

SEQ ID NO: 305853 - DNA, 153 bp, Homo sapiens; identical to SEQ ID NO: 256056
  chr6:37605017-37605170
  hypo

SEQ ID NO: 305854 - DNA, 36 bp, Homo sapiens; identical to SEQ ID NO: 256057
  chr6:37608135-37608171
  hypo

SEQ ID NO: 305855 - DNA, 103 bp, Homo sapiens; identical to SEQ ID NO: 256058
  chr6:37642012-37642115
  hypo

SEQ ID NO: 305856 - DNA, 466 bp, Homo sapiens; identical to SEQ ID NO: 284000
  chr6:37665241-37665707
  hypo

SEQ ID NO: 305857 - DNA, 381 bp, Homo sapiens; identical to SEQ ID NO: 284001
  chr6:37666463-37666844
  hypo

SEQ ID NO: 305858 - DNA, 221 bp, Homo sapiens; identical to SEQ ID NO: 42916
  chr6:37666866-37667087
  hypo

SEQ ID NO: 305859 - DNA, 102 bp, Homo sapiens; identical to SEQ ID NO: 210780
  chr6:37721653-37721755
  hypo

SEQ ID NO: 305860 - DNA, 197 bp, Homo sapiens; identical to SEQ ID NO: 256062
  chr6:37841059-37841256
  hypo

SEQ ID NO: 305861 - DNA, 82 bp, Homo sapiens; identical to SEQ ID NO: 256063
  chr6:38020518-38020600
  hypo

SEQ ID NO: 305862 - DNA, 166 bp, Homo sapiens; identical to SEQ ID NO: 210781
  chr6:38084362-38084528
  hypo

SEQ ID NO: 305863 - DNA, 151 bp, Homo sapiens
  chr6:38101972-38102123
  hypo
atatgagacacagtggcatttaattctgttgacatgcacattccgttctcctgagtgctaattcatatcctcatattccttgaaaagttacctcctccaagatcccttattgcagttgacttccccttggtgctcccgatttattacacat

SEQ ID NO: 305864 - DNA, 233 bp, Homo sapiens; identical to SEQ ID NO: 210782
  chr6:38118812-38119045
  hypo

SEQ ID NO: 305865 - DNA, 104 bp, Homo sapiens; identical to SEQ ID NO: 256067
  chr6:38121253-38121357
  hypo

SEQ ID NO: 305866 - DNA, 82 bp, Homo sapiens; identical to SEQ ID NO: 210783
  chr6:38122002-38122084
  hypo

SEQ ID NO: 305867 - DNA, 63 bp, Homo sapiens; identical to SEQ ID NO: 210784
  chr6:38134384-38134447
  hypo

SEQ ID NO: 305868 - DNA, 537 bp, Homo sapiens; identical to SEQ ID NO: 256070
  chr6:38141418-38141955
  hypo

SEQ ID NO: 305869 - DNA, 186 bp, Homo sapiens; identical to SEQ ID NO: 210785
  chr6:38646372-38646558
  hypo

SEQ ID NO: 305870 - DNA, 93 bp, Homo sapiens; identical to SEQ ID NO: 210786
  chr6:39127059-39127152
  hypo

SEQ ID NO: 305871 - DNA, 41 bp, Homo sapiens; identical to SEQ ID NO: 256073
  chr6:39154859-39154900
  hypo

SEQ ID NO: 305872 - DNA, 239 bp, Homo sapiens; identical to SEQ ID NO: 256074
  chr6:39158097-39158336
  hypo

SEQ ID NO: 305873 - DNA, 823 bp, Homo sapiens; identical to SEQ ID NO: 256075
  chr6:39158588-39159411
  hypo

SEQ ID NO: 305874 - DNA, 103 bp, Homo sapiens; identical to SEQ ID NO: 210788
  chr6:39162023-39162126
  hypo

SEQ ID NO: 305875 - DNA, 66 bp, Homo sapiens; identical to SEQ ID NO: 256077
  chr6:39162448-39162514
  hypo

SEQ ID NO: 305876 - DNA, 42 bp, Homo sapiens; identical to SEQ ID NO: 256078
  chr6:39185583-39185625
  hypo

SEQ ID NO: 305877 - DNA, 37 bp, Homo sapiens; identical to SEQ ID NO: 256079
  chr6:39691931-39691968
  hypo

SEQ ID NO: 305878 - DNA, 667 bp, Homo sapiens; identical to SEQ ID NO: 284010
  chr6:39692723-39693390
  hypo

SEQ ID NO: 305879 - DNA, 296 bp, Homo sapiens; identical to SEQ ID NO: 256080
  chr6:39895079-39895375
  hypo

SEQ ID NO: 305880 - DNA, 50 bp, Homo sapiens; identical to SEQ ID NO: 200428
  chr6:39902362-39902412
  hypo

SEQ ID NO: 305881 - DNA, 35 bp, Homo sapiens; identical to SEQ ID NO: 256081
  chr6:39907360-39907395
  hypo

SEQ ID NO: 305882 - DNA, 184 bp, Homo sapiens; identical to SEQ ID NO: 256082
  chr6:40359821-40360005
  hypo

SEQ ID NO: 305883 - DNA, 292 bp, Homo sapiens
  chr6:40360252-40360544
  hypo
ggcgggccctgcggcggggccccggctggtgcgctgcttggaggcggtggctgggcgccgttggtctgcgagtacacattgctcacggccgctgccatcttgctgggggcctcgtggttgcagaccttgtagcgcaccatgaggatgacgatgaagaccagcagcgtggccacgatgatgcccccgatgaccaggatcatggtgccgcccagaatctggctgtgcatggactggcactgcgggtagtcagccttggtgaagaactgggcgcagcccacgatgttggtggccg

SEQ ID NO: 305884 - DNA, 720 bp, Homo sapiens; identical to SEQ ID NO: 256084
  chr6:40399974-40400694
  hypo

SEQ ID NO: 305885 - DNA, 170 bp, Homo sapiens; identical to SEQ ID NO: 200429
  chr6:40554350-40554520
  hypo

SEQ ID NO: 305886 - DNA, 315 bp, Homo sapiens; identical to SEQ ID NO: 284013
  chr6:40554860-40555175
  hypo

SEQ ID NO: 305887 - DNA, 31 bp, Homo sapiens; identical to SEQ ID NO: 256085
  chr6:40624387-40624418
  hypo

SEQ ID NO: 305888 - DNA, 120 bp, Homo sapiens; identical to SEQ ID NO: 256086
  chr6:40846066-40846186
  hypo

SEQ ID NO: 305889 - DNA, 73 bp, Homo sapiens; identical to SEQ ID NO: 210793
  chr6:41001834-41001907
  hypo

SEQ ID NO: 305890 - DNA, 46 bp, Homo sapiens; identical to SEQ ID NO: 256088
  chr6:41303868-41303914
  hypo

SEQ ID NO: 305891 - DNA, 151 bp, Homo sapiens; identical to SEQ ID NO: 200432
  chr6:41339070-41339221
  hypo

SEQ ID NO: 305892 - DNA, 680 bp, Homo sapiens; identical to SEQ ID NO: 284018
  chr6:41340027-41340707
  hypo

SEQ ID NO: 305893 - DNA, 230 bp, Homo sapiens; identical to SEQ ID NO: 256089
  chr6:41490965-41491195
  hypo

SEQ ID NO: 305894 - DNA, 158 bp, Homo sapiens; identical to SEQ ID NO: 210796
  chr6:41511550-41511708
  hypo

SEQ ID NO: 305895 - DNA, 337 bp, Homo sapiens; identical to SEQ ID NO: 256091
  chr6:41620830-41621167
  hypo

SEQ ID NO: 305896 - DNA, 70 bp, Homo sapiens
  chr6:41709760-41709830
  hypo
gtggaagagattcattccatcgtggccatggaatgcaaagacaagtcggaggggactggggacaggtgca

SEQ ID NO: 305897 - DNA, 270 bp, Homo sapiens; identical to SEQ ID NO: 256093
  chr6:41715220-41715490
  hypo

SEQ ID NO: 305898 - DNA, 52 bp, Homo sapiens
  chr6:41715520-41715572
  hypo
aatagttctttgttgtgggccccatcctgtgtactatagaatgtttaacagc

SEQ ID NO: 305899 - DNA, 80 bp, Homo sapiens; identical to SEQ ID NO: 256095
  chr6:41753206-41753286
  hypo

SEQ ID NO: 305900 - DNA, 556 bp, Homo sapiens; identical to SEQ ID NO: 210797
  chr6:41773903-41774459
  hypo

SEQ ID NO: 305901 - DNA, 200 bp, Homo sapiens; identical to SEQ ID NO: 210798
  chr6:41827196-41827396
  hypo

SEQ ID NO: 305902 - DNA, 42 bp, Homo sapiens; identical to SEQ ID NO: 256098
  chr6:41956742-41956784
  hypo

SEQ ID NO: 305903 - DNA, 47 bp, Homo sapiens; identical to SEQ ID NO: 256099
  chr6:42017469-42017516
  hypo

SEQ ID NO: 305904 - DNA, 203 bp, Homo sapiens; identical to SEQ ID NO: 210799
  chr6:42047606-42047809
  hypo

SEQ ID NO: 305905 - DNA, 367 bp, Homo sapiens; identical to SEQ ID NO: 256102
  chr6:42073935-42074302
  hypo

SEQ ID NO: 305906 - DNA, 39 bp, Homo sapiens; identical to SEQ ID NO: 256104
  chr6:42105772-42105811
  hypo

SEQ ID NO: 305907 - DNA, 39 bp, Homo sapiens; identical to SEQ ID NO: 256106
  chr6:42510150-42510189
  hypo

SEQ ID NO: 305908 - DNA, 172 bp, Homo sapiens
  chr6:42762703-42762875
  hypo
aaaaaaaagaaacttaccataagtcatgcaagagtctatttactgatctctccaccaatactcacaaagagaattacgcatgaacgacagtcaaggtaactgaaaagatctacatctattgttagaaagttgtctaacttgttttccaaaactttctgctattagatttaaa

SEQ ID NO: 305909 - DNA, 85 bp, Homo sapiens; identical to SEQ ID NO: 210801
  chr6:43057813-43057898
  hypo

SEQ ID NO: 305910 - DNA, 125 bp, Homo sapiens; identical to SEQ ID NO: 222857
  chr6:43081636-43081761
  hypo

SEQ ID NO: 305911 - DNA, 266 bp, Homo sapiens; identical to SEQ ID NO: 210802
  chr6:43096727-43096993
  hypo

SEQ ID NO: 305912 - DNA, 34 bp, Homo sapiens; identical to SEQ ID NO: 256113
  chr6:43104148-43104182
  hypo

SEQ ID NO: 305913 - DNA, 31 bp, Homo sapiens; identical to SEQ ID NO: 210803
  chr6:43118951-43118982
  hypo

SEQ ID NO: 305914 - DNA, 42 bp, Homo sapiens; identical to SEQ ID NO: 210804
  chr6:43119871-43119913
  hypo

SEQ ID NO: 305915 - DNA, 130 bp, Homo sapiens; identical to SEQ ID NO: 256116
  chr6:43191028-43191158
  hypo

SEQ ID NO: 305916 - DNA, 215 bp, Homo sapiens; identical to SEQ ID NO: 256117
  chr6:43230737-43230952
  hypo

SEQ ID NO: 305917 - DNA, 168 bp, Homo sapiens
  chr6:43251622-43251790
  hypo
ggctctcgccccaggagccgtatccctgtcctgctctctgaggaggacacgggctcggagccctcaggctcactgtcggccaaagagcggtggagcaagcgggctcggccgcagcaggacctggcgcggctggtgatggagaagaggcagggccgcctgctgttgcgg

SEQ ID NO: 305918 - DNA, 65 bp, Homo sapiens; identical to SEQ ID NO: 210805
  chr6:43325214-43325279
  hypo

SEQ ID NO: 305919 - DNA, 101 bp, Homo sapiens; identical to SEQ ID NO: 210806
  chr6:43334539-43334640
  hypo

SEQ ID NO: 305920 - DNA, 83 bp, Homo sapiens; identical to SEQ ID NO: 256121
  chr6:43364279-43364362
  hypo

SEQ ID NO: 305921 - DNA, 319 bp, Homo sapiens; identical to SEQ ID NO: 210807
  chr6:43456970-43457289
  hypo

SEQ ID NO: 305922 - DNA, 92 bp, Homo sapiens; identical to SEQ ID NO: 222858
  chr6:43477369-43477461
  hypo

SEQ ID NO: 305923 - DNA, 71 bp, Homo sapiens
  chr6:43478745-43478816
  hypo
caatacaaagaaggtgccagggccagggccctggagcactggtgaggacgtgaaggcggctgagccacact

SEQ ID NO: 305924 - DNA, 98 bp, Homo sapiens; identical to SEQ ID NO: 200449
  chr6:43596713-43596811
  hypo

SEQ ID NO: 305925 - DNA, 309 bp, Homo sapiens; identical to SEQ ID NO: 256126
  chr6:43641286-43641595
  hypo

SEQ ID NO: 305926 - DNA, 136 bp, Homo sapiens
  chr6:43706686-43706822
  hypo
ggatgagggtggggcgatgggaggaggtgtgctactcaacttctcaatggttgttgcatttctggaatttaagactccaaagcccatcctcccacccccactccactgtttaccttctggctttggtgatgggctg

SEQ ID NO: 305927 - DNA, 115 bp, Homo sapiens
  chr6:43706852-43706967
  hypo
tgcgggtgggccagacagaacatgtctgaggacgggatgtggtccacggggtgccagtttgcaacctcctcatccagccaaactgtactttttgccattccgttgtataggactg

SEQ ID NO: 305928 - DNA, 307 bp, Homo sapiens; identical to SEQ ID NO: 210809
  chr6:43745061-43745368
  hypo

SEQ ID NO: 305929 - DNA, 177 bp, Homo sapiens; identical to SEQ ID NO: 210810
  chr6:43748286-43748463
  hypo

SEQ ID NO: 305930 - DNA, 334 bp, Homo sapiens
  chr6:43749594-43749928
  hypo
gcagctgcggacatgttagggggtgttgcatggtgattttttttctctctctctgctgatgctctagcttagatgtctttccttttgcctttttgcagtccctgtgggccttgctcagagcggagaaagcatttgtttgtacaagatccgcagacgtgtaaatgttcctgcaaaaacacagactcgcgttgcaaggcgaggcagcttgagttaaacgaacgtacttgcaggttggttcccagagggcaagcaagtcagagaggggcatcacacagagatggggagagagagagagaaagagagtgagcgagcgagcgagcgggagagcgcctga

SEQ ID NO: 305931 - DNA, 167 bp, Homo sapiens; identical to SEQ ID NO: 256131
  chr6:43752449-43752616
  hypo

SEQ ID NO: 305932 - DNA, 83 bp, Homo sapiens; identical to SEQ ID NO: 256132
  chr6:43753108-43753191
  hypo

SEQ ID NO: 305933 - DNA, 76 bp, Homo sapiens; identical to SEQ ID NO: 210811
  chr6:43755593-43755669
  hypo

SEQ ID NO: 305934 - DNA, 195 bp, Homo sapiens; identical to SEQ ID NO: 256134
  chr6:43755969-43756164
  hypo

SEQ ID NO: 305935 - DNA, 100 bp, Homo sapiens; identical to SEQ ID NO: 256135
  chr6:43814641-43814741
  hypo

SEQ ID NO: 305936 - DNA, 33 bp, Homo sapiens; identical to SEQ ID NO: 256136
  chr6:43857893-43857926
  hypo

SEQ ID NO: 305937 - DNA, 117 bp, Homo sapiens; identical to SEQ ID NO: 210812
  chr6:43890879-43890996
  hypo

SEQ ID NO: 305938 - DNA, 189 bp, Homo sapiens; identical to SEQ ID NO: 256138
  chr6:43891389-43891578
  hypo

SEQ ID NO: 305939 - DNA, 165 bp, Homo sapiens; identical to SEQ ID NO: 210813
  chr6:43893235-43893400
  hypo

SEQ ID NO: 305940 - DNA, 92 bp, Homo sapiens; identical to SEQ ID NO: 256140
  chr6:43894169-43894261
  hypo

SEQ ID NO: 305941 - DNA, 50 bp, Homo sapiens; identical to SEQ ID NO: 256141
  chr6:43894752-43894802
  hypo

SEQ ID NO: 305942 - DNA, 55 bp, Homo sapiens; identical to SEQ ID NO: 256142
  chr6:43895090-43895145
  hypo

SEQ ID NO: 305943 - DNA, 133 bp, Homo sapiens; identical to SEQ ID NO: 256143
  chr6:43917992-43918125
  hypo

SEQ ID NO: 305944 - DNA, 192 bp, Homo sapiens; identical to SEQ ID NO: 256144
  chr6:43990914-43991106
  hypo

SEQ ID NO: 305945 - DNA, 126 bp, Homo sapiens; identical to SEQ ID NO: 256145
  chr6:44030801-44030927
  hypo

SEQ ID NO: 305946 - DNA, 196 bp, Homo sapiens; identical to SEQ ID NO: 284065
  chr6:44044181-44044377
  hypo

SEQ ID NO: 305947 - DNA, 118 bp, Homo sapiens; identical to SEQ ID NO: 284066
  chr6:44044450-44044568
  hypo

SEQ ID NO: 305948 - DNA, 144 bp, Homo sapiens; identical to SEQ ID NO: 256146
  chr6:44077027-44077171
  hypo

SEQ ID NO: 305949 - DNA, 43 bp, Homo sapiens; identical to SEQ ID NO: 210814
  chr6:44086953-44086996
  hypo

SEQ ID NO: 305950 - DNA, 40 bp, Homo sapiens; identical to SEQ ID NO: 256148
  chr6:44089393-44089433
  hypo

SEQ ID NO: 305951 - DNA, 34 bp, Homo sapiens; identical to SEQ ID NO: 256149
  chr6:44090098-44090132
  hypo

SEQ ID NO: 305952 - DNA, 270 bp, Homo sapiens; identical to SEQ ID NO: 200451
  chr6:44095871-44096141
  hypo

SEQ ID NO: 305953 - DNA, 218 bp, Homo sapiens; identical to SEQ ID NO: 210816
  chr6:44120364-44120582
  hypo

SEQ ID NO: 305954 - DNA, 167 bp, Homo sapiens; identical to SEQ ID NO: 256151
  chr6:44121130-44121297
  hypo

SEQ ID NO: 305955 - DNA, 32 bp, Homo sapiens; identical to SEQ ID NO: 256152
  chr6:44150584-44150616
  hypo

SEQ ID NO: 305956 - DNA, 36 bp, Homo sapiens; identical to SEQ ID NO: 210817
  chr6:44166169-44166205
  hypo

SEQ ID NO: 305957 - DNA, 564 bp, Homo sapiens; identical to SEQ ID NO: 256154
  chr6:44222494-44223058
  hypo

SEQ ID NO: 305958 - DNA, 237 bp, Homo sapiens; identical to SEQ ID NO: 210819
  chr6:44227780-44228017
  hypo

SEQ ID NO: 305959 - DNA, 170 bp, Homo sapiens; identical to SEQ ID NO: 256156
  chr6:44229401-44229571
  hypo

SEQ ID NO: 305960 - DNA, 75 bp, Homo sapiens
  chr6:44250124-44250199
  hypo
tgagcacacgcaggcggctgtggctcagcagcttggcagcacctcgtgcaccacggtctccaatgaggttttgtg

SEQ ID NO: 305961 - DNA, 31 bp, Homo sapiens; identical to SEQ ID NO: 256158
  chr6:44375066-44375097
  hypo

SEQ ID NO: 305962 - DNA, 127 bp, Homo sapiens; identical to SEQ ID NO: 256159
  chr6:44449535-44449662
  hypo

SEQ ID NO: 305963 - DNA, 254 bp, Homo sapiens; identical to SEQ ID NO: 256160
  chr6:44451224-44451478
  hypo

SEQ ID NO: 305964 - DNA, 143 bp, Homo sapiens
  chr6:44695620-44695763
  hypo
tgagcgagcacgcacgcgtacacacgaggcacgcaggtgggcatgcgtgcgttaggtgtacctgtacacttgctgctcccctgatgatttgctcaacagtgtctgcaattggcagccagaaggagtccgcaagaagcaggagg

SEQ ID NO: 305965 - DNA, 73 bp, Homo sapiens
  chr6:44695795-44695868
  hypo
gccaggatctgggagcgcaaggtgagtgcaggggaaaacagcctgagcaggtcttgagccagcttcctgctgc

SEQ ID NO: 305966 - DNA, 235 bp, Homo sapiens
  chr6:44695919-44696154
  hypo
ctcaaggacagtaaagccaattaaacaagtgggtgcccctctctccttttctgattaggcctctcaggccttgcgccatctcgtgctaggatgcctcttcagtctctttctcactacttttatcctcacgctctcagctctggtcgtgtgccctgccttggggcagacacctcctggactgcaccctgaaatgaatgtctgaagcctagccctgccctccggaaagaacagccag

SEQ ID NO: 305967 - DNA, 42 bp, Homo sapiens; identical to SEQ ID NO: 256162
  chr6:45030134-45030176
  hypo

SEQ ID NO: 305968 - DNA, 43 bp, Homo sapiens; identical to SEQ ID NO: 232110
  chr6:45390376-45390419
  hypo

SEQ ID NO: 305969 - DNA, 325 bp, Homo sapiens; identical to SEQ ID NO: 284079
  chr6:45390539-45390864
  hypo

SEQ ID NO: 305970 - DNA, 39 bp, Homo sapiens; identical to SEQ ID NO: 256163
  chr6:45492176-45492215
  hypo

SEQ ID NO: 305971 - DNA, 130 bp, Homo sapiens; identical to SEQ ID NO: 256165
  chr6:45544535-45544665
  hypo

SEQ ID NO: 305972 - DNA, 264 bp, Homo sapiens
  chr6:45608783-45609047
  hypo
ctcactttgtcggcggagggtcaggactggccctgtagtctgctcataggacctggctgtcacccacaggcaattcatcctgaccgcgtctgcaactgtgtatggaaaacaacagcagtcgctttaacagcaaaagcaacaaacacacaccaaacgggatcatccctgtgctcccaggtggtgggaggcagatacgggagggaggacacattttcctgcgatattgaataagatgagcaatggttattttgggccagtctccag

SEQ ID NO: 305973 - DNA, 37 bp, Homo sapiens; identical to SEQ ID NO: 284080
  chr6:45631099-45631136
  hypo

SEQ ID NO: 305974 - DNA, 373 bp, Homo sapiens; identical to SEQ ID NO: 200459
  chr6:46097249-46097622
  hypo

SEQ ID NO: 305975 - DNA, 535 bp, Homo sapiens; identical to SEQ ID NO: 113429
  chr6:46097694-46098229
  hypo

SEQ ID NO: 305976 - DNA, 87 bp, Homo sapiens; identical to SEQ ID NO: 200463
  chr6:46816765-46816852
  hypo

SEQ ID NO: 305977 - DNA, 31 bp, Homo sapiens; identical to SEQ ID NO: 256168
  chr6:46952093-46952124
  hypo

SEQ ID NO: 305978 - DNA, 152 bp, Homo sapiens; identical to SEQ ID NO: 256169
  chr6:47084373-47084525
  hypo

SEQ ID NO: 305979 - DNA, 362 bp, Homo sapiens
  chr6:47201998-47202360
  hypo
tgctgcgcacggcctaaaacctgtacttctgactctcaagataagttcaactttaaatctttggatacagcaagcttggtaaataattttcaaaaatcttgccagactacattttatcaggccttccccgaaacacacatttgatagcatcatgaggataaagggtggccgatagctctccaccgggcagtgcgagctgcaaagattttggaggcgtgtcttcgccagccaatggcgaggttactctcgggccagcgtatcttgaagttttggactggtcttcctgggcaggtaattcagatgactcaactctcagctacaactggactgtggacggggagggacgaatcccaggggctctt

SEQ ID NO: 305980 - DNA, 176 bp, Homo sapiens; identical to SEQ ID NO: 210826
  chr6:47202453-47202629
  hypo

SEQ ID NO: 305981 - DNA, 80 bp, Homo sapiens; identical to SEQ ID NO: 256171
  chr6:47221022-47221102
  hypo

SEQ ID NO: 305982 - DNA, 41 bp, Homo sapiens; identical to SEQ ID NO: 210827
  chr6:47412331-47412372
  hypo

SEQ ID NO: 305983 - DNA, 42 bp, Homo sapiens
  chr6:47539956-47539998
  hypo
gtatatcaagaagcaggggccgggcgcagtgactcatgcctg

SEQ ID NO: 305984 - DNA, 95 bp, Homo sapiens; identical to SEQ ID NO: 256174
  chr6:49221778-49221873
  hypo

SEQ ID NO: 305985 - DNA, 144 bp, Homo sapiens; identical to SEQ ID NO: 256175
  chr6:49453725-49453869
  hypo

SEQ ID NO: 305986 - DNA, 98 bp, Homo sapiens; identical to SEQ ID NO: 210828
  chr6:49708447-49708545
  hypo

SEQ ID NO: 305987 - DNA, 224 bp, Homo sapiens; identical to SEQ ID NO: 256177
  chr6:52141055-52141279
  hypo

SEQ ID NO: 305988 - DNA, 142 bp, Homo sapiens; identical to SEQ ID NO: 256178
  chr6:52171805-52171947
  hypo

SEQ ID NO: 305989 - DNA, 954 bp, Homo sapiens; identical to SEQ ID NO: 200474
  chr6:52226797-52227751
  hypo

SEQ ID NO: 305990 - DNA, 289 bp, Homo sapiens; identical to SEQ ID NO: 210830
  chr6:52267886-52268175
  hypo

SEQ ID NO: 305991 - DNA, 86 bp, Homo sapiens; identical to SEQ ID NO: 210831
  chr6:52344289-52344375
  hypo

SEQ ID NO: 305992 - DNA, 180 bp, Homo sapiens; identical to SEQ ID NO: 210832
  chr6:52344405-52344585
  hypo

SEQ ID NO: 305993 - DNA, 151 bp, Homo sapiens; identical to SEQ ID NO: 256181
  chr6:52409343-52409494
  hypo

SEQ ID NO: 305994 - DNA, 199 bp, Homo sapiens; identical to SEQ ID NO: 284118
  chr6:52441278-52441477
  hypo

SEQ ID NO: 305995 - DNA, 97 bp, Homo sapiens; identical to SEQ ID NO: 256182
  chr6:52769065-52769162
  hypo

SEQ ID NO: 305996 - DNA, 43 bp, Homo sapiens; identical to SEQ ID NO: 256183
  chr6:52856825-52856868
  hypo

SEQ ID NO: 305997 - DNA, 140 bp, Homo sapiens; identical to SEQ ID NO: 222868
  chr6:52859558-52859698
  hypo

SEQ ID NO: 305998 - DNA, 56 bp, Homo sapiens; identical to SEQ ID NO: 210833
  chr6:53052103-53052159
  hypo

SEQ ID NO: 305999 - DNA, 206 bp, Homo sapiens; identical to SEQ ID NO: 210834
  chr6:53111001-53111207
  hypo

SEQ ID NO: 306000 - DNA, 156 bp, Homo sapiens; identical to SEQ ID NO: 256187
  chr6:53139851-53140007
  hypo

SEQ ID NO: 306001 - DNA, 43 bp, Homo sapiens; identical to SEQ ID NO: 256188
  chr6:53154515-53154558
  hypo

SEQ ID NO: 306002 - DNA, 86 bp, Homo sapiens; identical to SEQ ID NO: 256189
  chr6:53188589-53188675
  hypo

SEQ ID NO: 306003 - DNA, 120 bp, Homo sapiens; identical to SEQ ID NO: 256190
  chr6:53219594-53219714
  hypo

SEQ ID NO: 306004 - DNA, 708 bp, Homo sapiens; identical to SEQ ID NO: 256191
  chr6:53385075-53385783
  hypo

SEQ ID NO: 306005 - DNA, 80 bp, Homo sapiens; identical to SEQ ID NO: 256192
  chr6:53406020-53406100
  hypo

SEQ ID NO: 306006 - DNA, 539 bp, Homo sapiens; identical to SEQ ID NO: 43077
  chr6:53409552-53410091
  hypo

SEQ ID NO: 306007 - DNA, 470 bp, Homo sapiens; identical to SEQ ID NO: 284129
  chr6:53660404-53660874
  hypo

SEQ ID NO: 306008 - DNA, 62 bp, Homo sapiens; identical to SEQ ID NO: 113504
  chr6:53660908-53660970
  hypo

SEQ ID NO: 306009 - DNA, 87 bp, Homo sapiens; identical to SEQ ID NO: 256193
  chr6:53787620-53787707
  hypo

SEQ ID NO: 306010 - DNA, 99 bp, Homo sapiens; identical to SEQ ID NO: 256194
  chr6:55010120-55010219
  hypo

SEQ ID NO: 306011 - DNA, 112 bp, Homo sapiens; identical to SEQ ID NO: 256195
  chr6:56295532-56295644
  hypo

SEQ ID NO: 306012 - DNA, 74 bp, Homo sapiens; identical to SEQ ID NO: 256196
  chr6:56297181-56297255
  hypo

SEQ ID NO: 306013 - DNA, 145 bp, Homo sapiens; identical to SEQ ID NO: 284134
  chr6:56820270-56820415
  hypo

SEQ ID NO: 306014 - DNA, 147 bp, Homo sapiens; identical to SEQ ID NO: 210837
  chr6:56894236-56894383
  hypo

SEQ ID NO: 306015 - DNA, 60 bp, Homo sapiens; identical to SEQ ID NO: 210838
  chr6:57042600-57042660
  hypo

SEQ ID NO: 306016 - DNA, 91 bp, Homo sapiens; identical to SEQ ID NO: 256199
  chr6:57085534-57085625
  hypo

SEQ ID NO: 306017 - DNA, 155 bp, Homo sapiens; identical to SEQ ID NO: 210839
  chr6:57096923-57097078
  hypo

SEQ ID NO: 306018 - DNA, 91 bp, Homo sapiens; identical to SEQ ID NO: 256201
  chr6:57111928-57112019
  hypo

SEQ ID NO: 306019 - DNA, 144 bp, Homo sapiens; identical to SEQ ID NO: 256202
  chr6:57726146-57726290
  hypo

SEQ ID NO: 306020 - DNA, 51 bp, Homo sapiens; identical to SEQ ID NO: 256203
  chr6:58002345-58002396
  hypo

SEQ ID NO: 306021 - DNA, 32 bp, Homo sapiens
  chr6:64150631-64150663
  hypo
caaaaccctggagccaggtccgttcagccgac

SEQ ID NO: 306022 - DNA, 96 bp, Homo sapiens; identical to SEQ ID NO: 256205
  chr6:64151088-64151184
  hypo

SEQ ID NO: 306023 - DNA, 52 bp, Homo sapiens; identical to SEQ ID NO: 200489
  chr6:64283088-64283140
  hypo

SEQ ID NO: 306024 - DNA, 100 bp, Homo sapiens; identical to SEQ ID NO: 210841
  chr6:64354747-64354847
  hypo

SEQ ID NO: 306025 - DNA, 489 bp, Homo sapiens; identical to SEQ ID NO: 256207
  chr6:66497655-66498144
  hypo

SEQ ID NO: 306026 - DNA, 42 bp, Homo sapiens; identical to SEQ ID NO: 256208
  chr6:66948547-66948589
  hypo

SEQ ID NO: 306027 - DNA, 294 bp, Homo sapiens; identical to SEQ ID NO: 200490
  chr6:69344649-69344943
  hypo

SEQ ID NO: 306028 - DNA, 42 bp, Homo sapiens; identical to SEQ ID NO: 256209
  chr6:69882240-69882282
  hypo

SEQ ID NO: 306029 - DNA, 41 bp, Homo sapiens; identical to SEQ ID NO: 256210
  chr6:70515895-70515936
  hypo

SEQ ID NO: 306030 - DNA, 566 bp, Homo sapiens; identical to SEQ ID NO: 284149
  chr6:71123138-71123704
  hypo

SEQ ID NO: 306031 - DNA, 304 bp, Homo sapiens; identical to SEQ ID NO: 43113
  chr6:71123746-71124050
  hypo

SEQ ID NO: 306032 - DNA, 62 bp, Homo sapiens; identical to SEQ ID NO: 256211
  chr6:71521663-71521725
  hypo

SEQ ID NO: 306033 - DNA, 38 bp, Homo sapiens; identical to SEQ ID NO: 256212
  chr6:71544653-71544691
  hypo

SEQ ID NO: 306034 - DNA, 183 bp, Homo sapiens; identical to SEQ ID NO: 256213
  chr6:71556091-71556274
  hypo

SEQ ID NO: 306035 - DNA, 222 bp, Homo sapiens; identical to SEQ ID NO: 200499
  chr6:71665723-71665945
  hypo

SEQ ID NO: 306036 - DNA, 38 bp, Homo sapiens; identical to SEQ ID NO: 210847
  chr6:71874697-71874735
  hypo

SEQ ID NO: 306037 - DNA, 87 bp, Homo sapiens; identical to SEQ ID NO: 71805
  chr6:71874758-71874845
  hypo

SEQ ID NO: 306038 - DNA, 85 bp, Homo sapiens
  chr6:71955555-71955640
  hypo
attctgccttgtcccgccaccgatggcctgccgatgtctgctggtgtctgtgtgtttgcttttctgctcctcttgacgaccagcc

SEQ ID NO: 306039 - DNA, 164 bp, Homo sapiens; identical to SEQ ID NO: 200500
  chr6:72129568-72129732
  hypo

SEQ ID NO: 306040 - DNA, 106 bp, Homo sapiens; identical to SEQ ID NO: 210850
  chr6:72806769-72806875
  hypo

SEQ ID NO: 306041 - DNA, 93 bp, Homo sapiens; identical to SEQ ID NO: 210851
  chr6:72806905-72806998
  hypo

SEQ ID NO: 306042 - DNA, 65 bp, Homo sapiens; identical to SEQ ID NO: 256217
  chr6:73319961-73320026
  hypo

SEQ ID NO: 306043 - DNA, 70 bp, Homo sapiens; identical to SEQ ID NO: 256218
  chr6:73843279-73843349
  hypo

SEQ ID NO: 306044 - DNA, 242 bp, Homo sapiens; identical to SEQ ID NO: 256219
  chr6:73934979-73935221
  hypo

SEQ ID NO: 306045 - DNA, 104 bp, Homo sapiens; identical to SEQ ID NO: 256220
  chr6:73940904-73941008
  hypo

SEQ ID NO: 306046 - DNA, 42 bp, Homo sapiens; identical to SEQ ID NO: 256221
  chr6:74016436-74016478
  hypo

SEQ ID NO: 306047 - DNA, 55 bp, Homo sapiens; identical to SEQ ID NO: 200505
  chr6:74019358-74019413
  hypo

SEQ ID NO: 306048 - DNA, 116 bp, Homo sapiens; identical to SEQ ID NO: 200506
  chr6:74020094-74020210
  hypo

SEQ ID NO: 306049 - DNA, 217 bp, Homo sapiens; identical to SEQ ID NO: 256222
  chr6:74079517-74079734
  hypo

SEQ ID NO: 306050 - DNA, 90 bp, Homo sapiens; identical to SEQ ID NO: 256223
  chr6:74097680-74097770
  hypo

SEQ ID NO: 306051 - DNA, 178 bp, Homo sapiens; identical to SEQ ID NO: 200507
  chr6:74161321-74161499
  hypo

SEQ ID NO: 306052 - DNA, 207 bp, Homo sapiens; identical to SEQ ID NO: 256224
  chr6:74191759-74191966
  hypo

SEQ ID NO: 306053 - DNA, 290 bp, Homo sapiens; identical to SEQ ID NO: 284165
  chr6:74405623-74405913
  hypo

SEQ ID NO: 306054 - DNA, 189 bp, Homo sapiens; identical to SEQ ID NO: 284166
  chr6:74406015-74406204
  hypo

SEQ ID NO: 306055 - DNA, 77 bp, Homo sapiens; identical to SEQ ID NO: 256226
  chr6:75985977-75986054
  hypo

SEQ ID NO: 306056 - DNA, 37 bp, Homo sapiens; identical to SEQ ID NO: 256227
  chr6:75995669-75995706
  hypo

SEQ ID NO: 306057 - DNA, 86 bp, Homo sapiens; identical to SEQ ID NO: 200513
  chr6:76458864-76458950
  hypo

SEQ ID NO: 306058 - DNA, 42 bp, Homo sapiens; identical to SEQ ID NO: 256228
  chr6:76468481-76468523
  hypo

SEQ ID NO: 306059 - DNA, 35 bp, Homo sapiens; identical to SEQ ID NO: 256229
  chr6:76541353-76541388
  hypo

SEQ ID NO: 306060 - DNA, 177 bp, Homo sapiens; identical to SEQ ID NO: 256230
  chr6:79767963-79768140
  hypo

SEQ ID NO: 306061 - DNA, 35 bp, Homo sapiens; identical to SEQ ID NO: 256231
  chr6:80380890-80380925
  hypo

SEQ ID NO: 306062 - DNA, 104 bp, Homo sapiens; identical to SEQ ID NO: 200523
  chr6:80657600-80657704
  hypo

SEQ ID NO: 306063 - DNA, 41 bp, Homo sapiens; identical to SEQ ID NO: 210857
  chr6:82588584-82588625
  hypo

SEQ ID NO: 306064 - DNA, 42 bp, Homo sapiens; identical to SEQ ID NO: 256233
  chr6:82936653-82936695
  hypo

SEQ ID NO: 306065 - DNA, 43 bp, Homo sapiens; identical to SEQ ID NO: 210858
  chr6:83901419-83901462
  hypo

SEQ ID NO: 306066 - DNA, 77 bp, Homo sapiens; identical to SEQ ID NO: 210859
  chr6:86325374-86325451
  hypo

SEQ ID NO: 306067 - DNA, 82 bp, Homo sapiens; identical to SEQ ID NO: 256238
  chr6:86653351-86653433
  hypo

SEQ ID NO: 306068 - DNA, 46 bp, Homo sapiens; identical to SEQ ID NO: 256239
  chr6:86915708-86915754
  hypo

SEQ ID NO: 306069 - DNA, 81 bp, Homo sapiens; identical to SEQ ID NO: 256240
  chr6:87725863-87725944
  hypo

SEQ ID NO: 306070 - DNA, 145 bp, Homo sapiens; identical to SEQ ID NO: 222892
  chr6:87832386-87832531
  hypo

SEQ ID NO: 306071 - DNA, 120 bp, Homo sapiens; identical to SEQ ID NO: 210860
  chr6:87890686-87890806
  hypo

SEQ ID NO: 306072 - DNA, 31 bp, Homo sapiens; identical to SEQ ID NO: 210861
  chr6:88039271-88039302
  hypo

SEQ ID NO: 306073 - DNA, 101 bp, Homo sapiens; identical to SEQ ID NO: 210862
  chr6:88280033-88280134
  hypo

SEQ ID NO: 306074 - DNA, 35 bp, Homo sapiens; identical to SEQ ID NO: 256244
  chr6:88461840-88461875
  hypo

SEQ ID NO: 306075 - DNA, 120 bp, Homo sapiens; identical to SEQ ID NO: 256245
  chr6:88553999-88554119
  hypo

SEQ ID NO: 306076 - DNA, 120 bp, Homo sapiens; identical to SEQ ID NO: 210863
  chr6:89376382-89376502
  hypo

SEQ ID NO: 306077 - DNA, 200 bp, Homo sapiens; identical to SEQ ID NO: 256247
  chr6:89376682-89376882
  hypo

SEQ ID NO: 306078 - DNA, 150 bp, Homo sapiens; identical to SEQ ID NO: 256248
  chr6:89554102-89554252
  hypo

SEQ ID NO: 306079 - DNA, 332 bp, Homo sapiens; identical to SEQ ID NO: 284237
  chr6:89827121-89827453
  hypo

SEQ ID NO: 306080 - DNA, 244 bp, Homo sapiens; identical to SEQ ID NO: 284238
  chr6:89827501-89827745
  hypo

SEQ ID NO: 306081 - DNA, 142 bp, Homo sapiens; identical to SEQ ID NO: 200550
  chr6:89827793-89827935
  hypo

SEQ ID NO: 306082 - DNA, 195 bp, Homo sapiens; identical to SEQ ID NO: 256251
  chr6:89913946-89914141
  hypo

SEQ ID NO: 306083 - DNA, 63 bp, Homo sapiens; identical to SEQ ID NO: 210865
  chr6:90052741-90052804
  hypo

SEQ ID NO: 306084 - DNA, 337 bp, Homo sapiens; identical to SEQ ID NO: 284241
  chr6:90062614-90062951
  hypo

SEQ ID NO: 306085 - DNA, 182 bp, Homo sapiens; identical to SEQ ID NO: 256253
  chr6:90095593-90095775
  hypo

SEQ ID NO: 306086 - DNA, 304 bp, Homo sapiens; identical to SEQ ID NO: 200552
  chr6:90121293-90121597
  hypo

SEQ ID NO: 306087 - DNA, 267 bp, Homo sapiens; identical to SEQ ID NO: 200556
  chr6:90142635-90142902
  hypo

SEQ ID NO: 306088 - DNA, 95 bp, Homo sapiens; identical to SEQ ID NO: 256254
  chr6:90359813-90359908
  hypo

SEQ ID NO: 306089 - DNA, 221 bp, Homo sapiens; identical to SEQ ID NO: 210868
  chr6:90367696-90367917
  hypo

SEQ ID NO: 306090 - DNA, 35 bp, Homo sapiens; identical to SEQ ID NO: 256256
  chr6:90522085-90522120
  hypo

SEQ ID NO: 306091 - DNA, 147 bp, Homo sapiens
  chr6:90644672-90644819
  hypo
acaccgggaaagggcacctcctaaaatatttataaatttatcaagaaaatatgttttaaaaatgaaaaataaacagatgtacaagtgcaacttgagagaaatacattatgcgagtttgcaacagctgagtggcgggtgtgtgggaga

SEQ ID NO: 306092 - DNA, 104 bp, Homo sapiens; identical to SEQ ID NO: 256258
  chr6:90685940-90686044
  hypo

SEQ ID NO: 306093 - DNA, 1051 bp, Homo sapiens; identical to SEQ ID NO: 284249
  chr6:91005702-91006753
  hypo

SEQ ID NO: 306094 - DNA, 45 bp, Homo sapiens; identical to SEQ ID NO: 256259
  chr6:91291934-91291979
  hypo

SEQ ID NO: 306095 - DNA, 44 bp, Homo sapiens; identical to SEQ ID NO: 256260
  chr6:91304006-91304050
  hypo

SEQ ID NO: 306096 - DNA, 41 bp, Homo sapiens; identical to SEQ ID NO: 256261
  chr6:91316404-91316445
  hypo

SEQ ID NO: 306097 - DNA, 94 bp, Homo sapiens; identical to SEQ ID NO: 210870
  chr6:96085019-96085113
  hypo

SEQ ID NO: 306098 - DNA, 34 bp, Homo sapiens; identical to SEQ ID NO: 256263
  chr6:96552675-96552709
  hypo

SEQ ID NO: 306099 - DNA, 82 bp, Homo sapiens; identical to SEQ ID NO: 256264
  chr6:98148229-98148311
  hypo

SEQ ID NO: 306100 - DNA, 66 bp, Homo sapiens; identical to SEQ ID NO: 200588
  chr6:99962859-99962925
  hypo

SEQ ID NO: 306101 - DNA, 219 bp, Homo sapiens; identical to SEQ ID NO: 232287
  chr6:99963448-99963667
  hypo

SEQ ID NO: 306102 - DNA, 167 bp, Homo sapiens; identical to SEQ ID NO: 284298
  chr6:100054672-100054839
  hypo

SEQ ID NO: 306103 - DNA, 146 bp, Homo sapiens; identical to SEQ ID NO: 210873
  chr6:100841322-100841468
  hypo

SEQ ID NO: 306104 - DNA, 192 bp, Homo sapiens; identical to SEQ ID NO: 284308
  chr6:101841974-101842166
  hypo

SEQ ID NO: 306105 - DNA, 59 bp, Homo sapiens; identical to SEQ ID NO: 222906
  chr6:105307082-105307141
  hypo

SEQ ID NO: 306106 - DNA, 155 bp, Homo sapiens; identical to SEQ ID NO: 200598
  chr6:105628083-105628238
  hypo

SEQ ID NO: 306107 - DNA, 43 bp, Homo sapiens; identical to SEQ ID NO: 210875
  chr6:105750346-105750389
  hypo

SEQ ID NO: 306108 - DNA, 104 bp, Homo sapiens; identical to SEQ ID NO: 210876
  chr6:105750646-105750750
  hypo

SEQ ID NO: 306109 - DNA, 165 bp, Homo sapiens; identical to SEQ ID NO: 256267
  chr6:106456821-106456986
  hypo

SEQ ID NO: 306110 - DNA, 351 bp, Homo sapiens; identical to SEQ ID NO: 284323
  chr6:106533694-106534045
  hypo

SEQ ID NO: 306111 - DNA, 32 bp, Homo sapiens; identical to SEQ ID NO: 256268
  chr6:106582673-106582705
  hypo

SEQ ID NO: 306112 - DNA, 156 bp, Homo sapiens; identical to SEQ ID NO: 200607
  chr6:106961023-106961179
  hypo

SEQ ID NO: 306113 - DNA, 34 bp, Homo sapiens; identical to SEQ ID NO: 210879
  chr6:107010364-107010398
  hypo

SEQ ID NO: 306114 - DNA, 77 bp, Homo sapiens; identical to SEQ ID NO: 256270
  chr6:107078765-107078842
  hypo

SEQ ID NO: 306115 - DNA, 53 bp, Homo sapiens; identical to SEQ ID NO: 256271
  chr6:107537665-107537718
  hypo

SEQ ID NO: 306116 - DNA, 120 bp, Homo sapiens; identical to SEQ ID NO: 210880
  chr6:107562426-107562546
  hypo

SEQ ID NO: 306117 - DNA, 36 bp, Homo sapiens; identical to SEQ ID NO: 210881
  chr6:107563806-107563842
  hypo

SEQ ID NO: 306118 - DNA, 314 bp, Homo sapiens; identical to SEQ ID NO: 200609
  chr6:107810308-107810622
  hypo

SEQ ID NO: 306119 - DNA, 436 bp, Homo sapiens; identical to SEQ ID NO: 284335
  chr6:107810665-107811101
  hypo

SEQ ID NO: 306120 - DNA, 178 bp, Homo sapiens; identical to SEQ ID NO: 222913
  chr6:108455183-108455361
  hypo

SEQ ID NO: 306121 - DNA, 183 bp, Homo sapiens; identical to SEQ ID NO: 200616
  chr6:108882164-108882347
  hypo

SEQ ID NO: 306122 - DNA, 44 bp, Homo sapiens; identical to SEQ ID NO: 210884
  chr6:108984287-108984331
  hypo

SEQ ID NO: 306123 - DNA, 31 bp, Homo sapiens; identical to SEQ ID NO: 256276
  chr6:108997762-108997793
  hypo

SEQ ID NO: 306124 - DNA, 99 bp, Homo sapiens; identical to SEQ ID NO: 210885
  chr6:109053387-109053486
  hypo

SEQ ID NO: 306125 - DNA, 162 bp, Homo sapiens; identical to SEQ ID NO: 210886
  chr6:109058636-109058798
  hypo

SEQ ID NO: 306126 - DNA, 120 bp, Homo sapiens; identical to SEQ ID NO: 210887
  chr6:109059981-109060101
  hypo

SEQ ID NO: 306127 - DNA, 39 bp, Homo sapiens; identical to SEQ ID NO: 256283
  chr6:109551797-109551836
  hypo

SEQ ID NO: 306128 - DNA, 139 bp, Homo sapiens; identical to SEQ ID NO: 256284
  chr6:109647760-109647899
  hypo

SEQ ID NO: 306129 - DNA, 429 bp, Homo sapiens; identical to SEQ ID NO: 200619
  chr6:109777177-109777606
  hypo

SEQ ID NO: 306130 - DNA, 143 bp, Homo sapiens; identical to SEQ ID NO: 210889
  chr6:109798005-109798148
  hypo

SEQ ID NO: 306131 - DNA, 70 bp, Homo sapiens
  chr6:110437751-110437821
  hypo
gctcagtaaggtctattccctctataaattccacctcttggggaaggacgtagtagaacaaaaagcagca

SEQ ID NO: 306132 - DNA, 68 bp, Homo sapiens; identical to SEQ ID NO: 256287
  chr6:110670276-110670344
  hypo

SEQ ID NO: 306133 - DNA, 135 bp, Homo sapiens; identical to SEQ ID NO: 210890
  chr6:110768071-110768206
  hypo

SEQ ID NO: 306134 - DNA, 44 bp, Homo sapiens; identical to SEQ ID NO: 256289
  chr6:110798286-110798330
  hypo

SEQ ID NO: 306135 - DNA, 86 bp, Homo sapiens; identical to SEQ ID NO: 256290
  chr6:110817991-110818077
  hypo

SEQ ID NO: 306136 - DNA, 121 bp, Homo sapiens; identical to SEQ ID NO: 256291
  chr6:110842271-110842392
  hypo

SEQ ID NO: 306137 - DNA, 48 bp, Homo sapiens; identical to SEQ ID NO: 210891
  chr6:110843341-110843389
  hypo

SEQ ID NO: 306138 - DNA, 187 bp, Homo sapiens; identical to SEQ ID NO: 210892
  chr6:110872232-110872419
  hypo

SEQ ID NO: 306139 - DNA, 425 bp, Homo sapiens; identical to SEQ ID NO: 256294
  chr6:110966935-110967360
  hypo

SEQ ID NO: 306140 - DNA, 82 bp, Homo sapiens; identical to SEQ ID NO: 256295
  chr6:110968047-110968129
  hypo

SEQ ID NO: 306141 - DNA, 120 bp, Homo sapiens; identical to SEQ ID NO: 256296
  chr6:111014240-111014360
  hypo

SEQ ID NO: 306142 - DNA, 86 bp, Homo sapiens; identical to SEQ ID NO: 210893
  chr6:111022042-111022128
  hypo

SEQ ID NO: 306143 - DNA, 45 bp, Homo sapiens; identical to SEQ ID NO: 210894
  chr6:111085015-111085060
  hypo

SEQ ID NO: 306144 - DNA, 177 bp, Homo sapiens; identical to SEQ ID NO: 256299
  chr6:111244972-111245149
  hypo

SEQ ID NO: 306145 - DNA, 585 bp, Homo sapiens; identical to SEQ ID NO: 284368
  chr6:111408731-111409316
  hypo

SEQ ID NO: 306146 - DNA, 273 bp, Homo sapiens; identical to SEQ ID NO: 200623
  chr6:111409368-111409641
  hypo

SEQ ID NO: 306147 - DNA, 104 bp, Homo sapiens; identical to SEQ ID NO: 256300
  chr6:111546768-111546872
  hypo

SEQ ID NO: 306148 - DNA, 41 bp, Homo sapiens; identical to SEQ ID NO: 256301
  chr6:111579404-111579445
  hypo

SEQ ID NO: 306149 - DNA, 32 bp, Homo sapiens; identical to SEQ ID NO: 256302
  chr6:111581423-111581455
  hypo

SEQ ID NO: 306150 - DNA, 138 bp, Homo sapiens; identical to SEQ ID NO: 256303
  chr6:111581990-111582128
  hypo

SEQ ID NO: 306151 - DNA, 195 bp, Homo sapiens; identical to SEQ ID NO: 210897
  chr6:111673961-111674156
  hypo

SEQ ID NO: 306152 - DNA, 245 bp, Homo sapiens; identical to SEQ ID NO: 256305
  chr6:111750920-111751165
  hypo

SEQ ID NO: 306153 - DNA, 212 bp, Homo sapiens; identical to SEQ ID NO: 210898
  chr6:111751866-111752078
  hypo

SEQ ID NO: 306154 - DNA, 164 bp, Homo sapiens; identical to SEQ ID NO: 210899
  chr6:111766137-111766301
  hypo

SEQ ID NO: 306155 - DNA, 34 bp, Homo sapiens; identical to SEQ ID NO: 256308
  chr6:111860206-111860240
  hypo

SEQ ID NO: 306156 - DNA, 156 bp, Homo sapiens; identical to SEQ ID NO: 210900
  chr6:111872274-111872430
  hypo

SEQ ID NO: 306157 - DNA, 153 bp, Homo sapiens
  chr6:111874474-111874627
  hypo
aaaaggcgagccagcatgaccatacgtttctcatgtctacatccaaaaggtaatgcagatgttccaaacagctaagtattattccaagaagtgccatttttgtggaatcagaattgtgataggacgggctggacgcagtggctcatacccgta

SEQ ID NO: 306158 - DNA, 87 bp, Homo sapiens; identical to SEQ ID NO: 210901
  chr6:111886815-111886902
  hypo

SEQ ID NO: 306159 - DNA, 102 bp, Homo sapiens; identical to SEQ ID NO: 256312
  chr6:111955506-111955608
  hypo

SEQ ID NO: 306160 - DNA, 186 bp, Homo sapiens; identical to SEQ ID NO: 256313
  chr6:111993235-111993421
  hypo

SEQ ID NO: 306161 - DNA, 85 bp, Homo sapiens; identical to SEQ ID NO: 256314
  chr6:112021620-112021705
  hypo

SEQ ID NO: 306162 - DNA, 86 bp, Homo sapiens; identical to SEQ ID NO: 256315
  chr6:112128161-112128247
  hypo

SEQ ID NO: 306163 - DNA, 39 bp, Homo sapiens; identical to SEQ ID NO: 256316
  chr6:114153359-114153398
  hypo

SEQ ID NO: 306164 - DNA, 34 bp, Homo sapiens; identical to SEQ ID NO: 256317
  chr6:116800745-116800779
  hypo

SEQ ID NO: 306165 - DNA, 40 bp, Homo sapiens; identical to SEQ ID NO: 256318
  chr6:116873934-116873974
  hypo

SEQ ID NO: 306166 - DNA, 130 bp, Homo sapiens; identical to SEQ ID NO: 256319
  chr6:116905294-116905424
  hypo

SEQ ID NO: 306167 - DNA, 34 bp, Homo sapiens; identical to SEQ ID NO: 256320
  chr6:117100692-117100726
  hypo

SEQ ID NO: 306168 - DNA, 166 bp, Homo sapiens; identical to SEQ ID NO: 284395
  chr6:117592207-117592373
  hypo

SEQ ID NO: 306169 - DNA, 821 bp, Homo sapiens; identical to SEQ ID NO: 284396
  chr6:117803613-117804434
  hypo

SEQ ID NO: 306170 - DNA, 62 bp, Homo sapiens; identical to SEQ ID NO: 256321
  chr6:117894655-117894717
  hypo

SEQ ID NO: 306171 - DNA, 44 bp, Homo sapiens; identical to SEQ ID NO: 256322
  chr6:118848429-118848473
  hypo

SEQ ID NO: 306172 - DNA, 83 bp, Homo sapiens; identical to SEQ ID NO: 256323
  chr6:118898186-118898269
  hypo

SEQ ID NO: 306173 - DNA, 33 bp, Homo sapiens; identical to SEQ ID NO: 210903
  chr6:119023866-119023899
  hypo

SEQ ID NO: 306174 - DNA, 81 bp, Homo sapiens; identical to SEQ ID NO: 256325
  chr6:119162952-119163033
  hypo

SEQ ID NO: 306175 - DNA, 70 bp, Homo sapiens; identical to SEQ ID NO: 256326
  chr6:119240581-119240651
  hypo

SEQ ID NO: 306176 - DNA, 92 bp, Homo sapiens; identical to SEQ ID NO: 210904
  chr6:119254299-119254391
  hypo

SEQ ID NO: 306177 - DNA, 86 bp, Homo sapiens; identical to SEQ ID NO: 256329
  chr6:119462544-119462630
  hypo

SEQ ID NO: 306178 - DNA, 31 bp, Homo sapiens; identical to SEQ ID NO: 256330
  chr6:119482932-119482963
  hypo

SEQ ID NO: 306179 - DNA, 31 bp, Homo sapiens; identical to SEQ ID NO: 256331
  chr6:119483263-119483294
  hypo

SEQ ID NO: 306180 - DNA, 93 bp, Homo sapiens
  chr6:119510813-119510906
  hypo
ataacatgtactcacatgttcgattatatgattcatgacaagtacgggcaatttcagccccgagttcaaggtagtgttgggccatgccttcgg

SEQ ID NO: 306181 - DNA, 69 bp, Homo sapiens
  chr6:119510942-119511011
  hypo
cgaagcaggtcaggtggcccatcttgtgctccaggaggccccctttccactctgcgatataagttagtc

SEQ ID NO: 306182 - DNA, 41 bp, Homo sapiens; identical to SEQ ID NO: 256334
  chr6:119620032-119620073
  hypo

SEQ ID NO: 306183 - DNA, 40 bp, Homo sapiens; identical to SEQ ID NO: 222921
  chr6:119762016-119762056
  hypo

SEQ ID NO: 306184 - DNA, 92 bp, Homo sapiens; identical to SEQ ID NO: 256335
  chr6:119834901-119834993
  hypo

SEQ ID NO: 306185 - DNA, 90 bp, Homo sapiens; identical to SEQ ID NO: 256336
  chr6:121364079-121364169
  hypo

SEQ ID NO: 306186 - DNA, 210 bp, Homo sapiens; identical to SEQ ID NO: 256337
  chr6:121654738-121654948
  hypo

SEQ ID NO: 306187 - DNA, 105 bp, Homo sapiens; identical to SEQ ID NO: 222922
  chr6:123110275-123110380
  hypo

SEQ ID NO: 306188 - DNA, 420 bp, Homo sapiens; identical to SEQ ID NO: 222923
  chr6:123110438-123110858
  hypo

SEQ ID NO: 306189 - DNA, 376 bp, Homo sapiens; identical to SEQ ID NO: 284416
  chr6:124123917-124124293
  hypo

SEQ ID NO: 306190 - DNA, 131 bp, Homo sapiens; identical to SEQ ID NO: 256338
  chr6:125087371-125087502
  hypo

SEQ ID NO: 306191 - DNA, 39 bp, Homo sapiens; identical to SEQ ID NO: 256339
  chr6:125207462-125207501
  hypo

SEQ ID NO: 306192 - DNA, 278 bp, Homo sapiens; identical to SEQ ID NO: 284418
  chr6:125282855-125283133
  hypo

SEQ ID NO: 306193 - DNA, 210 bp, Homo sapiens; identical to SEQ ID NO: 256340
  chr6:125299462-125299672
  hypo

SEQ ID NO: 306194 - DNA, 78 bp, Homo sapiens; identical to SEQ ID NO: 284420
  chr6:125420731-125420809
  hypo

SEQ ID NO: 306195 - DNA, 41 bp, Homo sapiens; identical to SEQ ID NO: 256341
  chr6:126208032-126208073
  hypo

SEQ ID NO: 306196 - DNA, 151 bp, Homo sapiens; identical to SEQ ID NO: 210907
  chr6:126242092-126242243
  hypo

SEQ ID NO: 306197 - DNA, 57 bp, Homo sapiens; identical to SEQ ID NO: 256343
  chr6:126243892-126243949
  hypo

SEQ ID NO: 306198 - DNA, 150 bp, Homo sapiens; identical to SEQ ID NO: 210908
  chr6:126426570-126426720
  hypo

SEQ ID NO: 306199 - DNA, 439 bp, Homo sapiens; identical to SEQ ID NO: 284440
  chr6:127836226-127836665
  hypo

SEQ ID NO: 306200 - DNA, 52 bp, Homo sapiens; identical to SEQ ID NO: 200647
  chr6:127837749-127837801
  hypo

SEQ ID NO: 306201 - DNA, 82 bp, Homo sapiens; identical to SEQ ID NO: 256345
  chr6:128830109-128830191
  hypo

SEQ ID NO: 306202 - DNA, 436 bp, Homo sapiens
  chr6:128901269-128901705
  hypo
caaagctgcgatgtcgacactctgcacatgctcctcaaacttggtgatctcctcctccagcaagtctgtccccactttgtcgtcctccaccacacactgaatctgcatcttccggataccatagcccacggacgccagcttggaggccccgctcactagcccatccagctggatagagcgcacacatgcctccagctgggtcatgtccgtcttattgtcccaaggcttgatgtccagcaggatggaggacttggccaccagcgagggattcttggccttcttggcgtacagccgcagccgctcctcccgcagccgccttgcctccttgtcttcctccttattgtcgctgccaacagatcaatgtcatcgtcctcgttatcctctgcttcttggccggggtcgtagtaaggggggcgaggggaggggcgctccactt

SEQ ID NO: 306203 - DNA, 81 bp, Homo sapiens; identical to SEQ ID NO: 256347
  chr6:129635704-129635785
  hypo

SEQ ID NO: 306204 - DNA, 32 bp, Homo sapiens; identical to SEQ ID NO: 256348
  chr6:130472587-130472619
  hypo

SEQ ID NO: 306205 - DNA, 103 bp, Homo sapiens; identical to SEQ ID NO: 256349
  chr6:130499429-130499532
  hypo

SEQ ID NO: 306206 - DNA, 380 bp, Homo sapiens; identical to SEQ ID NO: 43472
  chr6:131383361-131383741
  hypo

SEQ ID NO: 306207 - DNA, 110 bp, Homo sapiens; identical to SEQ ID NO: 210913
  chr6:131455849-131455959
  hypo

SEQ ID NO: 306208 - DNA, 143 bp, Homo sapiens; identical to SEQ ID NO: 256351
  chr6:132601694-132601837
  hypo

SEQ ID NO: 306209 - DNA, 41 bp, Homo sapiens; identical to SEQ ID NO: 256352
  chr6:133118418-133118459
  hypo

SEQ ID NO: 306210 - DNA, 193 bp, Homo sapiens; identical to SEQ ID NO: 222933
  chr6:133146628-133146821
  hypo

SEQ ID NO: 306211 - DNA, 697 bp, Homo sapiens; identical to SEQ ID NO: 284465
  chr6:134212421-134213118
  hypo

SEQ ID NO: 306212 - DNA, 43 bp, Homo sapiens; identical to SEQ ID NO: 256353
  chr6:134502445-134502488
  hypo

SEQ ID NO: 306213 - DNA, 32 bp, Homo sapiens; identical to SEQ ID NO: 256354
  chr6:134545871-134545903
  hypo

SEQ ID NO: 306214 - DNA, 174 bp, Homo sapiens; identical to SEQ ID NO: 256356
  chr6:134669115-134669289
  hypo

SEQ ID NO: 306215 - DNA, 74 bp, Homo sapiens; identical to SEQ ID NO: 256357
  chr6:134749836-134749910
  hypo

SEQ ID NO: 306216 - DNA, 82 bp, Homo sapiens; identical to SEQ ID NO: 210914
  chr6:134817633-134817715
  hypo

SEQ ID NO: 306217 - DNA, 36 bp, Homo sapiens; identical to SEQ ID NO: 256359
  chr6:135305600-135305636
  hypo

SEQ ID NO: 306218 - DNA, 110 bp, Homo sapiens; identical to SEQ ID NO: 256360
  chr6:135427927-135428037
  hypo

SEQ ID NO: 306219 - DNA, 44 bp, Homo sapiens; identical to SEQ ID NO: 200662
  chr6:135503608-135503652
  hypo

SEQ ID NO: 306220 - DNA, 34 bp, Homo sapiens; identical to SEQ ID NO: 256361
  chr6:135930509-135930543
  hypo

SEQ ID NO: 306221 - DNA, 55 bp, Homo sapiens; identical to SEQ ID NO: 256362
  chr6:136552674-136552729
  hypo

SEQ ID NO: 306222 - DNA, 153 bp, Homo sapiens
  chr6:136556331-136556484
  hypo
tcctagatcttaagcaaccgggtgatcgtgttgccatttgctaatatgcaaaagacgtgggaaagaacaggttttcaaggtggcggaaaagaacaggtaggaaggaaaagtcctgttttggacctgtgaaacgagatacctgtgagacaggca

SEQ ID NO: 306223 - DNA, 120 bp, Homo sapiens; identical to SEQ ID NO: 256364
  chr6:136655688-136655808
  hypo

SEQ ID NO: 306224 - DNA, 31 bp, Homo sapiens; identical to SEQ ID NO: 256365
  chr6:136682124-136682155
  hypo

SEQ ID NO: 306225 - DNA, 206 bp, Homo sapiens; identical to SEQ ID NO: 210916
  chr6:136682758-136682964
  hypo

SEQ ID NO: 306226 - DNA, 154 bp, Homo sapiens; identical to SEQ ID NO: 256367
  chr6:136809005-136809159
  hypo

SEQ ID NO: 306227 - DNA, 563 bp, Homo sapiens; identical to SEQ ID NO: 200664
  chr6:136870742-136871305
  hypo

SEQ ID NO: 306228 - DNA, 156 bp, Homo sapiens; identical to SEQ ID NO: 256368
  chr6:136901462-136901618
  hypo

SEQ ID NO: 306229 - DNA, 125 bp, Homo sapiens; identical to SEQ ID NO: 210918
  chr6:136980868-136980993
  hypo

SEQ ID NO: 306230 - DNA, 212 bp, Homo sapiens; identical to SEQ ID NO: 256371
  chr6:137147517-137147729
  hypo

SEQ ID NO: 306231 - DNA, 48 bp, Homo sapiens; identical to SEQ ID NO: 200668
  chr6:137243410-137243458
  hypo

SEQ ID NO: 306232 - DNA, 227 bp, Homo sapiens; identical to SEQ ID NO: 284494
  chr6:138428363-138428590
  hypo

SEQ ID NO: 306233 - DNA, 190 bp, Homo sapiens; identical to SEQ ID NO: 256372
  chr6:138518767-138518957
  hypo

SEQ ID NO: 306234 - DNA, 266 bp, Homo sapiens; identical to SEQ ID NO: 200675
  chr6:138724516-138724782
  hypo

SEQ ID NO: 306235 - DNA, 327 bp, Homo sapiens; identical to SEQ ID NO: 256373
  chr6:138745335-138745662
  hypo

SEQ ID NO: 306236 - DNA, 57 bp, Homo sapiens
  chr6:138790362-138790419
  hypo
gccaactaagcagccaatcacgtactatgcggatgcacacaaatgaaaccctcactt

SEQ ID NO: 306237 - DNA, 49 bp, Homo sapiens
  chr6:138790576-138790625
  hypo
aaggctgagcgcgatgactcacgcctgtaagcctagaactttgggaggc

SEQ ID NO: 306238 - DNA, 41 bp, Homo sapiens; identical to SEQ ID NO: 256375
  chr6:138812078-138812119
  hypo

SEQ ID NO: 306239 - DNA, 161 bp, Homo sapiens; identical to SEQ ID NO: 210924
  chr6:138883861-138884022
  hypo

SEQ ID NO: 306240 - DNA, 184 bp, Homo sapiens; identical to SEQ ID NO: 256377
  chr6:138884363-138884547
  hypo

SEQ ID NO: 306241 - DNA, 154 bp, Homo sapiens; identical to SEQ ID NO: 256378
  chr6:138905937-138906091
  hypo

SEQ ID NO: 306242 - DNA, 483 bp, Homo sapiens; identical to SEQ ID NO: 284501
  chr6:139013361-139013844
  hypo

SEQ ID NO: 306243 - DNA, 32 bp, Homo sapiens; identical to SEQ ID NO: 256379
  chr6:139455797-139455829
  hypo

SEQ ID NO: 306244 - DNA, 379 bp, Homo sapiens; identical to SEQ ID NO: 256380
  chr6:139564048-139564427
  hypo

SEQ ID NO: 306245 - DNA, 407 bp, Homo sapiens; identical to SEQ ID NO: 284507
  chr6:139694964-139695371
  hypo

SEQ ID NO: 306246 - DNA, 48 bp, Homo sapiens; identical to SEQ ID NO: 256381
  chr6:139697344-139697392
  hypo

SEQ ID NO: 306247 - DNA, 61 bp, Homo sapiens; identical to SEQ ID NO: 256382
  chr6:139697463-139697524
  hypo

SEQ ID NO: 306248 - DNA, 64 bp, Homo sapiens
  chr6:139858225-139858289
  hypo
ggcctggaccaacagtccctcggtgaattcatgacaaaacgcctgaatgtggaatcagggtagt

SEQ ID NO: 306249 - DNA, 78 bp, Homo sapiens; identical to SEQ ID NO: 256384
  chr6:139858705-139858783
  hypo

SEQ ID NO: 306250 - DNA, 33 bp, Homo sapiens; identical to SEQ ID NO: 210927
  chr6:139871210-139871243
  hypo

SEQ ID NO: 306251 - DNA, 33 bp, Homo sapiens; identical to SEQ ID NO: 256386
  chr6:139871483-139871516
  hypo

SEQ ID NO: 306252 - DNA, 31 bp, Homo sapiens; identical to SEQ ID NO: 256387
  chr6:139908685-139908716
  hypo

SEQ ID NO: 306253 - DNA, 212 bp, Homo sapiens; identical to SEQ ID NO: 210928
  chr6:140300532-140300744
  hypo

SEQ ID NO: 306254 - DNA, 35 bp, Homo sapiens; identical to SEQ ID NO: 256389
  chr6:141150320-141150355
  hypo

SEQ ID NO: 306255 - DNA, 32 bp, Homo sapiens; identical to SEQ ID NO: 256390
  chr6:142237865-142237897
  hypo

SEQ ID NO: 306256 - DNA, 86 bp, Homo sapiens; identical to SEQ ID NO: 256391
  chr6:142509608-142509694
  hypo

SEQ ID NO: 306257 - DNA, 77 bp, Homo sapiens; identical to SEQ ID NO: 256392
  chr6:142543125-142543202
  hypo

SEQ ID NO: 306258 - DNA, 185 bp, Homo sapiens; identical to SEQ ID NO: 284510
  chr6:142622529-142622714
  hypo

SEQ ID NO: 306259 - DNA, 485 bp, Homo sapiens; identical to SEQ ID NO: 284511
  chr6:142622963-142623448
  hypo

SEQ ID NO: 306260 - DNA, 65 bp, Homo sapiens; identical to SEQ ID NO: 210930
  chr6:143031708-143031773
  hypo

SEQ ID NO: 306261 - DNA, 38 bp, Homo sapiens; identical to SEQ ID NO: 256395
  chr6:143239181-143239219
  hypo

SEQ ID NO: 306262 - DNA, 198 bp, Homo sapiens; identical to SEQ ID NO: 200681
  chr6:143266117-143266315
  hypo

SEQ ID NO: 306263 - DNA, 39 bp, Homo sapiens; identical to SEQ ID NO: 256397
  chr6:143947371-143947410
  hypo

SEQ ID NO: 306264 - DNA, 39 bp, Homo sapiens; identical to SEQ ID NO: 256398
  chr6:143947650-143947689
  hypo

SEQ ID NO: 306265 - DNA, 713 bp, Homo sapiens; identical to SEQ ID NO: 222946
  chr6:143998943-143999656
  hypo

SEQ ID NO: 306266 - DNA, 173 bp, Homo sapiens; identical to SEQ ID NO: 256399
  chr6:144067584-144067757
  hypo

SEQ ID NO: 306267 - DNA, 250 bp, Homo sapiens; identical to SEQ ID NO: 256400
  chr6:144271186-144271436
  hypo

SEQ ID NO: 306268 - DNA, 72 bp, Homo sapiens; identical to SEQ ID NO: 210933
  chr6:144330175-144330247
  hypo

SEQ ID NO: 306269 - DNA, 79 bp, Homo sapiens; identical to SEQ ID NO: 210934
  chr6:144508671-144508750
  hypo

SEQ ID NO: 306270 - DNA, 173 bp, Homo sapiens; identical to SEQ ID NO: 256403
  chr6:144534399-144534572
  hypo

SEQ ID NO: 306271 - DNA, 46 bp, Homo sapiens; identical to SEQ ID NO: 200686
  chr6:144537939-144537985
  hypo

SEQ ID NO: 306272 - DNA, 487 bp, Homo sapiens; identical to SEQ ID NO: 200687
  chr6:144606893-144607380
  hypo

SEQ ID NO: 306273 - DNA, 177 bp, Homo sapiens; identical to SEQ ID NO: 256404
  chr6:144973591-144973768
  hypo

SEQ ID NO: 306274 - DNA, 31 bp, Homo sapiens; identical to SEQ ID NO: 210937
  chr6:146011352-146011383
  hypo

SEQ ID NO: 306275 - DNA, 535 bp, Homo sapiens; identical to SEQ ID NO: 200688
  chr6:146136028-146136563
  hypo

SEQ ID NO: 306276 - DNA, 246 bp, Homo sapiens; identical to SEQ ID NO: 200689
  chr6:146136564-146136810
  hypo

SEQ ID NO: 306277 - DNA, 254 bp, Homo sapiens; identical to SEQ ID NO: 200691
  chr6:146864508-146864762
  hypo

SEQ ID NO: 306278 - DNA, 399 bp, Homo sapiens; identical to SEQ ID NO: 284533
  chr6:146864878-146865277
  hypo

SEQ ID NO: 306279 - DNA, 69 bp, Homo sapiens; identical to SEQ ID NO: 256406
  chr6:147519322-147519391
  hypo

SEQ ID NO: 306280 - DNA, 163 bp, Homo sapiens; identical to SEQ ID NO: 256407
  chr6:147728142-147728305
  hypo

SEQ ID NO: 306281 - DNA, 42 bp, Homo sapiens; identical to SEQ ID NO: 256408
  chr6:148062632-148062674
  hypo

SEQ ID NO: 306282 - DNA, 137 bp, Homo sapiens; identical to SEQ ID NO: 210942
  chr6:148200360-148200497
  hypo

SEQ ID NO: 306283 - DNA, 39 bp, Homo sapiens; identical to SEQ ID NO: 210943
  chr6:148648689-148648728
  hypo

SEQ ID NO: 306284 - DNA, 157 bp, Homo sapiens; identical to SEQ ID NO: 256411
  chr6:148710316-148710473
  hypo

SEQ ID NO: 306285 - DNA, 198 bp, Homo sapiens; identical to SEQ ID NO: 256412
  chr6:148819897-148820095
  hypo

SEQ ID NO: 306286 - DNA, 210 bp, Homo sapiens; identical to SEQ ID NO: 256413
  chr6:148869356-148869566
  hypo

SEQ ID NO: 306287 - DNA, 195 bp, Homo sapiens; identical to SEQ ID NO: 256414
  chr6:149177572-149177767
  hypo

SEQ ID NO: 306288 - DNA, 92 bp, Homo sapiens; identical to SEQ ID NO: 256415
  chr6:149198424-149198516
  hypo

SEQ ID NO: 306289 - DNA, 32 bp, Homo sapiens; identical to SEQ ID NO: 256416
  chr6:149198576-149198608
  hypo

SEQ ID NO: 306290 - DNA, 311 bp, Homo sapiens; identical to SEQ ID NO: 256417
  chr6:149409546-149409857
  hypo

SEQ ID NO: 306291 - DNA, 110 bp, Homo sapiens; identical to SEQ ID NO: 256418
  chr6:149721362-149721472
  hypo

SEQ ID NO: 306292 - DNA, 324 bp, Homo sapiens; identical to SEQ ID NO: 284546
  chr6:149771949-149772273
  hypo

SEQ ID NO: 306293 - DNA, 169 bp, Homo sapiens; identical to SEQ ID NO: 114190
  chr6:149772292-149772461
  hypo

SEQ ID NO: 306294 - DNA, 169 bp, Homo sapiens; identical to SEQ ID NO: 256421
  chr6:149813263-149813432
  hypo

SEQ ID NO: 306295 - DNA, 55 bp, Homo sapiens
  chr6:149868387-149868442
  hypo
ttttataatgatttacaagatcctctcctaccccatcctacgccatcttcttatt

SEQ ID NO: 306296 - DNA, 484 bp, Homo sapiens; identical to SEQ ID NO: 210944
  chr6:149915185-149915669
  hypo

SEQ ID NO: 306297 - DNA, 84 bp, Homo sapiens; identical to SEQ ID NO: 210945
  chr6:150081971-150082055
  hypo

SEQ ID NO: 306298 - DNA, 122 bp, Homo sapiens; identical to SEQ ID NO: 256425
  chr6:150174429-150174551
  hypo

SEQ ID NO: 306299 - DNA, 286 bp, Homo sapiens; identical to SEQ ID NO: 284554
  chr6:150185355-150185641
  hypo

SEQ ID NO: 306300 - DNA, 210 bp, Homo sapiens; identical to SEQ ID NO: 256426
  chr6:150209155-150209365
  hypo

SEQ ID NO: 306301 - DNA, 99 bp, Homo sapiens; identical to SEQ ID NO: 256427
  chr6:150420027-150420126
  hypo

SEQ ID NO: 306302 - DNA, 39 bp, Homo sapiens; identical to SEQ ID NO: 256428
  chr6:150420186-150420225
  hypo

SEQ ID NO: 306303 - DNA, 120 bp, Homo sapiens; identical to SEQ ID NO: 256429
  chr6:150421767-150421887
  hypo

SEQ ID NO: 306304 - DNA, 120 bp, Homo sapiens; identical to SEQ ID NO: 256430
  chr6:150437046-150437166
  hypo

SEQ ID NO: 306305 - DNA, 43 bp, Homo sapiens; identical to SEQ ID NO: 256431
  chr6:150437286-150437329
  hypo

SEQ ID NO: 306306 - DNA, 31 bp, Homo sapiens
  chr6:150487186-150487217
  hypo
cacatgccacataccgctcttcttcttcttt

SEQ ID NO: 306307 - DNA, 118 bp, Homo sapiens; identical to SEQ ID NO: 256433
  chr6:150498913-150499031
  hypo

SEQ ID NO: 306308 - DNA, 31 bp, Homo sapiens; identical to SEQ ID NO: 256434
  chr6:150499232-150499263
  hypo

SEQ ID NO: 306309 - DNA, 169 bp, Homo sapiens; identical to SEQ ID NO: 256435
  chr6:150518591-150518760
  hypo

SEQ ID NO: 306310 - DNA, 39 bp, Homo sapiens; identical to SEQ ID NO: 210947
  chr6:150596883-150596922
  hypo

SEQ ID NO: 306311 - DNA, 495 bp, Homo sapiens; identical to SEQ ID NO: 256437
  chr6:150654140-150654635
  hypo

SEQ ID NO: 306312 - DNA, 766 bp, Homo sapiens; identical to SEQ ID NO: 200707
  chr6:150921277-150922043
  hypo

SEQ ID NO: 306313 - DNA, 66 bp, Homo sapiens; identical to SEQ ID NO: 256438
  chr6:151125834-151125900
  hypo

SEQ ID NO: 306314 - DNA, 125 bp, Homo sapiens; identical to SEQ ID NO: 256439
  chr6:151306909-151307034
  hypo

SEQ ID NO: 306315 - DNA, 57 bp, Homo sapiens; identical to SEQ ID NO: 210950
  chr6:151346254-151346311
  hypo

SEQ ID NO: 306316 - DNA, 51 bp, Homo sapiens; identical to SEQ ID NO: 210951
  chr6:151346372-151346423
  hypo

SEQ ID NO: 306317 - DNA, 34 bp, Homo sapiens; identical to SEQ ID NO: 210952
  chr6:151546982-151547016
  hypo

SEQ ID NO: 306318 - DNA, 34 bp, Homo sapiens; identical to SEQ ID NO: 210953
  chr6:151547076-151547110
  hypo

SEQ ID NO: 306319 - DNA, 70 bp, Homo sapiens; identical to SEQ ID NO: 200708
  chr6:151562596-151562666
  hypo

SEQ ID NO: 306320 - DNA, 369 bp, Homo sapiens; identical to SEQ ID NO: 256443
  chr6:151662637-151663006
  hypo

SEQ ID NO: 306321 - DNA, 270 bp, Homo sapiens; identical to SEQ ID NO: 256444
  chr6:151687250-151687520
  hypo

SEQ ID NO: 306322 - DNA, 38 bp, Homo sapiens; identical to SEQ ID NO: 256445
  chr6:151770486-151770524
  hypo

SEQ ID NO: 306323 - DNA, 142 bp, Homo sapiens; identical to SEQ ID NO: 210955
  chr6:152099113-152099255
  hypo

SEQ ID NO: 306324 - DNA, 44 bp, Homo sapiens; identical to SEQ ID NO: 256447
  chr6:152457829-152457873
  hypo

SEQ ID NO: 306325 - DNA, 124 bp, Homo sapiens; identical to SEQ ID NO: 256448
  chr6:152527365-152527489
  hypo

SEQ ID NO: 306326 - DNA, 177 bp, Homo sapiens; identical to SEQ ID NO: 256449
  chr6:152539828-152540005
  hypo

SEQ ID NO: 306327 - DNA, 37 bp, Homo sapiens; identical to SEQ ID NO: 200712
  chr6:152623493-152623530
  hypo

SEQ ID NO: 306328 - DNA, 165 bp, Homo sapiens; identical to SEQ ID NO: 256450
  chr6:152644581-152644746
  hypo

SEQ ID NO: 306329 - DNA, 39 bp, Homo sapiens; identical to SEQ ID NO: 256451
  chr6:153337061-153337100
  hypo

SEQ ID NO: 306330 - DNA, 110 bp, Homo sapiens; identical to SEQ ID NO: 256452
  chr6:153355448-153355558
  hypo

SEQ ID NO: 306331 - DNA, 80 bp, Homo sapiens; identical to SEQ ID NO: 256453
  chr6:153572990-153573070
  hypo

SEQ ID NO: 306332 - DNA, 37 bp, Homo sapiens; identical to SEQ ID NO: 256454
  chr6:154709415-154709452
  hypo

SEQ ID NO: 306333 - DNA, 113 bp, Homo sapiens; identical to SEQ ID NO: 256455
  chr6:154727651-154727764
  hypo

SEQ ID NO: 306334 - DNA, 73 bp, Homo sapiens; identical to SEQ ID NO: 256456
  chr6:154757104-154757177
  hypo

SEQ ID NO: 306335 - DNA, 136 bp, Homo sapiens; identical to SEQ ID NO: 210957
  chr6:154764334-154764470
  hypo

SEQ ID NO: 306336 - DNA, 96 bp, Homo sapiens; identical to SEQ ID NO: 256458
  chr6:154785476-154785572
  hypo

SEQ ID NO: 306337 - DNA, 183 bp, Homo sapiens; identical to SEQ ID NO: 256459
  chr6:154799040-154799223
  hypo

SEQ ID NO: 306338 - DNA, 121 bp, Homo sapiens; identical to SEQ ID NO: 256460
  chr6:154806723-154806844
  hypo

SEQ ID NO: 306339 - DNA, 160 bp, Homo sapiens; identical to SEQ ID NO: 256461
  chr6:154826922-154827082
  hypo

SEQ ID NO: 306340 - DNA, 1435 bp, Homo sapiens; identical to SEQ ID NO: 284580
  chr6:154830765-154832200
  hypo

SEQ ID NO: 306341 - DNA, 175 bp, Homo sapiens; identical to SEQ ID NO: 210959
  chr6:154842637-154842812
  hypo

SEQ ID NO: 306342 - DNA, 341 bp, Homo sapiens; identical to SEQ ID NO: 256463
  chr6:154863131-154863472
  hypo

SEQ ID NO: 306343 - DNA, 152 bp, Homo sapiens; identical to SEQ ID NO: 210960
  chr6:154894708-154894860
  hypo

SEQ ID NO: 306344 - DNA, 38 bp, Homo sapiens; identical to SEQ ID NO: 210961
  chr6:154970832-154970870
  hypo

SEQ ID NO: 306345 - DNA, 41 bp, Homo sapiens; identical to SEQ ID NO: 210962
  chr6:155077849-155077890
  hypo

SEQ ID NO: 306346 - DNA, 111 bp, Homo sapiens; identical to SEQ ID NO: 210963
  chr6:155281630-155281741
  hypo

SEQ ID NO: 306347 - DNA, 206 bp, Homo sapiens; identical to SEQ ID NO: 256469
  chr6:155353325-155353531
  hypo

SEQ ID NO: 306348 - DNA, 60 bp, Homo sapiens; identical to SEQ ID NO: 256470
  chr6:155396836-155396896
  hypo

SEQ ID NO: 306349 - DNA, 392 bp, Homo sapiens; identical to SEQ ID NO: 256471
  chr6:155509028-155509420
  hypo

SEQ ID NO: 306350 - DNA, 450 bp, Homo sapiens; identical to SEQ ID NO: 256472
  chr6:155534949-155535399
  hypo

SEQ ID NO: 306351 - DNA, 296 bp, Homo sapiens; identical to SEQ ID NO: 210964
  chr6:155568912-155569208
  hypo

SEQ ID NO: 306352 - DNA, 154 bp, Homo sapiens; identical to SEQ ID NO: 210965
  chr6:155569349-155569503
  hypo

SEQ ID NO: 306353 - DNA, 439 bp, Homo sapiens; identical to SEQ ID NO: 256474
  chr6:155577640-155578079
  hypo

SEQ ID NO: 306354 - DNA, 66 bp, Homo sapiens; identical to SEQ ID NO: 256476
  chr6:155838705-155838771
  hypo

SEQ ID NO: 306355 - DNA, 40 bp, Homo sapiens; identical to SEQ ID NO: 256477
  chr6:155991045-155991085
  hypo

SEQ ID NO: 306356 - DNA, 65 bp, Homo sapiens; identical to SEQ ID NO: 256478
  chr6:156030251-156030316
  hypo

SEQ ID NO: 306357 - DNA, 32 bp, Homo sapiens; identical to SEQ ID NO: 210966
  chr6:156156136-156156168
  hypo

SEQ ID NO: 306358 - DNA, 120 bp, Homo sapiens; identical to SEQ ID NO: 256480
  chr6:156199683-156199803
  hypo

SEQ ID NO: 306359 - DNA, 130 bp, Homo sapiens; identical to SEQ ID NO: 256481
  chr6:156374934-156375064
  hypo

SEQ ID NO: 306360 - DNA, 139 bp, Homo sapiens; identical to SEQ ID NO: 256482
  chr6:156710186-156710325
  hypo

SEQ ID NO: 306361 - DNA, 117 bp, Homo sapiens
  chr6:156817580-156817697
  hypo
ttgaataaaagcaaacttcaaccttcaagaaaaaaaaaattggaagcaacatatattttgctttgtttcgttttgttttgttttgagacggagtctctctctctccccaaggctgga

SEQ ID NO: 306362 - DNA, 163 bp, Homo sapiens; identical to SEQ ID NO: 256484
  chr6:156876717-156876880
  hypo

SEQ ID NO: 306363 - DNA, 244 bp, Homo sapiens; identical to SEQ ID NO: 256485
  chr6:156883161-156883405
  hypo

SEQ ID NO: 306364 - DNA, 81 bp, Homo sapiens; identical to SEQ ID NO: 256486
  chr6:157159618-157159699
  hypo

SEQ ID NO: 306365 - DNA, 86 bp, Homo sapiens; identical to SEQ ID NO: 210967
  chr6:157193703-157193789
  hypo

SEQ ID NO: 306366 - DNA, 120 bp, Homo sapiens; identical to SEQ ID NO: 256488
  chr6:157283777-157283897
  hypo

SEQ ID NO: 306367 - DNA, 166 bp, Homo sapiens; identical to SEQ ID NO: 256489
  chr6:157336127-157336293
  hypo

SEQ ID NO: 306368 - DNA, 227 bp, Homo sapiens; identical to SEQ ID NO: 210968
  chr6:157351860-157352087
  hypo

SEQ ID NO: 306369 - DNA, 40 bp, Homo sapiens; identical to SEQ ID NO: 256491
  chr6:157390994-157391034
  hypo

SEQ ID NO: 306370 - DNA, 144 bp, Homo sapiens; identical to SEQ ID NO: 256492
  chr6:157411050-157411194
  hypo

SEQ ID NO: 306371 - DNA, 176 bp, Homo sapiens; identical to SEQ ID NO: 210969
  chr6:157430366-157430542
  hypo

SEQ ID NO: 306372 - DNA, 45 bp, Homo sapiens
  chr6:157431600-157431645
  hypo
tacaggtagtcagatgcctccgcagccacccgggagccagtcaga

SEQ ID NO: 306373 - DNA, 98 bp, Homo sapiens
  chr6:157431675-157431773
  hypo
accaatgccacaggaaagaggttcgtctccagttcatgtcttacatgcctatagtgctttcaggcgataaggcgtacgtgagtttgcttacctatgca

SEQ ID NO: 306374 - DNA, 86 bp, Homo sapiens; identical to SEQ ID NO: 256495
  chr6:157447664-157447750
  hypo

SEQ ID NO: 306375 - DNA, 166 bp, Homo sapiens; identical to SEQ ID NO: 256496
  chr6:157472013-157472179
  hypo

SEQ ID NO: 306376 - DNA, 224 bp, Homo sapiens; identical to SEQ ID NO: 210970
  chr6:157477823-157478047
  hypo

SEQ ID NO: 306377 - DNA, 76 bp, Homo sapiens; identical to SEQ ID NO: 210971
  chr6:157478478-157478554
  hypo

SEQ ID NO: 306378 - DNA, 180 bp, Homo sapiens; identical to SEQ ID NO: 256499
  chr6:157484363-157484543
  hypo

SEQ ID NO: 306379 - DNA, 279 bp, Homo sapiens; identical to SEQ ID NO: 256500
  chr6:157498984-157499263
  hypo

SEQ ID NO: 306380 - DNA, 267 bp, Homo sapiens
  chr6:157502171-157502438
  hypo
agaaagctctgggtcgaccgatacctcaccttcatggaagagagaggctctcctgtctcaagtctgcctgccgtgggcaagaagcccctggacctgttccgactctacgtctgcgtcaaagagatcgggggtttggcccaggtaagaatgagtgagggagggggtgaaaaaggaagcattgtggataagttcttacagtggctttctttgaatgtgtggactcattttttttctcacaaaggaaaagctaagcctgtgtgaaagtcg

SEQ ID NO: 306381 - DNA, 51 bp, Homo sapiens; identical to SEQ ID NO: 256502
  chr6:157502910-157502961
  hypo

SEQ ID NO: 306382 - DNA, 217 bp, Homo sapiens; identical to SEQ ID NO: 210972
  chr6:157505865-157506082
  hypo

SEQ ID NO: 306383 - DNA, 66 bp, Homo sapiens; identical to SEQ ID NO: 210973
  chr6:157548327-157548393
  hypo

SEQ ID NO: 306384 - DNA, 79 bp, Homo sapiens; identical to SEQ ID NO: 210974
  chr6:157549784-157549863
  hypo

SEQ ID NO: 306385 - DNA, 31 bp, Homo sapiens; identical to SEQ ID NO: 210975
  chr6:157550095-157550126
  hypo

SEQ ID NO: 306386 - DNA, 59 bp, Homo sapiens; identical to SEQ ID NO: 200718
  chr6:157802884-157802943
  hypo

SEQ ID NO: 306387 - DNA, 168 bp, Homo sapiens; identical to SEQ ID NO: 222962
  chr6:157803299-157803467
  hypo

SEQ ID NO: 306388 - DNA, 82 bp, Homo sapiens; identical to SEQ ID NO: 256508
  chr6:157837762-157837844
  hypo

SEQ ID NO: 306389 - DNA, 138 bp, Homo sapiens; identical to SEQ ID NO: 256509
  chr6:157849557-157849695
  hypo

SEQ ID NO: 306390 - DNA, 363 bp, Homo sapiens; identical to SEQ ID NO: 256510
  chr6:157892374-157892737
  hypo

SEQ ID NO: 306391 - DNA, 547 bp, Homo sapiens; identical to SEQ ID NO: 256511
  chr6:158017916-158018463
  hypo

SEQ ID NO: 306392 - DNA, 706 bp, Homo sapiens; identical to SEQ ID NO: 256512
  chr6:158024057-158024763
  hypo

SEQ ID NO: 306393 - DNA, 90 bp, Homo sapiens; identical to SEQ ID NO: 256513
  chr6:158057893-158057983
  hypo

SEQ ID NO: 306394 - DNA, 275 bp, Homo sapiens; identical to SEQ ID NO: 256514
  chr6:158070271-158070546
  hypo

SEQ ID NO: 306395 - DNA, 152 bp, Homo sapiens
  chr6:158093623-158093775
  hypo
tgaggtgtcactaacggtttctctcttctcgcaccccaccctccccgcccgtgccctgtccccatccctgtccctccccacctctgccccctcctctccaccttctctttgctggcgcctcccgctctccagtgcgaccaagaccagtgcat

SEQ ID NO: 306396 - DNA, 193 bp, Homo sapiens
  chr6:158094082-158094275
  hypo
ctgggcctggccagccaggactccctgcatgaggactctgtgcgcggcctggtgaagctcagctccgtgtgacccacatggccccaggccgggggacaccagaggctcctccatgggcagcaggagtgagcggaggggtgtgtcccacagcgactttcccagccaatgccacggtggagatgacagccccagg

SEQ ID NO: 306397 - DNA, 56 bp, Homo sapiens; identical to SEQ ID NO: 256516
  chr6:158094784-158094840
  hypo

SEQ ID NO: 306398 - DNA, 276 bp, Homo sapiens; identical to SEQ ID NO: 256517
  chr6:158116417-158116693
  hypo

SEQ ID NO: 306399 - DNA, 571 bp, Homo sapiens; identical to SEQ ID NO: 284588
  chr6:158244130-158244701
  hypo

SEQ ID NO: 306400 - DNA, 302 bp, Homo sapiens; identical to SEQ ID NO: 256518
  chr6:158296042-158296344
  hypo

SEQ ID NO: 306401 - DNA, 87 bp, Homo sapiens; identical to SEQ ID NO: 256519
  chr6:158321403-158321490
  hypo

SEQ ID NO: 306402 - DNA, 199 bp, Homo sapiens; identical to SEQ ID NO: 210981
  chr6:158328733-158328932
  hypo

SEQ ID NO: 306403 - DNA, 519 bp, Homo sapiens; identical to SEQ ID NO: 200720
  chr6:158402115-158402634
  hypo

SEQ ID NO: 306404 - DNA, 228 bp, Homo sapiens; identical to SEQ ID NO: 256521
  chr6:158412178-158412406
  hypo

SEQ ID NO: 306405 - DNA, 165 bp, Homo sapiens; identical to SEQ ID NO: 256522
  chr6:158454488-158454653
  hypo

SEQ ID NO: 306406 - DNA, 183 bp, Homo sapiens; identical to SEQ ID NO: 210983
  chr6:158488744-158488927
  hypo

SEQ ID NO: 306407 - DNA, 37 bp, Homo sapiens; identical to SEQ ID NO: 256524
  chr6:158563786-158563823
  hypo

SEQ ID NO: 306408 - DNA, 35 bp, Homo sapiens; identical to SEQ ID NO: 256525
  chr6:158567710-158567745
  hypo

SEQ ID NO: 306409 - DNA, 35 bp, Homo sapiens; identical to SEQ ID NO: 210984
  chr6:158593346-158593381
  hypo

SEQ ID NO: 306410 - DNA, 50 bp, Homo sapiens; identical to SEQ ID NO: 256527
  chr6:158619761-158619811
  hypo

SEQ ID NO: 306411 - DNA, 217 bp, Homo sapiens; identical to SEQ ID NO: 256528
  chr6:158651785-158652002
  hypo

SEQ ID NO: 306412 - DNA, 219 bp, Homo sapiens; identical to SEQ ID NO: 256529
  chr6:158708293-158708512
  hypo

SEQ ID NO: 306413 - DNA, 41 bp, Homo sapiens; identical to SEQ ID NO: 210985
  chr6:158734071-158734112
  hypo

SEQ ID NO: 306414 - DNA, 120 bp, Homo sapiens; identical to SEQ ID NO: 256531
  chr6:158794424-158794544
  hypo

SEQ ID NO: 306415 - DNA, 157 bp, Homo sapiens; identical to SEQ ID NO: 256532
  chr6:158806007-158806164
  hypo

SEQ ID NO: 306416 - DNA, 181 bp, Homo sapiens; identical to SEQ ID NO: 256533
  chr6:158873203-158873384
  hypo

SEQ ID NO: 306417 - DNA, 55 bp, Homo sapiens; identical to SEQ ID NO: 256534
  chr6:158925050-158925105
  hypo

SEQ ID NO: 306418 - DNA, 75 bp, Homo sapiens; identical to SEQ ID NO: 200723
  chr6:158957207-158957282
  hypo

SEQ ID NO: 306419 - DNA, 430 bp, Homo sapiens; identical to SEQ ID NO: 200724
  chr6:158957317-158957747
  hypo

SEQ ID NO: 306420 - DNA, 206 bp, Homo sapiens; identical to SEQ ID NO: 284595
  chr6:158957988-158958194
  hypo

SEQ ID NO: 306421 - DNA, 79 bp, Homo sapiens
  chr6:158982652-158982731
  hypo
ggtcttctgccagggtcctgcgctgttacaggacagggaactagaccaaagaaagcagttgaccaaggaaaggtcccga

SEQ ID NO: 306422 - DNA, 448 bp, Homo sapiens; identical to SEQ ID NO: 210989
  chr6:159045071-159045519
  hypo

SEQ ID NO: 306423 - DNA, 133 bp, Homo sapiens; identical to SEQ ID NO: 210990
  chr6:159049612-159049745
  hypo

SEQ ID NO: 306424 - DNA, 212 bp, Homo sapiens
  chr6:159049883-159050095
  hypo
accgcggggctccaagcccctactgccctccagcagagcactgtggggtggctgagggctgccgtgagcctcctgtctccccccgggatatctctctcatcatcacggagatgtatccaagggtatgacagttgtggcaggttgagcctgtgtctgtagggaagagctcagaaaatactgggacccccttcgattcccgctgtgcctgaggc

SEQ ID NO: 306425 - DNA, 216 bp, Homo sapiens; identical to SEQ ID NO: 256538
  chr6:159076942-159077158
  hypo

SEQ ID NO: 306426 - DNA, 124 bp, Homo sapiens; identical to SEQ ID NO: 256539
  chr6:159086527-159086651
  hypo

SEQ ID NO: 306427 - DNA, 185 bp, Homo sapiens; identical to SEQ ID NO: 210992
  chr6:159135764-159135949
  hypo

SEQ ID NO: 306428 - DNA, 206 bp, Homo sapiens
  chr6:159151686-159151892
  hypo
tgcagggtcctcacataccacgcgggccaggtaacctcatgcataagacaaggaaggaaataccggaggagctggtaaaatatttccttggtggtcaggactaaggaaagaaaagctgcggggcggtaaagcattccttggttaggacatacctaggtaagagaaaccgcaggggcggtaaagcattccttaggactgaagaaaga

SEQ ID NO: 306429 - DNA, 103 bp, Homo sapiens; identical to SEQ ID NO: 256542
  chr6:159175774-159175877
  hypo

SEQ ID NO: 306430 - DNA, 306 bp, Homo sapiens; identical to SEQ ID NO: 256543
  chr6:159176740-159177046
  hypo

SEQ ID NO: 306431 - DNA, 92 bp, Homo sapiens; identical to SEQ ID NO: 256544
  chr6:159177387-159177479
  hypo

SEQ ID NO: 306432 - DNA, 162 bp, Homo sapiens; identical to SEQ ID NO: 256545
  chr6:159180413-159180575
  hypo

SEQ ID NO: 306433 - DNA, 112 bp, Homo sapiens; identical to SEQ ID NO: 256546
  chr6:159182970-159183082
  hypo

SEQ ID NO: 306434 - DNA, 114 bp, Homo sapiens; identical to SEQ ID NO: 256547
  chr6:159188289-159188403
  hypo

SEQ ID NO: 306435 - DNA, 194 bp, Homo sapiens; identical to SEQ ID NO: 210994
  chr6:159190317-159190511
  hypo

SEQ ID NO: 306436 - DNA, 178 bp, Homo sapiens; identical to SEQ ID NO: 256549
  chr6:159193321-159193499
  hypo

SEQ ID NO: 306437 - DNA, 96 bp, Homo sapiens; identical to SEQ ID NO: 256550
  chr6:159203058-159203154
  hypo

SEQ ID NO: 306438 - DNA, 125 bp, Homo sapiens; identical to SEQ ID NO: 210995
  chr6:159205611-159205736
  hypo

SEQ ID NO: 306439 - DNA, 234 bp, Homo sapiens; identical to SEQ ID NO: 256552
  chr6:159206078-159206312
  hypo

SEQ ID NO: 306440 - DNA, 172 bp, Homo sapiens; identical to SEQ ID NO: 256553
  chr6:159211979-159212151
  hypo

SEQ ID NO: 306441 - DNA, 35 bp, Homo sapiens; identical to SEQ ID NO: 256554
  chr6:159213572-159213607
  hypo

SEQ ID NO: 306442 - DNA, 130 bp, Homo sapiens; identical to SEQ ID NO: 256555
  chr6:159215619-159215749
  hypo

SEQ ID NO: 306443 - DNA, 143 bp, Homo sapiens; identical to SEQ ID NO: 256556
  chr6:159219542-159219685
  hypo

SEQ ID NO: 306444 - DNA, 37 bp, Homo sapiens; identical to SEQ ID NO: 256557
  chr6:159223564-159223601
  hypo

SEQ ID NO: 306445 - DNA, 37 bp, Homo sapiens; identical to SEQ ID NO: 256558
  chr6:159223841-159223878
  hypo

SEQ ID NO: 306446 - DNA, 139 bp, Homo sapiens; identical to SEQ ID NO: 284596
  chr6:159290684-159290823
  hypo

SEQ ID NO: 306447 - DNA, 311 bp, Homo sapiens; identical to SEQ ID NO: 284597
  chr6:159290852-159291163
  hypo

SEQ ID NO: 306448 - DNA, 63 bp, Homo sapiens; identical to SEQ ID NO: 210996
  chr6:159299254-159299317
  hypo

SEQ ID NO: 306449 - DNA, 119 bp, Homo sapiens; identical to SEQ ID NO: 256561
  chr6:159345138-159345257
  hypo

SEQ ID NO: 306450 - DNA, 120 bp, Homo sapiens; identical to SEQ ID NO: 210997
  chr6:159419499-159419619
  hypo

SEQ ID NO: 306451 - DNA, 145 bp, Homo sapiens; identical to SEQ ID NO: 256563
  chr6:159423619-159423764
  hypo

SEQ ID NO: 306452 - DNA, 62 bp, Homo sapiens; identical to SEQ ID NO: 200727
  chr6:159591277-159591339
  hypo

SEQ ID NO: 306453 - DNA, 34 bp, Homo sapiens
  chr6:159653184-159653218
  hypo
ttcccgggaggactcgcccatgtcaccctcagac

SEQ ID NO: 306454 - DNA, 179 bp, Homo sapiens
  chr6:159653248-159653427
  hypo
ccaagtagacacggccactcggtggttgctcccggcaggactgcagtgagggcccggatgccagcgctgccccgaagggaaggcgtagataagcctggcttttccctggccacgcagccccgcccaggggcgcccccctcggcttcggcctctcctgcccaccacgcgtccacccaggg

SEQ ID NO: 306455 - DNA, 130 bp, Homo sapiens; identical to SEQ ID NO: 256565
  chr6:159653853-159653983
  hypo

SEQ ID NO: 306456 - DNA, 287 bp, Homo sapiens; identical to SEQ ID NO: 256566
  chr6:159876779-159877066
  hypo

SEQ ID NO: 306457 - DNA, 42 bp, Homo sapiens; identical to SEQ ID NO: 256567
  chr6:159877096-159877138
  hypo

SEQ ID NO: 306458 - DNA, 253 bp, Homo sapiens; identical to SEQ ID NO: 256568
  chr6:160220483-160220736
  hypo

SEQ ID NO: 306459 - DNA, 180 bp, Homo sapiens; identical to SEQ ID NO: 256569
  chr6:160328046-160328226
  hypo

SEQ ID NO: 306460 - DNA, 470 bp, Homo sapiens; identical to SEQ ID NO: 284607
  chr6:160389587-160390057
  hypo

SEQ ID NO: 306461 - DNA, 133 bp, Homo sapiens; identical to SEQ ID NO: 256570
  chr6:160418650-160418783
  hypo

SEQ ID NO: 306462 - DNA, 236 bp, Homo sapiens; identical to SEQ ID NO: 256571
  chr6:160452661-160452897
  hypo

SEQ ID NO: 306463 - DNA, 56 bp, Homo sapiens; identical to SEQ ID NO: 211001
  chr6:160455508-160455564
  hypo

SEQ ID NO: 306464 - DNA, 263 bp, Homo sapiens; identical to SEQ ID NO: 256573
  chr6:160459515-160459778
  hypo

SEQ ID NO: 306465 - DNA, 217 bp, Homo sapiens; identical to SEQ ID NO: 256574
  chr6:160463628-160463845
  hypo

SEQ ID NO: 306466 - DNA, 86 bp, Homo sapiens; identical to SEQ ID NO: 211002
  chr6:160475955-160476041
  hypo

SEQ ID NO: 306467 - DNA, 162 bp, Homo sapiens; identical to SEQ ID NO: 211003
  chr6:160491754-160491916
  hypo

SEQ ID NO: 306468 - DNA, 71 bp, Homo sapiens; identical to SEQ ID NO: 256577
  chr6:160509961-160510032
  hypo

SEQ ID NO: 306469 - DNA, 270 bp, Homo sapiens
  chr6:160512209-160512479
  hypo
gctccgtgccctggtgctgagcgcatcgccgagaaggagcaggtgctccgtgccctggtgctgagcgcatcgccgagaaggagcaggtgctccgtgccctggtgctgagcgcatcgccgagaaggagcaggtgctccgtgccctggtgctgagcgcatcgccgagaaggagcaggtgctctgtgccctggtgctgagcgcatcgccgagaaggagcaggtgctccgtgccctggtgctgagtgcatctccacgacggcagcacctgatgg

SEQ ID NO: 306470 - DNA, 31 bp, Homo sapiens; identical to SEQ ID NO: 256579
  chr6:160513374-160513405
  hypo

SEQ ID NO: 306471 - DNA, 111 bp, Homo sapiens; identical to SEQ ID NO: 256580
  chr6:160527214-160527325
  hypo

SEQ ID NO: 306472 - DNA, 468 bp, Homo sapiens; identical to SEQ ID NO: 211005
  chr6:160679357-160679825
  hypo

SEQ ID NO: 306473 - DNA, 195 bp, Homo sapiens; identical to SEQ ID NO: 256582
  chr6:160680141-160680336
  hypo

SEQ ID NO: 306474 - DNA, 98 bp, Homo sapiens; identical to SEQ ID NO: 256583
  chr6:161430268-161430366
  hypo

SEQ ID NO: 306475 - DNA, 168 bp, Homo sapiens; identical to SEQ ID NO: 211006
  chr6:161522588-161522756
  hypo

SEQ ID NO: 306476 - DNA, 64 bp, Homo sapiens; identical to SEQ ID NO: 256585
  chr6:161547843-161547907
  hypo

SEQ ID NO: 306477 - DNA, 75 bp, Homo sapiens; identical to SEQ ID NO: 256586
  chr6:161549953-161550028
  hypo

SEQ ID NO: 306478 - DNA, 34 bp, Homo sapiens; identical to SEQ ID NO: 256587
  chr6:161556868-161556902
  hypo

SEQ ID NO: 306479 - DNA, 39 bp, Homo sapiens; identical to SEQ ID NO: 256588
  chr6:161558061-161558100
  hypo

SEQ ID NO: 306480 - DNA, 128 bp, Homo sapiens; identical to SEQ ID NO: 256589
  chr6:161559035-161559163
  hypo

SEQ ID NO: 306481 - DNA, 362 bp, Homo sapiens; identical to SEQ ID NO: 256590
  chr6:161559597-161559959
  hypo

SEQ ID NO: 306482 - DNA, 47 bp, Homo sapiens; identical to SEQ ID NO: 256591
  chr6:161560591-161560638
  hypo

SEQ ID NO: 306483 - DNA, 113 bp, Homo sapiens; identical to SEQ ID NO: 256592
  chr6:161572342-161572455
  hypo

SEQ ID NO: 306484 - DNA, 644 bp, Homo sapiens
  chr6:161575239-161575883
  hypo
cctgctcccacttgcgcgaacagaagaccatctcggtgaagtaccacatccagccgataattgggacataggccagctctttcttggccaggaccttggagccctgaaacagaagaaggagcccaggtgcccatgaaggagacgtcagagccacctgccggggctgttggagactgaagtagaaaaagaggaggggacgttcacaccagacgcctcgggacagtcccagaacacatgctgtcgaggccatggaccctggtgccctccccacctttcagctagaggtccaggttgtgcttgccctgccagtgtgggagcagggggcaggggcaccctggttctcagcgcagacggcaggagtcaagaaggcagcagcgagcagtcacaggtattcagggtcctgacgatgctcccaccaccatccaaacggtttctaggttatcaccgtcacatactcgctaagcccaccgtgcagctgtgtgacactaatttgtgcacctcttttctgcagatctcactgagttttgtgatattacaaaatatagtaattcttgatcgctgaaaatgtcaaacgctagaaaatgtagcattcctaggtgtgaggttaacatccttcttgaacagtggttggccaaagattcatt

SEQ ID NO: 306485 - DNA, 187 bp, Homo sapiens
  chr6:161575913-161576100
  hypo
cactctgctgagctctgcagttgaggcaaacaggagtctccgctcacagagcaggctgcggagcccagtgggatctccgggtacagctggtccaagctgggagtaaaacccagaccaggagatgtgctcggtgccctccacacccgctgccagcatgtccttgaggctgagacggggcagaagcacc

SEQ ID NO: 306486 - DNA, 153 bp, Homo sapiens
  chr6:161585085-161585238
  hypo
aggtgggatgggcgtgctgttgacttgctttcccgccatcagcgctcccgcccttatgctcagagttgtaaagtgatcatggattcggaagcctttgggagcaaaaccctaaacggtgctgagattaaattcccgctccgtgaatgtctcttc

SEQ ID NO: 306487 - DNA, 276 bp, Homo sapiens; identical to SEQ ID NO: 256595
  chr6:161637994-161638270
  hypo

SEQ ID NO: 306488 - DNA, 99 bp, Homo sapiens; identical to SEQ ID NO: 256596
  chr6:161642104-161642203
  hypo

SEQ ID NO: 306489 - DNA, 134 bp, Homo sapiens; identical to SEQ ID NO: 256598
  chr6:161725115-161725249
  hypo

SEQ ID NO: 306490 - DNA, 141 bp, Homo sapiens; identical to SEQ ID NO: 256599
  chr6:161788278-161788419
  hypo

SEQ ID NO: 306491 - DNA, 221 bp, Homo sapiens
  chr6:162253713-162253934
  hypo
ggccgatccctaaggcctccatggtgtcttacagccacacagtgtgacacaatgacatgcgccatcctggagcagggcatctcaccctccccattctctacggtctgtctggagaaagctttgtggcggcgcctgtgccctgcagggtctccagcagcatccccgctcctgcccactagatgccagcagccttctcctacttgggacgaccaactatgact

SEQ ID NO: 306492 - DNA, 41 bp, Homo sapiens; identical to SEQ ID NO: 256601
  chr6:162938563-162938604
  hypo

SEQ ID NO: 306493 - DNA, 37 bp, Homo sapiens; identical to SEQ ID NO: 211008
  chr6:163009855-163009892
  hypo

SEQ ID NO: 306494 - DNA, 45 bp, Homo sapiens; identical to SEQ ID NO: 256603
  chr6:163032923-163032968
  hypo

SEQ ID NO: 306495 - DNA, 290 bp, Homo sapiens; identical to SEQ ID NO: 256604
  chr6:163321044-163321334
  hypo

SEQ ID NO: 306496 - DNA, 59 bp, Homo sapiens
  chr6:163558514-163558573
  hypo
tccatccattcaaagaggagcgccaggatttcccaagcgacaagaacagggcgagctct

SEQ ID NO: 306497 - DNA, 209 bp, Homo sapiens; identical to SEQ ID NO: 211009
  chr6:163591723-163591932
  hypo

SEQ ID NO: 306498 - DNA, 153 bp, Homo sapiens; identical to SEQ ID NO: 256607
  chr6:163607798-163607951
  hypo

SEQ ID NO: 306499 - DNA, 144 bp, Homo sapiens; identical to SEQ ID NO: 256608
  chr6:163710196-163710340
  hypo

SEQ ID NO: 306500 - DNA, 238 bp, Homo sapiens; identical to SEQ ID NO: 200741
  chr6:163837231-163837469
  hypo

SEQ ID NO: 306501 - DNA, 50 bp, Homo sapiens; identical to SEQ ID NO: 256611
  chr6:164112161-164112211
  hypo

SEQ ID NO: 306502 - DNA, 126 bp, Homo sapiens
  chr6:164170160-164170286
  hypo
gcctgtcctggagcacagcccgtgcccaaagtggctcccacaccaagcgtggtgggagctgggccgcactgggggatgggactggctgctctggaagcatcgagaagtagtgtcctccagaggagg

SEQ ID NO: 306503 - DNA, 56 bp, Homo sapiens
  chr6:164170324-164170380
  hypo
gggtgaggggccgggggatgtcactgctgcagatcgccccagtggaggccaggaag

SEQ ID NO: 306504 - DNA, 180 bp, Homo sapiens; identical to SEQ ID NO: 256613
  chr6:164183098-164183278
  hypo

SEQ ID NO: 306505 - DNA, 249 bp, Homo sapiens
  chr6:164245494-164245743
  hypo
atctgcccaacatggacaaagatgctgcatggaccagccttcctcttgtgaagaggagcttgtgctctgtaaagccttactgtggtgcgcctcaggggagcagggtcccggacaaccatctccacgccaacagggcggccatctttggtagcattttgtgcctcataacgtgttttaaattaaaatacgtcatgtttttcttctctactaaggccttactgttgtgtcggaaaacaattacagagattg

SEQ ID NO: 306506 - DNA, 42 bp, Homo sapiens
  chr6:164283377-164283419
  hypo
tgaagttcacatgggacaatcgatggcacagaagatggccct

SEQ ID NO: 306507 - DNA, 42 bp, Homo sapiens; identical to SEQ ID NO: 256617
  chr6:164299008-164299050
  hypo

SEQ ID NO: 306508 - DNA, 38 bp, Homo sapiens; identical to SEQ ID NO: 256619
  chr6:164320871-164320909
  hypo

SEQ ID NO: 306509 - DNA, 130 bp, Homo sapiens; identical to SEQ ID NO: 256621
  chr6:164339933-164340063
  hypo

SEQ ID NO: 306510 - DNA, 137 bp, Homo sapiens; identical to SEQ ID NO: 211011
  chr6:164441373-164441510
  hypo

SEQ ID NO: 306511 - DNA, 135 bp, Homo sapiens; identical to SEQ ID NO: 256623
  chr6:164506147-164506282
  hypo

SEQ ID NO: 306512 - DNA, 52 bp, Homo sapiens; identical to SEQ ID NO: 256624
  chr6:165747832-165747884
  hypo

SEQ ID NO: 306513 - DNA, 41 bp, Homo sapiens
  chr6:166128526-166128567
  hypo
aggaacccacgggccgcgagggtagagtattggctcagcct

SEQ ID NO: 306514 - DNA, 40 bp, Homo sapiens
  chr6:166128614-166128654
  hypo
gggctcagtgaccaggtgcggccggcgctgcttacactca

SEQ ID NO: 306515 - DNA, 89 bp, Homo sapiens; identical to SEQ ID NO: 256626
  chr6:166144516-166144605
  hypo

SEQ ID NO: 306516 - DNA, 445 bp, Homo sapiens; identical to SEQ ID NO: 256627
  chr6:166240451-166240896
  hypo

SEQ ID NO: 306517 - DNA, 151 bp, Homo sapiens; identical to SEQ ID NO: 5249
  chr6:166402752-166402903
  hypo

SEQ ID NO: 306518 - DNA, 228 bp, Homo sapiens; identical to SEQ ID NO: 284635
  chr6:166667296-166667524
  hypo

SEQ ID NO: 306519 - DNA, 42 bp, Homo sapiens; identical to SEQ ID NO: 284636
  chr6:166667590-166667632
  hypo

SEQ ID NO: 306520 - DNA, 200 bp, Homo sapiens; identical to SEQ ID NO: 256630
  chr6:166731254-166731454
  hypo

SEQ ID NO: 306521 - DNA, 289 bp, Homo sapiens; identical to SEQ ID NO: 256631
  chr6:166731848-166732137
  hypo

SEQ ID NO: 306522 - DNA, 106 bp, Homo sapiens; identical to SEQ ID NO: 256632
  chr6:166742969-166743075
  hypo

SEQ ID NO: 306523 - DNA, 48 bp, Homo sapiens; identical to SEQ ID NO: 211013
  chr6:166748326-166748374
  hypo

SEQ ID NO: 306524 - DNA, 203 bp, Homo sapiens; identical to SEQ ID NO: 256634
  chr6:166868890-166869093
  hypo

SEQ ID NO: 306525 - DNA, 354 bp, Homo sapiens
  chr6:166943992-166944346
  hypo
cccagggggtcagtttatgtaactaataagctgctgtcagttcatctgtccagtgcccggcgctgtgtgttcaatcgcctaatgctgtttagggcagggggaagttccctctctcaccaacacagtgaataggaggtgatcagaacagatacggtaggtgcccagctagtgacgggcttaaagactgtgagcctggaacggagattttggatcacattctgactctaacgctgcactaggggctcatccctcacttgcaggatgggcgtgcagaggagctgggcagaaatcggtatttctaatgcccagtcactgggtcaacaaaggaaaacaacccaacccaaccatgagtca

SEQ ID NO: 306526 - DNA, 44 bp, Homo sapiens; identical to SEQ ID NO: 256636
  chr6:166944738-166944782
  hypo

SEQ ID NO: 306527 - DNA, 48 bp, Homo sapiens
  chr6:167038321-167038369
  hypo
gcattgacctttttttttttgagacaagtctcgctctctcgccaggct

SEQ ID NO: 306528 - DNA, 96 bp, Homo sapiens; identical to SEQ ID NO: 211014
  chr6:167051700-167051796
  hypo

SEQ ID NO: 306529 - DNA, 87 bp, Homo sapiens; identical to SEQ ID NO: 256639
  chr6:167089923-167090010
  hypo

SEQ ID NO: 306530 - DNA, 67 bp, Homo sapiens; identical to SEQ ID NO: 256640
  chr6:167091815-167091882
  hypo

SEQ ID NO: 306531 - DNA, 37 bp, Homo sapiens; identical to SEQ ID NO: 256641
  chr6:167092252-167092289
  hypo

SEQ ID NO: 306532 - DNA, 115 bp, Homo sapiens; identical to SEQ ID NO: 211015
  chr6:167136191-167136306
  hypo

SEQ ID NO: 306533 - DNA, 90 bp, Homo sapiens
  chr6:167136408-167136498
  hypo
catcacaactcgcgagacaccaccgcctccaaggtctgtctgtgcctacacttggcgactatgacaaccgttaagcgatgcaaggtttgg

SEQ ID NO: 306534 - DNA, 277 bp, Homo sapiens
  chr6:167140085-167140362
  hypo
ccaaaatatataaccgtgatcaccttaaatcacataaacatgatcaccttaaacagagaactggatctcgtgtactgatgctgctggcagcattggaaagtgactcttacaacttcagttgcgataccggtttccataagcttctgtgaattcttgtcaaagctttaaaactgaacacggcaacaactctaggtgaggagtgtttggcagatgaaacccctccaccagggaggtgacgggtctcagggagtgtgtctggcgggtggggaggaatccc

SEQ ID NO: 306535 - DNA, 55 bp, Homo sapiens; identical to SEQ ID NO: 256646
  chr6:167169077-167169132
  hypo

SEQ ID NO: 306536 - DNA, 49 bp, Homo sapiens; identical to SEQ ID NO: 284644
  chr6:167276260-167276309
  hypo

SEQ ID NO: 306537 - DNA, 204 bp, Homo sapiens; identical to SEQ ID NO: 256647
  chr6:167284359-167284563
  hypo

SEQ ID NO: 306538 - DNA, 2667 bp, Homo sapiens; identical to SEQ ID NO: 256648
  chr6:167313423-167316090
  hypo

SEQ ID NO: 306539 - DNA, 176 bp, Homo sapiens; identical to SEQ ID NO: 256649
  chr6:167354231-167354407
  hypo

SEQ ID NO: 306540 - DNA, 65 bp, Homo sapiens; identical to SEQ ID NO: 211017
  chr6:167384339-167384404
  hypo

SEQ ID NO: 306541 - DNA, 217 bp, Homo sapiens; identical to SEQ ID NO: 256651
  chr6:167391010-167391227
  hypo

SEQ ID NO: 306542 - DNA, 196 bp, Homo sapiens; identical to SEQ ID NO: 211018
  chr6:167511715-167511911
  hypo

SEQ ID NO: 306543 - DNA, 127 bp, Homo sapiens; identical to SEQ ID NO: 256653
  chr6:167649278-167649405
  hypo

SEQ ID NO: 306544 - DNA, 86 bp, Homo sapiens; identical to SEQ ID NO: 256654
  chr6:167707449-167707535
  hypo

SEQ ID NO: 306545 - DNA, 138 bp, Homo sapiens; identical to SEQ ID NO: 256655
  chr6:167813214-167813352
  hypo

SEQ ID NO: 306546 - DNA, 101 bp, Homo sapiens
  chr6:167834914-167835015
  hypo
cctgcacccgccaccgctccaatccccacgcagcccggtcacccggtgcctccactgccttggctggcgctgggccggggcctccaggtttctgtgtccaa

SEQ ID NO: 306547 - DNA, 80 bp, Homo sapiens
  chr6:167836478-167836558
  hypo
tccctcatacactgcggcttcccccccaacacatgacggctcacccacatctggcggctccccctctacacggctcccgt

SEQ ID NO: 306548 - DNA, 302 bp, Homo sapiens
  chr6:167836629-167836931
  hypo
cagcagttcccacacacacactgcggctcccccgcacatggtggcttccccccaccacactggggttcccccccagggcagctcccacacacacgacggctccccccatactgtggcttccctgcacacgacagctccccccccacacaccatggttccccccacacggtggctccccctcacacagcagctcccccgctacacggcggctcccccgacacggtggctccccacacgtaagcagcagctccccccacacacggccctccccacacacacacacccggcggctccccccacca

SEQ ID NO: 306549 - DNA, 545 bp, Homo sapiens; identical to SEQ ID NO: 211020
  chr6:167880207-167880752
  hypo

SEQ ID NO: 306550 - DNA, 51 bp, Homo sapiens; identical to SEQ ID NO: 211021
  chr6:168054236-168054287
  hypo

SEQ ID NO: 306551 - DNA, 732 bp, Homo sapiens; identical to SEQ ID NO: 256660
  chr6:168062967-168063699
  hypo

SEQ ID NO: 306552 - DNA, 36 bp, Homo sapiens; identical to SEQ ID NO: 211022
  chr6:168131201-168131237
  hypo

SEQ ID NO: 306553 - DNA, 261 bp, Homo sapiens; identical to SEQ ID NO: 256662
  chr6:168137807-168138068
  hypo

SEQ ID NO: 306554 - DNA, 47 bp, Homo sapiens; identical to SEQ ID NO: 211023
  chr6:168156341-168156388
  hypo

SEQ ID NO: 306555 - DNA, 277 bp, Homo sapiens; identical to SEQ ID NO: 256664
  chr6:168167927-168168204
  hypo

SEQ ID NO: 306556 - DNA, 930 bp, Homo sapiens; identical to SEQ ID NO: 284647
  chr6:168226538-168227468
  hypo

SEQ ID NO: 306557 - DNA, 33 bp, Homo sapiens; identical to SEQ ID NO: 200752
  chr6:168227910-168227943
  hypo

SEQ ID NO: 306558 - DNA, 84 bp, Homo sapiens; identical to SEQ ID NO: 200753
  chr6:168228222-168228306
  hypo

SEQ ID NO: 306559 - DNA, 130 bp, Homo sapiens
  chr6:168377608-168377738
  hypo
tgctccccaacgcccgctcctgtgctggtcactgggggcagtgagaggaggccagaagcagaggcgatgccggcggggagcgggcggtgggggggcttctgggagcgacggacccggcagctgcagagcc

SEQ ID NO: 306560 - DNA, 683 bp, Homo sapiens; identical to SEQ ID NO: 256666
  chr6:168378613-168379296
  hypo

SEQ ID NO: 306561 - DNA, 40 bp, Homo sapiens; identical to SEQ ID NO: 256667
  chr6:168387062-168387102
  hypo

SEQ ID NO: 306562 - DNA, 86 bp, Homo sapiens; identical to SEQ ID NO: 211029
  chr6:168387333-168387419
  hypo

SEQ ID NO: 306563 - DNA, 188 bp, Homo sapiens; identical to SEQ ID NO: 256669
  chr6:168389684-168389872
  hypo

SEQ ID NO: 306564 - DNA, 100 bp, Homo sapiens; identical to SEQ ID NO: 256670
  chr6:168390655-168390755
  hypo

SEQ ID NO: 306565 - DNA, 99 bp, Homo sapiens; identical to SEQ ID NO: 256671
  chr6:168390875-168390974
  hypo

SEQ ID NO: 306566 - DNA, 305 bp, Homo sapiens; identical to SEQ ID NO: 256672
  chr6:168391271-168391576
  hypo

SEQ ID NO: 306567 - DNA, 201 bp, Homo sapiens; identical to SEQ ID NO: 256673
  chr6:168401780-168401981
  hypo

SEQ ID NO: 306568 - DNA, 97 bp, Homo sapiens; identical to SEQ ID NO: 256674
  chr6:168416725-168416822
  hypo

SEQ ID NO: 306569 - DNA, 127 bp, Homo sapiens; identical to SEQ ID NO: 256675
  chr6:168417026-168417153
  hypo

SEQ ID NO: 306570 - DNA, 200 bp, Homo sapiens; identical to SEQ ID NO: 256676
  chr6:168420280-168420480
  hypo

SEQ ID NO: 306571 - DNA, 45 bp, Homo sapiens; identical to SEQ ID NO: 211031
  chr6:168428432-168428477
  hypo

SEQ ID NO: 306572 - DNA, 167 bp, Homo sapiens; identical to SEQ ID NO: 211032
  chr6:168434610-168434777
  hypo

SEQ ID NO: 306573 - DNA, 153 bp, Homo sapiens; identical to SEQ ID NO: 256679
  chr6:168450069-168450222
  hypo

SEQ ID NO: 306574 - DNA, 552 bp, Homo sapiens; identical to SEQ ID NO: 256680
  chr6:168450728-168451280
  hypo

SEQ ID NO: 306575 - DNA, 210 bp, Homo sapiens; identical to SEQ ID NO: 256681
  chr6:168453027-168453237
  hypo

SEQ ID NO: 306576 - DNA, 351 bp, Homo sapiens; identical to SEQ ID NO: 256682
  chr6:168458057-168458408
  hypo

SEQ ID NO: 306577 - DNA, 203 bp, Homo sapiens; identical to SEQ ID NO: 256683
  chr6:168458627-168458830
  hypo

SEQ ID NO: 306578 - DNA, 66 bp, Homo sapiens; identical to SEQ ID NO: 256684
  chr6:168461832-168461898
  hypo

SEQ ID NO: 306579 - DNA, 43 bp, Homo sapiens
  chr6:168462442-168462485
  hypo
gcacagtccggctgcggagcccagcatacccagcccagcccca

SEQ ID NO: 306580 - DNA, 223 bp, Homo sapiens
  chr6:168462521-168462744
  hypo
gtgggccgcacgcggaggtggagctggtggctggcgcgcagcaggtgcagcaggtgcctggaccgccaggtgcaccccgtgtagtaaaccagcttctgtgctgcgggcagcccatccagctggatctccagcttctttccctgagcaaacaggagagaagttgccactccacaggtggaaaaccacgctagccacaggaaaggatgattttaaatgtcagcca

SEQ ID NO: 306581 - DNA, 54 bp, Homo sapiens; identical to SEQ ID NO: 256686
  chr6:168462774-168462828
  hypo

SEQ ID NO: 306582 - DNA, 202 bp, Homo sapiens; identical to SEQ ID NO: 211035
  chr6:168463427-168463629
  hypo

SEQ ID NO: 306583 - DNA, 119 bp, Homo sapiens; identical to SEQ ID NO: 211036
  chr6:168467750-168467869
  hypo

SEQ ID NO: 306584 - DNA, 53 bp, Homo sapiens; identical to SEQ ID NO: 256689
  chr6:168482041-168482094
  hypo

SEQ ID NO: 306585 - DNA, 172 bp, Homo sapiens; identical to SEQ ID NO: 256690
  chr6:168482714-168482886
  hypo

SEQ ID NO: 306586 - DNA, 103 bp, Homo sapiens; identical to SEQ ID NO: 256691
  chr6:168490178-168490281
  hypo

SEQ ID NO: 306587 - DNA, 118 bp, Homo sapiens; identical to SEQ ID NO: 256692
  chr6:168517650-168517768
  hypo

SEQ ID NO: 306588 - DNA, 541 bp, Homo sapiens; identical to SEQ ID NO: 256693
  chr6:168529686-168530227
  hypo

SEQ ID NO: 306589 - DNA, 38 bp, Homo sapiens; identical to SEQ ID NO: 256694
  chr6:168561523-168561561
  hypo

SEQ ID NO: 306590 - DNA, 209 bp, Homo sapiens; identical to SEQ ID NO: 256695
  chr6:168591119-168591328
  hypo

SEQ ID NO: 306591 - DNA, 108 bp, Homo sapiens; identical to SEQ ID NO: 211038
  chr6:168613294-168613402
  hypo

SEQ ID NO: 306592 - DNA, 252 bp, Homo sapiens; identical to SEQ ID NO: 256697
  chr6:168633686-168633938
  hypo

SEQ ID NO: 306593 - DNA, 193 bp, Homo sapiens; identical to SEQ ID NO: 256698
  chr6:168664088-168664281
  hypo

SEQ ID NO: 306594 - DNA, 400 bp, Homo sapiens; identical to SEQ ID NO: 256699
  chr6:168672432-168672832
  hypo

SEQ ID NO: 306595 - DNA, 56 bp, Homo sapiens; identical to SEQ ID NO: 256700
  chr6:168700436-168700492
  hypo

SEQ ID NO: 306596 - DNA, 453 bp, Homo sapiens; identical to SEQ ID NO: 256701
  chr6:168708247-168708700
  hypo

SEQ ID NO: 306597 - DNA, 646 bp, Homo sapiens; identical to SEQ ID NO: 256702
  chr6:168709572-168710218
  hypo

SEQ ID NO: 306598 - DNA, 622 bp, Homo sapiens; identical to SEQ ID NO: 284651
  chr6:168720072-168720694
  hypo

SEQ ID NO: 306599 - DNA, 133 bp, Homo sapiens; identical to SEQ ID NO: 211043
  chr6:168813949-168814082
  hypo

SEQ ID NO: 306600 - DNA, 354 bp, Homo sapiens; identical to SEQ ID NO: 211044
  chr6:168936432-168936786
  hypo

SEQ ID NO: 306601 - DNA, 156 bp, Homo sapiens; identical to SEQ ID NO: 256706
  chr6:168956125-168956281
  hypo

SEQ ID NO: 306602 - DNA, 87 bp, Homo sapiens; identical to SEQ ID NO: 256707
  chr6:169013509-169013596
  hypo

SEQ ID NO: 306603 - DNA, 185 bp, Homo sapiens; identical to SEQ ID NO: 211045
  chr6:169106757-169106942
  hypo

SEQ ID NO: 306604 - DNA, 42 bp, Homo sapiens; identical to SEQ ID NO: 256709
  chr6:169448769-169448811
  hypo

SEQ ID NO: 306605 - DNA, 177 bp, Homo sapiens; identical to SEQ ID NO: 256710
  chr6:169465183-169465360
  hypo

SEQ ID NO: 306606 - DNA, 117 bp, Homo sapiens; identical to SEQ ID NO: 211046
  chr6:169539421-169539538
  hypo

SEQ ID NO: 306607 - DNA, 350 bp, Homo sapiens; identical to SEQ ID NO: 211047
  chr6:169539703-169540053
  hypo

SEQ ID NO: 306608 - DNA, 426 bp, Homo sapiens; identical to SEQ ID NO: 211048
  chr6:169567204-169567630
  hypo

SEQ ID NO: 306609 - DNA, 45 bp, Homo sapiens; identical to SEQ ID NO: 256713
  chr6:169585505-169585550
  hypo

SEQ ID NO: 306610 - DNA, 240 bp, Homo sapiens; identical to SEQ ID NO: 211049
  chr6:169592278-169592518
  hypo

SEQ ID NO: 306611 - DNA, 212 bp, Homo sapiens; identical to SEQ ID NO: 211050
  chr6:169592578-169592790
  hypo

SEQ ID NO: 306612 - DNA, 368 bp, Homo sapiens; identical to SEQ ID NO: 256716
  chr6:169625141-169625509
  hypo

SEQ ID NO: 306613 - DNA, 34 bp, Homo sapiens; identical to SEQ ID NO: 211051
  chr6:169634743-169634777
  hypo

SEQ ID NO: 306614 - DNA, 269 bp, Homo sapiens; identical to SEQ ID NO: 211052
  chr6:169634807-169635076
  hypo

SEQ ID NO: 306615 - DNA, 349 bp, Homo sapiens; identical to SEQ ID NO: 256718
  chr6:169641063-169641412
  hypo

SEQ ID NO: 306616 - DNA, 106 bp, Homo sapiens; identical to SEQ ID NO: 211053
  chr6:169641783-169641889
  hypo

SEQ ID NO: 306617 - DNA, 193 bp, Homo sapiens; identical to SEQ ID NO: 211054
  chr6:169642005-169642198
  hypo

SEQ ID NO: 306618 - DNA, 745 bp, Homo sapiens; identical to SEQ ID NO: 211055
  chr6:169648464-169649209
  hypo

SEQ ID NO: 306619 - DNA, 193 bp, Homo sapiens; identical to SEQ ID NO: 256721
  chr6:169803235-169803428
  hypo

SEQ ID NO: 306620 - DNA, 120 bp, Homo sapiens; identical to SEQ ID NO: 256722
  chr6:169880473-169880593
  hypo

SEQ ID NO: 306621 - DNA, 103 bp, Homo sapiens; identical to SEQ ID NO: 256723
  chr6:169971578-169971681
  hypo

SEQ ID NO: 306622 - DNA, 158 bp, Homo sapiens
  chr6:170047309-170047467
  hypo
gaaggcattatcaggacacacgtgagaatcgggcgactgtcacggaagccgagacacactcagccctgcaggaaaaggtcccggctgagggtccggtaaggaaggaatcctgtgcgcagcctgcatgatgccatccccagcctggcgcctccagccca

SEQ ID NO: 306623 - DNA, 231 bp, Homo sapiens
  chr6:170047499-170047730
  hypo
gcagtgactgttccattagcttctttgcctgccgaagccctcccaccttaacatgtctgtaggaggggtcagacaaacagagcaaaccccggaggagctggacacagaacagcaaattcgctgctagtgagtgagtgccagtgtctgtgcccacgcaggggtgagatgcctggagatcaccctcactacagtcgagtgaaacgcagtctcggttttcatccagacacaaac

SEQ ID NO: 306624 - DNA, 178 bp, Homo sapiens; identical to SEQ ID NO: 211056
  chr6:170059400-170059578
  hypo

SEQ ID NO: 306625 - DNA, 36 bp, Homo sapiens; identical to SEQ ID NO: 211057
  chr6:170061018-170061054
  hypo

SEQ ID NO: 306626 - DNA, 113 bp, Homo sapiens
  chr6:170065254-170065367
  hypo
gtgggagcgggggacgtctgctcacagccctcttctcagcaggttttcagggtcacgtgagtggccctcacttttgctgcactccagaaccacgcatggagctctgggacatg

SEQ ID NO: 306627 - DNA, 555 bp, Homo sapiens
  chr6:170065397-170065952
  hypo
ccaggaccatattgaacccacagtgacgctgagacccacagaaggtcacgttctcagcactgaggtggacaggttttttcaaatcgcaggaaaatacaaagtagcatgaagacaaagacctttgtgtacaagctcacgttcaggcatgtctgggaactggaacttaactctgtggctgtctcacctggccgtcagcacacccggtgaccagctgcctgctttctgcatcaatgaataaactgagaagaggatatgctggtgaaaggaacatcggaaaatttagctttgtaagtgcctggtaccaattaacccgagaactgtcagttttacttatctctttacacgtaatatttacttacagtatttctgttagtcaagtttgaactattccaaaataatttcttcaccaaaaagtaaaacttgcacatgaatacaaatgttgaaaaccccataaacacaatgaaggctggggacatcaccccaaaaggctgcccggtgagtccaccacagatgggtcccgaggaatcccatcccacctcccgacagaaggcctgg

SEQ ID NO: 306628 - DNA, 523 bp, Homo sapiens; identical to SEQ ID NO: 200758
  chr6:170124883-170125406
  hypo

SEQ ID NO: 306629 - DNA, 145 bp, Homo sapiens; identical to SEQ ID NO: 256728
  chr6:170178945-170179090
  hypo

SEQ ID NO: 306630 - DNA, 226 bp, Homo sapiens; identical to SEQ ID NO: 211060
  chr6:170339178-170339404
  hypo

SEQ ID NO: 306631 - DNA, 250 bp, Homo sapiens; identical to SEQ ID NO: 211061
  chr6:170339543-170339793
  hypo

SEQ ID NO: 306632 - DNA, 42 bp, Homo sapiens; identical to SEQ ID NO: 256730
  chr6:170365710-170365752
  hypo

SEQ ID NO: 306633 - DNA, 222 bp, Homo sapiens
  chr6:170402059-170402281
  hypo
gaagggagctttatgatccacgcccaacccataggcccgctcccgccatgccccctcctctgggaaagccgcctggagtgtccaccgcagaacgagtgctgcgctcagcagcaccaggacccgcagggcccgcactcccctccgcacgaagctcactgtccacgaggaaagacgaggaaatgcggggaaaggagggcacgggacaacacgtccaactgtgta

SEQ ID NO: 306634 - DNA, 47 bp, Homo sapiens; identical to SEQ ID NO: 256732
  chr6:170413530-170413577
  hypo

SEQ ID NO: 306635 - DNA, 72 bp, Homo sapiens
  chr6:170413607-170413679
  hypo
tcacagagtcacgggtgaccccagcaaagtcaggacatgctccccatgagcacacacacccggcgaggacat

SEQ ID NO: 306636 - DNA, 42 bp, Homo sapiens
  chr6:170413793-170413835
  hypo
atgctcacaatgagcacacacacccagcgagggcatcaccca

SEQ ID NO: 306637 - DNA, 229 bp, Homo sapiens; identical to SEQ ID NO: 211062
  chr6:170453833-170454062
  hypo

SEQ ID NO: 306638 - DNA, 699 bp, Homo sapiens; identical to SEQ ID NO: 211063
  chr6:170454200-170454899
  hypo

SEQ ID NO: 306639 - DNA, 280 bp, Homo sapiens
  chr6:170474563-170474843
  hypo
gtgcagtgccgcccgccatcctcctgcattagcatactcctaattgattaagtggatgattgattattggacccgtgcggtctgctttccagacccgttggctgggaatggaaagccacgctcggccctcggatgcagcagaagccccctgccccgtccgctccaggctgcagagccgaggtgattggcgccaggctgcccaccccgcctgccccagcaagtgcgtcgcgcccccatggtttctgctgtttgcatgtcaggtcccggcaggaagctgcag

SEQ ID NO: 306640 - DNA, 902 bp, Homo sapiens; identical to SEQ ID NO: 256736
  chr6:170491589-170492491
  hypo

SEQ ID NO: 306641 - DNA, 35 bp, Homo sapiens; identical to SEQ ID NO: 256737
  chr6:170492521-170492556
  hypo

SEQ ID NO: 306642 - DNA, 276 bp, Homo sapiens; identical to SEQ ID NO: 256738
  chr6:170492586-170492862
  hypo

SEQ ID NO: 306643 - DNA, 120 bp, Homo sapiens; identical to SEQ ID NO: 211065
  chr6:170500862-170500982
  hypo

SEQ ID NO: 306644 - DNA, 163 bp, Homo sapiens; identical to SEQ ID NO: 211066
  chr6:170531588-170531751
  hypo

SEQ ID NO: 306645 - DNA, 227 bp, Homo sapiens; identical to SEQ ID NO: 256741
  chr6:170578601-170578828
  hypo

SEQ ID NO: 306646 - DNA, 74 bp, Homo sapiens; identical to SEQ ID NO: 256742
  chr6:170578858-170578932
  hypo

SEQ ID NO: 306647 - DNA, 56 bp, Homo sapiens; identical to SEQ ID NO: 211067
  chr6:170579426-170579482
  hypo

SEQ ID NO: 306648 - DNA, 98 bp, Homo sapiens; identical to SEQ ID NO: 284661
  chr6:170605422-170605520
  hypo

SEQ ID NO: 306649 - DNA, 132 bp, Homo sapiens; identical to SEQ ID NO: 284662
  chr6:170605940-170606072
  hypo

SEQ ID NO: 306650 - DNA, 344 bp, Homo sapiens; identical to SEQ ID NO: 256745
  chr6:170667200-170667544
  hypo

SEQ ID NO: 306651 - DNA, 112 bp, Homo sapiens; identical to SEQ ID NO: 256746
  chr6:170713941-170714053
  hypo

SEQ ID NO: 306652 - DNA, 176 bp, Homo sapiens; identical to SEQ ID NO: 256747
  chr6:170871267-170871443
  hypo

SEQ ID NO: 306653 - DNA, 120 bp, Homo sapiens; identical to SEQ ID NO: 211068
  chr6:170894913-170895033
  hypo

SEQ ID NO: 306654 - DNA, 33 bp, Homo sapiens; identical to SEQ ID NO: 256749
  chr7:62937-62970
  hypo

SEQ ID NO: 306655 - DNA, 218 bp, Homo sapiens; identical to SEQ ID NO: 256750
  chr7:84205-84423
  hypo

SEQ ID NO: 306656 - DNA, 139 bp, Homo sapiens; identical to SEQ ID NO: 211069
  chr7:85450-85589
  hypo

SEQ ID NO: 306657 - DNA, 46 bp, Homo sapiens; identical to SEQ ID NO: 256752
  chr7:118252-118298
  hypo

SEQ ID NO: 306658 - DNA, 94 bp, Homo sapiens; identical to SEQ ID NO: 256753
  chr7:139618-139712
  hypo

SEQ ID NO: 306659 - DNA, 90 bp, Homo sapiens; identical to SEQ ID NO: 284667
  chr7:149020-149110
  hypo

SEQ ID NO: 306660 - DNA, 589 bp, Homo sapiens; identical to SEQ ID NO: 284668
  chr7:149220-149809
  hypo

SEQ ID NO: 306661 - DNA, 155 bp, Homo sapiens; identical to SEQ ID NO: 256754
  chr7:153660-153815
  hypo

SEQ ID NO: 306662 - DNA, 66 bp, Homo sapiens; identical to SEQ ID NO: 256755
  chr7:154289-154355
  hypo

SEQ ID NO: 306663 - DNA, 217 bp, Homo sapiens; identical to SEQ ID NO: 256756
  chr7:158843-159060
  hypo

SEQ ID NO: 306664 - DNA, 262 bp, Homo sapiens; identical to SEQ ID NO: 256757
  chr7:161869-162131
  hypo

SEQ ID NO: 306665 - DNA, 149 bp, Homo sapiens; identical to SEQ ID NO: 256758
  chr7:168485-168634
  hypo

SEQ ID NO: 306666 - DNA, 283 bp, Homo sapiens; identical to SEQ ID NO: 256759
  chr7:170020-170303
  hypo

SEQ ID NO: 306667 - DNA, 272 bp, Homo sapiens
  chr7:173194-173466
  hypo
cggaggacaggacccgccccgcgctgccagtgccgaagcttgggttctctgaggactgcgagggggtctcagcactgtgtccacagatggggcagggacctccgcagggaaccttctctcggctgggccagcccaccccaggggctgtagacgagggagttaatgaacacgggatgggttgagccgcctggtttgcccacagaggggcgaggaagggagtggggagtctgctgtgagcggagagaggacagcctgaggcctcaggaacgctg

SEQ ID NO: 306668 - DNA, 184 bp, Homo sapiens
  chr7:173496-173680
  hypo
cgtctgtcgggaaggggcacggccacaggatttaggggcagtttggacacactggtccggtgagcttgatttcagattccgggatctggtttcggagtggagttgtggactctccaggacccatcgctgaggagcaggaggttctccaggggccatggggcccggggctctgagggaggctctg

SEQ ID NO: 306669 - DNA, 529 bp, Homo sapiens; identical to SEQ ID NO: 256761
  chr7:175273-175802
  hypo

SEQ ID NO: 306670 - DNA, 254 bp, Homo sapiens; identical to SEQ ID NO: 256762
  chr7:178590-178844
  hypo

SEQ ID NO: 306671 - DNA, 334 bp, Homo sapiens; identical to SEQ ID NO: 256763
  chr7:181259-181593
  hypo

SEQ ID NO: 306672 - DNA, 438 bp, Homo sapiens; identical to SEQ ID NO: 284669
  chr7:191992-192430
  hypo

SEQ ID NO: 306673 - DNA, 362 bp, Homo sapiens; identical to SEQ ID NO: 284670
  chr7:192614-192976
  hypo

SEQ ID NO: 306674 - DNA, 511 bp, Homo sapiens; identical to SEQ ID NO: 284671
  chr7:193101-193612
  hypo

SEQ ID NO: 306675 - DNA, 276 bp, Homo sapiens; identical to SEQ ID NO: 284672
  chr7:193708-193984
  hypo

SEQ ID NO: 306676 - DNA, 148 bp, Homo sapiens; identical to SEQ ID NO: 256764
  chr7:199426-199574
  hypo

SEQ ID NO: 306677 - DNA, 202 bp, Homo sapiens; identical to SEQ ID NO: 256765
  chr7:204779-204981
  hypo

SEQ ID NO: 306678 - DNA, 202 bp, Homo sapiens; identical to SEQ ID NO: 256766
  chr7:208838-209040
  hypo

SEQ ID NO: 306679 - DNA, 342 bp, Homo sapiens; identical to SEQ ID NO: 211073
  chr7:212459-212801
  hypo

SEQ ID NO: 306680 - DNA, 155 bp, Homo sapiens; identical to SEQ ID NO: 256768
  chr7:217102-217257
  hypo

SEQ ID NO: 306681 - DNA, 314 bp, Homo sapiens; identical to SEQ ID NO: 256769
  chr7:217590-217904
  hypo

SEQ ID NO: 306682 - DNA, 120 bp, Homo sapiens; identical to SEQ ID NO: 211074
  chr7:223534-223654
  hypo

SEQ ID NO: 306683 - DNA, 354 bp, Homo sapiens; identical to SEQ ID NO: 211075
  chr7:226184-226538
  hypo

SEQ ID NO: 306684 - DNA, 166 bp, Homo sapiens; identical to SEQ ID NO: 256772
  chr7:228056-228222
  hypo

SEQ ID NO: 306685 - DNA, 231 bp, Homo sapiens; identical to SEQ ID NO: 256773
  chr7:229478-229709
  hypo

SEQ ID NO: 306686 - DNA, 124 bp, Homo sapiens; identical to SEQ ID NO: 256774
  chr7:230453-230577
  hypo

SEQ ID NO: 306687 - DNA, 305 bp, Homo sapiens; identical to SEQ ID NO: 256775
  chr7:284816-285121
  hypo

SEQ ID NO: 306688 - DNA, 771 bp, Homo sapiens; identical to SEQ ID NO: 256776
  chr7:286006-286777
  hypo

SEQ ID NO: 306689 - DNA, 570 bp, Homo sapiens; identical to SEQ ID NO: 211076
  chr7:287708-288278
  hypo

SEQ ID NO: 306690 - DNA, 466 bp, Homo sapiens
  chr7:288328-288794
  hypo
catgaccaaggagatccgggacgtcacacgggacaagaagctctggaggaccttcttcatctctccaggtagcctggcacgggggcccgcattcatctctccaggtagcctggcacgggggcccgcattcatctctccaggtagcctggcacggggagcccacattcatctcgccaggtagcctggcacgggggcccacattcacctctccaggtagcctggcacggggggccgcattcatctcttcaggtagcctggcacggggagcccacattcatctcgccaggtagcctggcacgggggcccacattcacctctccaggtagcctggcacgggggcccgcattcatctctccaggtagcctggcatggggagcccacattcacctccccaggtagcctggcacggggagaccacattcatctcgccaggtagcctggcacaggggcccgcattcatctctcc

SEQ ID NO: 306691 - DNA, 113 bp, Homo sapiens; identical to SEQ ID NO: 256778
  chr7:289727-289840
  hypo

SEQ ID NO: 306692 - DNA, 258 bp, Homo sapiens; identical to SEQ ID NO: 211078
  chr7:290537-290795
  hypo

SEQ ID NO: 306693 - DNA, 233 bp, Homo sapiens; identical to SEQ ID NO: 256780
  chr7:291025-291258
  hypo

SEQ ID NO: 306694 - DNA, 665 bp, Homo sapiens; identical to SEQ ID NO: 211079
  chr7:292736-293401
  hypo

SEQ ID NO: 306695 - DNA, 434 bp, Homo sapiens; identical to SEQ ID NO: 211080
  chr7:293611-294045
  hypo

SEQ ID NO: 306696 - DNA, 850 bp, Homo sapiens; identical to SEQ ID NO: 211081
  chr7:294114-294964
  hypo

SEQ ID NO: 306697 - DNA, 1233 bp, Homo sapiens; identical to SEQ ID NO: 211082
  chr7:295710-296943
  hypo

SEQ ID NO: 306698 - DNA, 315 bp, Homo sapiens; identical to SEQ ID NO: 256784
  chr7:297158-297473
  hypo

SEQ ID NO: 306699 - DNA, 674 bp, Homo sapiens; identical to SEQ ID NO: 211083
  chr7:298605-299279
  hypo

SEQ ID NO: 306700 - DNA, 38 bp, Homo sapiens; identical to SEQ ID NO: 256786
  chr7:299617-299655
  hypo

SEQ ID NO: 306701 - DNA, 1066 bp, Homo sapiens; identical to SEQ ID NO: 211084
  chr7:299916-300982
  hypo

SEQ ID NO: 306702 - DNA, 102 bp, Homo sapiens
  chr7:312490-312592
  hypo
cacaagagcccctccctccacgcccccaccgtgcacgttcccagacacagaagtcgcctcctggttctgaatcccagcggcctgcacagtgaccctcacaag

SEQ ID NO: 306703 - DNA, 259 bp, Homo sapiens
  chr7:312638-312897
  hypo
agatcacaccccctctccttcacgcaccatccccatcccacacgagggcaaggcagagtcctcacaaaggccttcggggtcctctgcaggtggcctcggtccacgtgctaagatcatcctgcttctcttcctctcacgggttctccttcagccccaggcctggctgcttctcggtcagtgggcattcacccgcacagccctctgccctgtgcctccctcagcctcgcatggctggtgcgtcccctcttttgggtctgtg

SEQ ID NO: 306704 - DNA, 224 bp, Homo sapiens
  chr7:322815-323039
  hypo
catggacccctcctctggacgtggacggcccctccgggcgcccccatcctggccgccccaccctctcgggcgcacccgcgtgtcaggatcgccagcctccatcgcttccgcatcgaggacgcacacggtgtgtcccttcagtgctacagagcacgcacccttaaataggcttccgtacagtcaaggatcctcgaagagtaaacgcttttaagctttttccattc

SEQ ID NO: 306705 - DNA, 146 bp, Homo sapiens; identical to SEQ ID NO: 256790
  chr7:325295-325441
  hypo

SEQ ID NO: 306706 - DNA, 45 bp, Homo sapiens; identical to SEQ ID NO: 211085
  chr7:328541-328586
  hypo

SEQ ID NO: 306707 - DNA, 55 bp, Homo sapiens; identical to SEQ ID NO: 211086
  chr7:328625-328680
  hypo

SEQ ID NO: 306708 - DNA, 159 bp, Homo sapiens; identical to SEQ ID NO: 256793
  chr7:337220-337379
  hypo

SEQ ID NO: 306709 - DNA, 63 bp, Homo sapiens; identical to SEQ ID NO: 256794
  chr7:337996-338059
  hypo

SEQ ID NO: 306710 - DNA, 34 bp, Homo sapiens; identical to SEQ ID NO: 211087
  chr7:339204-339238
  hypo

SEQ ID NO: 306711 - DNA, 65 bp, Homo sapiens; identical to SEQ ID NO: 211088
  chr7:345230-345295
  hypo

SEQ ID NO: 306712 - DNA, 155 bp, Homo sapiens
  chr7:345608-345763
  hypo
ctcacggaaccacggcaggacgtggaagaaattatgtggcttgtttgtgtgtctgcaatcgcgtcaagaccgatggtccctcggctctggacagacgcccccccagccagctgaggatgcgaatattcatggcctggtgccgggtccggggctgg

SEQ ID NO: 306713 - DNA, 292 bp, Homo sapiens; identical to SEQ ID NO: 256797
  chr7:357936-358228
  hypo

SEQ ID NO: 306714 - DNA, 56 bp, Homo sapiens; identical to SEQ ID NO: 256798
  chr7:361849-361905
  hypo

SEQ ID NO: 306715 - DNA, 180 bp, Homo sapiens; identical to SEQ ID NO: 256799
  chr7:367650-367830
  hypo

SEQ ID NO: 306716 - DNA, 258 bp, Homo sapiens; identical to SEQ ID NO: 256801
  chr7:373771-374029
  hypo

SEQ ID NO: 306717 - DNA, 353 bp, Homo sapiens; identical to SEQ ID NO: 256802
  chr7:378631-378984
  hypo

SEQ ID NO: 306718 - DNA, 261 bp, Homo sapiens; identical to SEQ ID NO: 211090
  chr7:380936-381197
  hypo

SEQ ID NO: 306719 - DNA, 100 bp, Homo sapiens; identical to SEQ ID NO: 256804
  chr7:388190-388290
  hypo

SEQ ID NO: 306720 - DNA, 107 bp, Homo sapiens
  chr7:409495-409602
  hypo
tccaatccgccgtggccagacgcccggcgatcgtccactgtgccgaggccccgggccccaggctggctgcagaggcgaacgacgcggccggccccgcgctgcagacg

SEQ ID NO: 306721 - DNA, 45 bp, Homo sapiens
  chr7:409781-409826
  hypo
ggccccaggtcccgcgggttataaagcaagggctggacccagccc

SEQ ID NO: 306722 - DNA, 94 bp, Homo sapiens
  chr7:409892-409986
  hypo
ataaatagactctttgtttcaaagaaaatgtttttaaaagcaaggcagccaagccgggcccaggtaacaagcagagggaggaggcctcagaggg

SEQ ID NO: 306723 - DNA, 412 bp, Homo sapiens
  chr7:414503-414915
  hypo
ccccactcccaccgcggcggctacctctttcctcgcacgctccatggagagctggacctgcgggccgacggagggaaccctgtacacgccccctcactcactcgccatcccctgccccaaatgcagtgaatctctcctgtggtcccggattcaccgtctccactcagagtcgctaattctagagacaaggacggccttgttccagctggaacgcacacggaatgggaaggtgaatggggtgggaagcgtgcgtgggtcctgccacttggctcgtgggcagccctctgtgctgggggtcacgtggggcccacggccgcccgtgaaggagcctcccctgatggaggagacctgagcccaggccgctgagtgagccctgaggtgtggaacttgcaggagcccacaggggtaggat

SEQ ID NO: 306724 - DNA, 211 bp, Homo sapiens; identical to SEQ ID NO: 211092
  chr7:414945-415156
  hypo

SEQ ID NO: 306725 - DNA, 428 bp, Homo sapiens; identical to SEQ ID NO: 256807
  chr7:418417-418845
  hypo

SEQ ID NO: 306726 - DNA, 146 bp, Homo sapiens; identical to SEQ ID NO: 211094
  chr7:429737-429883
  hypo

SEQ ID NO: 306727 - DNA, 56 bp, Homo sapiens
  chr7:431783-431839
  hypo
gatctgagaggggctttcccggagccaggcagggaggcggccgtgcacctgcgggg

SEQ ID NO: 306728 - DNA, 51 bp, Homo sapiens; identical to SEQ ID NO: 256810
  chr7:432226-432277
  hypo

SEQ ID NO: 306729 - DNA, 190 bp, Homo sapiens; identical to SEQ ID NO: 256811
  chr7:438533-438723
  hypo

SEQ ID NO: 306730 - DNA, 158 bp, Homo sapiens; identical to SEQ ID NO: 256812
  chr7:442389-442547
  hypo

SEQ ID NO: 306731 - DNA, 35 bp, Homo sapiens; identical to SEQ ID NO: 256813
  chr7:453594-453629
  hypo

SEQ ID NO: 306732 - DNA, 305 bp, Homo sapiens; identical to SEQ ID NO: 256814
  chr7:455128-455433
  hypo

SEQ ID NO: 306733 - DNA, 387 bp, Homo sapiens; identical to SEQ ID NO: 256815
  chr7:455739-456126
  hypo

SEQ ID NO: 306734 - DNA, 206 bp, Homo sapiens; identical to SEQ ID NO: 256816
  chr7:462325-462531
  hypo

SEQ ID NO: 306735 - DNA, 573 bp, Homo sapiens; identical to SEQ ID NO: 256817
  chr7:462738-463311
  hypo

SEQ ID NO: 306736 - DNA, 533 bp, Homo sapiens; identical to SEQ ID NO: 256818
  chr7:465353-465886
  hypo

SEQ ID NO: 306737 - DNA, 34 bp, Homo sapiens; identical to SEQ ID NO: 256819
  chr7:466110-466144
  hypo

SEQ ID NO: 306738 - DNA, 39 bp, Homo sapiens
  chr7:466508-466547
  hypo
ccacacacgaaggccgggcactcactctgggccaggact

SEQ ID NO: 306739 - DNA, 241 bp, Homo sapiens
  chr7:466577-466818
  hypo
gatgctgccctggcctcagagactctccctgagtgcaggcggcacaacccagtcgaggctgccctgtcctcagagactcccctgggtgcaggtggcatagctgagtcgatgccgccctgtcctcagggactctccctgggggataaggcagtgcctccctgccactccccgtgctgtgctggcaaacgtctaacaatcagcaacccaggaagaccctgactcgcagcgactgccaatttcc

SEQ ID NO: 306740 - DNA, 512 bp, Homo sapiens; identical to SEQ ID NO: 211095
  chr7:469699-470211
  hypo

SEQ ID NO: 306741 - DNA, 319 bp, Homo sapiens; identical to SEQ ID NO: 211096
  chr7:479005-479324
  hypo

SEQ ID NO: 306742 - DNA, 450 bp, Homo sapiens; identical to SEQ ID NO: 256823
  chr7:480950-481400
  hypo

SEQ ID NO: 306743 - DNA, 35 bp, Homo sapiens; identical to SEQ ID NO: 211098
  chr7:485248-485283
  hypo

SEQ ID NO: 306744 - DNA, 576 bp, Homo sapiens
  chr7:503100-503676
  hypo
agcccagaaaggcgacggggtggcccaaggtcacacccacgccaggcccagcactctgctcttcccgctcacccactcggccgggcctgtgccctcccgcccggccaagtgggggctccaggaagggcagcgagtgccccgcggccccggccccactgcgggcggccggaacacagagggcggtgaggaaggaggcgttccctgccgggtgccctccagcaggattcgcgaacccaggggagcgagcgggaggattttccatgtgaggccggcttcctggggcgaggcccacccggcgccagcgtggagagaggagaggagcaaagcgcctcgacacattctccctcggtgatttaatggccggagcattcgtgcgatatttatgcagtaaatccttccactggggggtttcactgtgtcacgggaggctcctcccagcccgtccccatcccgtcccccccaaaaaaagaatcctgagaaaatctcatttcacagtttcccatcgagccaggtgcacagcagctgcggtgggcatggcgggcgcgggtcctggggaacaccctctgctggcgtccg

SEQ ID NO: 306745 - DNA, 60 bp, Homo sapiens; identical to SEQ ID NO: 256827
  chr7:531100-531160
  hypo

SEQ ID NO: 306746 - DNA, 408 bp, Homo sapiens; identical to SEQ ID NO: 256828
  chr7:531190-531598
  hypo

SEQ ID NO: 306747 - DNA, 107 bp, Homo sapiens; identical to SEQ ID NO: 256829
  chr7:532034-532141
  hypo

SEQ ID NO: 306748 - DNA, 102 bp, Homo sapiens; identical to SEQ ID NO: 256830
  chr7:533202-533304
  hypo

SEQ ID NO: 306749 - DNA, 188 bp, Homo sapiens; identical to SEQ ID NO: 256831
  chr7:534692-534880
  hypo

SEQ ID NO: 306750 - DNA, 292 bp, Homo sapiens; identical to SEQ ID NO: 256832
  chr7:540523-540815
  hypo

SEQ ID NO: 306751 - DNA, 159 bp, Homo sapiens; identical to SEQ ID NO: 256833
  chr7:544945-545104
  hypo

SEQ ID NO: 306752 - DNA, 201 bp, Homo sapiens; identical to SEQ ID NO: 211101
  chr7:545346-545547
  hypo

SEQ ID NO: 306753 - DNA, 119 bp, Homo sapiens; identical to SEQ ID NO: 211102
  chr7:551453-551572
  hypo

SEQ ID NO: 306754 - DNA, 256 bp, Homo sapiens
  chr7:551697-551953
  hypo
tgatggctcttctctcctggaagctctcttggcccagaccaggactccaggaggagcaggcgggctggggcaggagacaccctcgaaggagggaggcctcgggagaggccagagccagaggcaccagggccaggcctattttagggaggagggaacgggtggcttgcctgaggccactgcgctgggagagcgggcagctcctccccacccggccctgccctgcccatcgcggcctcctggactcaccctgacccgg

SEQ ID NO: 306755 - DNA, 131 bp, Homo sapiens
  chr7:552019-552150
  hypo
cgcttctcgggcacatgcttagtggcatggaccccgtgagctctcaggctggtgtccaaagaatcctcactccctgcaggcggaaggagaacaccgtgaatgccccaggcccgtgcgctgtgccctgggcc

SEQ ID NO: 306756 - DNA, 294 bp, Homo sapiens; identical to SEQ ID NO: 200769
  chr7:557697-557991
  hypo

SEQ ID NO: 306757 - DNA, 36 bp, Homo sapiens; identical to SEQ ID NO: 222989
  chr7:558727-558763
  hypo

SEQ ID NO: 306758 - DNA, 505 bp, Homo sapiens; identical to SEQ ID NO: 222990
  chr7:558986-559491
  hypo

SEQ ID NO: 306759 - DNA, 59 bp, Homo sapiens
  chr7:564178-564237
  hypo
tgctggggacacggcgttaagaccaggccctcacggagccctcactctctgaggaggaa

SEQ ID NO: 306760 - DNA, 116 bp, Homo sapiens
  chr7:564271-564387
  hypo
aggcaaaggatttcaggcccaggtcaggaaggccttgtctgaggagtctgagaagaagtcaattgacaacagctagaacatctaggtcaggcactccaggccgacacgacaaagca

SEQ ID NO: 306761 - DNA, 73 bp, Homo sapiens; identical to SEQ ID NO: 256838
  chr7:576731-576804
  hypo

SEQ ID NO: 306762 - DNA, 150 bp, Homo sapiens; identical to SEQ ID NO: 256839
  chr7:577692-577842
  hypo

SEQ ID NO: 306763 - DNA, 112 bp, Homo sapiens; identical to SEQ ID NO: 211106
  chr7:578810-578922
  hypo

SEQ ID NO: 306764 - DNA, 190 bp, Homo sapiens
  chr7:579048-579238
  hypo
ggctcagggcggtgccctcctctacctgcccacacactccaagggagcttcagtccccacctgccagctggaacaggggctccctgagggcccgagtccccaacgctaacacaggaggcaccagggagcgtctgcggaattaaaccaacactctgtgtgcacgtcacacgtttagcggacacaggcccag

SEQ ID NO: 306765 - DNA, 31 bp, Homo sapiens; identical to SEQ ID NO: 210108
  chr7:587416-587447
  hypo

SEQ ID NO: 306766 - DNA, 148 bp, Homo sapiens; identical to SEQ ID NO: 256842
  chr7:589082-589230
  hypo

SEQ ID NO: 306767 - DNA, 131 bp, Homo sapiens; identical to SEQ ID NO: 256843
  chr7:593561-593692
  hypo

SEQ ID NO: 306768 - DNA, 208 bp, Homo sapiens; identical to SEQ ID NO: 211108
  chr7:601255-601463
  hypo

SEQ ID NO: 306769 - DNA, 359 bp, Homo sapiens; identical to SEQ ID NO: 20843
  chr7:601503-601862
  hypo

SEQ ID NO: 306770 - DNA, 233 bp, Homo sapiens
  chr7:612444-612677
  hypo
cacagggcatctgcgacccaccaaggccgtgatttacaaaacaatgtgctttagaaactgctggaggaagaatgacagtgagcagacagggcaggacgccggccccagggagagcgagggaccggcatctcctccacgcgctgcttcaagaaaaacaaacggcggccacgagggcagccactgagcctccagcgcctgccgagaagccgccccaccggccgggccccgccgca

SEQ ID NO: 306771 - DNA, 57 bp, Homo sapiens
  chr7:612745-612802
  hypo
agcgcgtcggttccgagcctctgatccctgcaccccggggtcacactgacttaccaa

SEQ ID NO: 306772 - DNA, 472 bp, Homo sapiens; identical to SEQ ID NO: 256846
  chr7:617512-617984
  hypo

SEQ ID NO: 306773 - DNA, 868 bp, Homo sapiens; identical to SEQ ID NO: 256847
  chr7:622700-623568
  hypo

SEQ ID NO: 306774 - DNA, 39 bp, Homo sapiens; identical to SEQ ID NO: 211110
  chr7:635126-635165
  hypo

SEQ ID NO: 306775 - DNA, 36 bp, Homo sapiens; identical to SEQ ID NO: 211111
  chr7:636569-636605
  hypo

SEQ ID NO: 306776 - DNA, 42 bp, Homo sapiens; identical to SEQ ID NO: 256850
  chr7:649823-649865
  hypo

SEQ ID NO: 306777 - DNA, 151 bp, Homo sapiens; identical to SEQ ID NO: 211112
  chr7:653116-653267
  hypo

SEQ ID NO: 306778 - DNA, 292 bp, Homo sapiens; identical to SEQ ID NO: 211113
  chr7:653525-653817
  hypo

SEQ ID NO: 306779 - DNA, 76 bp, Homo sapiens; identical to SEQ ID NO: 256853
  chr7:661919-661995
  hypo

SEQ ID NO: 306780 - DNA, 330 bp, Homo sapiens; identical to SEQ ID NO: 256854
  chr7:667314-667644
  hypo

SEQ ID NO: 306781 - DNA, 68 bp, Homo sapiens; identical to SEQ ID NO: 211115
  chr7:671703-671771
  hypo

SEQ ID NO: 306782 - DNA, 151 bp, Homo sapiens; identical to SEQ ID NO: 211116
  chr7:675431-675582
  hypo

SEQ ID NO: 306783 - DNA, 69 bp, Homo sapiens; identical to SEQ ID NO: 256857
  chr7:711712-711781
  hypo

SEQ ID NO: 306784 - DNA, 346 bp, Homo sapiens; identical to SEQ ID NO: 256858
  chr7:716115-716461
  hypo

SEQ ID NO: 306785 - DNA, 280 bp, Homo sapiens; identical to SEQ ID NO: 256859
  chr7:716715-716995
  hypo

SEQ ID NO: 306786 - DNA, 101 bp, Homo sapiens; identical to SEQ ID NO: 256860
  chr7:738373-738474
  hypo

SEQ ID NO: 306787 - DNA, 31 bp, Homo sapiens; identical to SEQ ID NO: 256861
  chr7:744080-744111
  hypo

SEQ ID NO: 306788 - DNA, 92 bp, Homo sapiens; identical to SEQ ID NO: 256862
  chr7:746773-746865
  hypo

SEQ ID NO: 306789 - DNA, 89 bp, Homo sapiens; identical to SEQ ID NO: 211117
  chr7:778948-779037
  hypo

SEQ ID NO: 306790 - DNA, 82 bp, Homo sapiens; identical to SEQ ID NO: 211118
  chr7:799679-799761
  hypo

SEQ ID NO: 306791 - DNA, 36 bp, Homo sapiens; identical to SEQ ID NO: 211119
  chr7:803211-803247
  hypo

SEQ ID NO: 306792 - DNA, 228 bp, Homo sapiens
  chr7:803615-803843
  hypo
gccgtcccgacagctggcgtgccgtgcctggccccactcaggctacacacctgctcccccaggtgctcagcaggtaccagcgccgaccagctgagctgtggttcactgaagcgtgttgttaaaagtacccaatagtcactcttgcctggggagaagcagcattttaaggagcatcgcattgaagactgtgggacgcagctcttccacttggcccgggcacacgctttc

SEQ ID NO: 306793 - DNA, 432 bp, Homo sapiens; identical to SEQ ID NO: 256866
  chr7:807333-807765
  hypo

SEQ ID NO: 306794 - DNA, 266 bp, Homo sapiens; identical to SEQ ID NO: 256867
  chr7:807795-808061
  hypo

SEQ ID NO: 306795 - DNA, 144 bp, Homo sapiens; identical to SEQ ID NO: 211120
  chr7:808384-808528
  hypo

SEQ ID NO: 306796 - DNA, 241 bp, Homo sapiens; identical to SEQ ID NO: 211121
  chr7:808577-808818
  hypo

SEQ ID NO: 306797 - DNA, 403 bp, Homo sapiens; identical to SEQ ID NO: 211122
  chr7:808848-809251
  hypo

SEQ ID NO: 306798 - DNA, 245 bp, Homo sapiens; identical to SEQ ID NO: 211123
  chr7:818258-818503
  hypo

SEQ ID NO: 306799 - DNA, 38 bp, Homo sapiens; identical to SEQ ID NO: 211124
  chr7:819362-819400
  hypo

SEQ ID NO: 306800 - DNA, 143 bp, Homo sapiens
  chr7:819698-819841
  hypo
tcagagcagtgtccagtacctgtaccgagagttgctggttcaccttgacgatccagagagggccatccaggatgcaattttaggtgagactccgacggcttggccttcgttccgatgcctgctttcggcgcctgccacgggca

SEQ ID NO: 306801 - DNA, 256 bp, Homo sapiens; identical to SEQ ID NO: 284688
  chr7:822392-822648
  hypo

SEQ ID NO: 306802 - DNA, 69 bp, Homo sapiens; identical to SEQ ID NO: 256872
  chr7:825191-825260
  hypo

SEQ ID NO: 306803 - DNA, 78 bp, Homo sapiens; identical to SEQ ID NO: 211126
  chr7:834225-834303
  hypo

SEQ ID NO: 306804 - DNA, 338 bp, Homo sapiens; identical to SEQ ID NO: 211127
  chr7:834873-835211
  hypo

SEQ ID NO: 306805 - DNA, 106 bp, Homo sapiens; identical to SEQ ID NO: 256874
  chr7:872193-872299
  hypo

SEQ ID NO: 306806 - DNA, 141 bp, Homo sapiens; identical to SEQ ID NO: 256875
  chr7:874775-874916
  hypo

SEQ ID NO: 306807 - DNA, 35 bp, Homo sapiens; identical to SEQ ID NO: 211128
  chr7:878053-878088
  hypo

SEQ ID NO: 306808 - DNA, 122 bp, Homo sapiens; identical to SEQ ID NO: 211129
  chr7:882990-883112
  hypo

SEQ ID NO: 306809 - DNA, 286 bp, Homo sapiens; identical to SEQ ID NO: 284692
  chr7:889350-889636
  hypo

SEQ ID NO: 306810 - DNA, 463 bp, Homo sapiens; identical to SEQ ID NO: 256879
  chr7:899731-900194
  hypo

SEQ ID NO: 306811 - DNA, 382 bp, Homo sapiens; identical to SEQ ID NO: 256880
  chr7:902843-903225
  hypo

SEQ ID NO: 306812 - DNA, 393 bp, Homo sapiens; identical to SEQ ID NO: 211133
  chr7:907709-908102
  hypo

SEQ ID NO: 306813 - DNA, 92 bp, Homo sapiens; identical to SEQ ID NO: 256883
  chr7:920453-920545
  hypo

SEQ ID NO: 306814 - DNA, 133 bp, Homo sapiens; identical to SEQ ID NO: 211134
  chr7:920785-920918
  hypo

SEQ ID NO: 306815 - DNA, 197 bp, Homo sapiens; identical to SEQ ID NO: 211135
  chr7:920980-921177
  hypo

SEQ ID NO: 306816 - DNA, 44 bp, Homo sapiens; identical to SEQ ID NO: 211136
  chr7:921709-921753
  hypo

SEQ ID NO: 306817 - DNA, 221 bp, Homo sapiens; identical to SEQ ID NO: 256886
  chr7:923637-923858
  hypo

SEQ ID NO: 306818 - DNA, 777 bp, Homo sapiens; identical to SEQ ID NO: 211137
  chr7:925619-926396
  hypo

SEQ ID NO: 306819 - DNA, 68 bp, Homo sapiens; identical to SEQ ID NO: 211138
  chr7:931095-931163
  hypo

SEQ ID NO: 306820 - DNA, 66 bp, Homo sapiens; identical to SEQ ID NO: 256889
  chr7:931798-931864
  hypo

SEQ ID NO: 306821 - DNA, 473 bp, Homo sapiens; identical to SEQ ID NO: 284694
  chr7:932819-933292
  hypo

SEQ ID NO: 306822 - DNA, 634 bp, Homo sapiens; identical to SEQ ID NO: 256891
  chr7:943348-943982
  hypo

SEQ ID NO: 306823 - DNA, 117 bp, Homo sapiens; identical to SEQ ID NO: 211140
  chr7:944012-944129
  hypo

SEQ ID NO: 306824 - DNA, 152 bp, Homo sapiens; identical to SEQ ID NO: 211141
  chr7:955105-955257
  hypo

SEQ ID NO: 306825 - DNA, 301 bp, Homo sapiens; identical to SEQ ID NO: 256894
  chr7:955484-955785
  hypo

SEQ ID NO: 306826 - DNA, 102 bp, Homo sapiens; identical to SEQ ID NO: 211142
  chr7:959972-960074
  hypo

SEQ ID NO: 306827 - DNA, 210 bp, Homo sapiens; identical to SEQ ID NO: 211143
  chr7:960104-960314
  hypo

SEQ ID NO: 306828 - DNA, 180 bp, Homo sapiens; identical to SEQ ID NO: 256897
  chr7:960590-960770
  hypo

SEQ ID NO: 306829 - DNA, 174 bp, Homo sapiens
  chr7:965798-965972
  hypo
cccacgtccgctcccgccctgaggagccagggcaggccccgaaacaacagccgcccctcccgttcccctcccagaccgccaggagcacctgggagggcccctcagatccacccgagacccccaaggcctcagcgaacctgggtgggctgtagctactgatgcacaatgaccttc

SEQ ID NO: 306830 - DNA, 514 bp, Homo sapiens
  chr7:966009-966523
  hypo
gcccggtggtggccagcagacacaggcggcacctcggggtctgggggacgcagctgcggctggcttctccccgaccctgtgggcggcacccaactccccaccctgccgggtcctcccggggccatctcggagccacccagcacttgaccatggccctgacaaggcccctttgtactcactggcagtcggagggcgtgggccggtagtagaaggagggtactttggactcaaacctggctctcgcggcgtcgttcccgtgggaggccatgaactgcaagagaggaggggccgggtcagaggcctggggtcccaggggcagcctaggaggtgccagctgcccttggggccgtcaccacagtgacccgcagacccaaggctctgagggctccaccagcaccaggacgggaacgccacctcctcctgccccagggacaccatttctgagtgatcgaccctcccctgggacagggaaggagccagcgtccctaacgacggggtcccggcaaagggggcc

SEQ ID NO: 306831 - DNA, 120 bp, Homo sapiens; identical to SEQ ID NO: 256900
  chr7:984884-985004
  hypo

SEQ ID NO: 306832 - DNA, 182 bp, Homo sapiens; identical to SEQ ID NO: 256901
  chr7:985370-985552
  hypo

SEQ ID NO: 306833 - DNA, 110 bp, Homo sapiens; identical to SEQ ID NO: 211146
  chr7:986124-986234
  hypo

SEQ ID NO: 306834 - DNA, 186 bp, Homo sapiens; identical to SEQ ID NO: 211147
  chr7:986336-986522
  hypo

SEQ ID NO: 306835 - DNA, 98 bp, Homo sapiens; identical to SEQ ID NO: 211148
  chr7:986582-986680
  hypo

SEQ ID NO: 306836 - DNA, 233 bp, Homo sapiens; identical to SEQ ID NO: 256904
  chr7:987221-987454
  hypo

SEQ ID NO: 306837 - DNA, 42 bp, Homo sapiens; identical to SEQ ID NO: 256905
  chr7:988731-988773
  hypo

SEQ ID NO: 306838 - DNA, 317 bp, Homo sapiens; identical to SEQ ID NO: 256906
  chr7:996951-997268
  hypo

SEQ ID NO: 306839 - DNA, 351 bp, Homo sapiens; identical to SEQ ID NO: 284695
  chr7:1001818-1002169
  hypo

SEQ ID NO: 306840 - DNA, 804 bp, Homo sapiens; identical to SEQ ID NO: 284696
  chr7:1007358-1008162
  hypo

SEQ ID NO: 306841 - DNA, 57 bp, Homo sapiens; identical to SEQ ID NO: 256909
  chr7:1011971-1012028
  hypo

SEQ ID NO: 306842 - DNA, 45 bp, Homo sapiens; identical to SEQ ID NO: 256910
  chr7:1024995-1025040
  hypo

SEQ ID NO: 306843 - DNA, 91 bp, Homo sapiens; identical to SEQ ID NO: 256912
  chr7:1029387-1029478
  hypo

SEQ ID NO: 306844 - DNA, 37 bp, Homo sapiens; identical to SEQ ID NO: 256913
  chr7:1029508-1029545
  hypo

SEQ ID NO: 306845 - DNA, 88 bp, Homo sapiens; identical to SEQ ID NO: 211151
  chr7:1029912-1030000
  hypo

SEQ ID NO: 306846 - DNA, 206 bp, Homo sapiens; identical to SEQ ID NO: 256915
  chr7:1045397-1045603
  hypo

SEQ ID NO: 306847 - DNA, 212 bp, Homo sapiens; identical to SEQ ID NO: 211152
  chr7:1052679-1052891
  hypo

SEQ ID NO: 306848 - DNA, 440 bp, Homo sapiens; identical to SEQ ID NO: 256917
  chr7:1059664-1060104
  hypo

SEQ ID NO: 306849 - DNA, 402 bp, Homo sapiens; identical to SEQ ID NO: 256918
  chr7:1061547-1061949
  hypo

SEQ ID NO: 306850 - DNA, 135 bp, Homo sapiens
  chr7:1066392-1066527
  hypo
aggcgaggctcccgtagtgctcgagagggccttgcacgctccccgtggagggaacaaagctacgtggattttccagcgcgccgcccacttcaccaggcagcctctgggcttcatcctgctcgcgtgacaggtgtg

SEQ ID NO: 306851 - DNA, 332 bp, Homo sapiens; identical to SEQ ID NO: 284697
  chr7:1069637-1069969
  hypo

SEQ ID NO: 306852 - DNA, 48 bp, Homo sapiens; identical to SEQ ID NO: 211154
  chr7:1071763-1071811
  hypo

SEQ ID NO: 306853 - DNA, 42 bp, Homo sapiens; identical to SEQ ID NO: 211155
  chr7:1071841-1071883
  hypo

SEQ ID NO: 306854 - DNA, 189 bp, Homo sapiens; identical to SEQ ID NO: 256922
  chr7:1075882-1076071
  hypo

SEQ ID NO: 306855 - DNA, 338 bp, Homo sapiens; identical to SEQ ID NO: 284698
  chr7:1083896-1084234
  hypo

SEQ ID NO: 306856 - DNA, 38 bp, Homo sapiens; identical to SEQ ID NO: 211156
  chr7:1097390-1097428
  hypo

SEQ ID NO: 306857 - DNA, 242 bp, Homo sapiens; identical to SEQ ID NO: 256925
  chr7:1097706-1097948
  hypo

SEQ ID NO: 306858 - DNA, 188 bp, Homo sapiens; identical to SEQ ID NO: 256926
  chr7:1103862-1104050
  hypo

SEQ ID NO: 306859 - DNA, 44 bp, Homo sapiens; identical to SEQ ID NO: 211157
  chr7:1113683-1113727
  hypo

SEQ ID NO: 306860 - DNA, 177 bp, Homo sapiens; identical to SEQ ID NO: 211158
  chr7:1115545-1115722
  hypo

SEQ ID NO: 306861 - DNA, 178 bp, Homo sapiens; identical to SEQ ID NO: 211159
  chr7:1124308-1124486
  hypo

SEQ ID NO: 306862 - DNA, 127 bp, Homo sapiens; identical to SEQ ID NO: 211160
  chr7:1132022-1132149
  hypo

SEQ ID NO: 306863 - DNA, 149 bp, Homo sapiens; identical to SEQ ID NO: 256931
  chr7:1133748-1133897
  hypo

SEQ ID NO: 306864 - DNA, 148 bp, Homo sapiens; identical to SEQ ID NO: 256932
  chr7:1141332-1141480
  hypo

SEQ ID NO: 306865 - DNA, 444 bp, Homo sapiens; identical to SEQ ID NO: 256933
  chr7:1141910-1142354
  hypo

SEQ ID NO: 306866 - DNA, 320 bp, Homo sapiens; identical to SEQ ID NO: 256934
  chr7:1148237-1148557
  hypo

SEQ ID NO: 306867 - DNA, 150 bp, Homo sapiens; identical to SEQ ID NO: 256935
  chr7:1164416-1164566
  hypo

SEQ ID NO: 306868 - DNA, 93 bp, Homo sapiens; identical to SEQ ID NO: 256936
  chr7:1184625-1184718
  hypo

SEQ ID NO: 306869 - DNA, 463 bp, Homo sapiens; identical to SEQ ID NO: 256937
  chr7:1202644-1203107
  hypo

SEQ ID NO: 306870 - DNA, 46 bp, Homo sapiens; identical to SEQ ID NO: 256938
  chr7:1215557-1215603
  hypo

SEQ ID NO: 306871 - DNA, 48 bp, Homo sapiens; identical to SEQ ID NO: 256939
  chr7:1220822-1220870
  hypo

SEQ ID NO: 306872 - DNA, 77 bp, Homo sapiens; identical to SEQ ID NO: 211162
  chr7:1225056-1225133
  hypo

SEQ ID NO: 306873 - DNA, 68 bp, Homo sapiens; identical to SEQ ID NO: 211163
  chr7:1225226-1225294
  hypo

SEQ ID NO: 306874 - DNA, 86 bp, Homo sapiens; identical to SEQ ID NO: 256941
  chr7:1234856-1234942
  hypo

SEQ ID NO: 306875 - DNA, 71 bp, Homo sapiens; identical to SEQ ID NO: 211164
  chr7:1303352-1303423
  hypo

SEQ ID NO: 306876 - DNA, 137 bp, Homo sapiens
  chr7:1308150-1308287
  hypo
cctgggtgaaggcccgcgaccctggcaggaggtctcagagaagacggctcgccacaggccctcagaacaccctcctggtctacagaggggacgctgaggctgggagcgggaatgtggctggtccctgctgctccctc

SEQ ID NO: 306877 - DNA, 139 bp, Homo sapiens; identical to SEQ ID NO: 211166
  chr7:1315705-1315844
  hypo

SEQ ID NO: 306878 - DNA, 89 bp, Homo sapiens; identical to SEQ ID NO: 256946
  chr7:1318804-1318893
  hypo

SEQ ID NO: 306879 - DNA, 91 bp, Homo sapiens; identical to SEQ ID NO: 256947
  chr7:1324738-1324829
  hypo

SEQ ID NO: 306880 - DNA, 292 bp, Homo sapiens
  chr7:1328613-1328905
  hypo
cagacacagctcccgtcattcaatatggcaaagtgtggtggtgctggctccgcagaccccactgtggaggcgaaaggtaagaagtcagggttcgaggttggggttccgtgaacacagccccgagaccgggtgtctaccccaccgagaggaggggtctcgtcggggggcctcgctgagcctccgtgtcccacccggagccagggtgggcaccctcccgtccccgcagccccggaagatctggcaggtggcatgacacccacccgggggccctggtcaccggcgcatgggcagc

SEQ ID NO: 306881 - DNA, 199 bp, Homo sapiens; identical to SEQ ID NO: 211167
  chr7:1333680-1333879
  hypo

SEQ ID NO: 306882 - DNA, 236 bp, Homo sapiens; identical to SEQ ID NO: 211168
  chr7:1347154-1347390
  hypo

SEQ ID NO: 306883 - DNA, 406 bp, Homo sapiens
  chr7:1347435-1347841
  hypo
ccttatggagagtgactcggcaacatgcactctgcgccatggaaatgctcagcacctctgacccagtgacgccgcctctgggatgctcttccgggggaaattatccacaatatggggagagatttaagccaaagatattcatggcaacattatctttgatgaccaaaaaaaaattggaagcagctgaaatgtccaacaatcggggagttgtttagtagattacgacatacacactcggtggaatactaggcagtcattaaaagtgctaattgcgaagactgggtggttatgtacaaacacgcctacagcatgatgccgagggaagccgtgtatggaattaggggcacattaagggtgtaatgatgtaaaaaacatatgcagcccgagaacgcgtggatgaagagga

SEQ ID NO: 306884 - DNA, 39 bp, Homo sapiens; identical to SEQ ID NO: 211170
  chr7:1351444-1351483
  hypo

SEQ ID NO: 306885 - DNA, 411 bp, Homo sapiens
  chr7:1351606-1352017
  hypo
ggtggtgccggccccagagcgcatggccacagccagcctggtccacccgacattgaagcctccctgtcataattggcaattttgtcatatttattcacaacagatcgggctgtcaggagcttgtgggggctctccggaggcccgccgtgaaatcggtttgaaatggcgtgtcaggtttttctctccctgctgaagcgaccatctggctgatagactcggcgctgggatgatacgctgacccgcggaatcacggctaagccgctcccggggggccacatgccggctgggcagcccctcgtgccacacctgacctccctgtgggttctgggagccaggccacagggcaaggcctgggctgggcagggacaggggtgggcaccaggctgggagctccccgggtaccccactggc

SEQ ID NO: 306886 - DNA, 54 bp, Homo sapiens; identical to SEQ ID NO: 256952
  chr7:1354098-1354152
  hypo

SEQ ID NO: 306887 - DNA, 154 bp, Homo sapiens; identical to SEQ ID NO: 256953
  chr7:1357986-1358140
  hypo

SEQ ID NO: 306888 - DNA, 265 bp, Homo sapiens; identical to SEQ ID NO: 256954
  chr7:1358498-1358763
  hypo

SEQ ID NO: 306889 - DNA, 119 bp, Homo sapiens
  chr7:1360167-1360286
  hypo
gaccacgttcatgtcgtggtgggagcctgaggctctgggggggtgggggaggtgcctgagagggtgaacgtccttgcacacgtgcttgggtgtgctcacgcctgagcgtgtgttcactg

SEQ ID NO: 306890 - DNA, 35 bp, Homo sapiens
  chr7:1365511-1365546
  hypo
tgtacgtggctgctgctctccgctcccctgggctg

SEQ ID NO: 306891 - DNA, 442 bp, Homo sapiens
  chr7:1370035-1370477
  hypo
catgtctcaaatcctccatgcgtgatggctcaggtgcgtcttccacgcagatcactctggcagggagcgcggatggagacccgaggctggggcctgctggctttgcccctctacgcgaacagaatggcctctgccctgcaggaatcttgagtccaggagaggagagtttccctggaggtggaggtcaggcccggcagtcagcaggccaagctccttcgggccagggcaagccggagggcttcccagagcgggcacagtggacagctgagcaggccagactctgacatgaggtctggacaggcccttccgcccttccggatgccagtccccctgcttgtctgaccactggcccgcctgcccacggggcggctgagatgctggcgtgtgcgtgcgcatgtgcacgtgtgtttgtgtgcgcgtggggctttctgacagccgataa

SEQ ID NO: 306892 - DNA, 39 bp, Homo sapiens; identical to SEQ ID NO: 200784
  chr7:1408440-1408479
  hypo

SEQ ID NO: 306893 - DNA, 144 bp, Homo sapiens; identical to SEQ ID NO: 211174
  chr7:1451100-1451244
  hypo

SEQ ID NO: 306894 - DNA, 121 bp, Homo sapiens; identical to SEQ ID NO: 211175
  chr7:1460652-1460773
  hypo

SEQ ID NO: 306895 - DNA, 51 bp, Homo sapiens; identical to SEQ ID NO: 211176
  chr7:1460958-1461009
  hypo

SEQ ID NO: 306896 - DNA, 587 bp, Homo sapiens; identical to SEQ ID NO: 211177
  chr7:1473773-1474360
  hypo

SEQ ID NO: 306897 - DNA, 319 bp, Homo sapiens; identical to SEQ ID NO: 211178
  chr7:1475085-1475404
  hypo

SEQ ID NO: 306898 - DNA, 1800 bp, Homo sapiens; identical to SEQ ID NO: 211179
  chr7:1476253-1478053
  hypo

SEQ ID NO: 306899 - DNA, 929 bp, Homo sapiens; identical to SEQ ID NO: 256963
  chr7:1478541-1479470
  hypo

SEQ ID NO: 306900 - DNA, 532 bp, Homo sapiens; identical to SEQ ID NO: 256964
  chr7:1479734-1480266
  hypo

SEQ ID NO: 306901 - DNA, 301 bp, Homo sapiens; identical to SEQ ID NO: 256965
  chr7:1480645-1480946
  hypo

SEQ ID NO: 306902 - DNA, 515 bp, Homo sapiens; identical to SEQ ID NO: 256966
  chr7:1488212-1488727
  hypo

SEQ ID NO: 306903 - DNA, 821 bp, Homo sapiens; identical to SEQ ID NO: 211182
  chr7:1491121-1491942
  hypo

SEQ ID NO: 306904 - DNA, 347 bp, Homo sapiens; identical to SEQ ID NO: 256968
  chr7:1492393-1492740
  hypo

SEQ ID NO: 306905 - DNA, 95 bp, Homo sapiens; identical to SEQ ID NO: 256969
  chr7:1493403-1493498
  hypo

SEQ ID NO: 306906 - DNA, 95 bp, Homo sapiens; identical to SEQ ID NO: 256970
  chr7:1496414-1496509
  hypo

SEQ ID NO: 306907 - DNA, 1008 bp, Homo sapiens; identical to SEQ ID NO: 284719
  chr7:1498585-1499593
  hypo

SEQ ID NO: 306908 - DNA, 221 bp, Homo sapiens
  chr7:1505248-1505469
  hypo
cacaggtgaggaatcaagctcagaaaagggcagcgatttgtccaaggccagtggggagcaggcgttagaaccctggggtcggtcctgcctcgtgtcacccacctgcccaggcctgcagccacaggctatggcccccgctgacaggactctggatggggcccccggggtcctggctggaatgctgactagggatgaaggaggcctaaagggtgtttgggatc

SEQ ID NO: 306909 - DNA, 67 bp, Homo sapiens
  chr7:1505499-1505566
  hypo
gaggcccctgggccctgtgtccccaaggactctatgttccccggagctggggcgccagcagtagcct

SEQ ID NO: 306910 - DNA, 220 bp, Homo sapiens; identical to SEQ ID NO: 256972
  chr7:1514362-1514582
  hypo

SEQ ID NO: 306911 - DNA, 280 bp, Homo sapiens; identical to SEQ ID NO: 211184
  chr7:1519129-1519409
  hypo

SEQ ID NO: 306912 - DNA, 236 bp, Homo sapiens; identical to SEQ ID NO: 256974
  chr7:1520865-1521101
  hypo

SEQ ID NO: 306913 - DNA, 244 bp, Homo sapiens; identical to SEQ ID NO: 256975
  chr7:1524903-1525147
  hypo

SEQ ID NO: 306914 - DNA, 44 bp, Homo sapiens; identical to SEQ ID NO: 211185
  chr7:1533021-1533065
  hypo

SEQ ID NO: 306915 - DNA, 550 bp, Homo sapiens; identical to SEQ ID NO: 211186
  chr7:1533908-1534458
  hypo

SEQ ID NO: 306916 - DNA, 144 bp, Homo sapiens; identical to SEQ ID NO: 211187
  chr7:1534752-1534896
  hypo

SEQ ID NO: 306917 - DNA, 213 bp, Homo sapiens; identical to SEQ ID NO: 256979
  chr7:1535457-1535670
  hypo

SEQ ID NO: 306918 - DNA, 68 bp, Homo sapiens; identical to SEQ ID NO: 211189
  chr7:1537961-1538029
  hypo

SEQ ID NO: 306919 - DNA, 34 bp, Homo sapiens; identical to SEQ ID NO: 256982
  chr7:1553100-1553134
  hypo

SEQ ID NO: 306920 - DNA, 68 bp, Homo sapiens; identical to SEQ ID NO: 256983
  chr7:1554245-1554313
  hypo

SEQ ID NO: 306921 - DNA, 158 bp, Homo sapiens; identical to SEQ ID NO: 256984
  chr7:1556125-1556283
  hypo

SEQ ID NO: 306922 - DNA, 135 bp, Homo sapiens; identical to SEQ ID NO: 256985
  chr7:1560607-1560742
  hypo

SEQ ID NO: 306923 - DNA, 262 bp, Homo sapiens; identical to SEQ ID NO: 256986
  chr7:1563390-1563652
  hypo

SEQ ID NO: 306924 - DNA, 351 bp, Homo sapiens; identical to SEQ ID NO: 256987
  chr7:1574077-1574428
  hypo

SEQ ID NO: 306925 - DNA, 210 bp, Homo sapiens; identical to SEQ ID NO: 211192
  chr7:1575803-1576013
  hypo

SEQ ID NO: 306926 - DNA, 1040 bp, Homo sapiens; identical to SEQ ID NO: 155292
  chr7:1578254-1579294
  hypo

SEQ ID NO: 306927 - DNA, 55 bp, Homo sapiens; identical to SEQ ID NO: 211194
  chr7:1579574-1579629
  hypo

SEQ ID NO: 306928 - DNA, 293 bp, Homo sapiens; identical to SEQ ID NO: 256991
  chr7:1581944-1582237
  hypo

SEQ ID NO: 306929 - DNA, 63 bp, Homo sapiens; identical to SEQ ID NO: 211195
  chr7:1582574-1582637
  hypo

SEQ ID NO: 306930 - DNA, 425 bp, Homo sapiens; identical to SEQ ID NO: 211196
  chr7:1583986-1584411
  hypo

SEQ ID NO: 306931 - DNA, 383 bp, Homo sapiens; identical to SEQ ID NO: 256994
  chr7:1585839-1586222
  hypo

SEQ ID NO: 306932 - DNA, 590 bp, Homo sapiens; identical to SEQ ID NO: 256995
  chr7:1589281-1589871
  hypo

SEQ ID NO: 306933 - DNA, 57 bp, Homo sapiens; identical to SEQ ID NO: 211198
  chr7:1590461-1590518
  hypo

SEQ ID NO: 306934 - DNA, 838 bp, Homo sapiens
  chr7:1599700-1600538
  hypo
cactgtctcagctgacctggcgacctggcaggtcataggggggcgcttgcctcagcttctgactctcgagcaattctgttctgcctgagcccatcagccccagatcccagggtggggccgtcccaaggatctgctctcttcctcccataggtctcccgtcctgtcctccggggccaagcccccacctccctgctcctgtccctggtccctctgttgcccccatccccagaaagtcacccagggcctgcctatacttgccttcacctgagggagctgccagccctgggcgtgtacgggtcgggggcaccctttcatctggagccaggatggggggtgctcgtctggcctggacttgccaggctggctggagaccctgtttggtgtccaggtgccgtcctggggcccagcctctgaggtggcggtgaggcttaggggttggcggactgtgattctccgaatttcaaggtatgttttttttttcgaggagccccccaccccattgaagtgcaggggctcagcctggacaccatacccctctggtatgcacccccttcccccacacacacactctcgcactcccacacccacgcagctcacctccctggtggcgctcagcctgtcaggcaggttggctgcaggtctctgggcctgaggggggggccaaggcggggtgggcctgaagctcggcccccggcctcctggcctctgctgccgcctcctcacagcggcgggcagcctgggtccctgagagatgattgctcctgagcagtggcctctccccagacccaggaactcctcccagccccaccccctccccacccagccagccctacctgcc

SEQ ID NO: 306935 - DNA, 297 bp, Homo sapiens; identical to SEQ ID NO: 211199
  chr7:1615093-1615390
  hypo

SEQ ID NO: 306936 - DNA, 134 bp, Homo sapiens
  chr7:1615444-1615578
  hypo
ctgtgtgtcacggtccctggatgaacgtttgtggaactggattgaattaaacaagacgtgcaaagcaagtggttcacgaggtagtgtgggggtgtagggatggggactgacccgggaggcaggacacagcccaa

SEQ ID NO: 306937 - DNA, 144 bp, Homo sapiens
  chr7:1620359-1620503
  hypo
ttcagaatcgggcccggggagacagaagctggaatagactgtcaaggccataacagaagcgcagggcctgtgtgtgccggtgccgggtcctctgcagttgctgttattgggcctcagcctcagctctgaccttcctggtagccc

SEQ ID NO: 306938 - DNA, 56 bp, Homo sapiens
  chr7:1620539-1620595
  hypo
ctgactccctgtcctgggcaaggagcctcccggctgctccgcgaaagcgccgtgtt

SEQ ID NO: 306939 - DNA, 124 bp, Homo sapiens; identical to SEQ ID NO: 257004
  chr7:1625535-1625659
  hypo

SEQ ID NO: 306940 - DNA, 254 bp, Homo sapiens
  chr7:1627150-1627404
  hypo
tagcccaggtgccccggaggctgctgagagggttgagagtgcagagacgaggggcccagggaagtcttggattctctcgccatcttcaatgtcggagcccagacggggcaaggcgaggaggagcccggggcgaagacgccacccacattcctccttcccgcaggcttcttctccttctagcccttccaggagagaaaccatcccacaagtccagagtagtggcgtccccggggccatgtctcctgagcaaacac

SEQ ID NO: 306941 - DNA, 123 bp, Homo sapiens
  chr7:1627434-1627557
  hypo
atctaggtcaatccctttgcagaacggtgaaggaatctgaagcccagagagggaaaacaatgcctcctgggtcacacagcccatcaggggcagggcagggacgaacggcgagaaaaggaccag

SEQ ID NO: 306942 - DNA, 435 bp, Homo sapiens
  chr7:1641978-1642413
  hypo
ggcccaggctgaagtatcatgatgaagagcttggaccgagggcagttaaggtgtgtgagtattcagatcccccacgtgcccttctctggaaggtgccagcgacctgtcctctctgggcctctgtcttctcctctgtggaatgggaatgatggcgtccgcacctcatagggctgctggaaaatgggtctgggtctcggctggaatttcagccagcgccgaggaccagaggccctggttcctgtccacgtggcctgggacccccgcggccccgcacctgggctccgggggcaagtgtgttcgctttgaggacccagccttggaggtcagatggcatccgttatgggttaaattttgtccccctaaattcatatgttgaagtcttaacccacagggcctcagaatgggatggtatttggagcccgggccttgaaagag

SEQ ID NO: 306943 - DNA, 76 bp, Homo sapiens; identical to SEQ ID NO: 211201
  chr7:1650398-1650474
  hypo

SEQ ID NO: 306944 - DNA, 179 bp, Homo sapiens; identical to SEQ ID NO: 211202
  chr7:1659734-1659913
  hypo

SEQ ID NO: 306945 - DNA, 350 bp, Homo sapiens; identical to SEQ ID NO: 257010
  chr7:1660350-1660700
  hypo

SEQ ID NO: 306946 - DNA, 72 bp, Homo sapiens; identical to SEQ ID NO: 211203
  chr7:1681117-1681189
  hypo

SEQ ID NO: 306947 - DNA, 38 bp, Homo sapiens; identical to SEQ ID NO: 211204
  chr7:1681239-1681277
  hypo

SEQ ID NO: 306948 - DNA, 203 bp, Homo sapiens; identical to SEQ ID NO: 257013
  chr7:1692786-1692989
  hypo

SEQ ID NO: 306949 - DNA, 325 bp, Homo sapiens
  chr7:1694555-1694880
  hypo
catgcagggggagcgaagggggtgcccagcctcgccccgcccagcgcacccctgcagcagcccgggagggcaggccgtggctcctgggaacacggcgcccagctgcaatccacattgctgctagtgaatatggacaattcagagacatgaaataaggcagacagagaaaaagcatcggtgactctgccaggctacatatgtgtgtgcgtgtctgcatatatatacacacacgtgtatacgcacacacagagccacacatcactcaacgacagggacacgttctgagaaatacatggttccgtgattttgtcatcgcgcgtacatc

SEQ ID NO: 306950 - DNA, 233 bp, Homo sapiens; identical to SEQ ID NO: 284724
  chr7:1705153-1705386
  hypo

SEQ ID NO: 306951 - DNA, 502 bp, Homo sapiens; identical to SEQ ID NO: 284725
  chr7:1705693-1706195
  hypo

SEQ ID NO: 306952 - DNA, 206 bp, Homo sapiens; identical to SEQ ID NO: 284726
  chr7:1706733-1706939
  hypo

SEQ ID NO: 306953 - DNA, 310 bp, Homo sapiens; identical to SEQ ID NO: 284727
  chr7:1707309-1707619
  hypo

SEQ ID NO: 306954 - DNA, 154 bp, Homo sapiens; identical to SEQ ID NO: 200790
  chr7:1708906-1709060
  hypo

SEQ ID NO: 306955 - DNA, 146 bp, Homo sapiens; identical to SEQ ID NO: 284729
  chr7:1710370-1710516
  hypo

SEQ ID NO: 306956 - DNA, 465 bp, Homo sapiens; identical to SEQ ID NO: 257015
  chr7:1714478-1714943
  hypo

SEQ ID NO: 306957 - DNA, 226 bp, Homo sapiens; identical to SEQ ID NO: 211208
  chr7:1718471-1718697
  hypo

SEQ ID NO: 306958 - DNA, 61 bp, Homo sapiens
  chr7:1719696-1719757
  hypo
cattcactgattcattcattcattcacctacccagtggacattctccgatgctgggctccg

SEQ ID NO: 306959 - DNA, 32 bp, Homo sapiens
  chr7:1733134-1733166
  hypo
tgtgtggtgtggggcgtgacccacttcctggt

SEQ ID NO: 306960 - DNA, 39 bp, Homo sapiens
  chr7:1735052-1735091
  hypo
gcagactcagcccgccaagcccatgaaccccactttgaa

SEQ ID NO: 306961 - DNA, 147 bp, Homo sapiens
  chr7:1778728-1778875
  hypo
tggagattgtgtctggaggccggattctcctccacgcgtggaggactggacgccctcagggctgcgcggggccgcaggaccgccttggtggttagcgaggctccctctggctgtggagggagaatggattgtgggtgccaggagacc

SEQ ID NO: 306962 - DNA, 214 bp, Homo sapiens
  chr7:1778914-1779128
  hypo
tgggcggtcgtggtgggagtggagtgattccagatgcttctgcaggtggattagatgctgctggagttggaccaggtgtggggggaggaaagagaggagtccagaatgcggcgtcaacttttggtgtaggaatgtggcggatggtgaggcagggagatgccagcggggacgggaacttggagcagccacttagacgcaacgggggagaatcttc

SEQ ID NO: 306963 - DNA, 294 bp, Homo sapiens; identical to SEQ ID NO: 211209
  chr7:1783932-1784226
  hypo

SEQ ID NO: 306964 - DNA, 233 bp, Homo sapiens; identical to SEQ ID NO: 211210
  chr7:1784457-1784690
  hypo

SEQ ID NO: 306965 - DNA, 385 bp, Homo sapiens
  chr7:1784927-1785312
  hypo
gggccagggccgccgcggccaccgcagcatcctcagcaaactgcagtcagtctgcaccgaggactcgtacgcggctgaggtggtcgggcccccacgtccagcatccgggcgctcacagccgggccgctccccgccgcccccgcctccgccggagcccagtgacatgccctgtgccgatgatgagtgcttctccggggacggcaccacgccactggtggccctgcccacgctggccacgcaggccgaggcccgccccctcatcaaggtcaagcagctcactcagaactcggccaccatcaccgtccagctgcccagcccgttccaccggatgtacaccctggagcatttcaacaacagcaaggcctccaccgtgtccaggctgacc

SEQ ID NO: 306966 - DNA, 463 bp, Homo sapiens; identical to SEQ ID NO: 284730
  chr7:1785930-1786393
  hypo

SEQ ID NO: 306967 - DNA, 103 bp, Homo sapiens; identical to SEQ ID NO: 284731
  chr7:1786899-1787002
  hypo

SEQ ID NO: 306968 - DNA, 187 bp, Homo sapiens; identical to SEQ ID NO: 257025
  chr7:1794935-1795122
  hypo

SEQ ID NO: 306969 - DNA, 188 bp, Homo sapiens
  chr7:1800912-1801100
  hypo
cggatggatcgctggcattctgcacagcacgggtgagctgcaccacaccatgccatgccgcagaggcctcacctggaagatttccacaggccctatttttaatcactaagaaacccagactgctcctaatagaaaataatatataatttgctttttgtttttcgatatctttttttttcttttggaga

SEQ ID NO: 306970 - DNA, 142 bp, Homo sapiens; identical to SEQ ID NO: 257027
  chr7:1801400-1801542
  hypo

SEQ ID NO: 306971 - DNA, 143 bp, Homo sapiens; identical to SEQ ID NO: 257028
  chr7:1827531-1827674
  hypo

SEQ ID NO: 306972 - DNA, 154 bp, Homo sapiens; identical to SEQ ID NO: 257029
  chr7:1846092-1846246
  hypo

SEQ ID NO: 306973 - DNA, 75 bp, Homo sapiens; identical to SEQ ID NO: 211211
  chr7:1847553-1847628
  hypo

SEQ ID NO: 306974 - DNA, 280 bp, Homo sapiens
  chr7:1849796-1850076
  hypo
ccttccccacgggggtgacacgccagagccaggggcgcccggggtggctgggcccaaccgagagggacaagtggaaaatccagcgggatccccgagaccaaagccgactgtggaaggtcccattcaccgttcgcattggtcacacgtcgacacgatgccatgttggatagattgggttagaggtgtatttgctaacattaatttcactggcttctgcttactatttaacgtggctactaaaaaatgtcaagttacgtatgcggttcgcgtggcgtctcta

SEQ ID NO: 306975 - DNA, 363 bp, Homo sapiens; identical to SEQ ID NO: 211212
  chr7:1855556-1855919
  hypo

SEQ ID NO: 306976 - DNA, 539 bp, Homo sapiens; identical to SEQ ID NO: 257033
  chr7:1856753-1857292
  hypo

SEQ ID NO: 306977 - DNA, 283 bp, Homo sapiens; identical to SEQ ID NO: 257034
  chr7:1864266-1864549
  hypo

SEQ ID NO: 306978 - DNA, 289 bp, Homo sapiens; identical to SEQ ID NO: 211213
  chr7:1865909-1866198
  hypo

SEQ ID NO: 306979 - DNA, 122 bp, Homo sapiens; identical to SEQ ID NO: 211214
  chr7:1885181-1885303
  hypo

SEQ ID NO: 306980 - DNA, 72 bp, Homo sapiens
  chr7:1888787-1888859
  hypo
acacacacacgtacgcacatgcggggtcagggagctgatgctgtgcgaggctgtcgagggcttcttcactca

SEQ ID NO: 306981 - DNA, 166 bp, Homo sapiens
  chr7:1888889-1889055
  hypo
ggcccctcatccatgtcctcgttattggcagcacaaatctccaagtgaggaggggccatgtttaccagccgtccttccagcccacgtctcctacggttccttattttcacaggtactgttttgcagacacagagcccccaagcagcccacacgtcttagccgggtg

SEQ ID NO: 306982 - DNA, 136 bp, Homo sapiens; identical to SEQ ID NO: 257038
  chr7:1906702-1906838
  hypo

SEQ ID NO: 306983 - DNA, 190 bp, Homo sapiens; identical to SEQ ID NO: 211215
  chr7:1913834-1914024
  hypo

SEQ ID NO: 306984 - DNA, 209 bp, Homo sapiens; identical to SEQ ID NO: 211216
  chr7:1931660-1931869
  hypo

SEQ ID NO: 306985 - DNA, 234 bp, Homo sapiens; identical to SEQ ID NO: 211217
  chr7:1932169-1932403
  hypo

SEQ ID NO: 306986 - DNA, 235 bp, Homo sapiens; identical to SEQ ID NO: 257042
  chr7:1937725-1937960
  hypo

SEQ ID NO: 306987 - DNA, 79 bp, Homo sapiens; identical to SEQ ID NO: 211218
  chr7:1946383-1946462
  hypo

SEQ ID NO: 306988 - DNA, 152 bp, Homo sapiens; identical to SEQ ID NO: 211219
  chr7:1950266-1950418
  hypo

SEQ ID NO: 306989 - DNA, 180 bp, Homo sapiens; identical to SEQ ID NO: 211220
  chr7:1950693-1950873
  hypo

SEQ ID NO: 306990 - DNA, 78 bp, Homo sapiens; identical to SEQ ID NO: 257046
  chr7:1961803-1961881
  hypo

SEQ ID NO: 306991 - DNA, 42 bp, Homo sapiens; identical to SEQ ID NO: 211221
  chr7:1962511-1962553
  hypo

SEQ ID NO: 306992 - DNA, 147 bp, Homo sapiens; identical to SEQ ID NO: 211222
  chr7:1969179-1969326
  hypo

SEQ ID NO: 306993 - DNA, 65 bp, Homo sapiens
  chr7:1970777-1970842
  hypo
acccccaactcctcaccccacgcacggtcacaggagcgagggcgcgtcgtggggtccacgtcaag

SEQ ID NO: 306994 - DNA, 109 bp, Homo sapiens
  chr7:1970921-1971030
  hypo
acgtcaagggtctgctgacactgcgggcacacccttgctcctcatctggagaatggggaggggacagccctctctggcagcaagcggcgtgacctggacttttctcttt

SEQ ID NO: 306995 - DNA, 118 bp, Homo sapiens; identical to SEQ ID NO: 211223
  chr7:1995853-1995971
  hypo

SEQ ID NO: 306996 - DNA, 303 bp, Homo sapiens; identical to SEQ ID NO: 211224
  chr7:1997041-1997344
  hypo

SEQ ID NO: 306997 - DNA, 148 bp, Homo sapiens; identical to SEQ ID NO: 257052
  chr7:1997548-1997696
  hypo

SEQ ID NO: 306998 - DNA, 107 bp, Homo sapiens; identical to SEQ ID NO: 257053
  chr7:1999009-1999116
  hypo

SEQ ID NO: 306999 - DNA, 196 bp, Homo sapiens; identical to SEQ ID NO: 257054
  chr7:2004876-2005072
  hypo

SEQ ID NO: 307000 - DNA, 181 bp, Homo sapiens; identical to SEQ ID NO: 211225
  chr7:2006411-2006592
  hypo

SEQ ID NO: 307001 - DNA, 223 bp, Homo sapiens; identical to SEQ ID NO: 257056
  chr7:2007846-2008069
  hypo

SEQ ID NO: 307002 - DNA, 151 bp, Homo sapiens; identical to SEQ ID NO: 284732
  chr7:2018616-2018767
  hypo

SEQ ID NO: 307003 - DNA, 335 bp, Homo sapiens; identical to SEQ ID NO: 257057
  chr7:2019124-2019459
  hypo

SEQ ID NO: 307004 - DNA, 123 bp, Homo sapiens; identical to SEQ ID NO: 211226
  chr7:2024689-2024812
  hypo

SEQ ID NO: 307005 - DNA, 393 bp, Homo sapiens
  chr7:2024842-2025235
  hypo
ggcctcctccaaccccttgaggccggaatgaaatgaaaactggaggaggcgaccgttcctcccttgcctgcctggtggcctgagcggggcagctcccgttttccgcccaggactggggctttcaccacaggctccgctggttctcaggcctgcagagcggactgggcacagcacaggctcttccaggtctgctgtgcacagatgcagaccacgggatcctggctccatggccaagagcgagggcctcacagtcactctctcgggatagaccagtctaccgcacctggtgctctagggagcctaacatgcagctcgatctgctctccccacctgatactacctttagatggtgtgtctgtgtcttcggctctcaacagcgaagccgccatcctc

SEQ ID NO: 307006 - DNA, 73 bp, Homo sapiens; identical to SEQ ID NO: 211228
  chr7:2027225-2027298
  hypo

SEQ ID NO: 307007 - DNA, 100 bp, Homo sapiens; identical to SEQ ID NO: 257060
  chr7:2034835-2034935
  hypo

SEQ ID NO: 307008 - DNA, 217 bp, Homo sapiens; identical to SEQ ID NO: 257061
  chr7:2035958-2036175
  hypo

SEQ ID NO: 307009 - DNA, 96 bp, Homo sapiens; identical to SEQ ID NO: 211229
  chr7:2040770-2040866
  hypo

SEQ ID NO: 307010 - DNA, 569 bp, Homo sapiens; identical to SEQ ID NO: 211230
  chr7:2041377-2041946
  hypo

SEQ ID NO: 307011 - DNA, 72 bp, Homo sapiens; identical to SEQ ID NO: 257065
  chr7:2046906-2046978
  hypo

SEQ ID NO: 307012 - DNA, 300 bp, Homo sapiens; identical to SEQ ID NO: 257066
  chr7:2053261-2053561
  hypo

SEQ ID NO: 307013 - DNA, 36 bp, Homo sapiens
  chr7:2056518-2056554
  hypo
ccattgacttttatcgtttcaagccagttaccggag

SEQ ID NO: 307014 - DNA, 118 bp, Homo sapiens; identical to SEQ ID NO: 257068
  chr7:2056937-2057055
  hypo

SEQ ID NO: 307015 - DNA, 42 bp, Homo sapiens; identical to SEQ ID NO: 257069
  chr7:2067734-2067776
  hypo

SEQ ID NO: 307016 - DNA, 175 bp, Homo sapiens; identical to SEQ ID NO: 257070
  chr7:2068933-2069108
  hypo

SEQ ID NO: 307017 - DNA, 134 bp, Homo sapiens; identical to SEQ ID NO: 211231
  chr7:2069775-2069909
  hypo

SEQ ID NO: 307018 - DNA, 165 bp, Homo sapiens; identical to SEQ ID NO: 211232
  chr7:2070136-2070301
  hypo

SEQ ID NO: 307019 - DNA, 266 bp, Homo sapiens; identical to SEQ ID NO: 257073
  chr7:2071761-2072027
  hypo

SEQ ID NO: 307020 - DNA, 144 bp, Homo sapiens; identical to SEQ ID NO: 257074
  chr7:2076008-2076152
  hypo

SEQ ID NO: 307021 - DNA, 105 bp, Homo sapiens; identical to SEQ ID NO: 257075
  chr7:2083091-2083196
  hypo

SEQ ID NO: 307022 - DNA, 203 bp, Homo sapiens; identical to SEQ ID NO: 257076
  chr7:2091644-2091847
  hypo

SEQ ID NO: 307023 - DNA, 31 bp, Homo sapiens; identical to SEQ ID NO: 257077
  chr7:2092074-2092105
  hypo

SEQ ID NO: 307024 - DNA, 640 bp, Homo sapiens; identical to SEQ ID NO: 72943
  chr7:2094462-2095102
  hypo

SEQ ID NO: 307025 - DNA, 47 bp, Homo sapiens; identical to SEQ ID NO: 211235
  chr7:2099514-2099561
  hypo

SEQ ID NO: 307026 - DNA, 169 bp, Homo sapiens; identical to SEQ ID NO: 257080
  chr7:2100209-2100378
  hypo

SEQ ID NO: 307027 - DNA, 312 bp, Homo sapiens; identical to SEQ ID NO: 257081
  chr7:2102522-2102834
  hypo

SEQ ID NO: 307028 - DNA, 46 bp, Homo sapiens; identical to SEQ ID NO: 211236
  chr7:2105354-2105400
  hypo

SEQ ID NO: 307029 - DNA, 239 bp, Homo sapiens; identical to SEQ ID NO: 257083
  chr7:2108164-2108403
  hypo

SEQ ID NO: 307030 - DNA, 94 bp, Homo sapiens
  chr7:2110060-2110154
  hypo
agccaggagagatgagaggccgcccgagaggaggagagtcaggactccacagtgaggtacgagagctctcccaggaaaggacacagccaggaaa

SEQ ID NO: 307031 - DNA, 404 bp, Homo sapiens; identical to SEQ ID NO: 257086
  chr7:2113542-2113946
  hypo

SEQ ID NO: 307032 - DNA, 137 bp, Homo sapiens; identical to SEQ ID NO: 257088
  chr7:2122563-2122700
  hypo

SEQ ID NO: 307033 - DNA, 47 bp, Homo sapiens; identical to SEQ ID NO: 257089
  chr7:2130636-2130683
  hypo

SEQ ID NO: 307034 - DNA, 79 bp, Homo sapiens; identical to SEQ ID NO: 257090
  chr7:2138295-2138374
  hypo

SEQ ID NO: 307035 - DNA, 158 bp, Homo sapiens; identical to SEQ ID NO: 257091
  chr7:2147799-2147957
  hypo

SEQ ID NO: 307036 - DNA, 49 bp, Homo sapiens; identical to SEQ ID NO: 211238
  chr7:2148951-2149000
  hypo

SEQ ID NO: 307037 - DNA, 195 bp, Homo sapiens; identical to SEQ ID NO: 211239
  chr7:2158523-2158718
  hypo

SEQ ID NO: 307038 - DNA, 170 bp, Homo sapiens; identical to SEQ ID NO: 211240
  chr7:2160716-2160886
  hypo

SEQ ID NO: 307039 - DNA, 163 bp, Homo sapiens; identical to SEQ ID NO: 211241
  chr7:2162503-2162666
  hypo

SEQ ID NO: 307040 - DNA, 328 bp, Homo sapiens; identical to SEQ ID NO: 211242
  chr7:2162966-2163294
  hypo

SEQ ID NO: 307041 - DNA, 382 bp, Homo sapiens
  chr7:2163467-2163849
  hypo
aagccagaaataaataaataaagctgccaattagccagcgcccttttccgctctggcaagggctttttagcttctccaaatacaccagagtcctgcaaggctgcacacaagcaaaggcagcccaggcagcaaggggcgggggcttaggccccgggggcaagaactctgcttcctgggaagccccctgtagccaggtcaggctcctcctctagacggggaagccgggcaaacacctccaggagcaaggcgaaggctctcagtacccccagtacagatgcagccgggagcccccagctctccacaggtcagaggccacgccacgcccctgctcaactcgcagagcagcaaggcaggaggggcaggccatcgggcagcggtgcag

SEQ ID NO: 307042 - DNA, 375 bp, Homo sapiens; identical to SEQ ID NO: 257098
  chr7:2169012-2169387
  hypo

SEQ ID NO: 307043 - DNA, 158 bp, Homo sapiens; identical to SEQ ID NO: 257099
  chr7:2183890-2184048
  hypo

SEQ ID NO: 307044 - DNA, 202 bp, Homo sapiens; identical to SEQ ID NO: 200791
  chr7:2195725-2195927
  hypo

SEQ ID NO: 307045 - DNA, 416 bp, Homo sapiens; identical to SEQ ID NO: 211246
  chr7:2196794-2197210
  hypo

SEQ ID NO: 307046 - DNA, 325 bp, Homo sapiens; identical to SEQ ID NO: 211247
  chr7:2208345-2208670
  hypo

SEQ ID NO: 307047 - DNA, 112 bp, Homo sapiens; identical to SEQ ID NO: 211248
  chr7:2208844-2208956
  hypo

SEQ ID NO: 307048 - DNA, 693 bp, Homo sapiens; identical to SEQ ID NO: 257103
  chr7:2211989-2212682
  hypo

SEQ ID NO: 307049 - DNA, 240 bp, Homo sapiens; identical to SEQ ID NO: 211250
  chr7:2222236-2222476
  hypo

SEQ ID NO: 307050 - DNA, 47 bp, Homo sapiens; identical to SEQ ID NO: 211251
  chr7:2232844-2232891
  hypo

SEQ ID NO: 307051 - DNA, 236 bp, Homo sapiens; identical to SEQ ID NO: 211252
  chr7:2233056-2233292
  hypo

SEQ ID NO: 307052 - DNA, 121 bp, Homo sapiens; identical to SEQ ID NO: 211253
  chr7:2233470-2233591
  hypo

SEQ ID NO: 307053 - DNA, 184 bp, Homo sapiens; identical to SEQ ID NO: 257106
  chr7:2236061-2236245
  hypo

SEQ ID NO: 307054 - DNA, 137 bp, Homo sapiens; identical to SEQ ID NO: 257107
  chr7:2237100-2237237
  hypo

SEQ ID NO: 307055 - DNA, 150 bp, Homo sapiens; identical to SEQ ID NO: 211254
  chr7:2237968-2238118
  hypo

SEQ ID NO: 307056 - DNA, 110 bp, Homo sapiens; identical to SEQ ID NO: 257109
  chr7:2241774-2241884
  hypo

SEQ ID NO: 307057 - DNA, 274 bp, Homo sapiens; identical to SEQ ID NO: 211255
  chr7:2255763-2256037
  hypo

SEQ ID NO: 307058 - DNA, 100 bp, Homo sapiens; identical to SEQ ID NO: 257111
  chr7:2256931-2257031
  hypo

SEQ ID NO: 307059 - DNA, 72 bp, Homo sapiens; identical to SEQ ID NO: 211256
  chr7:2259945-2260017
  hypo

SEQ ID NO: 307060 - DNA, 92 bp, Homo sapiens; identical to SEQ ID NO: 211257
  chr7:2262278-2262370
  hypo

SEQ ID NO: 307061 - DNA, 509 bp, Homo sapiens; identical to SEQ ID NO: 211258
  chr7:2263998-2264507
  hypo

SEQ ID NO: 307062 - DNA, 49 bp, Homo sapiens; identical to SEQ ID NO: 211259
  chr7:2264962-2265011
  hypo

SEQ ID NO: 307063 - DNA, 289 bp, Homo sapiens; identical to SEQ ID NO: 211260
  chr7:2265241-2265530
  hypo

SEQ ID NO: 307064 - DNA, 457 bp, Homo sapiens; identical to SEQ ID NO: 257116
  chr7:2292991-2293448
  hypo

SEQ ID NO: 307065 - DNA, 194 bp, Homo sapiens; identical to SEQ ID NO: 211261
  chr7:2293743-2293937
  hypo

SEQ ID NO: 307066 - DNA, 490 bp, Homo sapiens; identical to SEQ ID NO: 257118
  chr7:2294448-2294938
  hypo

SEQ ID NO: 307067 - DNA, 426 bp, Homo sapiens; identical to SEQ ID NO: 257119
  chr7:2298036-2298462
  hypo

SEQ ID NO: 307068 - DNA, 265 bp, Homo sapiens; identical to SEQ ID NO: 257120
  chr7:2299116-2299381
  hypo

SEQ ID NO: 307069 - DNA, 149 bp, Homo sapiens; identical to SEQ ID NO: 211264
  chr7:2300173-2300322
  hypo

SEQ ID NO: 307070 - DNA, 142 bp, Homo sapiens; identical to SEQ ID NO: 257123
  chr7:2313678-2313820
  hypo

SEQ ID NO: 307071 - DNA, 552 bp, Homo sapiens; identical to SEQ ID NO: 257124
  chr7:2328672-2329224
  hypo

SEQ ID NO: 307072 - DNA, 327 bp, Homo sapiens; identical to SEQ ID NO: 211265
  chr7:2349432-2349759
  hypo

SEQ ID NO: 307073 - DNA, 152 bp, Homo sapiens; identical to SEQ ID NO: 257126
  chr7:2360917-2361069
  hypo

SEQ ID NO: 307074 - DNA, 127 bp, Homo sapiens; identical to SEQ ID NO: 257127
  chr7:2412473-2412600
  hypo

SEQ ID NO: 307075 - DNA, 165 bp, Homo sapiens
  chr7:2420148-2420313
  hypo
gcgacgccactggcggcaccttctcctgcgcccagtgatgtttccacggtgcctgtacacagccgagcagcatttccgttgaaggacttgcatccccattgcgggcagtgctggacgtgtcccggagacccaccgggagggcgccgccatgccttgtacccccac

SEQ ID NO: 307076 - DNA, 191 bp, Homo sapiens
  chr7:2420396-2420587
  hypo
ctttgaatgtagatagagaccttgaacttggtgcctgcctccctccccagtggcaagggcctgcttgccaagccagacctctgcagggcgctgtcccgtccggtcgtcacgcacactcggccaccctgtgtccagcgatgcactagtcatgccacagtctcttctgttgcgttgttttctgtgaaagatgc

SEQ ID NO: 307077 - DNA, 260 bp, Homo sapiens; identical to SEQ ID NO: 257129
  chr7:2448729-2448989
  hypo

SEQ ID NO: 307078 - DNA, 90 bp, Homo sapiens; identical to SEQ ID NO: 257130
  chr7:2464829-2464919
  hypo

SEQ ID NO: 307079 - DNA, 214 bp, Homo sapiens; identical to SEQ ID NO: 257131
  chr7:2471874-2472088
  hypo

SEQ ID NO: 307080 - DNA, 479 bp, Homo sapiens
  chr7:2472800-2473279
  hypo
ccaactggaagcgcgtgatgatcgtgctgagcggaagcctgctgcaccgcggtgcgccctaccgcgacccgctgcgcatcccgcgcgagcacgtgcacaacgccagcgcgcacctgaccttcaacaagttctggcgccgctacgggaagctctcccgccacctcatgaaggtcaagctcaagaagtacaccaagttcctcttcgtgcgcgaccccttcgtgcgcctgatctccgccttccgcagcaagttcgagctggagaacgaggagttctaccgcaagttcgccgtgcccatgctgcggctgtacgccaaccacaccagcctgcccgcctcggcgcgcgaggccttccgcgctggcctcaaggtgtccttcgccaacttcatccagtacctgctggacccgcacacggagaagctggcgcccttcaacgagcactggcggcaggtgtaccgcctctgccacccgtgccagatcgac

SEQ ID NO: 307081 - DNA, 338 bp, Homo sapiens; identical to SEQ ID NO: 21024
  chr7:2473779-2474117
  hypo

SEQ ID NO: 307082 - DNA, 33 bp, Homo sapiens; identical to SEQ ID NO: 257133
  chr7:2476917-2476950
  hypo

SEQ ID NO: 307083 - DNA, 280 bp, Homo sapiens; identical to SEQ ID NO: 257134
  chr7:2477349-2477629
  hypo

SEQ ID NO: 307084 - DNA, 33 bp, Homo sapiens
  chr7:2499648-2499681
  hypo
agagagaatctgagcggcacacaggctggggag

SEQ ID NO: 307085 - DNA, 479 bp, Homo sapiens
  chr7:2499718-2500197
  hypo
gagcctattactgacccaagtcccagtatcaccaggtcccagtgattcctcacagcagccggcgtccctccccttgtctcattcctgctggccccgacttcctagctccgtgcttctccaggcctcagtttcccctcttccaaggccagggcccgctccccttcctggggctgccaggagcctagagcgtgggaaacggctctgctgtgtgtccggggccaaagacacgcaggggcggtcgtgccagccaggctctcgggctcttgggcgctcgccacactctggcggccaaacaatgcccacctctgagtagagctgtgggtggcggtaaccatggtgaggggccctccacgccaactgcccatccggggtcagccgggcccgtggccctggttccggctttgtctcggggctggaactgggcccagggatgggctctgaatggctggcgggtgggagggcactgcccaccacatagc

SEQ ID NO: 307086 - DNA, 175 bp, Homo sapiens; identical to SEQ ID NO: 211272
  chr7:2539250-2539425
  hypo

SEQ ID NO: 307087 - DNA, 43 bp, Homo sapiens; identical to SEQ ID NO: 155554
  chr7:2540075-2540118
  hypo

SEQ ID NO: 307088 - DNA, 50 bp, Homo sapiens
  chr7:2544413-2544463
  hypo
gtgggaaggggcttcgggggaggtccctgtggacacacctgagcagcccg

SEQ ID NO: 307089 - DNA, 157 bp, Homo sapiens
  chr7:2544627-2544784
  hypo
ccggaccaggcctcccagggggtggccgccttggggctgagaggcagagaggaggtcagttcccaccgcctccccgcagaggccctgggaggaagcgggtcagcaggtggtgggccagctggggcctgggcctgccccaacccgcatctgctgggca

SEQ ID NO: 307090 - DNA, 77 bp, Homo sapiens; identical to SEQ ID NO: 223010
  chr7:2555344-2555421
  hypo

SEQ ID NO: 307091 - DNA, 140 bp, Homo sapiens
  chr7:2565080-2565220
  hypo
caacctgcgggccctgctgcggctgctggccagctacccgcacacgcgggacgtctacgtcggcaagcccagcctggacaggcccatccaggccatggagcgggtcagcgagaacaaggtggtgagtgcctgcccctccc

SEQ ID NO: 307092 - DNA, 36 bp, Homo sapiens; identical to SEQ ID NO: 211273
  chr7:2565883-2565919
  hypo

SEQ ID NO: 307093 - DNA, 237 bp, Homo sapiens; identical to SEQ ID NO: 211274
  chr7:2566658-2566895
  hypo

SEQ ID NO: 307094 - DNA, 209 bp, Homo sapiens; identical to SEQ ID NO: 211275
  chr7:2566939-2567148
  hypo

SEQ ID NO: 307095 - DNA, 309 bp, Homo sapiens; identical to SEQ ID NO: 257142
  chr7:2583247-2583556
  hypo

SEQ ID NO: 307096 - DNA, 37 bp, Homo sapiens; identical to SEQ ID NO: 257143
  chr7:2593553-2593590
  hypo

SEQ ID NO: 307097 - DNA, 53 bp, Homo sapiens; identical to SEQ ID NO: 257144
  chr7:2609245-2609298
  hypo

SEQ ID NO: 307098 - DNA, 301 bp, Homo sapiens; identical to SEQ ID NO: 211276
  chr7:2611215-2611516
  hypo

SEQ ID NO: 307099 - DNA, 41 bp, Homo sapiens; identical to SEQ ID NO: 257146
  chr7:2611944-2611985
  hypo

SEQ ID NO: 307100 - DNA, 152 bp, Homo sapiens; identical to SEQ ID NO: 211277
  chr7:2612209-2612361
  hypo

SEQ ID NO: 307101 - DNA, 42 bp, Homo sapiens; identical to SEQ ID NO: 211278
  chr7:2629286-2629328
  hypo

SEQ ID NO: 307102 - DNA, 269 bp, Homo sapiens; identical to SEQ ID NO: 257150
  chr7:2632066-2632335
  hypo

SEQ ID NO: 307103 - DNA, 440 bp, Homo sapiens; identical to SEQ ID NO: 257151
  chr7:2643038-2643478
  hypo

SEQ ID NO: 307104 - DNA, 103 bp, Homo sapiens; identical to SEQ ID NO: 257153
  chr7:2658659-2658762
  hypo

SEQ ID NO: 307105 - DNA, 173 bp, Homo sapiens; identical to SEQ ID NO: 211280
  chr7:2679580-2679753
  hypo

SEQ ID NO: 307106 - DNA, 348 bp, Homo sapiens; identical to SEQ ID NO: 211281
  chr7:2679783-2680131
  hypo

SEQ ID NO: 307107 - DNA, 52 bp, Homo sapiens; identical to SEQ ID NO: 257156
  chr7:2680524-2680576
  hypo

SEQ ID NO: 307108 - DNA, 51 bp, Homo sapiens; identical to SEQ ID NO: 211282
  chr7:2686911-2686962
  hypo

SEQ ID NO: 307109 - DNA, 140 bp, Homo sapiens; identical to SEQ ID NO: 257158
  chr7:2690602-2690742
  hypo

SEQ ID NO: 307110 - DNA, 184 bp, Homo sapiens; identical to SEQ ID NO: 257159
  chr7:2691942-2692126
  hypo

SEQ ID NO: 307111 - DNA, 55 bp, Homo sapiens; identical to SEQ ID NO: 211283
  chr7:2695698-2695753
  hypo

SEQ ID NO: 307112 - DNA, 271 bp, Homo sapiens; identical to SEQ ID NO: 211284
  chr7:2697946-2698217
  hypo

SEQ ID NO: 307113 - DNA, 182 bp, Homo sapiens; identical to SEQ ID NO: 211285
  chr7:2698474-2698656
  hypo

SEQ ID NO: 307114 - DNA, 151 bp, Homo sapiens; identical to SEQ ID NO: 257163
  chr7:2699684-2699835
  hypo

SEQ ID NO: 307115 - DNA, 34 bp, Homo sapiens; identical to SEQ ID NO: 257164
  chr7:2705240-2705274
  hypo

SEQ ID NO: 307116 - DNA, 43 bp, Homo sapiens; identical to SEQ ID NO: 284742
  chr7:2728259-2728302
  hypo

SEQ ID NO: 307117 - DNA, 167 bp, Homo sapiens; identical to SEQ ID NO: 211286
  chr7:2731703-2731870
  hypo

SEQ ID NO: 307118 - DNA, 242 bp, Homo sapiens; identical to SEQ ID NO: 257166
  chr7:2740188-2740430
  hypo

SEQ ID NO: 307119 - DNA, 159 bp, Homo sapiens; identical to SEQ ID NO: 257167
  chr7:2741198-2741357
  hypo

SEQ ID NO: 307120 - DNA, 239 bp, Homo sapiens; identical to SEQ ID NO: 211287
  chr7:2742260-2742499
  hypo

SEQ ID NO: 307121 - DNA, 379 bp, Homo sapiens; identical to SEQ ID NO: 211288
  chr7:2751965-2752344
  hypo

SEQ ID NO: 307122 - DNA, 413 bp, Homo sapiens
  chr7:2770640-2771053
  hypo
gtccttttgcctagagctcgctggctggctggtctgacagcattcctgagccaggtattccagggcacggatccgagaaacccactcaaggaccacacagacaacacacacccaagagtctgaccgacagccgtgggggctgctcaacgacgacaaaccccggggcttcctcgctcactgcagcatgatgtccttcaggttctcctgcaggatggtgtctttcacagcatggaacacgaagcggacgttctcggtgtcgatggcggtggtgaagtggtggaagagtggcttgctgcggttccgtctcttcctgtcgaagcactggaccaggtagcgctggacgtcctccagcctgtgcgggtcgcccctgaagtccgggaagtgcttcttgatgctcacggtcttcaccttct

SEQ ID NO: 307123 - DNA, 32 bp, Homo sapiens; identical to SEQ ID NO: 257171
  chr7:2783184-2783216
  hypo

SEQ ID NO: 307124 - DNA, 120 bp, Homo sapiens; identical to SEQ ID NO: 257172
  chr7:2796665-2796785
  hypo

SEQ ID NO: 307125 - DNA, 49 bp, Homo sapiens; identical to SEQ ID NO: 257173
  chr7:2796965-2797014
  hypo

SEQ ID NO: 307126 - DNA, 166 bp, Homo sapiens; identical to SEQ ID NO: 211289
  chr7:2804415-2804581
  hypo

SEQ ID NO: 307127 - DNA, 37 bp, Homo sapiens; identical to SEQ ID NO: 211290
  chr7:2815344-2815381
  hypo

SEQ ID NO: 307128 - DNA, 60 bp, Homo sapiens; identical to SEQ ID NO: 257177
  chr7:2844840-2844900
  hypo

SEQ ID NO: 307129 - DNA, 44 bp, Homo sapiens; identical to SEQ ID NO: 257178
  chr7:2871310-2871354
  hypo

SEQ ID NO: 307130 - DNA, 101 bp, Homo sapiens; identical to SEQ ID NO: 257179
  chr7:2884994-2885095
  hypo

SEQ ID NO: 307131 - DNA, 42 bp, Homo sapiens; identical to SEQ ID NO: 257180
  chr7:2900160-2900202
  hypo

SEQ ID NO: 307132 - DNA, 227 bp, Homo sapiens; identical to SEQ ID NO: 211291
  chr7:2931116-2931343
  hypo

SEQ ID NO: 307133 - DNA, 240 bp, Homo sapiens; identical to SEQ ID NO: 211292
  chr7:2935118-2935358
  hypo

SEQ ID NO: 307134 - DNA, 49 bp, Homo sapiens; identical to SEQ ID NO: 211293
  chr7:2946305-2946354
  hypo

SEQ ID NO: 307135 - DNA, 243 bp, Homo sapiens; identical to SEQ ID NO: 257184
  chr7:2951742-2951985
  hypo

SEQ ID NO: 307136 - DNA, 69 bp, Homo sapiens; identical to SEQ ID NO: 257185
  chr7:2952965-2953034
  hypo

SEQ ID NO: 307137 - DNA, 160 bp, Homo sapiens; identical to SEQ ID NO: 257186
  chr7:2953809-2953969
  hypo

SEQ ID NO: 307138 - DNA, 127 bp, Homo sapiens; identical to SEQ ID NO: 73097
  chr7:2958269-2958396
  hypo

SEQ ID NO: 307139 - DNA, 185 bp, Homo sapiens; identical to SEQ ID NO: 211294
  chr7:2959043-2959228
  hypo

SEQ ID NO: 307140 - DNA, 322 bp, Homo sapiens
  chr7:2967959-2968281
  hypo
gggctgtggggcccgggaacctgatttctgggcagcatggagccacgggtcataggttttgtccttggacaggcagctgggtgaacccagggaggccgcttccctcctctgagcctcagcctcctcatctgtacaatgagcagtaccctgcctttcagggttgcttcgaggacagctgggtcagcaagcgtggactggcccagagacggggtaaggaggcttggcatggtggcacggggcaaaagcccagtcctccctcacctgccacccacctgcgatggggcgcgtcctccttgtagcgtctgacgatggagtcgtttcc

SEQ ID NO: 307141 - DNA, 93 bp, Homo sapiens; identical to SEQ ID NO: 211296
  chr7:2972305-2972398
  hypo

SEQ ID NO: 307142 - DNA, 216 bp, Homo sapiens; identical to SEQ ID NO: 211297
  chr7:2976623-2976839
  hypo

SEQ ID NO: 307143 - DNA, 176 bp, Homo sapiens; identical to SEQ ID NO: 257192
  chr7:2983576-2983752
  hypo

SEQ ID NO: 307144 - DNA, 505 bp, Homo sapiens; identical to SEQ ID NO: 257193
  chr7:3012740-3013245
  hypo

SEQ ID NO: 307145 - DNA, 42 bp, Homo sapiens; identical to SEQ ID NO: 257194
  chr7:3015334-3015376
  hypo

SEQ ID NO: 307146 - DNA, 222 bp, Homo sapiens; identical to SEQ ID NO: 211299
  chr7:3026339-3026561
  hypo

SEQ ID NO: 307147 - DNA, 293 bp, Homo sapiens
  chr7:3033184-3033477
  hypo
acgggaaagagaggcggcggactcgccaggggaaagctcatatccagggacgcagcagaaggtgggccccgtgatccgggtcggagctgcttttaattgcctttgcttttcctgcacaaaggagtctgggccatttggctttctctgcagaagaattaacctttagcaggatggataattgatcctcagcaggggaaacgtcccgtgggttttgacgcagaaccggctctcggtaaacctgtccctgccacaccctgcaaagctcccgcccctgcctcctcttgtctggagct

SEQ ID NO: 307148 - DNA, 176 bp, Homo sapiens
  chr7:3033798-3033974
  hypo
gcctggctgcgttgaaggtatcaccttttctacgaacacctgttctgaacagtgaaaatagctattcctaacagaggagttgcaagctccagggatctgtgtgtgcgttggggagagtggagtacatcatttctggaaaacggggcctcaaaacgtagcgccgtttacagatgaga

SEQ ID NO: 307149 - DNA, 215 bp, Homo sapiens; identical to SEQ ID NO: 211300
  chr7:3049091-3049306
  hypo

SEQ ID NO: 307150 - DNA, 125 bp, Homo sapiens; identical to SEQ ID NO: 257198
  chr7:3054280-3054405
  hypo

SEQ ID NO: 307151 - DNA, 77 bp, Homo sapiens; identical to SEQ ID NO: 257199
  chr7:3081166-3081243
  hypo

SEQ ID NO: 307152 - DNA, 98 bp, Homo sapiens; identical to SEQ ID NO: 200794
  chr7:3083602-3083700
  hypo

SEQ ID NO: 307153 - DNA, 42 bp, Homo sapiens; identical to SEQ ID NO: 257200
  chr7:3150400-3150442
  hypo

SEQ ID NO: 307154 - DNA, 44 bp, Homo sapiens; identical to SEQ ID NO: 211302
  chr7:3179217-3179261
  hypo

SEQ ID NO: 307155 - DNA, 115 bp, Homo sapiens; identical to SEQ ID NO: 257202
  chr7:3211449-3211564
  hypo

SEQ ID NO: 307156 - DNA, 42 bp, Homo sapiens; identical to SEQ ID NO: 257203
  chr7:3239123-3239165
  hypo

SEQ ID NO: 307157 - DNA, 90 bp, Homo sapiens; identical to SEQ ID NO: 257204
  chr7:3243216-3243306
  hypo

SEQ ID NO: 307158 - DNA, 56 bp, Homo sapiens
  chr7:3283442-3283498
  hypo
tgggattacaggccgtgagccaccgcgcccagcctcagaagtgctccttttttacc

SEQ ID NO: 307159 - DNA, 35 bp, Homo sapiens; identical to SEQ ID NO: 257206
  chr7:3513739-3513774
  hypo

SEQ ID NO: 307160 - DNA, 42 bp, Homo sapiens; identical to SEQ ID NO: 257207
  chr7:3624123-3624165
  hypo

SEQ ID NO: 307161 - DNA, 33 bp, Homo sapiens; identical to SEQ ID NO: 211303
  chr7:3727109-3727142
  hypo

SEQ ID NO: 307162 - DNA, 111 bp, Homo sapiens; identical to SEQ ID NO: 211304
  chr7:3727180-3727291
  hypo

SEQ ID NO: 307163 - DNA, 42 bp, Homo sapiens; identical to SEQ ID NO: 257209
  chr7:3864237-3864279
  hypo

SEQ ID NO: 307164 - DNA, 157 bp, Homo sapiens; identical to SEQ ID NO: 211305
  chr7:3880279-3880436
  hypo

SEQ ID NO: 307165 - DNA, 176 bp, Homo sapiens; identical to SEQ ID NO: 257211
  chr7:3947953-3948129
  hypo

SEQ ID NO: 307166 - DNA, 88 bp, Homo sapiens; identical to SEQ ID NO: 257212
  chr7:3982615-3982703
  hypo

SEQ ID NO: 307167 - DNA, 97 bp, Homo sapiens; identical to SEQ ID NO: 211306
  chr7:3991158-3991255
  hypo

SEQ ID NO: 307168 - DNA, 131 bp, Homo sapiens; identical to SEQ ID NO: 257214
  chr7:3991580-3991711
  hypo

SEQ ID NO: 307169 - DNA, 117 bp, Homo sapiens; identical to SEQ ID NO: 257215
  chr7:4011096-4011213
  hypo

SEQ ID NO: 307170 - DNA, 301 bp, Homo sapiens; identical to SEQ ID NO: 257216
  chr7:4030056-4030357
  hypo

SEQ ID NO: 307171 - DNA, 42 bp, Homo sapiens; identical to SEQ ID NO: 257217
  chr7:4047169-4047211
  hypo

SEQ ID NO: 307172 - DNA, 192 bp, Homo sapiens
  chr7:4056949-4057141
  hypo
cagcagggcagtgaccgagtacaccttgcagggaggtaagcttgtctccaaaaccacgaggtggcgggatctttgccggggaatgggatttgcaaggtttgactggagtacgttagaaagaaaaacagagaatccagtcccctagggagcgtttacaagaaaattcatcacgtatttaatgggatctctcca

SEQ ID NO: 307173 - DNA, 169 bp, Homo sapiens; identical to SEQ ID NO: 211307
  chr7:4116727-4116896
  hypo

SEQ ID NO: 307174 - DNA, 47 bp, Homo sapiens
  chr7:4139331-4139378
  hypo
ggaagtggtggctaatgcaccgtgggcagggccaagcaggcacagag

SEQ ID NO: 307175 - DNA, 39 bp, Homo sapiens
  chr7:4139408-4139447
  hypo
gatggcccaaggggagccgcagctggtgggaaaggccat

SEQ ID NO: 307176 - DNA, 94 bp, Homo sapiens; identical to SEQ ID NO: 257221
  chr7:4140699-4140793
  hypo

SEQ ID NO: 307177 - DNA, 34 bp, Homo sapiens; identical to SEQ ID NO: 211308
  chr7:4141093-4141127
  hypo

SEQ ID NO: 307178 - DNA, 178 bp, Homo sapiens; identical to SEQ ID NO: 257223
  chr7:4146923-4147101
  hypo

SEQ ID NO: 307179 - DNA, 257 bp, Homo sapiens; identical to SEQ ID NO: 211309
  chr7:4152827-4153084
  hypo

SEQ ID NO: 307180 - DNA, 408 bp, Homo sapiens; identical to SEQ ID NO: 211310
  chr7:4153553-4153961
  hypo

SEQ ID NO: 307181 - DNA, 42 bp, Homo sapiens; identical to SEQ ID NO: 257226
  chr7:4171198-4171240
  hypo

SEQ ID NO: 307182 - DNA, 200 bp, Homo sapiens; identical to SEQ ID NO: 257227
  chr7:4171860-4172060
  hypo

SEQ ID NO: 307183 - DNA, 92 bp, Homo sapiens; identical to SEQ ID NO: 257228
  chr7:4177336-4177428
  hypo

SEQ ID NO: 307184 - DNA, 54 bp, Homo sapiens; identical to SEQ ID NO: 211311
  chr7:4183234-4183288
  hypo

SEQ ID NO: 307185 - DNA, 152 bp, Homo sapiens; identical to SEQ ID NO: 211312
  chr7:4183448-4183600
  hypo

SEQ ID NO: 307186 - DNA, 238 bp, Homo sapiens; identical to SEQ ID NO: 211313
  chr7:4185350-4185588
  hypo

SEQ ID NO: 307187 - DNA, 72 bp, Homo sapiens
  chr7:4187738-4187810
  hypo
gtccaagagagcctttgaaacgggatacgctgggccacctcccctccggagaccaggtgaaatcacaagggc

SEQ ID NO: 307188 - DNA, 229 bp, Homo sapiens; identical to SEQ ID NO: 211315
  chr7:4187866-4188095
  hypo

SEQ ID NO: 307189 - DNA, 140 bp, Homo sapiens; identical to SEQ ID NO: 257232
  chr7:4198502-4198642
  hypo

SEQ ID NO: 307190 - DNA, 561 bp, Homo sapiens; identical to SEQ ID NO: 257233
  chr7:4201343-4201904
  hypo

SEQ ID NO: 307191 - DNA, 135 bp, Homo sapiens; identical to SEQ ID NO: 257234
  chr7:4203270-4203405
  hypo

SEQ ID NO: 307192 - DNA, 317 bp, Homo sapiens; identical to SEQ ID NO: 257235
  chr7:4211345-4211662
  hypo

SEQ ID NO: 307193 - DNA, 362 bp, Homo sapiens; identical to SEQ ID NO: 211316
  chr7:4214559-4214921
  hypo

SEQ ID NO: 307194 - DNA, 231 bp, Homo sapiens
  chr7:4215093-4215324
  hypo
aaaaggtgtcctgccactcagtgctaagttgtgccaaaaactagcatgtttcactgaatcagagtggtaagcacaccccgcctgtccgggactggggtgccttgttgtttacgaggaggtgcggcagcccccgcaactgggagctggtggaaagcttgggcggtagcggggtctttattgccccgggaggcgcagcgtgggaagtggctggcatcccagtaaggcacctgt

SEQ ID NO: 307195 - DNA, 127 bp, Homo sapiens
  chr7:4215384-4215511
  hypo
tctgctttgcttaccccaatagcccaaagcagcttcaagacggtgaacagcagctccacatcgacgatgtgtgaactaacacgtaagtgcgctctcagcgggaggcccatgccgcgaggcgcacaca

SEQ ID NO: 307196 - DNA, 138 bp, Homo sapiens; identical to SEQ ID NO: 257237
  chr7:4218110-4218248
  hypo

SEQ ID NO: 307197 - DNA, 802 bp, Homo sapiens; identical to SEQ ID NO: 211317
  chr7:4219129-4219931
  hypo

SEQ ID NO: 307198 - DNA, 42 bp, Homo sapiens; identical to SEQ ID NO: 257239
  chr7:4230171-4230213
  hypo

SEQ ID NO: 307199 - DNA, 244 bp, Homo sapiens; identical to SEQ ID NO: 257240
  chr7:4243556-4243800
  hypo

SEQ ID NO: 307200 - DNA, 171 bp, Homo sapiens; identical to SEQ ID NO: 257241
  chr7:4246746-4246917
  hypo

SEQ ID NO: 307201 - DNA, 199 bp, Homo sapiens; identical to SEQ ID NO: 211318
  chr7:4247841-4248040
  hypo

SEQ ID NO: 307202 - DNA, 188 bp, Homo sapiens; identical to SEQ ID NO: 257243
  chr7:4249811-4249999
  hypo

SEQ ID NO: 307203 - DNA, 164 bp, Homo sapiens; identical to SEQ ID NO: 211319
  chr7:4254667-4254831
  hypo

SEQ ID NO: 307204 - DNA, 93 bp, Homo sapiens; identical to SEQ ID NO: 257245
  chr7:4256587-4256680
  hypo

SEQ ID NO: 307205 - DNA, 263 bp, Homo sapiens; identical to SEQ ID NO: 211320
  chr7:4265023-4265286
  hypo

SEQ ID NO: 307206 - DNA, 85 bp, Homo sapiens
  chr7:4265508-4265593
  hypo
ctcaacattcaaaagcaggtcgccaacgatctcccctttcggatcatgaagggaacccaagcaggccgcgggacccgtgttcttt

SEQ ID NO: 307207 - DNA, 316 bp, Homo sapiens; identical to SEQ ID NO: 211321
  chr7:4272745-4273061
  hypo

SEQ ID NO: 307208 - DNA, 240 bp, Homo sapiens; identical to SEQ ID NO: 211322
  chr7:4273570-4273810
  hypo

SEQ ID NO: 307209 - DNA, 139 bp, Homo sapiens; identical to SEQ ID NO: 257250
  chr7:4275903-4276042
  hypo

SEQ ID NO: 307210 - DNA, 209 bp, Homo sapiens; identical to SEQ ID NO: 211323
  chr7:4277417-4277626
  hypo

SEQ ID NO: 307211 - DNA, 183 bp, Homo sapiens; identical to SEQ ID NO: 211324
  chr7:4285297-4285480
  hypo

SEQ ID NO: 307212 - DNA, 182 bp, Homo sapiens; identical to SEQ ID NO: 257253
  chr7:4286818-4287000
  hypo

SEQ ID NO: 307213 - DNA, 42 bp, Homo sapiens; identical to SEQ ID NO: 257254
  chr7:4299321-4299363
  hypo

SEQ ID NO: 307214 - DNA, 115 bp, Homo sapiens; identical to SEQ ID NO: 257255
  chr7:4307407-4307522
  hypo

SEQ ID NO: 307215 - DNA, 101 bp, Homo sapiens; identical to SEQ ID NO: 257256
  chr7:4308003-4308104
  hypo

SEQ ID NO: 307216 - DNA, 289 bp, Homo sapiens
  chr7:4308194-4308483
  hypo
tctgtacaggtcttcggaggccgtgtttgtatctaactgtgactgggctgaagcatgatgtttgcctaatggttcgtagcatggtttttatttcttacgcattcttggcacacagtgtagctatcctcctgacgagcaacccgtctgcgtacctaagtgtggctccccgtgggtcagcgtcctggtagcatggatccagtctgaaaggtgaggacaacgtggaaactcatgagctgagcctgcccgctgggacacgtctccttcccgcgtcaccttctggtttagggag

SEQ ID NO: 307217 - DNA, 78 bp, Homo sapiens; identical to SEQ ID NO: 257258
  chr7:4323516-4323594
  hypo

SEQ ID NO: 307218 - DNA, 155 bp, Homo sapiens; identical to SEQ ID NO: 257259
  chr7:4348038-4348193
  hypo

SEQ ID NO: 307219 - DNA, 324 bp, Homo sapiens; identical to SEQ ID NO: 211325
  chr7:4349445-4349769
  hypo

SEQ ID NO: 307220 - DNA, 357 bp, Homo sapiens; identical to SEQ ID NO: 257261
  chr7:4410636-4410993
  hypo

SEQ ID NO: 307221 - DNA, 81 bp, Homo sapiens; identical to SEQ ID NO: 211326
  chr7:4540651-4540732
  hypo

SEQ ID NO: 307222 - DNA, 79 bp, Homo sapiens; identical to SEQ ID NO: 257263
  chr7:4546534-4546613
  hypo

SEQ ID NO: 307223 - DNA, 219 bp, Homo sapiens; identical to SEQ ID NO: 257264
  chr7:4730596-4730815
  hypo

SEQ ID NO: 307224 - DNA, 208 bp, Homo sapiens
  chr7:4751218-4751426
  hypo
gtctcaagagtgccactcctcggcattgtgtggatgggcggtagtgagaataattactaagggcgtcataccctctcgtatctgcatcacccataaggggtgggcagtggtgctgccgtgtcttgtcaggaggccagctctgtgtcacccaccaggctgggctcagccacaagtcggcaacgtagtgcctccagggcagatgccacgg

SEQ ID NO: 307225 - DNA, 320 bp, Homo sapiens; identical to SEQ ID NO: 211328
  chr7:4751607-4751927
  hypo

SEQ ID NO: 307226 - DNA, 35 bp, Homo sapiens; identical to SEQ ID NO: 257266
  chr7:4753919-4753954
  hypo

SEQ ID NO: 307227 - DNA, 147 bp, Homo sapiens; identical to SEQ ID NO: 211329
  chr7:4754252-4754399
  hypo

SEQ ID NO: 307228 - DNA, 130 bp, Homo sapiens; identical to SEQ ID NO: 257268
  chr7:4762728-4762858
  hypo

SEQ ID NO: 307229 - DNA, 257 bp, Homo sapiens; identical to SEQ ID NO: 257269
  chr7:4767338-4767595
  hypo

SEQ ID NO: 307230 - DNA, 50 bp, Homo sapiens; identical to SEQ ID NO: 200795
  chr7:4770079-4770129
  hypo

SEQ ID NO: 307231 - DNA, 119 bp, Homo sapiens; identical to SEQ ID NO: 284747
  chr7:4770153-4770272
  hypo

SEQ ID NO: 307232 - DNA, 69 bp, Homo sapiens
  chr7:4771496-4771565
  hypo
tgaagcacattttcagtaaccgcttgctacgtgccagccgtccggtcaggactgatgttcacggcatgg

SEQ ID NO: 307233 - DNA, 439 bp, Homo sapiens
  chr7:4781492-4781931
  hypo
agtcacacacgaacctcaggcgacagcctggatgcatggcacacagccctggccctggtcctgtcatacagggatgcaaaaacagacgtgtacttgaggctggagggttcatacattctttaatgatttacctcttcattgcggacatttctaaacgtggctggcttttctctcccaaccgcacgtctgtggctctgcagatgcgtggctgcgcgtggtttggtgccggagctgtggctcctccgcagcaccagcagtttctgcgtcgctcgcgcgtcaccagcaaaggtcaccccagtggaaaaagcagatcacatcttagggctgttgtgaacatggtgttgacctcacatataccctgaaaggggctcagggccctcggggacatctgtgaagcacgctctgggcatgctgatctgttggagcgagcgctgtggca

SEQ ID NO: 307234 - DNA, 144 bp, Homo sapiens; identical to SEQ ID NO: 257273
  chr7:4783196-4783340
  hypo

SEQ ID NO: 307235 - DNA, 105 bp, Homo sapiens; identical to SEQ ID NO: 257274
  chr7:4800783-4800888
  hypo

SEQ ID NO: 307236 - DNA, 906 bp, Homo sapiens
  chr7:4801646-4802552
  hypo
gggacggcagggcccgcagggagcagagcaagggtagccgtcctgcctggcaggggtgcactgacctccggttccggcttggtggcttagcccctgtataggggacttgaaaaaagcagctgggtcctaaccagaccccagagtaaccctcttcttcctccactccagccctcaccagccctttgcagctccttgcgacccaagcgagttcatccgcgccggtggtggtcacccgggtgtgcgaggtggggcccaaggagccagcagcagccgtcgcggccacggccaccaccaccccagccactgccaccaccgcctctgcctccgcctcttccactggagagcccgaggtcaaaaggtcccgggtggaggagcccagtggtgctgtaaccacaccggctggagtgatcgcagctgccggcccccaggggccaggcaccggggagtgaggtcacctgcaacgcgggggagtgggactcacccagcggcgaccccgaagctggacccggcagctcaggcggccgcacccacagacggaggagaacagcccgcggcggcctgtgggcatcggcggcacctggacacacccagccctttccatttgatcgcctgccttcccgtggtttaagacaaaaacacataaacaagttcagacaactgattgtatgattctgggaattctttgctttcctttccttctccctcggcaccacctcctctccccaggcctccctgtcgggcatggggaggaggttggagctcagcatcttgaggaatgtgtcaagacagcccctccgctccgcgctgcacggccagccgcctttgtccgggaggacagacagaaacgcagcaaggcacacaccaaggctgccggggaggcccgggcaccggacagatgcctgttgg

SEQ ID NO: 307237 - DNA, 427 bp, Homo sapiens; identical to SEQ ID NO: 211334
  chr7:4802589-4803016
  hypo

SEQ ID NO: 307238 - DNA, 69 bp, Homo sapiens; identical to SEQ ID NO: 257276
  chr7:4803494-4803563
  hypo

SEQ ID NO: 307239 - DNA, 831 bp, Homo sapiens; identical to SEQ ID NO: 257277
  chr7:4806263-4807094
  hypo

SEQ ID NO: 307240 - DNA, 152 bp, Homo sapiens; identical to SEQ ID NO: 257278
  chr7:4807419-4807571
  hypo

SEQ ID NO: 307241 - DNA, 51 bp, Homo sapiens
  chr7:4813870-4813921
  hypo
cattctctgcaccaggtgccctcagacatcactgggcgccctagggcatct

SEQ ID NO: 307242 - DNA, 127 bp, Homo sapiens; identical to SEQ ID NO: 257280
  chr7:4823843-4823970
  hypo

SEQ ID NO: 307243 - DNA, 151 bp, Homo sapiens; identical to SEQ ID NO: 211335
  chr7:4824492-4824643
  hypo

SEQ ID NO: 307244 - DNA, 225 bp, Homo sapiens; identical to SEQ ID NO: 257282
  chr7:4825103-4825328
  hypo

SEQ ID NO: 307245 - DNA, 97 bp, Homo sapiens; identical to SEQ ID NO: 257283
  chr7:4828437-4828534
  hypo

SEQ ID NO: 307246 - DNA, 188 bp, Homo sapiens; identical to SEQ ID NO: 257285
  chr7:4839816-4840004
  hypo

SEQ ID NO: 307247 - DNA, 224 bp, Homo sapiens; identical to SEQ ID NO: 211337
  chr7:4855714-4855938
  hypo

SEQ ID NO: 307248 - DNA, 492 bp, Homo sapiens; identical to SEQ ID NO: 211338
  chr7:4856090-4856582
  hypo

SEQ ID NO: 307249 - DNA, 231 bp, Homo sapiens; identical to SEQ ID NO: 211339
  chr7:4856612-4856843
  hypo

SEQ ID NO: 307250 - DNA, 114 bp, Homo sapiens; identical to SEQ ID NO: 211340
  chr7:4857296-4857410
  hypo

SEQ ID NO: 307251 - DNA, 125 bp, Homo sapiens
  chr7:4857846-4857971
  hypo
cagggctgcatgggcggcgcctggtgagccaggccaacactcaccccagcgcgggcctcccaggagcacaggcccccagctgcccctctgccgggcagactgcaccggaggccggcccactcatg

SEQ ID NO: 307252 - DNA, 363 bp, Homo sapiens; identical to SEQ ID NO: 257289
  chr7:4861934-4862297
  hypo

SEQ ID NO: 307253 - DNA, 216 bp, Homo sapiens; identical to SEQ ID NO: 257290
  chr7:4864847-4865063
  hypo

SEQ ID NO: 307254 - DNA, 34 bp, Homo sapiens; identical to SEQ ID NO: 211341
  chr7:4867284-4867318
  hypo

SEQ ID NO: 307255 - DNA, 167 bp, Homo sapiens; identical to SEQ ID NO: 211342
  chr7:4874066-4874233
  hypo

SEQ ID NO: 307256 - DNA, 201 bp, Homo sapiens; identical to SEQ ID NO: 211343
  chr7:4874263-4874464
  hypo

SEQ ID NO: 307257 - DNA, 175 bp, Homo sapiens; identical to SEQ ID NO: 257293
  chr7:4878540-4878715
  hypo

SEQ ID NO: 307258 - DNA, 37 bp, Homo sapiens; identical to SEQ ID NO: 257294
  chr7:4902242-4902279
  hypo

SEQ ID NO: 307259 - DNA, 286 bp, Homo sapiens; identical to SEQ ID NO: 257295
  chr7:4913158-4913444
  hypo

SEQ ID NO: 307260 - DNA, 258 bp, Homo sapiens; identical to SEQ ID NO: 257296
  chr7:4913719-4913977
  hypo

SEQ ID NO: 307261 - DNA, 269 bp, Homo sapiens; identical to SEQ ID NO: 211344
  chr7:4915141-4915410
  hypo

SEQ ID NO: 307262 - DNA, 281 bp, Homo sapiens; identical to SEQ ID NO: 257298
  chr7:4916207-4916488
  hypo

SEQ ID NO: 307263 - DNA, 546 bp, Homo sapiens; identical to SEQ ID NO: 257299
  chr7:4917082-4917628
  hypo

SEQ ID NO: 307264 - DNA, 35 bp, Homo sapiens; identical to SEQ ID NO: 257301
  chr7:4932640-4932675
  hypo

SEQ ID NO: 307265 - DNA, 77 bp, Homo sapiens; identical to SEQ ID NO: 211346
  chr7:4985613-4985690
  hypo

SEQ ID NO: 307266 - DNA, 108 bp, Homo sapiens; identical to SEQ ID NO: 211347
  chr7:4985899-4986007
  hypo

SEQ ID NO: 307267 - DNA, 40 bp, Homo sapiens; identical to SEQ ID NO: 257304
  chr7:5041595-5041635
  hypo

SEQ ID NO: 307268 - DNA, 456 bp, Homo sapiens; identical to SEQ ID NO: 257305
  chr7:5157464-5157920
  hypo

SEQ ID NO: 307269 - DNA, 276 bp, Homo sapiens; identical to SEQ ID NO: 211348
  chr7:5230916-5231192
  hypo

SEQ ID NO: 307270 - DNA, 263 bp, Homo sapiens; identical to SEQ ID NO: 257307
  chr7:5237698-5237961
  hypo

SEQ ID NO: 307271 - DNA, 89 bp, Homo sapiens; identical to SEQ ID NO: 211349
  chr7:5240136-5240225
  hypo

SEQ ID NO: 307272 - DNA, 88 bp, Homo sapiens; identical to SEQ ID NO: 257309
  chr7:5240285-5240373
  hypo

SEQ ID NO: 307273 - DNA, 121 bp, Homo sapiens; identical to SEQ ID NO: 257310
  chr7:5242891-5243012
  hypo

SEQ ID NO: 307274 - DNA, 114 bp, Homo sapiens; identical to SEQ ID NO: 211350
  chr7:5253973-5254087
  hypo

SEQ ID NO: 307275 - DNA, 47 bp, Homo sapiens; identical to SEQ ID NO: 211351
  chr7:5262386-5262433
  hypo

SEQ ID NO: 307276 - DNA, 365 bp, Homo sapiens
  chr7:5262623-5262988
  hypo
cacaccctcccctttaaaggccacgctctgagaacctgttccagctctccagctccgcctccaccctcagcaaatggcattggccccttcttttaacccagaagccgcagcctggagttctcttgtcttcctccctccaggctgcaaagcttccctcatcggtgcttacatgcctcctgtggcgcctgctttggaggcaggactgtccctccctcgtcggacagtagagcgggggaggcctcgggctctggagcccgtgcctcagattggagccctagggagcactttcagtcgcatggccgtggtcggcgggaccccacctcaggtctgtggctccacgtctcggatcagtacctccctccctg

SEQ ID NO: 307277 - DNA, 271 bp, Homo sapiens; identical to SEQ ID NO: 257313
  chr7:5265609-5265880
  hypo

SEQ ID NO: 307278 - DNA, 514 bp, Homo sapiens; identical to SEQ ID NO: 211353
  chr7:5272774-5273288
  hypo

SEQ ID NO: 307279 - DNA, 98 bp, Homo sapiens; identical to SEQ ID NO: 211354
  chr7:5334869-5334967
  hypo

SEQ ID NO: 307280 - DNA, 110 bp, Homo sapiens; identical to SEQ ID NO: 211355
  chr7:5353278-5353388
  hypo

SEQ ID NO: 307281 - DNA, 395 bp, Homo sapiens; identical to SEQ ID NO: 257319
  chr7:5372388-5372783
  hypo

SEQ ID NO: 307282 - DNA, 42 bp, Homo sapiens; identical to SEQ ID NO: 257320
  chr7:5373542-5373584
  hypo

SEQ ID NO: 307283 - DNA, 118 bp, Homo sapiens; identical to SEQ ID NO: 257321
  chr7:5384805-5384923
  hypo

SEQ ID NO: 307284 - DNA, 319 bp, Homo sapiens; identical to SEQ ID NO: 257322
  chr7:5390477-5390796
  hypo

SEQ ID NO: 307285 - DNA, 55 bp, Homo sapiens; identical to SEQ ID NO: 257323
  chr7:5391379-5391434
  hypo

SEQ ID NO: 307286 - DNA, 231 bp, Homo sapiens; identical to SEQ ID NO: 257324
  chr7:5396667-5396898
  hypo

SEQ ID NO: 307287 - DNA, 103 bp, Homo sapiens; identical to SEQ ID NO: 257325
  chr7:5398875-5398978
  hypo

SEQ ID NO: 307288 - DNA, 557 bp, Homo sapiens; identical to SEQ ID NO: 211358
  chr7:5428494-5429051
  hypo

SEQ ID NO: 307289 - DNA, 286 bp, Homo sapiens; identical to SEQ ID NO: 211359
  chr7:5446686-5446972
  hypo

SEQ ID NO: 307290 - DNA, 81 bp, Homo sapiens; identical to SEQ ID NO: 211360
  chr7:5449226-5449307
  hypo

SEQ ID NO: 307291 - DNA, 160 bp, Homo sapiens; identical to SEQ ID NO: 211361
  chr7:5453845-5454005
  hypo

SEQ ID NO: 307292 - DNA, 221 bp, Homo sapiens; identical to SEQ ID NO: 200801
  chr7:5462090-5462311
  hypo

SEQ ID NO: 307293 - DNA, 249 bp, Homo sapiens; identical to SEQ ID NO: 257331
  chr7:5488162-5488411
  hypo

SEQ ID NO: 307294 - DNA, 190 bp, Homo sapiens; identical to SEQ ID NO: 211363
  chr7:5491669-5491859
  hypo

SEQ ID NO: 307295 - DNA, 91 bp, Homo sapiens; identical to SEQ ID NO: 257333
  chr7:5521407-5521498
  hypo

SEQ ID NO: 307296 - DNA, 74 bp, Homo sapiens; identical to SEQ ID NO: 211364
  chr7:5521784-5521858
  hypo

SEQ ID NO: 307297 - DNA, 156 bp, Homo sapiens; identical to SEQ ID NO: 257335
  chr7:5528281-5528437
  hypo

SEQ ID NO: 307298 - DNA, 69 bp, Homo sapiens; identical to SEQ ID NO: 257336
  chr7:5528739-5528808
  hypo

SEQ ID NO: 307299 - DNA, 100 bp, Homo sapiens
  chr7:5529739-5529839
  hypo
gcaagcagggttgtcggcgcccagtggctcgagacgtcctggctgatggctcttctcgcaactctgtgaacagctggggcctccttcctgtcacctctcc

SEQ ID NO: 307300 - DNA, 120 bp, Homo sapiens
  chr7:5529955-5530075
  hypo
tcttgaaatgcgtcactccccacatcgcctaccaagctccagctctctccaggaatcgcctcctcctaatttgtgttcaattctaggtgctcacctgacttcctgcgcagcagcagagca

SEQ ID NO: 307301 - DNA, 189 bp, Homo sapiens; identical to SEQ ID NO: 257338
  chr7:5530811-5531000
  hypo

SEQ ID NO: 307302 - DNA, 254 bp, Homo sapiens; identical to SEQ ID NO: 257339
  chr7:5541327-5541581
  hypo

SEQ ID NO: 307303 - DNA, 633 bp, Homo sapiens; identical to SEQ ID NO: 284764
  chr7:5594638-5595271
  hypo

SEQ ID NO: 307304 - DNA, 637 bp, Homo sapiens; identical to SEQ ID NO: 200808
  chr7:5632266-5632903
  hypo

SEQ ID NO: 307305 - DNA, 138 bp, Homo sapiens; identical to SEQ ID NO: 200809
  chr7:5633472-5633610
  hypo

SEQ ID NO: 307306 - DNA, 32 bp, Homo sapiens; identical to SEQ ID NO: 257341
  chr7:5655102-5655134
  hypo

SEQ ID NO: 307307 - DNA, 93 bp, Homo sapiens; identical to SEQ ID NO: 257342
  chr7:5655367-5655460
  hypo

SEQ ID NO: 307308 - DNA, 153 bp, Homo sapiens; identical to SEQ ID NO: 257343
  chr7:5692777-5692930
  hypo

SEQ ID NO: 307309 - DNA, 194 bp, Homo sapiens; identical to SEQ ID NO: 257344
  chr7:5697663-5697857
  hypo

SEQ ID NO: 307310 - DNA, 138 bp, Homo sapiens; identical to SEQ ID NO: 257345
  chr7:5730673-5730811
  hypo

SEQ ID NO: 307311 - DNA, 301 bp, Homo sapiens; identical to SEQ ID NO: 257346
  chr7:5870805-5871106
  hypo

SEQ ID NO: 307312 - DNA, 222 bp, Homo sapiens; identical to SEQ ID NO: 257347
  chr7:5877162-5877384
  hypo

SEQ ID NO: 307313 - DNA, 94 bp, Homo sapiens; identical to SEQ ID NO: 211368
  chr7:5920562-5920656
  hypo

SEQ ID NO: 307314 - DNA, 83 bp, Homo sapiens; identical to SEQ ID NO: 257350
  chr7:5997467-5997550
  hypo

SEQ ID NO: 307315 - DNA, 141 bp, Homo sapiens; identical to SEQ ID NO: 257351
  chr7:6034953-6035094
  hypo

SEQ ID NO: 307316 - DNA, 125 bp, Homo sapiens; identical to SEQ ID NO: 257352
  chr7:6054904-6055029
  hypo

SEQ ID NO: 307317 - DNA, 208 bp, Homo sapiens; identical to SEQ ID NO: 257353
  chr7:6058647-6058855
  hypo

SEQ ID NO: 307318 - DNA, 41 bp, Homo sapiens; identical to SEQ ID NO: 211369
  chr7:6059658-6059699
  hypo

SEQ ID NO: 307319 - DNA, 81 bp, Homo sapiens
  chr7:6060509-6060590
  hypo
tgtttatgatcaggcgagctcttacctataaaactgctaacacctgagacttaacgggaaaagataaacacagctgctgat

SEQ ID NO: 307320 - DNA, 104 bp, Homo sapiens; identical to SEQ ID NO: 211371
  chr7:6060612-6060716
  hypo

SEQ ID NO: 307321 - DNA, 72 bp, Homo sapiens; identical to SEQ ID NO: 211372
  chr7:6060772-6060844
  hypo

SEQ ID NO: 307322 - DNA, 185 bp, Homo sapiens; identical to SEQ ID NO: 211373
  chr7:6076894-6077079
  hypo

SEQ ID NO: 307323 - DNA, 240 bp, Homo sapiens; identical to SEQ ID NO: 257358
  chr7:6099499-6099739
  hypo

SEQ ID NO: 307324 - DNA, 142 bp, Homo sapiens; identical to SEQ ID NO: 257359
  chr7:6124191-6124333
  hypo

SEQ ID NO: 307325 - DNA, 217 bp, Homo sapiens; identical to SEQ ID NO: 257363
  chr7:6193772-6193989
  hypo

SEQ ID NO: 307326 - DNA, 238 bp, Homo sapiens; identical to SEQ ID NO: 257364
  chr7:6204760-6204998
  hypo

SEQ ID NO: 307327 - DNA, 532 bp, Homo sapiens; identical to SEQ ID NO: 257365
  chr7:6207763-6208295
  hypo

SEQ ID NO: 307328 - DNA, 199 bp, Homo sapiens; identical to SEQ ID NO: 257366
  chr7:6222704-6222903
  hypo

SEQ ID NO: 307329 - DNA, 44 bp, Homo sapiens; identical to SEQ ID NO: 211375
  chr7:6229682-6229726
  hypo

SEQ ID NO: 307330 - DNA, 147 bp, Homo sapiens; identical to SEQ ID NO: 257368
  chr7:6235848-6235995
  hypo

SEQ ID NO: 307331 - DNA, 41 bp, Homo sapiens; identical to SEQ ID NO: 257369
  chr7:6295662-6295703
  hypo

SEQ ID NO: 307332 - DNA, 82 bp, Homo sapiens; identical to SEQ ID NO: 211376
  chr7:6308101-6308183
  hypo

SEQ ID NO: 307333 - DNA, 188 bp, Homo sapiens
  chr7:6386234-6386422
  hypo
ctcctgagcttaagcgacgcagacaccttggcctcccaaagtgttgggattacttacaggagtgagctactgtgcccagccatcttaactcaatttggatcaacagccggtgttaggtttcatgttaattaccatcacctgtgtcaggcaccagccacctgaagacctgctactgggacaatcatact

SEQ ID NO: 307334 - DNA, 49 bp, Homo sapiens
  chr7:6386468-6386517
  hypo
ggtggttctactgctcagactggttcattctgcacgccagggagcaacc

SEQ ID NO: 307335 - DNA, 94 bp, Homo sapiens; identical to SEQ ID NO: 257372
  chr7:6405541-6405635
  hypo

SEQ ID NO: 307336 - DNA, 160 bp, Homo sapiens; identical to SEQ ID NO: 211377
  chr7:6432515-6432675
  hypo

SEQ ID NO: 307337 - DNA, 107 bp, Homo sapiens; identical to SEQ ID NO: 211378
  chr7:6443719-6443826
  hypo

SEQ ID NO: 307338 - DNA, 100 bp, Homo sapiens; identical to SEQ ID NO: 211379
  chr7:6443856-6443956
  hypo

SEQ ID NO: 307339 - DNA, 60 bp, Homo sapiens; identical to SEQ ID NO: 211380
  chr7:6443990-6444050
  hypo

SEQ ID NO: 307340 - DNA, 48 bp, Homo sapiens; identical to SEQ ID NO: 211381
  chr7:6444143-6444191
  hypo

SEQ ID NO: 307341 - DNA, 191 bp, Homo sapiens; identical to SEQ ID NO: 211382
  chr7:6448757-6448948
  hypo

SEQ ID NO: 307342 - DNA, 69 bp, Homo sapiens; identical to SEQ ID NO: 257379
  chr7:6449561-6449630
  hypo

SEQ ID NO: 307343 - DNA, 99 bp, Homo sapiens; identical to SEQ ID NO: 257380
  chr7:6450104-6450203
  hypo

SEQ ID NO: 307344 - DNA, 88 bp, Homo sapiens; identical to SEQ ID NO: 211383
  chr7:6484556-6484644
  hypo

SEQ ID NO: 307345 - DNA, 177 bp, Homo sapiens; identical to SEQ ID NO: 211384
  chr7:6500829-6501006
  hypo

SEQ ID NO: 307346 - DNA, 75 bp, Homo sapiens; identical to SEQ ID NO: 284776
  chr7:6570379-6570454
  hypo

SEQ ID NO: 307347 - DNA, 92 bp, Homo sapiens; identical to SEQ ID NO: 284777
  chr7:6575941-6576033
  hypo

SEQ ID NO: 307348 - DNA, 126 bp, Homo sapiens; identical to SEQ ID NO: 257387
  chr7:6597055-6597181
  hypo

SEQ ID NO: 307349 - DNA, 41 bp, Homo sapiens; identical to SEQ ID NO: 211385
  chr7:6619099-6619140
  hypo

SEQ ID NO: 307350 - DNA, 332 bp, Homo sapiens; identical to SEQ ID NO: 211386
  chr7:6644210-6644542
  hypo

SEQ ID NO: 307351 - DNA, 203 bp, Homo sapiens; identical to SEQ ID NO: 211387
  chr7:6645603-6645806
  hypo

SEQ ID NO: 307352 - DNA, 52 bp, Homo sapiens; identical to SEQ ID NO: 257391
  chr7:6646146-6646198
  hypo

SEQ ID NO: 307353 - DNA, 1290 bp, Homo sapiens; identical to SEQ ID NO: 211388
  chr7:6647171-6648461
  hypo

SEQ ID NO: 307354 - DNA, 42 bp, Homo sapiens; identical to SEQ ID NO: 257393
  chr7:6650217-6650259
  hypo

SEQ ID NO: 307355 - DNA, 62 bp, Homo sapiens; identical to SEQ ID NO: 284778
  chr7:6655356-6655418
  hypo

SEQ ID NO: 307356 - DNA, 220 bp, Homo sapiens; identical to SEQ ID NO: 284779
  chr7:6655448-6655668
  hypo

SEQ ID NO: 307357 - DNA, 167 bp, Homo sapiens; identical to SEQ ID NO: 284780
  chr7:6655854-6656021
  hypo

SEQ ID NO: 307358 - DNA, 101 bp, Homo sapiens; identical to SEQ ID NO: 257394
  chr7:6661790-6661891
  hypo

SEQ ID NO: 307359 - DNA, 133 bp, Homo sapiens; identical to SEQ ID NO: 257395
  chr7:6662671-6662804
  hypo

SEQ ID NO: 307360 - DNA, 173 bp, Homo sapiens; identical to SEQ ID NO: 211389
  chr7:6682659-6682832
  hypo

SEQ ID NO: 307361 - DNA, 132 bp, Homo sapiens; identical to SEQ ID NO: 257397
  chr7:6683068-6683200
  hypo

SEQ ID NO: 307362 - DNA, 190 bp, Homo sapiens; identical to SEQ ID NO: 211390
  chr7:6686203-6686393
  hypo

SEQ ID NO: 307363 - DNA, 186 bp, Homo sapiens; identical to SEQ ID NO: 211391
  chr7:6692859-6693045
  hypo

SEQ ID NO: 307364 - DNA, 172 bp, Homo sapiens; identical to SEQ ID NO: 211392
  chr7:6694964-6695136
  hypo

SEQ ID NO: 307365 - DNA, 71 bp, Homo sapiens; identical to SEQ ID NO: 284782
  chr7:6966984-6967055
  hypo

SEQ ID NO: 307366 - DNA, 80 bp, Homo sapiens
  chr7:7097584-7097664
  hypo
ccctactgcgatattgtccataataaccagggggtaaggatgctgttactccccatatcgcaggggctgtacaccctcca

SEQ ID NO: 307367 - DNA, 148 bp, Homo sapiens
  chr7:7097928-7098076
  hypo
accaatcatatcgccgtgtgtgtgtgcccccctgcgatattcttcgggatattcagtggtggagaggataatattactctctgtatcacggggggtgtacaccacactgacatattgttacccccagcgatatgaggagtagtagcaa

SEQ ID NO: 307368 - DNA, 148 bp, Homo sapiens
  chr7:7098156-7098304
  hypo
accccctctccccacctgactattacgatccacggtggacctacacagtgtttatgatattgtgagtaaatcatgtccccctcagcaaattacgaactatttcacagacgggtgtacaacctctgccgtattgggaacaatatcatcc

SEQ ID NO: 307369 - DNA, 104 bp, Homo sapiens
  chr7:7099575-7099679
  hypo
aatatcaccctgtctccctccctggatattacgatccacgtggacacaccacgttgtttacgatattgtgagtaatgtcatctccccctctagaaattacgaac

SEQ ID NO: 307370 - DNA, 70 bp, Homo sapiens
  chr7:7102868-7102938
  hypo
tgttcctaatatcccggggggagtcagtgatattggcaatatcacagggtgtgtacaccacacctgttat

SEQ ID NO: 307371 - DNA, 64 bp, Homo sapiens
  chr7:7102968-7103032
  hypo
tgatactattgtcaaaacagaatgcgcggtacaccccgcatgagatattgtttctaatatccat

SEQ ID NO: 307372 - DNA, 43 bp, Homo sapiens; identical to SEQ ID NO: 257405
  chr7:7103152-7103195
  hypo

SEQ ID NO: 307373 - DNA, 114 bp, Homo sapiens; identical to SEQ ID NO: 257406
  chr7:7109415-7109529
  hypo

SEQ ID NO: 307374 - DNA, 90 bp, Homo sapiens; identical to SEQ ID NO: 257407
  chr7:7109912-7110002
  hypo

SEQ ID NO: 307375 - DNA, 49 bp, Homo sapiens; identical to SEQ ID NO: 257408
  chr7:7188993-7189042
  hypo

SEQ ID NO: 307376 - DNA, 36 bp, Homo sapiens; identical to SEQ ID NO: 211393
  chr7:7249348-7249384
  hypo

SEQ ID NO: 307377 - DNA, 209 bp, Homo sapiens; identical to SEQ ID NO: 211394
  chr7:7605822-7606031
  hypo

SEQ ID NO: 307378 - DNA, 100 bp, Homo sapiens; identical to SEQ ID NO: 211395
  chr7:7612731-7612831
  hypo

SEQ ID NO: 307379 - DNA, 179 bp, Homo sapiens; identical to SEQ ID NO: 211396
  chr7:7613124-7613303
  hypo

SEQ ID NO: 307380 - DNA, 165 bp, Homo sapiens; identical to SEQ ID NO: 73410
  chr7:7621497-7621662
  hypo

SEQ ID NO: 307381 - DNA, 89 bp, Homo sapiens; identical to SEQ ID NO: 257416
  chr7:7666892-7666981
  hypo

SEQ ID NO: 307382 - DNA, 86 bp, Homo sapiens; identical to SEQ ID NO: 257417
  chr7:7799055-7799141
  hypo

SEQ ID NO: 307383 - DNA, 81 bp, Homo sapiens; identical to SEQ ID NO: 211397
  chr7:7807037-7807118
  hypo

SEQ ID NO: 307384 - DNA, 82 bp, Homo sapiens; identical to SEQ ID NO: 257419
  chr7:7822313-7822395
  hypo

SEQ ID NO: 307385 - DNA, 59 bp, Homo sapiens; identical to SEQ ID NO: 257420
  chr7:7839194-7839253
  hypo

SEQ ID NO: 307386 - DNA, 97 bp, Homo sapiens; identical to SEQ ID NO: 257421
  chr7:7880864-7880961
  hypo

SEQ ID NO: 307387 - DNA, 100 bp, Homo sapiens; identical to SEQ ID NO: 257422
  chr7:7935069-7935169
  hypo

SEQ ID NO: 307388 - DNA, 90 bp, Homo sapiens; identical to SEQ ID NO: 257423
  chr7:7998934-7999024
  hypo

SEQ ID NO: 307389 - DNA, 36 bp, Homo sapiens; identical to SEQ ID NO: 211398
  chr7:8954796-8954832
  hypo

SEQ ID NO: 307390 - DNA, 42 bp, Homo sapiens; identical to SEQ ID NO: 257425
  chr7:9707913-9707955
  hypo

SEQ ID NO: 307391 - DNA, 434 bp, Homo sapiens
  chr7:9766087-9766521
  hypo
aatcaaactcaaggtgcccacgggcctccggggccaggcgcttctgaaagtgtggggccgcggctggcaggcggaggaggggctcctctttcacaaccagacctcggtgaccgtggacggccggggcgcttctgtattcatccagacggacaagcctgtgtacagaccccagcaccgagtgctcataagcatcttcaccgtctctccaaatctgaggcctgtcaacgagaagctggaagccaacatcctggacccccgaggctctcggatgatagagtggagacacttgaagccgttctgctgcggcatcaccaacatgagcttccccttgtccgaccagcctgtgttgggagaatggttcatttttgttgaaatgcaaggccacgcgtacaacaagtcttttgaagttcagaagtatgtgttgcccaagttcg

SEQ ID NO: 307392 - DNA, 240 bp, Homo sapiens
  chr7:9766551-9766791
  hypo
aagacctggacgcctgtgagacaggcactgtgcgggccaggtatacctttgggaaacctgtggctggtgccttaacgatcaacatgactgttaatggtgtagggtactacagccacgaggtgggacgccccgtcctcagaacatccaagatcctcggctcccgggacttcgacatctgcgtgagggacatgatcccagcggacgtccctgagcacttccggggcagggtcagcatctggg

SEQ ID NO: 307393 - DNA, 284 bp, Homo sapiens; identical to SEQ ID NO: 257427
  chr7:10516004-10516288
  hypo

SEQ ID NO: 307394 - DNA, 32 bp, Homo sapiens; identical to SEQ ID NO: 257428
  chr7:11281035-11281067
  hypo

SEQ ID NO: 307395 - DNA, 136 bp, Homo sapiens; identical to SEQ ID NO: 257429
  chr7:12510651-12510787
  hypo

SEQ ID NO: 307396 - DNA, 98 bp, Homo sapiens; identical to SEQ ID NO: 211399
  chr7:12750832-12750930
  hypo

SEQ ID NO: 307397 - DNA, 32 bp, Homo sapiens; identical to SEQ ID NO: 211400
  chr7:12763983-12764015
  hypo

SEQ ID NO: 307398 - DNA, 44 bp, Homo sapiens; identical to SEQ ID NO: 211401
  chr7:12795792-12795836
  hypo

SEQ ID NO: 307399 - DNA, 34 bp, Homo sapiens; identical to SEQ ID NO: 257433
  chr7:13761024-13761058
  hypo

SEQ ID NO: 307400 - DNA, 31 bp, Homo sapiens; identical to SEQ ID NO: 257434
  chr7:15128782-15128813
  hypo

SEQ ID NO: 307401 - DNA, 89 bp, Homo sapiens; identical to SEQ ID NO: 257435
  chr7:15436141-15436230
  hypo

SEQ ID NO: 307402 - DNA, 78 bp, Homo sapiens; identical to SEQ ID NO: 257436
  chr7:16189282-16189360
  hypo

SEQ ID NO: 307403 - DNA, 37 bp, Homo sapiens; identical to SEQ ID NO: 257437
  chr7:16256011-16256048
  hypo

SEQ ID NO: 307404 - DNA, 88 bp, Homo sapiens; identical to SEQ ID NO: 257438
  chr7:16313198-16313286
  hypo

SEQ ID NO: 307405 - DNA, 38 bp, Homo sapiens; identical to SEQ ID NO: 211402
  chr7:16370912-16370950
  hypo

SEQ ID NO: 307406 - DNA, 131 bp, Homo sapiens; identical to SEQ ID NO: 211403
  chr7:16436345-16436476
  hypo

SEQ ID NO: 307407 - DNA, 135 bp, Homo sapiens; identical to SEQ ID NO: 211404
  chr7:16438008-16438143
  hypo

SEQ ID NO: 307408 - DNA, 161 bp, Homo sapiens; identical to SEQ ID NO: 257442
  chr7:16439151-16439312
  hypo

SEQ ID NO: 307409 - DNA, 481 bp, Homo sapiens; identical to SEQ ID NO: 257443
  chr7:16439979-16440460
  hypo

SEQ ID NO: 307410 - DNA, 285 bp, Homo sapiens; identical to SEQ ID NO: 284817
  chr7:16793057-16793342
  hypo

SEQ ID NO: 307411 - DNA, 182 bp, Homo sapiens; identical to SEQ ID NO: 114656
  chr7:16793380-16793562
  hypo

SEQ ID NO: 307412 - DNA, 337 bp, Homo sapiens; identical to SEQ ID NO: 257445
  chr7:17214726-17215063
  hypo

SEQ ID NO: 307413 - DNA, 1038 bp, Homo sapiens; identical to SEQ ID NO: 200834
  chr7:17338062-17339100
  hypo

SEQ ID NO: 307414 - DNA, 33 bp, Homo sapiens; identical to SEQ ID NO: 257447
  chr7:18041863-18041896
  hypo

SEQ ID NO: 307415 - DNA, 105 bp, Homo sapiens; identical to SEQ ID NO: 200837
  chr7:18125867-18125972
  hypo

SEQ ID NO: 307416 - DNA, 218 bp, Homo sapiens; identical to SEQ ID NO: 200838
  chr7:18126225-18126443
  hypo

SEQ ID NO: 307417 - DNA, 39 bp, Homo sapiens; identical to SEQ ID NO: 211409
  chr7:18927745-18927784
  hypo

SEQ ID NO: 307418 - DNA, 59 bp, Homo sapiens; identical to SEQ ID NO: 200840
  chr7:19156644-19156703
  hypo

SEQ ID NO: 307419 - DNA, 40 bp, Homo sapiens; identical to SEQ ID NO: 257449
  chr7:19379034-19379074
  hypo

SEQ ID NO: 307420 - DNA, 68 bp, Homo sapiens; identical to SEQ ID NO: 257450
  chr7:19740986-19741054
  hypo

SEQ ID NO: 307421 - DNA, 185 bp, Homo sapiens; identical to SEQ ID NO: 211411
  chr7:20628397-20628582
  hypo

SEQ ID NO: 307422 - DNA, 38 bp, Homo sapiens; identical to SEQ ID NO: 257452
  chr7:20719883-20719921
  hypo

SEQ ID NO: 307423 - DNA, 99 bp, Homo sapiens; identical to SEQ ID NO: 284831
  chr7:20817281-20817380
  hypo

SEQ ID NO: 307424 - DNA, 127 bp, Homo sapiens; identical to SEQ ID NO: 200844
  chr7:20817410-20817537
  hypo

SEQ ID NO: 307425 - DNA, 554 bp, Homo sapiens; identical to SEQ ID NO: 284834
  chr7:20825559-20826113
  hypo

SEQ ID NO: 307426 - DNA, 297 bp, Homo sapiens; identical to SEQ ID NO: 200847
  chr7:20826202-20826499
  hypo

SEQ ID NO: 307427 - DNA, 70 bp, Homo sapiens; identical to SEQ ID NO: 200851
  chr7:20837557-20837627
  hypo

SEQ ID NO: 307428 - DNA, 182 bp, Homo sapiens; identical to SEQ ID NO: 43954
  chr7:20837650-20837832
  hypo

SEQ ID NO: 307429 - DNA, 120 bp, Homo sapiens; identical to SEQ ID NO: 211418
  chr7:20855065-20855185
  hypo

SEQ ID NO: 307430 - DNA, 37 bp, Homo sapiens; identical to SEQ ID NO: 211419
  chr7:21409421-21409458
  hypo

SEQ ID NO: 307431 - DNA, 37 bp, Homo sapiens; identical to SEQ ID NO: 211420
  chr7:21501380-21501417
  hypo

SEQ ID NO: 307432 - DNA, 91 bp, Homo sapiens; identical to SEQ ID NO: 257457
  chr7:21924279-21924370
  hypo

SEQ ID NO: 307433 - DNA, 1127 bp, Homo sapiens; identical to SEQ ID NO: 284850
  chr7:21984772-21985899
  hypo

SEQ ID NO: 307434 - DNA, 31 bp, Homo sapiens; identical to SEQ ID NO: 257458
  chr7:22028252-22028283
  hypo

SEQ ID NO: 307435 - DNA, 37 bp, Homo sapiens; identical to SEQ ID NO: 257459
  chr7:22083773-22083810
  hypo

SEQ ID NO: 307436 - DNA, 184 bp, Homo sapiens; identical to SEQ ID NO: 284851
  chr7:22143358-22143542
  hypo

SEQ ID NO: 307437 - DNA, 38 bp, Homo sapiens; identical to SEQ ID NO: 257460
  chr7:22143965-22144003
  hypo

SEQ ID NO: 307438 - DNA, 160 bp, Homo sapiens; identical to SEQ ID NO: 257461
  chr7:22881609-22881769
  hypo

SEQ ID NO: 307439 - DNA, 154 bp, Homo sapiens; identical to SEQ ID NO: 200858
  chr7:22893423-22893577
  hypo

SEQ ID NO: 307440 - DNA, 1093 bp, Homo sapiens; identical to SEQ ID NO: 200859
  chr7:22893607-22894700
  hypo

SEQ ID NO: 307441 - DNA, 75 bp, Homo sapiens; identical to SEQ ID NO: 257462
  chr7:22903374-22903449
  hypo

SEQ ID NO: 307442 - DNA, 223 bp, Homo sapiens; identical to SEQ ID NO: 284855
  chr7:23052804-23053027
  hypo

SEQ ID NO: 307443 - DNA, 713 bp, Homo sapiens; identical to SEQ ID NO: 284856
  chr7:23053080-23053793
  hypo

SEQ ID NO: 307444 - DNA, 260 bp, Homo sapiens; identical to SEQ ID NO: 114713
  chr7:23053819-23054079
  hypo

SEQ ID NO: 307445 - DNA, 104 bp, Homo sapiens; identical to SEQ ID NO: 211426
  chr7:23211637-23211741
  hypo

SEQ ID NO: 307446 - DNA, 39 bp, Homo sapiens; identical to SEQ ID NO: 257464
  chr7:23345800-23345839
  hypo

SEQ ID NO: 307447 - DNA, 773 bp, Homo sapiens; identical to SEQ ID NO: 284860
  chr7:23510068-23510841
  hypo

SEQ ID NO: 307448 - DNA, 248 bp, Homo sapiens; identical to SEQ ID NO: 200866
  chr7:23513226-23513474
  hypo

SEQ ID NO: 307449 - DNA, 76 bp, Homo sapiens; identical to SEQ ID NO: 257466
  chr7:23529548-23529624
  hypo

SEQ ID NO: 307450 - DNA, 40 bp, Homo sapiens; identical to SEQ ID NO: 211429
  chr7:23550217-23550257
  hypo

SEQ ID NO: 307451 - DNA, 42 bp, Homo sapiens; identical to SEQ ID NO: 211430
  chr7:23556807-23556849
  hypo

SEQ ID NO: 307452 - DNA, 37 bp, Homo sapiens; identical to SEQ ID NO: 257469
  chr7:23568876-23568913
  hypo

SEQ ID NO: 307453 - DNA, 249 bp, Homo sapiens; identical to SEQ ID NO: 223043
  chr7:23570143-23570392
  hypo

SEQ ID NO: 307454 - DNA, 147 bp, Homo sapiens; identical to SEQ ID NO: 211431
  chr7:23749559-23749706
  hypo

SEQ ID NO: 307455 - DNA, 372 bp, Homo sapiens
  chr7:23749829-23750201
  hypo
gggcccttgcggtcgaagctcacgcggtaagccgctgcacgtgtgctacggcgggcggagggccgaaagtccagtatgtgggtccagggtcactcttctagagcttccgcaacggaaagtgtgaggtcagtagtagtttttgtggtacgtgcagtggtggccgcttcaaggactattttcgtcgctgcttgcgttttaagtctccaatcctgggacgaggcccatttcagggttttctgtcaccttctagccgcccgccaccccagaggggtgccagatgccccagtttttgagtgcatgcaggcaggcgaaagtggctcgaaaagacctccggcctgaatgatctccatgaagacgcggtcacgcagcctc

SEQ ID NO: 307456 - DNA, 146 bp, Homo sapiens; identical to SEQ ID NO: 200870
  chr7:24323183-24323329
  hypo

SEQ ID NO: 307457 - DNA, 155 bp, Homo sapiens; identical to SEQ ID NO: 200871
  chr7:24323343-24323498
  hypo

SEQ ID NO: 307458 - DNA, 235 bp, Homo sapiens; identical to SEQ ID NO: 200872
  chr7:24323528-24323763
  hypo

SEQ ID NO: 307459 - DNA, 89 bp, Homo sapiens; identical to SEQ ID NO: 200873
  chr7:24323939-24324028
  hypo

SEQ ID NO: 307460 - DNA, 34 bp, Homo sapiens; identical to SEQ ID NO: 200874
  chr7:24324151-24324185
  hypo

SEQ ID NO: 307461 - DNA, 441 bp, Homo sapiens; identical to SEQ ID NO: 284872
  chr7:24324248-24324689
  hypo

SEQ ID NO: 307462 - DNA, 37 bp, Homo sapiens; identical to SEQ ID NO: 257474
  chr7:24990042-24990079
  hypo

SEQ ID NO: 307463 - DNA, 1200 bp, Homo sapiens; identical to SEQ ID NO: 200875
  chr7:25019060-25020260
  hypo

SEQ ID NO: 307464 - DNA, 146 bp, Homo sapiens; identical to SEQ ID NO: 211439
  chr7:25158787-25158933
  hypo

SEQ ID NO: 307465 - DNA, 571 bp, Homo sapiens; identical to SEQ ID NO: 200876
  chr7:25219529-25220100
  hypo

SEQ ID NO: 307466 - DNA, 49 bp, Homo sapiens; identical to SEQ ID NO: 257479
  chr7:25607208-25607257
  hypo

SEQ ID NO: 307467 - DNA, 83 bp, Homo sapiens; identical to SEQ ID NO: 257480
  chr7:25783409-25783492
  hypo

SEQ ID NO: 307468 - DNA, 47 bp, Homo sapiens; identical to SEQ ID NO: 200877
  chr7:25891899-25891946
  hypo

SEQ ID NO: 307469 - DNA, 188 bp, Homo sapiens; identical to SEQ ID NO: 200878
  chr7:25892243-25892431
  hypo

SEQ ID NO: 307470 - DNA, 95 bp, Homo sapiens; identical to SEQ ID NO: 200883
  chr7:25989915-25990010
  hypo

SEQ ID NO: 307471 - DNA, 593 bp, Homo sapiens; identical to SEQ ID NO: 284891
  chr7:25990228-25990821
  hypo

SEQ ID NO: 307472 - DNA, 128 bp, Homo sapiens; identical to SEQ ID NO: 257481
  chr7:26098333-26098461
  hypo

SEQ ID NO: 307473 - DNA, 97 bp, Homo sapiens; identical to SEQ ID NO: 257482
  chr7:26198602-26198699
  hypo

SEQ ID NO: 307474 - DNA, 180 bp, Homo sapiens; identical to SEQ ID NO: 257484
  chr7:26259534-26259714
  hypo

SEQ ID NO: 307475 - DNA, 168 bp, Homo sapiens; identical to SEQ ID NO: 211444
  chr7:26283815-26283983
  hypo

SEQ ID NO: 307476 - DNA, 36 bp, Homo sapiens; identical to SEQ ID NO: 211445
  chr7:26291675-26291711
  hypo

SEQ ID NO: 307477 - DNA, 33 bp, Homo sapiens; identical to SEQ ID NO: 257487
  chr7:26298989-26299022
  hypo

SEQ ID NO: 307478 - DNA, 126 bp, Homo sapiens; identical to SEQ ID NO: 257488
  chr7:26417608-26417734
  hypo

SEQ ID NO: 307479 - DNA, 138 bp, Homo sapiens; identical to SEQ ID NO: 211446
  chr7:26439682-26439820
  hypo

SEQ ID NO: 307480 - DNA, 151 bp, Homo sapiens; identical to SEQ ID NO: 211447
  chr7:26439850-26440001
  hypo

SEQ ID NO: 307481 - DNA, 142 bp, Homo sapiens; identical to SEQ ID NO: 257490
  chr7:26667940-26668082
  hypo

SEQ ID NO: 307482 - DNA, 95 bp, Homo sapiens; identical to SEQ ID NO: 257491
  chr7:26687816-26687911
  hypo

SEQ ID NO: 307483 - DNA, 44 bp, Homo sapiens; identical to SEQ ID NO: 257492
  chr7:26753490-26753534
  hypo

SEQ ID NO: 307484 - DNA, 87 bp, Homo sapiens; identical to SEQ ID NO: 211448
  chr7:27032268-27032355
  hypo

SEQ ID NO: 307485 - DNA, 145 bp, Homo sapiens; identical to SEQ ID NO: 200889
  chr7:27136790-27136935
  hypo

SEQ ID NO: 307486 - DNA, 32 bp, Homo sapiens; identical to SEQ ID NO: 114773
  chr7:27146541-27146573
  hypo

SEQ ID NO: 307487 - DNA, 477 bp, Homo sapiens; identical to SEQ ID NO: 284901
  chr7:27191584-27192061
  hypo

SEQ ID NO: 307488 - DNA, 320 bp, Homo sapiens; identical to SEQ ID NO: 284902
  chr7:27192098-27192418
  hypo

SEQ ID NO: 307489 - DNA, 35 bp, Homo sapiens; identical to SEQ ID NO: 200906
  chr7:27278959-27278994
  hypo

SEQ ID NO: 307490 - DNA, 498 bp, Homo sapiens; identical to SEQ ID NO: 200907
  chr7:27279659-27280157
  hypo

SEQ ID NO: 307491 - DNA, 35 bp, Homo sapiens; identical to SEQ ID NO: 257494
  chr7:27336400-27336435
  hypo

SEQ ID NO: 307492 - DNA, 38 bp, Homo sapiens; identical to SEQ ID NO: 257495
  chr7:27514343-27514381
  hypo

SEQ ID NO: 307493 - DNA, 470 bp, Homo sapiens
  chr7:27531253-27531723
  hypo
ggtctgacatgattgttggccgtggaaggcctcgggccatcctgagctcagatcttggctgccggccgctagggcggctgcttctgcagcagggctagggtgtcccgcttctcaatggagcgcagctgctgctgctttgcccgcttgagcttggcagggtttcggatcacttggacgatctccaccttccgctcgttctccaggcggcatttcaggttctccgcccgacgctgtttcttctcctggcggcgcctctcctactcctcctccaggtgacgggcaaagtccttggccagcttcctctcctgcttcatcttccgctgccacgatatacgcaggggcttgtcctaaagcatctgagagaatcttttcttggagcggtccttccacacttgccccgacttgggcttccccttcgggattacaggaagctcctcctccttcagcttcttggacgctggggcctggga

SEQ ID NO: 307494 - DNA, 71 bp, Homo sapiens; identical to SEQ ID NO: 257497
  chr7:27591612-27591683
  hypo

SEQ ID NO: 307495 - DNA, 129 bp, Homo sapiens; identical to SEQ ID NO: 257498
  chr7:27651038-27651167
  hypo

SEQ ID NO: 307496 - DNA, 188 bp, Homo sapiens; identical to SEQ ID NO: 257499
  chr7:27679515-27679703
  hypo

SEQ ID NO: 307497 - DNA, 31 bp, Homo sapiens; identical to SEQ ID NO: 211454
  chr7:27686737-27686768
  hypo

SEQ ID NO: 307498 - DNA, 102 bp, Homo sapiens; identical to SEQ ID NO: 211455
  chr7:27686815-27686917
  hypo

SEQ ID NO: 307499 - DNA, 193 bp, Homo sapiens; identical to SEQ ID NO: 223061
  chr7:27701810-27702003
  hypo

SEQ ID NO: 307500 - DNA, 41 bp, Homo sapiens; identical to SEQ ID NO: 257501
  chr7:27782388-27782429
  hypo

SEQ ID NO: 307501 - DNA, 167 bp, Homo sapiens; identical to SEQ ID NO: 211456
  chr7:27831634-27831801
  hypo

SEQ ID NO: 307502 - DNA, 225 bp, Homo sapiens; identical to SEQ ID NO: 257503
  chr7:27882584-27882809
  hypo

SEQ ID NO: 307503 - DNA, 393 bp, Homo sapiens
  chr7:27903423-27903816
  hypo
ggaggaaggcatagcgaagacacacaaaaacgtcacctacctgagattcagcttccagcaaatgaaacgcctaagttcaattccctgtcacatttctctctgccagtttttggcaaagaagtgaaactcacaagttgatggaatgcttgtgggcagtggcacttcccgctaggtcaactgccagagaggagcacaggagaatgcaggggctgcctcctccaagccgccagctttgtgaacagagcccggactcaccaggagcgcagggccctgactaccgcctggccgctgtgacgagaccgtcgtcatcctaagggctaatgatgcacagaggaggctgtgactcacccctggctccctcactctgcatcagggaagaaggaagaatgtcac

SEQ ID NO: 307504 - DNA, 203 bp, Homo sapiens; identical to SEQ ID NO: 211458
  chr7:27907623-27907826
  hypo

SEQ ID NO: 307505 - DNA, 91 bp, Homo sapiens; identical to SEQ ID NO: 211459
  chr7:27908068-27908159
  hypo

SEQ ID NO: 307506 - DNA, 148 bp, Homo sapiens; identical to SEQ ID NO: 211460
  chr7:27914809-27914957
  hypo

SEQ ID NO: 307507 - DNA, 184 bp, Homo sapiens; identical to SEQ ID NO: 257507
  chr7:27984539-27984723
  hypo

SEQ ID NO: 307508 - DNA, 329 bp, Homo sapiens; identical to SEQ ID NO: 257508
  chr7:28109347-28109676
  hypo

SEQ ID NO: 307509 - DNA, 38 bp, Homo sapiens; identical to SEQ ID NO: 257510
  chr7:28176530-28176568
  hypo

SEQ ID NO: 307510 - DNA, 129 bp, Homo sapiens; identical to SEQ ID NO: 257511
  chr7:28190080-28190209
  hypo

SEQ ID NO: 307511 - DNA, 36 bp, Homo sapiens; identical to SEQ ID NO: 257512
  chr7:28266793-28266829
  hypo

SEQ ID NO: 307512 - DNA, 202 bp, Homo sapiens; identical to SEQ ID NO: 257513
  chr7:28811874-28812076
  hypo

SEQ ID NO: 307513 - DNA, 32 bp, Homo sapiens; identical to SEQ ID NO: 211462
  chr7:28989195-28989227
  hypo

SEQ ID NO: 307514 - DNA, 49 bp, Homo sapiens; identical to SEQ ID NO: 257515
  chr7:29105618-29105667
  hypo

SEQ ID NO: 307515 - DNA, 37 bp, Homo sapiens; identical to SEQ ID NO: 200915
  chr7:29186197-29186234
  hypo

SEQ ID NO: 307516 - DNA, 135 bp, Homo sapiens; identical to SEQ ID NO: 257516
  chr7:29210728-29210863
  hypo

SEQ ID NO: 307517 - DNA, 496 bp, Homo sapiens; identical to SEQ ID NO: 200916
  chr7:29234008-29234504
  hypo

SEQ ID NO: 307518 - DNA, 180 bp, Homo sapiens; identical to SEQ ID NO: 200917
  chr7:29234886-29235066
  hypo

SEQ ID NO: 307519 - DNA, 160 bp, Homo sapiens; identical to SEQ ID NO: 257517
  chr7:29362350-29362510
  hypo

SEQ ID NO: 307520 - DNA, 34 bp, Homo sapiens; identical to SEQ ID NO: 257518
  chr7:29372516-29372550
  hypo

SEQ ID NO: 307521 - DNA, 80 bp, Homo sapiens; identical to SEQ ID NO: 257519
  chr7:29390375-29390455
  hypo

SEQ ID NO: 307522 - DNA, 100 bp, Homo sapiens; identical to SEQ ID NO: 257520
  chr7:29410049-29410149
  hypo

SEQ ID NO: 307523 - DNA, 32 bp, Homo sapiens; identical to SEQ ID NO: 257521
  chr7:29452225-29452257
  hypo

SEQ ID NO: 307524 - DNA, 34 bp, Homo sapiens
  chr7:29482542-29482576
  hypo
tgaatttctttttttttttttttttgagacggag

SEQ ID NO: 307525 - DNA, 103 bp, Homo sapiens; identical to SEQ ID NO: 257523
  chr7:29682478-29682581
  hypo

SEQ ID NO: 307526 - DNA, 56 bp, Homo sapiens; identical to SEQ ID NO: 257524
  chr7:29689982-29690038
  hypo

SEQ ID NO: 307527 - DNA, 369 bp, Homo sapiens; identical to SEQ ID NO: 200920
  chr7:29724332-29724701
  hypo

SEQ ID NO: 307528 - DNA, 54 bp, Homo sapiens; identical to SEQ ID NO: 200921
  chr7:29725077-29725131
  hypo

SEQ ID NO: 307529 - DNA, 369 bp, Homo sapiens; identical to SEQ ID NO: 200924
  chr7:30028879-30029248
  hypo

SEQ ID NO: 307530 - DNA, 400 bp, Homo sapiens; identical to SEQ ID NO: 284951
  chr7:30029302-30029702
  hypo

SEQ ID NO: 307531 - DNA, 246 bp, Homo sapiens; identical to SEQ ID NO: 200927
  chr7:30067778-30068024
  hypo

SEQ ID NO: 307532 - DNA, 122 bp, Homo sapiens; identical to SEQ ID NO: 257525
  chr7:30205887-30206009
  hypo

SEQ ID NO: 307533 - DNA, 62 bp, Homo sapiens; identical to SEQ ID NO: 211471
  chr7:30341570-30341632
  hypo

SEQ ID NO: 307534 - DNA, 149 bp, Homo sapiens; identical to SEQ ID NO: 211472
  chr7:30516406-30516555
  hypo

SEQ ID NO: 307535 - DNA, 256 bp, Homo sapiens; identical to SEQ ID NO: 200928
  chr7:30517956-30518212
  hypo

SEQ ID NO: 307536 - DNA, 40 bp, Homo sapiens; identical to SEQ ID NO: 257528
  chr7:30596671-30596711
  hypo

SEQ ID NO: 307537 - DNA, 89 bp, Homo sapiens; identical to SEQ ID NO: 257529
  chr7:30599495-30599584
  hypo

SEQ ID NO: 307538 - DNA, 60 bp, Homo sapiens
  chr7:30603331-30603391
  hypo
aactcaccgactcaccgttctggaggctggaagaccaagatcaaagtgttggccgagcca

SEQ ID NO: 307539 - DNA, 131 bp, Homo sapiens
  chr7:30603436-30603567
  hypo
agccccaggcatttgtggcgtgtggcagcatctctccgatctctgcctccatcttcacacggcggtctctgctctgtgtgtgtccagatttccctcttcttaataaggacgcttgtcccactgggttcaga

SEQ ID NO: 307540 - DNA, 154 bp, Homo sapiens; identical to SEQ ID NO: 211474
  chr7:30656754-30656908
  hypo

SEQ ID NO: 307541 - DNA, 164 bp, Homo sapiens; identical to SEQ ID NO: 257532
  chr7:30675597-30675761
  hypo

SEQ ID NO: 307542 - DNA, 412 bp, Homo sapiens; identical to SEQ ID NO: 257533
  chr7:30817952-30818364
  hypo

SEQ ID NO: 307543 - DNA, 117 bp, Homo sapiens; identical to SEQ ID NO: 211476
  chr7:30857292-30857409
  hypo

SEQ ID NO: 307544 - DNA, 95 bp, Homo sapiens; identical to SEQ ID NO: 257535
  chr7:30902138-30902233
  hypo

SEQ ID NO: 307545 - DNA, 50 bp, Homo sapiens; identical to SEQ ID NO: 211477
  chr7:30921727-30921777
  hypo

SEQ ID NO: 307546 - DNA, 173 bp, Homo sapiens; identical to SEQ ID NO: 257537
  chr7:30922908-30923081
  hypo

SEQ ID NO: 307547 - DNA, 79 bp, Homo sapiens; identical to SEQ ID NO: 257538
  chr7:30925107-30925186
  hypo

SEQ ID NO: 307548 - DNA, 42 bp, Homo sapiens; identical to SEQ ID NO: 257539
  chr7:30928162-30928204
  hypo

SEQ ID NO: 307549 - DNA, 120 bp, Homo sapiens; identical to SEQ ID NO: 257540
  chr7:30934601-30934721
  hypo

SEQ ID NO: 307550 - DNA, 139 bp, Homo sapiens; identical to SEQ ID NO: 211478
  chr7:30944106-30944245
  hypo

SEQ ID NO: 307551 - DNA, 115 bp, Homo sapiens; identical to SEQ ID NO: 257542
  chr7:30946539-30946654
  hypo

SEQ ID NO: 307552 - DNA, 42 bp, Homo sapiens; identical to SEQ ID NO: 257543
  chr7:30971902-30971944
  hypo

SEQ ID NO: 307553 - DNA, 216 bp, Homo sapiens; identical to SEQ ID NO: 211479
  chr7:30972824-30973040
  hypo

SEQ ID NO: 307554 - DNA, 115 bp, Homo sapiens; identical to SEQ ID NO: 257545
  chr7:31018779-31018894
  hypo

SEQ ID NO: 307555 - DNA, 299 bp, Homo sapiens; identical to SEQ ID NO: 257546
  chr7:31032047-31032346
  hypo

SEQ ID NO: 307556 - DNA, 163 bp, Homo sapiens; identical to SEQ ID NO: 257547
  chr7:31068265-31068428
  hypo

SEQ ID NO: 307557 - DNA, 69 bp, Homo sapiens; identical to SEQ ID NO: 200930
  chr7:31091826-31091895
  hypo

SEQ ID NO: 307558 - DNA, 137 bp, Homo sapiens; identical to SEQ ID NO: 257548
  chr7:31939010-31939147
  hypo

SEQ ID NO: 307559 - DNA, 100 bp, Homo sapiens; identical to SEQ ID NO: 257549
  chr7:32128068-32128168
  hypo

SEQ ID NO: 307560 - DNA, 31 bp, Homo sapiens; identical to SEQ ID NO: 257550
  chr7:32416317-32416348
  hypo

SEQ ID NO: 307561 - DNA, 31 bp, Homo sapiens; identical to SEQ ID NO: 257551
  chr7:32416588-32416619
  hypo

SEQ ID NO: 307562 - DNA, 130 bp, Homo sapiens; identical to SEQ ID NO: 257552
  chr7:32609661-32609791
  hypo

SEQ ID NO: 307563 - DNA, 196 bp, Homo sapiens; identical to SEQ ID NO: 211482
  chr7:32630925-32631121
  hypo

SEQ ID NO: 307564 - DNA, 375 bp, Homo sapiens; identical to SEQ ID NO: 284966
  chr7:32768220-32768595
  hypo

SEQ ID NO: 307565 - DNA, 346 bp, Homo sapiens; identical to SEQ ID NO: 284967
  chr7:32981766-32982112
  hypo

SEQ ID NO: 307566 - DNA, 701 bp, Homo sapiens; identical to SEQ ID NO: 200939
  chr7:32982270-32982971
  hypo

SEQ ID NO: 307567 - DNA, 227 bp, Homo sapiens; identical to SEQ ID NO: 200940
  chr7:32996717-32996944
  hypo

SEQ ID NO: 307568 - DNA, 157 bp, Homo sapiens; identical to SEQ ID NO: 200941
  chr7:32997454-32997611
  hypo

SEQ ID NO: 307569 - DNA, 32 bp, Homo sapiens; identical to SEQ ID NO: 211487
  chr7:33026795-33026827
  hypo

SEQ ID NO: 307570 - DNA, 186 bp, Homo sapiens; identical to SEQ ID NO: 211488
  chr7:33139663-33139849
  hypo

SEQ ID NO: 307571 - DNA, 207 bp, Homo sapiens; identical to SEQ ID NO: 257556
  chr7:33542772-33542979
  hypo

SEQ ID NO: 307572 - DNA, 73 bp, Homo sapiens
  chr7:33725730-33725803
  hypo
aacagctcctctagtggcagcgcaattgggcatcctggctgctgtgtgtggcgcacgcggcccaggcctgagc

SEQ ID NO: 307573 - DNA, 79 bp, Homo sapiens
  chr7:33725938-33726017
  hypo
ggtaagcactgaggcggtaacctaacactcttgcgaggtgctttgggcttagctggccgattcctcattgaatgatgtt

SEQ ID NO: 307574 - DNA, 42 bp, Homo sapiens; identical to SEQ ID NO: 257558
  chr7:33737759-33737801
  hypo

SEQ ID NO: 307575 - DNA, 227 bp, Homo sapiens; identical to SEQ ID NO: 257559
  chr7:33877124-33877351
  hypo

SEQ ID NO: 307576 - DNA, 36 bp, Homo sapiens; identical to SEQ ID NO: 257560
  chr7:33899153-33899189
  hypo

SEQ ID NO: 307577 - DNA, 42 bp, Homo sapiens; identical to SEQ ID NO: 211489
  chr7:34034217-34034259
  hypo

SEQ ID NO: 307578 - DNA, 140 bp, Homo sapiens; identical to SEQ ID NO: 211490
  chr7:34349352-34349492
  hypo

SEQ ID NO: 307579 - DNA, 44 bp, Homo sapiens; identical to SEQ ID NO: 257563
  chr7:34526629-34526673
  hypo

SEQ ID NO: 307580 - DNA, 97 bp, Homo sapiens; identical to SEQ ID NO: 211491
  chr7:35042666-35042763
  hypo

SEQ ID NO: 307581 - DNA, 31 bp, Homo sapiens; identical to SEQ ID NO: 257565
  chr7:35066801-35066832
  hypo

SEQ ID NO: 307582 - DNA, 36 bp, Homo sapiens; identical to SEQ ID NO: 211492
  chr7:35190412-35190448
  hypo

SEQ ID NO: 307583 - DNA, 115 bp, Homo sapiens
  chr7:35349991-35350106
  hypo
ttctgggctacgggcgatgtgcattgcttgacctgggagatggttacactggtataatcattttcactcaatgctcatgaatgtcttaactgccccatgcctcccacacccagac

SEQ ID NO: 307584 - DNA, 41 bp, Homo sapiens; identical to SEQ ID NO: 257569
  chr7:35994751-35994792
  hypo

SEQ ID NO: 307585 - DNA, 133 bp, Homo sapiens; identical to SEQ ID NO: 257570
  chr7:36008765-36008898
  hypo

SEQ ID NO: 307586 - DNA, 289 bp, Homo sapiens; identical to SEQ ID NO: 211493
  chr7:36124378-36124667
  hypo

SEQ ID NO: 307587 - DNA, 41 bp, Homo sapiens; identical to SEQ ID NO: 257572
  chr7:36134137-36134178
  hypo

SEQ ID NO: 307588 - DNA, 41 bp, Homo sapiens; identical to SEQ ID NO: 257573
  chr7:36134208-36134249
  hypo

SEQ ID NO: 307589 - DNA, 1059 bp, Homo sapiens; identical to SEQ ID NO: 284978
  chr7:36192233-36193292
  hypo

SEQ ID NO: 307590 - DNA, 506 bp, Homo sapiens; identical to SEQ ID NO: 257574
  chr7:36338990-36339496
  hypo

SEQ ID NO: 307591 - DNA, 34 bp, Homo sapiens; identical to SEQ ID NO: 257575
  chr7:36343958-36343992
  hypo

SEQ ID NO: 307592 - DNA, 35 bp, Homo sapiens; identical to SEQ ID NO: 257576
  chr7:36349959-36349994
  hypo

SEQ ID NO: 307593 - DNA, 355 bp, Homo sapiens; identical to SEQ ID NO: 257577
  chr7:36352555-36352910
  hypo

SEQ ID NO: 307594 - DNA, 43 bp, Homo sapiens; identical to SEQ ID NO: 257579
  chr7:36823504-36823547
  hypo

SEQ ID NO: 307595 - DNA, 240 bp, Homo sapiens; identical to SEQ ID NO: 257580
  chr7:36825465-36825705
  hypo

SEQ ID NO: 307596 - DNA, 109 bp, Homo sapiens; identical to SEQ ID NO: 257581
  chr7:36836027-36836136
  hypo

SEQ ID NO: 307597 - DNA, 553 bp, Homo sapiens; identical to SEQ ID NO: 211496
  chr7:36894941-36895494
  hypo

SEQ ID NO: 307598 - DNA, 177 bp, Homo sapiens; identical to SEQ ID NO: 257583
  chr7:36901365-36901542
  hypo

SEQ ID NO: 307599 - DNA, 45 bp, Homo sapiens; identical to SEQ ID NO: 257584
  chr7:36941501-36941546
  hypo

SEQ ID NO: 307600 - DNA, 54 bp, Homo sapiens; identical to SEQ ID NO: 257585
  chr7:36985067-36985121
  hypo

SEQ ID NO: 307601 - DNA, 104 bp, Homo sapiens; identical to SEQ ID NO: 211497
  chr7:37250876-37250980
  hypo

SEQ ID NO: 307602 - DNA, 72 bp, Homo sapiens; identical to SEQ ID NO: 211498
  chr7:37264539-37264611
  hypo

SEQ ID NO: 307603 - DNA, 332 bp, Homo sapiens; identical to SEQ ID NO: 257589
  chr7:37458222-37458554
  hypo

SEQ ID NO: 307604 - DNA, 189 bp, Homo sapiens; identical to SEQ ID NO: 200947
  chr7:37960958-37961147
  hypo

SEQ ID NO: 307605 - DNA, 142 bp, Homo sapiens; identical to SEQ ID NO: 257590
  chr7:38089576-38089718
  hypo

SEQ ID NO: 307606 - DNA, 285 bp, Homo sapiens; identical to SEQ ID NO: 257591
  chr7:38725398-38725683
  hypo

SEQ ID NO: 307607 - DNA, 275 bp, Homo sapiens; identical to SEQ ID NO: 257592
  chr7:38726298-38726573
  hypo

SEQ ID NO: 307608 - DNA, 66 bp, Homo sapiens; identical to SEQ ID NO: 257593
  chr7:38787793-38787859
  hypo

SEQ ID NO: 307609 - DNA, 132 bp, Homo sapiens; identical to SEQ ID NO: 257594
  chr7:38943827-38943959
  hypo

SEQ ID NO: 307610 - DNA, 131 bp, Homo sapiens; identical to SEQ ID NO: 257595
  chr7:38974187-38974318
  hypo

SEQ ID NO: 307611 - DNA, 35 bp, Homo sapiens; identical to SEQ ID NO: 200949
  chr7:39453506-39453541
  hypo

SEQ ID NO: 307612 - DNA, 60 bp, Homo sapiens; identical to SEQ ID NO: 257596
  chr7:39503985-39504045
  hypo

SEQ ID NO: 307613 - DNA, 37 bp, Homo sapiens; identical to SEQ ID NO: 257597
  chr7:39942871-39942908
  hypo

SEQ ID NO: 307614 - DNA, 166 bp, Homo sapiens; identical to SEQ ID NO: 257598
  chr7:40027212-40027378
  hypo

SEQ ID NO: 307615 - DNA, 32 bp, Homo sapiens; identical to SEQ ID NO: 257599
  chr7:40156753-40156785
  hypo

SEQ ID NO: 307616 - DNA, 60 bp, Homo sapiens
  chr7:40157025-40157085
  hypo
tactacagaatgctattatacttgtgaaattctcttgtctaacctgaatttacattccat

SEQ ID NO: 307617 - DNA, 106 bp, Homo sapiens; identical to SEQ ID NO: 211502
  chr7:40766265-40766371
  hypo

SEQ ID NO: 307618 - DNA, 38 bp, Homo sapiens; identical to SEQ ID NO: 257602
  chr7:40840156-40840194
  hypo

SEQ ID NO: 307619 - DNA, 189 bp, Homo sapiens
  chr7:40938943-40939132
  hypo
cacctcggtggctataaatacgccctgtgaatgcaattacgtgatggaacgcaggctgcgccaaagcctctttgctccaggctatggtgtcagccatttacctctgtgaagcatataaaaagacacgcgactcaagaggcaacgcacacgctgagacagaaagcaagagcacaacgaaaaatacaacaa

SEQ ID NO: 307620 - DNA, 145 bp, Homo sapiens; identical to SEQ ID NO: 257604
  chr7:40939651-40939796
  hypo

SEQ ID NO: 307621 - DNA, 299 bp, Homo sapiens; identical to SEQ ID NO: 257605
  chr7:41176259-41176558
  hypo

SEQ ID NO: 307622 - DNA, 153 bp, Homo sapiens; identical to SEQ ID NO: 257606
  chr7:41764777-41764930
  hypo

SEQ ID NO: 307623 - DNA, 36 bp, Homo sapiens; identical to SEQ ID NO: 211503
  chr7:41840523-41840559
  hypo

SEQ ID NO: 307624 - DNA, 517 bp, Homo sapiens; identical to SEQ ID NO: 211504
  chr7:42004852-42005369
  hypo

SEQ ID NO: 307625 - DNA, 689 bp, Homo sapiens; identical to SEQ ID NO: 211505
  chr7:42005528-42006217
  hypo

SEQ ID NO: 307626 - DNA, 57 bp, Homo sapiens; identical to SEQ ID NO: 257609
  chr7:42142438-42142495
  hypo

SEQ ID NO: 307627 - DNA, 31 bp, Homo sapiens; identical to SEQ ID NO: 211506
  chr7:42169114-42169145
  hypo

SEQ ID NO: 307628 - DNA, 31 bp, Homo sapiens; identical to SEQ ID NO: 211507
  chr7:42169385-42169416
  hypo

SEQ ID NO: 307629 - DNA, 272 bp, Homo sapiens; identical to SEQ ID NO: 257612
  chr7:42237186-42237458
  hypo

SEQ ID NO: 307630 - DNA, 408 bp, Homo sapiens; identical to SEQ ID NO: 200954
  chr7:42276904-42277312
  hypo

SEQ ID NO: 307631 - DNA, 60 bp, Homo sapiens; identical to SEQ ID NO: 200955
  chr7:42277588-42277648
  hypo

SEQ ID NO: 307632 - DNA, 42 bp, Homo sapiens; identical to SEQ ID NO: 257613
  chr7:42353124-42353166
  hypo

SEQ ID NO: 307633 - DNA, 143 bp, Homo sapiens; identical to SEQ ID NO: 257614
  chr7:42440833-42440976
  hypo

SEQ ID NO: 307634 - DNA, 178 bp, Homo sapiens; identical to SEQ ID NO: 257615
  chr7:42812190-42812368
  hypo

SEQ ID NO: 307635 - DNA, 221 bp, Homo sapiens; identical to SEQ ID NO: 257616
  chr7:42834367-42834588
  hypo

SEQ ID NO: 307636 - DNA, 197 bp, Homo sapiens; identical to SEQ ID NO: 257618
  chr7:43116310-43116507
  hypo

SEQ ID NO: 307637 - DNA, 144 bp, Homo sapiens; identical to SEQ ID NO: 257619
  chr7:43237314-43237458
  hypo

SEQ ID NO: 307638 - DNA, 32 bp, Homo sapiens; identical to SEQ ID NO: 257621
  chr7:43279920-43279952
  hypo

SEQ ID NO: 307639 - DNA, 77 bp, Homo sapiens; identical to SEQ ID NO: 257622
  chr7:43313712-43313789
  hypo

SEQ ID NO: 307640 - DNA, 32 bp, Homo sapiens; identical to SEQ ID NO: 257623
  chr7:43409045-43409077
  hypo

SEQ ID NO: 307641 - DNA, 93 bp, Homo sapiens; identical to SEQ ID NO: 257624
  chr7:43594218-43594311
  hypo

SEQ ID NO: 307642 - DNA, 33 bp, Homo sapiens; identical to SEQ ID NO: 257625
  chr7:43799758-43799791
  hypo

SEQ ID NO: 307643 - DNA, 185 bp, Homo sapiens; identical to SEQ ID NO: 257626
  chr7:43827245-43827430
  hypo

SEQ ID NO: 307644 - DNA, 291 bp, Homo sapiens; identical to SEQ ID NO: 211510
  chr7:44153137-44153428
  hypo

SEQ ID NO: 307645 - DNA, 36 bp, Homo sapiens; identical to SEQ ID NO: 257631
  chr7:44250466-44250502
  hypo

SEQ ID NO: 307646 - DNA, 322 bp, Homo sapiens; identical to SEQ ID NO: 257632
  chr7:44256925-44257247
  hypo

SEQ ID NO: 307647 - DNA, 95 bp, Homo sapiens
  chr7:44258654-44258749
  hypo
gagcccatgcgttggcaggaggatgcagacaccttaggtgtggggtgtgtgcgttacctacaaactaacaccgttcagcacgcgacgggggcctg

SEQ ID NO: 307648 - DNA, 91 bp, Homo sapiens; identical to SEQ ID NO: 257634
  chr7:44279651-44279742
  hypo

SEQ ID NO: 307649 - DNA, 37 bp, Homo sapiens; identical to SEQ ID NO: 257635
  chr7:44301708-44301745
  hypo

SEQ ID NO: 307650 - DNA, 99 bp, Homo sapiens; identical to SEQ ID NO: 257636
  chr7:44311757-44311856
  hypo

SEQ ID NO: 307651 - DNA, 36 bp, Homo sapiens; identical to SEQ ID NO: 285009
  chr7:44364449-44364485
  hypo

SEQ ID NO: 307652 - DNA, 384 bp, Homo sapiens; identical to SEQ ID NO: 285010
  chr7:44365258-44365642
  hypo

SEQ ID NO: 307653 - DNA, 187 bp, Homo sapiens
  chr7:44431034-44431221
  hypo
agacaatccagatacaccacaaggtaaggttcctccaagagacaaaatgagaagaaaatatcgatcagcgatcttcagggggaggaggcggtccgtgtttacagaacaaaaataaggagactgtgcccagcagatgacccctccccactgactcaaggctgcactgcgtccgcgtgccctgctgtac

SEQ ID NO: 307654 - DNA, 144 bp, Homo sapiens; identical to SEQ ID NO: 211511
  chr7:44582326-44582470
  hypo

SEQ ID NO: 307655 - DNA, 272 bp, Homo sapiens
  chr7:44582529-44582801
  hypo
tgtgtcagaacaaagatatgaaaggcccaccctgcctttcatatgtttcttcccatgggggctgtctaggctaagcccctggagcccagctgtgcccagtctagcaccacagagagatagagtccagctatgtggtctcctggggtcatttgtgaaacacacgcagcataacagcggcacaatccggctcggaatgacagtgaaaatttcacacccgatctcccaacccagctgccggtgcctctggacacacgtgccgagctgtaaccata

SEQ ID NO: 307656 - DNA, 39 bp, Homo sapiens; identical to SEQ ID NO: 211512
  chr7:44583394-44583433
  hypo

SEQ ID NO: 307657 - DNA, 141 bp, Homo sapiens; identical to SEQ ID NO: 211513
  chr7:44611081-44611222
  hypo

SEQ ID NO: 307658 - DNA, 66 bp, Homo sapiens; identical to SEQ ID NO: 211514
  chr7:44612063-44612129
  hypo

SEQ ID NO: 307659 - DNA, 31 bp, Homo sapiens; identical to SEQ ID NO: 211515
  chr7:44740322-44740353
  hypo

SEQ ID NO: 307660 - DNA, 72 bp, Homo sapiens; identical to SEQ ID NO: 211516
  chr7:44740672-44740744
  hypo

SEQ ID NO: 307661 - DNA, 379 bp, Homo sapiens
  chr7:44746536-44746915
  hypo
atactcttgtccccgaagtctgagccaagctgttttgaaggctagcctggtgttacttgatacccagagctggccatgtctgctgtgtatttgttacacgtaacgtgcttttcaaagtgtgcctggtctgagcaaatacagggcatcagaggctggtgaaggggaagcatctctaacccttgaaagctgcgtctcctggcagcagtccctggcacagccctgggcccaggagagctctcagccacatacctgagagaaccagcctagccatgggaactctcttgtaggaacccacttccagcgggtgatcccagaagatggccctgcagctcagaacccagaaaatgtcaaaaggcttctcttctgcaccggcaaagtg

SEQ ID NO: 307662 - DNA, 93 bp, Homo sapiens; identical to SEQ ID NO: 211518
  chr7:44746945-44747038
  hypo

SEQ ID NO: 307663 - DNA, 148 bp, Homo sapiens; identical to SEQ ID NO: 257646
  chr7:44750444-44750592
  hypo

SEQ ID NO: 307664 - DNA, 428 bp, Homo sapiens
  chr7:44801215-44801643
  hypo
tgacccccacgaggctctgttcctcctcccacactctcagggcccgttttctgggtgtccacccatcttcctgagcaggcctgacctggagctgcaattcaagtgctaccaccacgaggaccggcagatgaacaccaactggccagcctcggtgcaggtcagcgtcaatgccacgccgctcaccatcgagcgtggcgacaacaagacctcgcacaagccactctacctgaagcatgtgtgccagccaggccgcaacaccatccagatcaccgtcaccgcctgctgctgcgtgcgtgtcctgcgccgagggggcggtgctgtggcgtggggcggggtgtggtggggcctggcccagcggtgccgtggggtggggcggggtgtgggcggggcctggcccagcggcgcagtgggagcggagccaggacatg

SEQ ID NO: 307665 - DNA, 32 bp, Homo sapiens; identical to SEQ ID NO: 257649
  chr7:44844994-44845026
  hypo

SEQ ID NO: 307666 - DNA, 96 bp, Homo sapiens; identical to SEQ ID NO: 257650
  chr7:44912167-44912263
  hypo

SEQ ID NO: 307667 - DNA, 174 bp, Homo sapiens; identical to SEQ ID NO: 285016
  chr7:44924079-44924253
  hypo

SEQ ID NO: 307668 - DNA, 309 bp, Homo sapiens; identical to SEQ ID NO: 200961
  chr7:44924469-44924778
  hypo

SEQ ID NO: 307669 - DNA, 623 bp, Homo sapiens; identical to SEQ ID NO: 223093
  chr7:45026005-45026628
  hypo

SEQ ID NO: 307670 - DNA, 163 bp, Homo sapiens; identical to SEQ ID NO: 211521
  chr7:45091550-45091713
  hypo

SEQ ID NO: 307671 - DNA, 138 bp, Homo sapiens; identical to SEQ ID NO: 257653
  chr7:45115574-45115712
  hypo

SEQ ID NO: 307672 - DNA, 166 bp, Homo sapiens; identical to SEQ ID NO: 211522
  chr7:45125709-45125875
  hypo

SEQ ID NO: 307673 - DNA, 38 bp, Homo sapiens; identical to SEQ ID NO: 211523
  chr7:45222825-45222863
  hypo

SEQ ID NO: 307674 - DNA, 68 bp, Homo sapiens; identical to SEQ ID NO: 211524
  chr7:45222971-45223039
  hypo

SEQ ID NO: 307675 - DNA, 103 bp, Homo sapiens; identical to SEQ ID NO: 257656
  chr7:45252688-45252791
  hypo

SEQ ID NO: 307676 - DNA, 153 bp, Homo sapiens; identical to SEQ ID NO: 211525
  chr7:45262245-45262398
  hypo

SEQ ID NO: 307677 - DNA, 189 bp, Homo sapiens; identical to SEQ ID NO: 44188
  chr7:45299683-45299872
  hypo

SEQ ID NO: 307678 - DNA, 96 bp, Homo sapiens; identical to SEQ ID NO: 257658
  chr7:45431198-45431294
  hypo

SEQ ID NO: 307679 - DNA, 240 bp, Homo sapiens; identical to SEQ ID NO: 257659
  chr7:45439018-45439258
  hypo

SEQ ID NO: 307680 - DNA, 180 bp, Homo sapiens; identical to SEQ ID NO: 257660
  chr7:45632339-45632519
  hypo

SEQ ID NO: 307681 - DNA, 61 bp, Homo sapiens; identical to SEQ ID NO: 211526
  chr7:45743036-45743097
  hypo

SEQ ID NO: 307682 - DNA, 45 bp, Homo sapiens; identical to SEQ ID NO: 257662
  chr7:45809383-45809428
  hypo

SEQ ID NO: 307683 - DNA, 147 bp, Homo sapiens; identical to SEQ ID NO: 211527
  chr7:47088919-47089066
  hypo

SEQ ID NO: 307684 - DNA, 153 bp, Homo sapiens; identical to SEQ ID NO: 223096
  chr7:47293661-47293814
  hypo

SEQ ID NO: 307685 - DNA, 173 bp, Homo sapiens; identical to SEQ ID NO: 200965
  chr7:47294081-47294254
  hypo

SEQ ID NO: 307686 - DNA, 282 bp, Homo sapiens; identical to SEQ ID NO: 257664
  chr7:47338286-47338568
  hypo

SEQ ID NO: 307687 - DNA, 84 bp, Homo sapiens; identical to SEQ ID NO: 257665
  chr7:47340361-47340445
  hypo

SEQ ID NO: 307688 - DNA, 319 bp, Homo sapiens; identical to SEQ ID NO: 211529
  chr7:47343228-47343547
  hypo

SEQ ID NO: 307689 - DNA, 134 bp, Homo sapiens; identical to SEQ ID NO: 257667
  chr7:47370841-47370975
  hypo

SEQ ID NO: 307690 - DNA, 44 bp, Homo sapiens; identical to SEQ ID NO: 257668
  chr7:47384308-47384352
  hypo

SEQ ID NO: 307691 - DNA, 255 bp, Homo sapiens; identical to SEQ ID NO: 257670
  chr7:47410354-47410609
  hypo

SEQ ID NO: 307692 - DNA, 428 bp, Homo sapiens; identical to SEQ ID NO: 211530
  chr7:47440318-47440746
  hypo

SEQ ID NO: 307693 - DNA, 87 bp, Homo sapiens; identical to SEQ ID NO: 257673
  chr7:47446856-47446943
  hypo

SEQ ID NO: 307694 - DNA, 92 bp, Homo sapiens; identical to SEQ ID NO: 211531
  chr7:47515267-47515359
  hypo

SEQ ID NO: 307695 - DNA, 168 bp, Homo sapiens; identical to SEQ ID NO: 211532
  chr7:47515405-47515573
  hypo

SEQ ID NO: 307696 - DNA, 149 bp, Homo sapiens; identical to SEQ ID NO: 257676
  chr7:47544599-47544748
  hypo

SEQ ID NO: 307697 - DNA, 71 bp, Homo sapiens; identical to SEQ ID NO: 211533
  chr7:47581607-47581678
  hypo

SEQ ID NO: 307698 - DNA, 35 bp, Homo sapiens; identical to SEQ ID NO: 257678
  chr7:47591522-47591557
  hypo

SEQ ID NO: 307699 - DNA, 451 bp, Homo sapiens; identical to SEQ ID NO: 211534
  chr7:47605260-47605711
  hypo

SEQ ID NO: 307700 - DNA, 69 bp, Homo sapiens; identical to SEQ ID NO: 257680
  chr7:47612934-47613003
  hypo

SEQ ID NO: 307701 - DNA, 38 bp, Homo sapiens; identical to SEQ ID NO: 211535
  chr7:47615110-47615148
  hypo

SEQ ID NO: 307702 - DNA, 221 bp, Homo sapiens; identical to SEQ ID NO: 200967
  chr7:47621699-47621920
  hypo

SEQ ID NO: 307703 - DNA, 31 bp, Homo sapiens; identical to SEQ ID NO: 257682
  chr7:47628646-47628677
  hypo

SEQ ID NO: 307704 - DNA, 86 bp, Homo sapiens; identical to SEQ ID NO: 257683
  chr7:47639913-47639999
  hypo

SEQ ID NO: 307705 - DNA, 151 bp, Homo sapiens; identical to SEQ ID NO: 211537
  chr7:47679854-47680005
  hypo

SEQ ID NO: 307706 - DNA, 62 bp, Homo sapiens; identical to SEQ ID NO: 257685
  chr7:47711089-47711151
  hypo

SEQ ID NO: 307707 - DNA, 33 bp, Homo sapiens; identical to SEQ ID NO: 257686
  chr7:48093728-48093761
  hypo

SEQ ID NO: 307708 - DNA, 262 bp, Homo sapiens; identical to SEQ ID NO: 200969
  chr7:48127995-48128257
  hypo

SEQ ID NO: 307709 - DNA, 115 bp, Homo sapiens; identical to SEQ ID NO: 257687
  chr7:48147030-48147145
  hypo

SEQ ID NO: 307710 - DNA, 31 bp, Homo sapiens; identical to SEQ ID NO: 257688
  chr7:48212093-48212124
  hypo

SEQ ID NO: 307711 - DNA, 49 bp, Homo sapiens; identical to SEQ ID NO: 211539
  chr7:48964017-48964066
  hypo

SEQ ID NO: 307712 - DNA, 51 bp, Homo sapiens; identical to SEQ ID NO: 257691
  chr7:49842430-49842481
  hypo

SEQ ID NO: 307713 - DNA, 95 bp, Homo sapiens; identical to SEQ ID NO: 257692
  chr7:50221917-50222012
  hypo

SEQ ID NO: 307714 - DNA, 109 bp, Homo sapiens
  chr7:50251628-50251737
  hypo
agcatgctggcattgggaagaggcaccctcacactggcatcgggaggaggtgtccatatgttggcatcaggaggaggtgtccacacgctggtatcgggaagcaggtgtc

SEQ ID NO: 307715 - DNA, 349 bp, Homo sapiens
  chr7:50341935-50342284
  hypo
gagagacgtaccagcggctaaaggtacttctgcatccaagaactagaggtgtcccgtgtcccctttacaacattgttggcctccctctgggccttgtaccttatgtttattgcctcatttaatccaggtaaggagtctttaggattggtggcatgtattctttttatagacaaggaagatgatgctcaggagtttggataacctgcccaaggtcacgcagtggaggagaggactagaaggtaaatcaatggacctttcactaccttccccttctctgggctgtagcagtgagttaactggctcagacttgcccagcggaatgcccttcaggacacactgagtactgtag

SEQ ID NO: 307716 - DNA, 348 bp, Homo sapiens
  chr7:50342314-50342662
  hypo
tggatagacgctgtttgtgattcacgggtaaagggccttctcccagaggcagcagaggcagatcctgtctctggtgtgccctggcccccgacttggaggcctcctgggccaggccaagaccttccccggcagcgatggtctccagccacactcaactgccctgaagggacatttcctgcttattcccttgcccggctgtgtcctccacccggaaggcctgtgccttcttcgcctgcatgtcctaccctgaggaggctcccttggtctttcatcgctctccctatgggtcttcacgccttcccgaaccaccgcgcccaagcaggagcacgttctcggccctcttcacag

SEQ ID NO: 307717 - DNA, 116 bp, Homo sapiens; identical to SEQ ID NO: 200970
  chr7:50344738-50344854
  hypo

SEQ ID NO: 307718 - DNA, 153 bp, Homo sapiens; identical to SEQ ID NO: 257698
  chr7:50415431-50415584
  hypo

SEQ ID NO: 307719 - DNA, 180 bp, Homo sapiens; identical to SEQ ID NO: 257700
  chr7:50443887-50444067
  hypo

SEQ ID NO: 307720 - DNA, 56 bp, Homo sapiens; identical to SEQ ID NO: 211543
  chr7:50447754-50447810
  hypo

SEQ ID NO: 307721 - DNA, 167 bp, Homo sapiens; identical to SEQ ID NO: 257702
  chr7:50450251-50450418
  hypo

SEQ ID NO: 307722 - DNA, 108 bp, Homo sapiens; identical to SEQ ID NO: 257703
  chr7:50460166-50460274
  hypo

SEQ ID NO: 307723 - DNA, 103 bp, Homo sapiens; identical to SEQ ID NO: 211544
  chr7:50514846-50514949
  hypo

SEQ ID NO: 307724 - DNA, 43 bp, Homo sapiens; identical to SEQ ID NO: 257705
  chr7:50537914-50537957
  hypo

SEQ ID NO: 307725 - DNA, 76 bp, Homo sapiens; identical to SEQ ID NO: 211545
  chr7:50560481-50560557
  hypo

SEQ ID NO: 307726 - DNA, 241 bp, Homo sapiens; identical to SEQ ID NO: 211546
  chr7:50560663-50560904
  hypo

SEQ ID NO: 307727 - DNA, 250 bp, Homo sapiens; identical to SEQ ID NO: 257707
  chr7:50611649-50611899
  hypo

SEQ ID NO: 307728 - DNA, 355 bp, Homo sapiens; identical to SEQ ID NO: 257708
  chr7:50654699-50655054
  hypo

SEQ ID NO: 307729 - DNA, 112 bp, Homo sapiens; identical to SEQ ID NO: 211549
  chr7:50658396-50658508
  hypo

SEQ ID NO: 307730 - DNA, 103 bp, Homo sapiens; identical to SEQ ID NO: 211550
  chr7:50659743-50659846
  hypo

SEQ ID NO: 307731 - DNA, 624 bp, Homo sapiens; identical to SEQ ID NO: 257711
  chr7:50660382-50661006
  hypo

SEQ ID NO: 307732 - DNA, 89 bp, Homo sapiens; identical to SEQ ID NO: 257712
  chr7:50667300-50667389
  hypo

SEQ ID NO: 307733 - DNA, 202 bp, Homo sapiens; identical to SEQ ID NO: 257713
  chr7:50687516-50687718
  hypo

SEQ ID NO: 307734 - DNA, 166 bp, Homo sapiens; identical to SEQ ID NO: 257714
  chr7:50695454-50695620
  hypo

SEQ ID NO: 307735 - DNA, 203 bp, Homo sapiens; identical to SEQ ID NO: 257715
  chr7:50709530-50709733
  hypo

SEQ ID NO: 307736 - DNA, 190 bp, Homo sapiens; identical to SEQ ID NO: 211552
  chr7:50715838-50716028
  hypo

SEQ ID NO: 307737 - DNA, 108 bp, Homo sapiens; identical to SEQ ID NO: 211553
  chr7:50720336-50720444
  hypo

SEQ ID NO: 307738 - DNA, 46 bp, Homo sapiens; identical to SEQ ID NO: 257718
  chr7:50734033-50734079
  hypo

SEQ ID NO: 307739 - DNA, 37 bp, Homo sapiens; identical to SEQ ID NO: 257719
  chr7:50740987-50741024
  hypo

SEQ ID NO: 307740 - DNA, 82 bp, Homo sapiens; identical to SEQ ID NO: 257720
  chr7:50769974-50770056
  hypo

SEQ ID NO: 307741 - DNA, 257 bp, Homo sapiens; identical to SEQ ID NO: 257721
  chr7:50801206-50801463
  hypo

SEQ ID NO: 307742 - DNA, 210 bp, Homo sapiens; identical to SEQ ID NO: 257722
  chr7:50816099-50816309
  hypo

SEQ ID NO: 307743 - DNA, 81 bp, Homo sapiens; identical to SEQ ID NO: 257723
  chr7:50821773-50821854
  hypo

SEQ ID NO: 307744 - DNA, 179 bp, Homo sapiens; identical to SEQ ID NO: 257724
  chr7:50823230-50823409
  hypo

SEQ ID NO: 307745 - DNA, 172 bp, Homo sapiens; identical to SEQ ID NO: 257725
  chr7:50853192-50853364
  hypo

SEQ ID NO: 307746 - DNA, 204 bp, Homo sapiens; identical to SEQ ID NO: 257726
  chr7:50876168-50876372
  hypo

SEQ ID NO: 307747 - DNA, 42 bp, Homo sapiens; identical to SEQ ID NO: 257727
  chr7:50905759-50905801
  hypo

SEQ ID NO: 307748 - DNA, 191 bp, Homo sapiens; identical to SEQ ID NO: 211554
  chr7:50935531-50935722
  hypo

SEQ ID NO: 307749 - DNA, 159 bp, Homo sapiens; identical to SEQ ID NO: 211555
  chr7:51083468-51083627
  hypo

SEQ ID NO: 307750 - DNA, 361 bp, Homo sapiens; identical to SEQ ID NO: 257730
  chr7:51092657-51093018
  hypo

SEQ ID NO: 307751 - DNA, 184 bp, Homo sapiens; identical to SEQ ID NO: 211557
  chr7:51098965-51099149
  hypo

SEQ ID NO: 307752 - DNA, 40 bp, Homo sapiens; identical to SEQ ID NO: 257732
  chr7:51111296-51111336
  hypo

SEQ ID NO: 307753 - DNA, 125 bp, Homo sapiens; identical to SEQ ID NO: 257733
  chr7:51113097-51113222
  hypo

SEQ ID NO: 307754 - DNA, 167 bp, Homo sapiens; identical to SEQ ID NO: 257734
  chr7:51126558-51126725
  hypo

SEQ ID NO: 307755 - DNA, 173 bp, Homo sapiens; identical to SEQ ID NO: 257735
  chr7:51130438-51130611
  hypo

SEQ ID NO: 307756 - DNA, 69 bp, Homo sapiens; identical to SEQ ID NO: 257736
  chr7:51323448-51323517
  hypo

SEQ ID NO: 307757 - DNA, 42 bp, Homo sapiens; identical to SEQ ID NO: 257737
  chr7:51374681-51374723
  hypo

SEQ ID NO: 307758 - DNA, 175 bp, Homo sapiens
  chr7:52736911-52737086
  hypo
gcgaggctttgcatggacagaaccaacggcgagccgcgccctggggactccaggctgccgggatccagtcccgcctccagcgcaggctccaccctggggagctcccgagaggcctgcgcgctcctgccactctccaagcctgcaaggaagaaccgaaagacctttattacattcc

SEQ ID NO: 307759 - DNA, 94 bp, Homo sapiens; identical to SEQ ID NO: 257740
  chr7:53071290-53071384
  hypo

SEQ ID NO: 307760 - DNA, 587 bp, Homo sapiens
  chr7:53103586-53104173
  hypo
acccacctcatcgaggtgcggcccacccaggaccccgccaagccgcagcgggtggtctccgagggctggaggcgccctgcccttcccggggagaccgctctggggcgagacctctcctgtgcctgggagggttgcatgaaaggggggctgtgtcgtgcctggaacccaggacggacctggagcccggtgaccatcgggatcgcgccccctgagcgtcaggagagcccctggagatcccctggacagagagcccgccccgcaggccgccccgccgcccaggagctcctggacccctgcacccgggagactctgctgggggcgctcagccagtgccccaagggaagcgctaggttcgacgggccgttgtggttcgaggtctcagacagcaagggtggcaggcggaacctgcagccccggccctctgccttcaagcccctgagcaaaaatggagcggttgcttccttcgtgcccaggccagggcctctgaagccgagcctcggcccctggagcctcagtttttgtgatgatgcttggccttccgtgctggtccagcccgccccatccgccatctgggacttctgggaggc

SEQ ID NO: 307761 - DNA, 78 bp, Homo sapiens
  chr7:53104233-53104311
  hypo
tgctggcccctttggctcctaagaatctgggctctgctacccacctccggagacacaagcccacgtatctactttcac

SEQ ID NO: 307762 - DNA, 149 bp, Homo sapiens; identical to SEQ ID NO: 257742
  chr7:53155253-53155402
  hypo

SEQ ID NO: 307763 - DNA, 42 bp, Homo sapiens; identical to SEQ ID NO: 257744
  chr7:54332183-54332225
  hypo

SEQ ID NO: 307764 - DNA, 80 bp, Homo sapiens; identical to SEQ ID NO: 257745
  chr7:54842471-54842551
  hypo

SEQ ID NO: 307765 - DNA, 32 bp, Homo sapiens; identical to SEQ ID NO: 211558
  chr7:55145813-55145845
  hypo

SEQ ID NO: 307766 - DNA, 621 bp, Homo sapiens
  chr7:55145980-55146601
  hypo
gggacaccccccaccccaccccaccgccacagcccagagcggtgccaggaagccgcctcgacgcagccgtatcttgaggctccagccccatccccagggtaccacgccacgtagagacactatttttcacttcgtgtttgtcactcctaaagcatgtgtgctagctgcaccaaccctgggatgcctcggtgcatagggtttatgtgcgtcctcctccttccctctgagctggtcccccgtggggaactgctgcccagactgacctgcgtccttccgcacgtgcaggaaaatgtccacgtgcacttgtcagggtgggggccacacgggcaccaccactgatcatctgtgggatcgagttactgcccatgcagatcccacgtgcagggcccagtcgctttggtgagagagtggacgctgtggtgactccacggtctgtggctgtgctcaggaggacagagaggggacatcctgagatggtttgggcagcccgcggatcctgtgcatgtccccagagcgtccactttctccatggagcagtggagtggcgttgctgagacagaaagttcaggttctccactccccatgcagcccccactcccctgtctccggccaggcacgcgt

SEQ ID NO: 307767 - DNA, 32 bp, Homo sapiens; identical to SEQ ID NO: 257747
  chr7:55147017-55147049
  hypo

SEQ ID NO: 307768 - DNA, 50 bp, Homo sapiens; identical to SEQ ID NO: 211560
  chr7:55212336-55212386
  hypo

SEQ ID NO: 307769 - DNA, 46 bp, Homo sapiens
  chr7:55223543-55223589
  hypo
acggctcgtgcgtccgagcctgtggggccgacagctatgagatgga

SEQ ID NO: 307770 - DNA, 31 bp, Homo sapiens
  chr7:55223636-55223667
  hypo
aaggtaggaagcccgccggtgtgcggacgag

SEQ ID NO: 307771 - DNA, 60 bp, Homo sapiens; identical to SEQ ID NO: 257750
  chr7:55312949-55313009
  hypo

SEQ ID NO: 307772 - DNA, 172 bp, Homo sapiens; identical to SEQ ID NO: 257751
  chr7:55323877-55324049
  hypo

SEQ ID NO: 307773 - DNA, 226 bp, Homo sapiens; identical to SEQ ID NO: 257752
  chr7:55464081-55464307
  hypo

SEQ ID NO: 307774 - DNA, 61 bp, Homo sapiens; identical to SEQ ID NO: 257753
  chr7:55468907-55468968
  hypo

SEQ ID NO: 307775 - DNA, 216 bp, Homo sapiens; identical to SEQ ID NO: 257754
  chr7:55473623-55473839
  hypo

SEQ ID NO: 307776 - DNA, 97 bp, Homo sapiens; identical to SEQ ID NO: 257755
  chr7:55495726-55495823
  hypo

SEQ ID NO: 307777 - DNA, 107 bp, Homo sapiens; identical to SEQ ID NO: 211561
  chr7:55506181-55506288
  hypo

SEQ ID NO: 307778 - DNA, 176 bp, Homo sapiens; identical to SEQ ID NO: 257757
  chr7:55540710-55540886
  hypo

SEQ ID NO: 307779 - DNA, 116 bp, Homo sapiens; identical to SEQ ID NO: 257758
  chr7:55541146-55541262
  hypo

SEQ ID NO: 307780 - DNA, 206 bp, Homo sapiens; identical to SEQ ID NO: 257759
  chr7:55541705-55541911
  hypo

SEQ ID NO: 307781 - DNA, 205 bp, Homo sapiens; identical to SEQ ID NO: 257760
  chr7:55542790-55542995
  hypo

SEQ ID NO: 307782 - DNA, 229 bp, Homo sapiens; identical to SEQ ID NO: 211562
  chr7:55552439-55552668
  hypo

SEQ ID NO: 307783 - DNA, 614 bp, Homo sapiens; identical to SEQ ID NO: 211563
  chr7:55553220-55553834
  hypo

SEQ ID NO: 307784 - DNA, 68 bp, Homo sapiens; identical to SEQ ID NO: 257763
  chr7:55554250-55554318
  hypo

SEQ ID NO: 307785 - DNA, 223 bp, Homo sapiens; identical to SEQ ID NO: 211564
  chr7:55557173-55557396
  hypo

SEQ ID NO: 307786 - DNA, 51 bp, Homo sapiens; identical to SEQ ID NO: 257765
  chr7:55570141-55570192
  hypo

SEQ ID NO: 307787 - DNA, 199 bp, Homo sapiens; identical to SEQ ID NO: 257766
  chr7:55571328-55571527
  hypo

SEQ ID NO: 307788 - DNA, 42 bp, Homo sapiens; identical to SEQ ID NO: 211565
  chr7:55585937-55585979
  hypo

SEQ ID NO: 307789 - DNA, 137 bp, Homo sapiens; identical to SEQ ID NO: 257768
  chr7:55588552-55588689
  hypo

SEQ ID NO: 307790 - DNA, 42 bp, Homo sapiens; identical to SEQ ID NO: 257769
  chr7:55589957-55589999
  hypo

SEQ ID NO: 307791 - DNA, 115 bp, Homo sapiens; identical to SEQ ID NO: 200983
  chr7:55593336-55593451
  hypo

SEQ ID NO: 307792 - DNA, 65 bp, Homo sapiens; identical to SEQ ID NO: 211567
  chr7:55619129-55619194
  hypo

SEQ ID NO: 307793 - DNA, 34 bp, Homo sapiens; identical to SEQ ID NO: 257771
  chr7:55638346-55638380
  hypo

SEQ ID NO: 307794 - DNA, 145 bp, Homo sapiens; identical to SEQ ID NO: 257772
  chr7:55923002-55923147
  hypo

SEQ ID NO: 307795 - DNA, 82 bp, Homo sapiens; identical to SEQ ID NO: 257773
  chr7:55960568-55960650
  hypo

SEQ ID NO: 307796 - DNA, 388 bp, Homo sapiens; identical to SEQ ID NO: 257775
  chr7:56030889-56031277
  hypo

SEQ ID NO: 307797 - DNA, 76 bp, Homo sapiens; identical to SEQ ID NO: 211568
  chr7:56031537-56031613
  hypo

SEQ ID NO: 307798 - DNA, 151 bp, Homo sapiens; identical to SEQ ID NO: 257778
  chr7:56037252-56037403
  hypo

SEQ ID NO: 307799 - DNA, 84 bp, Homo sapiens; identical to SEQ ID NO: 257779
  chr7:56075635-56075719
  hypo

SEQ ID NO: 307800 - DNA, 90 bp, Homo sapiens; identical to SEQ ID NO: 257780
  chr7:56078752-56078842
  hypo

SEQ ID NO: 307801 - DNA, 135 bp, Homo sapiens
  chr7:56144536-56144671
  hypo
cccatgggggaactggttccagccaaaccgcaccaacctgtggcaggtaagacctacgttcctcctttcaccaagcattgacagagacctgctggaggctgggcactgtgttgttaggccgcggcatccagaagg

SEQ ID NO: 307802 - DNA, 120 bp, Homo sapiens; identical to SEQ ID NO: 257782
  chr7:56332924-56333044
  hypo

SEQ ID NO: 307803 - DNA, 32 bp, Homo sapiens; identical to SEQ ID NO: 257783
  chr7:56362765-56362797
  hypo

SEQ ID NO: 307804 - DNA, 120 bp, Homo sapiens; identical to SEQ ID NO: 257784
  chr7:56363037-56363157
  hypo

SEQ ID NO: 307805 - DNA, 104 bp, Homo sapiens; identical to SEQ ID NO: 211570
  chr7:56636909-56637013
  hypo

SEQ ID NO: 307806 - DNA, 155 bp, Homo sapiens; identical to SEQ ID NO: 257786
  chr7:56665470-56665625
  hypo

SEQ ID NO: 307807 - DNA, 122 bp, Homo sapiens; identical to SEQ ID NO: 211571
  chr7:57247598-57247720
  hypo

SEQ ID NO: 307808 - DNA, 179 bp, Homo sapiens; identical to SEQ ID NO: 211572
  chr7:57247887-57248066
  hypo

SEQ ID NO: 307809 - DNA, 335 bp, Homo sapiens; identical to SEQ ID NO: 257788
  chr7:57324292-57324627
  hypo

SEQ ID NO: 307810 - DNA, 218 bp, Homo sapiens; identical to SEQ ID NO: 211573
  chr7:57706364-57706582
  hypo

SEQ ID NO: 307811 - DNA, 277 bp, Homo sapiens; identical to SEQ ID NO: 211574
  chr7:57706642-57706919
  hypo

SEQ ID NO: 307812 - DNA, 141 bp, Homo sapiens; identical to SEQ ID NO: 257791
  chr7:57711530-57711671
  hypo

SEQ ID NO: 307813 - DNA, 39 bp, Homo sapiens; identical to SEQ ID NO: 257792
  chr7:57712631-57712670
  hypo

SEQ ID NO: 307814 - DNA, 68 bp, Homo sapiens; identical to SEQ ID NO: 211575
  chr7:57878613-57878681
  hypo

SEQ ID NO: 307815 - DNA, 64 bp, Homo sapiens; identical to SEQ ID NO: 285055
  chr7:57928159-57928223
  hypo

SEQ ID NO: 307816 - DNA, 80 bp, Homo sapiens; identical to SEQ ID NO: 285056
  chr7:57928240-57928320
  hypo

SEQ ID NO: 307817 - DNA, 149 bp, Homo sapiens; identical to SEQ ID NO: 257794
  chr7:63027890-63028039
  hypo

SEQ ID NO: 307818 - DNA, 149 bp, Homo sapiens; identical to SEQ ID NO: 257795
  chr7:63392780-63392929
  hypo

SEQ ID NO: 307819 - DNA, 35 bp, Homo sapiens; identical to SEQ ID NO: 211576
  chr7:63423514-63423549
  hypo

SEQ ID NO: 307820 - DNA, 34 bp, Homo sapiens; identical to SEQ ID NO: 211577
  chr7:63423789-63423823
  hypo

SEQ ID NO: 307821 - DNA, 159 bp, Homo sapiens; identical to SEQ ID NO: 211578
  chr7:63569123-63569282
  hypo

SEQ ID NO: 307822 - DNA, 73 bp, Homo sapiens; identical to SEQ ID NO: 211579
  chr7:63652610-63652683
  hypo

SEQ ID NO: 307823 - DNA, 143 bp, Homo sapiens; identical to SEQ ID NO: 211580
  chr7:63652839-63652982
  hypo

SEQ ID NO: 307824 - DNA, 44 bp, Homo sapiens; identical to SEQ ID NO: 211581
  chr7:63667110-63667154
  hypo

SEQ ID NO: 307825 - DNA, 169 bp, Homo sapiens; identical to SEQ ID NO: 257802
  chr7:63757331-63757500
  hypo

SEQ ID NO: 307826 - DNA, 103 bp, Homo sapiens; identical to SEQ ID NO: 211582
  chr7:63864996-63865099
  hypo

SEQ ID NO: 307827 - DNA, 42 bp, Homo sapiens; identical to SEQ ID NO: 257804
  chr7:63867873-63867915
  hypo

SEQ ID NO: 307828 - DNA, 437 bp, Homo sapiens; identical to SEQ ID NO: 211583
  chr7:64146484-64146921
  hypo

SEQ ID NO: 307829 - DNA, 179 bp, Homo sapiens; identical to SEQ ID NO: 211584
  chr7:64330555-64330734
  hypo

SEQ ID NO: 307830 - DNA, 204 bp, Homo sapiens; identical to SEQ ID NO: 211585
  chr7:64330833-64331037
  hypo

SEQ ID NO: 307831 - DNA, 535 bp, Homo sapiens; identical to SEQ ID NO: 257807
  chr7:64332670-64333205
  hypo

SEQ ID NO: 307832 - DNA, 42 bp, Homo sapiens; identical to SEQ ID NO: 257808
  chr7:64336401-64336443
  hypo

SEQ ID NO: 307833 - DNA, 76 bp, Homo sapiens; identical to SEQ ID NO: 211587
  chr7:64345085-64345161
  hypo

SEQ ID NO: 307834 - DNA, 255 bp, Homo sapiens
  chr7:64345211-64345466
  hypo
gagacggcccgaggatgccctatggtagttacttttaggcttccacagtgattgtcgcaggcagcattttccctagactaggccggctctgccttcccattttcctctgctcaggcaggctgacagccctgacagccctgacagcctggccccagcacctgcctcgcggattcgcatgcgccagtcgcgggacacctgtcgcgagcggtgagccttggctcgcgtgtcagtgtatgccaccgttgcctggtgaca

SEQ ID NO: 307835 - DNA, 412 bp, Homo sapiens; identical to SEQ ID NO: 200989
  chr7:64349470-64349882
  hypo

SEQ ID NO: 307836 - DNA, 62 bp, Homo sapiens; identical to SEQ ID NO: 285065
  chr7:64350036-64350098
  hypo

SEQ ID NO: 307837 - DNA, 35 bp, Homo sapiens; identical to SEQ ID NO: 257810
  chr7:64358373-64358408
  hypo

SEQ ID NO: 307838 - DNA, 44 bp, Homo sapiens; identical to SEQ ID NO: 257811
  chr7:64358740-64358784
  hypo

SEQ ID NO: 307839 - DNA, 99 bp, Homo sapiens
  chr7:64450790-64450889
  hypo
aaggctgagccctgaacaaagacagggcttgacttttatacatgcatcaggcaggggcaagtcgggtttttggcgcaaaacctgcgaggtgagaaagca

SEQ ID NO: 307840 - DNA, 210 bp, Homo sapiens; identical to SEQ ID NO: 257814
  chr7:64459456-64459666
  hypo

SEQ ID NO: 307841 - DNA, 138 bp, Homo sapiens; identical to SEQ ID NO: 257815
  chr7:64478038-64478176
  hypo

SEQ ID NO: 307842 - DNA, 42 bp, Homo sapiens; identical to SEQ ID NO: 211590
  chr7:64851808-64851850
  hypo

SEQ ID NO: 307843 - DNA, 411 bp, Homo sapiens; identical to SEQ ID NO: 257818
  chr7:64895203-64895614
  hypo

SEQ ID NO: 307844 - DNA, 120 bp, Homo sapiens; identical to SEQ ID NO: 200991
  chr7:64974034-64974154
  hypo

SEQ ID NO: 307845 - DNA, 60 bp, Homo sapiens; identical to SEQ ID NO: 200992
  chr7:64974448-64974508
  hypo

SEQ ID NO: 307846 - DNA, 50 bp, Homo sapiens; identical to SEQ ID NO: 200993
  chr7:65037711-65037761
  hypo

SEQ ID NO: 307847 - DNA, 67 bp, Homo sapiens
  chr7:65441721-65441788
  hypo
cagcctgggtaacatagggaaaccacttcttccctaaaaatacaaacaatcagccggtcgtggtggt

SEQ ID NO: 307848 - DNA, 99 bp, Homo sapiens; identical to SEQ ID NO: 257820
  chr7:65442036-65442135
  hypo

SEQ ID NO: 307849 - DNA, 144 bp, Homo sapiens; identical to SEQ ID NO: 257821
  chr7:65474282-65474426
  hypo

SEQ ID NO: 307850 - DNA, 38 bp, Homo sapiens; identical to SEQ ID NO: 200996
  chr7:65541037-65541075
  hypo

SEQ ID NO: 307851 - DNA, 105 bp, Homo sapiens
  chr7:65553870-65553975
  hypo
aaggaattcagcttcgtgcagctctcagatgcctacaggtaagccctgaactgccacctccatctgccgctgccggcctctgtatcccccgccgcccgcggacgt

SEQ ID NO: 307852 - DNA, 322 bp, Homo sapiens
  chr7:65554018-65554340
  hypo
ttgcggcgctggaccagccaagggtccagccccttcagcgccagcacctctgtccccagcacgggaagcagcctgatgccccagaagaaaaaccccgacagtttggagctgatccggagcaaggctgggcgtgtgtttgggcgggtgagcaaggcagggggaggggcggggcctctgggctgatggtgggtggccaggggggcaggatcccgggtccagcccctgtgcctccctcttcccgcagtgtgccgggctcctgatgaccctcaagggacttcccagcacctacaacaaagacttacaggtgcgaggccgggggagg

SEQ ID NO: 307853 - DNA, 120 bp, Homo sapiens; identical to SEQ ID NO: 257823
  chr7:65562569-65562689
  hypo

SEQ ID NO: 307854 - DNA, 264 bp, Homo sapiens; identical to SEQ ID NO: 257824
  chr7:65611005-65611269
  hypo

SEQ ID NO: 307855 - DNA, 159 bp, Homo sapiens; identical to SEQ ID NO: 257825
  chr7:65647879-65648038
  hypo

SEQ ID NO: 307856 - DNA, 183 bp, Homo sapiens; identical to SEQ ID NO: 257826
  chr7:65841299-65841482
  hypo

SEQ ID NO: 307857 - DNA, 259 bp, Homo sapiens; identical to SEQ ID NO: 211595
  chr7:65877904-65878163
  hypo

SEQ ID NO: 307858 - DNA, 86 bp, Homo sapiens
  chr7:65879509-65879595
  hypo
gggtgacaggacagagtgagatcatgtctttaaaaaaatatatatgcaagtgacagcttttcttccagtgctaatgctcaaactga

SEQ ID NO: 307859 - DNA, 61 bp, Homo sapiens; identical to SEQ ID NO: 257829
  chr7:65938576-65938637
  hypo

SEQ ID NO: 307860 - DNA, 204 bp, Homo sapiens; identical to SEQ ID NO: 211596
  chr7:65939523-65939727
  hypo

SEQ ID NO: 307861 - DNA, 36 bp, Homo sapiens; identical to SEQ ID NO: 257832
  chr7:66064299-66064335
  hypo

SEQ ID NO: 307862 - DNA, 40 bp, Homo sapiens; identical to SEQ ID NO: 257833
  chr7:66076556-66076596
  hypo

SEQ ID NO: 307863 - DNA, 137 bp, Homo sapiens; identical to SEQ ID NO: 200998
  chr7:66094049-66094186
  hypo

SEQ ID NO: 307864 - DNA, 160 bp, Homo sapiens
  chr7:66105998-66106158
  hypo
gttccctatgtgtaaacaaagattccagggcgtggttttgcactcctgttgtactcttttagaggtggaaaagaggtggatactgagatctaagaggaaaggatagtcattcacgttctgagatatgcgctctctctattgttctcgtacacaaagggat

SEQ ID NO: 307865 - DNA, 38 bp, Homo sapiens; identical to SEQ ID NO: 257835
  chr7:66150978-66151016
  hypo

SEQ ID NO: 307866 - DNA, 120 bp, Homo sapiens; identical to SEQ ID NO: 257836
  chr7:66204245-66204365
  hypo

SEQ ID NO: 307867 - DNA, 188 bp, Homo sapiens; identical to SEQ ID NO: 211598
  chr7:66265794-66265982
  hypo

SEQ ID NO: 307868 - DNA, 111 bp, Homo sapiens; identical to SEQ ID NO: 211599
  chr7:66293278-66293389
  hypo

SEQ ID NO: 307869 - DNA, 129 bp, Homo sapiens; identical to SEQ ID NO: 211600
  chr7:66369062-66369191
  hypo

SEQ ID NO: 307870 - DNA, 210 bp, Homo sapiens; identical to SEQ ID NO: 257840
  chr7:66423291-66423501
  hypo

SEQ ID NO: 307871 - DNA, 696 bp, Homo sapiens; identical to SEQ ID NO: 257841
  chr7:66423830-66424526
  hypo

SEQ ID NO: 307872 - DNA, 36 bp, Homo sapiens; identical to SEQ ID NO: 211601
  chr7:66626984-66627020
  hypo

SEQ ID NO: 307873 - DNA, 31 bp, Homo sapiens; identical to SEQ ID NO: 257843
  chr7:66694225-66694256
  hypo

SEQ ID NO: 307874 - DNA, 88 bp, Homo sapiens; identical to SEQ ID NO: 211602
  chr7:66766508-66766596
  hypo

SEQ ID NO: 307875 - DNA, 180 bp, Homo sapiens; identical to SEQ ID NO: 257845
  chr7:66847453-66847633
  hypo

SEQ ID NO: 307876 - DNA, 141 bp, Homo sapiens; identical to SEQ ID NO: 257846
  chr7:66880056-66880197
  hypo

SEQ ID NO: 307877 - DNA, 140 bp, Homo sapiens; identical to SEQ ID NO: 257847
  chr7:66960265-66960405
  hypo

SEQ ID NO: 307878 - DNA, 241 bp, Homo sapiens; identical to SEQ ID NO: 211603
  chr7:67006548-67006789
  hypo

SEQ ID NO: 307879 - DNA, 32 bp, Homo sapiens; identical to SEQ ID NO: 211604
  chr7:67027848-67027880
  hypo

SEQ ID NO: 307880 - DNA, 170 bp, Homo sapiens; identical to SEQ ID NO: 257850
  chr7:67067246-67067416
  hypo

SEQ ID NO: 307881 - DNA, 50 bp, Homo sapiens; identical to SEQ ID NO: 257851
  chr7:67093767-67093817
  hypo

SEQ ID NO: 307882 - DNA, 80 bp, Homo sapiens; identical to SEQ ID NO: 211605
  chr7:67103482-67103562
  hypo

SEQ ID NO: 307883 - DNA, 133 bp, Homo sapiens; identical to SEQ ID NO: 257853
  chr7:67113980-67114113
  hypo

SEQ ID NO: 307884 - DNA, 36 bp, Homo sapiens; identical to SEQ ID NO: 257854
  chr7:67180647-67180683
  hypo

SEQ ID NO: 307885 - DNA, 110 bp, Homo sapiens; identical to SEQ ID NO: 257855
  chr7:67202219-67202329
  hypo

SEQ ID NO: 307886 - DNA, 32 bp, Homo sapiens; identical to SEQ ID NO: 257856
  chr7:67252810-67252842
  hypo

SEQ ID NO: 307887 - DNA, 42 bp, Homo sapiens; identical to SEQ ID NO: 257857
  chr7:67274834-67274876
  hypo

SEQ ID NO: 307888 - DNA, 98 bp, Homo sapiens; identical to SEQ ID NO: 257858
  chr7:67318539-67318637
  hypo

SEQ ID NO: 307889 - DNA, 42 bp, Homo sapiens; identical to SEQ ID NO: 257859
  chr7:67322985-67323027
  hypo

SEQ ID NO: 307890 - DNA, 109 bp, Homo sapiens; identical to SEQ ID NO: 257860
  chr7:67323057-67323166
  hypo

SEQ ID NO: 307891 - DNA, 120 bp, Homo sapiens; identical to SEQ ID NO: 257861
  chr7:67353383-67353503
  hypo

SEQ ID NO: 307892 - DNA, 91 bp, Homo sapiens; identical to SEQ ID NO: 257862
  chr7:67355827-67355918
  hypo

SEQ ID NO: 307893 - DNA, 98 bp, Homo sapiens; identical to SEQ ID NO: 211606
  chr7:67375596-67375694
  hypo

SEQ ID NO: 307894 - DNA, 33 bp, Homo sapiens; identical to SEQ ID NO: 257864
  chr7:67388760-67388793
  hypo

SEQ ID NO: 307895 - DNA, 420 bp, Homo sapiens; identical to SEQ ID NO: 257865
  chr7:67405588-67406008
  hypo

SEQ ID NO: 307896 - DNA, 90 bp, Homo sapiens; identical to SEQ ID NO: 257866
  chr7:67417184-67417274
  hypo

SEQ ID NO: 307897 - DNA, 50 bp, Homo sapiens; identical to SEQ ID NO: 257867
  chr7:67424155-67424205
  hypo

SEQ ID NO: 307898 - DNA, 42 bp, Homo sapiens; identical to SEQ ID NO: 257868
  chr7:67451827-67451869
  hypo

SEQ ID NO: 307899 - DNA, 162 bp, Homo sapiens; identical to SEQ ID NO: 257869
  chr7:67482477-67482639
  hypo

SEQ ID NO: 307900 - DNA, 39 bp, Homo sapiens; identical to SEQ ID NO: 257870
  chr7:67534656-67534695
  hypo

SEQ ID NO: 307901 - DNA, 115 bp, Homo sapiens; identical to SEQ ID NO: 257871
  chr7:67540136-67540251
  hypo

SEQ ID NO: 307902 - DNA, 140 bp, Homo sapiens; identical to SEQ ID NO: 257872
  chr7:67563070-67563210
  hypo

SEQ ID NO: 307903 - DNA, 34 bp, Homo sapiens; identical to SEQ ID NO: 257873
  chr7:67579760-67579794
  hypo

SEQ ID NO: 307904 - DNA, 35 bp, Homo sapiens; identical to SEQ ID NO: 257874
  chr7:67637855-67637890
  hypo

SEQ ID NO: 307905 - DNA, 42 bp, Homo sapiens; identical to SEQ ID NO: 257875
  chr7:67642884-67642926
  hypo

SEQ ID NO: 307906 - DNA, 108 bp, Homo sapiens; identical to SEQ ID NO: 257876
  chr7:67648538-67648646
  hypo

SEQ ID NO: 307907 - DNA, 31 bp, Homo sapiens; identical to SEQ ID NO: 257877
  chr7:67659057-67659088
  hypo

SEQ ID NO: 307908 - DNA, 91 bp, Homo sapiens; identical to SEQ ID NO: 257878
  chr7:67659328-67659419
  hypo

SEQ ID NO: 307909 - DNA, 200 bp, Homo sapiens; identical to SEQ ID NO: 257880
  chr7:67737923-67738123
  hypo

SEQ ID NO: 307910 - DNA, 44 bp, Homo sapiens; identical to SEQ ID NO: 211608
  chr7:67812980-67813024
  hypo

SEQ ID NO: 307911 - DNA, 176 bp, Homo sapiens; identical to SEQ ID NO: 257882
  chr7:67858437-67858613
  hypo

SEQ ID NO: 307912 - DNA, 283 bp, Homo sapiens; identical to SEQ ID NO: 257884
  chr7:68003149-68003432
  hypo

SEQ ID NO: 307913 - DNA, 81 bp, Homo sapiens; identical to SEQ ID NO: 257885
  chr7:68008895-68008976
  hypo

SEQ ID NO: 307914 - DNA, 90 bp, Homo sapiens; identical to SEQ ID NO: 257886
  chr7:68058866-68058956
  hypo

SEQ ID NO: 307915 - DNA, 130 bp, Homo sapiens; identical to SEQ ID NO: 257887
  chr7:68111546-68111676
  hypo

SEQ ID NO: 307916 - DNA, 42 bp, Homo sapiens; identical to SEQ ID NO: 257888
  chr7:68135058-68135100
  hypo

SEQ ID NO: 307917 - DNA, 55 bp, Homo sapiens; identical to SEQ ID NO: 211609
  chr7:68185672-68185727
  hypo

SEQ ID NO: 307918 - DNA, 42 bp, Homo sapiens; identical to SEQ ID NO: 257890
  chr7:68263365-68263407
  hypo

SEQ ID NO: 307919 - DNA, 44 bp, Homo sapiens; identical to SEQ ID NO: 257891
  chr7:68303945-68303989
  hypo

SEQ ID NO: 307920 - DNA, 41 bp, Homo sapiens; identical to SEQ ID NO: 211610
  chr7:68418436-68418477
  hypo

SEQ ID NO: 307921 - DNA, 100 bp, Homo sapiens; identical to SEQ ID NO: 211611
  chr7:68418717-68418817
  hypo

SEQ ID NO: 307922 - DNA, 80 bp, Homo sapiens; identical to SEQ ID NO: 257894
  chr7:68564601-68564681
  hypo

SEQ ID NO: 307923 - DNA, 85 bp, Homo sapiens; identical to SEQ ID NO: 257895
  chr7:68912781-68912866
  hypo

SEQ ID NO: 307924 - DNA, 95 bp, Homo sapiens; identical to SEQ ID NO: 257896
  chr7:68960050-68960145
  hypo

SEQ ID NO: 307925 - DNA, 112 bp, Homo sapiens; identical to SEQ ID NO: 257897
  chr7:69056912-69057024
  hypo

SEQ ID NO: 307926 - DNA, 170 bp, Homo sapiens; identical to SEQ ID NO: 200999
  chr7:69062189-69062359
  hypo

SEQ ID NO: 307927 - DNA, 421 bp, Homo sapiens; identical to SEQ ID NO: 201000
  chr7:69063038-69063459
  hypo

SEQ ID NO: 307928 - DNA, 318 bp, Homo sapiens; identical to SEQ ID NO: 201001
  chr7:69063552-69063870
  hypo

SEQ ID NO: 307929 - DNA, 282 bp, Homo sapiens; identical to SEQ ID NO: 201002
  chr7:69063900-69064182
  hypo

SEQ ID NO: 307930 - DNA, 80 bp, Homo sapiens; identical to SEQ ID NO: 211616
  chr7:69478666-69478746
  hypo

SEQ ID NO: 307931 - DNA, 152 bp, Homo sapiens; identical to SEQ ID NO: 257899
  chr7:69501075-69501227
  hypo

SEQ ID NO: 307932 - DNA, 68 bp, Homo sapiens; identical to SEQ ID NO: 257900
  chr7:69736941-69737009
  hypo

SEQ ID NO: 307933 - DNA, 140 bp, Homo sapiens; identical to SEQ ID NO: 211617
  chr7:70255442-70255582
  hypo

SEQ ID NO: 307934 - DNA, 227 bp, Homo sapiens; identical to SEQ ID NO: 257902
  chr7:70255790-70256017
  hypo

SEQ ID NO: 307935 - DNA, 88 bp, Homo sapiens
  chr7:70311133-70311221
  hypo
aaaatcttaccttcattttactaaaggaactacacctgttattcctatagctaatgctaaaatcaaggtgtccgttataaaagatcta

SEQ ID NO: 307936 - DNA, 202 bp, Homo sapiens; identical to SEQ ID NO: 257904
  chr7:70340709-70340911
  hypo

SEQ ID NO: 307937 - DNA, 187 bp, Homo sapiens; identical to SEQ ID NO: 257905
  chr7:70378264-70378451
  hypo

SEQ ID NO: 307938 - DNA, 36 bp, Homo sapiens; identical to SEQ ID NO: 257906
  chr7:70482807-70482843
  hypo

SEQ ID NO: 307939 - DNA, 120 bp, Homo sapiens; identical to SEQ ID NO: 257907
  chr7:70542996-70543116
  hypo

SEQ ID NO: 307940 - DNA, 89 bp, Homo sapiens; identical to SEQ ID NO: 285088
  chr7:70596058-70596147
  hypo

SEQ ID NO: 307941 - DNA, 39 bp, Homo sapiens; identical to SEQ ID NO: 285089
  chr7:70597367-70597406
  hypo

SEQ ID NO: 307942 - DNA, 56 bp, Homo sapiens; identical to SEQ ID NO: 257908
  chr7:70921261-70921317
  hypo

SEQ ID NO: 307943 - DNA, 31 bp, Homo sapiens; identical to SEQ ID NO: 257909
  chr7:71048822-71048853
  hypo

SEQ ID NO: 307944 - DNA, 37 bp, Homo sapiens; identical to SEQ ID NO: 211618
  chr7:71119293-71119330
  hypo

SEQ ID NO: 307945 - DNA, 88 bp, Homo sapiens; identical to SEQ ID NO: 223123
  chr7:71198521-71198609
  hypo

SEQ ID NO: 307946 - DNA, 162 bp, Homo sapiens; identical to SEQ ID NO: 257911
  chr7:71251956-71252118
  hypo

SEQ ID NO: 307947 - DNA, 85 bp, Homo sapiens; identical to SEQ ID NO: 257912
  chr7:71276627-71276712
  hypo

SEQ ID NO: 307948 - DNA, 38 bp, Homo sapiens; identical to SEQ ID NO: 211619
  chr7:71287516-71287554
  hypo

SEQ ID NO: 307949 - DNA, 43 bp, Homo sapiens; identical to SEQ ID NO: 257914
  chr7:71335072-71335115
  hypo

SEQ ID NO: 307950 - DNA, 42 bp, Homo sapiens; identical to SEQ ID NO: 257915
  chr7:71396557-71396599
  hypo

SEQ ID NO: 307951 - DNA, 35 bp, Homo sapiens; identical to SEQ ID NO: 211620
  chr7:71397499-71397534
  hypo

SEQ ID NO: 307952 - DNA, 34 bp, Homo sapiens; identical to SEQ ID NO: 257917
  chr7:71403494-71403528
  hypo

SEQ ID NO: 307953 - DNA, 98 bp, Homo sapiens; identical to SEQ ID NO: 257918
  chr7:71598019-71598117
  hypo

SEQ ID NO: 307954 - DNA, 238 bp, Homo sapiens; identical to SEQ ID NO: 257919
  chr7:71656030-71656268
  hypo

SEQ ID NO: 307955 - DNA, 72 bp, Homo sapiens
  chr7:71870980-71871052
  hypo
gctcaacaggcgcacggcactgaaggtggcagctccccgtaaggaacaatcgctcctgctgctcagctggct

SEQ ID NO: 307956 - DNA, 117 bp, Homo sapiens
  chr7:71871082-71871199
  hypo
gccagagaaacacaaagccaggggacccaaaatggagctggctcccatagccagaagccgtctctccagaattcccctctcccagtcacagctgcctgctggcgtaacgagggaagc

SEQ ID NO: 307957 - DNA, 93 bp, Homo sapiens; identical to SEQ ID NO: 257921
  chr7:71913527-71913620
  hypo

SEQ ID NO: 307958 - DNA, 43 bp, Homo sapiens; identical to SEQ ID NO: 257922
  chr7:75935606-75935649
  hypo

SEQ ID NO: 307959 - DNA, 192 bp, Homo sapiens; identical to SEQ ID NO: 257923
  chr7:75958854-75959046
  hypo

SEQ ID NO: 307960 - DNA, 127 bp, Homo sapiens
  chr7:76106204-76106331
  hypo
aggctgcgtgccttcgtggaaagttttagctgatgtcctcgcctgtatttcccaggctgtttttgcagagttgtgagagttggttcatccgggccatgaggacatgttgggacataccccgtgtgcc

SEQ ID NO: 307961 - DNA, 116 bp, Homo sapiens
  chr7:76106380-76106496
  hypo
taattggcttggaaggcagtcctctgatttgtacctcattgtggttacagaaacttccaattgaagacactgagctgaaccattccgcccgcccgcccgcccgagggcactccagg

SEQ ID NO: 307962 - DNA, 240 bp, Homo sapiens
  chr7:76604357-76604597
  hypo
ggctgttttgcagagttgtgagagttggttcatcgggccatgaggacatgttgggacataccccgtgtgccgatgatggaggcggccgtggctgcccgagagatgcgtgacacccaggagtaattggcttggaaggcagtcctctgatttgtacctcattgtggttacagaaacttccaattgaagacactgagctgaaccattccgcccgcccgcccgcctgcccgcccgcccgagggc

SEQ ID NO: 307963 - DNA, 89 bp, Homo sapiens
  chr7:76631604-76631693
  hypo
gtgcctcctggccatgtactgcaacggcaataaggtgcccccactggcccggggcggaggcgggtggcctgccccggaagtcctgagct

SEQ ID NO: 307964 - DNA, 159 bp, Homo sapiens; identical to SEQ ID NO: 211621
  chr7:76632095-76632254
  hypo

SEQ ID NO: 307965 - DNA, 90 bp, Homo sapiens; identical to SEQ ID NO: 257929
  chr7:77036055-77036145
  hypo

SEQ ID NO: 307966 - DNA, 421 bp, Homo sapiens; identical to SEQ ID NO: 285099
  chr7:77167456-77167877
  hypo

SEQ ID NO: 307967 - DNA, 39 bp, Homo sapiens; identical to SEQ ID NO: 211622
  chr7:77184920-77184959
  hypo

SEQ ID NO: 307968 - DNA, 111 bp, Homo sapiens; identical to SEQ ID NO: 257932
  chr7:77296782-77296893
  hypo

SEQ ID NO: 307969 - DNA, 120 bp, Homo sapiens; identical to SEQ ID NO: 257933
  chr7:77305019-77305139
  hypo

SEQ ID NO: 307970 - DNA, 101 bp, Homo sapiens; identical to SEQ ID NO: 211623
  chr7:77309610-77309711
  hypo

SEQ ID NO: 307971 - DNA, 120 bp, Homo sapiens; identical to SEQ ID NO: 211624
  chr7:77323833-77323953
  hypo

SEQ ID NO: 307972 - DNA, 169 bp, Homo sapiens; identical to SEQ ID NO: 211625
  chr7:77324193-77324362
  hypo

SEQ ID NO: 307973 - DNA, 34 bp, Homo sapiens; identical to SEQ ID NO: 211626
  chr7:77413233-77413267
  hypo

SEQ ID NO: 307974 - DNA, 37 bp, Homo sapiens; identical to SEQ ID NO: 211627
  chr7:77413297-77413334
  hypo

SEQ ID NO: 307975 - DNA, 88 bp, Homo sapiens; identical to SEQ ID NO: 257939
  chr7:77459676-77459764
  hypo

SEQ ID NO: 307976 - DNA, 441 bp, Homo sapiens; identical to SEQ ID NO: 285106
  chr7:79082579-79083020
  hypo

SEQ ID NO: 307977 - DNA, 31 bp, Homo sapiens; identical to SEQ ID NO: 257940
  chr7:79851712-79851743
  hypo

SEQ ID NO: 307978 - DNA, 153 bp, Homo sapiens; identical to SEQ ID NO: 211628
  chr7:80168619-80168772
  hypo

SEQ ID NO: 307979 - DNA, 34 bp, Homo sapiens; identical to SEQ ID NO: 211629
  chr7:80541273-80541307
  hypo

SEQ ID NO: 307980 - DNA, 36 bp, Homo sapiens; identical to SEQ ID NO: 257943
  chr7:80544781-80544817
  hypo

SEQ ID NO: 307981 - DNA, 250 bp, Homo sapiens; identical to SEQ ID NO: 285111
  chr7:80548007-80548257
  hypo

SEQ ID NO: 307982 - DNA, 460 bp, Homo sapiens; identical to SEQ ID NO: 285112
  chr7:80548403-80548863
  hypo

SEQ ID NO: 307983 - DNA, 97 bp, Homo sapiens; identical to SEQ ID NO: 257944
  chr7:80572493-80572590
  hypo

SEQ ID NO: 307984 - DNA, 92 bp, Homo sapiens
  chr7:80790225-80790317
  hypo
ttaacatgctaacaatggtaaaaaaaaaaaaaaaaaaaaaagaaagttggaaggaaactattttttttcgcttaagaatgaggagagccagc

SEQ ID NO: 307985 - DNA, 53 bp, Homo sapiens
  chr7:80896252-80896305
  hypo
ggggtccctgagcccgccctttgggccccaatgtctgttcatgatctaccttc

SEQ ID NO: 307986 - DNA, 34 bp, Homo sapiens
  chr7:80896335-80896369
  hypo
ggttctttctcctcggtatcggactgagtggggg

SEQ ID NO: 307987 - DNA, 36 bp, Homo sapiens; identical to SEQ ID NO: 211630
  chr7:80917900-80917936
  hypo

SEQ ID NO: 307988 - DNA, 36 bp, Homo sapiens; identical to SEQ ID NO: 211631
  chr7:80918176-80918212
  hypo

SEQ ID NO: 307989 - DNA, 31 bp, Homo sapiens; identical to SEQ ID NO: 257949
  chr7:80965882-80965913
  hypo

SEQ ID NO: 307990 - DNA, 140 bp, Homo sapiens; identical to SEQ ID NO: 257950
  chr7:81066982-81067122
  hypo

SEQ ID NO: 307991 - DNA, 83 bp, Homo sapiens; identical to SEQ ID NO: 257951
  chr7:82176346-82176429
  hypo

SEQ ID NO: 307992 - DNA, 415 bp, Homo sapiens; identical to SEQ ID NO: 285116
  chr7:82791563-82791978
  hypo

SEQ ID NO: 307993 - DNA, 297 bp, Homo sapiens; identical to SEQ ID NO: 44343
  chr7:82792128-82792425
  hypo

SEQ ID NO: 307994 - DNA, 512 bp, Homo sapiens; identical to SEQ ID NO: 211633
  chr7:86415571-86416083
  hypo

SEQ ID NO: 307995 - DNA, 58 bp, Homo sapiens; identical to SEQ ID NO: 211634
  chr7:86416125-86416183
  hypo

SEQ ID NO: 307996 - DNA, 109 bp, Homo sapiens; identical to SEQ ID NO: 201027
  chr7:86849527-86849636
  hypo

SEQ ID NO: 307997 - DNA, 60 bp, Homo sapiens; identical to SEQ ID NO: 201029
  chr7:87258398-87258458
  hypo

SEQ ID NO: 307998 - DNA, 215 bp, Homo sapiens; identical to SEQ ID NO: 285133
  chr7:87563614-87563829
  hypo

SEQ ID NO: 307999 - DNA, 439 bp, Homo sapiens; identical to SEQ ID NO: 285134
  chr7:87563890-87564329
  hypo

SEQ ID NO: 308000 - DNA, 205 bp, Homo sapiens; identical to SEQ ID NO: 285135
  chr7:87564359-87564564
  hypo

SEQ ID NO: 308001 - DNA, 481 bp, Homo sapiens; identical to SEQ ID NO: 201030
  chr7:87849420-87849901
  hypo

SEQ ID NO: 308002 - DNA, 41 bp, Homo sapiens; identical to SEQ ID NO: 257953
  chr7:88858571-88858612
  hypo

SEQ ID NO: 308003 - DNA, 634 bp, Homo sapiens; identical to SEQ ID NO: 285152
  chr7:90225111-90225745
  hypo

SEQ ID NO: 308004 - DNA, 211 bp, Homo sapiens; identical to SEQ ID NO: 201040
  chr7:90226057-90226268
  hypo

SEQ ID NO: 308005 - DNA, 184 bp, Homo sapiens; identical to SEQ ID NO: 211639
  chr7:90635233-90635417
  hypo

SEQ ID NO: 308006 - DNA, 377 bp, Homo sapiens; identical to SEQ ID NO: 285155
  chr7:90894561-90894938
  hypo

SEQ ID NO: 308007 - DNA, 145 bp, Homo sapiens; identical to SEQ ID NO: 257955
  chr7:91531327-91531472
  hypo

SEQ ID NO: 308008 - DNA, 80 bp, Homo sapiens; identical to SEQ ID NO: 257956
  chr7:91655605-91655685
  hypo

SEQ ID NO: 308009 - DNA, 40 bp, Homo sapiens; identical to SEQ ID NO: 211641
  chr7:92075854-92075894
  hypo

SEQ ID NO: 308010 - DNA, 143 bp, Homo sapiens; identical to SEQ ID NO: 201043
  chr7:92219764-92219907
  hypo

SEQ ID NO: 308011 - DNA, 119 bp, Homo sapiens; identical to SEQ ID NO: 211643
  chr7:92370087-92370206
  hypo

SEQ ID NO: 308012 - DNA, 1229 bp, Homo sapiens; identical to SEQ ID NO: 44386
  chr7:92462187-92463416
  hypo

SEQ ID NO: 308013 - DNA, 247 bp, Homo sapiens; identical to SEQ ID NO: 201045
  chr7:92463701-92463948
  hypo

SEQ ID NO: 308014 - DNA, 262 bp, Homo sapiens; identical to SEQ ID NO: 285162
  chr7:92464877-92465139
  hypo

SEQ ID NO: 308015 - DNA, 55 bp, Homo sapiens; identical to SEQ ID NO: 257959
  chr7:92465542-92465597
  hypo

SEQ ID NO: 308016 - DNA, 47 bp, Homo sapiens; identical to SEQ ID NO: 201046
  chr7:92466481-92466528
  hypo

SEQ ID NO: 308017 - DNA, 88 bp, Homo sapiens; identical to SEQ ID NO: 257960
  chr7:92745365-92745453
  hypo

SEQ ID NO: 308018 - DNA, 129 bp, Homo sapiens; identical to SEQ ID NO: 211647
  chr7:92939972-92940101
  hypo

SEQ ID NO: 308019 - DNA, 94 bp, Homo sapiens; identical to SEQ ID NO: 211648
  chr7:94138372-94138466
  hypo

SEQ ID NO: 308020 - DNA, 63 bp, Homo sapiens; identical to SEQ ID NO: 211649
  chr7:94293684-94293747
  hypo

SEQ ID NO: 308021 - DNA, 89 bp, Homo sapiens; identical to SEQ ID NO: 257964
  chr7:94732597-94732686
  hypo

SEQ ID NO: 308022 - DNA, 437 bp, Homo sapiens; identical to SEQ ID NO: 201052
  chr7:95064141-95064578
  hypo

SEQ ID NO: 308023 - DNA, 365 bp, Homo sapiens; identical to SEQ ID NO: 285191
  chr7:96746747-96747112
  hypo

SEQ ID NO: 308024 - DNA, 417 bp, Homo sapiens; identical to SEQ ID NO: 285192
  chr7:96747151-96747568
  hypo

SEQ ID NO: 308025 - DNA, 43 bp, Homo sapiens; identical to SEQ ID NO: 257965
  chr7:97137338-97137381
  hypo

SEQ ID NO: 308026 - DNA, 674 bp, Homo sapiens; identical to SEQ ID NO: 223150
  chr7:97501249-97501923
  hypo

SEQ ID NO: 308027 - DNA, 92 bp, Homo sapiens; identical to SEQ ID NO: 257966
  chr7:97591811-97591903
  hypo

SEQ ID NO: 308028 - DNA, 80 bp, Homo sapiens
  chr7:97600009-97600089
  hypo
atttggatgataaaataaaatcttattttcctcctgaaacatgaggaaacagaagcacatcatgaatagaaacatttcat

SEQ ID NO: 308029 - DNA, 36 bp, Homo sapiens
  chr7:97600249-97600285
  hypo
gcctgggcaacaccgtgagacctcgtctctatttaa

SEQ ID NO: 308030 - DNA, 186 bp, Homo sapiens; identical to SEQ ID NO: 257970
  chr7:97670351-97670537
  hypo

SEQ ID NO: 308031 - DNA, 33 bp, Homo sapiens; identical to SEQ ID NO: 257971
  chr7:97706016-97706049
  hypo

SEQ ID NO: 308032 - DNA, 225 bp, Homo sapiens; identical to SEQ ID NO: 257972
  chr7:97748929-97749154
  hypo

SEQ ID NO: 308033 - DNA, 78 bp, Homo sapiens
  chr7:97804194-97804272
  hypo
gcacacctgttgctcactaccgccccagcaggagagtggaaacgcatgttctcatttggcagggtgtttgccgtgttc

SEQ ID NO: 308034 - DNA, 115 bp, Homo sapiens
  chr7:97804302-97804417
  hypo
gatttgatcgtcagggccaccccacgtgccacgaggcaggtgccattattcatcccagttacagaggagaatactgaggcttggggtgctgagcggttggtctgtctcagccact

SEQ ID NO: 308035 - DNA, 151 bp, Homo sapiens; identical to SEQ ID NO: 211652
  chr7:97806161-97806312
  hypo

SEQ ID NO: 308036 - DNA, 159 bp, Homo sapiens; identical to SEQ ID NO: 257975
  chr7:97807169-97807328
  hypo

SEQ ID NO: 308037 - DNA, 146 bp, Homo sapiens
  chr7:97807596-97807742
  hypo
gaaaatgcctcctgcgtgttgagtttgcattggagaaccccgaagacgcgcaaactagtcctagcgtgagtgagcagcaagcagtggtacttccttgtgaatcggggtgggaacccttcagaaccgcgagctcccactttctgtcg

SEQ ID NO: 308038 - DNA, 89 bp, Homo sapiens
  chr7:97807772-97807861
  hypo
tggttactgtggtctcagtcacagcaagtgctgccaagctcaggcgacgctgccagagccttctgagagccgggcggggctggtgccac

SEQ ID NO: 308039 - DNA, 48 bp, Homo sapiens; identical to SEQ ID NO: 257977
  chr7:97808578-97808626
  hypo

SEQ ID NO: 308040 - DNA, 122 bp, Homo sapiens; identical to SEQ ID NO: 211653
  chr7:97832525-97832647
  hypo

SEQ ID NO: 308041 - DNA, 301 bp, Homo sapiens; identical to SEQ ID NO: 211654
  chr7:97833194-97833495
  hypo

SEQ ID NO: 308042 - DNA, 207 bp, Homo sapiens
  chr7:97833960-97834167
  hypo
cagcatcctgagtgtgctctcggggccatgccccctgcctgttgtggtcactctcaggctcgttaccggccaccctgtggggccaggctgaggcagaggggctctgggtcccaggaacgcccaggctgcgcgccatctcctctttttctcctgtggctgcatagtccctcctccgcactctgtctcctcctttcccagagagaacct

SEQ ID NO: 308043 - DNA, 499 bp, Homo sapiens; identical to SEQ ID NO: 257981
  chr7:97841577-97842076
  hypo

SEQ ID NO: 308044 - DNA, 111 bp, Homo sapiens; identical to SEQ ID NO: 257982
  chr7:97844377-97844488
  hypo

SEQ ID NO: 308045 - DNA, 94 bp, Homo sapiens; identical to SEQ ID NO: 211656
  chr7:97847038-97847132
  hypo

SEQ ID NO: 308046 - DNA, 184 bp, Homo sapiens; identical to SEQ ID NO: 257984
  chr7:97855417-97855601
  hypo

SEQ ID NO: 308047 - DNA, 165 bp, Homo sapiens; identical to SEQ ID NO: 211657
  chr7:97857342-97857507
  hypo

SEQ ID NO: 308048 - DNA, 67 bp, Homo sapiens
  chr7:97882281-97882348
  hypo
aactgggatttgaaaacactgtatcccgcctggcagaaaactggcaaggttaggatggagaaaggag

SEQ ID NO: 308049 - DNA, 350 bp, Homo sapiens
  chr7:97925221-97925571
  hypo
ctggaagccactcagtgttgggccaaccccgtgcacgcatgcctggggcccaacaatcctgctccctgtaggaacaagcagggcacacacccatgggcaccgagacactcgggcagccctggagaaacagcccagaccagaaacaccagacgcccgtcaatgggagagtcagaaccagcttctgtgcagacagcaggtcaccacacagcactgagcgactgtccctacggggccaccccagacagccatctctgtgccagggcttggggagtctggtgttggagaagggatggtcacggaggtgggccatgctgggtgatcgtgggggccgggaacgtcctgctgggtat

SEQ ID NO: 308050 - DNA, 132 bp, Homo sapiens; identical to SEQ ID NO: 257989
  chr7:97968886-97969018
  hypo

SEQ ID NO: 308051 - DNA, 224 bp, Homo sapiens; identical to SEQ ID NO: 257990
  chr7:97984208-97984432
  hypo

SEQ ID NO: 308052 - DNA, 42 bp, Homo sapiens; identical to SEQ ID NO: 211658
  chr7:97989649-97989691
  hypo

SEQ ID NO: 308053 - DNA, 35 bp, Homo sapiens; identical to SEQ ID NO: 211659
  chr7:98012255-98012290
  hypo

SEQ ID NO: 308054 - DNA, 236 bp, Homo sapiens; identical to SEQ ID NO: 201059
  chr7:98030420-98030656
  hypo

SEQ ID NO: 308055 - DNA, 142 bp, Homo sapiens
  chr7:98088535-98088677
  hypo
acctgtggagtgcccgctatgtgtgtccgcacctgccagggaagctgagaggcctggctggctgcttcgggtttgagcgaggacagcagcttggttctgagttaagcagactgcatcagaggtagccaagtattgaggcttc

SEQ ID NO: 308056 - DNA, 343 bp, Homo sapiens; identical to SEQ ID NO: 211661
  chr7:98115911-98116254
  hypo

SEQ ID NO: 308057 - DNA, 139 bp, Homo sapiens; identical to SEQ ID NO: 257995
  chr7:98147931-98148070
  hypo

SEQ ID NO: 308058 - DNA, 116 bp, Homo sapiens; identical to SEQ ID NO: 257996
  chr7:98254320-98254436
  hypo

SEQ ID NO: 308059 - DNA, 530 bp, Homo sapiens; identical to SEQ ID NO: 257997
  chr7:98586157-98586687
  hypo

SEQ ID NO: 308060 - DNA, 357 bp, Homo sapiens; identical to SEQ ID NO: 257998
  chr7:98598594-98598951
  hypo

SEQ ID NO: 308061 - DNA, 204 bp, Homo sapiens; identical to SEQ ID NO: 257999
  chr7:98599226-98599430
  hypo

SEQ ID NO: 308062 - DNA, 497 bp, Homo sapiens; identical to SEQ ID NO: 258000
  chr7:98599730-98600227
  hypo

SEQ ID NO: 308063 - DNA, 81 bp, Homo sapiens; identical to SEQ ID NO: 258001
  chr7:98601684-98601765
  hypo

SEQ ID NO: 308064 - DNA, 397 bp, Homo sapiens; identical to SEQ ID NO: 258002
  chr7:98602532-98602929
  hypo

SEQ ID NO: 308065 - DNA, 183 bp, Homo sapiens; identical to SEQ ID NO: 258003
  chr7:98605991-98606174
  hypo

SEQ ID NO: 308066 - DNA, 232 bp, Homo sapiens; identical to SEQ ID NO: 258004
  chr7:98636065-98636297
  hypo

SEQ ID NO: 308067 - DNA, 221 bp, Homo sapiens; identical to SEQ ID NO: 258005
  chr7:98639038-98639259
  hypo

SEQ ID NO: 308068 - DNA, 216 bp, Homo sapiens; identical to SEQ ID NO: 211663
  chr7:98639724-98639940
  hypo

SEQ ID NO: 308069 - DNA, 43 bp, Homo sapiens; identical to SEQ ID NO: 211664
  chr7:98704238-98704281
  hypo

SEQ ID NO: 308070 - DNA, 162 bp, Homo sapiens; identical to SEQ ID NO: 211665
  chr7:98704341-98704503
  hypo

SEQ ID NO: 308071 - DNA, 41 bp, Homo sapiens; identical to SEQ ID NO: 258009
  chr7:98705848-98705889
  hypo

SEQ ID NO: 308072 - DNA, 102 bp, Homo sapiens; identical to SEQ ID NO: 258010
  chr7:98735269-98735371
  hypo

SEQ ID NO: 308073 - DNA, 44 bp, Homo sapiens; identical to SEQ ID NO: 258011
  chr7:98738342-98738386
  hypo

SEQ ID NO: 308074 - DNA, 129 bp, Homo sapiens; identical to SEQ ID NO: 258012
  chr7:98775355-98775484
  hypo

SEQ ID NO: 308075 - DNA, 41 bp, Homo sapiens; identical to SEQ ID NO: 258013
  chr7:98814530-98814571
  hypo

SEQ ID NO: 308076 - DNA, 235 bp, Homo sapiens; identical to SEQ ID NO: 258014
  chr7:98845139-98845374
  hypo

SEQ ID NO: 308077 - DNA, 72 bp, Homo sapiens; identical to SEQ ID NO: 211667
  chr7:98870778-98870850
  hypo

SEQ ID NO: 308078 - DNA, 186 bp, Homo sapiens; identical to SEQ ID NO: 258016
  chr7:98876193-98876379
  hypo

SEQ ID NO: 308079 - DNA, 195 bp, Homo sapiens; identical to SEQ ID NO: 211668
  chr7:98879380-98879575
  hypo

SEQ ID NO: 308080 - DNA, 118 bp, Homo sapiens; identical to SEQ ID NO: 258018
  chr7:98885541-98885659
  hypo

SEQ ID NO: 308081 - DNA, 34 bp, Homo sapiens; identical to SEQ ID NO: 258019
  chr7:98889891-98889925
  hypo

SEQ ID NO: 308082 - DNA, 37 bp, Homo sapiens; identical to SEQ ID NO: 258020
  chr7:98901753-98901790
  hypo

SEQ ID NO: 308083 - DNA, 216 bp, Homo sapiens; identical to SEQ ID NO: 258021
  chr7:98904287-98904503
  hypo

SEQ ID NO: 308084 - DNA, 244 bp, Homo sapiens; identical to SEQ ID NO: 211669
  chr7:98955430-98955674
  hypo

SEQ ID NO: 308085 - DNA, 44 bp, Homo sapiens; identical to SEQ ID NO: 258023
  chr7:98960332-98960376
  hypo

SEQ ID NO: 308086 - DNA, 48 bp, Homo sapiens; identical to SEQ ID NO: 211670
  chr7:98966332-98966380
  hypo

SEQ ID NO: 308087 - DNA, 68 bp, Homo sapiens; identical to SEQ ID NO: 211671
  chr7:98966410-98966478
  hypo

SEQ ID NO: 308088 - DNA, 47 bp, Homo sapiens; identical to SEQ ID NO: 211672
  chr7:98966739-98966786
  hypo

SEQ ID NO: 308089 - DNA, 43 bp, Homo sapiens
  chr7:98970871-98970914
  hypo
agccacatactgcaggacaaaccaatgtcggcaggtgaggaca

SEQ ID NO: 308090 - DNA, 77 bp, Homo sapiens; identical to SEQ ID NO: 201060
  chr7:98971600-98971677
  hypo

SEQ ID NO: 308091 - DNA, 402 bp, Homo sapiens; identical to SEQ ID NO: 115310
  chr7:98971810-98972212
  hypo

SEQ ID NO: 308092 - DNA, 86 bp, Homo sapiens; identical to SEQ ID NO: 211675
  chr7:98985728-98985814
  hypo

SEQ ID NO: 308093 - DNA, 222 bp, Homo sapiens; identical to SEQ ID NO: 258029
  chr7:98994224-98994446
  hypo

SEQ ID NO: 308094 - DNA, 180 bp, Homo sapiens; identical to SEQ ID NO: 258030
  chr7:98997417-98997597
  hypo

SEQ ID NO: 308095 - DNA, 32 bp, Homo sapiens; identical to SEQ ID NO: 258031
  chr7:99019874-99019906
  hypo

SEQ ID NO: 308096 - DNA, 76 bp, Homo sapiens; identical to SEQ ID NO: 211677
  chr7:99020629-99020705
  hypo

SEQ ID NO: 308097 - DNA, 120 bp, Homo sapiens; identical to SEQ ID NO: 258034
  chr7:99032514-99032634
  hypo

SEQ ID NO: 308098 - DNA, 70 bp, Homo sapiens; identical to SEQ ID NO: 258035
  chr7:99065118-99065188
  hypo

SEQ ID NO: 308099 - DNA, 36 bp, Homo sapiens; identical to SEQ ID NO: 258036
  chr7:99073693-99073729
  hypo

SEQ ID NO: 308100 - DNA, 235 bp, Homo sapiens; identical to SEQ ID NO: 258037
  chr7:99084625-99084860
  hypo

SEQ ID NO: 308101 - DNA, 59 bp, Homo sapiens
  chr7:99103806-99103865
  hypo
agactttttaccagcgcttcaggcacttccagtaccatgaggcttcaggaccccgggag

SEQ ID NO: 308102 - DNA, 259 bp, Homo sapiens; identical to SEQ ID NO: 258040
  chr7:99135320-99135579
  hypo

SEQ ID NO: 308103 - DNA, 450 bp, Homo sapiens; identical to SEQ ID NO: 258041
  chr7:99140777-99141227
  hypo

SEQ ID NO: 308104 - DNA, 215 bp, Homo sapiens; identical to SEQ ID NO: 201064
  chr7:99156600-99156815
  hypo

SEQ ID NO: 308105 - DNA, 74 bp, Homo sapiens; identical to SEQ ID NO: 201065
  chr7:99156982-99157056
  hypo

SEQ ID NO: 308106 - DNA, 189 bp, Homo sapiens; identical to SEQ ID NO: 258042
  chr7:99161482-99161671
  hypo

SEQ ID NO: 308107 - DNA, 74 bp, Homo sapiens; identical to SEQ ID NO: 258043
  chr7:99191695-99191769
  hypo

SEQ ID NO: 308108 - DNA, 238 bp, Homo sapiens; identical to SEQ ID NO: 211680
  chr7:99227292-99227530
  hypo

SEQ ID NO: 308109 - DNA, 38 bp, Homo sapiens; identical to SEQ ID NO: 258045
  chr7:99391324-99391362
  hypo

SEQ ID NO: 308110 - DNA, 98 bp, Homo sapiens; identical to SEQ ID NO: 258046
  chr7:99391422-99391520
  hypo

SEQ ID NO: 308111 - DNA, 144 bp, Homo sapiens; identical to SEQ ID NO: 258047
  chr7:99552784-99552928
  hypo

SEQ ID NO: 308112 - DNA, 93 bp, Homo sapiens; identical to SEQ ID NO: 258048
  chr7:99602415-99602508
  hypo

SEQ ID NO: 308113 - DNA, 126 bp, Homo sapiens; identical to SEQ ID NO: 285209
  chr7:99613133-99613259
  hypo

SEQ ID NO: 308114 - DNA, 269 bp, Homo sapiens; identical to SEQ ID NO: 211681
  chr7:99691590-99691859
  hypo

SEQ ID NO: 308115 - DNA, 254 bp, Homo sapiens; identical to SEQ ID NO: 258050
  chr7:99696722-99696976
  hypo

SEQ ID NO: 308116 - DNA, 94 bp, Homo sapiens; identical to SEQ ID NO: 211682
  chr7:99723240-99723334
  hypo

SEQ ID NO: 308117 - DNA, 169 bp, Homo sapiens; identical to SEQ ID NO: 285215
  chr7:99725637-99725806
  hypo

SEQ ID NO: 308118 - DNA, 120 bp, Homo sapiens; identical to SEQ ID NO: 258052
  chr7:99734871-99734991
  hypo

SEQ ID NO: 308119 - DNA, 37 bp, Homo sapiens; identical to SEQ ID NO: 258054
  chr7:99782063-99782100
  hypo

SEQ ID NO: 308120 - DNA, 87 bp, Homo sapiens; identical to SEQ ID NO: 258055
  chr7:99796109-99796196
  hypo

SEQ ID NO: 308121 - DNA, 288 bp, Homo sapiens; identical to SEQ ID NO: 258056
  chr7:99819894-99820182
  hypo

SEQ ID NO: 308122 - DNA, 186 bp, Homo sapiens; identical to SEQ ID NO: 211683
  chr7:99839732-99839918
  hypo

SEQ ID NO: 308123 - DNA, 38 bp, Homo sapiens; identical to SEQ ID NO: 211684
  chr7:99839959-99839997
  hypo

SEQ ID NO: 308124 - DNA, 92 bp, Homo sapiens; identical to SEQ ID NO: 258058
  chr7:99849463-99849555
  hypo

SEQ ID NO: 308125 - DNA, 141 bp, Homo sapiens; identical to SEQ ID NO: 258059
  chr7:99964960-99965101
  hypo

SEQ ID NO: 308126 - DNA, 76 bp, Homo sapiens; identical to SEQ ID NO: 211685
  chr7:100024904-100024980
  hypo

SEQ ID NO: 308127 - DNA, 115 bp, Homo sapiens; identical to SEQ ID NO: 211686
  chr7:100025340-100025455
  hypo

SEQ ID NO: 308128 - DNA, 128 bp, Homo sapiens; identical to SEQ ID NO: 211687
  chr7:100030628-100030756
  hypo

SEQ ID NO: 308129 - DNA, 366 bp, Homo sapiens
  chr7:100034728-100035094
  hypo
gctgggattacaggcatgagccaccgcacctggccataaatggggcagctttaaggtaacggtccagtgtgccctgacctcccactcagacctgcacagcatttccggtgttccgttgcctccaaactcggaccggagttggcctgtatgagtgcgggcgagggtcgccgaccccatcccggactcccttctgggacacagcaactcttgcagctttttgtgactacttttaccttcgagagttccctgaaatattaatttgtataaaaagtagatatctggcacgggtgcggtagcgcatacctgcaattccaactctgggaggccaaggcgggaagatgtcttgaaaccctgagctggagacaa

SEQ ID NO: 308130 - DNA, 52 bp, Homo sapiens
  chr7:100035124-100035176
  hypo
ccattcccaatctctaccaaaagaatttaattttagccgggcgtggtggtgg

SEQ ID NO: 308131 - DNA, 277 bp, Homo sapiens; identical to SEQ ID NO: 211688
  chr7:100064566-100064843
  hypo

SEQ ID NO: 308132 - DNA, 37 bp, Homo sapiens; identical to SEQ ID NO: 258065
  chr7:100065387-100065424
  hypo

SEQ ID NO: 308133 - DNA, 228 bp, Homo sapiens; identical to SEQ ID NO: 258066
  chr7:100086232-100086460
  hypo

SEQ ID NO: 308134 - DNA, 180 bp, Homo sapiens; identical to SEQ ID NO: 258068
  chr7:100098054-100098234
  hypo

SEQ ID NO: 308135 - DNA, 111 bp, Homo sapiens; identical to SEQ ID NO: 258069
  chr7:100100530-100100641
  hypo

SEQ ID NO: 308136 - DNA, 33 bp, Homo sapiens; identical to SEQ ID NO: 211689
  chr7:100170149-100170182
  hypo

SEQ ID NO: 308137 - DNA, 186 bp, Homo sapiens; identical to SEQ ID NO: 258071
  chr7:100179298-100179484
  hypo

SEQ ID NO: 308138 - DNA, 187 bp, Homo sapiens
  chr7:100179940-100180127
  hypo
aggttgaggtaggtgagggctgtgagattccccaaggctgggttcaggcatctcaggcaattgtggtagaggctcaggccctccagggacaccagctggcacgccgcctcgggcacctcgggaaaccggttccgggacaggtctggggaaaaggaggtgtcggggagagttgcggaaaggcccagcc

SEQ ID NO: 308139 - DNA, 36 bp, Homo sapiens; identical to SEQ ID NO: 258073
  chr7:100189309-100189345
  hypo

SEQ ID NO: 308140 - DNA, 86 bp, Homo sapiens; identical to SEQ ID NO: 211690
  chr7:100198415-100198501
  hypo

SEQ ID NO: 308141 - DNA, 291 bp, Homo sapiens; identical to SEQ ID NO: 258075
  chr7:100218441-100218732
  hypo

SEQ ID NO: 308142 - DNA, 95 bp, Homo sapiens; identical to SEQ ID NO: 258076
  chr7:100246355-100246450
  hypo

SEQ ID NO: 308143 - DNA, 32 bp, Homo sapiens; identical to SEQ ID NO: 258077
  chr7:100258217-100258249
  hypo

SEQ ID NO: 308144 - DNA, 253 bp, Homo sapiens; identical to SEQ ID NO: 258078
  chr7:100275849-100276102
  hypo

SEQ ID NO: 308145 - DNA, 119 bp, Homo sapiens; identical to SEQ ID NO: 211693
  chr7:100279781-100279900
  hypo

SEQ ID NO: 308146 - DNA, 282 bp, Homo sapiens; identical to SEQ ID NO: 258080
  chr7:100281492-100281774
  hypo

SEQ ID NO: 308147 - DNA, 113 bp, Homo sapiens; identical to SEQ ID NO: 258081
  chr7:100284949-100285062
  hypo

SEQ ID NO: 308148 - DNA, 681 bp, Homo sapiens; identical to SEQ ID NO: 258082
  chr7:100285461-100286142
  hypo

SEQ ID NO: 308149 - DNA, 49 bp, Homo sapiens; identical to SEQ ID NO: 211694
  chr7:100388725-100388774
  hypo

SEQ ID NO: 308150 - DNA, 244 bp, Homo sapiens; identical to SEQ ID NO: 258084
  chr7:100400266-100400510
  hypo

SEQ ID NO: 308151 - DNA, 859 bp, Homo sapiens; identical to SEQ ID NO: 258085
  chr7:100402443-100403302
  hypo

SEQ ID NO: 308152 - DNA, 269 bp, Homo sapiens; identical to SEQ ID NO: 211695
  chr7:100405018-100405287
  hypo

SEQ ID NO: 308153 - DNA, 80 bp, Homo sapiens; identical to SEQ ID NO: 211696
  chr7:100407982-100408062
  hypo

SEQ ID NO: 308154 - DNA, 514 bp, Homo sapiens; identical to SEQ ID NO: 258088
  chr7:100410407-100410921
  hypo

SEQ ID NO: 308155 - DNA, 44 bp, Homo sapiens; identical to SEQ ID NO: 211698
  chr7:100417052-100417096
  hypo

SEQ ID NO: 308156 - DNA, 98 bp, Homo sapiens; identical to SEQ ID NO: 258090
  chr7:100420026-100420124
  hypo

SEQ ID NO: 308157 - DNA, 413 bp, Homo sapiens; identical to SEQ ID NO: 211699
  chr7:100421146-100421559
  hypo

SEQ ID NO: 308158 - DNA, 1470 bp, Homo sapiens; identical to SEQ ID NO: 285228
  chr7:100424341-100425811
  hypo

SEQ ID NO: 308159 - DNA, 122 bp, Homo sapiens; identical to SEQ ID NO: 211701
  chr7:100480482-100480604
  hypo

SEQ ID NO: 308160 - DNA, 43 bp, Homo sapiens; identical to SEQ ID NO: 258094
  chr7:100490911-100490954
  hypo

SEQ ID NO: 308161 - DNA, 143 bp, Homo sapiens; identical to SEQ ID NO: 258095
  chr7:100512579-100512722
  hypo

SEQ ID NO: 308162 - DNA, 91 bp, Homo sapiens; identical to SEQ ID NO: 258096
  chr7:100514709-100514800
  hypo

SEQ ID NO: 308163 - DNA, 152 bp, Homo sapiens; identical to SEQ ID NO: 201076
  chr7:100608956-100609108
  hypo

SEQ ID NO: 308164 - DNA, 137 bp, Homo sapiens; identical to SEQ ID NO: 285232
  chr7:100609361-100609498
  hypo

SEQ ID NO: 308165 - DNA, 38 bp, Homo sapiens; identical to SEQ ID NO: 258097
  chr7:100650571-100650609
  hypo

SEQ ID NO: 308166 - DNA, 58 bp, Homo sapiens; identical to SEQ ID NO: 258098
  chr7:100731011-100731069
  hypo

SEQ ID NO: 308167 - DNA, 343 bp, Homo sapiens; identical to SEQ ID NO: 258099
  chr7:100732095-100732438
  hypo

SEQ ID NO: 308168 - DNA, 562 bp, Homo sapiens; identical to SEQ ID NO: 285240
  chr7:100808502-100809064
  hypo

SEQ ID NO: 308169 - DNA, 41 bp, Homo sapiens; identical to SEQ ID NO: 285245
  chr7:100823770-100823811
  hypo

SEQ ID NO: 308170 - DNA, 36 bp, Homo sapiens; identical to SEQ ID NO: 258100
  chr7:100834973-100835009
  hypo

SEQ ID NO: 308171 - DNA, 95 bp, Homo sapiens; identical to SEQ ID NO: 211703
  chr7:100838061-100838156
  hypo

SEQ ID NO: 308172 - DNA, 84 bp, Homo sapiens; identical to SEQ ID NO: 258102
  chr7:100840809-100840893
  hypo

SEQ ID NO: 308173 - DNA, 234 bp, Homo sapiens; identical to SEQ ID NO: 211704
  chr7:100849418-100849652
  hypo

SEQ ID NO: 308174 - DNA, 69 bp, Homo sapiens; identical to SEQ ID NO: 258104
  chr7:100860161-100860230
  hypo

SEQ ID NO: 308175 - DNA, 94 bp, Homo sapiens; identical to SEQ ID NO: 211705
  chr7:100865918-100866012
  hypo

SEQ ID NO: 308176 - DNA, 157 bp, Homo sapiens; identical to SEQ ID NO: 258106
  chr7:100866248-100866405
  hypo

SEQ ID NO: 308177 - DNA, 103 bp, Homo sapiens; identical to SEQ ID NO: 258107
  chr7:100870052-100870155
  hypo

SEQ ID NO: 308178 - DNA, 91 bp, Homo sapiens; identical to SEQ ID NO: 258108
  chr7:100961430-100961521
  hypo

SEQ ID NO: 308179 - DNA, 157 bp, Homo sapiens; identical to SEQ ID NO: 258109
  chr7:101086134-101086291
  hypo

SEQ ID NO: 308180 - DNA, 34 bp, Homo sapiens; identical to SEQ ID NO: 258110
  chr7:101086746-101086780
  hypo

SEQ ID NO: 308181 - DNA, 105 bp, Homo sapiens; identical to SEQ ID NO: 211706
  chr7:101132023-101132128
  hypo

SEQ ID NO: 308182 - DNA, 77 bp, Homo sapiens; identical to SEQ ID NO: 211707
  chr7:101195310-101195387
  hypo

SEQ ID NO: 308183 - DNA, 59 bp, Homo sapiens; identical to SEQ ID NO: 258113
  chr7:101210706-101210765
  hypo

SEQ ID NO: 308184 - DNA, 165 bp, Homo sapiens; identical to SEQ ID NO: 211708
  chr7:101241666-101241831
  hypo

SEQ ID NO: 308185 - DNA, 57 bp, Homo sapiens; identical to SEQ ID NO: 258115
  chr7:101279964-101280021
  hypo

SEQ ID NO: 308186 - DNA, 336 bp, Homo sapiens; identical to SEQ ID NO: 201086
  chr7:101457433-101457769
  hypo

SEQ ID NO: 308187 - DNA, 467 bp, Homo sapiens; identical to SEQ ID NO: 201087
  chr7:101458246-101458713
  hypo

SEQ ID NO: 308188 - DNA, 190 bp, Homo sapiens; identical to SEQ ID NO: 201088
  chr7:101459183-101459373
  hypo

SEQ ID NO: 308189 - DNA, 496 bp, Homo sapiens; identical to SEQ ID NO: 223167
  chr7:101460545-101461041
  hypo

SEQ ID NO: 308190 - DNA, 146 bp, Homo sapiens; identical to SEQ ID NO: 258116
  chr7:101465441-101465587
  hypo

SEQ ID NO: 308191 - DNA, 136 bp, Homo sapiens; identical to SEQ ID NO: 211713
  chr7:101475654-101475790
  hypo

SEQ ID NO: 308192 - DNA, 250 bp, Homo sapiens
  chr7:101475858-101476108
  hypo
gagttcctttattcatccctatttgctttctgtctgtaatcctttgtaattccctggtttcatgatgtaattctaatggaaataaacccgaacctttcaaaattatgtaattaattgcattcagcttcaatgacaatgactaattatagtgatacctggtggcaaggcaggtacctactgctggggggctcctgtctgcttggtactaggactgccacttctgggcgcgtcggagcggctgcacaggggg

SEQ ID NO: 308193 - DNA, 37 bp, Homo sapiens; identical to SEQ ID NO: 211715
  chr7:101476346-101476383
  hypo

SEQ ID NO: 308194 - DNA, 139 bp, Homo sapiens; identical to SEQ ID NO: 258119
  chr7:101497175-101497314
  hypo

SEQ ID NO: 308195 - DNA, 152 bp, Homo sapiens; identical to SEQ ID NO: 211716
  chr7:101504316-101504468
  hypo

SEQ ID NO: 308196 - DNA, 42 bp, Homo sapiens; identical to SEQ ID NO: 258121
  chr7:101521621-101521663
  hypo

SEQ ID NO: 308197 - DNA, 56 bp, Homo sapiens; identical to SEQ ID NO: 258122
  chr7:101533919-101533975
  hypo

SEQ ID NO: 308198 - DNA, 173 bp, Homo sapiens; identical to SEQ ID NO: 211717
  chr7:101536663-101536836
  hypo

SEQ ID NO: 308199 - DNA, 274 bp, Homo sapiens; identical to SEQ ID NO: 258124
  chr7:101543484-101543758
  hypo

SEQ ID NO: 308200 - DNA, 50 bp, Homo sapiens; identical to SEQ ID NO: 258125
  chr7:101556168-101556218
  hypo

SEQ ID NO: 308201 - DNA, 111 bp, Homo sapiens; identical to SEQ ID NO: 201091
  chr7:101559394-101559505
  hypo

SEQ ID NO: 308202 - DNA, 350 bp, Homo sapiens; identical to SEQ ID NO: 211719
  chr7:101566716-101567066
  hypo

SEQ ID NO: 308203 - DNA, 283 bp, Homo sapiens; identical to SEQ ID NO: 211720
  chr7:101583547-101583830
  hypo

SEQ ID NO: 308204 - DNA, 121 bp, Homo sapiens
  chr7:101586046-101586167
  hypo
cagactctgggtcagagggcagcttgagctcctccaccgactgctccaagcctttgccccagctcttggtgcctggggtggtgggagcagcatgggcttcgctgcacacggacctgggccc

SEQ ID NO: 308205 - DNA, 200 bp, Homo sapiens; identical to SEQ ID NO: 211721
  chr7:101595976-101596176
  hypo

SEQ ID NO: 308206 - DNA, 197 bp, Homo sapiens; identical to SEQ ID NO: 211722
  chr7:101603072-101603269
  hypo

SEQ ID NO: 308207 - DNA, 263 bp, Homo sapiens; identical to SEQ ID NO: 211723
  chr7:101603308-101603571
  hypo

SEQ ID NO: 308208 - DNA, 213 bp, Homo sapiens; identical to SEQ ID NO: 258131
  chr7:101610608-101610821
  hypo

SEQ ID NO: 308209 - DNA, 234 bp, Homo sapiens; identical to SEQ ID NO: 258132
  chr7:101615800-101616034
  hypo

SEQ ID NO: 308210 - DNA, 323 bp, Homo sapiens; identical to SEQ ID NO: 211724
  chr7:101616396-101616719
  hypo

SEQ ID NO: 308211 - DNA, 45 bp, Homo sapiens; identical to SEQ ID NO: 211725
  chr7:101624113-101624158
  hypo

SEQ ID NO: 308212 - DNA, 101 bp, Homo sapiens; identical to SEQ ID NO: 211726
  chr7:101627640-101627741
  hypo

SEQ ID NO: 308213 - DNA, 296 bp, Homo sapiens
  chr7:101627846-101628142
  hypo
aagtcctgcaggactgagctctgaaggccacccacaccctgggttgtgcttggatgatggcatccctcctggcacaagcgcagatgggcagtcgggagggaacatcagcctgggaaaactagatgtcagtgaaaaatgctggaggtggctggcgttcgcaaaactcagtcgtaaaaaacagcacgttctcagtacaaaatgagcactgttaaaaataaaccgcgcaagaagaaatatatgaatacgagggcatggcaaacagttttgcaaggtattaagatcgcattaatcttaat

SEQ ID NO: 308214 - DNA, 163 bp, Homo sapiens; identical to SEQ ID NO: 258136
  chr7:101629392-101629555
  hypo

SEQ ID NO: 308215 - DNA, 102 bp, Homo sapiens; identical to SEQ ID NO: 211728
  chr7:101630576-101630678
  hypo

SEQ ID NO: 308216 - DNA, 455 bp, Homo sapiens; identical to SEQ ID NO: 211729
  chr7:101649203-101649658
  hypo

SEQ ID NO: 308217 - DNA, 319 bp, Homo sapiens
  chr7:101652271-101652590
  hypo
ggaaccctcggccccgcgtgctccagcaggtctgcatgattaacctgaattgcagtgttcagaggctcggcctgccagccacagcggttccagatgaaatgcagcttagaaggcagcatggtgtagtagctttggcgccagccgcacccagagtttggattgtagccagatggcctcaggtgcaatgtataacctctgggaattccagatttcctatttacacgacagggatgattccatacctgaagggctgtttggaagcatctagaagcaagcacagtggagtggctgtcatgacgctgaccgcacaaatgatggt

SEQ ID NO: 308218 - DNA, 215 bp, Homo sapiens; identical to SEQ ID NO: 258140
  chr7:101653175-101653390
  hypo

SEQ ID NO: 308219 - DNA, 111 bp, Homo sapiens
  chr7:101656270-101656381
  hypo
caggttaaattcttgcggtaatccttacggccctgtggtgttcgctaagatgtagcaagaatgtaaatagctaggtactttgatctacctcaaatacttactagtttaaac

SEQ ID NO: 308220 - DNA, 46 bp, Homo sapiens
  chr7:101656459-101656505
  hypo
acatgctgtcttgtgtggctgagacgtagatcaagagaaatttgta

SEQ ID NO: 308221 - DNA, 48 bp, Homo sapiens; identical to SEQ ID NO: 201092
  chr7:101671377-101671425
  hypo

SEQ ID NO: 308222 - DNA, 31 bp, Homo sapiens; identical to SEQ ID NO: 211732
  chr7:101694628-101694659
  hypo

SEQ ID NO: 308223 - DNA, 82 bp, Homo sapiens
  chr7:101706969-101707051
  hypo
gtcaagaaccctttacatattgagcattttcataaatatttaaacctggattcctgaacccttgggtcacatctgcagacca

SEQ ID NO: 308224 - DNA, 40 bp, Homo sapiens
  chr7:101707081-101707121
  hypo
gcatattaaacacccactgcgtgcccgtggtcgggaggaa

SEQ ID NO: 308225 - DNA, 79 bp, Homo sapiens; identical to SEQ ID NO: 201093
  chr7:101713618-101713697
  hypo

SEQ ID NO: 308226 - DNA, 138 bp, Homo sapiens; identical to SEQ ID NO: 201094
  chr7:101740643-101740781
  hypo

SEQ ID NO: 308227 - DNA, 124 bp, Homo sapiens; identical to SEQ ID NO: 201095
  chr7:101747615-101747739
  hypo

SEQ ID NO: 308228 - DNA, 77 bp, Homo sapiens; identical to SEQ ID NO: 201096
  chr7:101754977-101755054
  hypo

SEQ ID NO: 308229 - DNA, 67 bp, Homo sapiens; identical to SEQ ID NO: 201097
  chr7:101758486-101758553
  hypo

SEQ ID NO: 308230 - DNA, 49 bp, Homo sapiens; identical to SEQ ID NO: 201098
  chr7:101801839-101801888
  hypo

SEQ ID NO: 308231 - DNA, 105 bp, Homo sapiens; identical to SEQ ID NO: 201099
  chr7:101813725-101813830
  hypo

SEQ ID NO: 308232 - DNA, 189 bp, Homo sapiens; identical to SEQ ID NO: 201100
  chr7:101821748-101821937
  hypo

SEQ ID NO: 308233 - DNA, 59 bp, Homo sapiens; identical to SEQ ID NO: 201101
  chr7:101833092-101833151
  hypo

SEQ ID NO: 308234 - DNA, 49 bp, Homo sapiens; identical to SEQ ID NO: 201102
  chr7:101837121-101837170
  hypo

SEQ ID NO: 308235 - DNA, 97 bp, Homo sapiens; identical to SEQ ID NO: 201103
  chr7:101838786-101838883
  hypo

SEQ ID NO: 308236 - DNA, 672 bp, Homo sapiens; identical to SEQ ID NO: 201104
  chr7:101839913-101840585
  hypo

SEQ ID NO: 308237 - DNA, 66 bp, Homo sapiens; identical to SEQ ID NO: 201105
  chr7:101842081-101842147
  hypo

SEQ ID NO: 308238 - DNA, 102 bp, Homo sapiens; identical to SEQ ID NO: 201106
  chr7:101843350-101843452
  hypo

SEQ ID NO: 308239 - DNA, 845 bp, Homo sapiens; identical to SEQ ID NO: 201107
  chr7:101844639-101845484
  hypo

SEQ ID NO: 308240 - DNA, 166 bp, Homo sapiens; identical to SEQ ID NO: 201108
  chr7:101847670-101847836
  hypo

SEQ ID NO: 308241 - DNA, 57 bp, Homo sapiens; identical to SEQ ID NO: 201109
  chr7:101848393-101848450
  hypo

SEQ ID NO: 308242 - DNA, 303 bp, Homo sapiens; identical to SEQ ID NO: 201110
  chr7:101870646-101870949
  hypo

SEQ ID NO: 308243 - DNA, 189 bp, Homo sapiens; identical to SEQ ID NO: 201111
  chr7:101877331-101877520
  hypo

SEQ ID NO: 308244 - DNA, 265 bp, Homo sapiens; identical to SEQ ID NO: 201112
  chr7:101882599-101882864
  hypo

SEQ ID NO: 308245 - DNA, 9822 bp, Homo sapiens; identical to SEQ ID NO: 201113
  chr7:101891691-101901513
  hypo

SEQ ID NO: 308246 - DNA, 128 bp, Homo sapiens; identical to SEQ ID NO: 201114
  chr7:101916636-101916764
  hypo

SEQ ID NO: 308247 - DNA, 67 bp, Homo sapiens; identical to SEQ ID NO: 201115
  chr7:101917514-101917581
  hypo

SEQ ID NO: 308248 - DNA, 113 bp, Homo sapiens; identical to SEQ ID NO: 201116
  chr7:101918517-101918630
  hypo

SEQ ID NO: 308249 - DNA, 117 bp, Homo sapiens; identical to SEQ ID NO: 201117
  chr7:101921219-101921336
  hypo

SEQ ID NO: 308250 - DNA, 84 bp, Homo sapiens; identical to SEQ ID NO: 201118
  chr7:101923328-101923412
  hypo

SEQ ID NO: 308251 - DNA, 57 bp, Homo sapiens; identical to SEQ ID NO: 201119
  chr7:101924095-101924152
  hypo

SEQ ID NO: 308252 - DNA, 81 bp, Homo sapiens; identical to SEQ ID NO: 201120
  chr7:101925131-101925212
  hypo

SEQ ID NO: 308253 - DNA, 65 bp, Homo sapiens; identical to SEQ ID NO: 201121
  chr7:101926003-101926068
  hypo

SEQ ID NO: 308254 - DNA, 938 bp, Homo sapiens; identical to SEQ ID NO: 201122
  chr7:101926312-101927250
  hypo

SEQ ID NO: 308255 - DNA, 586 bp, Homo sapiens; identical to SEQ ID NO: 258145
  chr7:102087175-102087761
  hypo

SEQ ID NO: 308256 - DNA, 66 bp, Homo sapiens; identical to SEQ ID NO: 211764
  chr7:102088066-102088132
  hypo

SEQ ID NO: 308257 - DNA, 38 bp, Homo sapiens; identical to SEQ ID NO: 258147
  chr7:102094841-102094879
  hypo

SEQ ID NO: 308258 - DNA, 38 bp, Homo sapiens; identical to SEQ ID NO: 258149
  chr7:102756773-102756811
  hypo

SEQ ID NO: 308259 - DNA, 136 bp, Homo sapiens; identical to SEQ ID NO: 211765
  chr7:102782159-102782295
  hypo

SEQ ID NO: 308260 - DNA, 544 bp, Homo sapiens; identical to SEQ ID NO: 285294
  chr7:102920838-102921382
  hypo

SEQ ID NO: 308261 - DNA, 197 bp, Homo sapiens; identical to SEQ ID NO: 285298
  chr7:103086734-103086931
  hypo

SEQ ID NO: 308262 - DNA, 93 bp, Homo sapiens; identical to SEQ ID NO: 258151
  chr7:103778100-103778193
  hypo

SEQ ID NO: 308263 - DNA, 44 bp, Homo sapiens; identical to SEQ ID NO: 258152
  chr7:103778513-103778557
  hypo

SEQ ID NO: 308264 - DNA, 151 bp, Homo sapiens; identical to SEQ ID NO: 258153
  chr7:104464163-104464314
  hypo

SEQ ID NO: 308265 - DNA, 31 bp, Homo sapiens; identical to SEQ ID NO: 258154
  chr7:104564547-104564578
  hypo

SEQ ID NO: 308266 - DNA, 84 bp, Homo sapiens; identical to SEQ ID NO: 258155
  chr7:104566592-104566676
  hypo

SEQ ID NO: 308267 - DNA, 44 bp, Homo sapiens; identical to SEQ ID NO: 211767
  chr7:104629827-104629871
  hypo

SEQ ID NO: 308268 - DNA, 95 bp, Homo sapiens; identical to SEQ ID NO: 258157
  chr7:104764717-104764812
  hypo

SEQ ID NO: 308269 - DNA, 141 bp, Homo sapiens; identical to SEQ ID NO: 258158
  chr7:104845020-104845161
  hypo

SEQ ID NO: 308270 - DNA, 95 bp, Homo sapiens; identical to SEQ ID NO: 258159
  chr7:104860662-104860757
  hypo

SEQ ID NO: 308271 - DNA, 309 bp, Homo sapiens; identical to SEQ ID NO: 258160
  chr7:104869027-104869336
  hypo

SEQ ID NO: 308272 - DNA, 141 bp, Homo sapiens; identical to SEQ ID NO: 258161
  chr7:104869939-104870080
  hypo

SEQ ID NO: 308273 - DNA, 84 bp, Homo sapiens; identical to SEQ ID NO: 211768
  chr7:104917805-104917889
  hypo

SEQ ID NO: 308274 - DNA, 120 bp, Homo sapiens; identical to SEQ ID NO: 258163
  chr7:104988783-104988903
  hypo

SEQ ID NO: 308275 - DNA, 37 bp, Homo sapiens; identical to SEQ ID NO: 211769
  chr7:105016768-105016805
  hypo

SEQ ID NO: 308276 - DNA, 40 bp, Homo sapiens; identical to SEQ ID NO: 258165
  chr7:105137529-105137569
  hypo

SEQ ID NO: 308277 - DNA, 500 bp, Homo sapiens; identical to SEQ ID NO: 258166
  chr7:105254043-105254543
  hypo

SEQ ID NO: 308278 - DNA, 130 bp, Homo sapiens; identical to SEQ ID NO: 211770
  chr7:105278333-105278463
  hypo

SEQ ID NO: 308279 - DNA, 120 bp, Homo sapiens; identical to SEQ ID NO: 258168
  chr7:105278913-105279033
  hypo

SEQ ID NO: 308280 - DNA, 45 bp, Homo sapiens; identical to SEQ ID NO: 211771
  chr7:105279330-105279375
  hypo

SEQ ID NO: 308281 - DNA, 94 bp, Homo sapiens; identical to SEQ ID NO: 258170
  chr7:105280243-105280337
  hypo

SEQ ID NO: 308282 - DNA, 189 bp, Homo sapiens; identical to SEQ ID NO: 258171
  chr7:105399236-105399425
  hypo

SEQ ID NO: 308283 - DNA, 68 bp, Homo sapiens
  chr7:105432454-105432522
  hypo
gctgggtgacctgtcgaggcctgtcaggctgccactgacgccccattcttctgtattcctccagagac

SEQ ID NO: 308284 - DNA, 336 bp, Homo sapiens
  chr7:105432552-105432888
  hypo
cacagtcacacacatctgttatgtcagtgagcggaaggtaaaggttcggctccttagagactgtggccacctggaggtgtgttcccctccaggcctttcccgttgagacttttcctagtttccctagagggaagtgtcaaccttgtacgtgtctgatctgagcatgtctcctgtggaaagtgagaggacctgggaatctgcttgattattcctcagtgagtcaaccttaggatctcctctacaggctgcccaggtcctgagggccctgccgatggcgagcaaagacaggcagctggctcccaggaagaccaccacttcacacggctgggtgttcac

SEQ ID NO: 308285 - DNA, 156 bp, Homo sapiens; identical to SEQ ID NO: 258173
  chr7:105445968-105446124
  hypo

SEQ ID NO: 308286 - DNA, 241 bp, Homo sapiens; identical to SEQ ID NO: 285309
  chr7:105517690-105517931
  hypo

SEQ ID NO: 308287 - DNA, 161 bp, Homo sapiens; identical to SEQ ID NO: 258174
  chr7:105586619-105586780
  hypo

SEQ ID NO: 308288 - DNA, 38 bp, Homo sapiens; identical to SEQ ID NO: 211774
  chr7:105722825-105722863
  hypo

SEQ ID NO: 308289 - DNA, 40 bp, Homo sapiens
  chr7:105753778-105753818
  hypo
cactgaggttattccgtcagggttgacaactgttattgaa

SEQ ID NO: 308290 - DNA, 186 bp, Homo sapiens
  chr7:105753848-105754034
  hypo
tcgagacctatctccttgtttgctgtccagagagtgcaaaaaatacatttcattttctatgcagacagagacaatctttatgtttatcttggctcccgttcctcagtccccagcacagtcagtgctcaatgagcacctaatggcatatctcattttgaaataacattaagaactgggcgcggtggc

SEQ ID NO: 308291 - DNA, 411 bp, Homo sapiens; identical to SEQ ID NO: 201129
  chr7:106508245-106508656
  hypo

SEQ ID NO: 308292 - DNA, 85 bp, Homo sapiens; identical to SEQ ID NO: 258177
  chr7:106574561-106574646
  hypo

SEQ ID NO: 308293 - DNA, 144 bp, Homo sapiens; identical to SEQ ID NO: 211776
  chr7:106622690-106622834
  hypo

SEQ ID NO: 308294 - DNA, 37 bp, Homo sapiens; identical to SEQ ID NO: 211777
  chr7:106675696-106675733
  hypo

SEQ ID NO: 308295 - DNA, 86 bp, Homo sapiens; identical to SEQ ID NO: 211778
  chr7:106683489-106683575
  hypo

SEQ ID NO: 308296 - DNA, 32 bp, Homo sapiens; identical to SEQ ID NO: 201130
  chr7:106684800-106684832
  hypo

SEQ ID NO: 308297 - DNA, 251 bp, Homo sapiens; identical to SEQ ID NO: 201131
  chr7:106684920-106685171
  hypo

SEQ ID NO: 308298 - DNA, 37 bp, Homo sapiens; identical to SEQ ID NO: 211781
  chr7:106836715-106836752
  hypo

SEQ ID NO: 308299 - DNA, 37 bp, Homo sapiens; identical to SEQ ID NO: 211782
  chr7:106836992-106837029
  hypo

SEQ ID NO: 308300 - DNA, 41 bp, Homo sapiens; identical to SEQ ID NO: 211783
  chr7:106837817-106837858
  hypo

SEQ ID NO: 308301 - DNA, 42 bp, Homo sapiens; identical to SEQ ID NO: 258186
  chr7:107060907-107060949
  hypo

SEQ ID NO: 308302 - DNA, 90 bp, Homo sapiens; identical to SEQ ID NO: 258188
  chr7:107202440-107202530
  hypo

SEQ ID NO: 308303 - DNA, 115 bp, Homo sapiens; identical to SEQ ID NO: 258189
  chr7:107430184-107430299
  hypo

SEQ ID NO: 308304 - DNA, 138 bp, Homo sapiens; identical to SEQ ID NO: 211784
  chr7:107483556-107483694
  hypo

SEQ ID NO: 308305 - DNA, 38 bp, Homo sapiens; identical to SEQ ID NO: 211785
  chr7:107483918-107483956
  hypo

SEQ ID NO: 308306 - DNA, 201 bp, Homo sapiens; identical to SEQ ID NO: 258191
  chr7:107524448-107524649
  hypo

SEQ ID NO: 308307 - DNA, 322 bp, Homo sapiens; identical to SEQ ID NO: 201135
  chr7:107531675-107531997
  hypo

SEQ ID NO: 308308 - DNA, 44 bp, Homo sapiens; identical to SEQ ID NO: 211787
  chr7:107633907-107633951
  hypo

SEQ ID NO: 308309 - DNA, 57 bp, Homo sapiens; identical to SEQ ID NO: 258193
  chr7:107773016-107773073
  hypo

SEQ ID NO: 308310 - DNA, 43 bp, Homo sapiens; identical to SEQ ID NO: 201139
  chr7:108095229-108095272
  hypo

SEQ ID NO: 308311 - DNA, 130 bp, Homo sapiens
  chr7:108168536-108168666
  hypo
agaatttcttgaatcgttcctctgctccacattcgcatttccactgctctagttcaggctttcatccttgctcttcagtttcatctaaactggttttccagcctgtaactaacctctgacccagtcagtc

SEQ ID NO: 308312 - DNA, 37 bp, Homo sapiens; identical to SEQ ID NO: 258195
  chr7:108298193-108298230
  hypo

SEQ ID NO: 308313 - DNA, 89 bp, Homo sapiens; identical to SEQ ID NO: 258196
  chr7:110163602-110163691
  hypo

SEQ ID NO: 308314 - DNA, 81 bp, Homo sapiens; identical to SEQ ID NO: 258197
  chr7:110471985-110472066
  hypo

SEQ ID NO: 308315 - DNA, 34 bp, Homo sapiens; identical to SEQ ID NO: 258198
  chr7:112187148-112187182
  hypo

SEQ ID NO: 308316 - DNA, 214 bp, Homo sapiens; identical to SEQ ID NO: 258199
  chr7:112187242-112187456
  hypo

SEQ ID NO: 308317 - DNA, 199 bp, Homo sapiens; identical to SEQ ID NO: 258200
  chr7:112431880-112432079
  hypo

SEQ ID NO: 308318 - DNA, 482 bp, Homo sapiens; identical to SEQ ID NO: 285340
  chr7:113726887-113727369
  hypo

SEQ ID NO: 308319 - DNA, 57 bp, Homo sapiens; identical to SEQ ID NO: 258201
  chr7:114410865-114410922
  hypo

SEQ ID NO: 308320 - DNA, 43 bp, Homo sapiens; identical to SEQ ID NO: 258202
  chr7:115430130-115430173
  hypo

SEQ ID NO: 308321 - DNA, 102 bp, Homo sapiens; identical to SEQ ID NO: 258204
  chr7:116914129-116914231
  hypo

SEQ ID NO: 308322 - DNA, 762 bp, Homo sapiens; identical to SEQ ID NO: 285357
  chr7:120496812-120497574
  hypo

SEQ ID NO: 308323 - DNA, 120 bp, Homo sapiens; identical to SEQ ID NO: 258205
  chr7:120521915-120522035
  hypo

SEQ ID NO: 308324 - DNA, 130 bp, Homo sapiens; identical to SEQ ID NO: 201163
  chr7:121863466-121863596
  hypo

SEQ ID NO: 308325 - DNA, 157 bp, Homo sapiens; identical to SEQ ID NO: 201170
  chr7:123174506-123174663
  hypo

SEQ ID NO: 308326 - DNA, 93 bp, Homo sapiens; identical to SEQ ID NO: 258206
  chr7:123175850-123175943
  hypo

SEQ ID NO: 308327 - DNA, 180 bp, Homo sapiens; identical to SEQ ID NO: 258207
  chr7:124940679-124940859
  hypo

SEQ ID NO: 308328 - DNA, 38 bp, Homo sapiens; identical to SEQ ID NO: 258208
  chr7:125532056-125532094
  hypo

SEQ ID NO: 308329 - DNA, 32 bp, Homo sapiens; identical to SEQ ID NO: 258209
  chr7:126013969-126014001
  hypo

SEQ ID NO: 308330 - DNA, 134 bp, Homo sapiens; identical to SEQ ID NO: 258210
  chr7:126173534-126173668
  hypo

SEQ ID NO: 308331 - DNA, 71 bp, Homo sapiens; identical to SEQ ID NO: 201175
  chr7:126891135-126891206
  hypo

SEQ ID NO: 308332 - DNA, 37 bp, Homo sapiens; identical to SEQ ID NO: 285393
  chr7:126988120-126988157
  hypo

SEQ ID NO: 308333 - DNA, 77 bp, Homo sapiens; identical to SEQ ID NO: 285394
  chr7:126988206-126988283
  hypo

SEQ ID NO: 308334 - DNA, 36 bp, Homo sapiens; identical to SEQ ID NO: 258211
  chr7:127231013-127231049
  hypo

SEQ ID NO: 308335 - DNA, 245 bp, Homo sapiens; identical to SEQ ID NO: 258212
  chr7:127235457-127235702
  hypo

SEQ ID NO: 308336 - DNA, 100 bp, Homo sapiens; identical to SEQ ID NO: 258213
  chr7:127240011-127240111
  hypo

SEQ ID NO: 308337 - DNA, 101 bp, Homo sapiens; identical to SEQ ID NO: 211794
  chr7:127371028-127371129
  hypo

SEQ ID NO: 308338 - DNA, 266 bp, Homo sapiens
  chr7:127371249-127371515
  hypo
cccctttcctctacttcataccgcagctgctgtgagcgagtgcactgtgctctgcacaggagaattggcagacagttccatatgctggttttggccattgggacattcaggattattaggccagtttgtactttaagaggagggagacttgacatcgctcaaagcagcttattttatttatttctatttcttataaaggggaaagaagctagcccagcccttagctgttcctttcaacgtagccggctcaacgttttcctcaggaa

SEQ ID NO: 308339 - DNA, 163 bp, Homo sapiens; identical to SEQ ID NO: 258215
  chr7:127452506-127452669
  hypo

SEQ ID NO: 308340 - DNA, 32 bp, Homo sapiens; identical to SEQ ID NO: 258216
  chr7:127497484-127497516
  hypo

SEQ ID NO: 308341 - DNA, 54 bp, Homo sapiens; identical to SEQ ID NO: 258217
  chr7:127502788-127502842
  hypo

SEQ ID NO: 308342 - DNA, 125 bp, Homo sapiens; identical to SEQ ID NO: 211796
  chr7:127544866-127544991
  hypo

SEQ ID NO: 308343 - DNA, 172 bp, Homo sapiens; identical to SEQ ID NO: 258219
  chr7:127583867-127584039
  hypo

SEQ ID NO: 308344 - DNA, 83 bp, Homo sapiens
  chr7:127615838-127615921
  hypo
gtgcgctgtagcgccgagcacgctaccccgttcttctctctgctccactccactctgacacccccacagaggtgctcatggct

SEQ ID NO: 308345 - DNA, 215 bp, Homo sapiens; identical to SEQ ID NO: 211797
  chr7:127670440-127670655
  hypo

SEQ ID NO: 308346 - DNA, 208 bp, Homo sapiens; identical to SEQ ID NO: 285400
  chr7:127671450-127671658
  hypo

SEQ ID NO: 308347 - DNA, 108 bp, Homo sapiens; identical to SEQ ID NO: 211798
  chr7:127673455-127673563
  hypo

SEQ ID NO: 308348 - DNA, 105 bp, Homo sapiens; identical to SEQ ID NO: 258223
  chr7:127679931-127680036
  hypo

SEQ ID NO: 308349 - DNA, 287 bp, Homo sapiens; identical to SEQ ID NO: 211799
  chr7:127693923-127694210
  hypo

SEQ ID NO: 308350 - DNA, 46 bp, Homo sapiens; identical to SEQ ID NO: 258225
  chr7:127721780-127721826
  hypo

SEQ ID NO: 308351 - DNA, 42 bp, Homo sapiens; identical to SEQ ID NO: 258226
  chr7:127984395-127984437
  hypo

SEQ ID NO: 308352 - DNA, 105 bp, Homo sapiens; identical to SEQ ID NO: 211800
  chr7:128097963-128098068
  hypo

SEQ ID NO: 308353 - DNA, 215 bp, Homo sapiens; identical to SEQ ID NO: 258229
  chr7:128441280-128441495
  hypo

SEQ ID NO: 308354 - DNA, 257 bp, Homo sapiens; identical to SEQ ID NO: 211801
  chr7:128484037-128484294
  hypo

SEQ ID NO: 308355 - DNA, 46 bp, Homo sapiens
  chr7:128484885-128484931
  hypo
cccacggagcctggcgagtacaccatcaacatcctgtttgctgagg

SEQ ID NO: 308356 - DNA, 254 bp, Homo sapiens
  chr7:128484981-128485235
  hypo
ccgagcaaggtgcgggccagtggaccgggcctggagcgcggcaaggtcggtgaggcagccaccttcactgtggactgctcagaggcaggcgaggcggagctgaccattgagatcctgtcggatgccggggtcaaggccgaggtgctgatccacaacaacgcggatggcacctaccacatcacctacagccctgccttccctggcacctacaccattaccatcaagtatggcgggcatcccgtgcccaaattccc

SEQ ID NO: 308357 - DNA, 341 bp, Homo sapiens; identical to SEQ ID NO: 258232
  chr7:128488723-128489064
  hypo

SEQ ID NO: 308358 - DNA, 222 bp, Homo sapiens; identical to SEQ ID NO: 258233
  chr7:128489418-128489640
  hypo

SEQ ID NO: 308359 - DNA, 381 bp, Homo sapiens
  chr7:128492721-128493102
  hypo
ctgagccagctgaccgccagcatccgtgccccctcgggcaacgaggagccctgcctgctgaagcgcctgcccaaccggcacattggtgagcgtggggcctcacggggacctcaggggtgggggcccacaggatgctctgcctaacacccactttccacagggatctccttcacccccaaggaggtcggggagcacgtggtgagcgtgcgcaagagtggcaagcatgtcaccaacagccccttcaagatcctggtggggccatctgagatcggggacgccagcaaggtgcgggtctggggcaaggggctttccgagggacacacattccaggtggcagagttcatcgtggacactcgcaatgcaggtacctcctgccccaga

SEQ ID NO: 308360 - DNA, 75 bp, Homo sapiens
  chr7:128494167-128494242
  hypo
gagtccacccaggtcggcggggaccccttccctgctgtgtttggggacttcctgggccgggagcgcctgggatcc

SEQ ID NO: 308361 - DNA, 275 bp, Homo sapiens; identical to SEQ ID NO: 258236
  chr7:128494588-128494863
  hypo

SEQ ID NO: 308362 - DNA, 112 bp, Homo sapiens; identical to SEQ ID NO: 285410
  chr7:128509598-128509710
  hypo

SEQ ID NO: 308363 - DNA, 96 bp, Homo sapiens; identical to SEQ ID NO: 285411
  chr7:128509982-128510078
  hypo

SEQ ID NO: 308364 - DNA, 108 bp, Homo sapiens; identical to SEQ ID NO: 258238
  chr7:128532126-128532234
  hypo

SEQ ID NO: 308365 - DNA, 42 bp, Homo sapiens; identical to SEQ ID NO: 258239
  chr7:128533896-128533938
  hypo

SEQ ID NO: 308366 - DNA, 42 bp, Homo sapiens; identical to SEQ ID NO: 258240
  chr7:128534159-128534201
  hypo

SEQ ID NO: 308367 - DNA, 74 bp, Homo sapiens; identical to SEQ ID NO: 211803
  chr7:128587332-128587406
  hypo

SEQ ID NO: 308368 - DNA, 205 bp, Homo sapiens; identical to SEQ ID NO: 258242
  chr7:128597298-128597503
  hypo

SEQ ID NO: 308369 - DNA, 93 bp, Homo sapiens; identical to SEQ ID NO: 211804
  chr7:128602076-128602169
  hypo

SEQ ID NO: 308370 - DNA, 32 bp, Homo sapiens; identical to SEQ ID NO: 97204
  chr7:128602409-128602441
  hypo

SEQ ID NO: 308371 - DNA, 84 bp, Homo sapiens; identical to SEQ ID NO: 258245
  chr7:128767406-128767490
  hypo

SEQ ID NO: 308372 - DNA, 264 bp, Homo sapiens; identical to SEQ ID NO: 285416
  chr7:128828640-128828904
  hypo

SEQ ID NO: 308373 - DNA, 36 bp, Homo sapiens; identical to SEQ ID NO: 258246
  chr7:128853698-128853734
  hypo

SEQ ID NO: 308374 - DNA, 128 bp, Homo sapiens; identical to SEQ ID NO: 258247
  chr7:129050168-129050296
  hypo

SEQ ID NO: 308375 - DNA, 94 bp, Homo sapiens; identical to SEQ ID NO: 211806
  chr7:129096502-129096596
  hypo

SEQ ID NO: 308376 - DNA, 81 bp, Homo sapiens; identical to SEQ ID NO: 258249
  chr7:129172367-129172448
  hypo

SEQ ID NO: 308377 - DNA, 129 bp, Homo sapiens; identical to SEQ ID NO: 258250
  chr7:129245415-129245544
  hypo

SEQ ID NO: 308378 - DNA, 44 bp, Homo sapiens; identical to SEQ ID NO: 258251
  chr7:129287558-129287602
  hypo

SEQ ID NO: 308379 - DNA, 71 bp, Homo sapiens
  chr7:129297203-129297274
  hypo
ggagtgacccaaaccgaacatatggctaccatagaagcacatgcagtggcccagcaagtgcagcaggtcca

SEQ ID NO: 308380 - DNA, 45 bp, Homo sapiens
  chr7:129297304-129297349
  hypo
gagtgctgatgaagactcgccttcttctcccgaggacacctctta

SEQ ID NO: 308381 - DNA, 66 bp, Homo sapiens; identical to SEQ ID NO: 211807
  chr7:129330228-129330294
  hypo

SEQ ID NO: 308382 - DNA, 110 bp, Homo sapiens; identical to SEQ ID NO: 211808
  chr7:129330351-129330461
  hypo

SEQ ID NO: 308383 - DNA, 184 bp, Homo sapiens; identical to SEQ ID NO: 258254
  chr7:129392673-129392857
  hypo

SEQ ID NO: 308384 - DNA, 75 bp, Homo sapiens; identical to SEQ ID NO: 258255
  chr7:129410252-129410327
  hypo

SEQ ID NO: 308385 - DNA, 330 bp, Homo sapiens; identical to SEQ ID NO: 258256
  chr7:129414553-129414883
  hypo

SEQ ID NO: 308386 - DNA, 112 bp, Homo sapiens; identical to SEQ ID NO: 211810
  chr7:129435134-129435246
  hypo

SEQ ID NO: 308387 - DNA, 235 bp, Homo sapiens; identical to SEQ ID NO: 211811
  chr7:129470903-129471138
  hypo

SEQ ID NO: 308388 - DNA, 39 bp, Homo sapiens; identical to SEQ ID NO: 258259
  chr7:129483110-129483149
  hypo

SEQ ID NO: 308389 - DNA, 198 bp, Homo sapiens; identical to SEQ ID NO: 211812
  chr7:129483449-129483647
  hypo

SEQ ID NO: 308390 - DNA, 33 bp, Homo sapiens; identical to SEQ ID NO: 258261
  chr7:129501458-129501491
  hypo

SEQ ID NO: 308391 - DNA, 143 bp, Homo sapiens; identical to SEQ ID NO: 258262
  chr7:129504689-129504832
  hypo

SEQ ID NO: 308392 - DNA, 154 bp, Homo sapiens; identical to SEQ ID NO: 258263
  chr7:129518100-129518254
  hypo

SEQ ID NO: 308393 - DNA, 176 bp, Homo sapiens; identical to SEQ ID NO: 258264
  chr7:129565205-129565381
  hypo

SEQ ID NO: 308394 - DNA, 31 bp, Homo sapiens; identical to SEQ ID NO: 258265
  chr7:129665425-129665456
  hypo

SEQ ID NO: 308395 - DNA, 45 bp, Homo sapiens; identical to SEQ ID NO: 211813
  chr7:129689365-129689410
  hypo

SEQ ID NO: 308396 - DNA, 240 bp, Homo sapiens; identical to SEQ ID NO: 211814
  chr7:129689710-129689950
  hypo

SEQ ID NO: 308397 - DNA, 147 bp, Homo sapiens; identical to SEQ ID NO: 211815
  chr7:129778855-129779002
  hypo

SEQ ID NO: 308398 - DNA, 74 bp, Homo sapiens; identical to SEQ ID NO: 258269
  chr7:129780114-129780188
  hypo

SEQ ID NO: 308399 - DNA, 325 bp, Homo sapiens; identical to SEQ ID NO: 258270
  chr7:129780407-129780732
  hypo

SEQ ID NO: 308400 - DNA, 272 bp, Homo sapiens; identical to SEQ ID NO: 211816
  chr7:129782252-129782524
  hypo

SEQ ID NO: 308401 - DNA, 393 bp, Homo sapiens; identical to SEQ ID NO: 211817
  chr7:129782554-129782947
  hypo

SEQ ID NO: 308402 - DNA, 45 bp, Homo sapiens; identical to SEQ ID NO: 211818
  chr7:129800434-129800479
  hypo

SEQ ID NO: 308403 - DNA, 180 bp, Homo sapiens; identical to SEQ ID NO: 258274
  chr7:129833437-129833617
  hypo

SEQ ID NO: 308404 - DNA, 53 bp, Homo sapiens
  chr7:129846026-129846079
  hypo
ctgagccaggcgcacggatatagaaaataagaccttcctggttattacccaga

SEQ ID NO: 308405 - DNA, 84 bp, Homo sapiens
  chr7:129846109-129846193
  hypo
gcatttcggtggcaggtgaggtggatgcagtgctccccaaggaggcgcatccagcccagccccagctctcgcgagcttcctgga

SEQ ID NO: 308406 - DNA, 78 bp, Homo sapiens; identical to SEQ ID NO: 258277
  chr7:129851262-129851340
  hypo

SEQ ID NO: 308407 - DNA, 274 bp, Homo sapiens; identical to SEQ ID NO: 211819
  chr7:129948129-129948403
  hypo

SEQ ID NO: 308408 - DNA, 44 bp, Homo sapiens; identical to SEQ ID NO: 258279
  chr7:130982739-130982783
  hypo

SEQ ID NO: 308409 - DNA, 45 bp, Homo sapiens; identical to SEQ ID NO: 211820
  chr7:131041470-131041515
  hypo

SEQ ID NO: 308410 - DNA, 281 bp, Homo sapiens; identical to SEQ ID NO: 258282
  chr7:131422550-131422831
  hypo

SEQ ID NO: 308411 - DNA, 249 bp, Homo sapiens; identical to SEQ ID NO: 211821
  chr7:131864448-131864697
  hypo

SEQ ID NO: 308412 - DNA, 38 bp, Homo sapiens; identical to SEQ ID NO: 285434
  chr7:132262442-132262480
  hypo

SEQ ID NO: 308413 - DNA, 81 bp, Homo sapiens
  chr7:132418868-132418949
  hypo
aagaccaccctggcttgccacgcccccacctgagcctataaaaaccggataccctagcaaggcagagacagaagctgttgg

SEQ ID NO: 308414 - DNA, 73 bp, Homo sapiens
  chr7:132419066-132419139
  hypo
ctcacaacccgcaggacaaggcagagtttggctggggcaatcggaggaactccagggaaaaaccatctccctt

SEQ ID NO: 308415 - DNA, 105 bp, Homo sapiens; identical to SEQ ID NO: 211822
  chr7:132527723-132527828
  hypo

SEQ ID NO: 308416 - DNA, 45 bp, Homo sapiens; identical to SEQ ID NO: 211823
  chr7:132527948-132527993
  hypo

SEQ ID NO: 308417 - DNA, 173 bp, Homo sapiens; identical to SEQ ID NO: 258287
  chr7:132610412-132610585
  hypo

SEQ ID NO: 308418 - DNA, 203 bp, Homo sapiens; identical to SEQ ID NO: 211824
  chr7:132637910-132638113
  hypo

SEQ ID NO: 308419 - DNA, 92 bp, Homo sapiens; identical to SEQ ID NO: 211825
  chr7:133234086-133234178
  hypo

SEQ ID NO: 308420 - DNA, 157 bp, Homo sapiens; identical to SEQ ID NO: 258290
  chr7:133630765-133630922
  hypo

SEQ ID NO: 308421 - DNA, 102 bp, Homo sapiens; identical to SEQ ID NO: 258291
  chr7:133828852-133828954
  hypo

SEQ ID NO: 308422 - DNA, 42 bp, Homo sapiens; identical to SEQ ID NO: 258292
  chr7:134135183-134135225
  hypo

SEQ ID NO: 308423 - DNA, 59 bp, Homo sapiens; identical to SEQ ID NO: 211826
  chr7:134377919-134377978
  hypo

SEQ ID NO: 308424 - DNA, 50 bp, Homo sapiens; identical to SEQ ID NO: 211827
  chr7:134378383-134378433
  hypo

SEQ ID NO: 308425 - DNA, 177 bp, Homo sapiens; identical to SEQ ID NO: 211828
  chr7:134613459-134613636
  hypo

SEQ ID NO: 308426 - DNA, 144 bp, Homo sapiens; identical to SEQ ID NO: 211829
  chr7:134673287-134673431
  hypo

SEQ ID NO: 308427 - DNA, 184 bp, Homo sapiens; identical to SEQ ID NO: 211830
  chr7:134853337-134853521
  hypo

SEQ ID NO: 308428 - DNA, 242 bp, Homo sapiens; identical to SEQ ID NO: 258298
  chr7:134860914-134861156
  hypo

SEQ ID NO: 308429 - DNA, 156 bp, Homo sapiens; identical to SEQ ID NO: 258299
  chr7:134862668-134862824
  hypo

SEQ ID NO: 308430 - DNA, 189 bp, Homo sapiens; identical to SEQ ID NO: 211831
  chr7:134880722-134880911
  hypo

SEQ ID NO: 308431 - DNA, 225 bp, Homo sapiens; identical to SEQ ID NO: 211832
  chr7:134880941-134881166
  hypo

SEQ ID NO: 308432 - DNA, 238 bp, Homo sapiens; identical to SEQ ID NO: 211833
  chr7:134890670-134890908
  hypo

SEQ ID NO: 308433 - DNA, 199 bp, Homo sapiens; identical to SEQ ID NO: 258302
  chr7:134898276-134898475
  hypo

SEQ ID NO: 308434 - DNA, 105 bp, Homo sapiens; identical to SEQ ID NO: 211835
  chr7:134918299-134918404
  hypo

SEQ ID NO: 308435 - DNA, 215 bp, Homo sapiens; identical to SEQ ID NO: 211836
  chr7:134918661-134918876
  hypo

SEQ ID NO: 308436 - DNA, 36 bp, Homo sapiens; identical to SEQ ID NO: 258304
  chr7:134922346-134922382
  hypo

SEQ ID NO: 308437 - DNA, 97 bp, Homo sapiens; identical to SEQ ID NO: 211837
  chr7:135360968-135361065
  hypo

SEQ ID NO: 308438 - DNA, 197 bp, Homo sapiens; identical to SEQ ID NO: 258307
  chr7:135390900-135391097
  hypo

SEQ ID NO: 308439 - DNA, 120 bp, Homo sapiens; identical to SEQ ID NO: 258308
  chr7:135401689-135401809
  hypo

SEQ ID NO: 308440 - DNA, 207 bp, Homo sapiens
  chr7:135412177-135412384
  hypo
gcaggagcgggacgcagacgaccagcagcagcttccggactcggagcaggccctgcagcaggcccatcgcgcctctgtcctctccagctcgtccttggaccccgctctgccggcgaaaggcttcctgcctgggcactgctctctatccagaaagacttcttaaacctttcttggcttccgagagtcctccttcgtcttgggggcaga

SEQ ID NO: 308441 - DNA, 87 bp, Homo sapiens; identical to SEQ ID NO: 74795
  chr7:135440342-135440429
  hypo

SEQ ID NO: 308442 - DNA, 194 bp, Homo sapiens; identical to SEQ ID NO: 211838
  chr7:135611088-135611282
  hypo

SEQ ID NO: 308443 - DNA, 85 bp, Homo sapiens; identical to SEQ ID NO: 258312
  chr7:135751659-135751744
  hypo

SEQ ID NO: 308444 - DNA, 96 bp, Homo sapiens; identical to SEQ ID NO: 211839
  chr7:136437909-136438005
  hypo

SEQ ID NO: 308445 - DNA, 42 bp, Homo sapiens
  chr7:136849129-136849171
  hypo
gcatcctcggggccgggggcaagatcctcacttttgaccagc

SEQ ID NO: 308446 - DNA, 31 bp, Homo sapiens; identical to SEQ ID NO: 258315
  chr7:137107612-137107643
  hypo

SEQ ID NO: 308447 - DNA, 67 bp, Homo sapiens; identical to SEQ ID NO: 258316
  chr7:137499014-137499081
  hypo

SEQ ID NO: 308448 - DNA, 192 bp, Homo sapiens; identical to SEQ ID NO: 211840
  chr7:137564612-137564804
  hypo

SEQ ID NO: 308449 - DNA, 185 bp, Homo sapiens; identical to SEQ ID NO: 258318
  chr7:137593862-137594047
  hypo

SEQ ID NO: 308450 - DNA, 37 bp, Homo sapiens; identical to SEQ ID NO: 211841
  chr7:137637556-137637593
  hypo

SEQ ID NO: 308451 - DNA, 37 bp, Homo sapiens; identical to SEQ ID NO: 211842
  chr7:137637833-137637870
  hypo

SEQ ID NO: 308452 - DNA, 40 bp, Homo sapiens; identical to SEQ ID NO: 258321
  chr7:137658137-137658177
  hypo

SEQ ID NO: 308453 - DNA, 204 bp, Homo sapiens; identical to SEQ ID NO: 211843
  chr7:137670025-137670229
  hypo

SEQ ID NO: 308454 - DNA, 194 bp, Homo sapiens; identical to SEQ ID NO: 211844
  chr7:137706784-137706978
  hypo

SEQ ID NO: 308455 - DNA, 37 bp, Homo sapiens; identical to SEQ ID NO: 258325
  chr7:137742304-137742341
  hypo

SEQ ID NO: 308456 - DNA, 119 bp, Homo sapiens; identical to SEQ ID NO: 258326
  chr7:138010002-138010121
  hypo

SEQ ID NO: 308457 - DNA, 176 bp, Homo sapiens; identical to SEQ ID NO: 211845
  chr7:138042028-138042204
  hypo

SEQ ID NO: 308458 - DNA, 39 bp, Homo sapiens; identical to SEQ ID NO: 211846
  chr7:138042568-138042607
  hypo

SEQ ID NO: 308459 - DNA, 83 bp, Homo sapiens; identical to SEQ ID NO: 258329
  chr7:138044359-138044442
  hypo

SEQ ID NO: 308460 - DNA, 120 bp, Homo sapiens; identical to SEQ ID NO: 258330
  chr7:138044851-138044971
  hypo

SEQ ID NO: 308461 - DNA, 152 bp, Homo sapiens; identical to SEQ ID NO: 258331
  chr7:138125641-138125793
  hypo

SEQ ID NO: 308462 - DNA, 34 bp, Homo sapiens; identical to SEQ ID NO: 211847
  chr7:138247007-138247041
  hypo

SEQ ID NO: 308463 - DNA, 293 bp, Homo sapiens; identical to SEQ ID NO: 258333
  chr7:138554218-138554511
  hypo

SEQ ID NO: 308464 - DNA, 37 bp, Homo sapiens; identical to SEQ ID NO: 258334
  chr7:138588489-138588526
  hypo

SEQ ID NO: 308465 - DNA, 36 bp, Homo sapiens; identical to SEQ ID NO: 258335
  chr7:138588586-138588622
  hypo

SEQ ID NO: 308466 - DNA, 38 bp, Homo sapiens; identical to SEQ ID NO: 258336
  chr7:138636038-138636076
  hypo

SEQ ID NO: 308467 - DNA, 40 bp, Homo sapiens; identical to SEQ ID NO: 258337
  chr7:138647454-138647494
  hypo

SEQ ID NO: 308468 - DNA, 325 bp, Homo sapiens; identical to SEQ ID NO: 285450
  chr7:138720460-138720785
  hypo

SEQ ID NO: 308469 - DNA, 43 bp, Homo sapiens; identical to SEQ ID NO: 201201
  chr7:138720909-138720952
  hypo

SEQ ID NO: 308470 - DNA, 84 bp, Homo sapiens; identical to SEQ ID NO: 211850
  chr7:138721475-138721559
  hypo

SEQ ID NO: 308471 - DNA, 33 bp, Homo sapiens; identical to SEQ ID NO: 211851
  chr7:138778536-138778569
  hypo

SEQ ID NO: 308472 - DNA, 93 bp, Homo sapiens; identical to SEQ ID NO: 258341
  chr7:138912954-138913047
  hypo

SEQ ID NO: 308473 - DNA, 41 bp, Homo sapiens; identical to SEQ ID NO: 258342
  chr7:138913397-138913438
  hypo

SEQ ID NO: 308474 - DNA, 120 bp, Homo sapiens; identical to SEQ ID NO: 211852
  chr7:138974788-138974908
  hypo

SEQ ID NO: 308475 - DNA, 89 bp, Homo sapiens; identical to SEQ ID NO: 258344
  chr7:138993452-138993541
  hypo

SEQ ID NO: 308476 - DNA, 98 bp, Homo sapiens
  chr7:139112527-139112625
  hypo
tacatagacgatgcccgatgaatgtggaatgaatgaatgaagtgcctcatgttttccaacataaattaactcacacgatctcatttgatttgtatagc

SEQ ID NO: 308477 - DNA, 87 bp, Homo sapiens
  chr7:139112655-139112742
  hypo
ctatcaccatcatgcccgtttttcggagtaggaagctgaggcatgctgagtgactaataggacagagtcagccgacacctttttgat

SEQ ID NO: 308478 - DNA, 42 bp, Homo sapiens; identical to SEQ ID NO: 258346
  chr7:139123708-139123750
  hypo

SEQ ID NO: 308479 - DNA, 180 bp, Homo sapiens
  chr7:139245529-139245709
  hypo
ctgaggtggagctgctgcaggcacagcgcctggacggggctgtggcgcacgtagctcaagtgcgcagtggcaagggccctggcaatgggccagcaagccacgaggctccgggtgctgatggtgtctggtgagacggcagggcctgggtgcggaggatccgggatgcatattggaaagctt

SEQ ID NO: 308480 - DNA, 45 bp, Homo sapiens; identical to SEQ ID NO: 258348
  chr7:139256590-139256635
  hypo

SEQ ID NO: 308481 - DNA, 270 bp, Homo sapiens; identical to SEQ ID NO: 211853
  chr7:139257804-139258074
  hypo

SEQ ID NO: 308482 - DNA, 180 bp, Homo sapiens; identical to SEQ ID NO: 211854
  chr7:139298887-139299067
  hypo

SEQ ID NO: 308483 - DNA, 545 bp, Homo sapiens; identical to SEQ ID NO: 285456
  chr7:139477943-139478488
  hypo

SEQ ID NO: 308484 - DNA, 256 bp, Homo sapiens; identical to SEQ ID NO: 211855
  chr7:139690719-139690975
  hypo

SEQ ID NO: 308485 - DNA, 40 bp, Homo sapiens; identical to SEQ ID NO: 258352
  chr7:139709787-139709827
  hypo

SEQ ID NO: 308486 - DNA, 58 bp, Homo sapiens; identical to SEQ ID NO: 258353
  chr7:139710188-139710246
  hypo

SEQ ID NO: 308487 - DNA, 217 bp, Homo sapiens; identical to SEQ ID NO: 258354
  chr7:139717411-139717628
  hypo

SEQ ID NO: 308488 - DNA, 213 bp, Homo sapiens; identical to SEQ ID NO: 258355
  chr7:139727808-139728021
  hypo

SEQ ID NO: 308489 - DNA, 346 bp, Homo sapiens; identical to SEQ ID NO: 211856
  chr7:139733611-139733957
  hypo

SEQ ID NO: 308490 - DNA, 142 bp, Homo sapiens; identical to SEQ ID NO: 258357
  chr7:139763645-139763787
  hypo

SEQ ID NO: 308491 - DNA, 42 bp, Homo sapiens; identical to SEQ ID NO: 258358
  chr7:139842731-139842773
  hypo

SEQ ID NO: 308492 - DNA, 44 bp, Homo sapiens; identical to SEQ ID NO: 258359
  chr7:139866424-139866468
  hypo

SEQ ID NO: 308493 - DNA, 65 bp, Homo sapiens; identical to SEQ ID NO: 258360
  chr7:139897108-139897173
  hypo

SEQ ID NO: 308494 - DNA, 363 bp, Homo sapiens; identical to SEQ ID NO: 285458
  chr7:139930346-139930709
  hypo

SEQ ID NO: 308495 - DNA, 160 bp, Homo sapiens; identical to SEQ ID NO: 211857
  chr7:139992308-139992468
  hypo

SEQ ID NO: 308496 - DNA, 226 bp, Homo sapiens; identical to SEQ ID NO: 258362
  chr7:140006659-140006885
  hypo

SEQ ID NO: 308497 - DNA, 64 bp, Homo sapiens; identical to SEQ ID NO: 211858
  chr7:140026944-140027008
  hypo

SEQ ID NO: 308498 - DNA, 123 bp, Homo sapiens; identical to SEQ ID NO: 211859
  chr7:140027079-140027202
  hypo

SEQ ID NO: 308499 - DNA, 160 bp, Homo sapiens; identical to SEQ ID NO: 211860
  chr7:140027767-140027927
  hypo

SEQ ID NO: 308500 - DNA, 346 bp, Homo sapiens; identical to SEQ ID NO: 258365
  chr7:140029901-140030247
  hypo

SEQ ID NO: 308501 - DNA, 31 bp, Homo sapiens; identical to SEQ ID NO: 258366
  chr7:140045118-140045149
  hypo

SEQ ID NO: 308502 - DNA, 137 bp, Homo sapiens; identical to SEQ ID NO: 258367
  chr7:140045706-140045843
  hypo

SEQ ID NO: 308503 - DNA, 169 bp, Homo sapiens; identical to SEQ ID NO: 258368
  chr7:140048397-140048566
  hypo

SEQ ID NO: 308504 - DNA, 190 bp, Homo sapiens; identical to SEQ ID NO: 258369
  chr7:140050012-140050202
  hypo

SEQ ID NO: 308505 - DNA, 92 bp, Homo sapiens; identical to SEQ ID NO: 211861
  chr7:140063543-140063635
  hypo

SEQ ID NO: 308506 - DNA, 190 bp, Homo sapiens; identical to SEQ ID NO: 285459
  chr7:140098064-140098254
  hypo

SEQ ID NO: 308507 - DNA, 179 bp, Homo sapiens; identical to SEQ ID NO: 115791
  chr7:140098296-140098475
  hypo

SEQ ID NO: 308508 - DNA, 54 bp, Homo sapiens; identical to SEQ ID NO: 258371
  chr7:140105280-140105334
  hypo

SEQ ID NO: 308509 - DNA, 36 bp, Homo sapiens; identical to SEQ ID NO: 258372
  chr7:140105364-140105400
  hypo

SEQ ID NO: 308510 - DNA, 42 bp, Homo sapiens; identical to SEQ ID NO: 258373
  chr7:140130676-140130718
  hypo

SEQ ID NO: 308511 - DNA, 51 bp, Homo sapiens; identical to SEQ ID NO: 211864
  chr7:140156473-140156524
  hypo

SEQ ID NO: 308512 - DNA, 116 bp, Homo sapiens; identical to SEQ ID NO: 211865
  chr7:140156954-140157070
  hypo

SEQ ID NO: 308513 - DNA, 117 bp, Homo sapiens; identical to SEQ ID NO: 258377
  chr7:140205262-140205379
  hypo

SEQ ID NO: 308514 - DNA, 77 bp, Homo sapiens; identical to SEQ ID NO: 258378
  chr7:140217363-140217440
  hypo

SEQ ID NO: 308515 - DNA, 37 bp, Homo sapiens; identical to SEQ ID NO: 258379
  chr7:140219801-140219838
  hypo

SEQ ID NO: 308516 - DNA, 280 bp, Homo sapiens; identical to SEQ ID NO: 211866
  chr7:140221611-140221891
  hypo

SEQ ID NO: 308517 - DNA, 75 bp, Homo sapiens
  chr7:140227201-140227276
  hypo
gaccatggcgggtggcagcaccgggatgtaggtgtgctgccaggcgaaggggtagatcagcgccaccatcgcgtg

SEQ ID NO: 308518 - DNA, 183 bp, Homo sapiens; identical to SEQ ID NO: 285462
  chr7:140340368-140340551
  hypo

SEQ ID NO: 308519 - DNA, 205 bp, Homo sapiens; identical to SEQ ID NO: 258382
  chr7:140402597-140402802
  hypo

SEQ ID NO: 308520 - DNA, 32 bp, Homo sapiens; identical to SEQ ID NO: 211867
  chr7:140427687-140427719
  hypo

SEQ ID NO: 308521 - DNA, 42 bp, Homo sapiens; identical to SEQ ID NO: 258384
  chr7:140643306-140643348
  hypo

SEQ ID NO: 308522 - DNA, 175 bp, Homo sapiens; identical to SEQ ID NO: 211868
  chr7:140710244-140710419
  hypo

SEQ ID NO: 308523 - DNA, 140 bp, Homo sapiens; identical to SEQ ID NO: 201208
  chr7:140774419-140774559
  hypo

SEQ ID NO: 308524 - DNA, 37 bp, Homo sapiens; identical to SEQ ID NO: 258386
  chr7:140988502-140988539
  hypo

SEQ ID NO: 308525 - DNA, 188 bp, Homo sapiens; identical to SEQ ID NO: 258387
  chr7:141096128-141096316
  hypo

SEQ ID NO: 308526 - DNA, 62 bp, Homo sapiens; identical to SEQ ID NO: 258388
  chr7:141273455-141273517
  hypo

SEQ ID NO: 308527 - DNA, 180 bp, Homo sapiens; identical to SEQ ID NO: 258389
  chr7:142906905-142907085
  hypo

SEQ ID NO: 308528 - DNA, 1015 bp, Homo sapiens; identical to SEQ ID NO: 201211
  chr7:142985429-142986444
  hypo

SEQ ID NO: 308529 - DNA, 161 bp, Homo sapiens; identical to SEQ ID NO: 211871
  chr7:143000867-143001028
  hypo

SEQ ID NO: 308530 - DNA, 144 bp, Homo sapiens; identical to SEQ ID NO: 258391
  chr7:143013314-143013458
  hypo

SEQ ID NO: 308531 - DNA, 57 bp, Homo sapiens; identical to SEQ ID NO: 211872
  chr7:143096713-143096770
  hypo

SEQ ID NO: 308532 - DNA, 79 bp, Homo sapiens; identical to SEQ ID NO: 211873
  chr7:143097073-143097152
  hypo

SEQ ID NO: 308533 - DNA, 257 bp, Homo sapiens; identical to SEQ ID NO: 223241
  chr7:144100839-144101096
  hypo

SEQ ID NO: 308534 - DNA, 76 bp, Homo sapiens; identical to SEQ ID NO: 258394
  chr7:145021289-145021365
  hypo

SEQ ID NO: 308535 - DNA, 75 bp, Homo sapiens; identical to SEQ ID NO: 258395
  chr7:145021425-145021500
  hypo

SEQ ID NO: 308536 - DNA, 128 bp, Homo sapiens; identical to SEQ ID NO: 258396
  chr7:145280166-145280294
  hypo

SEQ ID NO: 308537 - DNA, 152 bp, Homo sapiens; identical to SEQ ID NO: 201215
  chr7:145981901-145982053
  hypo

SEQ ID NO: 308538 - DNA, 35 bp, Homo sapiens; identical to SEQ ID NO: 258397
  chr7:146228910-146228945
  hypo

SEQ ID NO: 308539 - DNA, 132 bp, Homo sapiens; identical to SEQ ID NO: 211875
  chr7:146425093-146425225
  hypo

SEQ ID NO: 308540 - DNA, 42 bp, Homo sapiens; identical to SEQ ID NO: 258399
  chr7:146656356-146656398
  hypo

SEQ ID NO: 308541 - DNA, 38 bp, Homo sapiens; identical to SEQ ID NO: 258400
  chr7:147179513-147179551
  hypo

SEQ ID NO: 308542 - DNA, 31 bp, Homo sapiens; identical to SEQ ID NO: 258401
  chr7:147216090-147216121
  hypo

SEQ ID NO: 308543 - DNA, 160 bp, Homo sapiens; identical to SEQ ID NO: 258402
  chr7:147354932-147355092
  hypo

SEQ ID NO: 308544 - DNA, 67 bp, Homo sapiens; identical to SEQ ID NO: 258403
  chr7:147954381-147954448
  hypo

SEQ ID NO: 308545 - DNA, 33 bp, Homo sapiens; identical to SEQ ID NO: 258404
  chr7:147975333-147975366
  hypo

SEQ ID NO: 308546 - DNA, 704 bp, Homo sapiens; identical to SEQ ID NO: 44845
  chr7:148036378-148037082
  hypo

SEQ ID NO: 308547 - DNA, 115 bp, Homo sapiens; identical to SEQ ID NO: 258405
  chr7:148077004-148077119
  hypo

SEQ ID NO: 308548 - DNA, 336 bp, Homo sapiens; identical to SEQ ID NO: 258406
  chr7:148079389-148079725
  hypo

SEQ ID NO: 308549 - DNA, 157 bp, Homo sapiens; identical to SEQ ID NO: 211878
  chr7:148079755-148079912
  hypo

SEQ ID NO: 308550 - DNA, 261 bp, Homo sapiens; identical to SEQ ID NO: 258408
  chr7:148162146-148162407
  hypo

SEQ ID NO: 308551 - DNA, 128 bp, Homo sapiens; identical to SEQ ID NO: 258409
  chr7:148296995-148297123
  hypo

SEQ ID NO: 308552 - DNA, 151 bp, Homo sapiens; identical to SEQ ID NO: 211880
  chr7:148448804-148448955
  hypo

SEQ ID NO: 308553 - DNA, 531 bp, Homo sapiens; identical to SEQ ID NO: 211881
  chr7:148480934-148481465
  hypo

SEQ ID NO: 308554 - DNA, 64 bp, Homo sapiens
  chr7:148500530-148500594
  hypo
gctggtctcttcagttcctccgggatcaagcaggcacttgggtaagtaccttggtcccatggaa

SEQ ID NO: 308555 - DNA, 102 bp, Homo sapiens
  chr7:148500624-148500726
  hypo
tgatgggtgagtcgggagttcgccccacaccttcagattcctggcctttacctgctccccttcgcactgggtaagtgtaccgtcttgactggtgtgaaagaa

SEQ ID NO: 308556 - DNA, 79 bp, Homo sapiens; identical to SEQ ID NO: 201217
  chr7:148506412-148506491
  hypo

SEQ ID NO: 308557 - DNA, 89 bp, Homo sapiens; identical to SEQ ID NO: 201218
  chr7:148507424-148507513
  hypo

SEQ ID NO: 308558 - DNA, 71 bp, Homo sapiens; identical to SEQ ID NO: 201219
  chr7:148508741-148508812
  hypo

SEQ ID NO: 308559 - DNA, 184 bp, Homo sapiens; identical to SEQ ID NO: 201220
  chr7:148511050-148511234
  hypo

SEQ ID NO: 308560 - DNA, 107 bp, Homo sapiens; identical to SEQ ID NO: 201221
  chr7:148512014-148512121
  hypo

SEQ ID NO: 308561 - DNA, 34 bp, Homo sapiens; identical to SEQ ID NO: 201222
  chr7:148513818-148513852
  hypo

SEQ ID NO: 308562 - DNA, 121 bp, Homo sapiens; identical to SEQ ID NO: 201223
  chr7:148514301-148514422
  hypo

SEQ ID NO: 308563 - DNA, 76 bp, Homo sapiens; identical to SEQ ID NO: 201224
  chr7:148515086-148515162
  hypo

SEQ ID NO: 308564 - DNA, 200 bp, Homo sapiens; identical to SEQ ID NO: 201225
  chr7:148523536-148523736
  hypo

SEQ ID NO: 308565 - DNA, 119 bp, Homo sapiens; identical to SEQ ID NO: 201226
  chr7:148526816-148526935
  hypo

SEQ ID NO: 308566 - DNA, 42 bp, Homo sapiens; identical to SEQ ID NO: 258413
  chr7:148625816-148625858
  hypo

SEQ ID NO: 308567 - DNA, 42 bp, Homo sapiens; identical to SEQ ID NO: 258414
  chr7:148626098-148626140
  hypo

SEQ ID NO: 308568 - DNA, 143 bp, Homo sapiens; identical to SEQ ID NO: 258415
  chr7:148692793-148692936
  hypo

SEQ ID NO: 308569 - DNA, 225 bp, Homo sapiens; identical to SEQ ID NO: 211892
  chr7:148703454-148703679
  hypo

SEQ ID NO: 308570 - DNA, 135 bp, Homo sapiens; identical to SEQ ID NO: 258417
  chr7:148717800-148717935
  hypo

SEQ ID NO: 308571 - DNA, 33 bp, Homo sapiens; identical to SEQ ID NO: 258418
  chr7:148819752-148819785
  hypo

SEQ ID NO: 308572 - DNA, 127 bp, Homo sapiens; identical to SEQ ID NO: 211893
  chr7:148846224-148846351
  hypo

SEQ ID NO: 308573 - DNA, 184 bp, Homo sapiens; identical to SEQ ID NO: 211894
  chr7:148851234-148851418
  hypo

SEQ ID NO: 308574 - DNA, 178 bp, Homo sapiens
  chr7:148884017-148884195
  hypo
atttttaatgtttttgtaagaataaggattattgtcatgaaaaaggtcctggaaaacaagtcaggaggccagagttttaaccttgctttcagttttctcattcataatgtgaggataatacctagtttacgaaggtgttgtgaagatcaaatgaggaaagtttttttttttttttgag

SEQ ID NO: 308575 - DNA, 84 bp, Homo sapiens; identical to SEQ ID NO: 211895
  chr7:148901648-148901732
  hypo

SEQ ID NO: 308576 - DNA, 117 bp, Homo sapiens; identical to SEQ ID NO: 258423
  chr7:148907692-148907809
  hypo

SEQ ID NO: 308577 - DNA, 246 bp, Homo sapiens; identical to SEQ ID NO: 258424
  chr7:148921396-148921642
  hypo

SEQ ID NO: 308578 - DNA, 45 bp, Homo sapiens; identical to SEQ ID NO: 211897
  chr7:148930559-148930604
  hypo

SEQ ID NO: 308579 - DNA, 158 bp, Homo sapiens; identical to SEQ ID NO: 201228
  chr7:148936558-148936716
  hypo

SEQ ID NO: 308580 - DNA, 266 bp, Homo sapiens; identical to SEQ ID NO: 285502
  chr7:148959355-148959621
  hypo

SEQ ID NO: 308581 - DNA, 186 bp, Homo sapiens; identical to SEQ ID NO: 258426
  chr7:148979096-148979282
  hypo

SEQ ID NO: 308582 - DNA, 394 bp, Homo sapiens; identical to SEQ ID NO: 258427
  chr7:148984552-148984946
  hypo

SEQ ID NO: 308583 - DNA, 319 bp, Homo sapiens; identical to SEQ ID NO: 258428
  chr7:148992084-148992403
  hypo

SEQ ID NO: 308584 - DNA, 178 bp, Homo sapiens; identical to SEQ ID NO: 258429
  chr7:149005005-149005183
  hypo

SEQ ID NO: 308585 - DNA, 105 bp, Homo sapiens; identical to SEQ ID NO: 258430
  chr7:149084384-149084489
  hypo

SEQ ID NO: 308586 - DNA, 32 bp, Homo sapiens; identical to SEQ ID NO: 211900
  chr7:149114320-149114352
  hypo

SEQ ID NO: 308587 - DNA, 430 bp, Homo sapiens; identical to SEQ ID NO: 258433
  chr7:149171587-149172017
  hypo

SEQ ID NO: 308588 - DNA, 77 bp, Homo sapiens; identical to SEQ ID NO: 258434
  chr7:149257399-149257476
  hypo

SEQ ID NO: 308589 - DNA, 101 bp, Homo sapiens; identical to SEQ ID NO: 258435
  chr7:149257709-149257810
  hypo

SEQ ID NO: 308590 - DNA, 328 bp, Homo sapiens; identical to SEQ ID NO: 258436
  chr7:149416660-149416988
  hypo

SEQ ID NO: 308591 - DNA, 133 bp, Homo sapiens; identical to SEQ ID NO: 258437
  chr7:149418014-149418147
  hypo

SEQ ID NO: 308592 - DNA, 432 bp, Homo sapiens; identical to SEQ ID NO: 211902
  chr7:149420320-149420752
  hypo

SEQ ID NO: 308593 - DNA, 969 bp, Homo sapiens; identical to SEQ ID NO: 258440
  chr7:149462308-149463277
  hypo

SEQ ID NO: 308594 - DNA, 98 bp, Homo sapiens; identical to SEQ ID NO: 258441
  chr7:149489458-149489556
  hypo

SEQ ID NO: 308595 - DNA, 131 bp, Homo sapiens; identical to SEQ ID NO: 258442
  chr7:149516460-149516591
  hypo

SEQ ID NO: 308596 - DNA, 136 bp, Homo sapiens; identical to SEQ ID NO: 211904
  chr7:150006590-150006726
  hypo

SEQ ID NO: 308597 - DNA, 120 bp, Homo sapiens; identical to SEQ ID NO: 211905
  chr7:150006786-150006906
  hypo

SEQ ID NO: 308598 - DNA, 43 bp, Homo sapiens; identical to SEQ ID NO: 211906
  chr7:150039378-150039421
  hypo

SEQ ID NO: 308599 - DNA, 99 bp, Homo sapiens; identical to SEQ ID NO: 211907
  chr7:150069580-150069679
  hypo

SEQ ID NO: 308600 - DNA, 114 bp, Homo sapiens; identical to SEQ ID NO: 211908
  chr7:150069820-150069934
  hypo

SEQ ID NO: 308601 - DNA, 129 bp, Homo sapiens
  chr7:150079390-150079519
  hypo
aggcttgccgccctgtggtgctcctcccaaactcagggagcaggtatttccgttcacctgcgccttcaagaacctgagctcaaagcgctgcaatgactggccagggactagcagcggctcagtggtggg

SEQ ID NO: 308602 - DNA, 43 bp, Homo sapiens; identical to SEQ ID NO: 258449
  chr7:150079846-150079889
  hypo

SEQ ID NO: 308603 - DNA, 148 bp, Homo sapiens
  chr7:150081308-150081456
  hypo
aggaaaggtggtccggtaggggcccgggggcccttgtgcgatagacaaagcggccttccaagacttggtgtgggcactggtgggagatggcgcatctggcccttgatgcctgtcttccagccggggcgctttgctgggcagcctgctc

SEQ ID NO: 308604 - DNA, 57 bp, Homo sapiens; identical to SEQ ID NO: 258451
  chr7:150097104-150097161
  hypo

SEQ ID NO: 308605 - DNA, 232 bp, Homo sapiens; identical to SEQ ID NO: 211909
  chr7:150098291-150098523
  hypo

SEQ ID NO: 308606 - DNA, 89 bp, Homo sapiens; identical to SEQ ID NO: 258453
  chr7:150099969-150100058
  hypo

SEQ ID NO: 308607 - DNA, 181 bp, Homo sapiens; identical to SEQ ID NO: 211910
  chr7:150100654-150100835
  hypo

SEQ ID NO: 308608 - DNA, 154 bp, Homo sapiens; identical to SEQ ID NO: 211911
  chr7:150104947-150105101
  hypo

SEQ ID NO: 308609 - DNA, 53 bp, Homo sapiens; identical to SEQ ID NO: 211912
  chr7:150105548-150105601
  hypo

SEQ ID NO: 308610 - DNA, 152 bp, Homo sapiens; identical to SEQ ID NO: 258457
  chr7:150269706-150269858
  hypo

SEQ ID NO: 308611 - DNA, 359 bp, Homo sapiens; identical to SEQ ID NO: 258458
  chr7:150325090-150325449
  hypo

SEQ ID NO: 308612 - DNA, 552 bp, Homo sapiens; identical to SEQ ID NO: 201234
  chr7:150497095-150497647
  hypo

SEQ ID NO: 308613 - DNA, 318 bp, Homo sapiens; identical to SEQ ID NO: 285517
  chr7:150497885-150498203
  hypo

SEQ ID NO: 308614 - DNA, 874 bp, Homo sapiens; identical to SEQ ID NO: 201236
  chr7:150671457-150672331
  hypo

SEQ ID NO: 308615 - DNA, 380 bp, Homo sapiens; identical to SEQ ID NO: 223261
  chr7:150676164-150676544
  hypo

SEQ ID NO: 308616 - DNA, 121 bp, Homo sapiens; identical to SEQ ID NO: 285521
  chr7:150714959-150715080
  hypo

SEQ ID NO: 308617 - DNA, 295 bp, Homo sapiens; identical to SEQ ID NO: 285522
  chr7:150715323-150715618
  hypo

SEQ ID NO: 308618 - DNA, 188 bp, Homo sapiens; identical to SEQ ID NO: 258459
  chr7:150720588-150720776
  hypo

SEQ ID NO: 308619 - DNA, 50 bp, Homo sapiens; identical to SEQ ID NO: 258460
  chr7:150745459-150745509
  hypo

SEQ ID NO: 308620 - DNA, 346 bp, Homo sapiens
  chr7:150758620-150758966
  hypo
accctgcgaggctccgttgtctgcctgggccttcactcccctctttccccagctcattatcactccctccctcatctttgttgctttctctccgggcctgggccttgactcctttctccctcatttttcttgcggcctttcccacctcctctctcctcctccctctactcagcctctcggcccttttcggcccccctcgcctcagtcctctcctgtctccttgttcttctcttttcttcctataaataactctcctctgtgctgtggctgccgctaagggccactctgaggcccttcatactccaggaggatccccagcagcgcagcctgcgcgtggtggctcctg

SEQ ID NO: 308621 - DNA, 54 bp, Homo sapiens; identical to SEQ ID NO: 211918
  chr7:150773442-150773496
  hypo

SEQ ID NO: 308622 - DNA, 201 bp, Homo sapiens
  chr7:150774065-150774266
  hypo
ccggccgtcccggcagaaatgccagcgttcccgcaacaccagcaccaccctgcagggggagggacgtggctcagggcatggcgggcaaggtggccagggctcccccaccctgcctcctttacctctgggcagggtctcgagtagtggcgctagaggcagcctggccctgtgggcaggaccttggtgggtatggcaggaagg

SEQ ID NO: 308623 - DNA, 346 bp, Homo sapiens
  chr7:150774358-150774704
  hypo
ctccgtctccccgggcctgccgcctgccccttgctcacctgtgcagtagcctggaggcacagtcaggtcctggcggtatttctcctcccccagcagctggcgcaacccctcagctactatgtccttgtgactgaggagaaaggacaccagtagcaggaagggcccggcacctcatcctaatctgtcccagtctagtgccaccaccctgggcaaagccctctgctgcttcagggcccagttttatggtggccgagagctccttagctttggcgcttcatggtccctctggcttttccactctgctggtcccaggctggcccctccccttgccccaggctgccccatc

SEQ ID NO: 308624 - DNA, 43 bp, Homo sapiens; identical to SEQ ID NO: 211920
  chr7:150774857-150774900
  hypo

SEQ ID NO: 308625 - DNA, 61 bp, Homo sapiens; identical to SEQ ID NO: 211921
  chr7:150776689-150776750
  hypo

SEQ ID NO: 308626 - DNA, 970 bp, Homo sapiens; identical to SEQ ID NO: 285528
  chr7:150784073-150785043
  hypo

SEQ ID NO: 308627 - DNA, 185 bp, Homo sapiens
  chr7:150811101-150811286
  hypo
acccagaactgcagcggaggttatctttgacttctctgctgcccttaggcaggacgcttaactcagtccagacagatgagtatcttctggattttataatctccaaagaagacagcctcagtcatcaacagaaaccgactgtagcagccagcaactctcgacctcagaatgtcagagccgaaact

SEQ ID NO: 308628 - DNA, 292 bp, Homo sapiens
  chr7:150811359-150811651
  hypo
tgacgtctcactcaggcttgtcatacttctgggcctcatgttcttggctcttctggctcttcctttgaagaatgagaaatggcccgcttttctccaaaatggggcccagtgtgtggtggactgaggactgttatttagttggcctgctcgtaatgacagctcctcacctacctgccggatcctaggaggcgccctgggctggaatttcctgttttcgagggctcccaggggctgccccagcaggccggctcccccgcgccgcgccgccgttcccgggcgttccaggccagac

SEQ ID NO: 308629 - DNA, 314 bp, Homo sapiens; identical to SEQ ID NO: 211925
  chr7:150812866-150813180
  hypo

SEQ ID NO: 308630 - DNA, 128 bp, Homo sapiens
  chr7:150813210-150813338
  hypo
ggctgtcggagggctctgggtaaagggacttgccagtcaggttctgaggacagactgaagggaagggagcccaggaggcggcctccctgctaaggaggagcttagagaggaggcgggtggggtagatg

SEQ ID NO: 308631 - DNA, 623 bp, Homo sapiens; identical to SEQ ID NO: 211926
  chr7:150813836-150814459
  hypo

SEQ ID NO: 308632 - DNA, 591 bp, Homo sapiens; identical to SEQ ID NO: 258470
  chr7:150816820-150817411
  hypo

SEQ ID NO: 308633 - DNA, 209 bp, Homo sapiens; identical to SEQ ID NO: 258471
  chr7:150817629-150817838
  hypo

SEQ ID NO: 308634 - DNA, 197 bp, Homo sapiens; identical to SEQ ID NO: 258472
  chr7:150828089-150828286
  hypo

SEQ ID NO: 308635 - DNA, 35 bp, Homo sapiens; identical to SEQ ID NO: 211928
  chr7:150828563-150828598
  hypo

SEQ ID NO: 308636 - DNA, 33 bp, Homo sapiens; identical to SEQ ID NO: 201242
  chr7:150869804-150869837
  hypo

SEQ ID NO: 308637 - DNA, 109 bp, Homo sapiens; identical to SEQ ID NO: 258474
  chr7:150878305-150878414
  hypo

SEQ ID NO: 308638 - DNA, 389 bp, Homo sapiens; identical to SEQ ID NO: 258475
  chr7:150889159-150889548
  hypo

SEQ ID NO: 308639 - DNA, 202 bp, Homo sapiens; identical to SEQ ID NO: 258476
  chr7:150934636-150934838
  hypo

SEQ ID NO: 308640 - DNA, 235 bp, Homo sapiens; identical to SEQ ID NO: 258477
  chr7:150936103-150936338
  hypo

SEQ ID NO: 308641 - DNA, 64 bp, Homo sapiens; identical to SEQ ID NO: 223266
  chr7:150948746-150948810
  hypo

SEQ ID NO: 308642 - DNA, 389 bp, Homo sapiens; identical to SEQ ID NO: 201243
  chr7:151038574-151038963
  hypo

SEQ ID NO: 308643 - DNA, 217 bp, Homo sapiens; identical to SEQ ID NO: 258478
  chr7:151073504-151073721
  hypo

SEQ ID NO: 308644 - DNA, 51 bp, Homo sapiens; identical to SEQ ID NO: 258479
  chr7:151074139-151074190
  hypo

SEQ ID NO: 308645 - DNA, 34 bp, Homo sapiens; identical to SEQ ID NO: 211931
  chr7:151074643-151074677
  hypo

SEQ ID NO: 308646 - DNA, 237 bp, Homo sapiens; identical to SEQ ID NO: 258481
  chr7:151124256-151124493
  hypo

SEQ ID NO: 308647 - DNA, 244 bp, Homo sapiens; identical to SEQ ID NO: 258482
  chr7:151129034-151129278
  hypo

SEQ ID NO: 308648 - DNA, 173 bp, Homo sapiens; identical to SEQ ID NO: 258483
  chr7:151133222-151133395
  hypo

SEQ ID NO: 308649 - DNA, 33 bp, Homo sapiens; identical to SEQ ID NO: 211932
  chr7:151134320-151134353
  hypo

SEQ ID NO: 308650 - DNA, 312 bp, Homo sapiens; identical to SEQ ID NO: 211933
  chr7:151165388-151165700
  hypo

SEQ ID NO: 308651 - DNA, 36 bp, Homo sapiens; identical to SEQ ID NO: 211934
  chr7:151214439-151214475
  hypo

SEQ ID NO: 308652 - DNA, 347 bp, Homo sapiens; identical to SEQ ID NO: 285540
  chr7:151217153-151217500
  hypo

SEQ ID NO: 308653 - DNA, 97 bp, Homo sapiens; identical to SEQ ID NO: 258487
  chr7:151266427-151266524
  hypo

SEQ ID NO: 308654 - DNA, 31 bp, Homo sapiens
  chr7:151298839-151298870
  hypo
tctggtgaggcacccgcagcatccactgtgc

SEQ ID NO: 308655 - DNA, 270 bp, Homo sapiens; identical to SEQ ID NO: 258489
  chr7:151326270-151326540
  hypo

SEQ ID NO: 308656 - DNA, 304 bp, Homo sapiens; identical to SEQ ID NO: 211935
  chr7:151358568-151358872
  hypo

SEQ ID NO: 308657 - DNA, 230 bp, Homo sapiens; identical to SEQ ID NO: 211936
  chr7:151411311-151411541
  hypo

SEQ ID NO: 308658 - DNA, 207 bp, Homo sapiens; identical to SEQ ID NO: 258492
  chr7:151412757-151412964
  hypo

SEQ ID NO: 308659 - DNA, 48 bp, Homo sapiens; identical to SEQ ID NO: 258493
  chr7:151421902-151421950
  hypo

SEQ ID NO: 308660 - DNA, 94 bp, Homo sapiens; identical to SEQ ID NO: 258494
  chr7:151423343-151423437
  hypo

SEQ ID NO: 308661 - DNA, 74 bp, Homo sapiens
  chr7:151423497-151423571
  hypo
acagagctgatgccacattatttactatggctgcgtgcgtaccctactaccagtaatcttagtacgagtccaac

SEQ ID NO: 308662 - DNA, 72 bp, Homo sapiens
  chr7:151423639-151423711
  hypo
gtgtccattaacaactggacggacgcaggagtcgttgtctgggcagacagcggagggttctgcagcaatgaa

SEQ ID NO: 308663 - DNA, 107 bp, Homo sapiens; identical to SEQ ID NO: 258496
  chr7:151436199-151436306
  hypo

SEQ ID NO: 308664 - DNA, 147 bp, Homo sapiens; identical to SEQ ID NO: 258497
  chr7:151476539-151476686
  hypo

SEQ ID NO: 308665 - DNA, 35 bp, Homo sapiens; identical to SEQ ID NO: 258498
  chr7:151496736-151496771
  hypo

SEQ ID NO: 308666 - DNA, 248 bp, Homo sapiens; identical to SEQ ID NO: 258499
  chr7:151505823-151506071
  hypo

SEQ ID NO: 308667 - DNA, 156 bp, Homo sapiens; identical to SEQ ID NO: 211937
  chr7:151506370-151506526
  hypo

SEQ ID NO: 308668 - DNA, 117 bp, Homo sapiens; identical to SEQ ID NO: 258501
  chr7:151554550-151554667
  hypo

SEQ ID NO: 308669 - DNA, 206 bp, Homo sapiens; identical to SEQ ID NO: 258502
  chr7:151556275-151556481
  hypo

SEQ ID NO: 308670 - DNA, 961 bp, Homo sapiens; identical to SEQ ID NO: 285541
  chr7:151572578-151573539
  hypo

SEQ ID NO: 308671 - DNA, 276 bp, Homo sapiens; identical to SEQ ID NO: 258504
  chr7:151592134-151592410
  hypo

SEQ ID NO: 308672 - DNA, 214 bp, Homo sapiens; identical to SEQ ID NO: 211939
  chr7:151624665-151624879
  hypo

SEQ ID NO: 308673 - DNA, 84 bp, Homo sapiens; identical to SEQ ID NO: 258506
  chr7:151648967-151649051
  hypo

SEQ ID NO: 308674 - DNA, 86 bp, Homo sapiens; identical to SEQ ID NO: 211940
  chr7:151712356-151712442
  hypo

SEQ ID NO: 308675 - DNA, 107 bp, Homo sapiens; identical to SEQ ID NO: 211941
  chr7:151720362-151720469
  hypo

SEQ ID NO: 308676 - DNA, 693 bp, Homo sapiens; identical to SEQ ID NO: 201247
  chr7:151722451-151723144
  hypo

SEQ ID NO: 308677 - DNA, 38 bp, Homo sapiens; identical to SEQ ID NO: 201248
  chr7:151723206-151723244
  hypo

SEQ ID NO: 308678 - DNA, 131 bp, Homo sapiens; identical to SEQ ID NO: 258509
  chr7:151781606-151781737
  hypo

SEQ ID NO: 308679 - DNA, 236 bp, Homo sapiens; identical to SEQ ID NO: 211944
  chr7:151791344-151791580
  hypo

SEQ ID NO: 308680 - DNA, 183 bp, Homo sapiens; identical to SEQ ID NO: 211945
  chr7:151802391-151802574
  hypo

SEQ ID NO: 308681 - DNA, 280 bp, Homo sapiens; identical to SEQ ID NO: 211946
  chr7:151812521-151812801
  hypo

SEQ ID NO: 308682 - DNA, 205 bp, Homo sapiens; identical to SEQ ID NO: 258513
  chr7:151826350-151826555
  hypo

SEQ ID NO: 308683 - DNA, 114 bp, Homo sapiens; identical to SEQ ID NO: 211947
  chr7:151874697-151874811
  hypo

SEQ ID NO: 308684 - DNA, 41 bp, Homo sapiens; identical to SEQ ID NO: 258515
  chr7:151876085-151876126
  hypo

SEQ ID NO: 308685 - DNA, 148 bp, Homo sapiens; identical to SEQ ID NO: 258516
  chr7:152152774-152152922
  hypo

SEQ ID NO: 308686 - DNA, 80 bp, Homo sapiens; identical to SEQ ID NO: 258517
  chr7:152159225-152159305
  hypo

SEQ ID NO: 308687 - DNA, 212 bp, Homo sapiens; identical to SEQ ID NO: 258519
  chr7:152221107-152221319
  hypo

SEQ ID NO: 308688 - DNA, 44 bp, Homo sapiens; identical to SEQ ID NO: 258520
  chr7:152243973-152244017
  hypo

SEQ ID NO: 308689 - DNA, 360 bp, Homo sapiens; identical to SEQ ID NO: 211948
  chr7:152273143-152273503
  hypo

SEQ ID NO: 308690 - DNA, 75 bp, Homo sapiens; identical to SEQ ID NO: 211949
  chr7:152374303-152374378
  hypo

SEQ ID NO: 308691 - DNA, 47 bp, Homo sapiens; identical to SEQ ID NO: 211950
  chr7:152374397-152374444
  hypo

SEQ ID NO: 308692 - DNA, 42 bp, Homo sapiens; identical to SEQ ID NO: 211951
  chr7:152455925-152455967
  hypo

SEQ ID NO: 308693 - DNA, 78 bp, Homo sapiens; identical to SEQ ID NO: 211952
  chr7:152543573-152543651
  hypo

SEQ ID NO: 308694 - DNA, 135 bp, Homo sapiens; identical to SEQ ID NO: 258526
  chr7:152549237-152549372
  hypo

SEQ ID NO: 308695 - DNA, 180 bp, Homo sapiens; identical to SEQ ID NO: 211953
  chr7:152551646-152551826
  hypo

SEQ ID NO: 308696 - DNA, 173 bp, Homo sapiens; identical to SEQ ID NO: 211954
  chr7:152555646-152555819
  hypo

SEQ ID NO: 308697 - DNA, 214 bp, Homo sapiens; identical to SEQ ID NO: 258529
  chr7:152562697-152562911
  hypo

SEQ ID NO: 308698 - DNA, 162 bp, Homo sapiens; identical to SEQ ID NO: 258530
  chr7:152564284-152564446
  hypo

SEQ ID NO: 308699 - DNA, 309 bp, Homo sapiens; identical to SEQ ID NO: 258531
  chr7:152569304-152569613
  hypo

SEQ ID NO: 308700 - DNA, 226 bp, Homo sapiens; identical to SEQ ID NO: 258532
  chr7:152569934-152570160
  hypo

SEQ ID NO: 308701 - DNA, 39 bp, Homo sapiens; identical to SEQ ID NO: 211955
  chr7:152647711-152647750
  hypo

SEQ ID NO: 308702 - DNA, 235 bp, Homo sapiens; identical to SEQ ID NO: 258534
  chr7:152716533-152716768
  hypo

SEQ ID NO: 308703 - DNA, 42 bp, Homo sapiens; identical to SEQ ID NO: 258535
  chr7:152738787-152738829
  hypo

SEQ ID NO: 308704 - DNA, 31 bp, Homo sapiens; identical to SEQ ID NO: 258536
  chr7:152789902-152789933
  hypo

SEQ ID NO: 308705 - DNA, 59 bp, Homo sapiens; identical to SEQ ID NO: 258537
  chr7:152796593-152796652
  hypo

SEQ ID NO: 308706 - DNA, 253 bp, Homo sapiens; identical to SEQ ID NO: 258538
  chr7:153109299-153109552
  hypo

SEQ ID NO: 308707 - DNA, 447 bp, Homo sapiens; identical to SEQ ID NO: 258539
  chr7:153110538-153110985
  hypo

SEQ ID NO: 308708 - DNA, 86 bp, Homo sapiens; identical to SEQ ID NO: 258540
  chr7:153111045-153111131
  hypo

SEQ ID NO: 308709 - DNA, 36 bp, Homo sapiens; identical to SEQ ID NO: 258541
  chr7:154018578-154018614
  hypo

SEQ ID NO: 308710 - DNA, 91 bp, Homo sapiens; identical to SEQ ID NO: 258542
  chr7:154062697-154062788
  hypo

SEQ ID NO: 308711 - DNA, 205 bp, Homo sapiens; identical to SEQ ID NO: 258543
  chr7:154072003-154072208
  hypo

SEQ ID NO: 308712 - DNA, 336 bp, Homo sapiens
  chr7:154087908-154088244
  hypo
ctgagagaccctcccgactactcctgtgcccgttgccatgccatttgttggatcacttgcaggccccgagtctcaaacacatgatttatcatcagatcgtacagtcgtcagaagggtcccaccgtttctaaccatgtgacctgggcggttgctttacttctccgcacctcaatgtccttgtctgtaaaatggggcggatcagcccacctactgtttgggattaaatgaggtgatgtgcataaagctgtcagtgccatccctgggctgcagcgggcgttctggaaatatcacagattaccatcactgtccgccgcgcggcatccgtatgcccttgat

SEQ ID NO: 308713 - DNA, 34 bp, Homo sapiens
  chr7:154088284-154088318
  hypo
aaataccaagagcagccgccgcatcttagaattt

SEQ ID NO: 308714 - DNA, 69 bp, Homo sapiens; identical to SEQ ID NO: 258545
  chr7:154128040-154128109
  hypo

SEQ ID NO: 308715 - DNA, 68 bp, Homo sapiens; identical to SEQ ID NO: 258546
  chr7:154150170-154150238
  hypo

SEQ ID NO: 308716 - DNA, 35 bp, Homo sapiens; identical to SEQ ID NO: 258547
  chr7:154382567-154382602
  hypo

SEQ ID NO: 308717 - DNA, 287 bp, Homo sapiens
  chr7:154540240-154540527
  hypo
ttagtaataatgagataataacttaatgaaaaacccctgcgagccctgcggggcggggagggagacctggtgtgtggtgctggacgcttcctgagcacctccctgcacagcctgcctctggagtttctcgcgcatggcggtaagcagggccaggcctcactctttccccttcacagtggagggtgtgagcagggcttcgatgccttttgctcacggtgtccagcagtggatgcgctggttggaacggacgtgcctataaccatgactcccaccgaggccttgtcctg

SEQ ID NO: 308718 - DNA, 147 bp, Homo sapiens
  chr7:154541924-154542071
  hypo
tgcagcaggcagaacctatccgtagatgaacaccctcgctctccagaagacaagaagcgggagtcgcagcctattgaagtgtagacatgatgtctacacagccaccctgtgtcctgcaagagcccaggctcagagcgtgtgcaccgt

SEQ ID NO: 308719 - DNA, 132 bp, Homo sapiens; identical to SEQ ID NO: 211957
  chr7:154542290-154542422
  hypo

SEQ ID NO: 308720 - DNA, 233 bp, Homo sapiens; identical to SEQ ID NO: 258550
  chr7:154646528-154646761
  hypo

SEQ ID NO: 308721 - DNA, 276 bp, Homo sapiens; identical to SEQ ID NO: 258551
  chr7:154673974-154674250
  hypo

SEQ ID NO: 308722 - DNA, 211 bp, Homo sapiens; identical to SEQ ID NO: 258552
  chr7:154875881-154876092
  hypo

SEQ ID NO: 308723 - DNA, 68 bp, Homo sapiens; identical to SEQ ID NO: 258553
  chr7:154922371-154922439
  hypo

SEQ ID NO: 308724 - DNA, 95 bp, Homo sapiens; identical to SEQ ID NO: 258555
  chr7:155016945-155017040
  hypo

SEQ ID NO: 308725 - DNA, 152 bp, Homo sapiens; identical to SEQ ID NO: 211958
  chr7:155017976-155018128
  hypo

SEQ ID NO: 308726 - DNA, 204 bp, Homo sapiens; identical to SEQ ID NO: 258557
  chr7:155077346-155077550
  hypo

SEQ ID NO: 308727 - DNA, 186 bp, Homo sapiens; identical to SEQ ID NO: 258558
  chr7:155079940-155080126
  hypo

SEQ ID NO: 308728 - DNA, 359 bp, Homo sapiens; identical to SEQ ID NO: 211959
  chr7:155130273-155130632
  hypo

SEQ ID NO: 308729 - DNA, 83 bp, Homo sapiens
  chr7:155130794-155130877
  hypo
cacatttacggaggccagaggcaggcacagaggcgtgtgcagggaggccaacagccaccacagaggcgcgtgcaggaaggcca

SEQ ID NO: 308730 - DNA, 35 bp, Homo sapiens; identical to SEQ ID NO: 201251
  chr7:155170943-155170978
  hypo

SEQ ID NO: 308731 - DNA, 94 bp, Homo sapiens; identical to SEQ ID NO: 258560
  chr7:155274563-155274657
  hypo

SEQ ID NO: 308732 - DNA, 156 bp, Homo sapiens; identical to SEQ ID NO: 258561
  chr7:155343623-155343779
  hypo

SEQ ID NO: 308733 - DNA, 79 bp, Homo sapiens; identical to SEQ ID NO: 211962
  chr7:155352613-155352692
  hypo

SEQ ID NO: 308734 - DNA, 209 bp, Homo sapiens; identical to SEQ ID NO: 211963
  chr7:155385399-155385608
  hypo

SEQ ID NO: 308735 - DNA, 168 bp, Homo sapiens; identical to SEQ ID NO: 211964
  chr7:155502689-155502857
  hypo

SEQ ID NO: 308736 - DNA, 155 bp, Homo sapiens; identical to SEQ ID NO: 258566
  chr7:155503998-155504153
  hypo

SEQ ID NO: 308737 - DNA, 177 bp, Homo sapiens; identical to SEQ ID NO: 211965
  chr7:155530782-155530959
  hypo

SEQ ID NO: 308738 - DNA, 195 bp, Homo sapiens; identical to SEQ ID NO: 211966
  chr7:155532479-155532674
  hypo

SEQ ID NO: 308739 - DNA, 111 bp, Homo sapiens; identical to SEQ ID NO: 258569
  chr7:155559197-155559308
  hypo

SEQ ID NO: 308740 - DNA, 126 bp, Homo sapiens; identical to SEQ ID NO: 211967
  chr7:155559943-155560069
  hypo

SEQ ID NO: 308741 - DNA, 213 bp, Homo sapiens; identical to SEQ ID NO: 258571
  chr7:155573670-155573883
  hypo

SEQ ID NO: 308742 - DNA, 62 bp, Homo sapiens; identical to SEQ ID NO: 258572
  chr7:155574316-155574378
  hypo

SEQ ID NO: 308743 - DNA, 57 bp, Homo sapiens; identical to SEQ ID NO: 285567
  chr7:155580355-155580412
  hypo

SEQ ID NO: 308744 - DNA, 31 bp, Homo sapiens; identical to SEQ ID NO: 211969
  chr7:155581211-155581242
  hypo

SEQ ID NO: 308745 - DNA, 238 bp, Homo sapiens; identical to SEQ ID NO: 211970
  chr7:155581980-155582218
  hypo

SEQ ID NO: 308746 - DNA, 256 bp, Homo sapiens; identical to SEQ ID NO: 258574
  chr7:155582651-155582907
  hypo

SEQ ID NO: 308747 - DNA, 732 bp, Homo sapiens
  chr7:155623753-155624485
  hypo
ggcaccaagggagagtgagttctgaccgggttgtcggggggtcagggactctgccctcagccactttggctgctggttctgccgagccactgcccgaacagcaccccggatgcacccgaggaggtgaggctctgcggaccgggtgccctgtgagtgacaggggagaggcccctgaggtttgcacagtgcctgtcacttctcaaagcacctccttcgttctggcaatttagtgagggaggctgggcagccggggctgtccattttatagaggaggacaccaagcctcagggagggagagggaagccggtggagccgggcagaagcctgtggagctgggtagaggccggcgggtttcccagcagcggtcttctgcatcttctggctgagtcctccgctgtcaggagaccccggcctgggccaggaggtccgattctgggatgcgaacgtggtggggctgttgccatagataccgatgtggtcaccagcctgaaacccttgagccacggagagatcagacggtggtccccactcctcagcctggagcctggcagagacgctcaaggaagagggtgggctgaccgcgcacgcctctcctttcttcatatcctgcgcggctcgggcgctgtgcaggaggcctgtgctcagcgaggagagagacagagagtgcagtgggaggagcgcggggtcggggggctctgcttcccacggtgcgcctgggagcctctttgcctc

SEQ ID NO: 308748 - DNA, 266 bp, Homo sapiens; identical to SEQ ID NO: 258576
  chr7:155637256-155637522
  hypo

SEQ ID NO: 308749 - DNA, 119 bp, Homo sapiens; identical to SEQ ID NO: 258577
  chr7:155638079-155638198
  hypo

SEQ ID NO: 308750 - DNA, 627 bp, Homo sapiens; identical to SEQ ID NO: 211972
  chr7:155679095-155679722
  hypo

SEQ ID NO: 308751 - DNA, 169 bp, Homo sapiens; identical to SEQ ID NO: 258579
  chr7:155706980-155707149
  hypo

SEQ ID NO: 308752 - DNA, 158 bp, Homo sapiens; identical to SEQ ID NO: 258580
  chr7:155793926-155794084
  hypo

SEQ ID NO: 308753 - DNA, 583 bp, Homo sapiens; identical to SEQ ID NO: 258581
  chr7:155797745-155798328
  hypo

SEQ ID NO: 308754 - DNA, 278 bp, Homo sapiens; identical to SEQ ID NO: 211973
  chr7:155828028-155828306
  hypo

SEQ ID NO: 308755 - DNA, 97 bp, Homo sapiens; identical to SEQ ID NO: 211974
  chr7:155828366-155828463
  hypo

SEQ ID NO: 308756 - DNA, 318 bp, Homo sapiens; identical to SEQ ID NO: 258584
  chr7:155855975-155856293
  hypo

SEQ ID NO: 308757 - DNA, 73 bp, Homo sapiens; identical to SEQ ID NO: 258585
  chr7:155859954-155860027
  hypo

SEQ ID NO: 308758 - DNA, 311 bp, Homo sapiens; identical to SEQ ID NO: 258586
  chr7:155868045-155868356
  hypo

SEQ ID NO: 308759 - DNA, 166 bp, Homo sapiens; identical to SEQ ID NO: 258588
  chr7:155897787-155897953
  hypo

SEQ ID NO: 308760 - DNA, 99 bp, Homo sapiens; identical to SEQ ID NO: 211975
  chr7:155898307-155898406
  hypo

SEQ ID NO: 308761 - DNA, 206 bp, Homo sapiens; identical to SEQ ID NO: 211976
  chr7:155900805-155901011
  hypo

SEQ ID NO: 308762 - DNA, 288 bp, Homo sapiens; identical to SEQ ID NO: 211977
  chr7:155913343-155913631
  hypo

SEQ ID NO: 308763 - DNA, 329 bp, Homo sapiens; identical to SEQ ID NO: 211978
  chr7:155916055-155916384
  hypo

SEQ ID NO: 308764 - DNA, 109 bp, Homo sapiens; identical to SEQ ID NO: 211979
  chr7:155920258-155920367
  hypo

SEQ ID NO: 308765 - DNA, 286 bp, Homo sapiens; identical to SEQ ID NO: 211980
  chr7:155935866-155936152
  hypo

SEQ ID NO: 308766 - DNA, 148 bp, Homo sapiens; identical to SEQ ID NO: 211981
  chr7:155948645-155948793
  hypo

SEQ ID NO: 308767 - DNA, 254 bp, Homo sapiens; identical to SEQ ID NO: 258596
  chr7:155985233-155985487
  hypo

SEQ ID NO: 308768 - DNA, 42 bp, Homo sapiens; identical to SEQ ID NO: 258597
  chr7:156000101-156000143
  hypo

SEQ ID NO: 308769 - DNA, 40 bp, Homo sapiens; identical to SEQ ID NO: 211982
  chr7:156012928-156012968
  hypo

SEQ ID NO: 308770 - DNA, 72 bp, Homo sapiens; identical to SEQ ID NO: 211983
  chr7:156013006-156013078
  hypo

SEQ ID NO: 308771 - DNA, 52 bp, Homo sapiens; identical to SEQ ID NO: 258599
  chr7:156154858-156154910
  hypo

SEQ ID NO: 308772 - DNA, 63 bp, Homo sapiens; identical to SEQ ID NO: 258600
  chr7:156255036-156255099
  hypo

SEQ ID NO: 308773 - DNA, 168 bp, Homo sapiens; identical to SEQ ID NO: 258601
  chr7:156255129-156255297
  hypo

SEQ ID NO: 308774 - DNA, 50 bp, Homo sapiens
  chr7:156290627-156290677
  hypo
aggtgagctgaactcgcttgaaaaaggcgcccgcggagcaggtggatgct

SEQ ID NO: 308775 - DNA, 290 bp, Homo sapiens; identical to SEQ ID NO: 258604
  chr7:156347363-156347653
  hypo

SEQ ID NO: 308776 - DNA, 306 bp, Homo sapiens; identical to SEQ ID NO: 258605
  chr7:156371322-156371628
  hypo

SEQ ID NO: 308777 - DNA, 87 bp, Homo sapiens; identical to SEQ ID NO: 258606
  chr7:156393241-156393328
  hypo

SEQ ID NO: 308778 - DNA, 222 bp, Homo sapiens; identical to SEQ ID NO: 258607
  chr7:156397739-156397961
  hypo

SEQ ID NO: 308779 - DNA, 132 bp, Homo sapiens; identical to SEQ ID NO: 211985
  chr7:156435906-156436038
  hypo

SEQ ID NO: 308780 - DNA, 405 bp, Homo sapiens; identical to SEQ ID NO: 258609
  chr7:156507228-156507633
  hypo

SEQ ID NO: 308781 - DNA, 187 bp, Homo sapiens; identical to SEQ ID NO: 258610
  chr7:156613330-156613517
  hypo

SEQ ID NO: 308782 - DNA, 163 bp, Homo sapiens; identical to SEQ ID NO: 258611
  chr7:156733207-156733370
  hypo

SEQ ID NO: 308783 - DNA, 120 bp, Homo sapiens; identical to SEQ ID NO: 211986
  chr7:156733810-156733930
  hypo

SEQ ID NO: 308784 - DNA, 37 bp, Homo sapiens; identical to SEQ ID NO: 211987
  chr7:156733990-156734027
  hypo

SEQ ID NO: 308785 - DNA, 32 bp, Homo sapiens; identical to SEQ ID NO: 211988
  chr7:156734692-156734724
  hypo

SEQ ID NO: 308786 - DNA, 54 bp, Homo sapiens
  chr7:156744799-156744853
  hypo
aggttcttgtatgctactgtgcctgcagtaagttaaggccgagcaaaagcgcag

SEQ ID NO: 308787 - DNA, 123 bp, Homo sapiens; identical to SEQ ID NO: 211989
  chr7:156760916-156761039
  hypo

SEQ ID NO: 308788 - DNA, 187 bp, Homo sapiens; identical to SEQ ID NO: 258617
  chr7:156782595-156782782
  hypo

SEQ ID NO: 308789 - DNA, 249 bp, Homo sapiens; identical to SEQ ID NO: 201268
  chr7:156802164-156802413
  hypo

SEQ ID NO: 308790 - DNA, 1185 bp, Homo sapiens; identical to SEQ ID NO: 285584
  chr7:156802537-156803722
  hypo

SEQ ID NO: 308791 - DNA, 193 bp, Homo sapiens
  chr7:156832487-156832680
  hypo
catgtctctgtgtccgcgggaccatcttataaggacacagtcacatcgaattgggggcccatcctactcctgcacagctaatcactaaccacatcttgttccgcagtaaagtcccattccgagacactggggctaggacttccacctgtctcttggacacatttcaacccgcagcaccaccactgaggaaacg

SEQ ID NO: 308792 - DNA, 173 bp, Homo sapiens
  chr7:156880358-156880531
  hypo
agttgaattgttttcagaagcgtaaggttctacgtagcaagaggcttttctcatatgcacctcactttctcggttggagtggcagaaatacctaaacgcagaagaatgtgcatgcaagggctcgcgctggcatacagtagggcttgctattgacgatgagcgcacccacggct

SEQ ID NO: 308793 - DNA, 196 bp, Homo sapiens
  chr7:156880599-156880795
  hypo
accttcttctgcgttcttgttttgcattttccttcatttctatcaaccgactttgctgctatagccgctgcttagcaaagccggtaaacatgaggttgtaatcgttgaatacggcactctggcaaccgagacgctgaaaggctgccttttccgggatgaagaaggactgtgtggcgttgagatatctaattacata

SEQ ID NO: 308794 - DNA, 45 bp, Homo sapiens
  chr7:156883643-156883688
  hypo
agagatttgcacagctggacagggcagctccgtcacccgtgacca

SEQ ID NO: 308795 - DNA, 197 bp, Homo sapiens; identical to SEQ ID NO: 258622
  chr7:156918515-156918712
  hypo

SEQ ID NO: 308796 - DNA, 86 bp, Homo sapiens; identical to SEQ ID NO: 211992
  chr7:156937634-156937720
  hypo

SEQ ID NO: 308797 - DNA, 156 bp, Homo sapiens; identical to SEQ ID NO: 211993
  chr7:156974867-156975023
  hypo

SEQ ID NO: 308798 - DNA, 481 bp, Homo sapiens; identical to SEQ ID NO: 211994
  chr7:157052686-157053167
  hypo

SEQ ID NO: 308799 - DNA, 337 bp, Homo sapiens; identical to SEQ ID NO: 258626
  chr7:157057954-157058291
  hypo

SEQ ID NO: 308800 - DNA, 179 bp, Homo sapiens; identical to SEQ ID NO: 258627
  chr7:157062218-157062397
  hypo

SEQ ID NO: 308801 - DNA, 222 bp, Homo sapiens; identical to SEQ ID NO: 258628
  chr7:157072934-157073156
  hypo

SEQ ID NO: 308802 - DNA, 73 bp, Homo sapiens; identical to SEQ ID NO: 258629
  chr7:157073389-157073462
  hypo

SEQ ID NO: 308803 - DNA, 326 bp, Homo sapiens
  chr7:157074072-157074398
  hypo
gatggttcagaggtgcaggccggggttggctcacctgccagcggctccgggccccaacctccttggcagcctctgcctcacctgctcacgcggccctcgggcagcccaggctgtgggcaccaaggggtcctgccggcttctcaggcagcagagtcctccgggtcctgagtgtggtgtgccttgggaacatgcgggaggcagagaagaacaggaagggattgaaaccgctccctccacccactcctgcccgaggcaccagaggcagcctcaaaaaaagcaaaaggtccagccttctgtggatctcagggatgcaggaggggaggcca

SEQ ID NO: 308804 - DNA, 61 bp, Homo sapiens
  chr7:157074428-157074489
  hypo
cgtgtgggttctagaacattcctagctgggccttgatccgtggcaccgtcgaggggtgtgg

SEQ ID NO: 308805 - DNA, 165 bp, Homo sapiens
  chr7:157075019-157075184
  hypo
cggtgctgcctggacgcggcccacagggaggtggcctggccacacggaggctgtttgtgaaccgatgccaggcacaccctcccccaggcacgagtctcccctctggcctcatccctgccccaccccacactcagggaaccccctccctgtctttaaggctgattt

SEQ ID NO: 308806 - DNA, 311 bp, Homo sapiens
  chr7:157084099-157084410
  hypo
gggggtgaggccagtggagggcaggggaggaggagggcaatttcgctttggaaatccactccggggggccttggccggaagctggactgccgcggaggacactgcgcccctgctctgcagaggaggaatcccagccgggggacgggccgcccgaggtcacagaggggcctgccagcaggggtgtggcaggagggcggtggggaggaggccagggcagtgtctgaggctgcgtgtgggggccgtgtgttcacctgggcgccagggtgcagaggggggtcgcagggcagatgggggaggatgggggctccagc

SEQ ID NO: 308807 - DNA, 402 bp, Homo sapiens
  chr7:157084622-157085024
  hypo
ctggcgtcacatagcacagcaatgccagcagcagcgcagtctcaggctctccccgccccgatgattctccactcccaacataagggtcatgtggtctggagggacctttggcccagctacaggggaccaactcagggagacccctccttggctccgtgtgggtcaagaaggaaaggatggattcctcgtgtccatgtagaggcagagagcgcttccaaaaagacagatgagtgaccattgcctcggctgcctgggccctgaagggctcccctgtcctgctgactgttctgttctcaaggacctcggagaaatcgtgtcgcagtttaaggtcccttccttgctgccacccagacttctccttcccaaacctttagtgaacaacagcaccgggagagctcactg

SEQ ID NO: 308808 - DNA, 171 bp, Homo sapiens; identical to SEQ ID NO: 211997
  chr7:157086147-157086318
  hypo

SEQ ID NO: 308809 - DNA, 172 bp, Homo sapiens; identical to SEQ ID NO: 258635
  chr7:157100021-157100193
  hypo

SEQ ID NO: 308810 - DNA, 57 bp, Homo sapiens; identical to SEQ ID NO: 258636
  chr7:157102726-157102783
  hypo

SEQ ID NO: 308811 - DNA, 136 bp, Homo sapiens; identical to SEQ ID NO: 211998
  chr7:157106437-157106573
  hypo

SEQ ID NO: 308812 - DNA, 108 bp, Homo sapiens; identical to SEQ ID NO: 211999
  chr7:157110670-157110778
  hypo

SEQ ID NO: 308813 - DNA, 149 bp, Homo sapiens; identical to SEQ ID NO: 258639
  chr7:157122530-157122679
  hypo

SEQ ID NO: 308814 - DNA, 75 bp, Homo sapiens; identical to SEQ ID NO: 258640
  chr7:157128228-157128303
  hypo

SEQ ID NO: 308815 - DNA, 32 bp, Homo sapiens; identical to SEQ ID NO: 285590
  chr7:157129285-157129317
  hypo

SEQ ID NO: 308816 - DNA, 42 bp, Homo sapiens; identical to SEQ ID NO: 258641
  chr7:157139858-157139900
  hypo

SEQ ID NO: 308817 - DNA, 104 bp, Homo sapiens; identical to SEQ ID NO: 223290
  chr7:157150797-157150901
  hypo

SEQ ID NO: 308818 - DNA, 175 bp, Homo sapiens; identical to SEQ ID NO: 258642
  chr7:157151170-157151345
  hypo

SEQ ID NO: 308819 - DNA, 670 bp, Homo sapiens; identical to SEQ ID NO: 258643
  chr7:157202475-157203145
  hypo

SEQ ID NO: 308820 - DNA, 253 bp, Homo sapiens; identical to SEQ ID NO: 258645
  chr7:157219101-157219354
  hypo

SEQ ID NO: 308821 - DNA, 60 bp, Homo sapiens
  chr7:157220412-157220472
  hypo
cacaccttcaaaaaactgagtcatcctttccctccagagaagctaccatgtgtggtgcag

SEQ ID NO: 308822 - DNA, 96 bp, Homo sapiens; identical to SEQ ID NO: 258647
  chr7:157233128-157233224
  hypo

SEQ ID NO: 308823 - DNA, 74 bp, Homo sapiens
  chr7:157255322-157255396
  hypo
tgcagacaagaactcgtcttaacacctgcaggctaaaggaggaaagagtggggtgtctgcgttagaggttcaga

SEQ ID NO: 308824 - DNA, 49 bp, Homo sapiens
  chr7:157262478-157262527
  hypo
caaggggccggcggcgcctaattccaccttgtgtgccagtgcagttcat

SEQ ID NO: 308825 - DNA, 229 bp, Homo sapiens; identical to SEQ ID NO: 212000
  chr7:157263471-157263700
  hypo

SEQ ID NO: 308826 - DNA, 164 bp, Homo sapiens; identical to SEQ ID NO: 258652
  chr7:157281182-157281346
  hypo

SEQ ID NO: 308827 - DNA, 90 bp, Homo sapiens
  chr7:157294321-157294411
  hypo
tgcgtgcactgccgttcgctcagagccattgtgcacgtttgtttctctgatcactaacagcctgcacgtttccagcgtttccagtttcca

SEQ ID NO: 308828 - DNA, 154 bp, Homo sapiens; identical to SEQ ID NO: 258654
  chr7:157332354-157332508
  hypo

SEQ ID NO: 308829 - DNA, 123 bp, Homo sapiens
  chr7:157332825-157332948
  hypo
tccatggtacccggcgcagtgttgatggagacgcagcgaggagctgtgattgtctcacttgccccgaagctgcaggacgttcagttctgtccctgcggcttctcccaatgataaactctctca

SEQ ID NO: 308830 - DNA, 115 bp, Homo sapiens
  chr7:157332978-157333093
  hypo
gggcggcctcactgagtgctgccagcttccccggccactcctgcacagtggatccaccctcccgaaagtggcagatgacaagcacactcttcctggaaaccgcctcgaacgtgct

SEQ ID NO: 308831 - DNA, 237 bp, Homo sapiens; identical to SEQ ID NO: 212001
  chr7:157334627-157334864
  hypo

SEQ ID NO: 308832 - DNA, 215 bp, Homo sapiens; identical to SEQ ID NO: 258657
  chr7:157335452-157335667
  hypo

SEQ ID NO: 308833 - DNA, 350 bp, Homo sapiens; identical to SEQ ID NO: 212002
  chr7:157336680-157337030
  hypo

SEQ ID NO: 308834 - DNA, 149 bp, Homo sapiens; identical to SEQ ID NO: 212003
  chr7:157340247-157340396
  hypo

SEQ ID NO: 308835 - DNA, 310 bp, Homo sapiens; identical to SEQ ID NO: 212004
  chr7:157340426-157340736
  hypo

SEQ ID NO: 308836 - DNA, 257 bp, Homo sapiens
  chr7:157341258-157341515
  hypo
ggccccggagaggccgggcagcgctcagagagctcagaacatcctcctgagggttctgggatttatcgtcaacctctttctacaaaaatgcagcgttctccccccacccccaaatctagtgaatggaaagagccagtggatcgagttcctaggacttgagatgtggctgcatctggaggtgttgcaggaaacgccagtggacctttgggggcccagaagtgaccccgcccatgcaaggccggcatggacgaggccgg

SEQ ID NO: 308837 - DNA, 134 bp, Homo sapiens
  chr7:157341671-157341805
  hypo
tcaagtgctccagggtcgctgcgatatcaatctctttagcacctgcaacaaaccacaaattgggctgagttcagagcacaagataatccatgccacatctgtcaatctcctgctagccacgttccctctgggct

SEQ ID NO: 308838 - DNA, 520 bp, Homo sapiens; identical to SEQ ID NO: 258661
  chr7:157344958-157345478
  hypo

SEQ ID NO: 308839 - DNA, 161 bp, Homo sapiens; identical to SEQ ID NO: 212005
  chr7:157346267-157346428
  hypo

SEQ ID NO: 308840 - DNA, 495 bp, Homo sapiens
  chr7:157347302-157347797
  hypo
caaggtgaaggagcagctaacgaaagttaaattccagggaaacagaaaggcccagtggtgtgacgctgacatcgaaaagcctgcaaacagtcgaggagtcagcgcacacacaaagaaaatccagatggaaggaaagaaaggaaccttaacgatgtctaccggggacagagcgtggggtccacggagaagtcccaggcgttttccacctaagaagcatcatggtgattcaaacaccagggaaatgaatggactcagtggagccactttctgctacttgaccaggtttaattcgagttgtccatgtcgggaatctacagggaagtgacgcaggctgccatcttgctcagcaccccagtgtggcgggcgccccagtgtggcgggcgtcccagtgtggtgagcaccggccaagtcagtttgggttgggctgcaccctcgtgcctgggacacccaggaagacccacctctctcgtgttagtggaccagggaggcagccac

SEQ ID NO: 308841 - DNA, 109 bp, Homo sapiens; identical to SEQ ID NO: 258664
  chr7:157364282-157364391
  hypo

SEQ ID NO: 308842 - DNA, 102 bp, Homo sapiens
  chr7:157367335-157367437
  hypo
cggtgcctggcgaacgcgccaggccagagtgagaacgcgtcgtctattgttcaaagataagaaacgctgcagcatgaagatggccggtgtcttcagaagggg

SEQ ID NO: 308843 - DNA, 33 bp, Homo sapiens
  chr7:157367476-157367509
  hypo
atacagaaaaccagccaccggcaatgcttgtct

SEQ ID NO: 308844 - DNA, 171 bp, Homo sapiens; identical to SEQ ID NO: 212007
  chr7:157370299-157370470
  hypo

SEQ ID NO: 308845 - DNA, 137 bp, Homo sapiens; identical to SEQ ID NO: 212008
  chr7:157370789-157370926
  hypo

SEQ ID NO: 308846 - DNA, 99 bp, Homo sapiens; identical to SEQ ID NO: 258667
  chr7:157372247-157372346
  hypo

SEQ ID NO: 308847 - DNA, 134 bp, Homo sapiens; identical to SEQ ID NO: 258668
  chr7:157372651-157372785
  hypo

SEQ ID NO: 308848 - DNA, 155 bp, Homo sapiens; identical to SEQ ID NO: 258669
  chr7:157386352-157386507
  hypo

SEQ ID NO: 308849 - DNA, 239 bp, Homo sapiens; identical to SEQ ID NO: 212009
  chr7:157387164-157387403
  hypo

SEQ ID NO: 308850 - DNA, 378 bp, Homo sapiens
  chr7:157402241-157402619
  hypo
tcataaggatggaacgattcacgtggccacggcctcgtggtccacaggggagcacagggtttgactcccagccccactgcttgccagcgggcgatcctgggtaaactgttcagtgttcggagaatgcaggatgataacatacaactcacagcactgttgtggtaaatggcacgcagcaagcaatgaggagcaaggctgagatgacggtggacacgcacccaactgcgcaggtcagccaagctggcaaagcgtgttcttgctgccccgtggtggcagaacatatggagcgatttttcatagatgccaacagaagagacacatcccacaatttcttgttgattattactatggcaaagagccttgggagatggcccagct

SEQ ID NO: 308851 - DNA, 83 bp, Homo sapiens
  chr7:157402654-157402737
  hypo
tcatgatctagaacctcccgtgcccaccccactgcatctgaggaaagcgtgtggaagactcctctgcccggaacatcgtcttg

SEQ ID NO: 308852 - DNA, 287 bp, Homo sapiens; identical to SEQ ID NO: 258673
  chr7:157403100-157403387
  hypo

SEQ ID NO: 308853 - DNA, 172 bp, Homo sapiens
  chr7:157404196-157404368
  hypo
ccagggttgagctgcgtaccctcccccaaaaagacacactggagtcccagccctgggaacatgaccttatttggaaatagggtctttacagaggtaagcgagcggagggcatttgggcggccctaatgcaatatgactggcgtgctgttaggaagaaggactctgcacaccc

SEQ ID NO: 308854 - DNA, 45 bp, Homo sapiens
  chr7:157404566-157404611
  hypo
gaagacagccgcagtcatgctggggacacgcggagggagagcgcc

SEQ ID NO: 308855 - DNA, 817 bp, Homo sapiens
  chr7:157407768-157408585
  hypo
tacttacttgaagtcgtccagccagaaaataaatgaagtgctcgcaggtcacgctaatacggccaacactgggcggctggccagcgtgggtggtgggtgtgcaggcgatgccacgctaccccttccacttgagtgtttaaaactcttgtaataaaaagtgggggaggaagtcatgctaagccagccacacttctgctccagagagggccctgcaagagcggtgtgcgtgggttgcggctgggtctgcgctggggtagtgtaggctgcactctccggggagccgctgaccttgggctccctaacctccttcagccccagctctgtccctgtgtgaatctcagggctgtttcgaggatgaaaaggaggtgtttagccccgagcctcacgtggaaacatctgatgagcctttgccaatatgctcgggacctggggacggctggggtgaccccatcgcaaggccgggccgtggaaacaatctcagccctggaaccagcgcctgggaagtcccgcggtggatccgcgtcacgggggaggattggctcagcactggtcctgcggaatgtgtttttatcaatgacttgacgacgtgaaaaacatgtttataaaacgagcagatggtgccgagctgagagggaggtgacgcagtgactcaggaaccacaagctctggaggctgaacgagaatcggttacaggagatgaacacaaggctcgattctcctgttaaacttgactgtcaccaacggggggtggggggtgcgcgaggccctgggctccaccgaagaccttaaggaaaagactctggatgttagtgggttc

SEQ ID NO: 308856 - DNA, 115 bp, Homo sapiens; identical to SEQ ID NO: 212014
  chr7:157408760-157408875
  hypo

SEQ ID NO: 308857 - DNA, 339 bp, Homo sapiens; identical to SEQ ID NO: 258677
  chr7:157410943-157411282
  hypo

SEQ ID NO: 308858 - DNA, 249 bp, Homo sapiens; identical to SEQ ID NO: 258678
  chr7:157413023-157413272
  hypo

SEQ ID NO: 308859 - DNA, 193 bp, Homo sapiens; identical to SEQ ID NO: 212015
  chr7:157414207-157414400
  hypo

SEQ ID NO: 308860 - DNA, 42 bp, Homo sapiens; identical to SEQ ID NO: 258680
  chr7:157434605-157434647
  hypo

SEQ ID NO: 308861 - DNA, 488 bp, Homo sapiens; identical to SEQ ID NO: 258681
  chr7:157436258-157436746
  hypo

SEQ ID NO: 308862 - DNA, 310 bp, Homo sapiens
  chr7:157445766-157446076
  hypo
tcacagaaagtctccgctcttggtgctgagcctgccccccagacggtgcagccggcctctcccacctgctggggctcctcacatctagcttggcctccagacatcaccaacctctgctgtttatttcatcggatcgtggggttcagatgccacgttttgtccaacgtgccccaggagtggctgcatgtcaggaacatgtcgctgggaatctctgtggcttatctgaccatcctgccatcctcaggtgaggggcactgaggtggccggttgggtgtctggcggaaacgaggctttgcgcacagagggctgg

SEQ ID NO: 308863 - DNA, 83 bp, Homo sapiens; identical to SEQ ID NO: 258683
  chr7:157446148-157446231
  hypo

SEQ ID NO: 308864 - DNA, 288 bp, Homo sapiens; identical to SEQ ID NO: 258684
  chr7:157446436-157446724
  hypo

SEQ ID NO: 308865 - DNA, 54 bp, Homo sapiens; identical to SEQ ID NO: 258685
  chr7:157447781-157447835
  hypo

SEQ ID NO: 308866 - DNA, 78 bp, Homo sapiens
  chr7:157448325-157448403
  hypo
ctccgtctccagtgcgggaaacagcacagccaggcacggtcacccaccaggacgacgcctacggcctggagatccagg

SEQ ID NO: 308867 - DNA, 54 bp, Homo sapiens; identical to SEQ ID NO: 212017
  chr7:157448526-157448580
  hypo

SEQ ID NO: 308868 - DNA, 216 bp, Homo sapiens; identical to SEQ ID NO: 212018
  chr7:157448958-157449174
  hypo

SEQ ID NO: 308869 - DNA, 50 bp, Homo sapiens; identical to SEQ ID NO: 212019
  chr7:157449405-157449455
  hypo

SEQ ID NO: 308870 - DNA, 50 bp, Homo sapiens; identical to SEQ ID NO: 212020
  chr7:157464610-157464660
  hypo

SEQ ID NO: 308871 - DNA, 452 bp, Homo sapiens; identical to SEQ ID NO: 258690
  chr7:157467102-157467554
  hypo

SEQ ID NO: 308872 - DNA, 193 bp, Homo sapiens; identical to SEQ ID NO: 258691
  chr7:157502240-157502433
  hypo

SEQ ID NO: 308873 - DNA, 273 bp, Homo sapiens; identical to SEQ ID NO: 258692
  chr7:157507358-157507631
  hypo

SEQ ID NO: 308874 - DNA, 325 bp, Homo sapiens; identical to SEQ ID NO: 212022
  chr7:157510158-157510483
  hypo

SEQ ID NO: 308875 - DNA, 136 bp, Homo sapiens; identical to SEQ ID NO: 212023
  chr7:157511495-157511631
  hypo

SEQ ID NO: 308876 - DNA, 436 bp, Homo sapiens; identical to SEQ ID NO: 212024
  chr7:157513000-157513436
  hypo

SEQ ID NO: 308877 - DNA, 333 bp, Homo sapiens; identical to SEQ ID NO: 258697
  chr7:157528457-157528790
  hypo

SEQ ID NO: 308878 - DNA, 541 bp, Homo sapiens
  chr7:157544023-157544564
  hypo
gaaaaaaatccatgcggcgaacgccctggctgtggcagcgggtttatttttgaatgaaggcaccatgcatttaaattaaatgtcagatgtaatttagcacccaggcatcaagaggctgagcgtgtgcagggaaagccggcagctcgcaggagtggctgagtgcctgctctccagcgcccacggagtgcgctcgctcgggaggtgtctctgtcctcggcgtgggagggtctttgagaaggtgaagcttggctgttgctaagacacacgagatcattgtttggaaggcgttttcccttctctctccctcaaatgactgtttaattgaggttactctgcaccgctgacacgcggtggaaagcccgacatcacttggagaacttaatcaaggctgatggagccgcgcgcacagaatcccaactgcccgcaccctttgtttcatgttcaccaagaccgaggggaccattcctacgggatgaggaaacacatctaacacaggccttctaaagagagaggagggagggagggagggatggaaaggggg

SEQ ID NO: 308879 - DNA, 342 bp, Homo sapiens; identical to SEQ ID NO: 212026
  chr7:157549923-157550265
  hypo

SEQ ID NO: 308880 - DNA, 52 bp, Homo sapiens
  chr7:157550872-157550924
  hypo
aaaagggccggtgtcgtaattgactggacaggtactaatgccgaccacatcc

SEQ ID NO: 308881 - DNA, 262 bp, Homo sapiens
  chr7:157550958-157551220
  hypo
agtccaggcctgtccaggcgccattccccgtggcctgcacgctcctgggtcatgctccgctcaggcggctccttcagtgaagttgcacagcagtcagggtaacctccatgtccccaaagggcaagaccggctcagaggcgaggtaggtggcacgaggccacacagctggtcagctcagccgggctgggacgcgggccccagaccgtggcccccgtgcagctctgggtccagctggccaaggtggactttgcacaaggtttgg

SEQ ID NO: 308882 - DNA, 61 bp, Homo sapiens
  chr7:157565439-157565500
  hypo
aacatctttttgaacaaacacgtaaacacattgagtctttggtcgcttttgcatcttcttt

SEQ ID NO: 308883 - DNA, 155 bp, Homo sapiens; identical to SEQ ID NO: 212027
  chr7:157567209-157567364
  hypo

SEQ ID NO: 308884 - DNA, 47 bp, Homo sapiens; identical to SEQ ID NO: 212028
  chr7:157568321-157568368
  hypo

SEQ ID NO: 308885 - DNA, 138 bp, Homo sapiens; identical to SEQ ID NO: 258704
  chr7:157570973-157571111
  hypo

SEQ ID NO: 308886 - DNA, 110 bp, Homo sapiens; identical to SEQ ID NO: 258705
  chr7:157571413-157571523
  hypo

SEQ ID NO: 308887 - DNA, 291 bp, Homo sapiens; identical to SEQ ID NO: 212029
  chr7:157589660-157589951
  hypo

SEQ ID NO: 308888 - DNA, 270 bp, Homo sapiens; identical to SEQ ID NO: 223292
  chr7:157594763-157595033
  hypo

SEQ ID NO: 308889 - DNA, 180 bp, Homo sapiens; identical to SEQ ID NO: 258709
  chr7:157602212-157602392
  hypo

SEQ ID NO: 308890 - DNA, 151 bp, Homo sapiens
  chr7:157602964-157603115
  hypo
tgatcccaaagcagcgatctagacgtgtggggtccacaggcgggcgccctggcactgggggctctgcaacttgacgaggctatgccaggctgggctagaggtgccgtgctgggcacaggctctccacgggatggcgggactgctgggcaca

SEQ ID NO: 308891 - DNA, 314 bp, Homo sapiens
  chr7:157603148-157603462
  hypo
caggctctccacggggacagcggggctgctgggcacagggtctccatggggacggcgggactgctgggagctgggttctccacggggacggggacggcgggactgctgggggctgggctctccatggggacagggacggggacggcgggactgctgggggctgggctctccatggggacggggacgggaacggcgggactgctgggggctgggctcttcacggggacggcgggacttctgggggctggctctccacggggacggcgggactgctggaggctggctctccacggggacggcgggactgctgggca

SEQ ID NO: 308892 - DNA, 44 bp, Homo sapiens; identical to SEQ ID NO: 258711
  chr7:157605781-157605825
  hypo

SEQ ID NO: 308893 - DNA, 406 bp, Homo sapiens; identical to SEQ ID NO: 212030
  chr7:157606033-157606439
  hypo

SEQ ID NO: 308894 - DNA, 248 bp, Homo sapiens; identical to SEQ ID NO: 212031
  chr7:157607748-157607996
  hypo

SEQ ID NO: 308895 - DNA, 37 bp, Homo sapiens; identical to SEQ ID NO: 212032
  chr7:157608040-157608077
  hypo

SEQ ID NO: 308896 - DNA, 123 bp, Homo sapiens; identical to SEQ ID NO: 258714
  chr7:157620461-157620584
  hypo

SEQ ID NO: 308897 - DNA, 366 bp, Homo sapiens; identical to SEQ ID NO: 212033
  chr7:157621929-157622295
  hypo

SEQ ID NO: 308898 - DNA, 496 bp, Homo sapiens; identical to SEQ ID NO: 258716
  chr7:157625834-157626330
  hypo

SEQ ID NO: 308899 - DNA, 153 bp, Homo sapiens; identical to SEQ ID NO: 258717
  chr7:157630455-157630608
  hypo

SEQ ID NO: 308900 - DNA, 165 bp, Homo sapiens; identical to SEQ ID NO: 258718
  chr7:157638211-157638376
  hypo

SEQ ID NO: 308901 - DNA, 512 bp, Homo sapiens; identical to SEQ ID NO: 258719
  chr7:157641413-157641925
  hypo

SEQ ID NO: 308902 - DNA, 244 bp, Homo sapiens; identical to SEQ ID NO: 212035
  chr7:157642943-157643187
  hypo

SEQ ID NO: 308903 - DNA, 84 bp, Homo sapiens; identical to SEQ ID NO: 258721
  chr7:157643707-157643791
  hypo

SEQ ID NO: 308904 - DNA, 413 bp, Homo sapiens; identical to SEQ ID NO: 212036
  chr7:157645533-157645946
  hypo

SEQ ID NO: 308905 - DNA, 94 bp, Homo sapiens; identical to SEQ ID NO: 212037
  chr7:157646590-157646684
  hypo

SEQ ID NO: 308906 - DNA, 258 bp, Homo sapiens; identical to SEQ ID NO: 258724
  chr7:157653861-157654119
  hypo

SEQ ID NO: 308907 - DNA, 263 bp, Homo sapiens
  chr7:157656414-157656677
  hypo
acaagctcttatggcgaccctgacccagcaggaccggtatccttatcagaaagggatatctggacacagagacagacgtgcacgtgtggagacacctgaagatgaagatggcatctaccaggcgggggagtggcctcaggagaaacgggctctgcccacgcctcgacctcggacttccagcctccagagccgtgtgaaaagaaacttccatcatttaagctgccctgtctgtgggactttgcctcggcagcctgagcagacag

SEQ ID NO: 308908 - DNA, 143 bp, Homo sapiens; identical to SEQ ID NO: 258726
  chr7:157657815-157657958
  hypo

SEQ ID NO: 308909 - DNA, 58 bp, Homo sapiens; identical to SEQ ID NO: 258727
  chr7:157658189-157658247
  hypo

SEQ ID NO: 308910 - DNA, 115 bp, Homo sapiens; identical to SEQ ID NO: 258728
  chr7:157658676-157658791
  hypo

SEQ ID NO: 308911 - DNA, 57 bp, Homo sapiens
  chr7:157659199-157659256
  hypo
gctcatgacctactaaacagcgcatgtgcctctcagcccttgccatgacaaccatga

SEQ ID NO: 308912 - DNA, 36 bp, Homo sapiens; identical to SEQ ID NO: 212038
  chr7:157659473-157659509
  hypo

SEQ ID NO: 308913 - DNA, 40 bp, Homo sapiens
  chr7:157660158-157660198
  hypo
gccaccaccctgtccctgacgccctggatacacggccacc

SEQ ID NO: 308914 - DNA, 259 bp, Homo sapiens; identical to SEQ ID NO: 258731
  chr7:157660637-157660896
  hypo

SEQ ID NO: 308915 - DNA, 164 bp, Homo sapiens; identical to SEQ ID NO: 212039
  chr7:157666019-157666183
  hypo

SEQ ID NO: 308916 - DNA, 107 bp, Homo sapiens; identical to SEQ ID NO: 258733
  chr7:157666383-157666490
  hypo

SEQ ID NO: 308917 - DNA, 100 bp, Homo sapiens
  chr7:157703411-157703511
  hypo
gtgtgcgagcgcgcgtgcgcccctgcgatcagcccagcagacagagcacgttcctgtaacgtgttgtgatccactgcgcggcaacaacacaaaacacaag

SEQ ID NO: 308918 - DNA, 368 bp, Homo sapiens; identical to SEQ ID NO: 258735
  chr7:157711203-157711571
  hypo

SEQ ID NO: 308919 - DNA, 280 bp, Homo sapiens; identical to SEQ ID NO: 212040
  chr7:157730033-157730313
  hypo

SEQ ID NO: 308920 - DNA, 169 bp, Homo sapiens; identical to SEQ ID NO: 201274
  chr7:157731890-157732059
  hypo

SEQ ID NO: 308921 - DNA, 324 bp, Homo sapiens; identical to SEQ ID NO: 258738
  chr7:157734698-157735022
  hypo

SEQ ID NO: 308922 - DNA, 268 bp, Homo sapiens; identical to SEQ ID NO: 212042
  chr7:157736786-157737054
  hypo

SEQ ID NO: 308923 - DNA, 314 bp, Homo sapiens; identical to SEQ ID NO: 212043
  chr7:157738093-157738407
  hypo

SEQ ID NO: 308924 - DNA, 186 bp, Homo sapiens; identical to SEQ ID NO: 212044
  chr7:157744267-157744453
  hypo

SEQ ID NO: 308925 - DNA, 41 bp, Homo sapiens
  chr7:157776962-157777003
  hypo
cccacgccaggctccaccccatcccacgccaggctccaccc

SEQ ID NO: 308926 - DNA, 128 bp, Homo sapiens
  chr7:157778518-157778646
  hypo
gctgacgagacccggcctcgctcagaaagctcctccaagatgccaccgcgtgtgaaatgcttggggttgaatctcgagagcagggagaccagccagacagcccacctggctgacgagacccggcctcg

SEQ ID NO: 308927 - DNA, 239 bp, Homo sapiens; identical to SEQ ID NO: 212045
  chr7:157794264-157794503
  hypo

SEQ ID NO: 308928 - DNA, 456 bp, Homo sapiens
  chr7:157794648-157795104
  hypo
ctgtctccaggtcctgggatcacgttgtttcagtggagacgatggccgccagcttcagattcagaaatggcacttagtgcctcttcccttggagtcacctcgggtgacatggggtggcccccatggccagcactgaccagctctgccccccaccgaggcgggagccacatctcaccaccaaatgcccttttatgggaactgaggtgcaaagcgggggcttgaggcaagcagcccccgcgggaaacacggcgtggtcatcaggcgagtgctgccttagagacccgccccctgcagaggctgtgctctggatggtcactcactcacccctttattaagagttggttctacggaggatgagagaggcagggacgtgttttgggagaaggtcatatgaaaaattagtgccacagagtttcggcccctaaaaagcttccagtttcacggtgaggggaaatg

SEQ ID NO: 308929 - DNA, 60 bp, Homo sapiens; identical to SEQ ID NO: 212047
  chr7:157795358-157795418
  hypo

SEQ ID NO: 308930 - DNA, 143 bp, Homo sapiens; identical to SEQ ID NO: 212048
  chr7:157795448-157795591
  hypo

SEQ ID NO: 308931 - DNA, 182 bp, Homo sapiens; identical to SEQ ID NO: 212049
  chr7:157847115-157847297
  hypo

SEQ ID NO: 308932 - DNA, 110 bp, Homo sapiens; identical to SEQ ID NO: 212050
  chr7:157849576-157849686
  hypo

SEQ ID NO: 308933 - DNA, 435 bp, Homo sapiens; identical to SEQ ID NO: 258749
  chr7:157853828-157854263
  hypo

SEQ ID NO: 308934 - DNA, 360 bp, Homo sapiens; identical to SEQ ID NO: 212051
  chr7:157860323-157860683
  hypo

SEQ ID NO: 308935 - DNA, 193 bp, Homo sapiens; identical to SEQ ID NO: 258751
  chr7:157861007-157861200
  hypo

SEQ ID NO: 308936 - DNA, 72 bp, Homo sapiens
  chr7:157877355-157877427
  hypo
cccatccacacccacgacgcccatccacacccaccacgcccatccacacccacgacactcatccacacccac

SEQ ID NO: 308937 - DNA, 425 bp, Homo sapiens
  chr7:157890859-157891284
  hypo
tcaagacccagcgtggggcagcctctgcctggccaggactggggacctcggagaagcgctggacgcagcaagaatcaggcttcagctccgcaatgtgggcaggggacccgcaaaggatcctgcgggtgaggccaccgggggggctccctggggaggaggtggagaggtccagattcccgaaggctccgagggacgggcggcgggactcaggtttgactctgtaggaaagagggggccgccagtgtcctaaggcgggagatgcccgagggtgacgcttacccaggactgagcctggcaaagcccagccctgctcccggaatgcggagaagccgtccgtgctcagaatccgtcttccgacagcgaaggcggtggccaggagggccaggggcagggagcaggcacgggcgaggcccagctgctctgtg

SEQ ID NO: 308938 - DNA, 119 bp, Homo sapiens; identical to SEQ ID NO: 212054
  chr7:157891519-157891638
  hypo

SEQ ID NO: 308939 - DNA, 50 bp, Homo sapiens; identical to SEQ ID NO: 258754
  chr7:157903545-157903595
  hypo

SEQ ID NO: 308940 - DNA, 104 bp, Homo sapiens; identical to SEQ ID NO: 258755
  chr7:157903815-157903919
  hypo

SEQ ID NO: 308941 - DNA, 210 bp, Homo sapiens; identical to SEQ ID NO: 212055
  chr7:157916055-157916265
  hypo

SEQ ID NO: 308942 - DNA, 245 bp, Homo sapiens; identical to SEQ ID NO: 212056
  chr7:157916514-157916759
  hypo

SEQ ID NO: 308943 - DNA, 282 bp, Homo sapiens; identical to SEQ ID NO: 212057
  chr7:157919944-157920226
  hypo

SEQ ID NO: 308944 - DNA, 256 bp, Homo sapiens; identical to SEQ ID NO: 258759
  chr7:157929559-157929815
  hypo

SEQ ID NO: 308945 - DNA, 112 bp, Homo sapiens
  chr7:157931998-157932110
  hypo
agtgaagagcacggcgtctgaaatttaaaatttatgtccattacgggtggacataacggaagaaacggtttgtgaatctgaagacagatcatagaagcgatcatcgttggaa

SEQ ID NO: 308946 - DNA, 114 bp, Homo sapiens; identical to SEQ ID NO: 258761
  chr7:157934029-157934143
  hypo

SEQ ID NO: 308947 - DNA, 58 bp, Homo sapiens; identical to SEQ ID NO: 212058
  chr7:157934535-157934593
  hypo

SEQ ID NO: 308948 - DNA, 113 bp, Homo sapiens; identical to SEQ ID NO: 212059
  chr7:157934659-157934772
  hypo

SEQ ID NO: 308949 - DNA, 117 bp, Homo sapiens; identical to SEQ ID NO: 258763
  chr7:157935699-157935816
  hypo

SEQ ID NO: 308950 - DNA, 282 bp, Homo sapiens; identical to SEQ ID NO: 258764
  chr7:157936031-157936313
  hypo

SEQ ID NO: 308951 - DNA, 296 bp, Homo sapiens; identical to SEQ ID NO: 212060
  chr7:157949122-157949418
  hypo

SEQ ID NO: 308952 - DNA, 70 bp, Homo sapiens; identical to SEQ ID NO: 258766
  chr7:157957666-157957736
  hypo

SEQ ID NO: 308953 - DNA, 252 bp, Homo sapiens; identical to SEQ ID NO: 258767
  chr7:157958023-157958275
  hypo

SEQ ID NO: 308954 - DNA, 134 bp, Homo sapiens; identical to SEQ ID NO: 258769
  chr7:157959397-157959531
  hypo

SEQ ID NO: 308955 - DNA, 146 bp, Homo sapiens; identical to SEQ ID NO: 212061
  chr7:157959848-157959994
  hypo

SEQ ID NO: 308956 - DNA, 129 bp, Homo sapiens; identical to SEQ ID NO: 258771
  chr7:157967881-157968010
  hypo

SEQ ID NO: 308957 - DNA, 55 bp, Homo sapiens; identical to SEQ ID NO: 258772
  chr7:157980855-157980910
  hypo

SEQ ID NO: 308958 - DNA, 151 bp, Homo sapiens; identical to SEQ ID NO: 212062
  chr7:157981292-157981443
  hypo

SEQ ID NO: 308959 - DNA, 122 bp, Homo sapiens; identical to SEQ ID NO: 212063
  chr7:157987148-157987270
  hypo

SEQ ID NO: 308960 - DNA, 404 bp, Homo sapiens; identical to SEQ ID NO: 212064
  chr7:158037726-158038130
  hypo

SEQ ID NO: 308961 - DNA, 36 bp, Homo sapiens; identical to SEQ ID NO: 212065
  chr7:158039728-158039764
  hypo

SEQ ID NO: 308962 - DNA, 58 bp, Homo sapiens; identical to SEQ ID NO: 212066
  chr7:158039794-158039852
  hypo

SEQ ID NO: 308963 - DNA, 168 bp, Homo sapiens; identical to SEQ ID NO: 212067
  chr7:158039882-158040050
  hypo

SEQ ID NO: 308964 - DNA, 34 bp, Homo sapiens; identical to SEQ ID NO: 212068
  chr7:158040316-158040350
  hypo

SEQ ID NO: 308965 - DNA, 290 bp, Homo sapiens; identical to SEQ ID NO: 258778
  chr7:158044818-158045108
  hypo

SEQ ID NO: 308966 - DNA, 127 bp, Homo sapiens; identical to SEQ ID NO: 258780
  chr7:158060880-158061007
  hypo

SEQ ID NO: 308967 - DNA, 499 bp, Homo sapiens; identical to SEQ ID NO: 258781
  chr7:158061260-158061759
  hypo

SEQ ID NO: 308968 - DNA, 783 bp, Homo sapiens
  chr7:158066166-158066949
  hypo
ggcacagggggagccgcaggcacagggggagccgcagacagacatgggaggagccgcagacacggggagccgcagacacagggggagccgcaggcacagggggagccgcagacagacatgggaggagccgcagacacggggagccgcaggcatgggggagccgcagacagacatgggaggagccgcagacacgggaggagccgcagacacagggagccgcagacacagggggagctgcagacacaggaggagacacacaaggagccgcagacacagggggagccacagacagacatgggaggagccgcagacacggggagccgcagacacagggggagccgcaggcatgggggagccgcagacacagggggagccgcagacacaggaggagacacacgaggagccgcagacgcaggaggagccgcagacagacgcgggaggagccgcagacacagggggagccgcagacacagggggagctgcagacagacatgggaggagccgcagacacagggagccgcagacacagggagccgcagacacagggggagccgcagacacaggaggagacacacgaggagccgcaggcacagggggagccgcagacacagggggagctgcagacagacatgggaggagccgcagacacggggagccgcagacacagggagccgcagacacagggggagccgcagacacaggaggagacacacgaggagccgcagacacagggggagccgcagacagacatgggaggagccacagacacgggagccgcagaca

SEQ ID NO: 308969 - DNA, 233 bp, Homo sapiens
  chr7:158067069-158067302
  hypo
ggggagccgcaggcacagggggagccacaggcacagggggagccgcagacagacatgggaggagccgcagacacggggagccgcagacacaggaggagacacacgaggagccgcaggcacagggggagccacaggcacgggggagccgcaggcacagggggagccacagacaccctcacactccgggatctagcgtgtgtggacgagcccgaggcgctcggcccagcttgtca

SEQ ID NO: 308970 - DNA, 305 bp, Homo sapiens; identical to SEQ ID NO: 212069
  chr7:158072900-158073205
  hypo

SEQ ID NO: 308971 - DNA, 411 bp, Homo sapiens
  chr7:158075396-158075807
  hypo
ggctgatccctcctcgtgctcccacatgcagcagccagacacagacggctcatccctcctcgtgctcccacacacagcagccggacagacagctgatccctcctcgtgctcccacacacacagcagccggacacagatggcttgtccctccctgtgctcccacacacagcagcgggacacagagggctcatccctcctcatgctcccacacagcagcgggatatagacggtggtccctcctcgtgctcccacgcagcagcaggacatagacggctcgtccctcctcatgctcccacacgcacagcagccggacacagatggctgatccctcctcgtgctcccacatgcaggggcctcagctctcaggaggaaaacactcttgagagaagagaactgaggaaaggtagcgct

SEQ ID NO: 308972 - DNA, 199 bp, Homo sapiens
  chr7:158075851-158076050
  hypo
acttcttgttacgttcatgccatgcttttgtattcgccacaataagaaaaccaagcaagtacttcagtcaggcggcagccgtcacaggtaaacaaactcctatgtgggaaatgaaccgaggctgtgagcctcaggcagctccccagacccccaagaggagagggagcagtgaccgagcaggccccgtctgcagttcaca

SEQ ID NO: 308973 - DNA, 175 bp, Homo sapiens; identical to SEQ ID NO: 258785
  chr7:158087289-158087464
  hypo

SEQ ID NO: 308974 - DNA, 153 bp, Homo sapiens; identical to SEQ ID NO: 258786
  chr7:158087693-158087846
  hypo

SEQ ID NO: 308975 - DNA, 196 bp, Homo sapiens; identical to SEQ ID NO: 212070
  chr7:158103401-158103597
  hypo

SEQ ID NO: 308976 - DNA, 104 bp, Homo sapiens; identical to SEQ ID NO: 258788
  chr7:158107194-158107298
  hypo

SEQ ID NO: 308977 - DNA, 96 bp, Homo sapiens; identical to SEQ ID NO: 212071
  chr7:158109478-158109574
  hypo

SEQ ID NO: 308978 - DNA, 89 bp, Homo sapiens; identical to SEQ ID NO: 212072
  chr7:158113046-158113135
  hypo

SEQ ID NO: 308979 - DNA, 94 bp, Homo sapiens; identical to SEQ ID NO: 212073
  chr7:158113271-158113365
  hypo

SEQ ID NO: 308980 - DNA, 355 bp, Homo sapiens; identical to SEQ ID NO: 258792
  chr7:158136091-158136446
  hypo

SEQ ID NO: 308981 - DNA, 151 bp, Homo sapiens; identical to SEQ ID NO: 258793
  chr7:158185087-158185238
  hypo

SEQ ID NO: 308982 - DNA, 41 bp, Homo sapiens
  chr7:158188491-158188532
  hypo
gcgaggggcgaggggcgagggctcccggcctgcgccgcctt

SEQ ID NO: 308983 - DNA, 54 bp, Homo sapiens
  chr7:158188577-158188631
  hypo
agcctggagggggagctcggagcctgcagcaggtgaggtcgggctacagacttc

SEQ ID NO: 308984 - DNA, 140 bp, Homo sapiens; identical to SEQ ID NO: 258795
  chr7:158198531-158198671
  hypo

SEQ ID NO: 308985 - DNA, 143 bp, Homo sapiens; identical to SEQ ID NO: 258796
  chr7:158198933-158199076
  hypo

SEQ ID NO: 308986 - DNA, 331 bp, Homo sapiens; identical to SEQ ID NO: 212074
  chr7:158216892-158217223
  hypo

SEQ ID NO: 308987 - DNA, 167 bp, Homo sapiens; identical to SEQ ID NO: 212075
  chr7:158235876-158236043
  hypo

SEQ ID NO: 308988 - DNA, 482 bp, Homo sapiens; identical to SEQ ID NO: 258799
  chr7:158240243-158240725
  hypo

SEQ ID NO: 308989 - DNA, 409 bp, Homo sapiens; identical to SEQ ID NO: 258800
  chr7:158267276-158267685
  hypo

SEQ ID NO: 308990 - DNA, 130 bp, Homo sapiens; identical to SEQ ID NO: 258801
  chr7:158267715-158267845
  hypo

SEQ ID NO: 308991 - DNA, 498 bp, Homo sapiens; identical to SEQ ID NO: 258802
  chr7:158270797-158271295
  hypo

SEQ ID NO: 308992 - DNA, 320 bp, Homo sapiens
  chr7:158277360-158277680
  hypo
attttgtataaatgaaatcatgtcccccgtgacttttgtgactcggtttcttcctctgagcacggcgattcccaggttcctccgcgtcagtgtgccggtgcttcctgcctccctttccacggccggacagcactccaccatcacagacgtcctcggttcctggtggttttctgccctcttcagtggagaaagggcttggaatagaagaagctgcagttggagacgtgaaggctgtggctgtgacgccgccacggggagtcggctgcaggaggagcctccccaccatcagcgtggccggcggagtgagccacgagcgcaag

SEQ ID NO: 308993 - DNA, 275 bp, Homo sapiens; identical to SEQ ID NO: 212079
  chr7:158277727-158278002
  hypo

SEQ ID NO: 308994 - DNA, 756 bp, Homo sapiens; identical to SEQ ID NO: 258804
  chr7:158281108-158281864
  hypo

SEQ ID NO: 308995 - DNA, 514 bp, Homo sapiens
  chr7:158282327-158282841
  hypo
cagctccaggccagcggcggggctcaccaggctgggcgctgcgcacggcgggcaggagaggggcagaccagggcgcagcagccaggaccccacactcaccgttcacacaggcctcggacgctccgcagaggccctcctcgagcaggcagcctgcggggaaacagagaagagacgcggtcagctggaggggaggaggggggtgcccccgaggctgccttcctggccccctggtgaatttcagagaaaccgccggtcaagcaggctcctccgacccggcttttccgagatggggccgattattctgaagccagaacgctgcgcccctgacccggccacgtgcgaggcctcctggcctagtcccggagcccagctctcacctggaccaggcccacagctctgggctgagggtcaagccggcgtcatcacaggagactctctggccgcgggagcagcagcggggccggggcctccccttgaggcctcccctgggcccggcgcctcccctggaccgggt

SEQ ID NO: 308996 - DNA, 315 bp, Homo sapiens; identical to SEQ ID NO: 212082
  chr7:158282873-158283188
  hypo

SEQ ID NO: 308997 - DNA, 224 bp, Homo sapiens; identical to SEQ ID NO: 212083
  chr7:158283236-158283460
  hypo

SEQ ID NO: 308998 - DNA, 117 bp, Homo sapiens; identical to SEQ ID NO: 258807
  chr7:158307739-158307856
  hypo

SEQ ID NO: 308999 - DNA, 141 bp, Homo sapiens; identical to SEQ ID NO: 258808
  chr7:158315944-158316085
  hypo

SEQ ID NO: 309000 - DNA, 109 bp, Homo sapiens; identical to SEQ ID NO: 258809
  chr7:158330971-158331080
  hypo

SEQ ID NO: 309001 - DNA, 231 bp, Homo sapiens; identical to SEQ ID NO: 212084
  chr7:158331366-158331597
  hypo

SEQ ID NO: 309002 - DNA, 89 bp, Homo sapiens; identical to SEQ ID NO: 212085
  chr7:158349367-158349456
  hypo

SEQ ID NO: 309003 - DNA, 382 bp, Homo sapiens; identical to SEQ ID NO: 212086
  chr7:158349747-158350129
  hypo

SEQ ID NO: 309004 - DNA, 111 bp, Homo sapiens; identical to SEQ ID NO: 285600
  chr7:158379699-158379810
  hypo

SEQ ID NO: 309005 - DNA, 37 bp, Homo sapiens; identical to SEQ ID NO: 258812
  chr7:158414042-158414079
  hypo

SEQ ID NO: 309006 - DNA, 205 bp, Homo sapiens; identical to SEQ ID NO: 212087
  chr7:158451038-158451243
  hypo

SEQ ID NO: 309007 - DNA, 110 bp, Homo sapiens; identical to SEQ ID NO: 258814
  chr7:158516191-158516301
  hypo

SEQ ID NO: 309008 - DNA, 40 bp, Homo sapiens; identical to SEQ ID NO: 212088
  chr7:158550059-158550099
  hypo

SEQ ID NO: 309009 - DNA, 36 bp, Homo sapiens; identical to SEQ ID NO: 212089
  chr7:158550339-158550375
  hypo

SEQ ID NO: 309010 - DNA, 381 bp, Homo sapiens; identical to SEQ ID NO: 258816
  chr7:158552733-158553114
  hypo

SEQ ID NO: 309011 - DNA, 163 bp, Homo sapiens; identical to SEQ ID NO: 212090
  chr7:158556265-158556428
  hypo

SEQ ID NO: 309012 - DNA, 236 bp, Homo sapiens; identical to SEQ ID NO: 212091
  chr7:158564138-158564374
  hypo

SEQ ID NO: 309013 - DNA, 113 bp, Homo sapiens; identical to SEQ ID NO: 212092
  chr7:158564404-158564517
  hypo

SEQ ID NO: 309014 - DNA, 218 bp, Homo sapiens; identical to SEQ ID NO: 212093
  chr7:158570554-158570772
  hypo

SEQ ID NO: 309015 - DNA, 258 bp, Homo sapiens; identical to SEQ ID NO: 258820
  chr7:158583817-158584075
  hypo

SEQ ID NO: 309016 - DNA, 83 bp, Homo sapiens; identical to SEQ ID NO: 258822
  chr7:158598728-158598811
  hypo

SEQ ID NO: 309017 - DNA, 43 bp, Homo sapiens; identical to SEQ ID NO: 258823
  chr7:158598841-158598884
  hypo

SEQ ID NO: 309018 - DNA, 34 bp, Homo sapiens; identical to SEQ ID NO: 212094
  chr7:158623834-158623868
  hypo

SEQ ID NO: 309019 - DNA, 33 bp, Homo sapiens; identical to SEQ ID NO: 212095
  chr7:158624108-158624141
  hypo

SEQ ID NO: 309020 - DNA, 49 bp, Homo sapiens; identical to SEQ ID NO: 258826
  chr7:158659174-158659223
  hypo

SEQ ID NO: 309021 - DNA, 186 bp, Homo sapiens
  chr7:158741267-158741453
  hypo
ctcagtgaaggtggcgcgggggatggctgagtggcagttgtgtctgcagggcagagtcatatcggaatgtacaagcgcaactggatatgcagacttttattcctggaggctacagtctggtccctcaatgaccccacaccccccacaattatttacaaaattccatttgacgtaaactggagtcaa

SEQ ID NO: 309022 - DNA, 52 bp, Homo sapiens; identical to SEQ ID NO: 212096
  chr7:158766776-158766828
  hypo

SEQ ID NO: 309023 - DNA, 199 bp, Homo sapiens; identical to SEQ ID NO: 212097
  chr7:158767105-158767304
  hypo

SEQ ID NO: 309024 - DNA, 196 bp, Homo sapiens; identical to SEQ ID NO: 212098
  chr7:158792183-158792379
  hypo

SEQ ID NO: 309025 - DNA, 257 bp, Homo sapiens; identical to SEQ ID NO: 258830
  chr7:158817162-158817419
  hypo

SEQ ID NO: 309026 - DNA, 186 bp, Homo sapiens; identical to SEQ ID NO: 258831
  chr7:158820419-158820605
  hypo

SEQ ID NO: 309027 - DNA, 222 bp, Homo sapiens; identical to SEQ ID NO: 258832
  chr7:158856804-158857026
  hypo

SEQ ID NO: 309028 - DNA, 158 bp, Homo sapiens; identical to SEQ ID NO: 258833
  chr7:158881371-158881529
  hypo

SEQ ID NO: 309029 - DNA, 42 bp, Homo sapiens; identical to SEQ ID NO: 258834
  chr7:158890572-158890614
  hypo

SEQ ID NO: 309030 - DNA, 179 bp, Homo sapiens; identical to SEQ ID NO: 258835
  chr7:158933386-158933565
  hypo

SEQ ID NO: 309031 - DNA, 114 bp, Homo sapiens; identical to SEQ ID NO: 258836
  chr7:158940025-158940139
  hypo

SEQ ID NO: 309032 - DNA, 42 bp, Homo sapiens; identical to SEQ ID NO: 258837
  chr7:158945568-158945610
  hypo

SEQ ID NO: 309033 - DNA, 187 bp, Homo sapiens; identical to SEQ ID NO: 258838
  chr7:158951178-158951365
  hypo

SEQ ID NO: 309034 - DNA, 864 bp, Homo sapiens
  chr7:158962524-158963388
  hypo
ttgtcagtgggtgcagtgatcgagggcataaccgggctccatcccaatgctgcctcatccctgcagtcaccccgcacaggtgacgcaggcttcagagggccccggacctcgcctgagggtgaagaaaatcacggcatcactgacaaggccgccatgaggatcgcgtgagcagaaacacgatgatcatggctcactgatggggcagctctgaggatcgcgtgagcagaaacacacagataatcacagaatcactgacggggcagctctgaggatcacgtgagcagaaacacacagataatcacagaatcactgacggggctgctgtgaggatcccgtgagcagaaacatggatgatcacggctcactgacggggcagctctgaggatcgcgtgagcagaaacacacagataatcacagaatcactgacggggccgctgtgaggatcccgtgagcagaaacatggatgatcacggctcactgacggggcagctctgaggatcacgtgagcagaaacacacagataatcacagaatcactgacgaggcctctgtgaggatcccgtgagcagaaacatggatgatcgcggcctgactggcggggctgctgtgaggatcatatgaccagaaacacgtggaagatcatggctcactgacggggctgctgtgactattgcgtgagcagaaacacgatgatcatggctcactgaatgggcagctctgaggatcgcgtgagcagaaacatggatgatcatggctcactgacagggaggtctgaggattgcgtgagcagaaacacagataatcacagaatcactgagggggccactgtgaggatcgcatgagcagaaacacacagatgatcacg

SEQ ID NO: 309035 - DNA, 106 bp, Homo sapiens; identical to SEQ ID NO: 258840
  chr8:287940-288046
  hypo

SEQ ID NO: 309036 - DNA, 93 bp, Homo sapiens; identical to SEQ ID NO: 285610
  chr8:495072-495165
  hypo

SEQ ID NO: 309037 - DNA, 44 bp, Homo sapiens; identical to SEQ ID NO: 285611
  chr8:495479-495523
  hypo

SEQ ID NO: 309038 - DNA, 68 bp, Homo sapiens; identical to SEQ ID NO: 201278
  chr8:495635-495703
  hypo

SEQ ID NO: 309039 - DNA, 101 bp, Homo sapiens; identical to SEQ ID NO: 258841
  chr8:566300-566401
  hypo

SEQ ID NO: 309040 - DNA, 33 bp, Homo sapiens
  chr8:566474-566507
  hypo
ccagacaggtacggccagagcactgctcccagg

SEQ ID NO: 309041 - DNA, 274 bp, Homo sapiens; identical to SEQ ID NO: 212100
  chr8:591683-591957
  hypo

SEQ ID NO: 309042 - DNA, 143 bp, Homo sapiens; identical to SEQ ID NO: 258844
  chr8:592172-592315
  hypo

SEQ ID NO: 309043 - DNA, 38 bp, Homo sapiens; identical to SEQ ID NO: 212101
  chr8:593299-593337
  hypo

SEQ ID NO: 309044 - DNA, 284 bp, Homo sapiens; identical to SEQ ID NO: 212102
  chr8:636732-637016
  hypo

SEQ ID NO: 309045 - DNA, 387 bp, Homo sapiens
  chr8:644802-645189
  hypo
tcaggtgcaaggaagagaccggttacactttatggggtgggcggcagcgagagttccccgtcccatcatctcctccgccggacgcacagagaatgcagcgtctgtgagcacagctgccctggacctggcatctaagagtcagggtcagagaggggcagtcagaaacccacctccctgctggacaagtcacaagcaccagcatccctcgggaaaggcagaggggcgtggtggctcggagccctagggtgataggcggttggctgccctgtgggtttcaccagtgtcacctcttcgcaggtgtcattgacctggctcctttctccccgtcaggttcccctcagctcctctgggctgctcctggcagccgacagctatggaggggctcac

SEQ ID NO: 309046 - DNA, 285 bp, Homo sapiens; identical to SEQ ID NO: 258848
  chr8:651179-651464
  hypo

SEQ ID NO: 309047 - DNA, 451 bp, Homo sapiens; identical to SEQ ID NO: 258849
  chr8:667715-668166
  hypo

SEQ ID NO: 309048 - DNA, 150 bp, Homo sapiens; identical to SEQ ID NO: 258850
  chr8:716398-716548
  hypo

SEQ ID NO: 309049 - DNA, 169 bp, Homo sapiens; identical to SEQ ID NO: 223302
  chr8:798795-798964
  hypo

SEQ ID NO: 309050 - DNA, 85 bp, Homo sapiens; identical to SEQ ID NO: 212104
  chr8:833589-833674
  hypo

SEQ ID NO: 309051 - DNA, 324 bp, Homo sapiens; identical to SEQ ID NO: 212105
  chr8:893356-893680
  hypo

SEQ ID NO: 309052 - DNA, 53 bp, Homo sapiens; identical to SEQ ID NO: 212106
  chr8:923935-923988
  hypo

SEQ ID NO: 309053 - DNA, 390 bp, Homo sapiens
  chr8:972315-972705
  hypo
tccctgggagtggacggtcccgtgccgaggtagacactctaaacaccacccaccctccctgggagtggacagtcccgtgccaaggtagacgctccaaacagcacccaccctccctgggagtggacggtcccgtgccaaggtagacactccagccgccatccatcctccctgggattggacggtcccatgccgaggtagacactccagccgccacccatcctccctgggagtggacggtcacgtgccgaggtagacactccagccgccacccatcctccctgggagtggacactcccgtgcttaggtagatgctccaaacagcacccaccctccctgggagtggacggtcccgtgccgaggtagacgctccaaacagcacccaccctccct

SEQ ID NO: 309054 - DNA, 231 bp, Homo sapiens
  chr8:976028-976259
  hypo
cggcccgtccaggccgcctccagcaccaccatgcacttcgtcccggcttccaggagccctggcagaaacggagctcagctgccagtctggcgtcctcgaacatgctgcgagtggcgttggtgcccatggctgtgaaaatggaatcgttgtcacctcatccaggacgtgcctcacgatcgtgctgtctcgttggtggagacgtttgccgtcttccgaagcttctctgcacca

SEQ ID NO: 309055 - DNA, 96 bp, Homo sapiens; identical to SEQ ID NO: 258856
  chr8:977339-977435
  hypo

SEQ ID NO: 309056 - DNA, 76 bp, Homo sapiens; identical to SEQ ID NO: 258857
  chr8:978468-978544
  hypo

SEQ ID NO: 309057 - DNA, 316 bp, Homo sapiens; identical to SEQ ID NO: 258858
  chr8:1026277-1026593
  hypo

SEQ ID NO: 309058 - DNA, 268 bp, Homo sapiens; identical to SEQ ID NO: 212107
  chr8:1047978-1048246
  hypo

SEQ ID NO: 309059 - DNA, 74 bp, Homo sapiens; identical to SEQ ID NO: 212108
  chr8:1048772-1048846
  hypo

SEQ ID NO: 309060 - DNA, 231 bp, Homo sapiens; identical to SEQ ID NO: 258862
  chr8:1078116-1078347
  hypo

SEQ ID NO: 309061 - DNA, 147 bp, Homo sapiens; identical to SEQ ID NO: 258863
  chr8:1104691-1104838
  hypo

SEQ ID NO: 309062 - DNA, 69 bp, Homo sapiens; identical to SEQ ID NO: 258864
  chr8:1105155-1105224
  hypo

SEQ ID NO: 309063 - DNA, 43 bp, Homo sapiens; identical to SEQ ID NO: 258865
  chr8:1108701-1108744
  hypo

SEQ ID NO: 309064 - DNA, 458 bp, Homo sapiens; identical to SEQ ID NO: 212109
  chr8:1132631-1133089
  hypo

SEQ ID NO: 309065 - DNA, 289 bp, Homo sapiens; identical to SEQ ID NO: 212110
  chr8:1150805-1151094
  hypo

SEQ ID NO: 309066 - DNA, 224 bp, Homo sapiens; identical to SEQ ID NO: 212111
  chr8:1151189-1151413
  hypo

SEQ ID NO: 309067 - DNA, 150 bp, Homo sapiens; identical to SEQ ID NO: 258868
  chr8:1207574-1207724
  hypo

SEQ ID NO: 309068 - DNA, 226 bp, Homo sapiens; identical to SEQ ID NO: 258870
  chr8:1251026-1251252
  hypo

SEQ ID NO: 309069 - DNA, 223 bp, Homo sapiens
  chr8:1303163-1303386
  hypo
cggatgagggtggaaagtcacggatgatgctgtggatgagggtggaaagtcacggatgatgctgtggatgagggtggaaagtcacggatgattctgtggatgaaggtggaaagtcacggaaatgtgcgttgtatgttttaagtggcaaagccgagcagaaagcaccgtgaaagcggtgacactgcatgcccgtgacagtggtggcacccgcgtgctggcgtga

SEQ ID NO: 309070 - DNA, 135 bp, Homo sapiens; identical to SEQ ID NO: 212112
  chr8:1308186-1308321
  hypo

SEQ ID NO: 309071 - DNA, 128 bp, Homo sapiens
  chr8:1308368-1308496
  hypo
gcggggcttttccggggcggggcttctccggggcggggcttctccggggcggggcttctccggggcggggcttctctggggcggggcttctccggggcggggcttctccggggcggggcttctccagg

SEQ ID NO: 309072 - DNA, 185 bp, Homo sapiens; identical to SEQ ID NO: 258875
  chr8:1324842-1325027
  hypo

SEQ ID NO: 309073 - DNA, 60 bp, Homo sapiens
  chr8:1326031-1326091
  hypo
ctgtgtctcttctgcgaagctgcacccacctcgtctgtctgggggtggcagccccaaatc

SEQ ID NO: 309074 - DNA, 154 bp, Homo sapiens
  chr8:1326121-1326275
  hypo
acgcagcctcccccagggcctttggctgccgtacaccctcaggcttggtccctctcagcagccactgaatcagacagctgccccaagacctgacttgcactgtactcctgctgaagtgacccgtctcaagatatctggacgcaggtgcacacct

SEQ ID NO: 309075 - DNA, 130 bp, Homo sapiens; identical to SEQ ID NO: 258877
  chr8:1326603-1326733
  hypo

SEQ ID NO: 309076 - DNA, 69 bp, Homo sapiens
  chr8:1379943-1380012
  hypo
gtaaaatgaagacactgatgcgtgcatgacagggactcttctgatgcctccgtgtcgatggccaccaag

SEQ ID NO: 309077 - DNA, 72 bp, Homo sapiens
  chr8:1380172-1380244
  hypo
catgccagccagcaccgctacggctgccatccatcggggctgaaccctgccggcacccagcaccccatgcca

SEQ ID NO: 309078 - DNA, 150 bp, Homo sapiens; identical to SEQ ID NO: 258879
  chr8:1411609-1411759
  hypo

SEQ ID NO: 309079 - DNA, 188 bp, Homo sapiens
  chr8:1443511-1443699
  hypo
gaggcagccgaggacgtttactgtcccgtgttacccggccacacaccccagggccctttctcttccccttctgctgtgctgctctgagccggagactgagccggccagggcagccgaggccaagagtggcgctgctgaggggccgccatcatgaggggtcagaatgtggtgggtgagccaggactgcg

SEQ ID NO: 309080 - DNA, 154 bp, Homo sapiens
  chr8:1443754-1443908
  hypo
attgaaacgtttgcctctgcacctactgggaagcctcttcctggaggaccctggctttgatctgtggttgtgctgacgtggacatctttgcctcgcaggatgcagattgcagacgctcatcgtctcgcaggcagctccagctcgagtggtggcc

SEQ ID NO: 309081 - DNA, 145 bp, Homo sapiens
  chr8:1471336-1471481
  hypo
cccctctggtggtccgggcccatggtcctgccaggggcccacagcatgaagatgtagctccctcacacacacgttgaatttggatttgcttgtctggcttctgctggggcgcaggatgtggggatggaaggaccaagacacacga

SEQ ID NO: 309082 - DNA, 70 bp, Homo sapiens
  chr8:1471664-1471734
  hypo
agctgtgccttagacgggggggaaggactccctgccccaggccggcaccgcacagtccctgggtagaaaa

SEQ ID NO: 309083 - DNA, 298 bp, Homo sapiens; identical to SEQ ID NO: 258882
  chr8:1475085-1475383
  hypo

SEQ ID NO: 309084 - DNA, 213 bp, Homo sapiens
  chr8:1501387-1501600
  hypo
gcagcctcccagtctcccaccgcgtcctgcgctcctggttttctcctcttctagtgtcttccccacctggcgtcgcccggccgcaaccctggccctcctggggaagaggttcggaccctactctttatttgacatgaagaggttcggactcccagttttattcggcatgttcacgggcagcagccccattttgtttggcgtgttcacgggcag

SEQ ID NO: 309085 - DNA, 263 bp, Homo sapiens
  chr8:1578880-1579143
  hypo
aagtttgcccttcatgtttaacattcaattttttctcaagcacaggaagggaattaaaaatctaactgaagtcttgtgagaggtgcttatgtccatgccgtttcctccttggaacctcagtagctgcactctgcttgggtttcctgcagctcatgtcccgagggtctcggcgggaggtccgggtgtcccgagggtctgggcgggaggtccgggtgtcccgagggtctcggcgggaggtcccagtgtcccgagggtctcggcgg

SEQ ID NO: 309086 - DNA, 79 bp, Homo sapiens; identical to SEQ ID NO: 212118
  chr8:1579182-1579261
  hypo

SEQ ID NO: 309087 - DNA, 209 bp, Homo sapiens; identical to SEQ ID NO: 258885
  chr8:1581635-1581844
  hypo

SEQ ID NO: 309088 - DNA, 243 bp, Homo sapiens
  chr8:1615950-1616193
  hypo
gatgacatgacctgcgtagaaatgacgccatgcctgtgcgctgtcctgcggggacacaccttgcctagctgtgtctctgctgctgggtttgctggtatttttaaatgatgccatgcctgtgcgctgtcctgcggggacacaccttgcctaggtgtgtctccgctgctggatttgttggtatttttaaatgacgccacacctgcgcactgtcctgaggggacgcacgttgcctagctgtgtctc

SEQ ID NO: 309089 - DNA, 121 bp, Homo sapiens; identical to SEQ ID NO: 258887
  chr8:1616694-1616815
  hypo

SEQ ID NO: 309090 - DNA, 284 bp, Homo sapiens; identical to SEQ ID NO: 258888
  chr8:1721745-1722029
  hypo

SEQ ID NO: 309091 - DNA, 106 bp, Homo sapiens; identical to SEQ ID NO: 258889
  chr8:1723929-1724035
  hypo

SEQ ID NO: 309092 - DNA, 119 bp, Homo sapiens; identical to SEQ ID NO: 258890
  chr8:1724065-1724184
  hypo

SEQ ID NO: 309093 - DNA, 226 bp, Homo sapiens; identical to SEQ ID NO: 258891
  chr8:1725081-1725307
  hypo

SEQ ID NO: 309094 - DNA, 44 bp, Homo sapiens; identical to SEQ ID NO: 258892
  chr8:1759476-1759520
  hypo

SEQ ID NO: 309095 - DNA, 235 bp, Homo sapiens; identical to SEQ ID NO: 212119
  chr8:1777141-1777376
  hypo

SEQ ID NO: 309096 - DNA, 33 bp, Homo sapiens; identical to SEQ ID NO: 258894
  chr8:1777967-1778000
  hypo

SEQ ID NO: 309097 - DNA, 88 bp, Homo sapiens; identical to SEQ ID NO: 258895
  chr8:1783965-1784053
  hypo

SEQ ID NO: 309098 - DNA, 382 bp, Homo sapiens; identical to SEQ ID NO: 258896
  chr8:1791891-1792273
  hypo

SEQ ID NO: 309099 - DNA, 307 bp, Homo sapiens; identical to SEQ ID NO: 212120
  chr8:1796262-1796569
  hypo

SEQ ID NO: 309100 - DNA, 162 bp, Homo sapiens; identical to SEQ ID NO: 212121
  chr8:1797380-1797542
  hypo

SEQ ID NO: 309101 - DNA, 522 bp, Homo sapiens; identical to SEQ ID NO: 258899
  chr8:1797602-1798124
  hypo

SEQ ID NO: 309102 - DNA, 42 bp, Homo sapiens; identical to SEQ ID NO: 258900
  chr8:1798701-1798743
  hypo

SEQ ID NO: 309103 - DNA, 201 bp, Homo sapiens; identical to SEQ ID NO: 258901
  chr8:1801273-1801474
  hypo

SEQ ID NO: 309104 - DNA, 50 bp, Homo sapiens; identical to SEQ ID NO: 258902
  chr8:1805144-1805194
  hypo

SEQ ID NO: 309105 - DNA, 281 bp, Homo sapiens; identical to SEQ ID NO: 258903
  chr8:1807458-1807739
  hypo

SEQ ID NO: 309106 - DNA, 75 bp, Homo sapiens; identical to SEQ ID NO: 258904
  chr8:1814165-1814240
  hypo

SEQ ID NO: 309107 - DNA, 189 bp, Homo sapiens; identical to SEQ ID NO: 258905
  chr8:1821224-1821413
  hypo

SEQ ID NO: 309108 - DNA, 54 bp, Homo sapiens; identical to SEQ ID NO: 212123
  chr8:1826001-1826055
  hypo

SEQ ID NO: 309109 - DNA, 175 bp, Homo sapiens; identical to SEQ ID NO: 258907
  chr8:1830207-1830382
  hypo

SEQ ID NO: 309110 - DNA, 300 bp, Homo sapiens; identical to SEQ ID NO: 212124
  chr8:1830728-1831028
  hypo

SEQ ID NO: 309111 - DNA, 46 bp, Homo sapiens; identical to SEQ ID NO: 258909
  chr8:1850870-1850916
  hypo

SEQ ID NO: 309112 - DNA, 727 bp, Homo sapiens; identical to SEQ ID NO: 258910
  chr8:1877722-1878449
  hypo

SEQ ID NO: 309113 - DNA, 109 bp, Homo sapiens; identical to SEQ ID NO: 258911
  chr8:1879662-1879771
  hypo

SEQ ID NO: 309114 - DNA, 346 bp, Homo sapiens; identical to SEQ ID NO: 258912
  chr8:1885043-1885389
  hypo

SEQ ID NO: 309115 - DNA, 151 bp, Homo sapiens; identical to SEQ ID NO: 258913
  chr8:1902126-1902277
  hypo

SEQ ID NO: 309116 - DNA, 33 bp, Homo sapiens; identical to SEQ ID NO: 212126
  chr8:1926963-1926996
  hypo

SEQ ID NO: 309117 - DNA, 283 bp, Homo sapiens; identical to SEQ ID NO: 258915
  chr8:1942393-1942676
  hypo

SEQ ID NO: 309118 - DNA, 91 bp, Homo sapiens; identical to SEQ ID NO: 258916
  chr8:2522805-2522896
  hypo

SEQ ID NO: 309119 - DNA, 32 bp, Homo sapiens; identical to SEQ ID NO: 258917
  chr8:2536389-2536421
  hypo

SEQ ID NO: 309120 - DNA, 38 bp, Homo sapiens; identical to SEQ ID NO: 258918
  chr8:2609653-2609691
  hypo

SEQ ID NO: 309121 - DNA, 187 bp, Homo sapiens; identical to SEQ ID NO: 258919
  chr8:3509584-3509771
  hypo

SEQ ID NO: 309122 - DNA, 48 bp, Homo sapiens; identical to SEQ ID NO: 258920
  chr8:4110697-4110745
  hypo

SEQ ID NO: 309123 - DNA, 42 bp, Homo sapiens; identical to SEQ ID NO: 258921
  chr8:4123574-4123616
  hypo

SEQ ID NO: 309124 - DNA, 31 bp, Homo sapiens; identical to SEQ ID NO: 258922
  chr8:4218294-4218325
  hypo

SEQ ID NO: 309125 - DNA, 42 bp, Homo sapiens; identical to SEQ ID NO: 258923
  chr8:4880493-4880535
  hypo

SEQ ID NO: 309126 - DNA, 253 bp, Homo sapiens; identical to SEQ ID NO: 258924
  chr8:5829440-5829693
  hypo

SEQ ID NO: 309127 - DNA, 134 bp, Homo sapiens; identical to SEQ ID NO: 258925
  chr8:5909951-5910085
  hypo

SEQ ID NO: 309128 - DNA, 42 bp, Homo sapiens; identical to SEQ ID NO: 258926
  chr8:6302322-6302364
  hypo

SEQ ID NO: 309129 - DNA, 376 bp, Homo sapiens; identical to SEQ ID NO: 258927
  chr8:6313799-6314175
  hypo

SEQ ID NO: 309130 - DNA, 270 bp, Homo sapiens; identical to SEQ ID NO: 258928
  chr8:6322707-6322977
  hypo

SEQ ID NO: 309131 - DNA, 272 bp, Homo sapiens; identical to SEQ ID NO: 258929
  chr8:6323187-6323459
  hypo

SEQ ID NO: 309132 - DNA, 70 bp, Homo sapiens; identical to SEQ ID NO: 258930
  chr8:6345659-6345729
  hypo

SEQ ID NO: 309133 - DNA, 38 bp, Homo sapiens; identical to SEQ ID NO: 212127
  chr8:6361545-6361583
  hypo

SEQ ID NO: 309134 - DNA, 169 bp, Homo sapiens; identical to SEQ ID NO: 258932
  chr8:6400935-6401104
  hypo

SEQ ID NO: 309135 - DNA, 341 bp, Homo sapiens; identical to SEQ ID NO: 212128
  chr8:6414547-6414888
  hypo

SEQ ID NO: 309136 - DNA, 188 bp, Homo sapiens
  chr8:6434512-6434700
  hypo
ctgctgcctgctgtgaggaggccccctttgccacggaacctgaaattcctgccactggaattacgctctggacaagcggcaagatactcctttcagtcccagccactgggttcctgctgcacaggaggccagggtgctgtgaacctgctctcagccccgggcaaagggaatctcgttaatccaggtgg

SEQ ID NO: 309137 - DNA, 102 bp, Homo sapiens; identical to SEQ ID NO: 212129
  chr8:6456168-6456270
  hypo

SEQ ID NO: 309138 - DNA, 159 bp, Homo sapiens; identical to SEQ ID NO: 212130
  chr8:6465692-6465851
  hypo

SEQ ID NO: 309139 - DNA, 84 bp, Homo sapiens; identical to SEQ ID NO: 258937
  chr8:6535110-6535194
  hypo

SEQ ID NO: 309140 - DNA, 43 bp, Homo sapiens; identical to SEQ ID NO: 258938
  chr8:6559148-6559191
  hypo

SEQ ID NO: 309141 - DNA, 90 bp, Homo sapiens; identical to SEQ ID NO: 258939
  chr8:6590044-6590134
  hypo

SEQ ID NO: 309142 - DNA, 473 bp, Homo sapiens; identical to SEQ ID NO: 212131
  chr8:6630575-6631048
  hypo

SEQ ID NO: 309143 - DNA, 110 bp, Homo sapiens; identical to SEQ ID NO: 212132
  chr8:6633001-6633111
  hypo

SEQ ID NO: 309144 - DNA, 229 bp, Homo sapiens; identical to SEQ ID NO: 212133
  chr8:6636292-6636521
  hypo

SEQ ID NO: 309145 - DNA, 102 bp, Homo sapiens; identical to SEQ ID NO: 258943
  chr8:6637651-6637753
  hypo

SEQ ID NO: 309146 - DNA, 69 bp, Homo sapiens; identical to SEQ ID NO: 258944
  chr8:6664120-6664189
  hypo

SEQ ID NO: 309147 - DNA, 93 bp, Homo sapiens; identical to SEQ ID NO: 212134
  chr8:6707719-6707812
  hypo

SEQ ID NO: 309148 - DNA, 209 bp, Homo sapiens; identical to SEQ ID NO: 212135
  chr8:6756662-6756871
  hypo

SEQ ID NO: 309149 - DNA, 77 bp, Homo sapiens; identical to SEQ ID NO: 258947
  chr8:8102810-8102887
  hypo

SEQ ID NO: 309150 - DNA, 36 bp, Homo sapiens; identical to SEQ ID NO: 258948
  chr8:8122017-8122053
  hypo

SEQ ID NO: 309151 - DNA, 547 bp, Homo sapiens; identical to SEQ ID NO: 258949
  chr8:8176211-8176758
  hypo

SEQ ID NO: 309152 - DNA, 157 bp, Homo sapiens; identical to SEQ ID NO: 258950
  chr8:8456541-8456698
  hypo

SEQ ID NO: 309153 - DNA, 328 bp, Homo sapiens; identical to SEQ ID NO: 258951
  chr8:8471121-8471449
  hypo

SEQ ID NO: 309154 - DNA, 235 bp, Homo sapiens; identical to SEQ ID NO: 258952
  chr8:8522696-8522931
  hypo

SEQ ID NO: 309155 - DNA, 123 bp, Homo sapiens; identical to SEQ ID NO: 212137
  chr8:8560673-8560796
  hypo

SEQ ID NO: 309156 - DNA, 56 bp, Homo sapiens
  chr8:8561032-8561088
  hypo
tttttgctgaagaatatatggaaagggtggcatttgcgtcacgtggaccagggaca

SEQ ID NO: 309157 - DNA, 39 bp, Homo sapiens; identical to SEQ ID NO: 212138
  chr8:8634037-8634076
  hypo

SEQ ID NO: 309158 - DNA, 39 bp, Homo sapiens; identical to SEQ ID NO: 212139
  chr8:8634316-8634355
  hypo

SEQ ID NO: 309159 - DNA, 120 bp, Homo sapiens; identical to SEQ ID NO: 201290
  chr8:8639980-8640100
  hypo

SEQ ID NO: 309160 - DNA, 155 bp, Homo sapiens; identical to SEQ ID NO: 258958
  chr8:8642145-8642300
  hypo

SEQ ID NO: 309161 - DNA, 200 bp, Homo sapiens; identical to SEQ ID NO: 258959
  chr8:8643103-8643303
  hypo

SEQ ID NO: 309162 - DNA, 195 bp, Homo sapiens; identical to SEQ ID NO: 212141
  chr8:8651864-8652059
  hypo

SEQ ID NO: 309163 - DNA, 76 bp, Homo sapiens; identical to SEQ ID NO: 258961
  chr8:8669105-8669181
  hypo

SEQ ID NO: 309164 - DNA, 129 bp, Homo sapiens; identical to SEQ ID NO: 212142
  chr8:8673405-8673534
  hypo

SEQ ID NO: 309165 - DNA, 139 bp, Homo sapiens; identical to SEQ ID NO: 212143
  chr8:8680437-8680576
  hypo

SEQ ID NO: 309166 - DNA, 77 bp, Homo sapiens; identical to SEQ ID NO: 212144
  chr8:8680890-8680967
  hypo

SEQ ID NO: 309167 - DNA, 76 bp, Homo sapiens; identical to SEQ ID NO: 212145
  chr8:8681182-8681258
  hypo

SEQ ID NO: 309168 - DNA, 159 bp, Homo sapiens; identical to SEQ ID NO: 212146
  chr8:8690237-8690396
  hypo

SEQ ID NO: 309169 - DNA, 174 bp, Homo sapiens; identical to SEQ ID NO: 212147
  chr8:8692863-8693037
  hypo

SEQ ID NO: 309170 - DNA, 105 bp, Homo sapiens; identical to SEQ ID NO: 212148
  chr8:8698610-8698715
  hypo

SEQ ID NO: 309171 - DNA, 141 bp, Homo sapiens; identical to SEQ ID NO: 258969
  chr8:8699972-8700113
  hypo

SEQ ID NO: 309172 - DNA, 252 bp, Homo sapiens
  chr8:8709481-8709733
  hypo
taataaggacagagcgctccctcaggaacagcgatgccaagcccagttttggatacatagggagtgggtggtggaatgccggcttccattcgaaggagacccctctccagcaccatgggagtcgcacccttagcagatattctgtcctccagagagctgaggtttcaggagtgccaagcaaggtataaatgtcattagcgtgagtacttaaaacataccacaatgtccaggtgcggtgactcacacctgtaa

SEQ ID NO: 309173 - DNA, 120 bp, Homo sapiens; identical to SEQ ID NO: 212150
  chr8:8712566-8712686
  hypo

SEQ ID NO: 309174 - DNA, 78 bp, Homo sapiens; identical to SEQ ID NO: 212151
  chr8:8712746-8712824
  hypo

SEQ ID NO: 309175 - DNA, 159 bp, Homo sapiens; identical to SEQ ID NO: 212152
  chr8:8725341-8725500
  hypo

SEQ ID NO: 309176 - DNA, 491 bp, Homo sapiens; identical to SEQ ID NO: 258974
  chr8:8731249-8731740
  hypo

SEQ ID NO: 309177 - DNA, 144 bp, Homo sapiens; identical to SEQ ID NO: 212153
  chr8:8748206-8748350
  hypo

SEQ ID NO: 309178 - DNA, 536 bp, Homo sapiens
  chr8:8749088-8749624
  hypo
gggacaggaagaagggctggatcacctcataactttcatccccagctaagtcatacacgatgaaccgcaggccccgggaggcatcggccgtccagctggtcacctcgatgcccttgctcacagggggaggtgacggtgggtagcacttctccttgtcccctcctcctgggcatccctccactctctcctcggtgaggcagtggcgcagcaaagtctttcctgcagccttatgccccatcaggagcagcttgagccggggctgcaccgccggctgggaatgagccagttccttctggtaggctgcgatgtaggggatccccttcatgcagacctcgtaggggggctggatcagtgggttgtctttgatcttccacaaacccacccgggagagctggccaaagtggtcgggcagcaccgcgatctggttcccctgcagcacgagctcctccaggccggtcagctccacgatggagtccggcaggtagcggatgcggttattatccagccacaaggtgagaagccggcccaggcccgag

SEQ ID NO: 309179 - DNA, 375 bp, Homo sapiens; identical to SEQ ID NO: 285633
  chr8:8750284-8750659
  hypo

SEQ ID NO: 309180 - DNA, 157 bp, Homo sapiens; identical to SEQ ID NO: 212156
  chr8:8780059-8780216
  hypo

SEQ ID NO: 309181 - DNA, 39 bp, Homo sapiens; identical to SEQ ID NO: 258977
  chr8:8803669-8803708
  hypo

SEQ ID NO: 309182 - DNA, 462 bp, Homo sapiens; identical to SEQ ID NO: 223306
  chr8:8820810-8821272
  hypo

SEQ ID NO: 309183 - DNA, 31 bp, Homo sapiens; identical to SEQ ID NO: 258978
  chr8:8850535-8850566
  hypo

SEQ ID NO: 309184 - DNA, 116 bp, Homo sapiens; identical to SEQ ID NO: 212158
  chr8:8898498-8898614
  hypo

SEQ ID NO: 309185 - DNA, 36 bp, Homo sapiens; identical to SEQ ID NO: 212159
  chr8:8922915-8922951
  hypo

SEQ ID NO: 309186 - DNA, 119 bp, Homo sapiens; identical to SEQ ID NO: 258981
  chr8:9637606-9637725
  hypo

SEQ ID NO: 309187 - DNA, 260 bp, Homo sapiens; identical to SEQ ID NO: 285637
  chr8:9761155-9761415
  hypo

SEQ ID NO: 309188 - DNA, 185 bp, Homo sapiens; identical to SEQ ID NO: 223311
  chr8:10058672-10058857
  hypo

SEQ ID NO: 309189 - DNA, 141 bp, Homo sapiens
  chr8:10192957-10193098
  hypo
cgaaaattatcttcgtcttgctgggttcgctgctgaactggggaggcgattggaattaccatctggcctcagagctgcgggtgactcttgtcctgaccccgtggcctagtgaacagatgaccccggcgcctgatcttgtac

SEQ ID NO: 309190 - DNA, 176 bp, Homo sapiens; identical to SEQ ID NO: 212161
  chr8:10261662-10261838
  hypo

SEQ ID NO: 309191 - DNA, 188 bp, Homo sapiens; identical to SEQ ID NO: 212162
  chr8:10261986-10262174
  hypo

SEQ ID NO: 309192 - DNA, 141 bp, Homo sapiens; identical to SEQ ID NO: 258984
  chr8:10283196-10283337
  hypo

SEQ ID NO: 309193 - DNA, 232 bp, Homo sapiens; identical to SEQ ID NO: 258985
  chr8:10466917-10467149
  hypo

SEQ ID NO: 309194 - DNA, 210 bp, Homo sapiens; identical to SEQ ID NO: 201294
  chr8:10587212-10587422
  hypo

SEQ ID NO: 309195 - DNA, 202 bp, Homo sapiens; identical to SEQ ID NO: 212164
  chr8:10683500-10683702
  hypo

SEQ ID NO: 309196 - DNA, 75 bp, Homo sapiens
  chr8:10694914-10694989
  hypo
tttgccggctttgctctacatccttttgctgtaataaatcttagcagtgagtgcgactatatgctgagtcctgtg

SEQ ID NO: 309197 - DNA, 42 bp, Homo sapiens; identical to SEQ ID NO: 258988
  chr8:10798364-10798406
  hypo

SEQ ID NO: 309198 - DNA, 240 bp, Homo sapiens; identical to SEQ ID NO: 201296
  chr8:10873649-10873889
  hypo

SEQ ID NO: 309199 - DNA, 376 bp, Homo sapiens; identical to SEQ ID NO: 285647
  chr8:11058799-11059175
  hypo

SEQ ID NO: 309200 - DNA, 180 bp, Homo sapiens; identical to SEQ ID NO: 258989
  chr8:11143735-11143915
  hypo

SEQ ID NO: 309201 - DNA, 88 bp, Homo sapiens; identical to SEQ ID NO: 258990
  chr8:11144656-11144744
  hypo

SEQ ID NO: 309202 - DNA, 87 bp, Homo sapiens; identical to SEQ ID NO: 258991
  chr8:11163743-11163830
  hypo

SEQ ID NO: 309203 - DNA, 136 bp, Homo sapiens; identical to SEQ ID NO: 258992
  chr8:11182858-11182994
  hypo

SEQ ID NO: 309204 - DNA, 332 bp, Homo sapiens; identical to SEQ ID NO: 258993
  chr8:11218929-11219261
  hypo

SEQ ID NO: 309205 - DNA, 60 bp, Homo sapiens; identical to SEQ ID NO: 258994
  chr8:11366265-11366325
  hypo

SEQ ID NO: 309206 - DNA, 149 bp, Homo sapiens; identical to SEQ ID NO: 258995
  chr8:11483117-11483266
  hypo

SEQ ID NO: 309207 - DNA, 251 bp, Homo sapiens; identical to SEQ ID NO: 285656
  chr8:11550368-11550619
  hypo

SEQ ID NO: 309208 - DNA, 66 bp, Homo sapiens; identical to SEQ ID NO: 212167
  chr8:11612347-11612413
  hypo

SEQ ID NO: 309209 - DNA, 179 bp, Homo sapiens; identical to SEQ ID NO: 258997
  chr8:11645475-11645654
  hypo

SEQ ID NO: 309210 - DNA, 75 bp, Homo sapiens; identical to SEQ ID NO: 258998
  chr8:11646750-11646825
  hypo

SEQ ID NO: 309211 - DNA, 286 bp, Homo sapiens; identical to SEQ ID NO: 258999
  chr8:11647194-11647480
  hypo

SEQ ID NO: 309212 - DNA, 41 bp, Homo sapiens; identical to SEQ ID NO: 259000
  chr8:11657164-11657205
  hypo

SEQ ID NO: 309213 - DNA, 68 bp, Homo sapiens; identical to SEQ ID NO: 259001
  chr8:11669212-11669280
  hypo

SEQ ID NO: 309214 - DNA, 54 bp, Homo sapiens; identical to SEQ ID NO: 259002
  chr8:11704225-11704279
  hypo

SEQ ID NO: 309215 - DNA, 73 bp, Homo sapiens
  chr8:11704674-11704747
  hypo
atcctggaaaatgaaccgagctcggggttggggagggcagtgaccgtgcctcgtggcacgccacggtcagcca

SEQ ID NO: 309216 - DNA, 72 bp, Homo sapiens; identical to SEQ ID NO: 212168
  chr8:11706508-11706580
  hypo

SEQ ID NO: 309217 - DNA, 120 bp, Homo sapiens; identical to SEQ ID NO: 212169
  chr8:11706613-11706733
  hypo

SEQ ID NO: 309218 - DNA, 96 bp, Homo sapiens
  chr8:11708330-11708426
  hypo
ccactttctctccagcgcttccccgccagccagcagggccttacccagcaggagccacaggagccctggtctctgatctctttgatggtgggacac

SEQ ID NO: 309219 - DNA, 151 bp, Homo sapiens; identical to SEQ ID NO: 259007
  chr8:11711013-11711164
  hypo

SEQ ID NO: 309220 - DNA, 92 bp, Homo sapiens; identical to SEQ ID NO: 259008
  chr8:11712326-11712418
  hypo

SEQ ID NO: 309221 - DNA, 155 bp, Homo sapiens; identical to SEQ ID NO: 201310
  chr8:11726004-11726159
  hypo

SEQ ID NO: 309222 - DNA, 35 bp, Homo sapiens; identical to SEQ ID NO: 259009
  chr8:11883053-11883088
  hypo

SEQ ID NO: 309223 - DNA, 225 bp, Homo sapiens; identical to SEQ ID NO: 212171
  chr8:12623675-12623900
  hypo

SEQ ID NO: 309224 - DNA, 91 bp, Homo sapiens; identical to SEQ ID NO: 212172
  chr8:12869539-12869630
  hypo

SEQ ID NO: 309225 - DNA, 211 bp, Homo sapiens; identical to SEQ ID NO: 259012
  chr8:12950150-12950361
  hypo

SEQ ID NO: 309226 - DNA, 346 bp, Homo sapiens; identical to SEQ ID NO: 259013
  chr8:12957816-12958162
  hypo

SEQ ID NO: 309227 - DNA, 158 bp, Homo sapiens; identical to SEQ ID NO: 259014
  chr8:12959265-12959423
  hypo

SEQ ID NO: 309228 - DNA, 33 bp, Homo sapiens; identical to SEQ ID NO: 259015
  chr8:13189949-13189982
  hypo

SEQ ID NO: 309229 - DNA, 34 bp, Homo sapiens; identical to SEQ ID NO: 259016
  chr8:16459748-16459782
  hypo

SEQ ID NO: 309230 - DNA, 100 bp, Homo sapiens
  chr8:16459902-16460002
  hypo
agaaggtctaattgagctaattaacacaagccacctgtgttaaggctaagctgaaagagcgcactgtaatacgagcccactggggctttgagagctgtaa

SEQ ID NO: 309231 - DNA, 84 bp, Homo sapiens; identical to SEQ ID NO: 201316
  chr8:16884239-16884323
  hypo

SEQ ID NO: 309232 - DNA, 101 bp, Homo sapiens; identical to SEQ ID NO: 259018
  chr8:17360874-17360975
  hypo

SEQ ID NO: 309233 - DNA, 399 bp, Homo sapiens; identical to SEQ ID NO: 285682
  chr8:17434527-17434926
  hypo

SEQ ID NO: 309234 - DNA, 122 bp, Homo sapiens; identical to SEQ ID NO: 259019
  chr8:17478545-17478667
  hypo

SEQ ID NO: 309235 - DNA, 34 bp, Homo sapiens; identical to SEQ ID NO: 259020
  chr8:17574339-17574373
  hypo

SEQ ID NO: 309236 - DNA, 100 bp, Homo sapiens; identical to SEQ ID NO: 259021
  chr8:17648492-17648592
  hypo

SEQ ID NO: 309237 - DNA, 210 bp, Homo sapiens; identical to SEQ ID NO: 259022
  chr8:17767556-17767766
  hypo

SEQ ID NO: 309238 - DNA, 99 bp, Homo sapiens; identical to SEQ ID NO: 212175
  chr8:17910135-17910234
  hypo

SEQ ID NO: 309239 - DNA, 36 bp, Homo sapiens; identical to SEQ ID NO: 212176
  chr8:18381897-18381933
  hypo

SEQ ID NO: 309240 - DNA, 37 bp, Homo sapiens; identical to SEQ ID NO: 259025
  chr8:18474405-18474442
  hypo

SEQ ID NO: 309241 - DNA, 87 bp, Homo sapiens; identical to SEQ ID NO: 259026
  chr8:18541367-18541454
  hypo

SEQ ID NO: 309242 - DNA, 1085 bp, Homo sapiens; identical to SEQ ID NO: 285689
  chr8:18870212-18871297
  hypo

SEQ ID NO: 309243 - DNA, 77 bp, Homo sapiens; identical to SEQ ID NO: 212178
  chr8:19068613-19068690
  hypo

SEQ ID NO: 309244 - DNA, 335 bp, Homo sapiens; identical to SEQ ID NO: 259028
  chr8:19094994-19095329
  hypo

SEQ ID NO: 309245 - DNA, 35 bp, Homo sapiens; identical to SEQ ID NO: 259029
  chr8:19192506-19192541
  hypo

SEQ ID NO: 309246 - DNA, 38 bp, Homo sapiens; identical to SEQ ID NO: 259030
  chr8:19335638-19335676
  hypo

SEQ ID NO: 309247 - DNA, 60 bp, Homo sapiens; identical to SEQ ID NO: 259031
  chr8:19460933-19460993
  hypo

SEQ ID NO: 309248 - DNA, 291 bp, Homo sapiens; identical to SEQ ID NO: 212180
  chr8:19690583-19690874
  hypo

SEQ ID NO: 309249 - DNA, 62 bp, Homo sapiens; identical to SEQ ID NO: 212181
  chr8:19706754-19706816
  hypo

SEQ ID NO: 309250 - DNA, 64 bp, Homo sapiens; identical to SEQ ID NO: 259034
  chr8:19715650-19715714
  hypo

SEQ ID NO: 309251 - DNA, 610 bp, Homo sapiens; identical to SEQ ID NO: 201323
  chr8:19796823-19797433
  hypo

SEQ ID NO: 309252 - DNA, 70 bp, Homo sapiens; identical to SEQ ID NO: 201324
  chr8:19798019-19798089
  hypo

SEQ ID NO: 309253 - DNA, 358 bp, Homo sapiens; identical to SEQ ID NO: 259035
  chr8:20107412-20107770
  hypo

SEQ ID NO: 309254 - DNA, 54 bp, Homo sapiens; identical to SEQ ID NO: 212184
  chr8:20110391-20110445
  hypo

SEQ ID NO: 309255 - DNA, 158 bp, Homo sapiens; identical to SEQ ID NO: 212185
  chr8:20110479-20110637
  hypo

SEQ ID NO: 309256 - DNA, 158 bp, Homo sapiens; identical to SEQ ID NO: 259037
  chr8:20793601-20793759
  hypo

SEQ ID NO: 309257 - DNA, 195 bp, Homo sapiens; identical to SEQ ID NO: 259038
  chr8:21590921-21591116
  hypo

SEQ ID NO: 309258 - DNA, 82 bp, Homo sapiens; identical to SEQ ID NO: 212186
  chr8:21608213-21608295
  hypo

SEQ ID NO: 309259 - DNA, 86 bp, Homo sapiens; identical to SEQ ID NO: 259040
  chr8:21624003-21624089
  hypo

SEQ ID NO: 309260 - DNA, 87 bp, Homo sapiens; identical to SEQ ID NO: 259041
  chr8:21718693-21718780
  hypo

SEQ ID NO: 309261 - DNA, 232 bp, Homo sapiens; identical to SEQ ID NO: 259042
  chr8:21769765-21769997
  hypo

SEQ ID NO: 309262 - DNA, 82 bp, Homo sapiens; identical to SEQ ID NO: 285701
  chr8:21868699-21868781
  hypo

SEQ ID NO: 309263 - DNA, 124 bp, Homo sapiens; identical to SEQ ID NO: 201326
  chr8:21906319-21906443
  hypo

SEQ ID NO: 309264 - DNA, 202 bp, Homo sapiens; identical to SEQ ID NO: 212188
  chr8:21910414-21910616
  hypo

SEQ ID NO: 309265 - DNA, 97 bp, Homo sapiens; identical to SEQ ID NO: 259045
  chr8:21959272-21959369
  hypo

SEQ ID NO: 309266 - DNA, 243 bp, Homo sapiens
  chr8:21959610-21959853
  hypo
ggcaccttgctgggggagtgcaaaaatactcaccagccctgccagccctcggctctgtccaccatgttcctacagccatacagcctgaacctgcaggtgacctcggtcctgtcccggcttgccctcttcccccacccccatattcatgagtacctgctggatccgtacatcagcctggcccccggctgcaggagcctattctccgtgttggtgagggtgaggacgcctcggcccaagggagtg

SEQ ID NO: 309267 - DNA, 166 bp, Homo sapiens; identical to SEQ ID NO: 212189
  chr8:21960397-21960563
  hypo

SEQ ID NO: 309268 - DNA, 894 bp, Homo sapiens; identical to SEQ ID NO: 212190
  chr8:21961297-21962191
  hypo

SEQ ID NO: 309269 - DNA, 87 bp, Homo sapiens; identical to SEQ ID NO: 259049
  chr8:21977140-21977227
  hypo

SEQ ID NO: 309270 - DNA, 379 bp, Homo sapiens; identical to SEQ ID NO: 259050
  chr8:21977566-21977945
  hypo

SEQ ID NO: 309271 - DNA, 225 bp, Homo sapiens; identical to SEQ ID NO: 259051
  chr8:21978253-21978478
  hypo

SEQ ID NO: 309272 - DNA, 70 bp, Homo sapiens; identical to SEQ ID NO: 212192
  chr8:21981256-21981326
  hypo

SEQ ID NO: 309273 - DNA, 95 bp, Homo sapiens; identical to SEQ ID NO: 259053
  chr8:22005942-22006037
  hypo

SEQ ID NO: 309274 - DNA, 81 bp, Homo sapiens; identical to SEQ ID NO: 259054
  chr8:22006313-22006394
  hypo

SEQ ID NO: 309275 - DNA, 40 bp, Homo sapiens; identical to SEQ ID NO: 212193
  chr8:22052966-22053006
  hypo

SEQ ID NO: 309276 - DNA, 40 bp, Homo sapiens; identical to SEQ ID NO: 259056
  chr8:22073146-22073186
  hypo

SEQ ID NO: 309277 - DNA, 405 bp, Homo sapiens; identical to SEQ ID NO: 212194
  chr8:22078961-22079366
  hypo

SEQ ID NO: 309278 - DNA, 44 bp, Homo sapiens; identical to SEQ ID NO: 259058
  chr8:22132540-22132584
  hypo

SEQ ID NO: 309279 - DNA, 187 bp, Homo sapiens; identical to SEQ ID NO: 259059
  chr8:22133209-22133396
  hypo

SEQ ID NO: 309280 - DNA, 39 bp, Homo sapiens; identical to SEQ ID NO: 259060
  chr8:22231505-22231544
  hypo

SEQ ID NO: 309281 - DNA, 297 bp, Homo sapiens; identical to SEQ ID NO: 259061
  chr8:22255560-22255857
  hypo

SEQ ID NO: 309282 - DNA, 70 bp, Homo sapiens; identical to SEQ ID NO: 259062
  chr8:22256253-22256323
  hypo

SEQ ID NO: 309283 - DNA, 315 bp, Homo sapiens; identical to SEQ ID NO: 259063
  chr8:22256722-22257037
  hypo

SEQ ID NO: 309284 - DNA, 107 bp, Homo sapiens; identical to SEQ ID NO: 285712
  chr8:22408652-22408759
  hypo

SEQ ID NO: 309285 - DNA, 142 bp, Homo sapiens; identical to SEQ ID NO: 285713
  chr8:22409076-22409218
  hypo

SEQ ID NO: 309286 - DNA, 142 bp, Homo sapiens; identical to SEQ ID NO: 116287
  chr8:22409253-22409395
  hypo

SEQ ID NO: 309287 - DNA, 892 bp, Homo sapiens; identical to SEQ ID NO: 116290
  chr8:22436855-22437747
  hypo

SEQ ID NO: 309288 - DNA, 92 bp, Homo sapiens; identical to SEQ ID NO: 259064
  chr8:22440003-22440095
  hypo

SEQ ID NO: 309289 - DNA, 31 bp, Homo sapiens; identical to SEQ ID NO: 259065
  chr8:22440395-22440426
  hypo

SEQ ID NO: 309290 - DNA, 75 bp, Homo sapiens; identical to SEQ ID NO: 259066
  chr8:22477223-22477298
  hypo

SEQ ID NO: 309291 - DNA, 83 bp, Homo sapiens; identical to SEQ ID NO: 259067
  chr8:22479976-22480059
  hypo

SEQ ID NO: 309292 - DNA, 115 bp, Homo sapiens; identical to SEQ ID NO: 259068
  chr8:22480089-22480204
  hypo

SEQ ID NO: 309293 - DNA, 145 bp, Homo sapiens; identical to SEQ ID NO: 212196
  chr8:22485267-22485412
  hypo

SEQ ID NO: 309294 - DNA, 229 bp, Homo sapiens; identical to SEQ ID NO: 259070
  chr8:22494911-22495140
  hypo

SEQ ID NO: 309295 - DNA, 69 bp, Homo sapiens; identical to SEQ ID NO: 259071
  chr8:22499362-22499431
  hypo

SEQ ID NO: 309296 - DNA, 217 bp, Homo sapiens; identical to SEQ ID NO: 223331
  chr8:22550331-22550548
  hypo

SEQ ID NO: 309297 - DNA, 256 bp, Homo sapiens; identical to SEQ ID NO: 223332
  chr8:22550912-22551168
  hypo

SEQ ID NO: 309298 - DNA, 54 bp, Homo sapiens; identical to SEQ ID NO: 259072
  chr8:22773287-22773341
  hypo

SEQ ID NO: 309299 - DNA, 166 bp, Homo sapiens; identical to SEQ ID NO: 259073
  chr8:22851898-22852064
  hypo

SEQ ID NO: 309300 - DNA, 196 bp, Homo sapiens; identical to SEQ ID NO: 259074
  chr8:22864845-22865041
  hypo

SEQ ID NO: 309301 - DNA, 458 bp, Homo sapiens; identical to SEQ ID NO: 212197
  chr8:22874765-22875223
  hypo

SEQ ID NO: 309302 - DNA, 309 bp, Homo sapiens; identical to SEQ ID NO: 223333
  chr8:22925472-22925781
  hypo

SEQ ID NO: 309303 - DNA, 53 bp, Homo sapiens; identical to SEQ ID NO: 259076
  chr8:22984120-22984173
  hypo

SEQ ID NO: 309304 - DNA, 135 bp, Homo sapiens; identical to SEQ ID NO: 201335
  chr8:23021590-23021725
  hypo

SEQ ID NO: 309305 - DNA, 41 bp, Homo sapiens; identical to SEQ ID NO: 159495
  chr8:23201725-23201766
  hypo

SEQ ID NO: 309306 - DNA, 156 bp, Homo sapiens; identical to SEQ ID NO: 259078
  chr8:23298419-23298575
  hypo

SEQ ID NO: 309307 - DNA, 338 bp, Homo sapiens; identical to SEQ ID NO: 285732
  chr8:23386092-23386430
  hypo

SEQ ID NO: 309308 - DNA, 243 bp, Homo sapiens; identical to SEQ ID NO: 212201
  chr8:23399632-23399875
  hypo

SEQ ID NO: 309309 - DNA, 350 bp, Homo sapiens; identical to SEQ ID NO: 212202
  chr8:23409903-23410253
  hypo

SEQ ID NO: 309310 - DNA, 205 bp, Homo sapiens; identical to SEQ ID NO: 212203
  chr8:23423713-23423918
  hypo

SEQ ID NO: 309311 - DNA, 36 bp, Homo sapiens; identical to SEQ ID NO: 212204
  chr8:23424342-23424378
  hypo

SEQ ID NO: 309312 - DNA, 125 bp, Homo sapiens; identical to SEQ ID NO: 212205
  chr8:23429103-23429228
  hypo

SEQ ID NO: 309313 - DNA, 172 bp, Homo sapiens
  chr8:23430698-23430870
  hypo
cctcatgcccgagtcggaagacccctctccagaagccattctgcatccttgtctgctctgcgtcacccgagaacacaggcttcgcagcctcgctttctgaaatggtgtgtgccgagtcagattgccgctcagagaaaatacaagcccgttttccctagctgtgccatttggt

SEQ ID NO: 309314 - DNA, 117 bp, Homo sapiens
  chr8:23430923-23431040
  hypo
ctgatttggagccctcaccggagcttgtctttaaaaatgagcaggaagctcatgtatgtttgcatttcagtgagccgggtcctgacctgccgccacccatcacggtcagcgtggtgc

SEQ ID NO: 309315 - DNA, 102 bp, Homo sapiens; identical to SEQ ID NO: 259086
  chr8:25084011-25084113
  hypo

SEQ ID NO: 309316 - DNA, 216 bp, Homo sapiens; identical to SEQ ID NO: 212206
  chr8:25105393-25105609
  hypo

SEQ ID NO: 309317 - DNA, 202 bp, Homo sapiens; identical to SEQ ID NO: 259088
  chr8:25107887-25108089
  hypo

SEQ ID NO: 309318 - DNA, 179 bp, Homo sapiens; identical to SEQ ID NO: 259089
  chr8:25174516-25174695
  hypo

SEQ ID NO: 309319 - DNA, 84 bp, Homo sapiens; identical to SEQ ID NO: 212207
  chr8:25249436-25249520
  hypo

SEQ ID NO: 309320 - DNA, 89 bp, Homo sapiens; identical to SEQ ID NO: 259091
  chr8:25252803-25252892
  hypo

SEQ ID NO: 309321 - DNA, 169 bp, Homo sapiens; identical to SEQ ID NO: 259092
  chr8:25265513-25265682
  hypo

SEQ ID NO: 309322 - DNA, 257 bp, Homo sapiens; identical to SEQ ID NO: 259093
  chr8:25336999-25337256
  hypo

SEQ ID NO: 309323 - DNA, 38 bp, Homo sapiens; identical to SEQ ID NO: 212208
  chr8:25338912-25338950
  hypo

SEQ ID NO: 309324 - DNA, 147 bp, Homo sapiens; identical to SEQ ID NO: 259095
  chr8:25376165-25376312
  hypo

SEQ ID NO: 309325 - DNA, 144 bp, Homo sapiens; identical to SEQ ID NO: 285758
  chr8:25902185-25902329
  hypo

SEQ ID NO: 309326 - DNA, 52 bp, Homo sapiens; identical to SEQ ID NO: 212209
  chr8:26053988-26054040
  hypo

SEQ ID NO: 309327 - DNA, 119 bp, Homo sapiens; identical to SEQ ID NO: 259098
  chr8:26148091-26148210
  hypo

SEQ ID NO: 309328 - DNA, 311 bp, Homo sapiens; identical to SEQ ID NO: 285768
  chr8:26148759-26149070
  hypo

SEQ ID NO: 309329 - DNA, 179 bp, Homo sapiens; identical to SEQ ID NO: 259099
  chr8:26193947-26194126
  hypo

SEQ ID NO: 309330 - DNA, 41 bp, Homo sapiens; identical to SEQ ID NO: 212210
  chr8:26230451-26230492
  hypo

SEQ ID NO: 309331 - DNA, 40 bp, Homo sapiens; identical to SEQ ID NO: 212211
  chr8:26230732-26230772
  hypo

SEQ ID NO: 309332 - DNA, 135 bp, Homo sapiens; identical to SEQ ID NO: 212212
  chr8:26267634-26267769
  hypo

SEQ ID NO: 309333 - DNA, 270 bp, Homo sapiens; identical to SEQ ID NO: 201360
  chr8:26372150-26372420
  hypo

SEQ ID NO: 309334 - DNA, 64 bp, Homo sapiens; identical to SEQ ID NO: 223345
  chr8:26435020-26435084
  hypo

SEQ ID NO: 309335 - DNA, 604 bp, Homo sapiens; identical to SEQ ID NO: 285778
  chr8:26436194-26436798
  hypo

SEQ ID NO: 309336 - DNA, 211 bp, Homo sapiens; identical to SEQ ID NO: 259103
  chr8:26444972-26445183
  hypo

SEQ ID NO: 309337 - DNA, 174 bp, Homo sapiens; identical to SEQ ID NO: 259104
  chr8:26481170-26481344
  hypo

SEQ ID NO: 309338 - DNA, 148 bp, Homo sapiens; identical to SEQ ID NO: 259105
  chr8:26515708-26515856
  hypo

SEQ ID NO: 309339 - DNA, 135 bp, Homo sapiens; identical to SEQ ID NO: 259106
  chr8:27145421-27145556
  hypo

SEQ ID NO: 309340 - DNA, 78 bp, Homo sapiens; identical to SEQ ID NO: 201364
  chr8:27168528-27168606
  hypo

SEQ ID NO: 309341 - DNA, 54 bp, Homo sapiens; identical to SEQ ID NO: 259107
  chr8:27279918-27279972
  hypo

SEQ ID NO: 309342 - DNA, 202 bp, Homo sapiens; identical to SEQ ID NO: 259108
  chr8:27315870-27316072
  hypo

SEQ ID NO: 309343 - DNA, 250 bp, Homo sapiens; identical to SEQ ID NO: 285782
  chr8:27327202-27327452
  hypo

SEQ ID NO: 309344 - DNA, 226 bp, Homo sapiens; identical to SEQ ID NO: 212216
  chr8:27337092-27337318
  hypo

SEQ ID NO: 309345 - DNA, 127 bp, Homo sapiens; identical to SEQ ID NO: 212217
  chr8:27516398-27516525
  hypo

SEQ ID NO: 309346 - DNA, 168 bp, Homo sapiens; identical to SEQ ID NO: 212218
  chr8:27516773-27516941
  hypo

SEQ ID NO: 309347 - DNA, 66 bp, Homo sapiens; identical to SEQ ID NO: 259113
  chr8:27530312-27530378
  hypo

SEQ ID NO: 309348 - DNA, 339 bp, Homo sapiens
  chr8:27779440-27779779
  hypo
agctggtagagctccagctgcgccgtgtcgctctgctggcccgtgcggtcccgcagcagggccaccgcctgctcggtctgcaccgcctgcgcctgcagcccccacagcgcgccctccagccgctgcactgcgcccgccagcgccagcaacgagtctgactggttctgcagcgcgtcctgcaccttccacacctgctccgtcaggtccgcttgcagcggagcctgcagcagccgcagctgcaagtcccggaagctctcattcagccggttcacattgcgagtcagggccttcaggtcgtcaggggagctgcgcggcctggacactgcggaggaggaagag

SEQ ID NO: 309349 - DNA, 39 bp, Homo sapiens
  chr8:27779809-27779848
  hypo
ccccgggtgacaagaggcgaacccagtcagagcctggca

SEQ ID NO: 309350 - DNA, 124 bp, Homo sapiens; identical to SEQ ID NO: 212220
  chr8:27845168-27845292
  hypo

SEQ ID NO: 309351 - DNA, 45 bp, Homo sapiens
  chr8:27931039-27931084
  hypo
aaaacacaaaggatatgatacgccactgttttctgcaactggggg

SEQ ID NO: 309352 - DNA, 159 bp, Homo sapiens; identical to SEQ ID NO: 212221
  chr8:27931114-27931273
  hypo

SEQ ID NO: 309353 - DNA, 353 bp, Homo sapiens; identical to SEQ ID NO: 259117
  chr8:28206805-28207158
  hypo

SEQ ID NO: 309354 - DNA, 156 bp, Homo sapiens; identical to SEQ ID NO: 212223
  chr8:28207459-28207615
  hypo

SEQ ID NO: 309355 - DNA, 107 bp, Homo sapiens; identical to SEQ ID NO: 259119
  chr8:28207904-28208011
  hypo

SEQ ID NO: 309356 - DNA, 612 bp, Homo sapiens; identical to SEQ ID NO: 259120
  chr8:28208626-28209238
  hypo

SEQ ID NO: 309357 - DNA, 133 bp, Homo sapiens; identical to SEQ ID NO: 259121
  chr8:28237868-28238001
  hypo

SEQ ID NO: 309358 - DNA, 226 bp, Homo sapiens; identical to SEQ ID NO: 285789
  chr8:28242659-28242885
  hypo

SEQ ID NO: 309359 - DNA, 78 bp, Homo sapiens; identical to SEQ ID NO: 201368
  chr8:28258795-28258873
  hypo

SEQ ID NO: 309360 - DNA, 43 bp, Homo sapiens; identical to SEQ ID NO: 259122
  chr8:28265545-28265588
  hypo

SEQ ID NO: 309361 - DNA, 38 bp, Homo sapiens; identical to SEQ ID NO: 259123
  chr8:28266309-28266347
  hypo

SEQ ID NO: 309362 - DNA, 61 bp, Homo sapiens; identical to SEQ ID NO: 259124
  chr8:28269021-28269082
  hypo

SEQ ID NO: 309363 - DNA, 144 bp, Homo sapiens; identical to SEQ ID NO: 259125
  chr8:28573489-28573633
  hypo

SEQ ID NO: 309364 - DNA, 208 bp, Homo sapiens; identical to SEQ ID NO: 259126
  chr8:28610787-28610995
  hypo

SEQ ID NO: 309365 - DNA, 76 bp, Homo sapiens; identical to SEQ ID NO: 259127
  chr8:28737393-28737469
  hypo

SEQ ID NO: 309366 - DNA, 333 bp, Homo sapiens; identical to SEQ ID NO: 201370
  chr8:28748909-28749242
  hypo

SEQ ID NO: 309367 - DNA, 320 bp, Homo sapiens; identical to SEQ ID NO: 259128
  chr8:28918856-28919176
  hypo

SEQ ID NO: 309368 - DNA, 168 bp, Homo sapiens; identical to SEQ ID NO: 259129
  chr8:28928119-28928287
  hypo

SEQ ID NO: 309369 - DNA, 139 bp, Homo sapiens; identical to SEQ ID NO: 212228
  chr8:28938418-28938557
  hypo

SEQ ID NO: 309370 - DNA, 136 bp, Homo sapiens; identical to SEQ ID NO: 212229
  chr8:28938587-28938723
  hypo

SEQ ID NO: 309371 - DNA, 213 bp, Homo sapiens; identical to SEQ ID NO: 212230
  chr8:28950156-28950369
  hypo

SEQ ID NO: 309372 - DNA, 175 bp, Homo sapiens; identical to SEQ ID NO: 259132
  chr8:28960025-28960200
  hypo

SEQ ID NO: 309373 - DNA, 125 bp, Homo sapiens; identical to SEQ ID NO: 259133
  chr8:29053240-29053365
  hypo

SEQ ID NO: 309374 - DNA, 142 bp, Homo sapiens; identical to SEQ ID NO: 259134
  chr8:29127380-29127522
  hypo

SEQ ID NO: 309375 - DNA, 98 bp, Homo sapiens; identical to SEQ ID NO: 259135
  chr8:29160770-29160868
  hypo

SEQ ID NO: 309376 - DNA, 2288 bp, Homo sapiens; identical to SEQ ID NO: 285797
  chr8:29205973-29208261
  hypo

SEQ ID NO: 309377 - DNA, 149 bp, Homo sapiens; identical to SEQ ID NO: 259136
  chr8:29212822-29212971
  hypo

SEQ ID NO: 309378 - DNA, 331 bp, Homo sapiens; identical to SEQ ID NO: 259137
  chr8:29926952-29927283
  hypo

SEQ ID NO: 309379 - DNA, 210 bp, Homo sapiens; identical to SEQ ID NO: 212232
  chr8:29949204-29949414
  hypo

SEQ ID NO: 309380 - DNA, 41 bp, Homo sapiens; identical to SEQ ID NO: 212233
  chr8:29951802-29951843
  hypo

SEQ ID NO: 309381 - DNA, 99 bp, Homo sapiens; identical to SEQ ID NO: 212234
  chr8:29958255-29958354
  hypo

SEQ ID NO: 309382 - DNA, 43 bp, Homo sapiens; identical to SEQ ID NO: 212235
  chr8:29962165-29962208
  hypo

SEQ ID NO: 309383 - DNA, 1018 bp, Homo sapiens; identical to SEQ ID NO: 201376
  chr8:30241612-30242630
  hypo

SEQ ID NO: 309384 - DNA, 361 bp, Homo sapiens; identical to SEQ ID NO: 201377
  chr8:30242697-30243058
  hypo

SEQ ID NO: 309385 - DNA, 213 bp, Homo sapiens; identical to SEQ ID NO: 201378
  chr8:30243175-30243388
  hypo

SEQ ID NO: 309386 - DNA, 160 bp, Homo sapiens; identical to SEQ ID NO: 259142
  chr8:30419851-30420011
  hypo

SEQ ID NO: 309387 - DNA, 49 bp, Homo sapiens; identical to SEQ ID NO: 259144
  chr8:30432995-30433044
  hypo

SEQ ID NO: 309388 - DNA, 400 bp, Homo sapiens; identical to SEQ ID NO: 212239
  chr8:30561836-30562236
  hypo

SEQ ID NO: 309389 - DNA, 43 bp, Homo sapiens; identical to SEQ ID NO: 259146
  chr8:30599240-30599283
  hypo

SEQ ID NO: 309390 - DNA, 38 bp, Homo sapiens; identical to SEQ ID NO: 259147
  chr8:30889695-30889733
  hypo

SEQ ID NO: 309391 - DNA, 245 bp, Homo sapiens; identical to SEQ ID NO: 285816
  chr8:33372206-33372451
  hypo

SEQ ID NO: 309392 - DNA, 319 bp, Homo sapiens; identical to SEQ ID NO: 259148
  chr8:33580344-33580663
  hypo

SEQ ID NO: 309393 - DNA, 142 bp, Homo sapiens; identical to SEQ ID NO: 259149
  chr8:36179410-36179552
  hypo

SEQ ID NO: 309394 - DNA, 32 bp, Homo sapiens; identical to SEQ ID NO: 259150
  chr8:36636712-36636744
  hypo

SEQ ID NO: 309395 - DNA, 120 bp, Homo sapiens; identical to SEQ ID NO: 259151
  chr8:36636804-36636924
  hypo

SEQ ID NO: 309396 - DNA, 120 bp, Homo sapiens; identical to SEQ ID NO: 259152
  chr8:36636984-36637104
  hypo

SEQ ID NO: 309397 - DNA, 1373 bp, Homo sapiens; identical to SEQ ID NO: 285819
  chr8:37552811-37554184
  hypo

SEQ ID NO: 309398 - DNA, 33 bp, Homo sapiens; identical to SEQ ID NO: 259153
  chr8:37673307-37673340
  hypo

SEQ ID NO: 309399 - DNA, 266 bp, Homo sapiens; identical to SEQ ID NO: 259154
  chr8:37688849-37689115
  hypo

SEQ ID NO: 309400 - DNA, 443 bp, Homo sapiens; identical to SEQ ID NO: 259155
  chr8:37702266-37702709
  hypo

SEQ ID NO: 309401 - DNA, 47 bp, Homo sapiens; identical to SEQ ID NO: 259156
  chr8:37708576-37708623
  hypo

SEQ ID NO: 309402 - DNA, 121 bp, Homo sapiens; identical to SEQ ID NO: 259157
  chr8:37720438-37720559
  hypo

SEQ ID NO: 309403 - DNA, 80 bp, Homo sapiens; identical to SEQ ID NO: 259158
  chr8:37721474-37721554
  hypo

SEQ ID NO: 309404 - DNA, 182 bp, Homo sapiens; identical to SEQ ID NO: 259159
  chr8:37946122-37946304
  hypo

SEQ ID NO: 309405 - DNA, 59 bp, Homo sapiens
  chr8:38020272-38020331
  hypo
agtcttctgcagtaaccagtaactgggaaacagctgaaagctccctcctcacgcctgag

SEQ ID NO: 309406 - DNA, 32 bp, Homo sapiens; identical to SEQ ID NO: 212243
  chr8:38032247-38032279
  hypo

SEQ ID NO: 309407 - DNA, 275 bp, Homo sapiens; identical to SEQ ID NO: 259163
  chr8:38146029-38146304
  hypo

SEQ ID NO: 309408 - DNA, 32 bp, Homo sapiens; identical to SEQ ID NO: 259164
  chr8:38223006-38223038
  hypo

SEQ ID NO: 309409 - DNA, 240 bp, Homo sapiens; identical to SEQ ID NO: 212245
  chr8:38223278-38223518
  hypo

SEQ ID NO: 309410 - DNA, 72 bp, Homo sapiens; identical to SEQ ID NO: 259166
  chr8:38260116-38260188
  hypo

SEQ ID NO: 309411 - DNA, 97 bp, Homo sapiens
  chr8:38274864-38274961
  hypo
tgcttcccgatcatcttcatcatctccatttctgagatcaggtctgacaagtctttctctgttgcgtccgctttaaagaacacgttgagactcattt

SEQ ID NO: 309412 - DNA, 34 bp, Homo sapiens; identical to SEQ ID NO: 259168
  chr8:38279097-38279131
  hypo

SEQ ID NO: 309413 - DNA, 70 bp, Homo sapiens; identical to SEQ ID NO: 259169
  chr8:38280652-38280722
  hypo

SEQ ID NO: 309414 - DNA, 135 bp, Homo sapiens; identical to SEQ ID NO: 259170
  chr8:38282093-38282228
  hypo

SEQ ID NO: 309415 - DNA, 226 bp, Homo sapiens; identical to SEQ ID NO: 201396
  chr8:38326050-38326276
  hypo

SEQ ID NO: 309416 - DNA, 42 bp, Homo sapiens; identical to SEQ ID NO: 259171
  chr8:38361680-38361722
  hypo

SEQ ID NO: 309417 - DNA, 269 bp, Homo sapiens; identical to SEQ ID NO: 285837
  chr8:38614519-38614788
  hypo

SEQ ID NO: 309418 - DNA, 103 bp, Homo sapiens; identical to SEQ ID NO: 285838
  chr8:38615060-38615163
  hypo

SEQ ID NO: 309419 - DNA, 143 bp, Homo sapiens; identical to SEQ ID NO: 212247
  chr8:38643832-38643975
  hypo

SEQ ID NO: 309420 - DNA, 113 bp, Homo sapiens; identical to SEQ ID NO: 212248
  chr8:38644035-38644148
  hypo

SEQ ID NO: 309421 - DNA, 44 bp, Homo sapiens; identical to SEQ ID NO: 212249
  chr8:38692767-38692811
  hypo

SEQ ID NO: 309422 - DNA, 105 bp, Homo sapiens; identical to SEQ ID NO: 212250
  chr8:38697062-38697167
  hypo

SEQ ID NO: 309423 - DNA, 42 bp, Homo sapiens; identical to SEQ ID NO: 259176
  chr8:38735772-38735814
  hypo

SEQ ID NO: 309424 - DNA, 288 bp, Homo sapiens; identical to SEQ ID NO: 212251
  chr8:38786180-38786468
  hypo

SEQ ID NO: 309425 - DNA, 104 bp, Homo sapiens; identical to SEQ ID NO: 259179
  chr8:38859453-38859557
  hypo

SEQ ID NO: 309426 - DNA, 394 bp, Homo sapiens; identical to SEQ ID NO: 259180
  chr8:39380183-39380577
  hypo

SEQ ID NO: 309427 - DNA, 86 bp, Homo sapiens; identical to SEQ ID NO: 259181
  chr8:39978288-39978374
  hypo

SEQ ID NO: 309428 - DNA, 393 bp, Homo sapiens; identical to SEQ ID NO: 259182
  chr8:40790349-40790742
  hypo

SEQ ID NO: 309429 - DNA, 86 bp, Homo sapiens; identical to SEQ ID NO: 212252
  chr8:41290578-41290664
  hypo

SEQ ID NO: 309430 - DNA, 63 bp, Homo sapiens; identical to SEQ ID NO: 212253
  chr8:41325383-41325446
  hypo

SEQ ID NO: 309431 - DNA, 98 bp, Homo sapiens; identical to SEQ ID NO: 259185
  chr8:41478655-41478753
  hypo

SEQ ID NO: 309432 - DNA, 92 bp, Homo sapiens; identical to SEQ ID NO: 259186
  chr8:41486828-41486920
  hypo

SEQ ID NO: 309433 - DNA, 122 bp, Homo sapiens; identical to SEQ ID NO: 259188
  chr8:41488513-41488635
  hypo

SEQ ID NO: 309434 - DNA, 63 bp, Homo sapiens
  chr8:41553927-41553990
  hypo
caggccctcctcctcggccagtgggggcggcgtgctgagcttctggggcttgaccaggcggca

SEQ ID NO: 309435 - DNA, 43 bp, Homo sapiens
  chr8:41554371-41554414
  hypo
gaaccttgccgctagaaaccaggtgccacgtggagaaagtgct

SEQ ID NO: 309436 - DNA, 46 bp, Homo sapiens
  chr8:41582866-41582912
  hypo
ggtgcacgcaggcgtgcaaggtcccggaccccctttctccacaccc

SEQ ID NO: 309437 - DNA, 275 bp, Homo sapiens; identical to SEQ ID NO: 259192
  chr8:41590545-41590820
  hypo

SEQ ID NO: 309438 - DNA, 34 bp, Homo sapiens; identical to SEQ ID NO: 212254
  chr8:41602335-41602369
  hypo

SEQ ID NO: 309439 - DNA, 68 bp, Homo sapiens; identical to SEQ ID NO: 212255
  chr8:41643317-41643385
  hypo

SEQ ID NO: 309440 - DNA, 53 bp, Homo sapiens; identical to SEQ ID NO: 212256
  chr8:41668308-41668361
  hypo

SEQ ID NO: 309441 - DNA, 192 bp, Homo sapiens; identical to SEQ ID NO: 259196
  chr8:41688593-41688785
  hypo

SEQ ID NO: 309442 - DNA, 59 bp, Homo sapiens; identical to SEQ ID NO: 259197
  chr8:41910398-41910457
  hypo

SEQ ID NO: 309443 - DNA, 69 bp, Homo sapiens; identical to SEQ ID NO: 259198
  chr8:41910487-41910556
  hypo

SEQ ID NO: 309444 - DNA, 36 bp, Homo sapiens; identical to SEQ ID NO: 259199
  chr8:41960685-41960721
  hypo

SEQ ID NO: 309445 - DNA, 205 bp, Homo sapiens; identical to SEQ ID NO: 259200
  chr8:42011673-42011878
  hypo

SEQ ID NO: 309446 - DNA, 34 bp, Homo sapiens; identical to SEQ ID NO: 201399
  chr8:42040329-42040363
  hypo

SEQ ID NO: 309447 - DNA, 275 bp, Homo sapiens; identical to SEQ ID NO: 259201
  chr8:42053906-42054181
  hypo

SEQ ID NO: 309448 - DNA, 85 bp, Homo sapiens; identical to SEQ ID NO: 212258
  chr8:42134201-42134286
  hypo

SEQ ID NO: 309449 - DNA, 138 bp, Homo sapiens
  chr8:42144494-42144632
  hypo
ttgtttagcagtggcaggatcggctctcaggctggggctccgggagctgctgccttgggcagctgctgccccgcagttgtcttggagacccccccatagccaaaagaggtgacagtggtgcagtggtgactcccttgt

SEQ ID NO: 309450 - DNA, 142 bp, Homo sapiens; identical to SEQ ID NO: 259205
  chr8:42145510-42145652
  hypo

SEQ ID NO: 309451 - DNA, 185 bp, Homo sapiens; identical to SEQ ID NO: 259206
  chr8:42146044-42146229
  hypo

SEQ ID NO: 309452 - DNA, 39 bp, Homo sapiens; identical to SEQ ID NO: 212259
  chr8:42147521-42147560
  hypo

SEQ ID NO: 309453 - DNA, 85 bp, Homo sapiens; identical to SEQ ID NO: 212260
  chr8:42148195-42148280
  hypo

SEQ ID NO: 309454 - DNA, 43 bp, Homo sapiens; identical to SEQ ID NO: 212261
  chr8:42255793-42255836
  hypo

SEQ ID NO: 309455 - DNA, 42 bp, Homo sapiens; identical to SEQ ID NO: 212262
  chr8:42256016-42256058
  hypo

SEQ ID NO: 309456 - DNA, 462 bp, Homo sapiens; identical to SEQ ID NO: 259211
  chr8:42268280-42268742
  hypo

SEQ ID NO: 309457 - DNA, 297 bp, Homo sapiens; identical to SEQ ID NO: 259212
  chr8:42293859-42294156
  hypo

SEQ ID NO: 309458 - DNA, 63 bp, Homo sapiens; identical to SEQ ID NO: 259213
  chr8:42306697-42306760
  hypo

SEQ ID NO: 309459 - DNA, 42 bp, Homo sapiens; identical to SEQ ID NO: 259214
  chr8:42315266-42315308
  hypo

SEQ ID NO: 309460 - DNA, 216 bp, Homo sapiens; identical to SEQ ID NO: 259215
  chr8:42316750-42316966
  hypo

SEQ ID NO: 309461 - DNA, 41 bp, Homo sapiens; identical to SEQ ID NO: 259216
  chr8:42318196-42318237
  hypo

SEQ ID NO: 309462 - DNA, 313 bp, Homo sapiens; identical to SEQ ID NO: 212265
  chr8:42333236-42333549
  hypo

SEQ ID NO: 309463 - DNA, 120 bp, Homo sapiens; identical to SEQ ID NO: 259220
  chr8:42544829-42544949
  hypo

SEQ ID NO: 309464 - DNA, 61 bp, Homo sapiens
  chr8:42600787-42600848
  hypo
cctttttcctctccagatgttcaccttctcttatgtaaaatgcaccattcgcagccggcct

SEQ ID NO: 309465 - DNA, 133 bp, Homo sapiens
  chr8:42600878-42601011
  hypo
tctaaggacgtatataaatgttaaacctcctgaaatcctcttatgaaaaacagccacaggtgtgtcccacaggtgcggtgtttttcccagacccgccctcaagtggcttaataaacctcgatgatcaagacac

SEQ ID NO: 309466 - DNA, 82 bp, Homo sapiens; identical to SEQ ID NO: 259222
  chr8:42651995-42652077
  hypo

SEQ ID NO: 309467 - DNA, 196 bp, Homo sapiens; identical to SEQ ID NO: 212266
  chr8:42750012-42750208
  hypo

SEQ ID NO: 309468 - DNA, 38 bp, Homo sapiens; identical to SEQ ID NO: 259224
  chr8:42917136-42917174
  hypo

SEQ ID NO: 309469 - DNA, 432 bp, Homo sapiens; identical to SEQ ID NO: 285852
  chr8:42996735-42997167
  hypo

SEQ ID NO: 309470 - DNA, 233 bp, Homo sapiens; identical to SEQ ID NO: 212267
  chr8:43059742-43059975
  hypo

SEQ ID NO: 309471 - DNA, 59 bp, Homo sapiens
  chr8:48044651-48044710
  hypo
aacaccaagccaagcgacgaacgccaagccaagccgttacatacgcatgcgcagaacac

SEQ ID NO: 309472 - DNA, 263 bp, Homo sapiens; identical to SEQ ID NO: 259227
  chr8:48091762-48092025
  hypo

SEQ ID NO: 309473 - DNA, 297 bp, Homo sapiens; identical to SEQ ID NO: 259228
  chr8:48172269-48172566
  hypo

SEQ ID NO: 309474 - DNA, 36 bp, Homo sapiens; identical to SEQ ID NO: 259229
  chr8:48255177-48255213
  hypo

SEQ ID NO: 309475 - DNA, 438 bp, Homo sapiens; identical to SEQ ID NO: 259230
  chr8:48292752-48293190
  hypo

SEQ ID NO: 309476 - DNA, 203 bp, Homo sapiens; identical to SEQ ID NO: 212269
  chr8:48348567-48348770
  hypo

SEQ ID NO: 309477 - DNA, 239 bp, Homo sapiens; identical to SEQ ID NO: 212270
  chr8:48396519-48396758
  hypo

SEQ ID NO: 309478 - DNA, 41 bp, Homo sapiens; identical to SEQ ID NO: 259234
  chr8:48523967-48524008
  hypo

SEQ ID NO: 309479 - DNA, 230 bp, Homo sapiens; identical to SEQ ID NO: 212271
  chr8:48585773-48586003
  hypo

SEQ ID NO: 309480 - DNA, 40 bp, Homo sapiens; identical to SEQ ID NO: 212272
  chr8:48593635-48593675
  hypo

SEQ ID NO: 309481 - DNA, 1723 bp, Homo sapiens; identical to SEQ ID NO: 285856
  chr8:48649725-48651448
  hypo

SEQ ID NO: 309482 - DNA, 58 bp, Homo sapiens; identical to SEQ ID NO: 212275
  chr8:48675290-48675348
  hypo

SEQ ID NO: 309483 - DNA, 120 bp, Homo sapiens; identical to SEQ ID NO: 212276
  chr8:48683807-48683927
  hypo

SEQ ID NO: 309484 - DNA, 116 bp, Homo sapiens; identical to SEQ ID NO: 259239
  chr8:48694944-48695060
  hypo

SEQ ID NO: 309485 - DNA, 180 bp, Homo sapiens; identical to SEQ ID NO: 212277
  chr8:48711778-48711958
  hypo

SEQ ID NO: 309486 - DNA, 566 bp, Homo sapiens; identical to SEQ ID NO: 212278
  chr8:48744129-48744695
  hypo

SEQ ID NO: 309487 - DNA, 179 bp, Homo sapiens; identical to SEQ ID NO: 259242
  chr8:48793718-48793897
  hypo

SEQ ID NO: 309488 - DNA, 194 bp, Homo sapiens; identical to SEQ ID NO: 259243
  chr8:48801154-48801348
  hypo

SEQ ID NO: 309489 - DNA, 161 bp, Homo sapiens; identical to SEQ ID NO: 259244
  chr8:48854509-48854670
  hypo

SEQ ID NO: 309490 - DNA, 75 bp, Homo sapiens; identical to SEQ ID NO: 212279
  chr8:48854908-48854983
  hypo

SEQ ID NO: 309491 - DNA, 83 bp, Homo sapiens; identical to SEQ ID NO: 259246
  chr8:48985104-48985187
  hypo

SEQ ID NO: 309492 - DNA, 169 bp, Homo sapiens; identical to SEQ ID NO: 212280
  chr8:49055453-49055622
  hypo

SEQ ID NO: 309493 - DNA, 162 bp, Homo sapiens
  chr8:49172622-49172784
  hypo
ggtggaggggcctttttatgcgttggaaacgcttttttagtgaaactaaactgaagtacttacggagtagctgagctgggcggactgcgcaggagcccaggcaccaattggcgtgaactctccagttctggacccacatccagaggtgtgtgaagccacccc

SEQ ID NO: 309494 - DNA, 509 bp, Homo sapiens
  chr8:49172814-49173323
  hypo
tgacctgggaatcagaccgttcccgagcgccccctgtgtgtggtgttccttgggtggtggggaccgctgtgttcagcccgtccttggaagaggcgaggggtgctgccgtgggaggtagagagaagggcaggggtgtggtgctctttttttccattcctacttcagctaaaccattgccacttttatccgttttgtgccgcgagctcttacctactcttgttggttggcggctttcgggcagggaaacgggcaaacgtggacgcgcgcagctaaggcaggcgcggtgggcagggggctgggccgggcagggactgtgccgcccccgcttctgggtgggagcggcctgtctcctctccgagggtctgagagcacccgcacccaccttccttccccagggcattccggcctaggggaagggcgtctggaatgggagcgggcgctccaccgcctgcaggcatacggtaggcctggcccagtactgggcgtccgagctgcacccaaggggcagc

SEQ ID NO: 309495 - DNA, 42 bp, Homo sapiens; identical to SEQ ID NO: 259249
  chr8:49187833-49187875
  hypo

SEQ ID NO: 309496 - DNA, 248 bp, Homo sapiens; identical to SEQ ID NO: 212281
  chr8:49241526-49241774
  hypo

SEQ ID NO: 309497 - DNA, 88 bp, Homo sapiens; identical to SEQ ID NO: 212282
  chr8:49334894-49334982
  hypo

SEQ ID NO: 309498 - DNA, 236 bp, Homo sapiens; identical to SEQ ID NO: 259252
  chr8:49339718-49339954
  hypo

SEQ ID NO: 309499 - DNA, 51 bp, Homo sapiens; identical to SEQ ID NO: 212284
  chr8:49382242-49382293
  hypo

SEQ ID NO: 309500 - DNA, 460 bp, Homo sapiens; identical to SEQ ID NO: 212285
  chr8:49382383-49382843
  hypo

SEQ ID NO: 309501 - DNA, 116 bp, Homo sapiens; identical to SEQ ID NO: 212286
  chr8:49390183-49390299
  hypo

SEQ ID NO: 309502 - DNA, 58 bp, Homo sapiens; identical to SEQ ID NO: 212287
  chr8:49390625-49390683
  hypo

SEQ ID NO: 309503 - DNA, 275 bp, Homo sapiens; identical to SEQ ID NO: 159868
  chr8:49493912-49494187
  hypo

SEQ ID NO: 309504 - DNA, 164 bp, Homo sapiens; identical to SEQ ID NO: 212288
  chr8:49496420-49496584
  hypo

SEQ ID NO: 309505 - DNA, 44 bp, Homo sapiens; identical to SEQ ID NO: 259257
  chr8:49520279-49520323
  hypo

SEQ ID NO: 309506 - DNA, 157 bp, Homo sapiens
  chr8:49546882-49547039
  hypo
gcctgcatccgcatttttcacaggctcagtgcccgaatgagctgcagtgtagtctggctggctccccaacctgtcgcacaggccttgctcaccactcctgacttttcaaggcagttgatttcactgttgaatacttccctattcaaataaagctctt

SEQ ID NO: 309507 - DNA, 240 bp, Homo sapiens
  chr8:49547084-49547324
  hypo
aggctgcacagacctgtctgctccgttgagacagtgaaggccgtctcacaaccgcaccttgggactcgcttccacataacacctcttctgttcctctcacggttcctcacagcgccagggccaagattctctcggggctggttccctgcctcgcagtcctgcctgacatcttggggctttcgaaatgggcaagtcctacggctgagttttgatcctcccggagttcagtgggtctcaccc

SEQ ID NO: 309508 - DNA, 198 bp, Homo sapiens
  chr8:49571717-49571915
  hypo
ttgggaggctgcgtcgtcctatcacagttaagaaagaattatttcgtgagttttacctagcagtttacataaatcagtttacagcagatttggagaaaaagaacattaaaagcagaccaggtgaacgagtttgaaacggcacacggaattggaagggagaaaaggttgtgatcactgctcaaacaagttcttccttcc

SEQ ID NO: 309509 - DNA, 43 bp, Homo sapiens; identical to SEQ ID NO: 212290
  chr8:49572364-49572407
  hypo

SEQ ID NO: 309510 - DNA, 80 bp, Homo sapiens; identical to SEQ ID NO: 259261
  chr8:49588260-49588340
  hypo

SEQ ID NO: 309511 - DNA, 42 bp, Homo sapiens; identical to SEQ ID NO: 212291
  chr8:49609208-49609250
  hypo

SEQ ID NO: 309512 - DNA, 114 bp, Homo sapiens
  chr8:49747144-49747258
  hypo
ttgggaagaagccgcactgcagggcacaataaccatgtgtagtgcttcctggctgaaatctgcactcaacaggaggtcgctcttagagtattaggctgctgctttgatatgagg

SEQ ID NO: 309513 - DNA, 323 bp, Homo sapiens; identical to SEQ ID NO: 212292
  chr8:49747318-49747641
  hypo

SEQ ID NO: 309514 - DNA, 38 bp, Homo sapiens; identical to SEQ ID NO: 259265
  chr8:49747863-49747901
  hypo

SEQ ID NO: 309515 - DNA, 35 bp, Homo sapiens; identical to SEQ ID NO: 212293
  chr8:49797125-49797160
  hypo

SEQ ID NO: 309516 - DNA, 160 bp, Homo sapiens; identical to SEQ ID NO: 259267
  chr8:49803111-49803271
  hypo

SEQ ID NO: 309517 - DNA, 222 bp, Homo sapiens
  chr8:49808459-49808681
  hypo
attaaatatgaacgaagcactatatgagactataaatggaattaatttttgtgaaaacaagaaaaggagtccccgaattaattactgctgtaagattgagcttgagaatttgtcttacaaaatcttttaataatgtattattctactcacaaaacagatattggttttgtgcctagtatgttccctgaggtgtacagggaacctcaaggagctcccagacta

SEQ ID NO: 309518 - DNA, 104 bp, Homo sapiens; identical to SEQ ID NO: 259269
  chr8:49809397-49809501
  hypo

SEQ ID NO: 309519 - DNA, 470 bp, Homo sapiens; identical to SEQ ID NO: 259270
  chr8:49890418-49890888
  hypo

SEQ ID NO: 309520 - DNA, 71 bp, Homo sapiens
  chr8:49959159-49959230
  hypo
agcccctccccagacgccagcgactctccggccaggcaggaacctttcatcagatacactgggtagggctg

SEQ ID NO: 309521 - DNA, 87 bp, Homo sapiens; identical to SEQ ID NO: 259272
  chr8:49983880-49983967
  hypo

SEQ ID NO: 309522 - DNA, 37 bp, Homo sapiens; identical to SEQ ID NO: 212295
  chr8:50014663-50014700
  hypo

SEQ ID NO: 309523 - DNA, 31 bp, Homo sapiens; identical to SEQ ID NO: 259275
  chr8:50053019-50053050
  hypo

SEQ ID NO: 309524 - DNA, 40 bp, Homo sapiens; identical to SEQ ID NO: 212296
  chr8:50071091-50071131
  hypo

SEQ ID NO: 309525 - DNA, 42 bp, Homo sapiens; identical to SEQ ID NO: 259277
  chr8:50115376-50115418
  hypo

SEQ ID NO: 309526 - DNA, 319 bp, Homo sapiens; identical to SEQ ID NO: 259278
  chr8:50313931-50314250
  hypo

SEQ ID NO: 309527 - DNA, 38 bp, Homo sapiens; identical to SEQ ID NO: 259279
  chr8:50377959-50377997
  hypo

SEQ ID NO: 309528 - DNA, 120 bp, Homo sapiens; identical to SEQ ID NO: 259280
  chr8:50568929-50569049
  hypo

SEQ ID NO: 309529 - DNA, 82 bp, Homo sapiens; identical to SEQ ID NO: 259281
  chr8:50740531-50740613
  hypo

SEQ ID NO: 309530 - DNA, 360 bp, Homo sapiens; identical to SEQ ID NO: 259282
  chr8:50891735-50892095
  hypo

SEQ ID NO: 309531 - DNA, 32 bp, Homo sapiens; identical to SEQ ID NO: 259283
  chr8:50945964-50945996
  hypo

SEQ ID NO: 309532 - DNA, 143 bp, Homo sapiens; identical to SEQ ID NO: 259284
  chr8:50987383-50987526
  hypo

SEQ ID NO: 309533 - DNA, 100 bp, Homo sapiens; identical to SEQ ID NO: 259285
  chr8:52143253-52143353
  hypo

SEQ ID NO: 309534 - DNA, 120 bp, Homo sapiens; identical to SEQ ID NO: 259286
  chr8:52184041-52184161
  hypo

SEQ ID NO: 309535 - DNA, 51 bp, Homo sapiens; identical to SEQ ID NO: 259287
  chr8:52191721-52191772
  hypo

SEQ ID NO: 309536 - DNA, 38 bp, Homo sapiens; identical to SEQ ID NO: 259288
  chr8:52384515-52384553
  hypo

SEQ ID NO: 309537 - DNA, 122 bp, Homo sapiens; identical to SEQ ID NO: 259289
  chr8:52432589-52432711
  hypo

SEQ ID NO: 309538 - DNA, 281 bp, Homo sapiens; identical to SEQ ID NO: 259290
  chr8:52432927-52433208
  hypo

SEQ ID NO: 309539 - DNA, 41 bp, Homo sapiens; identical to SEQ ID NO: 259292
  chr8:53459774-53459815
  hypo

SEQ ID NO: 309540 - DNA, 32 bp, Homo sapiens; identical to SEQ ID NO: 259293
  chr8:53487090-53487122
  hypo

SEQ ID NO: 309541 - DNA, 34 bp, Homo sapiens; identical to SEQ ID NO: 212297
  chr8:53657305-53657339
  hypo

SEQ ID NO: 309542 - DNA, 41 bp, Homo sapiens
  chr8:53805566-53805607
  hypo
acccagcaggaagacggagttgcccagcgggaagaacgggt

SEQ ID NO: 309543 - DNA, 76 bp, Homo sapiens
  chr8:53805637-53805713
  hypo
ggaagatggagtggcccagccggaagatggagtggcccagtgagaagatggtgtggcccagcgagaagatggggtt

SEQ ID NO: 309544 - DNA, 349 bp, Homo sapiens; identical to SEQ ID NO: 285868
  chr8:53852565-53852914
  hypo

SEQ ID NO: 309545 - DNA, 129 bp, Homo sapiens; identical to SEQ ID NO: 285869
  chr8:53853385-53853514
  hypo

SEQ ID NO: 309546 - DNA, 265 bp, Homo sapiens; identical to SEQ ID NO: 212299
  chr8:54154411-54154676
  hypo

SEQ ID NO: 309547 - DNA, 250 bp, Homo sapiens; identical to SEQ ID NO: 259297
  chr8:54507104-54507354
  hypo

SEQ ID NO: 309548 - DNA, 121 bp, Homo sapiens; identical to SEQ ID NO: 212301
  chr8:54640632-54640753
  hypo

SEQ ID NO: 309549 - DNA, 257 bp, Homo sapiens; identical to SEQ ID NO: 259299
  chr8:54645359-54645616
  hypo

SEQ ID NO: 309550 - DNA, 120 bp, Homo sapiens; identical to SEQ ID NO: 259300
  chr8:54645736-54645856
  hypo

SEQ ID NO: 309551 - DNA, 98 bp, Homo sapiens; identical to SEQ ID NO: 259301
  chr8:54647243-54647341
  hypo

SEQ ID NO: 309552 - DNA, 32 bp, Homo sapiens; identical to SEQ ID NO: 212302
  chr8:54647893-54647925
  hypo

SEQ ID NO: 309553 - DNA, 159 bp, Homo sapiens; identical to SEQ ID NO: 259303
  chr8:54658318-54658477
  hypo

SEQ ID NO: 309554 - DNA, 108 bp, Homo sapiens; identical to SEQ ID NO: 259304
  chr8:54667967-54668075
  hypo

SEQ ID NO: 309555 - DNA, 191 bp, Homo sapiens; identical to SEQ ID NO: 212303
  chr8:54750268-54750459
  hypo

SEQ ID NO: 309556 - DNA, 102 bp, Homo sapiens; identical to SEQ ID NO: 259306
  chr8:54925425-54925527
  hypo

SEQ ID NO: 309557 - DNA, 85 bp, Homo sapiens; identical to SEQ ID NO: 259307
  chr8:54945254-54945339
  hypo

SEQ ID NO: 309558 - DNA, 38 bp, Homo sapiens; identical to SEQ ID NO: 212304
  chr8:54956722-54956760
  hypo

SEQ ID NO: 309559 - DNA, 165 bp, Homo sapiens; identical to SEQ ID NO: 259309
  chr8:55212684-55212849
  hypo

SEQ ID NO: 309560 - DNA, 31 bp, Homo sapiens; identical to SEQ ID NO: 259310
  chr8:55229407-55229438
  hypo

SEQ ID NO: 309561 - DNA, 69 bp, Homo sapiens; identical to SEQ ID NO: 259311
  chr8:55765265-55765334
  hypo

SEQ ID NO: 309562 - DNA, 86 bp, Homo sapiens; identical to SEQ ID NO: 259312
  chr8:55826294-55826380
  hypo

SEQ ID NO: 309563 - DNA, 116 bp, Homo sapiens; identical to SEQ ID NO: 201413
  chr8:56014011-56014127
  hypo

SEQ ID NO: 309564 - DNA, 68 bp, Homo sapiens; identical to SEQ ID NO: 212306
  chr8:56361773-56361841
  hypo

SEQ ID NO: 309565 - DNA, 225 bp, Homo sapiens
  chr8:56362075-56362300
  hypo
tccgacagtcagctctggatccggtccacccactgctgggctgagggcacgtcctgggcacaaaagtcgtaaacgcgaggagttgtcttcacgtcaaagaaggccttctcatccacgctcttaggggcacccatggtggccatgccaggtgccacagcctccacctccacctccaccaggtcgatgacacccttgcactcagtgtccacacggtggtcgtagtag

SEQ ID NO: 309566 - DNA, 310 bp, Homo sapiens; identical to SEQ ID NO: 212307
  chr8:56362505-56362815
  hypo

SEQ ID NO: 309567 - DNA, 225 bp, Homo sapiens; identical to SEQ ID NO: 212308
  chr8:56364012-56364237
  hypo

SEQ ID NO: 309568 - DNA, 180 bp, Homo sapiens; identical to SEQ ID NO: 212309
  chr8:56364333-56364513
  hypo

SEQ ID NO: 309569 - DNA, 44 bp, Homo sapiens
  chr8:56365024-56365068
  hypo
cccatccggtggcaggtagatgcgcaggccatccagcacacact

SEQ ID NO: 309570 - DNA, 320 bp, Homo sapiens
  chr8:56366964-56367284
  hypo
caggaggctcctgcaggcatcggtgagctgctggtagctccgggacaggaagagaacctcgtgctccatgagggtggcacagaccaaagacagtacgttggtgatgcccagctggcggaagagcaggccacgctgcagctgctgatgggcagggagtcggccagtggagtctggatgacctgccggtcaccagcccccaaataaatcgtcctctactagcccccagccaggggcacggtgcacgtcagcaggttcccaattacgttccctgggaacacattcaggccctccacgtggacggcatagatgaggccgaggct

SEQ ID NO: 309571 - DNA, 447 bp, Homo sapiens
  chr8:56367314-56367761
  hypo
cgacacaggtaccagcgtctttggggcaaacatctgggcagatgggcaggctctgtgggcgacaggtgcgtaaggcctccctcatcctcctcttcctcccactcagtggcatccttagcgcgtgtcgtttcctgctcccagaaggtcaagcagcacagtagtggcgcccggagttgatgtcggtgaggacagcaacaaagaaggtcggtggattcctctcgggacacatctgccacccgctggactggcaaaacagctgggggaatgggttggcctcccagtccttctccgggaagaactgcagaatatggccctggcctttcccactcccgcgcgggtgcggcctgaatgccaccagcaggaagtagtctgtgatccgcgccatggggagggacgctgggcgggctccgcggctcggggactcgagggctgcgcgctcatggcccg

SEQ ID NO: 309572 - DNA, 38 bp, Homo sapiens
  chr8:56367791-56367829
  hypo
ccccgggttcgctccgcggcggccgcagcggctgcggc

SEQ ID NO: 309573 - DNA, 176 bp, Homo sapiens
  chr8:56602042-56602218
  hypo
gacaaacttctccaagagcccgcccttcccggactccatccggctgcgcggggcagagttctgcattgcagaggccgggctgtggggacccaggccagcaccactcagggagcagcttggtgggccccgttcccgggtgtgagggcaggaaaactggctgaggagtcggcactaga

SEQ ID NO: 309574 - DNA, 79 bp, Homo sapiens
  chr8:56602280-56602359
  hypo
gagatgaggaagaaggacccagaaggtcccgggcgggcacagaggcagcgcccagggaggtacgcgctggccgatgaag

SEQ ID NO: 309575 - DNA, 174 bp, Homo sapiens; identical to SEQ ID NO: 285879
  chr8:56791850-56792024
  hypo

SEQ ID NO: 309576 - DNA, 1174 bp, Homo sapiens; identical to SEQ ID NO: 201415
  chr8:56792065-56793239
  hypo

SEQ ID NO: 309577 - DNA, 37 bp, Homo sapiens; identical to SEQ ID NO: 259320
  chr8:56979945-56979982
  hypo

SEQ ID NO: 309578 - DNA, 398 bp, Homo sapiens; identical to SEQ ID NO: 259321
  chr8:57079620-57080018
  hypo

SEQ ID NO: 309579 - DNA, 619 bp, Homo sapiens; identical to SEQ ID NO: 285883
  chr8:57122656-57123275
  hypo

SEQ ID NO: 309580 - DNA, 155 bp, Homo sapiens; identical to SEQ ID NO: 285884
  chr8:57123315-57123470
  hypo

SEQ ID NO: 309581 - DNA, 65 bp, Homo sapiens; identical to SEQ ID NO: 212311
  chr8:57390711-57390776
  hypo

SEQ ID NO: 309582 - DNA, 80 bp, Homo sapiens; identical to SEQ ID NO: 212312
  chr8:58044529-58044609
  hypo

SEQ ID NO: 309583 - DNA, 48 bp, Homo sapiens
  chr8:58117079-58117127
  hypo
gtttggcagtgggcccatgagcggaggcagatgcgtatgggcctgcga

SEQ ID NO: 309584 - DNA, 250 bp, Homo sapiens; identical to SEQ ID NO: 259326
  chr8:58117447-58117697
  hypo

SEQ ID NO: 309585 - DNA, 222 bp, Homo sapiens; identical to SEQ ID NO: 212313
  chr8:58122848-58123070
  hypo

SEQ ID NO: 309586 - DNA, 297 bp, Homo sapiens; identical to SEQ ID NO: 259329
  chr8:58191334-58191631
  hypo

SEQ ID NO: 309587 - DNA, 425 bp, Homo sapiens; identical to SEQ ID NO: 259330
  chr8:58982675-58983100
  hypo

SEQ ID NO: 309588 - DNA, 87 bp, Homo sapiens; identical to SEQ ID NO: 212314
  chr8:58991411-58991498
  hypo

SEQ ID NO: 309589 - DNA, 154 bp, Homo sapiens; identical to SEQ ID NO: 259333
  chr8:59686610-59686764
  hypo

SEQ ID NO: 309590 - DNA, 238 bp, Homo sapiens; identical to SEQ ID NO: 201421
  chr8:60030908-60031146
  hypo

SEQ ID NO: 309591 - DNA, 349 bp, Homo sapiens; identical to SEQ ID NO: 201422
  chr8:60031791-60032140
  hypo

SEQ ID NO: 309592 - DNA, 152 bp, Homo sapiens; identical to SEQ ID NO: 212317
  chr8:60506003-60506155
  hypo

SEQ ID NO: 309593 - DNA, 54 bp, Homo sapiens; identical to SEQ ID NO: 212318
  chr8:60506185-60506239
  hypo

SEQ ID NO: 309594 - DNA, 42 bp, Homo sapiens; identical to SEQ ID NO: 259335
  chr8:60733751-60733793
  hypo

SEQ ID NO: 309595 - DNA, 93 bp, Homo sapiens; identical to SEQ ID NO: 212319
  chr8:61034762-61034855
  hypo

SEQ ID NO: 309596 - DNA, 155 bp, Homo sapiens; identical to SEQ ID NO: 259337
  chr8:61156140-61156295
  hypo

SEQ ID NO: 309597 - DNA, 81 bp, Homo sapiens; identical to SEQ ID NO: 259338
  chr8:61189328-61189409
  hypo

SEQ ID NO: 309598 - DNA, 292 bp, Homo sapiens; identical to SEQ ID NO: 201424
  chr8:61193765-61194057
  hypo

SEQ ID NO: 309599 - DNA, 70 bp, Homo sapiens; identical to SEQ ID NO: 259339
  chr8:61282991-61283061
  hypo

SEQ ID NO: 309600 - DNA, 32 bp, Homo sapiens; identical to SEQ ID NO: 259340
  chr8:61557774-61557806
  hypo

SEQ ID NO: 309601 - DNA, 59 bp, Homo sapiens; identical to SEQ ID NO: 259341
  chr8:61590513-61590572
  hypo

SEQ ID NO: 309602 - DNA, 85 bp, Homo sapiens; identical to SEQ ID NO: 259342
  chr8:61627786-61627871
  hypo

SEQ ID NO: 309603 - DNA, 154 bp, Homo sapiens; identical to SEQ ID NO: 259343
  chr8:61779845-61779999
  hypo

SEQ ID NO: 309604 - DNA, 154 bp, Homo sapiens
  chr8:61789712-61789866
  hypo
agtgaaagcagttccgtgtgatgcggccgctcactcagagctatgctgtgatccaccagatgggctcgcgctgatgggagtccggttgagtcctgctcagccaatggcaggttgtgtgccacgggcgagctacttcatttctctggacctgttt

SEQ ID NO: 309605 - DNA, 144 bp, Homo sapiens; identical to SEQ ID NO: 201426
  chr8:61822883-61823027
  hypo

SEQ ID NO: 309606 - DNA, 105 bp, Homo sapiens; identical to SEQ ID NO: 259345
  chr8:62221611-62221716
  hypo

SEQ ID NO: 309607 - DNA, 1143 bp, Homo sapiens; identical to SEQ ID NO: 285898
  chr8:62626290-62627433
  hypo

SEQ ID NO: 309608 - DNA, 82 bp, Homo sapiens; identical to SEQ ID NO: 259346
  chr8:62745086-62745168
  hypo

SEQ ID NO: 309609 - DNA, 99 bp, Homo sapiens; identical to SEQ ID NO: 259347
  chr8:64037106-64037205
  hypo

SEQ ID NO: 309610 - DNA, 33 bp, Homo sapiens; identical to SEQ ID NO: 259348
  chr8:64642939-64642972
  hypo

SEQ ID NO: 309611 - DNA, 124 bp, Homo sapiens; identical to SEQ ID NO: 259349
  chr8:65483619-65483743
  hypo

SEQ ID NO: 309612 - DNA, 288 bp, Homo sapiens; identical to SEQ ID NO: 201436
  chr8:65494311-65494599
  hypo

SEQ ID NO: 309613 - DNA, 183 bp, Homo sapiens; identical to SEQ ID NO: 259350
  chr8:65519231-65519414
  hypo

SEQ ID NO: 309614 - DNA, 178 bp, Homo sapiens; identical to SEQ ID NO: 259351
  chr8:65732649-65732827
  hypo

SEQ ID NO: 309615 - DNA, 38 bp, Homo sapiens; identical to SEQ ID NO: 212325
  chr8:65757970-65758008
  hypo

SEQ ID NO: 309616 - DNA, 38 bp, Homo sapiens; identical to SEQ ID NO: 212326
  chr8:65758248-65758286
  hypo

SEQ ID NO: 309617 - DNA, 36 bp, Homo sapiens; identical to SEQ ID NO: 259354
  chr8:66157671-66157707
  hypo

SEQ ID NO: 309618 - DNA, 213 bp, Homo sapiens; identical to SEQ ID NO: 212327
  chr8:66548504-66548717
  hypo

SEQ ID NO: 309619 - DNA, 32 bp, Homo sapiens; identical to SEQ ID NO: 259356
  chr8:66678462-66678494
  hypo

SEQ ID NO: 309620 - DNA, 33 bp, Homo sapiens; identical to SEQ ID NO: 259357
  chr8:66776021-66776054
  hypo

SEQ ID NO: 309621 - DNA, 84 bp, Homo sapiens; identical to SEQ ID NO: 259358
  chr8:66877730-66877814
  hypo

SEQ ID NO: 309622 - DNA, 53 bp, Homo sapiens; identical to SEQ ID NO: 259359
  chr8:66940483-66940536
  hypo

SEQ ID NO: 309623 - DNA, 103 bp, Homo sapiens; identical to SEQ ID NO: 259360
  chr8:67299564-67299667
  hypo

SEQ ID NO: 309624 - DNA, 42 bp, Homo sapiens; identical to SEQ ID NO: 259361
  chr8:67384648-67384690
  hypo

SEQ ID NO: 309625 - DNA, 53 bp, Homo sapiens
  chr8:67405469-67405522
  hypo
ggtaccaaaattcacgtttcctttttggtggaaattctccagccaagcttggc

SEQ ID NO: 309626 - DNA, 31 bp, Homo sapiens; identical to SEQ ID NO: 259363
  chr8:67405805-67405836
  hypo

SEQ ID NO: 309627 - DNA, 449 bp, Homo sapiens; identical to SEQ ID NO: 201440
  chr8:67417575-67418024
  hypo

SEQ ID NO: 309628 - DNA, 34 bp, Homo sapiens; identical to SEQ ID NO: 259365
  chr8:67867314-67867348
  hypo

SEQ ID NO: 309629 - DNA, 98 bp, Homo sapiens; identical to SEQ ID NO: 285931
  chr8:67941010-67941108
  hypo

SEQ ID NO: 309630 - DNA, 370 bp, Homo sapiens; identical to SEQ ID NO: 259366
  chr8:68115288-68115658
  hypo

SEQ ID NO: 309631 - DNA, 154 bp, Homo sapiens; identical to SEQ ID NO: 259367
  chr8:68236303-68236457
  hypo

SEQ ID NO: 309632 - DNA, 45 bp, Homo sapiens; identical to SEQ ID NO: 201443
  chr8:68863998-68864043
  hypo

SEQ ID NO: 309633 - DNA, 60 bp, Homo sapiens; identical to SEQ ID NO: 201444
  chr8:68864119-68864179
  hypo

SEQ ID NO: 309634 - DNA, 276 bp, Homo sapiens; identical to SEQ ID NO: 201445
  chr8:68864195-68864471
  hypo

SEQ ID NO: 309635 - DNA, 318 bp, Homo sapiens; identical to SEQ ID NO: 116751
  chr8:68864942-68865260
  hypo

SEQ ID NO: 309636 - DNA, 142 bp, Homo sapiens; identical to SEQ ID NO: 259368
  chr8:69169577-69169719
  hypo

SEQ ID NO: 309637 - DNA, 56 bp, Homo sapiens; identical to SEQ ID NO: 201447
  chr8:69242747-69242803
  hypo

SEQ ID NO: 309638 - DNA, 56 bp, Homo sapiens; identical to SEQ ID NO: 201448
  chr8:69243011-69243067
  hypo

SEQ ID NO: 309639 - DNA, 131 bp, Homo sapiens; identical to SEQ ID NO: 259369
  chr8:70246377-70246508
  hypo

SEQ ID NO: 309640 - DNA, 1943 bp, Homo sapiens; identical to SEQ ID NO: 285942
  chr8:70745324-70747267
  hypo

SEQ ID NO: 309641 - DNA, 33 bp, Homo sapiens; identical to SEQ ID NO: 212335
  chr8:71017206-71017239
  hypo

SEQ ID NO: 309642 - DNA, 166 bp, Homo sapiens; identical to SEQ ID NO: 259371
  chr8:71185496-71185662
  hypo

SEQ ID NO: 309643 - DNA, 329 bp, Homo sapiens; identical to SEQ ID NO: 285945
  chr8:71316515-71316844
  hypo

SEQ ID NO: 309644 - DNA, 269 bp, Homo sapiens; identical to SEQ ID NO: 212336
  chr8:71447612-71447881
  hypo

SEQ ID NO: 309645 - DNA, 146 bp, Homo sapiens; identical to SEQ ID NO: 212337
  chr8:71447941-71448087
  hypo

SEQ ID NO: 309646 - DNA, 57 bp, Homo sapiens; identical to SEQ ID NO: 212338
  chr8:71448124-71448181
  hypo

SEQ ID NO: 309647 - DNA, 141 bp, Homo sapiens; identical to SEQ ID NO: 259375
  chr8:71522527-71522668
  hypo

SEQ ID NO: 309648 - DNA, 70 bp, Homo sapiens; identical to SEQ ID NO: 201457
  chr8:72756949-72757019
  hypo

SEQ ID NO: 309649 - DNA, 108 bp, Homo sapiens; identical to SEQ ID NO: 285958
  chr8:73448678-73448786
  hypo

SEQ ID NO: 309650 - DNA, 252 bp, Homo sapiens; identical to SEQ ID NO: 285959
  chr8:73448832-73449084
  hypo

SEQ ID NO: 309651 - DNA, 263 bp, Homo sapiens; identical to SEQ ID NO: 285960
  chr8:73449114-73449377
  hypo

SEQ ID NO: 309652 - DNA, 207 bp, Homo sapiens; identical to SEQ ID NO: 285961
  chr8:73449432-73449639
  hypo

SEQ ID NO: 309653 - DNA, 40 bp, Homo sapiens; identical to SEQ ID NO: 201463
  chr8:73450162-73450202
  hypo

SEQ ID NO: 309654 - DNA, 37 bp, Homo sapiens; identical to SEQ ID NO: 259376
  chr8:73922264-73922301
  hypo

SEQ ID NO: 309655 - DNA, 186 bp, Homo sapiens; identical to SEQ ID NO: 259377
  chr8:73979604-73979790
  hypo

SEQ ID NO: 309656 - DNA, 131 bp, Homo sapiens; identical to SEQ ID NO: 259378
  chr8:73989477-73989608
  hypo

SEQ ID NO: 309657 - DNA, 235 bp, Homo sapiens; identical to SEQ ID NO: 212342
  chr8:73999532-73999767
  hypo

SEQ ID NO: 309658 - DNA, 235 bp, Homo sapiens; identical to SEQ ID NO: 212343
  chr8:74004014-74004249
  hypo

SEQ ID NO: 309659 - DNA, 98 bp, Homo sapiens; identical to SEQ ID NO: 259382
  chr8:74097718-74097816
  hypo

SEQ ID NO: 309660 - DNA, 454 bp, Homo sapiens; identical to SEQ ID NO: 259383
  chr8:74197777-74198231
  hypo

SEQ ID NO: 309661 - DNA, 45 bp, Homo sapiens; identical to SEQ ID NO: 259384
  chr8:74203780-74203825
  hypo

SEQ ID NO: 309662 - DNA, 183 bp, Homo sapiens; identical to SEQ ID NO: 223418
  chr8:74208009-74208192
  hypo

SEQ ID NO: 309663 - DNA, 493 bp, Homo sapiens; identical to SEQ ID NO: 212344
  chr8:74360978-74361471
  hypo

SEQ ID NO: 309664 - DNA, 396 bp, Homo sapiens; identical to SEQ ID NO: 259386
  chr8:74371800-74372196
  hypo

SEQ ID NO: 309665 - DNA, 59 bp, Homo sapiens; identical to SEQ ID NO: 259387
  chr8:74673152-74673211
  hypo

SEQ ID NO: 309666 - DNA, 101 bp, Homo sapiens
  chr8:74674334-74674435
  hypo
aggcagagagccggcggcaaaggtaaaaggccgacgacaacggacttggtccaggtgaacccacctgacaggcgcacgaaaacttcccttgccctccccgg

SEQ ID NO: 309667 - DNA, 355 bp, Homo sapiens; identical to SEQ ID NO: 259391
  chr8:75227593-75227948
  hypo

SEQ ID NO: 309668 - DNA, 141 bp, Homo sapiens; identical to SEQ ID NO: 212346
  chr8:75737615-75737756
  hypo

SEQ ID NO: 309669 - DNA, 46 bp, Homo sapiens; identical to SEQ ID NO: 201471
  chr8:75896508-75896554
  hypo

SEQ ID NO: 309670 - DNA, 204 bp, Homo sapiens; identical to SEQ ID NO: 201478
  chr8:77589894-77590098
  hypo

SEQ ID NO: 309671 - DNA, 42 bp, Homo sapiens; identical to SEQ ID NO: 259393
  chr8:80272279-80272321
  hypo

SEQ ID NO: 309672 - DNA, 208 bp, Homo sapiens; identical to SEQ ID NO: 201482
  chr8:80803900-80804108
  hypo

SEQ ID NO: 309673 - DNA, 81 bp, Homo sapiens; identical to SEQ ID NO: 259394
  chr8:80844671-80844752
  hypo

SEQ ID NO: 309674 - DNA, 37 bp, Homo sapiens; identical to SEQ ID NO: 212350
  chr8:80998635-80998672
  hypo

SEQ ID NO: 309675 - DNA, 246 bp, Homo sapiens; identical to SEQ ID NO: 259396
  chr8:81084473-81084719
  hypo

SEQ ID NO: 309676 - DNA, 44 bp, Homo sapiens; identical to SEQ ID NO: 259397
  chr8:81113805-81113849
  hypo

SEQ ID NO: 309677 - DNA, 161 bp, Homo sapiens; identical to SEQ ID NO: 212351
  chr8:81213157-81213318
  hypo

SEQ ID NO: 309678 - DNA, 341 bp, Homo sapiens
  chr8:81213356-81213697
  hypo
aagctcatgatcatgcgcatcgtcaagcacgccttcgagatcatccagctgctcacaggcgacaaccctctgcaggtcctggtgaacgccatcatcaacagtggtccccgggaggactccacactcactgggcgagccaggatcgtgagacgacaggctgtggccgtgtccccattaagccgtgtgaatcaggccatctggccgcagtgcacaggagctcttgaggctgccttccggaacatcaagaccattgctgagttcctggcagatgagctcatcagtgctgtcaagggctcctccaactcctatgctagcaagaagaaggacgagcttgagtgtgt

SEQ ID NO: 309679 - DNA, 33 bp, Homo sapiens; identical to SEQ ID NO: 259399
  chr8:81310006-81310039
  hypo

SEQ ID NO: 309680 - DNA, 36 bp, Homo sapiens; identical to SEQ ID NO: 259400
  chr8:81338705-81338741
  hypo

SEQ ID NO: 309681 - DNA, 273 bp, Homo sapiens; identical to SEQ ID NO: 201484
  chr8:81398155-81398428
  hypo

SEQ ID NO: 309682 - DNA, 364 bp, Homo sapiens; identical to SEQ ID NO: 285999
  chr8:81490259-81490623
  hypo

SEQ ID NO: 309683 - DNA, 119 bp, Homo sapiens; identical to SEQ ID NO: 223427
  chr8:81599502-81599621
  hypo

SEQ ID NO: 309684 - DNA, 85 bp, Homo sapiens; identical to SEQ ID NO: 259401
  chr8:81785030-81785115
  hypo

SEQ ID NO: 309685 - DNA, 300 bp, Homo sapiens; identical to SEQ ID NO: 201486
  chr8:81785141-81785441
  hypo

SEQ ID NO: 309686 - DNA, 1363 bp, Homo sapiens; identical to SEQ ID NO: 286002
  chr8:81785467-81786830
  hypo

SEQ ID NO: 309687 - DNA, 38 bp, Homo sapiens; identical to SEQ ID NO: 259402
  chr8:81820451-81820489
  hypo

SEQ ID NO: 309688 - DNA, 31 bp, Homo sapiens; identical to SEQ ID NO: 259403
  chr8:81964066-81964097
  hypo

SEQ ID NO: 309689 - DNA, 207 bp, Homo sapiens; identical to SEQ ID NO: 286003
  chr8:82192417-82192624
  hypo

SEQ ID NO: 309690 - DNA, 113 bp, Homo sapiens; identical to SEQ ID NO: 201490
  chr8:82193698-82193811
  hypo

SEQ ID NO: 309691 - DNA, 34 bp, Homo sapiens; identical to SEQ ID NO: 212360
  chr8:82680449-82680483
  hypo

SEQ ID NO: 309692 - DNA, 51 bp, Homo sapiens
  chr8:82902992-82903043
  hypo
cagttccagcttcctagccgctttacgtattcaagcctcagcaatggcaga

SEQ ID NO: 309693 - DNA, 40 bp, Homo sapiens; identical to SEQ ID NO: 212361
  chr8:83135626-83135666
  hypo

SEQ ID NO: 309694 - DNA, 40 bp, Homo sapiens; identical to SEQ ID NO: 212362
  chr8:83135906-83135946
  hypo

SEQ ID NO: 309695 - DNA, 250 bp, Homo sapiens; identical to SEQ ID NO: 286014
  chr8:86132759-86133009
  hypo

SEQ ID NO: 309696 - DNA, 35 bp, Homo sapiens; identical to SEQ ID NO: 259408
  chr8:86431840-86431875
  hypo

SEQ ID NO: 309697 - DNA, 56 bp, Homo sapiens; identical to SEQ ID NO: 259409
  chr8:86508969-86509025
  hypo

SEQ ID NO: 309698 - DNA, 85 bp, Homo sapiens; identical to SEQ ID NO: 259411
  chr8:86840940-86841025
  hypo

SEQ ID NO: 309699 - DNA, 86 bp, Homo sapiens
  chr8:86952963-86953049
  hypo
gtaaccggggtaaccgagtgggcagtagtttaggcagcctgataaatttatggtgagaactgctaggacggattcatctgtacact

SEQ ID NO: 309700 - DNA, 86 bp, Homo sapiens; identical to SEQ ID NO: 259413
  chr8:87257024-87257110
  hypo

SEQ ID NO: 309701 - DNA, 161 bp, Homo sapiens; identical to SEQ ID NO: 259414
  chr8:87425719-87425880
  hypo

SEQ ID NO: 309702 - DNA, 89 bp, Homo sapiens; identical to SEQ ID NO: 201499
  chr8:87527032-87527121
  hypo

SEQ ID NO: 309703 - DNA, 170 bp, Homo sapiens
  chr8:88886196-88886366
  hypo
catttcgttcggcggatgttctccctcctgaggggaagttctgtcccgggagtaagaggaagtaccgcttctttacaagcacgacttggcacggaagaacttcccgctgcgcctgcgcctgtgcgtatgaggtcgacccggacgagattcttcgtcgccttggcccaaat

SEQ ID NO: 309704 - DNA, 36 bp, Homo sapiens; identical to SEQ ID NO: 259416
  chr8:90650867-90650903
  hypo

SEQ ID NO: 309705 - DNA, 43 bp, Homo sapiens; identical to SEQ ID NO: 259419
  chr8:91374999-91375042
  hypo

SEQ ID NO: 309706 - DNA, 266 bp, Homo sapiens; identical to SEQ ID NO: 286025
  chr8:91657421-91657687
  hypo

SEQ ID NO: 309707 - DNA, 112 bp, Homo sapiens; identical to SEQ ID NO: 259420
  chr8:92120802-92120914
  hypo

SEQ ID NO: 309708 - DNA, 32 bp, Homo sapiens; identical to SEQ ID NO: 212365
  chr8:92433536-92433568
  hypo

SEQ ID NO: 309709 - DNA, 68 bp, Homo sapiens; identical to SEQ ID NO: 259422
  chr8:92570800-92570868
  hypo

SEQ ID NO: 309710 - DNA, 121 bp, Homo sapiens; identical to SEQ ID NO: 259423
  chr8:93875196-93875317
  hypo

SEQ ID NO: 309711 - DNA, 106 bp, Homo sapiens; identical to SEQ ID NO: 259424
  chr8:94129116-94129222
  hypo

SEQ ID NO: 309712 - DNA, 129 bp, Homo sapiens; identical to SEQ ID NO: 259425
  chr8:94658932-94659061
  hypo

SEQ ID NO: 309713 - DNA, 104 bp, Homo sapiens; identical to SEQ ID NO: 259426
  chr8:94683868-94683972
  hypo

SEQ ID NO: 309714 - DNA, 120 bp, Homo sapiens; identical to SEQ ID NO: 212366
  chr8:94684092-94684212
  hypo

SEQ ID NO: 309715 - DNA, 157 bp, Homo sapiens; identical to SEQ ID NO: 212367
  chr8:94685462-94685619
  hypo

SEQ ID NO: 309716 - DNA, 159 bp, Homo sapiens; identical to SEQ ID NO: 259430
  chr8:94706936-94707095
  hypo

SEQ ID NO: 309717 - DNA, 248 bp, Homo sapiens; identical to SEQ ID NO: 286033
  chr8:94712881-94713129
  hypo

SEQ ID NO: 309718 - DNA, 89 bp, Homo sapiens; identical to SEQ ID NO: 212369
  chr8:94747734-94747823
  hypo

SEQ ID NO: 309719 - DNA, 209 bp, Homo sapiens; identical to SEQ ID NO: 201506
  chr8:94929137-94929346
  hypo

SEQ ID NO: 309720 - DNA, 44 bp, Homo sapiens; identical to SEQ ID NO: 259432
  chr8:94941365-94941409
  hypo

SEQ ID NO: 309721 - DNA, 35 bp, Homo sapiens; identical to SEQ ID NO: 259433
  chr8:94967750-94967785
  hypo

SEQ ID NO: 309722 - DNA, 41 bp, Homo sapiens; identical to SEQ ID NO: 259434
  chr8:95488066-95488107
  hypo

SEQ ID NO: 309723 - DNA, 77 bp, Homo sapiens; identical to SEQ ID NO: 212371
  chr8:95556567-95556644
  hypo

SEQ ID NO: 309724 - DNA, 31 bp, Homo sapiens; identical to SEQ ID NO: 259436
  chr8:95625860-95625891
  hypo

SEQ ID NO: 309725 - DNA, 163 bp, Homo sapiens; identical to SEQ ID NO: 201513
  chr8:95653853-95654016
  hypo

SEQ ID NO: 309726 - DNA, 416 bp, Homo sapiens; identical to SEQ ID NO: 286045
  chr8:95654337-95654753
  hypo

SEQ ID NO: 309727 - DNA, 78 bp, Homo sapiens
  chr8:95816350-95816428
  hypo
aaataataaaagtatacttccgttttcatttatagccactgttagtaatgaggaaagacagcagaaaagaaagctcag

SEQ ID NO: 309728 - DNA, 97 bp, Homo sapiens; identical to SEQ ID NO: 259439
  chr8:95848306-95848403
  hypo

SEQ ID NO: 309729 - DNA, 157 bp, Homo sapiens; identical to SEQ ID NO: 212374
  chr8:95865517-95865674
  hypo

SEQ ID NO: 309730 - DNA, 120 bp, Homo sapiens; identical to SEQ ID NO: 212375
  chr8:95942702-95942822
  hypo

SEQ ID NO: 309731 - DNA, 40 bp, Homo sapiens; identical to SEQ ID NO: 212376
  chr8:96099108-96099148
  hypo

SEQ ID NO: 309732 - DNA, 187 bp, Homo sapiens; identical to SEQ ID NO: 212377
  chr8:96145224-96145411
  hypo

SEQ ID NO: 309733 - DNA, 1024 bp, Homo sapiens; identical to SEQ ID NO: 286047
  chr8:96145958-96146982
  hypo

SEQ ID NO: 309734 - DNA, 38 bp, Homo sapiens; identical to SEQ ID NO: 212379
  chr8:96229505-96229543
  hypo

SEQ ID NO: 309735 - DNA, 56 bp, Homo sapiens
  chr8:96285364-96285420
  hypo
agtgtcaggtatttcgtaaagaataggcaagtgcctccaggtgatacaattattaa

SEQ ID NO: 309736 - DNA, 45 bp, Homo sapiens; identical to SEQ ID NO: 212380
  chr8:96465482-96465527
  hypo

SEQ ID NO: 309737 - DNA, 120 bp, Homo sapiens; identical to SEQ ID NO: 259448
  chr8:97128826-97128946
  hypo

SEQ ID NO: 309738 - DNA, 159 bp, Homo sapiens; identical to SEQ ID NO: 259449
  chr8:97265370-97265529
  hypo

SEQ ID NO: 309739 - DNA, 258 bp, Homo sapiens; identical to SEQ ID NO: 259450
  chr8:97333717-97333975
  hypo

SEQ ID NO: 309740 - DNA, 154 bp, Homo sapiens; identical to SEQ ID NO: 259452
  chr8:97414934-97415088
  hypo

SEQ ID NO: 309741 - DNA, 35 bp, Homo sapiens; identical to SEQ ID NO: 286058
  chr8:97657755-97657790
  hypo

SEQ ID NO: 309742 - DNA, 198 bp, Homo sapiens; identical to SEQ ID NO: 259453
  chr8:98289305-98289503
  hypo

SEQ ID NO: 309743 - DNA, 41 bp, Homo sapiens; identical to SEQ ID NO: 212381
  chr8:98307803-98307844
  hypo

SEQ ID NO: 309744 - DNA, 36 bp, Homo sapiens; identical to SEQ ID NO: 212382
  chr8:98798632-98798668
  hypo

SEQ ID NO: 309745 - DNA, 35 bp, Homo sapiens; identical to SEQ ID NO: 212383
  chr8:98798908-98798943
  hypo

SEQ ID NO: 309746 - DNA, 765 bp, Homo sapiens; identical to SEQ ID NO: 286064
  chr8:98881052-98881817
  hypo

SEQ ID NO: 309747 - DNA, 58 bp, Homo sapiens; identical to SEQ ID NO: 286065
  chr8:98881884-98881942
  hypo

SEQ ID NO: 309748 - DNA, 215 bp, Homo sapiens; identical to SEQ ID NO: 259457
  chr8:98933981-98934196
  hypo

SEQ ID NO: 309749 - DNA, 132 bp, Homo sapiens; identical to SEQ ID NO: 259458
  chr8:99166496-99166628
  hypo

SEQ ID NO: 309750 - DNA, 65 bp, Homo sapiens; identical to SEQ ID NO: 259459
  chr8:99376415-99376480
  hypo

SEQ ID NO: 309751 - DNA, 56 bp, Homo sapiens; identical to SEQ ID NO: 259460
  chr8:99411607-99411663
  hypo

SEQ ID NO: 309752 - DNA, 74 bp, Homo sapiens; identical to SEQ ID NO: 286069
  chr8:99438739-99438813
  hypo

SEQ ID NO: 309753 - DNA, 101 bp, Homo sapiens; identical to SEQ ID NO: 259461
  chr8:99626612-99626713
  hypo

SEQ ID NO: 309754 - DNA, 54 bp, Homo sapiens; identical to SEQ ID NO: 223447
  chr8:99837477-99837531
  hypo

SEQ ID NO: 309755 - DNA, 418 bp, Homo sapiens; identical to SEQ ID NO: 201528
  chr8:99954762-99955180
  hypo

SEQ ID NO: 309756 - DNA, 833 bp, Homo sapiens; identical to SEQ ID NO: 286076
  chr8:99956453-99957286
  hypo

SEQ ID NO: 309757 - DNA, 155 bp, Homo sapiens; identical to SEQ ID NO: 212388
  chr8:100245163-100245318
  hypo

SEQ ID NO: 309758 - DNA, 174 bp, Homo sapiens; identical to SEQ ID NO: 212389
  chr8:100353992-100354166
  hypo

SEQ ID NO: 309759 - DNA, 392 bp, Homo sapiens; identical to SEQ ID NO: 259465
  chr8:100708318-100708710
  hypo

SEQ ID NO: 309760 - DNA, 466 bp, Homo sapiens; identical to SEQ ID NO: 212390
  chr8:100796509-100796975
  hypo

SEQ ID NO: 309761 - DNA, 104 bp, Homo sapiens; identical to SEQ ID NO: 212391
  chr8:100851150-100851254
  hypo

SEQ ID NO: 309762 - DNA, 114 bp, Homo sapiens; identical to SEQ ID NO: 259468
  chr8:100881200-100881314
  hypo

SEQ ID NO: 309763 - DNA, 230 bp, Homo sapiens; identical to SEQ ID NO: 212392
  chr8:100882016-100882246
  hypo

SEQ ID NO: 309764 - DNA, 79 bp, Homo sapiens; identical to SEQ ID NO: 212393
  chr8:100900796-100900875
  hypo

SEQ ID NO: 309765 - DNA, 92 bp, Homo sapiens
  chr8:100904089-100904181
  hypo
aacacatactttatgaccttcggcacaaagtaaaaaacatacataccttatacaaagctgcaacccccagggatagcacgaatgctacagcc

SEQ ID NO: 309766 - DNA, 39 bp, Homo sapiens; identical to SEQ ID NO: 259472
  chr8:101297999-101298038
  hypo

SEQ ID NO: 309767 - DNA, 107 bp, Homo sapiens; identical to SEQ ID NO: 212394
  chr8:101300173-101300280
  hypo

SEQ ID NO: 309768 - DNA, 41 bp, Homo sapiens
  chr8:101717051-101717092
  hypo
gcttatatataacacgatgtaagtgttctgtacaattaagt

SEQ ID NO: 309769 - DNA, 53 bp, Homo sapiens
  chr8:101717122-101717175
  hypo
agaggcaacttggtaaataaatttaaatcaccttagaacggagtgactctgga

SEQ ID NO: 309770 - DNA, 379 bp, Homo sapiens; identical to SEQ ID NO: 259476
  chr8:101730421-101730800
  hypo

SEQ ID NO: 309771 - DNA, 39 bp, Homo sapiens; identical to SEQ ID NO: 212395
  chr8:101735883-101735922
  hypo

SEQ ID NO: 309772 - DNA, 109 bp, Homo sapiens; identical to SEQ ID NO: 212396
  chr8:101744186-101744295
  hypo

SEQ ID NO: 309773 - DNA, 39 bp, Homo sapiens; identical to SEQ ID NO: 259479
  chr8:101787705-101787744
  hypo

SEQ ID NO: 309774 - DNA, 68 bp, Homo sapiens
  chr8:101872279-101872347
  hypo
gatggatccccatcctaggctgtgtcctcctctccccttctccggccgtgtggtgggaaagccttgaa

SEQ ID NO: 309775 - DNA, 33 bp, Homo sapiens; identical to SEQ ID NO: 212397
  chr8:101891231-101891264
  hypo

SEQ ID NO: 309776 - DNA, 177 bp, Homo sapiens; identical to SEQ ID NO: 212398
  chr8:102039315-102039492
  hypo

SEQ ID NO: 309777 - DNA, 145 bp, Homo sapiens; identical to SEQ ID NO: 259483
  chr8:102145022-102145167
  hypo

SEQ ID NO: 309778 - DNA, 201 bp, Homo sapiens; identical to SEQ ID NO: 212399
  chr8:102190370-102190571
  hypo

SEQ ID NO: 309779 - DNA, 36 bp, Homo sapiens; identical to SEQ ID NO: 259485
  chr8:102197224-102197260
  hypo

SEQ ID NO: 309780 - DNA, 53 bp, Homo sapiens; identical to SEQ ID NO: 259486
  chr8:102381068-102381121
  hypo

SEQ ID NO: 309781 - DNA, 344 bp, Homo sapiens; identical to SEQ ID NO: 259487
  chr8:102450882-102451226
  hypo

SEQ ID NO: 309782 - DNA, 40 bp, Homo sapiens; identical to SEQ ID NO: 201544
  chr8:102506365-102506405
  hypo

SEQ ID NO: 309783 - DNA, 39 bp, Homo sapiens; identical to SEQ ID NO: 259488
  chr8:102524933-102524972
  hypo

SEQ ID NO: 309784 - DNA, 94 bp, Homo sapiens; identical to SEQ ID NO: 212401
  chr8:102690214-102690308
  hypo

SEQ ID NO: 309785 - DNA, 213 bp, Homo sapiens; identical to SEQ ID NO: 259490
  chr8:102998569-102998782
  hypo

SEQ ID NO: 309786 - DNA, 117 bp, Homo sapiens; identical to SEQ ID NO: 259491
  chr8:103315024-103315141
  hypo

SEQ ID NO: 309787 - DNA, 105 bp, Homo sapiens; identical to SEQ ID NO: 259492
  chr8:103403085-103403190
  hypo

SEQ ID NO: 309788 - DNA, 81 bp, Homo sapiens; identical to SEQ ID NO: 259493
  chr8:103463270-103463351
  hypo

SEQ ID NO: 309789 - DNA, 138 bp, Homo sapiens; identical to SEQ ID NO: 212402
  chr8:103572768-103572906
  hypo

SEQ ID NO: 309790 - DNA, 38 bp, Homo sapiens; identical to SEQ ID NO: 259495
  chr8:103588277-103588315
  hypo

SEQ ID NO: 309791 - DNA, 33 bp, Homo sapiens; identical to SEQ ID NO: 212403
  chr8:103629516-103629549
  hypo

SEQ ID NO: 309792 - DNA, 156 bp, Homo sapiens; identical to SEQ ID NO: 259498
  chr8:103728517-103728673
  hypo

SEQ ID NO: 309793 - DNA, 362 bp, Homo sapiens; identical to SEQ ID NO: 259499
  chr8:103728893-103729255
  hypo

SEQ ID NO: 309794 - DNA, 33 bp, Homo sapiens
  chr8:103768948-103768981
  hypo
ccttggcaaggcgagttctgtcctgctggaaga

SEQ ID NO: 309795 - DNA, 171 bp, Homo sapiens; identical to SEQ ID NO: 259501
  chr8:103769321-103769492
  hypo

SEQ ID NO: 309796 - DNA, 37 bp, Homo sapiens; identical to SEQ ID NO: 259502
  chr8:103833090-103833127
  hypo

SEQ ID NO: 309797 - DNA, 33 bp, Homo sapiens; identical to SEQ ID NO: 212404
  chr8:103878119-103878152
  hypo

SEQ ID NO: 309798 - DNA, 37 bp, Homo sapiens; identical to SEQ ID NO: 212405
  chr8:103916556-103916593
  hypo

SEQ ID NO: 309799 - DNA, 37 bp, Homo sapiens; identical to SEQ ID NO: 259505
  chr8:103916713-103916750
  hypo

SEQ ID NO: 309800 - DNA, 45 bp, Homo sapiens; identical to SEQ ID NO: 212406
  chr8:103932060-103932105
  hypo

SEQ ID NO: 309801 - DNA, 142 bp, Homo sapiens; identical to SEQ ID NO: 212407
  chr8:103943076-103943218
  hypo

SEQ ID NO: 309802 - DNA, 36 bp, Homo sapiens; identical to SEQ ID NO: 259508
  chr8:103984301-103984337
  hypo

SEQ ID NO: 309803 - DNA, 154 bp, Homo sapiens; identical to SEQ ID NO: 259509
  chr8:104054117-104054271
  hypo

SEQ ID NO: 309804 - DNA, 120 bp, Homo sapiens; identical to SEQ ID NO: 212408
  chr8:104055449-104055569
  hypo

SEQ ID NO: 309805 - DNA, 199 bp, Homo sapiens; identical to SEQ ID NO: 212409
  chr8:104086527-104086726
  hypo

SEQ ID NO: 309806 - DNA, 148 bp, Homo sapiens; identical to SEQ ID NO: 259512
  chr8:104431399-104431547
  hypo

SEQ ID NO: 309807 - DNA, 429 bp, Homo sapiens; identical to SEQ ID NO: 201548
  chr8:104511554-104511983
  hypo

SEQ ID NO: 309808 - DNA, 79 bp, Homo sapiens; identical to SEQ ID NO: 259513
  chr8:105645133-105645212
  hypo

SEQ ID NO: 309809 - DNA, 42 bp, Homo sapiens; identical to SEQ ID NO: 286113
  chr8:106330393-106330435
  hypo

SEQ ID NO: 309810 - DNA, 90 bp, Homo sapiens; identical to SEQ ID NO: 212411
  chr8:106453048-106453138
  hypo

SEQ ID NO: 309811 - DNA, 32 bp, Homo sapiens; identical to SEQ ID NO: 259515
  chr8:106458435-106458467
  hypo

SEQ ID NO: 309812 - DNA, 38 bp, Homo sapiens; identical to SEQ ID NO: 259516
  chr8:106485010-106485048
  hypo

SEQ ID NO: 309813 - DNA, 637 bp, Homo sapiens; identical to SEQ ID NO: 201556
  chr8:107669366-107670003
  hypo

SEQ ID NO: 309814 - DNA, 42 bp, Homo sapiens; identical to SEQ ID NO: 212413
  chr8:108454321-108454363
  hypo

SEQ ID NO: 309815 - DNA, 77 bp, Homo sapiens
  chr8:108581068-108581145
  hypo
gatgatattactcccaatatcgcagggggttatttcccctgcaatattattcgtaatatccgggagggaggaaatga

SEQ ID NO: 309816 - DNA, 48 bp, Homo sapiens
  chr8:108581175-108581223
  hypo
tcccccccgtgatattgtgttaacatccaaagcgggagaagatgatgt

SEQ ID NO: 309817 - DNA, 44 bp, Homo sapiens; identical to SEQ ID NO: 259519
  chr8:109255556-109255600
  hypo

SEQ ID NO: 309818 - DNA, 239 bp, Homo sapiens; identical to SEQ ID NO: 201560
  chr8:109799175-109799414
  hypo

SEQ ID NO: 309819 - DNA, 63 bp, Homo sapiens; identical to SEQ ID NO: 201561
  chr8:109799903-109799966
  hypo

SEQ ID NO: 309820 - DNA, 70 bp, Homo sapiens; identical to SEQ ID NO: 212416
  chr8:109800324-109800394
  hypo

SEQ ID NO: 309821 - DNA, 120 bp, Homo sapiens; identical to SEQ ID NO: 259521
  chr8:110083307-110083427
  hypo

SEQ ID NO: 309822 - DNA, 59 bp, Homo sapiens
  chr8:110274931-110274990
  hypo
aattcattcatttgcataaacggatctgcttgggaacctgggcaggaactgttgctata

SEQ ID NO: 309823 - DNA, 161 bp, Homo sapiens; identical to SEQ ID NO: 259523
  chr8:110643645-110643806
  hypo

SEQ ID NO: 309824 - DNA, 68 bp, Homo sapiens; identical to SEQ ID NO: 201563
  chr8:110703933-110704001
  hypo

SEQ ID NO: 309825 - DNA, 45 bp, Homo sapiens; identical to SEQ ID NO: 201564
  chr8:110704144-110704189
  hypo

SEQ ID NO: 309826 - DNA, 42 bp, Homo sapiens; identical to SEQ ID NO: 212419
  chr8:110767246-110767288
  hypo

SEQ ID NO: 309827 - DNA, 149 bp, Homo sapiens; identical to SEQ ID NO: 259525
  chr8:112347385-112347534
  hypo

SEQ ID NO: 309828 - DNA, 242 bp, Homo sapiens; identical to SEQ ID NO: 259526
  chr8:112482647-112482889
  hypo

SEQ ID NO: 309829 - DNA, 79 bp, Homo sapiens; identical to SEQ ID NO: 212420
  chr8:114691130-114691209
  hypo

SEQ ID NO: 309830 - DNA, 34 bp, Homo sapiens; identical to SEQ ID NO: 212421
  chr8:114888155-114888189
  hypo

SEQ ID NO: 309831 - DNA, 31 bp, Homo sapiens; identical to SEQ ID NO: 259529
  chr8:115222084-115222115
  hypo

SEQ ID NO: 309832 - DNA, 92 bp, Homo sapiens; identical to SEQ ID NO: 259530
  chr8:116342861-116342953
  hypo

SEQ ID NO: 309833 - DNA, 34 bp, Homo sapiens; identical to SEQ ID NO: 212422
  chr8:116345686-116345720
  hypo

SEQ ID NO: 309834 - DNA, 176 bp, Homo sapiens; identical to SEQ ID NO: 212423
  chr8:117336911-117337087
  hypo

SEQ ID NO: 309835 - DNA, 42 bp, Homo sapiens; identical to SEQ ID NO: 259533
  chr8:117572511-117572553
  hypo

SEQ ID NO: 309836 - DNA, 142 bp, Homo sapiens; identical to SEQ ID NO: 259534
  chr8:117631322-117631464
  hypo

SEQ ID NO: 309837 - DNA, 119 bp, Homo sapiens; identical to SEQ ID NO: 212424
  chr8:117667019-117667138
  hypo

SEQ ID NO: 309838 - DNA, 1758 bp, Homo sapiens; identical to SEQ ID NO: 201571
  chr8:117858172-117859930
  hypo

SEQ ID NO: 309839 - DNA, 84 bp, Homo sapiens; identical to SEQ ID NO: 201572
  chr8:117861184-117861268
  hypo

SEQ ID NO: 309840 - DNA, 161 bp, Homo sapiens; identical to SEQ ID NO: 201573
  chr8:117862856-117863017
  hypo

SEQ ID NO: 309841 - DNA, 149 bp, Homo sapiens; identical to SEQ ID NO: 201574
  chr8:117864186-117864335
  hypo

SEQ ID NO: 309842 - DNA, 174 bp, Homo sapiens; identical to SEQ ID NO: 201575
  chr8:117864773-117864947
  hypo

SEQ ID NO: 309843 - DNA, 224 bp, Homo sapiens; identical to SEQ ID NO: 201576
  chr8:117866483-117866707
  hypo

SEQ ID NO: 309844 - DNA, 123 bp, Homo sapiens; identical to SEQ ID NO: 201577
  chr8:117868404-117868527
  hypo

SEQ ID NO: 309845 - DNA, 133 bp, Homo sapiens; identical to SEQ ID NO: 201578
  chr8:117868877-117869010
  hypo

SEQ ID NO: 309846 - DNA, 221 bp, Homo sapiens; identical to SEQ ID NO: 201579
  chr8:117869491-117869712
  hypo

SEQ ID NO: 309847 - DNA, 107 bp, Homo sapiens; identical to SEQ ID NO: 201580
  chr8:117870590-117870697
  hypo

SEQ ID NO: 309848 - DNA, 112 bp, Homo sapiens; identical to SEQ ID NO: 201581
  chr8:117874067-117874179
  hypo

SEQ ID NO: 309849 - DNA, 130 bp, Homo sapiens; identical to SEQ ID NO: 201582
  chr8:117875368-117875498
  hypo

SEQ ID NO: 309850 - DNA, 176 bp, Homo sapiens; identical to SEQ ID NO: 201583
  chr8:117878824-117879000
  hypo

SEQ ID NO: 309851 - DNA, 114 bp, Homo sapiens; identical to SEQ ID NO: 201584
  chr8:117886849-117886963
  hypo

SEQ ID NO: 309852 - DNA, 237 bp, Homo sapiens; identical to SEQ ID NO: 117113
  chr8:117887066-117887303
  hypo

SEQ ID NO: 309853 - DNA, 250 bp, Homo sapiens; identical to SEQ ID NO: 212440
  chr8:118531587-118531837
  hypo

SEQ ID NO: 309854 - DNA, 202 bp, Homo sapiens; identical to SEQ ID NO: 259539
  chr8:118849363-118849565
  hypo

SEQ ID NO: 309855 - DNA, 212 bp, Homo sapiens; identical to SEQ ID NO: 259540
  chr8:118958836-118959048
  hypo

SEQ ID NO: 309856 - DNA, 88 bp, Homo sapiens; identical to SEQ ID NO: 259541
  chr8:119024390-119024478
  hypo

SEQ ID NO: 309857 - DNA, 120 bp, Homo sapiens; identical to SEQ ID NO: 212441
  chr8:119057047-119057167
  hypo

SEQ ID NO: 309858 - DNA, 70 bp, Homo sapiens
  chr8:119057249-119057319
  hypo
aaagataagacgtaagtctcagcaaccttctaaaaggctcaaccatatcgtacacaaagtacagtgcttt

SEQ ID NO: 309859 - DNA, 207 bp, Homo sapiens; identical to SEQ ID NO: 201586
  chr8:119123498-119123705
  hypo

SEQ ID NO: 309860 - DNA, 62 bp, Homo sapiens; identical to SEQ ID NO: 259544
  chr8:119146975-119147037
  hypo

SEQ ID NO: 309861 - DNA, 170 bp, Homo sapiens; identical to SEQ ID NO: 259545
  chr8:119611614-119611784
  hypo

SEQ ID NO: 309862 - DNA, 208 bp, Homo sapiens; identical to SEQ ID NO: 212443
  chr8:120846159-120846367
  hypo

SEQ ID NO: 309863 - DNA, 190 bp, Homo sapiens; identical to SEQ ID NO: 259547
  chr8:121292126-121292316
  hypo

SEQ ID NO: 309864 - DNA, 67 bp, Homo sapiens; identical to SEQ ID NO: 259548
  chr8:121624349-121624416
  hypo

SEQ ID NO: 309865 - DNA, 555 bp, Homo sapiens; identical to SEQ ID NO: 286169
  chr8:121823346-121823901
  hypo

SEQ ID NO: 309866 - DNA, 35 bp, Homo sapiens; identical to SEQ ID NO: 286170
  chr8:121823930-121823965
  hypo

SEQ ID NO: 309867 - DNA, 220 bp, Homo sapiens; identical to SEQ ID NO: 201592
  chr8:121824481-121824701
  hypo

SEQ ID NO: 309868 - DNA, 35 bp, Homo sapiens
  chr8:121982635-121982670
  hypo
atactttgtcccacggtatacctatcaaagtgtct

SEQ ID NO: 309869 - DNA, 38 bp, Homo sapiens; identical to SEQ ID NO: 259550
  chr8:122245400-122245438
  hypo

SEQ ID NO: 309870 - DNA, 180 bp, Homo sapiens; identical to SEQ ID NO: 259551
  chr8:122454961-122455141
  hypo

SEQ ID NO: 309871 - DNA, 259 bp, Homo sapiens; identical to SEQ ID NO: 259552
  chr8:122731385-122731644
  hypo

SEQ ID NO: 309872 - DNA, 76 bp, Homo sapiens; identical to SEQ ID NO: 212446
  chr8:123508181-123508257
  hypo

SEQ ID NO: 309873 - DNA, 55 bp, Homo sapiens; identical to SEQ ID NO: 212447
  chr8:123695434-123695489
  hypo

SEQ ID NO: 309874 - DNA, 261 bp, Homo sapiens; identical to SEQ ID NO: 212448
  chr8:123830692-123830953
  hypo

SEQ ID NO: 309875 - DNA, 86 bp, Homo sapiens; identical to SEQ ID NO: 259556
  chr8:123842813-123842899
  hypo

SEQ ID NO: 309876 - DNA, 153 bp, Homo sapiens; identical to SEQ ID NO: 259557
  chr8:123865811-123865964
  hypo

SEQ ID NO: 309877 - DNA, 35 bp, Homo sapiens; identical to SEQ ID NO: 259558
  chr8:123872985-123873020
  hypo

SEQ ID NO: 309878 - DNA, 134 bp, Homo sapiens; identical to SEQ ID NO: 259559
  chr8:123874080-123874214
  hypo

SEQ ID NO: 309879 - DNA, 331 bp, Homo sapiens; identical to SEQ ID NO: 259560
  chr8:123874762-123875093
  hypo

SEQ ID NO: 309880 - DNA, 50 bp, Homo sapiens; identical to SEQ ID NO: 259561
  chr8:123875756-123875806
  hypo

SEQ ID NO: 309881 - DNA, 86 bp, Homo sapiens; identical to SEQ ID NO: 259562
  chr8:123943476-123943562
  hypo

SEQ ID NO: 309882 - DNA, 284 bp, Homo sapiens
  chr8:124001258-124001542
  hypo
aatgttagagcccacgtggtccaatatcctgtctccaagaagccagaaagaaaaaaaaacatgaagaatggaaggatttagaagccactccgcctagggatagggaaggagatggcccggagatgctgcacagggttagacagcgcgatggggtaatacaaacacaaactttgcaggcaggtgattcaaatcctgtaatttggagcaagtgacttcacctctttcagccttggttttctcgagtgtaaaatgggaagataatgcctacatcatagagttttgaa

SEQ ID NO: 309883 - DNA, 438 bp, Homo sapiens; identical to SEQ ID NO: 259565
  chr8:124014019-124014457
  hypo

SEQ ID NO: 309884 - DNA, 78 bp, Homo sapiens; identical to SEQ ID NO: 259567
  chr8:124161306-124161384
  hypo

SEQ ID NO: 309885 - DNA, 176 bp, Homo sapiens; identical to SEQ ID NO: 259568
  chr8:124163979-124164155
  hypo

SEQ ID NO: 309886 - DNA, 306 bp, Homo sapiens; identical to SEQ ID NO: 259569
  chr8:124178878-124179184
  hypo

SEQ ID NO: 309887 - DNA, 384 bp, Homo sapiens; identical to SEQ ID NO: 259570
  chr8:124186903-124187287
  hypo

SEQ ID NO: 309888 - DNA, 225 bp, Homo sapiens; identical to SEQ ID NO: 259571
  chr8:124195483-124195708
  hypo

SEQ ID NO: 309889 - DNA, 166 bp, Homo sapiens; identical to SEQ ID NO: 259572
  chr8:124197372-124197538
  hypo

SEQ ID NO: 309890 - DNA, 283 bp, Homo sapiens; identical to SEQ ID NO: 259573
  chr8:124238537-124238820
  hypo

SEQ ID NO: 309891 - DNA, 100 bp, Homo sapiens; identical to SEQ ID NO: 259574
  chr8:124238850-124238950
  hypo

SEQ ID NO: 309892 - DNA, 141 bp, Homo sapiens; identical to SEQ ID NO: 259575
  chr8:124247665-124247806
  hypo

SEQ ID NO: 309893 - DNA, 331 bp, Homo sapiens; identical to SEQ ID NO: 259577
  chr8:124249061-124249392
  hypo

SEQ ID NO: 309894 - DNA, 82 bp, Homo sapiens; identical to SEQ ID NO: 212453
  chr8:124254706-124254788
  hypo

SEQ ID NO: 309895 - DNA, 49 bp, Homo sapiens; identical to SEQ ID NO: 212454
  chr8:124255229-124255278
  hypo

SEQ ID NO: 309896 - DNA, 42 bp, Homo sapiens; identical to SEQ ID NO: 212455
  chr8:124412835-124412877
  hypo

SEQ ID NO: 309897 - DNA, 60 bp, Homo sapiens; identical to SEQ ID NO: 259583
  chr8:124453586-124453646
  hypo

SEQ ID NO: 309898 - DNA, 35 bp, Homo sapiens; identical to SEQ ID NO: 259584
  chr8:124455528-124455563
  hypo

SEQ ID NO: 309899 - DNA, 41 bp, Homo sapiens; identical to SEQ ID NO: 212456
  chr8:124533004-124533045
  hypo

SEQ ID NO: 309900 - DNA, 51 bp, Homo sapiens
  chr8:124552151-124552202
  hypo
tcgcccccgctcaccgggctaaatgctgagagtctctgaaagtcaactgtc

SEQ ID NO: 309901 - DNA, 58 bp, Homo sapiens; identical to SEQ ID NO: 160621
  chr8:124552287-124552345
  hypo

SEQ ID NO: 309902 - DNA, 259 bp, Homo sapiens; identical to SEQ ID NO: 223478
  chr8:124552598-124552857
  hypo

SEQ ID NO: 309903 - DNA, 115 bp, Homo sapiens; identical to SEQ ID NO: 259587
  chr8:124728889-124729004
  hypo

SEQ ID NO: 309904 - DNA, 343 bp, Homo sapiens; identical to SEQ ID NO: 259588
  chr8:124729996-124730339
  hypo

SEQ ID NO: 309905 - DNA, 41 bp, Homo sapiens; identical to SEQ ID NO: 212457
  chr8:124804120-124804161
  hypo

SEQ ID NO: 309906 - DNA, 366 bp, Homo sapiens; identical to SEQ ID NO: 259590
  chr8:124965500-124965866
  hypo

SEQ ID NO: 309907 - DNA, 196 bp, Homo sapiens; identical to SEQ ID NO: 259591
  chr8:125230732-125230928
  hypo

SEQ ID NO: 309908 - DNA, 41 bp, Homo sapiens; identical to SEQ ID NO: 259594
  chr8:125455719-125455760
  hypo

SEQ ID NO: 309909 - DNA, 89 bp, Homo sapiens; identical to SEQ ID NO: 212458
  chr8:125498208-125498297
  hypo

SEQ ID NO: 309910 - DNA, 69 bp, Homo sapiens; identical to SEQ ID NO: 212459
  chr8:125498532-125498601
  hypo

SEQ ID NO: 309911 - DNA, 36 bp, Homo sapiens; identical to SEQ ID NO: 259597
  chr8:125507236-125507272
  hypo

SEQ ID NO: 309912 - DNA, 87 bp, Homo sapiens; identical to SEQ ID NO: 212460
  chr8:125553022-125553109
  hypo

SEQ ID NO: 309913 - DNA, 55 bp, Homo sapiens; identical to SEQ ID NO: 212461
  chr8:125573951-125574006
  hypo

SEQ ID NO: 309914 - DNA, 179 bp, Homo sapiens; identical to SEQ ID NO: 212462
  chr8:125574036-125574215
  hypo

SEQ ID NO: 309915 - DNA, 71 bp, Homo sapiens; identical to SEQ ID NO: 259600
  chr8:125575144-125575215
  hypo

SEQ ID NO: 309916 - DNA, 118 bp, Homo sapiens; identical to SEQ ID NO: 212463
  chr8:125580698-125580816
  hypo

SEQ ID NO: 309917 - DNA, 119 bp, Homo sapiens; identical to SEQ ID NO: 212464
  chr8:125673727-125673846
  hypo

SEQ ID NO: 309918 - DNA, 101 bp, Homo sapiens; identical to SEQ ID NO: 212465
  chr8:125680350-125680451
  hypo

SEQ ID NO: 309919 - DNA, 106 bp, Homo sapiens; identical to SEQ ID NO: 259604
  chr8:125682590-125682696
  hypo

SEQ ID NO: 309920 - DNA, 59 bp, Homo sapiens; identical to SEQ ID NO: 259605
  chr8:125739079-125739138
  hypo

SEQ ID NO: 309921 - DNA, 149 bp, Homo sapiens; identical to SEQ ID NO: 259606
  chr8:125792768-125792917
  hypo

SEQ ID NO: 309922 - DNA, 334 bp, Homo sapiens; identical to SEQ ID NO: 223479
  chr8:125985497-125985831
  hypo

SEQ ID NO: 309923 - DNA, 38 bp, Homo sapiens; identical to SEQ ID NO: 259607
  chr8:125992005-125992043
  hypo

SEQ ID NO: 309924 - DNA, 173 bp, Homo sapiens; identical to SEQ ID NO: 259609
  chr8:126042714-126042887
  hypo

SEQ ID NO: 309925 - DNA, 58 bp, Homo sapiens; identical to SEQ ID NO: 212466
  chr8:126044384-126044442
  hypo

SEQ ID NO: 309926 - DNA, 228 bp, Homo sapiens; identical to SEQ ID NO: 259611
  chr8:126061268-126061496
  hypo

SEQ ID NO: 309927 - DNA, 204 bp, Homo sapiens; identical to SEQ ID NO: 212467
  chr8:126238678-126238882
  hypo

SEQ ID NO: 309928 - DNA, 34 bp, Homo sapiens; identical to SEQ ID NO: 259613
  chr8:126288087-126288121
  hypo

SEQ ID NO: 309929 - DNA, 40 bp, Homo sapiens; identical to SEQ ID NO: 259614
  chr8:126321193-126321233
  hypo

SEQ ID NO: 309930 - DNA, 171 bp, Homo sapiens; identical to SEQ ID NO: 259615
  chr8:126374237-126374408
  hypo

SEQ ID NO: 309931 - DNA, 141 bp, Homo sapiens; identical to SEQ ID NO: 259616
  chr8:126562037-126562178
  hypo

SEQ ID NO: 309932 - DNA, 100 bp, Homo sapiens; identical to SEQ ID NO: 259617
  chr8:126628078-126628178
  hypo

SEQ ID NO: 309933 - DNA, 37 bp, Homo sapiens; identical to SEQ ID NO: 259618
  chr8:127412850-127412887
  hypo

SEQ ID NO: 309934 - DNA, 37 bp, Homo sapiens; identical to SEQ ID NO: 259619
  chr8:127413007-127413044
  hypo

SEQ ID NO: 309935 - DNA, 104 bp, Homo sapiens; identical to SEQ ID NO: 212468
  chr8:127464658-127464762
  hypo

SEQ ID NO: 309936 - DNA, 44 bp, Homo sapiens; identical to SEQ ID NO: 212469
  chr8:127465002-127465046
  hypo

SEQ ID NO: 309937 - DNA, 1247 bp, Homo sapiens; identical to SEQ ID NO: 286189
  chr8:127569676-127570923
  hypo

SEQ ID NO: 309938 - DNA, 37 bp, Homo sapiens; identical to SEQ ID NO: 259622
  chr8:127887550-127887587
  hypo

SEQ ID NO: 309939 - DNA, 54 bp, Homo sapiens; identical to SEQ ID NO: 259623
  chr8:128235796-128235850
  hypo

SEQ ID NO: 309940 - DNA, 159 bp, Homo sapiens; identical to SEQ ID NO: 259624
  chr8:128699512-128699671
  hypo

SEQ ID NO: 309941 - DNA, 125 bp, Homo sapiens; identical to SEQ ID NO: 259625
  chr8:128735792-128735917
  hypo

SEQ ID NO: 309942 - DNA, 276 bp, Homo sapiens; identical to SEQ ID NO: 259627
  chr8:128831868-128832144
  hypo

SEQ ID NO: 309943 - DNA, 93 bp, Homo sapiens; identical to SEQ ID NO: 259628
  chr8:128836045-128836138
  hypo

SEQ ID NO: 309944 - DNA, 97 bp, Homo sapiens
  chr8:128861881-128861978
  hypo
gtacatatgtgtgtgtgtgcccctgcgtgcacgtgcatgggtgcacagcctgtacatatgtgtgtgtgtgcccctgcgtgcacgtgcgtgggtgcac

SEQ ID NO: 309945 - DNA, 45 bp, Homo sapiens; identical to SEQ ID NO: 259630
  chr8:128867594-128867639
  hypo

SEQ ID NO: 309946 - DNA, 395 bp, Homo sapiens; identical to SEQ ID NO: 259631
  chr8:128867872-128868267
  hypo

SEQ ID NO: 309947 - DNA, 641 bp, Homo sapiens
  chr8:128871642-128872283
  hypo
ttctcatattacgccgtggctgactccaaacttgaactctggtctctgtttttggagcttgcttccttcctacgaccctagactgctcctcctaaataattaagtggcaaacatggcacagacagtaacctcacataagaagctatgaggttaggacagaaatatccactgctggcctgcgaactattcacacaggtctgactccccgccagagtcctggctgccctggtcctgtggaatcccgtcatggcttctgtctaaacggagcaggctcagggccatgctgaacttggagaaatctgtgcaggagtcagatttgggctttagagtcacctggggttgaatctcgggcctgctatttattgaacctgtcctagcctcaatcgccttatctgtaccatggggatgataccatctaggtcgaaggtagttgcaggagattctcatgcacggaggcccttggccgtcatttgtttctttgtctctacaagcagagaggctgagtcatacagatcctgaggggagatcactttctcttccctcctttcgtgtgtcatctccacctgggtgtggtgagccccaggaataatgctgtgacatcaagccccgtgaacacctcctttcacacggaccccgtgact

SEQ ID NO: 309948 - DNA, 290 bp, Homo sapiens; identical to SEQ ID NO: 212473
  chr8:128872459-128872749
  hypo

SEQ ID NO: 309949 - DNA, 75 bp, Homo sapiens; identical to SEQ ID NO: 212474
  chr8:128888834-128888909
  hypo

SEQ ID NO: 309950 - DNA, 64 bp, Homo sapiens; identical to SEQ ID NO: 212475
  chr8:128889422-128889486
  hypo

SEQ ID NO: 309951 - DNA, 456 bp, Homo sapiens; identical to SEQ ID NO: 212476
  chr8:128893133-128893589
  hypo

SEQ ID NO: 309952 - DNA, 41 bp, Homo sapiens; identical to SEQ ID NO: 212477
  chr8:128896287-128896328
  hypo

SEQ ID NO: 309953 - DNA, 105 bp, Homo sapiens; identical to SEQ ID NO: 212478
  chr8:128931028-128931133
  hypo

SEQ ID NO: 309954 - DNA, 163 bp, Homo sapiens; identical to SEQ ID NO: 212479
  chr8:128931261-128931424
  hypo

SEQ ID NO: 309955 - DNA, 148 bp, Homo sapiens; identical to SEQ ID NO: 212480
  chr8:128957472-128957620
  hypo

SEQ ID NO: 309956 - DNA, 75 bp, Homo sapiens; identical to SEQ ID NO: 212481
  chr8:128958209-128958284
  hypo

SEQ ID NO: 309957 - DNA, 35 bp, Homo sapiens; identical to SEQ ID NO: 212482
  chr8:129070012-129070047
  hypo

SEQ ID NO: 309958 - DNA, 90 bp, Homo sapiens; identical to SEQ ID NO: 259640
  chr8:129131614-129131704
  hypo

SEQ ID NO: 309959 - DNA, 77 bp, Homo sapiens; identical to SEQ ID NO: 259641
  chr8:129338077-129338154
  hypo

SEQ ID NO: 309960 - DNA, 42 bp, Homo sapiens; identical to SEQ ID NO: 259642
  chr8:129533966-129534008
  hypo

SEQ ID NO: 309961 - DNA, 34 bp, Homo sapiens; identical to SEQ ID NO: 259643
  chr8:129893541-129893575
  hypo

SEQ ID NO: 309962 - DNA, 85 bp, Homo sapiens; identical to SEQ ID NO: 259644
  chr8:129909748-129909833
  hypo

SEQ ID NO: 309963 - DNA, 34 bp, Homo sapiens; identical to SEQ ID NO: 259645
  chr8:129996835-129996869
  hypo

SEQ ID NO: 309964 - DNA, 146 bp, Homo sapiens; identical to SEQ ID NO: 259646
  chr8:130368693-130368839
  hypo

SEQ ID NO: 309965 - DNA, 187 bp, Homo sapiens; identical to SEQ ID NO: 212483
  chr8:131064016-131064203
  hypo

SEQ ID NO: 309966 - DNA, 319 bp, Homo sapiens; identical to SEQ ID NO: 259648
  chr8:131070005-131070324
  hypo

SEQ ID NO: 309967 - DNA, 39 bp, Homo sapiens; identical to SEQ ID NO: 259649
  chr8:131082547-131082586
  hypo

SEQ ID NO: 309968 - DNA, 338 bp, Homo sapiens; identical to SEQ ID NO: 212484
  chr8:131085738-131086076
  hypo

SEQ ID NO: 309969 - DNA, 211 bp, Homo sapiens; identical to SEQ ID NO: 259651
  chr8:131098481-131098692
  hypo

SEQ ID NO: 309970 - DNA, 133 bp, Homo sapiens; identical to SEQ ID NO: 259652
  chr8:131124331-131124464
  hypo

SEQ ID NO: 309971 - DNA, 106 bp, Homo sapiens; identical to SEQ ID NO: 286194
  chr8:131455078-131455184
  hypo

SEQ ID NO: 309972 - DNA, 43 bp, Homo sapiens; identical to SEQ ID NO: 259653
  chr8:132966090-132966133
  hypo

SEQ ID NO: 309973 - DNA, 202 bp, Homo sapiens; identical to SEQ ID NO: 286197
  chr8:133491909-133492111
  hypo

SEQ ID NO: 309974 - DNA, 63 bp, Homo sapiens; identical to SEQ ID NO: 201602
  chr8:133492127-133492190
  hypo

SEQ ID NO: 309975 - DNA, 310 bp, Homo sapiens; identical to SEQ ID NO: 286199
  chr8:133493185-133493495
  hypo

SEQ ID NO: 309976 - DNA, 77 bp, Homo sapiens; identical to SEQ ID NO: 259655
  chr8:133906404-133906481
  hypo

SEQ ID NO: 309977 - DNA, 369 bp, Homo sapiens; identical to SEQ ID NO: 259656
  chr8:134224536-134224905
  hypo

SEQ ID NO: 309978 - DNA, 364 bp, Homo sapiens; identical to SEQ ID NO: 201605
  chr8:134232709-134233073
  hypo

SEQ ID NO: 309979 - DNA, 175 bp, Homo sapiens; identical to SEQ ID NO: 212491
  chr8:134251104-134251279
  hypo

SEQ ID NO: 309980 - DNA, 142 bp, Homo sapiens; identical to SEQ ID NO: 212492
  chr8:134254200-134254342
  hypo

SEQ ID NO: 309981 - DNA, 134 bp, Homo sapiens; identical to SEQ ID NO: 259660
  chr8:134268417-134268551
  hypo

SEQ ID NO: 309982 - DNA, 483 bp, Homo sapiens; identical to SEQ ID NO: 259661
  chr8:134278414-134278897
  hypo

SEQ ID NO: 309983 - DNA, 155 bp, Homo sapiens; identical to SEQ ID NO: 259662
  chr8:134297710-134297865
  hypo

SEQ ID NO: 309984 - DNA, 677 bp, Homo sapiens; identical to SEQ ID NO: 286202
  chr8:134308718-134309395
  hypo

SEQ ID NO: 309985 - DNA, 205 bp, Homo sapiens; identical to SEQ ID NO: 212495
  chr8:134335639-134335844
  hypo

SEQ ID NO: 309986 - DNA, 213 bp, Homo sapiens; identical to SEQ ID NO: 259664
  chr8:134462495-134462708
  hypo

SEQ ID NO: 309987 - DNA, 255 bp, Homo sapiens; identical to SEQ ID NO: 212496
  chr8:134466989-134467244
  hypo

SEQ ID NO: 309988 - DNA, 46 bp, Homo sapiens; identical to SEQ ID NO: 212497
  chr8:134470075-134470121
  hypo

SEQ ID NO: 309989 - DNA, 162 bp, Homo sapiens; identical to SEQ ID NO: 212498
  chr8:134478325-134478487
  hypo

SEQ ID NO: 309990 - DNA, 43 bp, Homo sapiens; identical to SEQ ID NO: 212499
  chr8:134482029-134482072
  hypo

SEQ ID NO: 309991 - DNA, 31 bp, Homo sapiens; identical to SEQ ID NO: 212500
  chr8:134482375-134482406
  hypo

SEQ ID NO: 309992 - DNA, 71 bp, Homo sapiens
  chr8:134545338-134545409
  hypo
ttcctggaatccctggatttccatggaatgtgggccttctagtcccccagcgcccccgcagtccaatggca

SEQ ID NO: 309993 - DNA, 56 bp, Homo sapiens; identical to SEQ ID NO: 201608
  chr8:134581293-134581349
  hypo

SEQ ID NO: 309994 - DNA, 1441 bp, Homo sapiens; identical to SEQ ID NO: 286205
  chr8:134581732-134583173
  hypo

SEQ ID NO: 309995 - DNA, 924 bp, Homo sapiens; identical to SEQ ID NO: 286206
  chr8:134583293-134584217
  hypo

SEQ ID NO: 309996 - DNA, 43 bp, Homo sapiens; identical to SEQ ID NO: 259671
  chr8:134602079-134602122
  hypo

SEQ ID NO: 309997 - DNA, 283 bp, Homo sapiens; identical to SEQ ID NO: 259672
  chr8:134686551-134686834
  hypo

SEQ ID NO: 309998 - DNA, 39 bp, Homo sapiens; identical to SEQ ID NO: 259673
  chr8:135003999-135004038
  hypo

SEQ ID NO: 309999 - DNA, 161 bp, Homo sapiens; identical to SEQ ID NO: 259675
  chr8:135348405-135348566
  hypo

SEQ ID NO: 310000 - DNA, 178 bp, Homo sapiens; identical to SEQ ID NO: 259676
  chr8:135563400-135563578
  hypo

SEQ ID NO: 310001 - DNA, 85 bp, Homo sapiens; identical to SEQ ID NO: 259677
  chr8:135805714-135805799
  hypo

SEQ ID NO: 310002 - DNA, 116 bp, Homo sapiens; identical to SEQ ID NO: 212502
  chr8:135871437-135871553
  hypo

SEQ ID NO: 310003 - DNA, 104 bp, Homo sapiens; identical to SEQ ID NO: 259679
  chr8:135950261-135950365
  hypo

SEQ ID NO: 310004 - DNA, 83 bp, Homo sapiens; identical to SEQ ID NO: 259680
  chr8:136440095-136440178
  hypo

SEQ ID NO: 310005 - DNA, 853 bp, Homo sapiens; identical to SEQ ID NO: 286211
  chr8:136469302-136470155
  hypo

SEQ ID NO: 310006 - DNA, 220 bp, Homo sapiens; identical to SEQ ID NO: 286212
  chr8:136470313-136470533
  hypo

SEQ ID NO: 310007 - DNA, 98 bp, Homo sapiens; identical to SEQ ID NO: 259681
  chr8:136577245-136577343
  hypo

SEQ ID NO: 310008 - DNA, 81 bp, Homo sapiens; identical to SEQ ID NO: 259682
  chr8:138498657-138498738
  hypo

SEQ ID NO: 310009 - DNA, 42 bp, Homo sapiens; identical to SEQ ID NO: 259684
  chr8:139096093-139096135
  hypo

SEQ ID NO: 310010 - DNA, 96 bp, Homo sapiens; identical to SEQ ID NO: 259685
  chr8:139356749-139356845
  hypo

SEQ ID NO: 310011 - DNA, 36 bp, Homo sapiens; identical to SEQ ID NO: 259686
  chr8:139357085-139357121
  hypo

SEQ ID NO: 310012 - DNA, 102 bp, Homo sapiens; identical to SEQ ID NO: 286213
  chr8:139509549-139509651
  hypo

SEQ ID NO: 310013 - DNA, 251 bp, Homo sapiens; identical to SEQ ID NO: 259687
  chr8:139833381-139833632
  hypo

SEQ ID NO: 310014 - DNA, 141 bp, Homo sapiens; identical to SEQ ID NO: 212504
  chr8:139889990-139890131
  hypo

SEQ ID NO: 310015 - DNA, 87 bp, Homo sapiens; identical to SEQ ID NO: 259689
  chr8:140383823-140383910
  hypo

SEQ ID NO: 310016 - DNA, 35 bp, Homo sapiens; identical to SEQ ID NO: 259690
  chr8:140616736-140616771
  hypo

SEQ ID NO: 310017 - DNA, 319 bp, Homo sapiens; identical to SEQ ID NO: 212505
  chr8:140630637-140630956
  hypo

SEQ ID NO: 310018 - DNA, 298 bp, Homo sapiens; identical to SEQ ID NO: 212506
  chr8:140630986-140631284
  hypo

SEQ ID NO: 310019 - DNA, 114 bp, Homo sapiens
  chr8:140691494-140691608
  hypo
cgcacaggtgcaggcccagctggcacctgcctctgctctcccctcctcttgccgagaaggcaggatgcggaatggcaggtgaaaggcactccctgagcacgggggtgtgggaac

SEQ ID NO: 310020 - DNA, 203 bp, Homo sapiens; identical to SEQ ID NO: 201610
  chr8:140716452-140716655
  hypo

SEQ ID NO: 310021 - DNA, 84 bp, Homo sapiens; identical to SEQ ID NO: 259693
  chr8:140719205-140719289
  hypo

SEQ ID NO: 310022 - DNA, 167 bp, Homo sapiens; identical to SEQ ID NO: 259694
  chr8:140744186-140744353
  hypo

SEQ ID NO: 310023 - DNA, 146 bp, Homo sapiens; identical to SEQ ID NO: 259695
  chr8:140751424-140751570
  hypo

SEQ ID NO: 310024 - DNA, 36 bp, Homo sapiens
  chr8:140755550-140755586
  hypo
actctactctccaaccttttgcgctggcgagaaaca

SEQ ID NO: 310025 - DNA, 284 bp, Homo sapiens; identical to SEQ ID NO: 259697
  chr8:140756690-140756974
  hypo

SEQ ID NO: 310026 - DNA, 84 bp, Homo sapiens; identical to SEQ ID NO: 259698
  chr8:140757362-140757446
  hypo

SEQ ID NO: 310027 - DNA, 44 bp, Homo sapiens; identical to SEQ ID NO: 259699
  chr8:140757750-140757794
  hypo

SEQ ID NO: 310028 - DNA, 315 bp, Homo sapiens; identical to SEQ ID NO: 212508
  chr8:140758126-140758441
  hypo

SEQ ID NO: 310029 - DNA, 240 bp, Homo sapiens; identical to SEQ ID NO: 259701
  chr8:140770346-140770586
  hypo

SEQ ID NO: 310030 - DNA, 265 bp, Homo sapiens; identical to SEQ ID NO: 259702
  chr8:140774448-140774713
  hypo

SEQ ID NO: 310031 - DNA, 356 bp, Homo sapiens; identical to SEQ ID NO: 259703
  chr8:140775903-140776259
  hypo

SEQ ID NO: 310032 - DNA, 374 bp, Homo sapiens; identical to SEQ ID NO: 259704
  chr8:140785340-140785714
  hypo

SEQ ID NO: 310033 - DNA, 350 bp, Homo sapiens; identical to SEQ ID NO: 259705
  chr8:140799716-140800066
  hypo

SEQ ID NO: 310034 - DNA, 122 bp, Homo sapiens; identical to SEQ ID NO: 212509
  chr8:140802163-140802285
  hypo

SEQ ID NO: 310035 - DNA, 132 bp, Homo sapiens; identical to SEQ ID NO: 259707
  chr8:140802500-140802632
  hypo

SEQ ID NO: 310036 - DNA, 249 bp, Homo sapiens; identical to SEQ ID NO: 259708
  chr8:140807902-140808151
  hypo

SEQ ID NO: 310037 - DNA, 120 bp, Homo sapiens; identical to SEQ ID NO: 259709
  chr8:140809392-140809512
  hypo

SEQ ID NO: 310038 - DNA, 500 bp, Homo sapiens; identical to SEQ ID NO: 259710
  chr8:140815075-140815575
  hypo

SEQ ID NO: 310039 - DNA, 113 bp, Homo sapiens
  chr8:140834002-140834115
  hypo
gccaccactgcgcacgggacccgtgagcttgttaaggcttctgagtagagaccaacagattcgtgtgccataatagcctggtaaataggaatcaaaaaggtagcagctggagt

SEQ ID NO: 310040 - DNA, 92 bp, Homo sapiens; identical to SEQ ID NO: 212510
  chr8:140834749-140834841
  hypo

SEQ ID NO: 310041 - DNA, 212 bp, Homo sapiens; identical to SEQ ID NO: 259714
  chr8:140844033-140844245
  hypo

SEQ ID NO: 310042 - DNA, 85 bp, Homo sapiens; identical to SEQ ID NO: 259715
  chr8:140844598-140844683
  hypo

SEQ ID NO: 310043 - DNA, 140 bp, Homo sapiens; identical to SEQ ID NO: 212511
  chr8:140847596-140847736
  hypo

SEQ ID NO: 310044 - DNA, 310 bp, Homo sapiens; identical to SEQ ID NO: 259717
  chr8:140859761-140860071
  hypo

SEQ ID NO: 310045 - DNA, 164 bp, Homo sapiens; identical to SEQ ID NO: 259718
  chr8:140871034-140871198
  hypo

SEQ ID NO: 310046 - DNA, 167 bp, Homo sapiens; identical to SEQ ID NO: 259719
  chr8:140920092-140920259
  hypo

SEQ ID NO: 310047 - DNA, 219 bp, Homo sapiens; identical to SEQ ID NO: 259720
  chr8:140932073-140932292
  hypo

SEQ ID NO: 310048 - DNA, 680 bp, Homo sapiens; identical to SEQ ID NO: 259721
  chr8:140937003-140937683
  hypo

SEQ ID NO: 310049 - DNA, 130 bp, Homo sapiens; identical to SEQ ID NO: 259722
  chr8:140950012-140950142
  hypo

SEQ ID NO: 310050 - DNA, 58 bp, Homo sapiens; identical to SEQ ID NO: 212513
  chr8:140962580-140962638
  hypo

SEQ ID NO: 310051 - DNA, 161 bp, Homo sapiens
  chr8:140963396-140963557
  hypo
ctccatttcttcctcctaagaagttggagaatcaccctgacacctcacagaattggtatgggaaggaacaaagcctctgccaacgctcctcacacaaagccctactcctataggggcttgatgcctgcaggccccaccgttctcttcgaagtggtcacagc

SEQ ID NO: 310052 - DNA, 69 bp, Homo sapiens; identical to SEQ ID NO: 259725
  chr8:140968327-140968396
  hypo

SEQ ID NO: 310053 - DNA, 334 bp, Homo sapiens
  chr8:140971011-140971345
  hypo
cttatttacagacacgccccgaggcaggacagggtgtgcagtcagcttccttagacatgtaaggagtgccttttcctttccacaaggaaaaggggagttgtgtagacaccatgagatgtgaccactgccctcgggaacacatgccagagatgacagcctgacacagagcactgcattccgagtcacacagaggagcactgcattccgagtcacacaggggagccctgcattccgagtcacacaggggagcactgcattccgagtcacacgggggagcactgcattccgagtcacacgggggagcactgcattccgagtcacacgggggaggcct

SEQ ID NO: 310054 - DNA, 162 bp, Homo sapiens
  chr8:140971375-140971537
  hypo
ttccgagtcacacgggggagccctgcattccgagtcacacgggggagccctgcattccgagtcacacgggggagccctgcattccgagtcacacgggggagccctgcattccgagtcacacgggggagccctgcattccgagtcacacgggggagccctgca

SEQ ID NO: 310055 - DNA, 114 bp, Homo sapiens; identical to SEQ ID NO: 259727
  chr8:140992412-140992526
  hypo

SEQ ID NO: 310056 - DNA, 379 bp, Homo sapiens; identical to SEQ ID NO: 259728
  chr8:141052508-141052887
  hypo

SEQ ID NO: 310057 - DNA, 76 bp, Homo sapiens
  chr8:141054769-141054845
  hypo
cttcggcactgatacgcagggctttcagaagattacagcttctcgcctcggggagaataagtccctattataaatg

SEQ ID NO: 310058 - DNA, 141 bp, Homo sapiens
  chr8:141054875-141055016
  hypo
tttttcctaatgcacagctgcaaaagagaaaattttcccttgtgtgctaaatacgcatttctaattaccctcacctaagatgcattcactctaaagactaagaatagctaactgatataacttacacgcagtaatatagtc

SEQ ID NO: 310059 - DNA, 186 bp, Homo sapiens; identical to SEQ ID NO: 212515
  chr8:141071378-141071564
  hypo

SEQ ID NO: 310060 - DNA, 153 bp, Homo sapiens
  chr8:141107001-141107154
  hypo
tgctgagaagtcaagaagaatgtgtcctcgcagctcctcctgcagcacctcacagtgcacaaccggctgggccagcccatccagcatagagatgtgaaaacctgtccaggtcgctggtgtatagccagaacaatggcacggggcagggcaaag

SEQ ID NO: 310061 - DNA, 131 bp, Homo sapiens
  chr8:141107409-141107540
  hypo
ggctcacccgagtccgccatgcgcagccctgccactgtctgcagggtaaggacgcccacctgggttcttgtgccagccacagttgtgccacagtccgtagggtaaggactcccccagagtaaggactcccg

SEQ ID NO: 310062 - DNA, 167 bp, Homo sapiens; identical to SEQ ID NO: 212516
  chr8:141107863-141108030
  hypo

SEQ ID NO: 310063 - DNA, 427 bp, Homo sapiens; identical to SEQ ID NO: 212517
  chr8:141147340-141147767
  hypo

SEQ ID NO: 310064 - DNA, 72 bp, Homo sapiens; identical to SEQ ID NO: 212518
  chr8:141159287-141159359
  hypo

SEQ ID NO: 310065 - DNA, 67 bp, Homo sapiens; identical to SEQ ID NO: 212519
  chr8:141159949-141160016
  hypo

SEQ ID NO: 310066 - DNA, 38 bp, Homo sapiens; identical to SEQ ID NO: 259736
  chr8:141185739-141185777
  hypo

SEQ ID NO: 310067 - DNA, 160 bp, Homo sapiens; identical to SEQ ID NO: 259738
  chr8:141213695-141213855
  hypo

SEQ ID NO: 310068 - DNA, 63 bp, Homo sapiens
  chr8:141219190-141219253
  hypo
cataggccctgaaggggccccgtggacacactctgcctcttccgtggcatctctgtggtgagg

SEQ ID NO: 310069 - DNA, 128 bp, Homo sapiens
  chr8:141219283-141219411
  hypo
gcaggagtcactcccgtgtctttccttgtttgtccacgtggtatttgtttgctgcttgtctcttctgctggatgtcagctcaggaacgtcgccttgttcactgttacgcccccagcattcagaactgg

SEQ ID NO: 310070 - DNA, 119 bp, Homo sapiens; identical to SEQ ID NO: 212520
  chr8:141231524-141231643
  hypo

SEQ ID NO: 310071 - DNA, 159 bp, Homo sapiens; identical to SEQ ID NO: 259741
  chr8:141233423-141233582
  hypo

SEQ ID NO: 310072 - DNA, 145 bp, Homo sapiens; identical to SEQ ID NO: 212521
  chr8:141249621-141249766
  hypo

SEQ ID NO: 310073 - DNA, 188 bp, Homo sapiens; identical to SEQ ID NO: 223497
  chr8:141260487-141260675
  hypo

SEQ ID NO: 310074 - DNA, 285 bp, Homo sapiens; identical to SEQ ID NO: 259743
  chr8:141265017-141265302
  hypo

SEQ ID NO: 310075 - DNA, 135 bp, Homo sapiens; identical to SEQ ID NO: 259744
  chr8:141267397-141267532
  hypo

SEQ ID NO: 310076 - DNA, 347 bp, Homo sapiens; identical to SEQ ID NO: 212522
  chr8:141268122-141268469
  hypo

SEQ ID NO: 310077 - DNA, 205 bp, Homo sapiens; identical to SEQ ID NO: 259746
  chr8:141273172-141273377
  hypo

SEQ ID NO: 310078 - DNA, 100 bp, Homo sapiens; identical to SEQ ID NO: 259747
  chr8:141290061-141290161
  hypo

SEQ ID NO: 310079 - DNA, 36 bp, Homo sapiens; identical to SEQ ID NO: 212523
  chr8:141343757-141343793
  hypo

SEQ ID NO: 310080 - DNA, 35 bp, Homo sapiens
  chr8:141347684-141347719
  hypo
gactcatccagatgcgcctccctccggctctgcca

SEQ ID NO: 310081 - DNA, 77 bp, Homo sapiens; identical to SEQ ID NO: 259750
  chr8:141436007-141436084
  hypo

SEQ ID NO: 310082 - DNA, 198 bp, Homo sapiens; identical to SEQ ID NO: 259751
  chr8:141455583-141455781
  hypo

SEQ ID NO: 310083 - DNA, 295 bp, Homo sapiens; identical to SEQ ID NO: 212524
  chr8:141458751-141459046
  hypo

SEQ ID NO: 310084 - DNA, 31 bp, Homo sapiens; identical to SEQ ID NO: 67308
  chr8:141466495-141466526
  hypo

SEQ ID NO: 310085 - DNA, 34 bp, Homo sapiens; identical to SEQ ID NO: 259754
  chr8:141523825-141523859
  hypo

SEQ ID NO: 310086 - DNA, 76 bp, Homo sapiens; identical to SEQ ID NO: 259755
  chr8:141525507-141525583
  hypo

SEQ ID NO: 310087 - DNA, 118 bp, Homo sapiens; identical to SEQ ID NO: 259756
  chr8:141534528-141534646
  hypo

SEQ ID NO: 310088 - DNA, 80 bp, Homo sapiens; identical to SEQ ID NO: 259757
  chr8:141539851-141539931
  hypo

SEQ ID NO: 310089 - DNA, 501 bp, Homo sapiens; identical to SEQ ID NO: 259758
  chr8:141543887-141544388
  hypo

SEQ ID NO: 310090 - DNA, 94 bp, Homo sapiens; identical to SEQ ID NO: 259759
  chr8:141545610-141545704
  hypo

SEQ ID NO: 310091 - DNA, 48 bp, Homo sapiens
  chr8:141559646-141559694
  hypo
ggctaacttgccaccgtaacacagcagcctttaaaccgcgctcacgct

SEQ ID NO: 310092 - DNA, 32 bp, Homo sapiens
  chr8:141559724-141559756
  hypo
gatgcgatgctgtccccgtaaagctgctgagc

SEQ ID NO: 310093 - DNA, 411 bp, Homo sapiens; identical to SEQ ID NO: 259761
  chr8:141565895-141566306
  hypo

SEQ ID NO: 310094 - DNA, 45 bp, Homo sapiens; identical to SEQ ID NO: 212527
  chr8:141566686-141566731
  hypo

SEQ ID NO: 310095 - DNA, 149 bp, Homo sapiens; identical to SEQ ID NO: 212528
  chr8:141568114-141568263
  hypo

SEQ ID NO: 310096 - DNA, 66 bp, Homo sapiens; identical to SEQ ID NO: 212529
  chr8:141587942-141588008
  hypo

SEQ ID NO: 310097 - DNA, 404 bp, Homo sapiens; identical to SEQ ID NO: 259765
  chr8:141588239-141588643
  hypo

SEQ ID NO: 310098 - DNA, 161 bp, Homo sapiens; identical to SEQ ID NO: 212531
  chr8:141589815-141589976
  hypo

SEQ ID NO: 310099 - DNA, 102 bp, Homo sapiens; identical to SEQ ID NO: 212532
  chr8:141594755-141594857
  hypo

SEQ ID NO: 310100 - DNA, 50 bp, Homo sapiens; identical to SEQ ID NO: 212533
  chr8:141594912-141594962
  hypo

SEQ ID NO: 310101 - DNA, 31 bp, Homo sapiens; identical to SEQ ID NO: 212534
  chr8:141596788-141596819
  hypo

SEQ ID NO: 310102 - DNA, 43 bp, Homo sapiens; identical to SEQ ID NO: 212535
  chr8:141597187-141597230
  hypo

SEQ ID NO: 310103 - DNA, 316 bp, Homo sapiens; identical to SEQ ID NO: 212536
  chr8:141599859-141600175
  hypo

SEQ ID NO: 310104 - DNA, 47 bp, Homo sapiens; identical to SEQ ID NO: 212537
  chr8:141600284-141600331
  hypo

SEQ ID NO: 310105 - DNA, 218 bp, Homo sapiens; identical to SEQ ID NO: 259771
  chr8:141603917-141604135
  hypo

SEQ ID NO: 310106 - DNA, 177 bp, Homo sapiens; identical to SEQ ID NO: 212538
  chr8:141613218-141613395
  hypo

SEQ ID NO: 310107 - DNA, 86 bp, Homo sapiens; identical to SEQ ID NO: 259773
  chr8:141623740-141623826
  hypo

SEQ ID NO: 310108 - DNA, 123 bp, Homo sapiens; identical to SEQ ID NO: 259774
  chr8:141624846-141624969
  hypo

SEQ ID NO: 310109 - DNA, 49 bp, Homo sapiens; identical to SEQ ID NO: 259775
  chr8:141633674-141633723
  hypo

SEQ ID NO: 310110 - DNA, 133 bp, Homo sapiens; identical to SEQ ID NO: 259776
  chr8:141634057-141634190
  hypo

SEQ ID NO: 310111 - DNA, 223 bp, Homo sapiens; identical to SEQ ID NO: 259777
  chr8:141634459-141634682
  hypo

SEQ ID NO: 310112 - DNA, 152 bp, Homo sapiens; identical to SEQ ID NO: 212539
  chr8:141636160-141636312
  hypo

SEQ ID NO: 310113 - DNA, 81 bp, Homo sapiens; identical to SEQ ID NO: 201611
  chr8:141644414-141644495
  hypo

SEQ ID NO: 310114 - DNA, 219 bp, Homo sapiens; identical to SEQ ID NO: 259779
  chr8:141704910-141705129
  hypo

SEQ ID NO: 310115 - DNA, 42 bp, Homo sapiens; identical to SEQ ID NO: 212542
  chr8:141738005-141738047
  hypo

SEQ ID NO: 310116 - DNA, 91 bp, Homo sapiens; identical to SEQ ID NO: 212543
  chr8:141741358-141741449
  hypo

SEQ ID NO: 310117 - DNA, 176 bp, Homo sapiens; identical to SEQ ID NO: 259782
  chr8:141745321-141745497
  hypo

SEQ ID NO: 310118 - DNA, 761 bp, Homo sapiens; identical to SEQ ID NO: 201612
  chr8:142010302-142011063
  hypo

SEQ ID NO: 310119 - DNA, 1210 bp, Homo sapiens; identical to SEQ ID NO: 45893
  chr8:142011091-142012301
  hypo

SEQ ID NO: 310120 - DNA, 54 bp, Homo sapiens; identical to SEQ ID NO: 259783
  chr8:142112482-142112536
  hypo

SEQ ID NO: 310121 - DNA, 1660 bp, Homo sapiens; identical to SEQ ID NO: 286221
  chr8:142138200-142139860
  hypo

SEQ ID NO: 310122 - DNA, 42 bp, Homo sapiens; identical to SEQ ID NO: 226542
  chr8:142141062-142141104
  hypo

SEQ ID NO: 310123 - DNA, 50 bp, Homo sapiens; identical to SEQ ID NO: 259785
  chr8:142149852-142149902
  hypo

SEQ ID NO: 310124 - DNA, 210 bp, Homo sapiens; identical to SEQ ID NO: 212548
  chr8:142157057-142157267
  hypo

SEQ ID NO: 310125 - DNA, 151 bp, Homo sapiens; identical to SEQ ID NO: 259787
  chr8:142165998-142166149
  hypo

SEQ ID NO: 310126 - DNA, 148 bp, Homo sapiens; identical to SEQ ID NO: 259788
  chr8:142176329-142176477
  hypo

SEQ ID NO: 310127 - DNA, 53 bp, Homo sapiens; identical to SEQ ID NO: 212549
  chr8:142178200-142178253
  hypo

SEQ ID NO: 310128 - DNA, 234 bp, Homo sapiens; identical to SEQ ID NO: 259790
  chr8:142186981-142187215
  hypo

SEQ ID NO: 310129 - DNA, 76 bp, Homo sapiens; identical to SEQ ID NO: 259791
  chr8:142188438-142188514
  hypo

SEQ ID NO: 310130 - DNA, 235 bp, Homo sapiens; identical to SEQ ID NO: 259792
  chr8:142190007-142190242
  hypo

SEQ ID NO: 310131 - DNA, 214 bp, Homo sapiens
  chr8:142190625-142190839
  hypo
cctggccactcactcgcacaccaggtgacaaccaggaaaggaggccgagggtgcatggctttctttcagtgccccgggtccaagagaccttcgtcttcacaaattaggaagttttacctgcaagctgatattctgcagaaatcagagtgcgtgaggccgttgcatcgcgtctgtttccttgaggctgcaacagtaacactccaagtgtcttgtc

SEQ ID NO: 310132 - DNA, 356 bp, Homo sapiens
  chr8:142190869-142191225
  hypo
ccctggaaacactgaagcataaaatcaacccctcggcgggggaggcgttcccacaagcggtggacgtgctgctctacactccaggtaaggcccctctgcccgcgcctcgctgccagttttcagccaatctgatgcgcttaggtttgggttcagggtcagccctgaagtgaaaggggagccagtgtcacgggataagtggggacaaggtgcctgttgctttctgaggtgaagtgctgagtgacaggtgtgcagctggcacgaccgctccacggactcagcctcacggtgactggagccagagagcccacgggagatggaattggggccagcacttgagctcccgccccagggctgcc

SEQ ID NO: 310133 - DNA, 514 bp, Homo sapiens; identical to SEQ ID NO: 259794
  chr8:142202626-142203140
  hypo

SEQ ID NO: 310134 - DNA, 241 bp, Homo sapiens; identical to SEQ ID NO: 212552
  chr8:142203890-142204131
  hypo

SEQ ID NO: 310135 - DNA, 318 bp, Homo sapiens; identical to SEQ ID NO: 259796
  chr8:142221150-142221468
  hypo

SEQ ID NO: 310136 - DNA, 86 bp, Homo sapiens; identical to SEQ ID NO: 212554
  chr8:142226699-142226785
  hypo

SEQ ID NO: 310137 - DNA, 328 bp, Homo sapiens; identical to SEQ ID NO: 259798
  chr8:142227281-142227609
  hypo

SEQ ID NO: 310138 - DNA, 511 bp, Homo sapiens; identical to SEQ ID NO: 212555
  chr8:142228300-142228811
  hypo

SEQ ID NO: 310139 - DNA, 969 bp, Homo sapiens; identical to SEQ ID NO: 212556
  chr8:142235170-142236139
  hypo

SEQ ID NO: 310140 - DNA, 127 bp, Homo sapiens; identical to SEQ ID NO: 212557
  chr8:142236375-142236502
  hypo

SEQ ID NO: 310141 - DNA, 71 bp, Homo sapiens; identical to SEQ ID NO: 259802
  chr8:142236532-142236603
  hypo

SEQ ID NO: 310142 - DNA, 1235 bp, Homo sapiens; identical to SEQ ID NO: 259803
  chr8:142240166-142241401
  hypo

SEQ ID NO: 310143 - DNA, 204 bp, Homo sapiens
  chr8:142242734-142242938
  hypo
ctcacaagctgcaacgggaacacagacattcagtggctcccaggtgagcgctcaccagctgcaacgggaacacagacattcagtggctcaacacagacattcagtggctcccaggtgagcactcacaagctgcaacgggaacacacacactcagtggctcccaggtgagcgctcgcgagctgcaacgggaacacacgcactcaa

SEQ ID NO: 310144 - DNA, 108 bp, Homo sapiens; identical to SEQ ID NO: 212560
  chr8:142243840-142243948
  hypo

SEQ ID NO: 310145 - DNA, 87 bp, Homo sapiens
  chr8:142244214-142244301
  hypo
tcacctgagggagtggggactgttcttctctatgtccactgaggcctaattcacatctcgtccctcggaaacctcagccctagcctg

SEQ ID NO: 310146 - DNA, 77 bp, Homo sapiens; identical to SEQ ID NO: 259807
  chr8:142247722-142247799
  hypo

SEQ ID NO: 310147 - DNA, 239 bp, Homo sapiens; identical to SEQ ID NO: 259808
  chr8:142248306-142248545
  hypo

SEQ ID NO: 310148 - DNA, 191 bp, Homo sapiens; identical to SEQ ID NO: 259809
  chr8:142252917-142253108
  hypo

SEQ ID NO: 310149 - DNA, 67 bp, Homo sapiens
  chr8:142260822-142260889
  hypo
tatgacgtgcggtgcggtaggtgtgttaaatccattttcgactcaaggtattttcaacgatgggttt

SEQ ID NO: 310150 - DNA, 142 bp, Homo sapiens; identical to SEQ ID NO: 212561
  chr8:142262365-142262507
  hypo

SEQ ID NO: 310151 - DNA, 600 bp, Homo sapiens; identical to SEQ ID NO: 212562
  chr8:142262687-142263287
  hypo

SEQ ID NO: 310152 - DNA, 141 bp, Homo sapiens; identical to SEQ ID NO: 212563
  chr8:142263347-142263488
  hypo

SEQ ID NO: 310153 - DNA, 367 bp, Homo sapiens; identical to SEQ ID NO: 212564
  chr8:142264058-142264425
  hypo

SEQ ID NO: 310154 - DNA, 309 bp, Homo sapiens; identical to SEQ ID NO: 212565
  chr8:142277203-142277512
  hypo

SEQ ID NO: 310155 - DNA, 320 bp, Homo sapiens; identical to SEQ ID NO: 259816
  chr8:142277817-142278137
  hypo

SEQ ID NO: 310156 - DNA, 117 bp, Homo sapiens; identical to SEQ ID NO: 259817
  chr8:142278840-142278957
  hypo

SEQ ID NO: 310157 - DNA, 267 bp, Homo sapiens; identical to SEQ ID NO: 259818
  chr8:142279182-142279449
  hypo

SEQ ID NO: 310158 - DNA, 155 bp, Homo sapiens; identical to SEQ ID NO: 212567
  chr8:142280196-142280351
  hypo

SEQ ID NO: 310159 - DNA, 200 bp, Homo sapiens; identical to SEQ ID NO: 259820
  chr8:142283871-142284071
  hypo

SEQ ID NO: 310160 - DNA, 241 bp, Homo sapiens; identical to SEQ ID NO: 212568
  chr8:142290886-142291127
  hypo

SEQ ID NO: 310161 - DNA, 481 bp, Homo sapiens; identical to SEQ ID NO: 259823
  chr8:142294981-142295462
  hypo

SEQ ID NO: 310162 - DNA, 111 bp, Homo sapiens; identical to SEQ ID NO: 212569
  chr8:142295926-142296037
  hypo

SEQ ID NO: 310163 - DNA, 184 bp, Homo sapiens; identical to SEQ ID NO: 259825
  chr8:142296404-142296588
  hypo

SEQ ID NO: 310164 - DNA, 159 bp, Homo sapiens; identical to SEQ ID NO: 286224
  chr8:142297598-142297757
  hypo

SEQ ID NO: 310165 - DNA, 31 bp, Homo sapiens; identical to SEQ ID NO: 212570
  chr8:142304055-142304086
  hypo

SEQ ID NO: 310166 - DNA, 144 bp, Homo sapiens; identical to SEQ ID NO: 212571
  chr8:142305925-142306069
  hypo

SEQ ID NO: 310167 - DNA, 83 bp, Homo sapiens; identical to SEQ ID NO: 259829
  chr8:142310045-142310128
  hypo

SEQ ID NO: 310168 - DNA, 222 bp, Homo sapiens; identical to SEQ ID NO: 212572
  chr8:142312689-142312911
  hypo

SEQ ID NO: 310169 - DNA, 448 bp, Homo sapiens; identical to SEQ ID NO: 201616
  chr8:142317707-142318155
  hypo

SEQ ID NO: 310170 - DNA, 413 bp, Homo sapiens; identical to SEQ ID NO: 201617
  chr8:142318184-142318597
  hypo

SEQ ID NO: 310171 - DNA, 226 bp, Homo sapiens; identical to SEQ ID NO: 259831
  chr8:142332802-142333028
  hypo

SEQ ID NO: 310172 - DNA, 389 bp, Homo sapiens; identical to SEQ ID NO: 212575
  chr8:142349759-142350148
  hypo

SEQ ID NO: 310173 - DNA, 184 bp, Homo sapiens; identical to SEQ ID NO: 259833
  chr8:142359675-142359859
  hypo

SEQ ID NO: 310174 - DNA, 205 bp, Homo sapiens
  chr8:142367163-142367368
  hypo
ctgctgagggtcacggccacgtggtagaccacgaggctcgtgtggtgtggcatgtcgggccacagcgccacggccacttggcgggcgtggaagggcgtgaagcagacgagaaagatgatgagcaccgtgagcaggagctgcatggcccgcacgcggcgctggcgaccctggtggagcagacccggccgcgacagtgcacacatga

SEQ ID NO: 310175 - DNA, 287 bp, Homo sapiens; identical to SEQ ID NO: 212577
  chr8:142367824-142368111
  hypo

SEQ ID NO: 310176 - DNA, 188 bp, Homo sapiens; identical to SEQ ID NO: 212578
  chr8:142374615-142374803
  hypo

SEQ ID NO: 310177 - DNA, 174 bp, Homo sapiens; identical to SEQ ID NO: 259836
  chr8:142383101-142383275
  hypo

SEQ ID NO: 310178 - DNA, 233 bp, Homo sapiens; identical to SEQ ID NO: 286227
  chr8:142425567-142425800
  hypo

SEQ ID NO: 310179 - DNA, 116 bp, Homo sapiens; identical to SEQ ID NO: 286228
  chr8:142427479-142427595
  hypo

SEQ ID NO: 310180 - DNA, 327 bp, Homo sapiens; identical to SEQ ID NO: 286229
  chr8:142427700-142428027
  hypo

SEQ ID NO: 310181 - DNA, 298 bp, Homo sapiens; identical to SEQ ID NO: 259837
  chr8:142435197-142435495
  hypo

SEQ ID NO: 310182 - DNA, 467 bp, Homo sapiens
  chr8:142435699-142436166
  hypo
gggcggttctgctgcgatatccttgggggggtgggccacagcagctgcaggcccagagccagccccaggggggtccacccccggcccggtggacgactgcccccctggtgcaggcctgcccagctgcgcctgggcctcagtctcctcagtgcggagcacccctcagtcactgcttttcatcccaggactctgcttttggctggggttgcagttttgtgacctcagcttggcggtttggaatggtggcagcgctggcggtttggggtcagacaggccttgggctgcgtcccgcctctgccctccccagccttgcgaccctgcaggtcactccgagccttgggttcctcacctcaaagcgaggctgcttggaagaatgggaggcaaaggcatgtccccgcttctcgcacggggtgcgcccacaccctccctccccttccacagcagcgggagggattggggtcagacgt

SEQ ID NO: 310183 - DNA, 38 bp, Homo sapiens; identical to SEQ ID NO: 212581
  chr8:142437114-142437152
  hypo

SEQ ID NO: 310184 - DNA, 87 bp, Homo sapiens
  chr8:142439113-142439200
  hypo
gctgtgtggctccccgcacctgaggctgcgctggtcaggacaggttgggccatgctgcggaaacagccaggcctgaaccccaacgac

SEQ ID NO: 310185 - DNA, 37 bp, Homo sapiens; identical to SEQ ID NO: 212583
  chr8:142439349-142439386
  hypo

SEQ ID NO: 310186 - DNA, 80 bp, Homo sapiens; identical to SEQ ID NO: 259841
  chr8:142440392-142440472
  hypo

SEQ ID NO: 310187 - DNA, 94 bp, Homo sapiens
  chr8:142452392-142452486
  hypo
cactggccctcgcttgtgagtgacggagaaacccgcggcactggcccttgcttgtgagtgacggagaaacccacggcaccggccctcgcttgtg

SEQ ID NO: 310188 - DNA, 31 bp, Homo sapiens; identical to SEQ ID NO: 259843
  chr8:142493073-142493104
  hypo

SEQ ID NO: 310189 - DNA, 239 bp, Homo sapiens; identical to SEQ ID NO: 212584
  chr8:142537302-142537541
  hypo

SEQ ID NO: 310190 - DNA, 38 bp, Homo sapiens; identical to SEQ ID NO: 212585
  chr8:142541546-142541584
  hypo

SEQ ID NO: 310191 - DNA, 148 bp, Homo sapiens; identical to SEQ ID NO: 259846
  chr8:142544218-142544366
  hypo

SEQ ID NO: 310192 - DNA, 96 bp, Homo sapiens; identical to SEQ ID NO: 259847
  chr8:142559813-142559909
  hypo

SEQ ID NO: 310193 - DNA, 144 bp, Homo sapiens
  chr8:142560227-142560371
  hypo
tgctcagtgctgggtgggccactcccagctggaacccatgtcctgagccacccttcacagtcaggcccgtcagctccccacgggcccagagctgggcctgtatctgccaagcacggtgatccagtgggtcggggtggacatcag

SEQ ID NO: 310194 - DNA, 206 bp, Homo sapiens; identical to SEQ ID NO: 259849
  chr8:142590894-142591100
  hypo

SEQ ID NO: 310195 - DNA, 77 bp, Homo sapiens
  chr8:142630170-142630247
  hypo
ccgagggtggtgggcgccccggagcgctggtggggattgggcaaagacgtcaacaccagggctgtggaaggaggcga

SEQ ID NO: 310196 - DNA, 334 bp, Homo sapiens
  chr8:142630288-142630622
  hypo
tggtggggattgggcaaagacgtcaacaccagggctgtggaaggaggcgagggccttcaggtgccgagggtggtgggcgccccggagcgctggtggggattgggcaaagacgtcaacaccagggctgtggaaggaggcgaggggccttcaggtgccgagggtggtgggcgccccggagcgctggtggggattgggcaaagacgtcaacaccagggctgtggaaggaggcgaggggccttcaggtgccgagggtggtgcgcacccagggatgctggtggggattgggcaaagacgtcaactccagggctgtggaaggaggcgagggccttcaggt

SEQ ID NO: 310197 - DNA, 119 bp, Homo sapiens; identical to SEQ ID NO: 259852
  chr8:142734866-142734985
  hypo

SEQ ID NO: 310198 - DNA, 66 bp, Homo sapiens; identical to SEQ ID NO: 259853
  chr8:142744451-142744517
  hypo

SEQ ID NO: 310199 - DNA, 184 bp, Homo sapiens; identical to SEQ ID NO: 259854
  chr8:142863058-142863242
  hypo

SEQ ID NO: 310200 - DNA, 195 bp, Homo sapiens
  chr8:142880971-142881166
  hypo
cagaggaggacctgcggccacccctccttgcctggccatcctccttgccatgtcacccctcaacgccaacccgtgcatgtgggggtgcatgaccagctgacatgggagtgtgggtcagccccagggccaagggggaagtgggtgagccaagatcccggagcatgacaagggccctggcagctgattggcagggga

SEQ ID NO: 310201 - DNA, 143 bp, Homo sapiens; identical to SEQ ID NO: 212587
  chr8:142881196-142881339
  hypo

SEQ ID NO: 310202 - DNA, 207 bp, Homo sapiens; identical to SEQ ID NO: 259856
  chr8:142898503-142898710
  hypo

SEQ ID NO: 310203 - DNA, 67 bp, Homo sapiens; identical to SEQ ID NO: 212588
  chr8:142984445-142984512
  hypo

SEQ ID NO: 310204 - DNA, 263 bp, Homo sapiens; identical to SEQ ID NO: 259858
  chr8:143022236-143022499
  hypo

SEQ ID NO: 310205 - DNA, 261 bp, Homo sapiens; identical to SEQ ID NO: 259859
  chr8:143026585-143026846
  hypo

SEQ ID NO: 310206 - DNA, 120 bp, Homo sapiens; identical to SEQ ID NO: 212589
  chr8:143054871-143054991
  hypo

SEQ ID NO: 310207 - DNA, 182 bp, Homo sapiens
  chr8:143088311-143088493
  hypo
tggcgagctgtctccgtgcagtaatgaggacggtgaaaccactcatgaacagggatgctatcacaacagaatctgtcatgacaggcccttggagacagtgtgccgattaacaggaggggagtggggaagaagtcaggccatccacagaggactgtaagctactgaatgagaaaggccgctgc

SEQ ID NO: 310208 - DNA, 233 bp, Homo sapiens; identical to SEQ ID NO: 212590
  chr8:143089100-143089333
  hypo

SEQ ID NO: 310209 - DNA, 125 bp, Homo sapiens; identical to SEQ ID NO: 259863
  chr8:143090352-143090477
  hypo

SEQ ID NO: 310210 - DNA, 563 bp, Homo sapiens; identical to SEQ ID NO: 212591
  chr8:143152592-143153155
  hypo

SEQ ID NO: 310211 - DNA, 261 bp, Homo sapiens; identical to SEQ ID NO: 212592
  chr8:143171282-143171543
  hypo

SEQ ID NO: 310212 - DNA, 265 bp, Homo sapiens; identical to SEQ ID NO: 259866
  chr8:143204858-143205123
  hypo

SEQ ID NO: 310213 - DNA, 151 bp, Homo sapiens; identical to SEQ ID NO: 259867
  chr8:143209714-143209865
  hypo

SEQ ID NO: 310214 - DNA, 282 bp, Homo sapiens; identical to SEQ ID NO: 212593
  chr8:143234555-143234837
  hypo

SEQ ID NO: 310215 - DNA, 124 bp, Homo sapiens; identical to SEQ ID NO: 212594
  chr8:143269916-143270040
  hypo

SEQ ID NO: 310216 - DNA, 59 bp, Homo sapiens; identical to SEQ ID NO: 212595
  chr8:143270070-143270129
  hypo

SEQ ID NO: 310217 - DNA, 206 bp, Homo sapiens
  chr8:143319108-143319314
  hypo
gccccgggtggatgcggagggagggcccatgagctggatctctcctggacctctctctcccgaaccatgcttgcagtggctgctcgtgagtcctgtccaccagccccgcagggtggcttacagctttttaatgcgtctgacttagagaagcgtcgggttgggggaaggcaagtctaccagagacaaggatctcctgtacctcccgt

SEQ ID NO: 310218 - DNA, 64 bp, Homo sapiens; identical to SEQ ID NO: 212596
  chr8:143333258-143333322
  hypo

SEQ ID NO: 310219 - DNA, 50 bp, Homo sapiens
  chr8:143334488-143334538
  hypo
actgggctctgccacgggtgagagtgcggaggtggacaggctggcgacag

SEQ ID NO: 310220 - DNA, 47 bp, Homo sapiens
  chr8:143368469-143368516
  hypo
ggccaccctccaggatgtggaacccaggaccccggccagatctcagg

SEQ ID NO: 310221 - DNA, 334 bp, Homo sapiens; identical to SEQ ID NO: 259875
  chr8:143368919-143369253
  hypo

SEQ ID NO: 310222 - DNA, 242 bp, Homo sapiens; identical to SEQ ID NO: 259876
  chr8:143372385-143372627
  hypo

SEQ ID NO: 310223 - DNA, 159 bp, Homo sapiens; identical to SEQ ID NO: 259877
  chr8:143373004-143373163
  hypo

SEQ ID NO: 310224 - DNA, 189 bp, Homo sapiens; identical to SEQ ID NO: 259878
  chr8:143374348-143374537
  hypo

SEQ ID NO: 310225 - DNA, 168 bp, Homo sapiens; identical to SEQ ID NO: 259879
  chr8:143379124-143379292
  hypo

SEQ ID NO: 310226 - DNA, 660 bp, Homo sapiens
  chr8:143386138-143386798
  hypo
ttgagctgtgcttttcccaacgctgtgagctacggggtagagacgttcctcccaggggggacatggccatacacgcccctggagagcggcatgacggttgagcacagcctcctcctgccagcggtgacaggccctacaacagccccactgactggggtcccgtggcctgggtaaagtcaaagcccccaggtaaacataacaaacttttgaggtaagaggtccccggggcagcccggctggtgtgcccgaggacggagatgtaggagcctgccctcggccctgacagcaaacagccacaggcgagggggctggaggaaatgtgctccctcccacgatgaaatcctccagggcagctaatgcgggcgagtgagatggccaggtggagaaggcaccacaggacgttctgtgcgatgttccctggacttgggggtttcagtgacagctccccaggagctgtgggcagagggtgccaggcacccatggagacctgcctcggatctgtgccttgggattgatgccacctcctgcatgtggagaaggggaagctcaggaggataggggagggcgcaggggtgggaggggggtgcaaacggggttccgtgtggacgcccaggaaagcggccaggctggggtgcgggctgtgtggacacccaggaaggc

SEQ ID NO: 310227 - DNA, 402 bp, Homo sapiens
  chr8:143386940-143387342
  hypo
tgcaggacaaaagccaggggaggaagagatggcttagacgcccgggtccctccgcggcctcctcctgaaaggctcacaaagcgctcctttattctccccacaaaggcccaatttgggtcttgagctccgaggctgggattagggatttgctggcaaggtgctggggcaagcgcagaggggacggccctgtgatagttttccagctcaagaggcagacagacaaaggcggctttctcctccccacagggctcagggcctgggtccctgttccgacacgtagggaagagacatgctctaacgtgagtgctggagacagggcacacacggtttcccgtgggaagagactccgctctgccaggcattcagaaagcagggacccgaggccggcgctcagggctctcc

SEQ ID NO: 310228 - DNA, 162 bp, Homo sapiens; identical to SEQ ID NO: 212599
  chr8:143397307-143397469
  hypo

SEQ ID NO: 310229 - DNA, 42 bp, Homo sapiens; identical to SEQ ID NO: 212600
  chr8:143398749-143398791
  hypo

SEQ ID NO: 310230 - DNA, 206 bp, Homo sapiens; identical to SEQ ID NO: 259883
  chr8:143404247-143404453
  hypo

SEQ ID NO: 310231 - DNA, 315 bp, Homo sapiens; identical to SEQ ID NO: 259885
  chr8:143406189-143406504
  hypo

SEQ ID NO: 310232 - DNA, 307 bp, Homo sapiens; identical to SEQ ID NO: 259886
  chr8:143410616-143410923
  hypo

SEQ ID NO: 310233 - DNA, 322 bp, Homo sapiens; identical to SEQ ID NO: 212601
  chr8:143413397-143413719
  hypo

SEQ ID NO: 310234 - DNA, 42 bp, Homo sapiens; identical to SEQ ID NO: 259888
  chr8:143414784-143414826
  hypo

SEQ ID NO: 310235 - DNA, 35 bp, Homo sapiens; identical to SEQ ID NO: 212602
  chr8:143415311-143415346
  hypo

SEQ ID NO: 310236 - DNA, 45 bp, Homo sapiens; identical to SEQ ID NO: 259890
  chr8:143421174-143421219
  hypo

SEQ ID NO: 310237 - DNA, 221 bp, Homo sapiens; identical to SEQ ID NO: 212603
  chr8:143424645-143424866
  hypo

SEQ ID NO: 310238 - DNA, 41 bp, Homo sapiens; identical to SEQ ID NO: 201620
  chr8:143429133-143429174
  hypo

SEQ ID NO: 310239 - DNA, 151 bp, Homo sapiens
  chr8:143436826-143436977
  hypo
cttggggcaccggccgtccctggaatggggagctgggcatcccgcccaaacctctcctcccgtgggctgcagctccagggactcagagcaaatgaccagaggataacgggagctctcctgcccagacactgccagagcgtcctccctgtgt

SEQ ID NO: 310240 - DNA, 120 bp, Homo sapiens; identical to SEQ ID NO: 259893
  chr8:143455672-143455792
  hypo

SEQ ID NO: 310241 - DNA, 32 bp, Homo sapiens; identical to SEQ ID NO: 259894
  chr8:143462129-143462161
  hypo

SEQ ID NO: 310242 - DNA, 627 bp, Homo sapiens; identical to SEQ ID NO: 212605
  chr8:143463002-143463629
  hypo

SEQ ID NO: 310243 - DNA, 234 bp, Homo sapiens; identical to SEQ ID NO: 212606
  chr8:143463681-143463915
  hypo

SEQ ID NO: 310244 - DNA, 180 bp, Homo sapiens; identical to SEQ ID NO: 212607
  chr8:143505868-143506048
  hypo

SEQ ID NO: 310245 - DNA, 109 bp, Homo sapiens; identical to SEQ ID NO: 212608
  chr8:143509042-143509151
  hypo

SEQ ID NO: 310246 - DNA, 207 bp, Homo sapiens; identical to SEQ ID NO: 201621
  chr8:143531771-143531978
  hypo

SEQ ID NO: 310247 - DNA, 278 bp, Homo sapiens; identical to SEQ ID NO: 259898
  chr8:143535499-143535777
  hypo

SEQ ID NO: 310248 - DNA, 43 bp, Homo sapiens; identical to SEQ ID NO: 259899
  chr8:143550866-143550909
  hypo

SEQ ID NO: 310249 - DNA, 102 bp, Homo sapiens; identical to SEQ ID NO: 259900
  chr8:143550969-143551071
  hypo

SEQ ID NO: 310250 - DNA, 295 bp, Homo sapiens; identical to SEQ ID NO: 201622
  chr8:143556723-143557018
  hypo

SEQ ID NO: 310251 - DNA, 82 bp, Homo sapiens; identical to SEQ ID NO: 212611
  chr8:143558643-143558725
  hypo

SEQ ID NO: 310252 - DNA, 334 bp, Homo sapiens; identical to SEQ ID NO: 259903
  chr8:143570691-143571025
  hypo

SEQ ID NO: 310253 - DNA, 255 bp, Homo sapiens; identical to SEQ ID NO: 212612
  chr8:143582343-143582598
  hypo

SEQ ID NO: 310254 - DNA, 142 bp, Homo sapiens
  chr8:143599430-143599572
  hypo
gtcttcgggtctgccgagtgggcgagtggggtgcctcactccctgcggtctcttcccggtccccacagaacatggagaaggcgactctgccgtcggtgacgctcatcgtgggctgtggcgtgtcctctctcaccctgctcat

SEQ ID NO: 310255 - DNA, 190 bp, Homo sapiens; identical to SEQ ID NO: 259907
  chr8:143609365-143609555
  hypo

SEQ ID NO: 310256 - DNA, 313 bp, Homo sapiens; identical to SEQ ID NO: 259908
  chr8:143614682-143614995
  hypo

SEQ ID NO: 310257 - DNA, 256 bp, Homo sapiens; identical to SEQ ID NO: 212614
  chr8:143660376-143660632
  hypo

SEQ ID NO: 310258 - DNA, 279 bp, Homo sapiens; identical to SEQ ID NO: 212615
  chr8:143662796-143663075
  hypo

SEQ ID NO: 310259 - DNA, 174 bp, Homo sapiens; identical to SEQ ID NO: 259912
  chr8:143667142-143667316
  hypo

SEQ ID NO: 310260 - DNA, 130 bp, Homo sapiens; identical to SEQ ID NO: 259913
  chr8:143699028-143699158
  hypo

SEQ ID NO: 310261 - DNA, 266 bp, Homo sapiens; identical to SEQ ID NO: 259914
  chr8:143843320-143843586
  hypo

SEQ ID NO: 310262 - DNA, 688 bp, Homo sapiens; identical to SEQ ID NO: 259915
  chr8:143868761-143869449
  hypo

SEQ ID NO: 310263 - DNA, 71 bp, Homo sapiens; identical to SEQ ID NO: 259916
  chr8:143879112-143879183
  hypo

SEQ ID NO: 310264 - DNA, 96 bp, Homo sapiens; identical to SEQ ID NO: 259917
  chr8:143916192-143916288
  hypo

SEQ ID NO: 310265 - DNA, 35 bp, Homo sapiens; identical to SEQ ID NO: 259918
  chr8:143983233-143983268
  hypo

SEQ ID NO: 310266 - DNA, 37 bp, Homo sapiens; identical to SEQ ID NO: 259920
  chr8:143994804-143994841
  hypo

SEQ ID NO: 310267 - DNA, 120 bp, Homo sapiens
  chr8:143998175-143998295
  hypo
gagaaagcagccgccgaggttggtgcagagcgggttctcactacacagaagggctcattgctctgcgtcttctctgcagaggtgcccgtgcccatttctccaccaccgccctgcttcccc

SEQ ID NO: 310268 - DNA, 152 bp, Homo sapiens
  chr8:143998327-143998479
  hypo
gccgtcctctgggccgggtgctcaccctcactgcccaccacaggggcccagggcagatgtgcttttgggtcctacctctctcgcctcccccctacacccaggctgcccaccctgctcccagctctcagctcccaactcgccgcttacaacaa

SEQ ID NO: 310269 - DNA, 43 bp, Homo sapiens; identical to SEQ ID NO: 259922
  chr8:144057229-144057272
  hypo

SEQ ID NO: 310270 - DNA, 42 bp, Homo sapiens; identical to SEQ ID NO: 259923
  chr8:144057392-144057434
  hypo

SEQ ID NO: 310271 - DNA, 182 bp, Homo sapiens
  chr8:144069364-144069546
  hypo
aatccaaggcctcccgccaaagggcagcatctgcctgccggcagcacagtgcaccatctaggagatgggtcctccagccctagccgagccttcggaccacttcaccccagacaacatctagcctcacgcagccggaaccacctgtggcgaaggctaaaatgactccatcttggatgctgacc

SEQ ID NO: 310272 - DNA, 73 bp, Homo sapiens
  chr8:144070435-144070508
  hypo
gtctccagaatctccgcttgagttgccccagaaacacctagagcccagtctccacgcctgcgggggagccaca

SEQ ID NO: 310273 - DNA, 47 bp, Homo sapiens
  chr8:144070659-144070706
  hypo
gcagctcccacctgacatcttcggaggctccacgagaggagaccagc

SEQ ID NO: 310274 - DNA, 425 bp, Homo sapiens; identical to SEQ ID NO: 212617
  chr8:144070963-144071388
  hypo

SEQ ID NO: 310275 - DNA, 137 bp, Homo sapiens; identical to SEQ ID NO: 259927
  chr8:144090396-144090533
  hypo

SEQ ID NO: 310276 - DNA, 211 bp, Homo sapiens; identical to SEQ ID NO: 259928
  chr8:144093516-144093727
  hypo

SEQ ID NO: 310277 - DNA, 141 bp, Homo sapiens; identical to SEQ ID NO: 259929
  chr8:144163832-144163973
  hypo

SEQ ID NO: 310278 - DNA, 362 bp, Homo sapiens; identical to SEQ ID NO: 212619
  chr8:144178363-144178725
  hypo

SEQ ID NO: 310279 - DNA, 263 bp, Homo sapiens; identical to SEQ ID NO: 259931
  chr8:144187580-144187843
  hypo

SEQ ID NO: 310280 - DNA, 66 bp, Homo sapiens
  chr8:144190246-144190312
  hypo
cacaaggaacaacagatgaacgggaactctcagaggcattcccggaactgaggttaatcagaagcc

SEQ ID NO: 310281 - DNA, 76 bp, Homo sapiens; identical to SEQ ID NO: 259933
  chr8:144203023-144203099
  hypo

SEQ ID NO: 310282 - DNA, 185 bp, Homo sapiens; identical to SEQ ID NO: 212620
  chr8:144203468-144203653
  hypo

SEQ ID NO: 310283 - DNA, 35 bp, Homo sapiens; identical to SEQ ID NO: 212621
  chr8:144203942-144203977
  hypo

SEQ ID NO: 310284 - DNA, 418 bp, Homo sapiens; identical to SEQ ID NO: 212622
  chr8:144204021-144204439
  hypo

SEQ ID NO: 310285 - DNA, 429 bp, Homo sapiens; identical to SEQ ID NO: 259935
  chr8:144205317-144205746
  hypo

SEQ ID NO: 310286 - DNA, 89 bp, Homo sapiens; identical to SEQ ID NO: 212623
  chr8:144208604-144208693
  hypo

SEQ ID NO: 310287 - DNA, 133 bp, Homo sapiens
  chr8:144222962-144223095
  hypo
tccgacaacgttcacgcgaccaaagaaatgaactcgagccccaccttctgcagccacagggacctcgaatgctgcggagcttcccacggacacttcgcttctcccagtggccgcctgtccacttgggttccaa

SEQ ID NO: 310288 - DNA, 200 bp, Homo sapiens; identical to SEQ ID NO: 259938
  chr8:144236385-144236585
  hypo

SEQ ID NO: 310289 - DNA, 42 bp, Homo sapiens
  chr8:144238764-144238806
  hypo
ccgtgtgcactgcacgctgagtgtacaagggtgggtgtgcac

SEQ ID NO: 310290 - DNA, 201 bp, Homo sapiens; identical to SEQ ID NO: 259940
  chr8:144254779-144254980
  hypo

SEQ ID NO: 310291 - DNA, 105 bp, Homo sapiens; identical to SEQ ID NO: 259941
  chr8:144262820-144262925
  hypo

SEQ ID NO: 310292 - DNA, 55 bp, Homo sapiens
  chr8:144292290-144292345
  hypo
ccctttcacacctgcgcaccatcccaggtggcaccttctgtaggggctggaccag

SEQ ID NO: 310293 - DNA, 252 bp, Homo sapiens
  chr8:144292470-144292722
  hypo
cctgggctgggcagtttgcacctgggctgaagaggagctgggcccagagggaggcaacgtgcaagggcctgggcccctgtggaggggaggcggcaggtggaggccccttgagaatcccagtagcgcccttcctaggagcagctcctgcagcactagattcaagggcctgtagcggtagccggggcggggcgcgggggaggtagggcagcaggaaagcggggcaccagggaagcggggcgacagggaggcggg

SEQ ID NO: 310294 - DNA, 217 bp, Homo sapiens
  chr8:144293893-144294110
  hypo
tagagacaggtattcccagcctcaggcgctgtcctaagcccagcaggtactgacccttgatggtcacctcaccctatgagggagctgaggcctggggaacccaaggggctagtccagaacccacagccgggggaaggaggaaccgggtcttaaacccaggtagctcactccagaaccaactcaacctctgttacaggtggccggccagaaaatgccc

SEQ ID NO: 310295 - DNA, 196 bp, Homo sapiens; identical to SEQ ID NO: 259944
  chr8:144311087-144311283
  hypo

SEQ ID NO: 310296 - DNA, 67 bp, Homo sapiens
  chr8:144330418-144330485
  hypo
tccctgaccacagtatgtgactaggatttggagataaaaaagatacgatcctcgccttcaggagacc

SEQ ID NO: 310297 - DNA, 62 bp, Homo sapiens; identical to SEQ ID NO: 259947
  chr8:144334638-144334700
  hypo

SEQ ID NO: 310298 - DNA, 42 bp, Homo sapiens; identical to SEQ ID NO: 259948
  chr8:144335407-144335449
  hypo

SEQ ID NO: 310299 - DNA, 65 bp, Homo sapiens
  chr8:144343416-144343481
  hypo
cgctgagatgtgatcgtttctttcctgagaatgagctgaggtaaaaacatgctggggaggaagat

SEQ ID NO: 310300 - DNA, 227 bp, Homo sapiens; identical to SEQ ID NO: 212625
  chr8:144343992-144344219
  hypo

SEQ ID NO: 310301 - DNA, 86 bp, Homo sapiens; identical to SEQ ID NO: 212626
  chr8:144344738-144344824
  hypo

SEQ ID NO: 310302 - DNA, 105 bp, Homo sapiens; identical to SEQ ID NO: 212627
  chr8:144347176-144347281
  hypo

SEQ ID NO: 310303 - DNA, 66 bp, Homo sapiens
  chr8:144347740-144347806
  hypo
aaaagtaaataaagaacaaaaggggtttgcttggctcacagttcagatcagcgttcagagggtgct

SEQ ID NO: 310304 - DNA, 266 bp, Homo sapiens; identical to SEQ ID NO: 259952
  chr8:144351690-144351956
  hypo

SEQ ID NO: 310305 - DNA, 298 bp, Homo sapiens
  chr8:144359679-144359977
  hypo
ggggagtctgggccacgaagctctgggagagctcagctgggggtggctccaagtgctgagtgccagtgattctgccagtgccttctccctgccctgcctgtgccctccgggacagctggcagaccccggaccccagcctggctcctccgaggctgtccctctccaggtctcacctcccctcctactgtgactcatccagaaccccgggcctggcccccagatgtgcctgtggcgggcctctgaggtcactgtcctggtgaagacgaaggctaccgtccccgctttctggcagtgtctg

SEQ ID NO: 310306 - DNA, 105 bp, Homo sapiens; identical to SEQ ID NO: 212628
  chr8:144360545-144360650
  hypo

SEQ ID NO: 310307 - DNA, 83 bp, Homo sapiens; identical to SEQ ID NO: 212629
  chr8:144361861-144361944
  hypo

SEQ ID NO: 310308 - DNA, 213 bp, Homo sapiens; identical to SEQ ID NO: 259955
  chr8:144372044-144372257
  hypo

SEQ ID NO: 310309 - DNA, 308 bp, Homo sapiens
  chr8:144380307-144380615
  hypo
gcggttgcaggattcgcccatcctggtctgggtgtggcttgtgaccacctcctgcagttctctgcccaggtaaggactaattgggaagaattctgggtcctgagctggctgccgcttccaagacagtcgctttgagggctcttggcaccgattttgttaaaatgcatgagcttagggttgtgcagcctgtaggggcaggggtggtctcagaatggatttggtggccccaccgttaattaagctcctgacccctgggccggtggtgaggtgggaagatgagcctgtgtctcccatgctgagccaagatc

SEQ ID NO: 310310 - DNA, 226 bp, Homo sapiens; identical to SEQ ID NO: 212631
  chr8:144380645-144380871
  hypo

SEQ ID NO: 310311 - DNA, 143 bp, Homo sapiens
  chr8:144383407-144383550
  hypo
catgacgtgaaacatcagacagtccaggacatagagacgatctgaaagcgcagatcacacacacaggctgaggaataaatcccttcccaagggcagactggaagttagaaaatgacagaacaatgcttcgaaaattacaagtg

SEQ ID NO: 310312 - DNA, 112 bp, Homo sapiens; identical to SEQ ID NO: 259958
  chr8:144386309-144386421
  hypo

SEQ ID NO: 310313 - DNA, 46 bp, Homo sapiens; identical to SEQ ID NO: 259959
  chr8:144386880-144386926
  hypo

SEQ ID NO: 310314 - DNA, 79 bp, Homo sapiens; identical to SEQ ID NO: 259960
  chr8:144387632-144387711
  hypo

SEQ ID NO: 310315 - DNA, 95 bp, Homo sapiens; identical to SEQ ID NO: 259961
  chr8:144390545-144390640
  hypo

SEQ ID NO: 310316 - DNA, 154 bp, Homo sapiens; identical to SEQ ID NO: 259962
  chr8:144396023-144396177
  hypo

SEQ ID NO: 310317 - DNA, 54 bp, Homo sapiens; identical to SEQ ID NO: 259963
  chr8:144398063-144398117
  hypo

SEQ ID NO: 310318 - DNA, 199 bp, Homo sapiens
  chr8:144400199-144400398
  hypo
gaagaggtcgtcccgggggtccttgttctccataaagagctgtaagttcttgtacacctgaaggagaaagaaggaatttcagaggacagaaaaaacccgaatccagtgaggacctgaagggcgtctacgcagagcctgggagcccacgggaggcttccctgaggaaggtggcccgagcagcatcaccgtcacctgtcgg

SEQ ID NO: 310319 - DNA, 239 bp, Homo sapiens
  chr8:144413513-144413752
  hypo
agacggagacaggacgtgtcactctcctgggccaggccctgcatgagcctcttccccgctcccacagtggctcctccctgtggctcctagcaggtgagcagtgtggcctccacctcacgggggaggaaaacaaggcctgcagagggaggcaaccctacctgacctcagaccccatgcccgtgtacccgcccatgccccccacctgcagaggcccgtgtgctgctgagtcacggatccca

SEQ ID NO: 310320 - DNA, 258 bp, Homo sapiens
  chr8:144413782-144414040
  hypo
ccagctaagtgggaaaggcaacgtgcctctcccaggctctagggcctctccccagatgggtcccttcagagccggtctagaatcttcgggaacctctccatgggaccatttcatttgctaaataaaggacctggctgcttatgagagagccctgcctccgaggagctgggtggaagggggtccagcagtgcagccagtggagaggcaccacagcagggcgcaggaccgccgcccacagaggatcgggcagggtggaag

SEQ ID NO: 310321 - DNA, 206 bp, Homo sapiens; identical to SEQ ID NO: 212634
  chr8:144414283-144414489
  hypo

SEQ ID NO: 310322 - DNA, 139 bp, Homo sapiens; identical to SEQ ID NO: 259967
  chr8:144452481-144452620
  hypo

SEQ ID NO: 310323 - DNA, 47 bp, Homo sapiens; identical to SEQ ID NO: 212635
  chr8:144457689-144457736
  hypo

SEQ ID NO: 310324 - DNA, 85 bp, Homo sapiens; identical to SEQ ID NO: 212636
  chr8:144457835-144457920
  hypo

SEQ ID NO: 310325 - DNA, 551 bp, Homo sapiens; identical to SEQ ID NO: 259969
  chr8:144460987-144461538
  hypo

SEQ ID NO: 310326 - DNA, 378 bp, Homo sapiens; identical to SEQ ID NO: 212638
  chr8:144462488-144462866
  hypo

SEQ ID NO: 310327 - DNA, 77 bp, Homo sapiens
  chr8:144471548-144471625
  hypo
atagctgggctgcacgcccgggcataactcagtgtttacctggtggggggtattggcggcccccgcggctccagctc

SEQ ID NO: 310328 - DNA, 190 bp, Homo sapiens
  chr8:144471835-144472025
  hypo
cggctgttaaactcgtggcggtgcccccgcccaccattcatcaccgcacggtgcttactcctgagagtgacacctgcccggtgcccagagcccctgggggcccctgccctggctccctgaccacacacagaggctgcagggagccctggggtgaagcatgtagacggggcagtggcgtggatgggataga

SEQ ID NO: 310329 - DNA, 135 bp, Homo sapiens; identical to SEQ ID NO: 223520
  chr8:144484160-144484295
  hypo

SEQ ID NO: 310330 - DNA, 101 bp, Homo sapiens; identical to SEQ ID NO: 286248
  chr8:144512372-144512473
  hypo

SEQ ID NO: 310331 - DNA, 310 bp, Homo sapiens; identical to SEQ ID NO: 286249
  chr8:144512503-144512813
  hypo

SEQ ID NO: 310332 - DNA, 126 bp, Homo sapiens; identical to SEQ ID NO: 259972
  chr8:144519592-144519718
  hypo

SEQ ID NO: 310333 - DNA, 99 bp, Homo sapiens; identical to SEQ ID NO: 212640
  chr8:144519748-144519847
  hypo

SEQ ID NO: 310334 - DNA, 232 bp, Homo sapiens; identical to SEQ ID NO: 212641
  chr8:144521390-144521622
  hypo

SEQ ID NO: 310335 - DNA, 160 bp, Homo sapiens; identical to SEQ ID NO: 212642
  chr8:144521831-144521991
  hypo

SEQ ID NO: 310336 - DNA, 145 bp, Homo sapiens; identical to SEQ ID NO: 259976
  chr8:144543710-144543855
  hypo

SEQ ID NO: 310337 - DNA, 135 bp, Homo sapiens; identical to SEQ ID NO: 259977
  chr8:144545694-144545829
  hypo

SEQ ID NO: 310338 - DNA, 99 bp, Homo sapiens; identical to SEQ ID NO: 212643
  chr8:144546273-144546372
  hypo

SEQ ID NO: 310339 - DNA, 91 bp, Homo sapiens; identical to SEQ ID NO: 212644
  chr8:144550587-144550678
  hypo

SEQ ID NO: 310340 - DNA, 144 bp, Homo sapiens
  chr8:144557088-144557232
  hypo
cggccccaggtgtgcgctcgcccgggcgtgtttgccgtacctggcatcatcctttttccaaaagcgaaacatggtgcttgtgagcaactctcccccaccccacagaaaatcaggggccgctcagccacgcgaggtgggcgccac

SEQ ID NO: 310341 - DNA, 198 bp, Homo sapiens; identical to SEQ ID NO: 212645
  chr8:144559235-144559433
  hypo

SEQ ID NO: 310342 - DNA, 37 bp, Homo sapiens; identical to SEQ ID NO: 259982
  chr8:144567459-144567496
  hypo

SEQ ID NO: 310343 - DNA, 259 bp, Homo sapiens; identical to SEQ ID NO: 259983
  chr8:144575937-144576196
  hypo

SEQ ID NO: 310344 - DNA, 147 bp, Homo sapiens; identical to SEQ ID NO: 259984
  chr8:144577123-144577270
  hypo

SEQ ID NO: 310345 - DNA, 33 bp, Homo sapiens; identical to SEQ ID NO: 212646
  chr8:144589672-144589705
  hypo

SEQ ID NO: 310346 - DNA, 58 bp, Homo sapiens; identical to SEQ ID NO: 212647
  chr8:144589919-144589977
  hypo

SEQ ID NO: 310347 - DNA, 234 bp, Homo sapiens; identical to SEQ ID NO: 212648
  chr8:144590082-144590316
  hypo

SEQ ID NO: 310348 - DNA, 265 bp, Homo sapiens; identical to SEQ ID NO: 259987
  chr8:144610876-144611141
  hypo

SEQ ID NO: 310349 - DNA, 189 bp, Homo sapiens; identical to SEQ ID NO: 259989
  chr8:144621156-144621345
  hypo

SEQ ID NO: 310350 - DNA, 120 bp, Homo sapiens; identical to SEQ ID NO: 286253
  chr8:144636569-144636689
  hypo

SEQ ID NO: 310351 - DNA, 449 bp, Homo sapiens; identical to SEQ ID NO: 201631
  chr8:144640321-144640770
  hypo

SEQ ID NO: 310352 - DNA, 181 bp, Homo sapiens
  chr8:144656945-144657126
  hypo
aggacaagctgtggggaaaagtgagtgattcgtgttgtttccagtcagccccgctccgagtctcagggggactgccccgcacacagactgttcaccagggcctgcagcctctcggacagcaccacctgcagggagcagaggacaggagcggtgggcagggtgagggcgggggcgcacaggg

SEQ ID NO: 310353 - DNA, 235 bp, Homo sapiens; identical to SEQ ID NO: 212650
  chr8:144658291-144658526
  hypo

SEQ ID NO: 310354 - DNA, 56 bp, Homo sapiens
  chr8:144661845-144661901
  hypo
ggagggagacaggccaggtacgagcaggaaatgaccaggacggagccagagggccg

SEQ ID NO: 310355 - DNA, 141 bp, Homo sapiens
  chr8:144661931-144662072
  hypo
cgcacgcgcgcacgtacacacactcaggcttcagatcttgttgaaagctgcgatatcgacactctgcacctgaggagaggcggagggtgacggtcagggctgttcccctacagcccactcggagccaggagcctcctctga

SEQ ID NO: 310356 - DNA, 31 bp, Homo sapiens; identical to SEQ ID NO: 212651
  chr8:144675968-144675999
  hypo

SEQ ID NO: 310357 - DNA, 109 bp, Homo sapiens; identical to SEQ ID NO: 212652
  chr8:144676118-144676227
  hypo

SEQ ID NO: 310358 - DNA, 88 bp, Homo sapiens; identical to SEQ ID NO: 212653
  chr8:144676812-144676900
  hypo

SEQ ID NO: 310359 - DNA, 85 bp, Homo sapiens; identical to SEQ ID NO: 223525
  chr8:144680874-144680959
  hypo

SEQ ID NO: 310360 - DNA, 95 bp, Homo sapiens
  chr8:144683804-144683899
  hypo
tttcatttccaacctttcttcccatctcagcccttttgttggcccgggtcccaggaggctggtgtcggtgagggcaggcccgctcctctcatcgg

SEQ ID NO: 310361 - DNA, 53 bp, Homo sapiens; identical to SEQ ID NO: 201633
  chr8:144691796-144691849
  hypo

SEQ ID NO: 310362 - DNA, 35 bp, Homo sapiens; identical to SEQ ID NO: 259998
  chr8:144717163-144717198
  hypo

SEQ ID NO: 310363 - DNA, 198 bp, Homo sapiens; identical to SEQ ID NO: 259999
  chr8:145155548-145155746
  hypo

SEQ ID NO: 310364 - DNA, 231 bp, Homo sapiens; identical to SEQ ID NO: 212655
  chr8:145161408-145161639
  hypo

SEQ ID NO: 310365 - DNA, 60 bp, Homo sapiens; identical to SEQ ID NO: 260001
  chr8:145163871-145163931
  hypo

SEQ ID NO: 310366 - DNA, 83 bp, Homo sapiens; identical to SEQ ID NO: 260002
  chr8:145214941-145215024
  hypo

SEQ ID NO: 310367 - DNA, 67 bp, Homo sapiens; identical to SEQ ID NO: 212656
  chr8:145223205-145223272
  hypo

SEQ ID NO: 310368 - DNA, 292 bp, Homo sapiens; identical to SEQ ID NO: 260005
  chr8:145226071-145226363
  hypo

SEQ ID NO: 310369 - DNA, 236 bp, Homo sapiens; identical to SEQ ID NO: 212657
  chr8:145235189-145235425
  hypo

SEQ ID NO: 310370 - DNA, 82 bp, Homo sapiens; identical to SEQ ID NO: 260007
  chr8:145273270-145273352
  hypo

SEQ ID NO: 310371 - DNA, 153 bp, Homo sapiens; identical to SEQ ID NO: 260008
  chr8:145278744-145278897
  hypo

SEQ ID NO: 310372 - DNA, 175 bp, Homo sapiens; identical to SEQ ID NO: 212658
  chr8:145661367-145661542
  hypo

SEQ ID NO: 310373 - DNA, 148 bp, Homo sapiens; identical to SEQ ID NO: 212659
  chr8:145679540-145679688
  hypo

SEQ ID NO: 310374 - DNA, 64 bp, Homo sapiens; identical to SEQ ID NO: 212660
  chr8:145680955-145681019
  hypo

SEQ ID NO: 310375 - DNA, 207 bp, Homo sapiens; identical to SEQ ID NO: 286263
  chr8:145697349-145697556
  hypo

SEQ ID NO: 310376 - DNA, 38 bp, Homo sapiens; identical to SEQ ID NO: 260012
  chr8:145719389-145719427
  hypo

SEQ ID NO: 310377 - DNA, 129 bp, Homo sapiens; identical to SEQ ID NO: 212661
  chr8:145721882-145722011
  hypo

SEQ ID NO: 310378 - DNA, 477 bp, Homo sapiens; identical to SEQ ID NO: 223529
  chr8:145726121-145726598
  hypo

SEQ ID NO: 310379 - DNA, 433 bp, Homo sapiens; identical to SEQ ID NO: 201637
  chr8:145733644-145734077
  hypo

SEQ ID NO: 310380 - DNA, 211 bp, Homo sapiens; identical to SEQ ID NO: 260014
  chr8:145736700-145736911
  hypo

SEQ ID NO: 310381 - DNA, 151 bp, Homo sapiens; identical to SEQ ID NO: 260015
  chr8:145737564-145737715
  hypo

SEQ ID NO: 310382 - DNA, 818 bp, Homo sapiens; identical to SEQ ID NO: 212664
  chr8:145738000-145738818
  hypo

SEQ ID NO: 310383 - DNA, 240 bp, Homo sapiens; identical to SEQ ID NO: 212665
  chr8:145740331-145740571
  hypo

SEQ ID NO: 310384 - DNA, 86 bp, Homo sapiens
  chr8:145745207-145745293
  hypo
gctgttcaaggtggccttcatggacaagaagacagtggtactgcgcgagttggtacacacgtggcccttcccgctgctcagtttcc

SEQ ID NO: 310385 - DNA, 295 bp, Homo sapiens; identical to SEQ ID NO: 260020
  chr8:145745870-145746165
  hypo

SEQ ID NO: 310386 - DNA, 48 bp, Homo sapiens; identical to SEQ ID NO: 212667
  chr8:145758478-145758526
  hypo

SEQ ID NO: 310387 - DNA, 50 bp, Homo sapiens; identical to SEQ ID NO: 212668
  chr8:145758692-145758742
  hypo

SEQ ID NO: 310388 - DNA, 57 bp, Homo sapiens; identical to SEQ ID NO: 212669
  chr8:145763001-145763058
  hypo

SEQ ID NO: 310389 - DNA, 402 bp, Homo sapiens; identical to SEQ ID NO: 260024
  chr8:145770758-145771160
  hypo

SEQ ID NO: 310390 - DNA, 566 bp, Homo sapiens; identical to SEQ ID NO: 260025
  chr8:145772641-145773207
  hypo

SEQ ID NO: 310391 - DNA, 35 bp, Homo sapiens; identical to SEQ ID NO: 260026
  chr8:145779199-145779234
  hypo

SEQ ID NO: 310392 - DNA, 121 bp, Homo sapiens; identical to SEQ ID NO: 260027
  chr8:145780880-145781001
  hypo

SEQ ID NO: 310393 - DNA, 188 bp, Homo sapiens; identical to SEQ ID NO: 260028
  chr8:145804872-145805060
  hypo

SEQ ID NO: 310394 - DNA, 139 bp, Homo sapiens; identical to SEQ ID NO: 260029
  chr8:145805453-145805592
  hypo

SEQ ID NO: 310395 - DNA, 170 bp, Homo sapiens; identical to SEQ ID NO: 212670
  chr8:145811091-145811261
  hypo

SEQ ID NO: 310396 - DNA, 571 bp, Homo sapiens; identical to SEQ ID NO: 260031
  chr8:145813606-145814177
  hypo

SEQ ID NO: 310397 - DNA, 281 bp, Homo sapiens; identical to SEQ ID NO: 260032
  chr8:145814544-145814825
  hypo

SEQ ID NO: 310398 - DNA, 175 bp, Homo sapiens; identical to SEQ ID NO: 260033
  chr8:145815417-145815592
  hypo

SEQ ID NO: 310399 - DNA, 290 bp, Homo sapiens; identical to SEQ ID NO: 260034
  chr8:145823326-145823616
  hypo

SEQ ID NO: 310400 - DNA, 96 bp, Homo sapiens; identical to SEQ ID NO: 212672
  chr8:145826423-145826519
  hypo

SEQ ID NO: 310401 - DNA, 36 bp, Homo sapiens; identical to SEQ ID NO: 212673
  chr8:145826579-145826615
  hypo

SEQ ID NO: 310402 - DNA, 306 bp, Homo sapiens; identical to SEQ ID NO: 212674
  chr8:145828364-145828670
  hypo

SEQ ID NO: 310403 - DNA, 261 bp, Homo sapiens; identical to SEQ ID NO: 260038
  chr8:145831271-145831532
  hypo

SEQ ID NO: 310404 - DNA, 78 bp, Homo sapiens; identical to SEQ ID NO: 260039
  chr8:145843552-145843630
  hypo

SEQ ID NO: 310405 - DNA, 64 bp, Homo sapiens; identical to SEQ ID NO: 212675
  chr8:145844223-145844287
  hypo

SEQ ID NO: 310406 - DNA, 472 bp, Homo sapiens; identical to SEQ ID NO: 260041
  chr8:145844496-145844968
  hypo

SEQ ID NO: 310407 - DNA, 666 bp, Homo sapiens; identical to SEQ ID NO: 260042
  chr8:145845209-145845875
  hypo

SEQ ID NO: 310408 - DNA, 167 bp, Homo sapiens; identical to SEQ ID NO: 212678
  chr8:145849042-145849209
  hypo

SEQ ID NO: 310409 - DNA, 42 bp, Homo sapiens; identical to SEQ ID NO: 260044
  chr8:145849872-145849914
  hypo

SEQ ID NO: 310410 - DNA, 152 bp, Homo sapiens; identical to SEQ ID NO: 260045
  chr8:145852008-145852160
  hypo

SEQ ID NO: 310411 - DNA, 69 bp, Homo sapiens; identical to SEQ ID NO: 260046
  chr8:145854282-145854351
  hypo

SEQ ID NO: 310412 - DNA, 113 bp, Homo sapiens; identical to SEQ ID NO: 212679
  chr8:145854689-145854802
  hypo

SEQ ID NO: 310413 - DNA, 249 bp, Homo sapiens; identical to SEQ ID NO: 286271
  chr8:145910532-145910781
  hypo

SEQ ID NO: 310414 - DNA, 542 bp, Homo sapiens; identical to SEQ ID NO: 223532
  chr8:145910994-145911536
  hypo

SEQ ID NO: 310415 - DNA, 99 bp, Homo sapiens; identical to SEQ ID NO: 212681
  chr8:145978673-145978772
  hypo

SEQ ID NO: 310416 - DNA, 253 bp, Homo sapiens; identical to SEQ ID NO: 260050
  chr8:146033024-146033277
  hypo

SEQ ID NO: 310417 - DNA, 159 bp, Homo sapiens
  chr8:146036126-146036285
  hypo
tcacacccacagcacggacagcgggaataacacttcctttggggatccagggtttctggtgtctccagatttttcaggcgccaccatgttcctctcatccagacgtcagcacccaaggtggaagcaggtcatggcatgcccggcccagctgcagtccga

SEQ ID NO: 310418 - DNA, 142 bp, Homo sapiens
  chr8:146036319-146036461
  hypo
aaagcacaagccacgcacagcccgccaggttgagtgggcaggtacctccaacagccagcccaggttgagtgggcaggtacctccaacagcctggagccgtgaggccttgcgcaggggcgttgccggccgtggaggtctctgg

SEQ ID NO: 310419 - DNA, 203 bp, Homo sapiens; identical to SEQ ID NO: 212683
  chr8:146046147-146046350
  hypo

SEQ ID NO: 310420 - DNA, 184 bp, Homo sapiens; identical to SEQ ID NO: 286274
  chr8:146052022-146052206
  hypo

SEQ ID NO: 310421 - DNA, 36 bp, Homo sapiens; identical to SEQ ID NO: 201641
  chr8:146078071-146078107
  hypo

SEQ ID NO: 310422 - DNA, 66 bp, Homo sapiens
  chr8:146079313-146079379
  hypo
tgacaggttgggtgcggtggctcacgcctgtaatcccagcactttgggaggcggaggtggacaacc

SEQ ID NO: 310423 - DNA, 84 bp, Homo sapiens; identical to SEQ ID NO: 212685
  chr8:146105089-146105173
  hypo

SEQ ID NO: 310424 - DNA, 160 bp, Homo sapiens; identical to SEQ ID NO: 212686
  chr8:146176579-146176739
  hypo

SEQ ID NO: 310425 - DNA, 82 bp, Homo sapiens; identical to SEQ ID NO: 260056
  chr8:146301130-146301212
  hypo

SEQ ID NO: 310426 - DNA, 82 bp, Homo sapiens; identical to SEQ ID NO: 212687
  chr9:173863-173945
  hypo

SEQ ID NO: 310427 - DNA, 106 bp, Homo sapiens; identical to SEQ ID NO: 286279
  chr9:214545-214651
  hypo

SEQ ID NO: 310428 - DNA, 34 bp, Homo sapiens; identical to SEQ ID NO: 260058
  chr9:413857-413891
  hypo

SEQ ID NO: 310429 - DNA, 1688 bp, Homo sapiens; identical to SEQ ID NO: 286282
  chr9:503916-505604
  hypo

SEQ ID NO: 310430 - DNA, 103 bp, Homo sapiens; identical to SEQ ID NO: 286283
  chr9:505639-505742
  hypo

SEQ ID NO: 310431 - DNA, 99 bp, Homo sapiens; identical to SEQ ID NO: 260059
  chr9:573570-573669
  hypo

SEQ ID NO: 310432 - DNA, 35 bp, Homo sapiens; identical to SEQ ID NO: 260060
  chr9:671596-671631
  hypo

SEQ ID NO: 310433 - DNA, 138 bp, Homo sapiens; identical to SEQ ID NO: 286284
  chr9:706973-707111
  hypo

SEQ ID NO: 310434 - DNA, 239 bp, Homo sapiens; identical to SEQ ID NO: 45981
  chr9:707165-707404
  hypo

SEQ ID NO: 310435 - DNA, 79 bp, Homo sapiens
  chr9:738242-738321
  hypo
tctataaatagaagaactaacgaccacttggtgttttggcagaggttctgtctgaacaccctccagcacgagtggttcc

SEQ ID NO: 310436 - DNA, 95 bp, Homo sapiens; identical to SEQ ID NO: 161534
  chr9:738429-738524
  hypo

SEQ ID NO: 310437 - DNA, 456 bp, Homo sapiens; identical to SEQ ID NO: 260062
  chr9:2047359-2047815
  hypo

SEQ ID NO: 310438 - DNA, 149 bp, Homo sapiens; identical to SEQ ID NO: 260063
  chr9:2086730-2086879
  hypo

SEQ ID NO: 310439 - DNA, 231 bp, Homo sapiens; identical to SEQ ID NO: 260065
  chr9:2170356-2170587
  hypo

SEQ ID NO: 310440 - DNA, 98 bp, Homo sapiens; identical to SEQ ID NO: 260066
  chr9:2170837-2170935
  hypo

SEQ ID NO: 310441 - DNA, 165 bp, Homo sapiens
  chr9:2177850-2178015
  hypo
cagaggtagatttcttaactagcatatcagccttcagcatgtctctaagcttaaaatataatcaaagctaaagctgacatttatgtaaagtttataatgtatgcagtcaccagtttagagtcatagtatagatgtggaattatacttttggtttgtggaggtaat

SEQ ID NO: 310442 - DNA, 92 bp, Homo sapiens; identical to SEQ ID NO: 212691
  chr9:2178158-2178250
  hypo

SEQ ID NO: 310443 - DNA, 93 bp, Homo sapiens; identical to SEQ ID NO: 260068
  chr9:2272286-2272379
  hypo

SEQ ID NO: 310444 - DNA, 312 bp, Homo sapiens; identical to SEQ ID NO: 260069
  chr9:2717324-2717636
  hypo

SEQ ID NO: 310445 - DNA, 133 bp, Homo sapiens; identical to SEQ ID NO: 212693
  chr9:2718724-2718857
  hypo

SEQ ID NO: 310446 - DNA, 196 bp, Homo sapiens; identical to SEQ ID NO: 260071
  chr9:2876420-2876616
  hypo

SEQ ID NO: 310447 - DNA, 717 bp, Homo sapiens
  chr9:2933126-2933843
  hypo
agccgctgccatgacgccggctgcagtggggtacaggagtaggtcgcgggtcctcaggtacagactctgaggtgtgcagcccctggagcctgcacctaggagcgcccccggaacctgctgccctgagaactcacccctgggagccccgggaatagggctgggcccagccaccccctggagggagagtagggaggtgaggcacagaaaatgggcagagagggtccccaagacagaactgggcccagggcggtgccgcgcttgcacgcggagcatgggggccgggcccgagacatggaactggggccccgcttcaggggcccagggcaagaagtgggagcggcacccacttcgaggacctgcccagtggcatgaccactgcgcccaacccgccgatggcgccaagttcctgcgcctcaggaagaggctccgtatggggccgcctgaggccgtatccccaggacctgccccacattaaggtgaccgctaagccagacaatcctgatggtgaggccccgtgcctgccatctgctcctggagacgccccccaaccccaggcatggccgtcagccggcgaggcggtactgaggcagggggcgcgtcctggtcattggagagtttcagcccagtgggtgaaccagacacactgttcaagggggcagcggttagtaagcaggacgagggggagccccaggccgcagggagaactcgtgacaacgt

SEQ ID NO: 310448 - DNA, 119 bp, Homo sapiens; identical to SEQ ID NO: 212695
  chr9:2933873-2933992
  hypo

SEQ ID NO: 310449 - DNA, 68 bp, Homo sapiens; identical to SEQ ID NO: 260073
  chr9:3262996-3263064
  hypo

SEQ ID NO: 310450 - DNA, 31 bp, Homo sapiens; identical to SEQ ID NO: 260074
  chr9:3469785-3469816
  hypo

SEQ ID NO: 310451 - DNA, 40 bp, Homo sapiens; identical to SEQ ID NO: 260075
  chr9:4622943-4622983
  hypo

SEQ ID NO: 310452 - DNA, 78 bp, Homo sapiens; identical to SEQ ID NO: 212696
  chr9:4714888-4714966
  hypo

SEQ ID NO: 310453 - DNA, 160 bp, Homo sapiens; identical to SEQ ID NO: 260077
  chr9:4804634-4804794
  hypo

SEQ ID NO: 310454 - DNA, 208 bp, Homo sapiens; identical to SEQ ID NO: 260078
  chr9:4864401-4864609
  hypo

SEQ ID NO: 310455 - DNA, 43 bp, Homo sapiens; identical to SEQ ID NO: 212697
  chr9:4987437-4987480
  hypo

SEQ ID NO: 310456 - DNA, 99 bp, Homo sapiens; identical to SEQ ID NO: 201655
  chr9:5022028-5022127
  hypo

SEQ ID NO: 310457 - DNA, 248 bp, Homo sapiens; identical to SEQ ID NO: 201656
  chr9:5054640-5054888
  hypo

SEQ ID NO: 310458 - DNA, 82 bp, Homo sapiens; identical to SEQ ID NO: 201657
  chr9:5069924-5070006
  hypo

SEQ ID NO: 310459 - DNA, 152 bp, Homo sapiens; identical to SEQ ID NO: 201658
  chr9:5080228-5080380
  hypo

SEQ ID NO: 310460 - DNA, 99 bp, Homo sapiens; identical to SEQ ID NO: 201659
  chr9:5081712-5081811
  hypo

SEQ ID NO: 310461 - DNA, 41 bp, Homo sapiens; identical to SEQ ID NO: 260080
  chr9:5418576-5418617
  hypo

SEQ ID NO: 310462 - DNA, 34 bp, Homo sapiens; identical to SEQ ID NO: 250599
  chr9:6183187-6183221
  hypo

SEQ ID NO: 310463 - DNA, 84 bp, Homo sapiens; identical to SEQ ID NO: 286311
  chr9:6412900-6412984
  hypo

SEQ ID NO: 310464 - DNA, 219 bp, Homo sapiens; identical to SEQ ID NO: 212704
  chr9:6868325-6868544
  hypo

SEQ ID NO: 310465 - DNA, 98 bp, Homo sapiens; identical to SEQ ID NO: 212705
  chr9:6868604-6868702
  hypo

SEQ ID NO: 310466 - DNA, 142 bp, Homo sapiens; identical to SEQ ID NO: 260085
  chr9:6883915-6884057
  hypo

SEQ ID NO: 310467 - DNA, 224 bp, Homo sapiens; identical to SEQ ID NO: 260086
  chr9:6997067-6997291
  hypo

SEQ ID NO: 310468 - DNA, 100 bp, Homo sapiens; identical to SEQ ID NO: 212706
  chr9:7028538-7028638
  hypo

SEQ ID NO: 310469 - DNA, 240 bp, Homo sapiens; identical to SEQ ID NO: 212707
  chr9:7028698-7028938
  hypo

SEQ ID NO: 310470 - DNA, 113 bp, Homo sapiens; identical to SEQ ID NO: 260089
  chr9:7032961-7033074
  hypo

SEQ ID NO: 310471 - DNA, 37 bp, Homo sapiens; identical to SEQ ID NO: 212708
  chr9:7164555-7164592
  hypo

SEQ ID NO: 310472 - DNA, 66 bp, Homo sapiens; identical to SEQ ID NO: 212709
  chr9:7164622-7164688
  hypo

SEQ ID NO: 310473 - DNA, 232 bp, Homo sapiens; identical to SEQ ID NO: 212710
  chr9:7172202-7172434
  hypo

SEQ ID NO: 310474 - DNA, 44 bp, Homo sapiens; identical to SEQ ID NO: 260093
  chr9:7392965-7393009
  hypo

SEQ ID NO: 310475 - DNA, 138 bp, Homo sapiens; identical to SEQ ID NO: 212711
  chr9:7785325-7785463
  hypo

SEQ ID NO: 310476 - DNA, 337 bp, Homo sapiens; identical to SEQ ID NO: 286320
  chr9:12775826-12776163
  hypo

SEQ ID NO: 310477 - DNA, 369 bp, Homo sapiens; identical to SEQ ID NO: 286321
  chr9:12776216-12776585
  hypo

SEQ ID NO: 310478 - DNA, 347 bp, Homo sapiens; identical to SEQ ID NO: 286324
  chr9:13278956-13279303
  hypo

SEQ ID NO: 310479 - DNA, 227 bp, Homo sapiens; identical to SEQ ID NO: 201670
  chr9:13279406-13279633
  hypo

SEQ ID NO: 310480 - DNA, 146 bp, Homo sapiens
  chr9:13323322-13323468
  hypo
gtcctgctctccaccagctccttcgtcggactcagtctggatcttctcaacgcccagctcctggctccgagtcagggctctctggatgcacggtaacaccctcctcttctgggtaccctccctccgtctcatgttattatgagaga

SEQ ID NO: 310481 - DNA, 192 bp, Homo sapiens; identical to SEQ ID NO: 260096
  chr9:13753041-13753233
  hypo

SEQ ID NO: 310482 - DNA, 211 bp, Homo sapiens; identical to SEQ ID NO: 260097
  chr9:14232123-14232334
  hypo

SEQ ID NO: 310483 - DNA, 223 bp, Homo sapiens; identical to SEQ ID NO: 201671
  chr9:14313096-14313319
  hypo

SEQ ID NO: 310484 - DNA, 2025 bp, Homo sapiens; identical to SEQ ID NO: 286329
  chr9:14313785-14315810
  hypo

SEQ ID NO: 310485 - DNA, 845 bp, Homo sapiens; identical to SEQ ID NO: 201674
  chr9:14322293-14323138
  hypo

SEQ ID NO: 310486 - DNA, 96 bp, Homo sapiens; identical to SEQ ID NO: 260098
  chr9:14355600-14355696
  hypo

SEQ ID NO: 310487 - DNA, 42 bp, Homo sapiens; identical to SEQ ID NO: 260099
  chr9:14462634-14462676
  hypo

SEQ ID NO: 310488 - DNA, 206 bp, Homo sapiens; identical to SEQ ID NO: 212719
  chr9:14607839-14608045
  hypo

SEQ ID NO: 310489 - DNA, 180 bp, Homo sapiens; identical to SEQ ID NO: 260101
  chr9:14796912-14797092
  hypo

SEQ ID NO: 310490 - DNA, 74 bp, Homo sapiens
  chr9:14974117-14974191
  hypo
catcatcccccggatattacaaacaatatcgcaggggtgtgtatattccttgcgatataaagagtaacatcatc

SEQ ID NO: 310491 - DNA, 34 bp, Homo sapiens; identical to SEQ ID NO: 260103
  chr9:14979217-14979251
  hypo

SEQ ID NO: 310492 - DNA, 623 bp, Homo sapiens; identical to SEQ ID NO: 286334
  chr9:15306323-15306946
  hypo

SEQ ID NO: 310493 - DNA, 393 bp, Homo sapiens; identical to SEQ ID NO: 117474
  chr9:15306998-15307391
  hypo

SEQ ID NO: 310494 - DNA, 63 bp, Homo sapiens; identical to SEQ ID NO: 212722
  chr9:15527748-15527811
  hypo

SEQ ID NO: 310495 - DNA, 92 bp, Homo sapiens; identical to SEQ ID NO: 260106
  chr9:15618919-15619011
  hypo

SEQ ID NO: 310496 - DNA, 91 bp, Homo sapiens; identical to SEQ ID NO: 260107
  chr9:16144535-16144626
  hypo

SEQ ID NO: 310497 - DNA, 206 bp, Homo sapiens; identical to SEQ ID NO: 212723
  chr9:16268704-16268910
  hypo

SEQ ID NO: 310498 - DNA, 216 bp, Homo sapiens; identical to SEQ ID NO: 286340
  chr9:16871199-16871415
  hypo

SEQ ID NO: 310499 - DNA, 36 bp, Homo sapiens; identical to SEQ ID NO: 212724
  chr9:16886662-16886698
  hypo

SEQ ID NO: 310500 - DNA, 42 bp, Homo sapiens; identical to SEQ ID NO: 260110
  chr9:17018077-17018119
  hypo

SEQ ID NO: 310501 - DNA, 38 bp, Homo sapiens; identical to SEQ ID NO: 286341
  chr9:17134993-17135031
  hypo

SEQ ID NO: 310502 - DNA, 87 bp, Homo sapiens; identical to SEQ ID NO: 260111
  chr9:17223003-17223090
  hypo

SEQ ID NO: 310503 - DNA, 62 bp, Homo sapiens; identical to SEQ ID NO: 286342
  chr9:17579748-17579810
  hypo

SEQ ID NO: 310504 - DNA, 1125 bp, Homo sapiens; identical to SEQ ID NO: 260112
  chr9:18776738-18777863
  hypo

SEQ ID NO: 310505 - DNA, 180 bp, Homo sapiens; identical to SEQ ID NO: 260113
  chr9:19103984-19104164
  hypo

SEQ ID NO: 310506 - DNA, 57 bp, Homo sapiens
  chr9:19374749-19374806
  hypo
gcacaaaaactagccgcagtgcacacctgtagttcccaggcggtcaaggctgcagtg

SEQ ID NO: 310507 - DNA, 32 bp, Homo sapiens; identical to SEQ ID NO: 260115
  chr9:19414878-19414910
  hypo

SEQ ID NO: 310508 - DNA, 44 bp, Homo sapiens; identical to SEQ ID NO: 212726
  chr9:19431391-19431435
  hypo

SEQ ID NO: 310509 - DNA, 1618 bp, Homo sapiens; identical to SEQ ID NO: 201681
  chr9:20620754-20622372
  hypo

SEQ ID NO: 310510 - DNA, 44 bp, Homo sapiens; identical to SEQ ID NO: 260117
  chr9:20778484-20778528
  hypo

SEQ ID NO: 310511 - DNA, 35 bp, Homo sapiens; identical to SEQ ID NO: 223568
  chr9:21032003-21032038
  hypo

SEQ ID NO: 310512 - DNA, 68 bp, Homo sapiens; identical to SEQ ID NO: 223569
  chr9:21802584-21802652
  hypo

SEQ ID NO: 310513 - DNA, 161 bp, Homo sapiens; identical to SEQ ID NO: 286360
  chr9:21995749-21995910
  hypo

SEQ ID NO: 310514 - DNA, 72 bp, Homo sapiens; identical to SEQ ID NO: 286364
  chr9:23821662-23821734
  hypo

SEQ ID NO: 310515 - DNA, 95 bp, Homo sapiens; identical to SEQ ID NO: 286365
  chr9:23822017-23822112
  hypo

SEQ ID NO: 310516 - DNA, 92 bp, Homo sapiens; identical to SEQ ID NO: 286373
  chr9:25677513-25677605
  hypo

SEQ ID NO: 310517 - DNA, 426 bp, Homo sapiens; identical to SEQ ID NO: 286374
  chr9:25677627-25678053
  hypo

SEQ ID NO: 310518 - DNA, 490 bp, Homo sapiens; identical to SEQ ID NO: 286375
  chr9:25678127-25678617
  hypo

SEQ ID NO: 310519 - DNA, 84 bp, Homo sapiens; identical to SEQ ID NO: 260118
  chr9:26936774-26936858
  hypo

SEQ ID NO: 310520 - DNA, 225 bp, Homo sapiens; identical to SEQ ID NO: 212728
  chr9:27212709-27212934
  hypo

SEQ ID NO: 310521 - DNA, 167 bp, Homo sapiens; identical to SEQ ID NO: 212729
  chr9:27340153-27340320
  hypo

SEQ ID NO: 310522 - DNA, 42 bp, Homo sapiens; identical to SEQ ID NO: 260121
  chr9:27380602-27380644
  hypo

SEQ ID NO: 310523 - DNA, 567 bp, Homo sapiens; identical to SEQ ID NO: 201691
  chr9:27528537-27529104
  hypo

SEQ ID NO: 310524 - DNA, 182 bp, Homo sapiens; identical to SEQ ID NO: 201692
  chr9:27529157-27529339
  hypo

SEQ ID NO: 310525 - DNA, 581 bp, Homo sapiens; identical to SEQ ID NO: 201693
  chr9:27529340-27529921
  hypo

SEQ ID NO: 310526 - DNA, 56 bp, Homo sapiens; identical to SEQ ID NO: 212733
  chr9:27610812-27610868
  hypo

SEQ ID NO: 310527 - DNA, 299 bp, Homo sapiens; identical to SEQ ID NO: 286381
  chr9:29212828-29213127
  hypo

SEQ ID NO: 310528 - DNA, 44 bp, Homo sapiens; identical to SEQ ID NO: 212735
  chr9:32481580-32481624
  hypo

SEQ ID NO: 310529 - DNA, 42 bp, Homo sapiens; identical to SEQ ID NO: 260124
  chr9:32516784-32516826
  hypo

SEQ ID NO: 310530 - DNA, 109 bp, Homo sapiens; identical to SEQ ID NO: 260125
  chr9:32632958-32633067
  hypo

SEQ ID NO: 310531 - DNA, 43 bp, Homo sapiens; identical to SEQ ID NO: 212736
  chr9:32999674-32999717
  hypo

SEQ ID NO: 310532 - DNA, 173 bp, Homo sapiens; identical to SEQ ID NO: 260128
  chr9:33019798-33019971
  hypo

SEQ ID NO: 310533 - DNA, 84 bp, Homo sapiens; identical to SEQ ID NO: 260129
  chr9:33023517-33023601
  hypo

SEQ ID NO: 310534 - DNA, 45 bp, Homo sapiens; identical to SEQ ID NO: 212737
  chr9:33077216-33077261
  hypo

SEQ ID NO: 310535 - DNA, 120 bp, Homo sapiens; identical to SEQ ID NO: 260131
  chr9:33077545-33077665
  hypo

SEQ ID NO: 310536 - DNA, 123 bp, Homo sapiens; identical to SEQ ID NO: 212738
  chr9:33136435-33136558
  hypo

SEQ ID NO: 310537 - DNA, 56 bp, Homo sapiens; identical to SEQ ID NO: 212739
  chr9:33136588-33136644
  hypo

SEQ ID NO: 310538 - DNA, 78 bp, Homo sapiens; identical to SEQ ID NO: 260133
  chr9:33299616-33299694
  hypo

SEQ ID NO: 310539 - DNA, 120 bp, Homo sapiens; identical to SEQ ID NO: 260134
  chr9:33411413-33411533
  hypo

SEQ ID NO: 310540 - DNA, 31 bp, Homo sapiens; identical to SEQ ID NO: 260136
  chr9:33438855-33438886
  hypo

SEQ ID NO: 310541 - DNA, 809 bp, Homo sapiens; identical to SEQ ID NO: 260137
  chr9:33442163-33442972
  hypo

SEQ ID NO: 310542 - DNA, 517 bp, Homo sapiens; identical to SEQ ID NO: 260138
  chr9:33464102-33464619
  hypo

SEQ ID NO: 310543 - DNA, 32 bp, Homo sapiens; identical to SEQ ID NO: 212742
  chr9:33834158-33834190
  hypo

SEQ ID NO: 310544 - DNA, 33 bp, Homo sapiens; identical to SEQ ID NO: 260140
  chr9:33862121-33862154
  hypo

SEQ ID NO: 310545 - DNA, 39 bp, Homo sapiens; identical to SEQ ID NO: 212743
  chr9:34050561-34050600
  hypo

SEQ ID NO: 310546 - DNA, 180 bp, Homo sapiens; identical to SEQ ID NO: 260144
  chr9:34062783-34062963
  hypo

SEQ ID NO: 310547 - DNA, 43 bp, Homo sapiens; identical to SEQ ID NO: 260146
  chr9:34148342-34148385
  hypo

SEQ ID NO: 310548 - DNA, 40 bp, Homo sapiens; identical to SEQ ID NO: 212745
  chr9:34224474-34224514
  hypo

SEQ ID NO: 310549 - DNA, 40 bp, Homo sapiens; identical to SEQ ID NO: 260148
  chr9:34230332-34230372
  hypo

SEQ ID NO: 310550 - DNA, 35 bp, Homo sapiens; identical to SEQ ID NO: 212746
  chr9:34276112-34276147
  hypo

SEQ ID NO: 310551 - DNA, 81 bp, Homo sapiens; identical to SEQ ID NO: 212747
  chr9:34316317-34316398
  hypo

SEQ ID NO: 310552 - DNA, 706 bp, Homo sapiens; identical to SEQ ID NO: 260151
  chr9:34318262-34318968
  hypo

SEQ ID NO: 310553 - DNA, 730 bp, Homo sapiens; identical to SEQ ID NO: 212749
  chr9:34372075-34372805
  hypo

SEQ ID NO: 310554 - DNA, 192 bp, Homo sapiens; identical to SEQ ID NO: 260153
  chr9:34401060-34401252
  hypo

SEQ ID NO: 310555 - DNA, 118 bp, Homo sapiens
  chr9:34574690-34574808
  hypo
gtgacctccacagccggagatggggtcctggaggggacaagattccgatggattttggcagcggcctggactcagtgctcaaaacccccattcccagcctcttgcaccgtggggaccc

SEQ ID NO: 310556 - DNA, 278 bp, Homo sapiens; identical to SEQ ID NO: 286392
  chr9:34591177-34591455
  hypo

SEQ ID NO: 310557 - DNA, 39 bp, Homo sapiens; identical to SEQ ID NO: 286393
  chr9:34591656-34591695
  hypo

SEQ ID NO: 310558 - DNA, 77 bp, Homo sapiens; identical to SEQ ID NO: 201697
  chr9:34646925-34647002
  hypo

SEQ ID NO: 310559 - DNA, 85 bp, Homo sapiens; identical to SEQ ID NO: 212751
  chr9:34971556-34971641
  hypo

SEQ ID NO: 310560 - DNA, 33 bp, Homo sapiens; identical to SEQ ID NO: 201699
  chr9:35072284-35072317
  hypo

SEQ ID NO: 310561 - DNA, 296 bp, Homo sapiens; identical to SEQ ID NO: 201701
  chr9:35161757-35162053
  hypo

SEQ ID NO: 310562 - DNA, 73 bp, Homo sapiens; identical to SEQ ID NO: 212754
  chr9:35608230-35608303
  hypo

SEQ ID NO: 310563 - DNA, 284 bp, Homo sapiens; identical to SEQ ID NO: 260157
  chr9:35609216-35609500
  hypo

SEQ ID NO: 310564 - DNA, 145 bp, Homo sapiens; identical to SEQ ID NO: 260158
  chr9:35649869-35650014
  hypo

SEQ ID NO: 310565 - DNA, 192 bp, Homo sapiens; identical to SEQ ID NO: 260159
  chr9:35689364-35689556
  hypo

SEQ ID NO: 310566 - DNA, 314 bp, Homo sapiens; identical to SEQ ID NO: 212756
  chr9:35711911-35712225
  hypo

SEQ ID NO: 310567 - DNA, 70 bp, Homo sapiens; identical to SEQ ID NO: 260161
  chr9:35712951-35713021
  hypo

SEQ ID NO: 310568 - DNA, 145 bp, Homo sapiens; identical to SEQ ID NO: 201705
  chr9:35814690-35814835
  hypo

SEQ ID NO: 310569 - DNA, 317 bp, Homo sapiens; identical to SEQ ID NO: 260162
  chr9:35869775-35870092
  hypo

SEQ ID NO: 310570 - DNA, 112 bp, Homo sapiens; identical to SEQ ID NO: 260163
  chr9:36118828-36118940
  hypo

SEQ ID NO: 310571 - DNA, 35 bp, Homo sapiens; identical to SEQ ID NO: 260164
  chr9:36165535-36165570
  hypo

SEQ ID NO: 310572 - DNA, 70 bp, Homo sapiens; identical to SEQ ID NO: 201708
  chr9:36257445-36257515
  hypo

SEQ ID NO: 310573 - DNA, 76 bp, Homo sapiens; identical to SEQ ID NO: 260165
  chr9:36303861-36303937
  hypo

SEQ ID NO: 310574 - DNA, 32 bp, Homo sapiens
  chr9:36318335-36318367
  hypo
cactgaagagcaaatatatacgttgttggatg

SEQ ID NO: 310575 - DNA, 81 bp, Homo sapiens; identical to SEQ ID NO: 260167
  chr9:36320468-36320549
  hypo

SEQ ID NO: 310576 - DNA, 120 bp, Homo sapiens; identical to SEQ ID NO: 260168
  chr9:36478391-36478511
  hypo

SEQ ID NO: 310577 - DNA, 241 bp, Homo sapiens; identical to SEQ ID NO: 286422
  chr9:37035886-37036127
  hypo

SEQ ID NO: 310578 - DNA, 120 bp, Homo sapiens; identical to SEQ ID NO: 212760
  chr9:37118379-37118499
  hypo

SEQ ID NO: 310579 - DNA, 81 bp, Homo sapiens; identical to SEQ ID NO: 212761
  chr9:37118799-37118880
  hypo

SEQ ID NO: 310580 - DNA, 36 bp, Homo sapiens; identical to SEQ ID NO: 212762
  chr9:37119169-37119205
  hypo

SEQ ID NO: 310581 - DNA, 155 bp, Homo sapiens; identical to SEQ ID NO: 260172
  chr9:37119445-37119600
  hypo

SEQ ID NO: 310582 - DNA, 37 bp, Homo sapiens; identical to SEQ ID NO: 260173
  chr9:37122905-37122942
  hypo

SEQ ID NO: 310583 - DNA, 42 bp, Homo sapiens; identical to SEQ ID NO: 260174
  chr9:37380693-37380735
  hypo

SEQ ID NO: 310584 - DNA, 142 bp, Homo sapiens; identical to SEQ ID NO: 260175
  chr9:37409148-37409290
  hypo

SEQ ID NO: 310585 - DNA, 490 bp, Homo sapiens; identical to SEQ ID NO: 212764
  chr9:37414524-37415014
  hypo

SEQ ID NO: 310586 - DNA, 99 bp, Homo sapiens; identical to SEQ ID NO: 212765
  chr9:37432303-37432402
  hypo

SEQ ID NO: 310587 - DNA, 84 bp, Homo sapiens; identical to SEQ ID NO: 212766
  chr9:37468277-37468361
  hypo

SEQ ID NO: 310588 - DNA, 137 bp, Homo sapiens; identical to SEQ ID NO: 260180
  chr9:37515931-37516068
  hypo

SEQ ID NO: 310589 - DNA, 98 bp, Homo sapiens; identical to SEQ ID NO: 212767
  chr9:37778484-37778582
  hypo

SEQ ID NO: 310590 - DNA, 82 bp, Homo sapiens; identical to SEQ ID NO: 212768
  chr9:37871179-37871261
  hypo

SEQ ID NO: 310591 - DNA, 223 bp, Homo sapiens; identical to SEQ ID NO: 260183
  chr9:37928527-37928750
  hypo

SEQ ID NO: 310592 - DNA, 437 bp, Homo sapiens; identical to SEQ ID NO: 260184
  chr9:37935344-37935781
  hypo

SEQ ID NO: 310593 - DNA, 52 bp, Homo sapiens; identical to SEQ ID NO: 260185
  chr9:37948329-37948381
  hypo

SEQ ID NO: 310594 - DNA, 88 bp, Homo sapiens; identical to SEQ ID NO: 212770
  chr9:37948878-37948966
  hypo

SEQ ID NO: 310595 - DNA, 376 bp, Homo sapiens; identical to SEQ ID NO: 260187
  chr9:37950440-37950816
  hypo

SEQ ID NO: 310596 - DNA, 158 bp, Homo sapiens; identical to SEQ ID NO: 260188
  chr9:37955883-37956041
  hypo

SEQ ID NO: 310597 - DNA, 45 bp, Homo sapiens; identical to SEQ ID NO: 260189
  chr9:37965536-37965581
  hypo

SEQ ID NO: 310598 - DNA, 301 bp, Homo sapiens; identical to SEQ ID NO: 260190
  chr9:37974530-37974831
  hypo

SEQ ID NO: 310599 - DNA, 34 bp, Homo sapiens; identical to SEQ ID NO: 212771
  chr9:37985465-37985499
  hypo

SEQ ID NO: 310600 - DNA, 45 bp, Homo sapiens; identical to SEQ ID NO: 286428
  chr9:37998720-37998765
  hypo

SEQ ID NO: 310601 - DNA, 85 bp, Homo sapiens; identical to SEQ ID NO: 260192
  chr9:38005202-38005287
  hypo

SEQ ID NO: 310602 - DNA, 184 bp, Homo sapiens; identical to SEQ ID NO: 260193
  chr9:38012923-38013107
  hypo

SEQ ID NO: 310603 - DNA, 258 bp, Homo sapiens; identical to SEQ ID NO: 260194
  chr9:38022309-38022567
  hypo

SEQ ID NO: 310604 - DNA, 80 bp, Homo sapiens; identical to SEQ ID NO: 260195
  chr9:38033536-38033616
  hypo

SEQ ID NO: 310605 - DNA, 88 bp, Homo sapiens; identical to SEQ ID NO: 260196
  chr9:38033980-38034068
  hypo

SEQ ID NO: 310606 - DNA, 207 bp, Homo sapiens; identical to SEQ ID NO: 260197
  chr9:38042761-38042968
  hypo

SEQ ID NO: 310607 - DNA, 151 bp, Homo sapiens; identical to SEQ ID NO: 260198
  chr9:38045591-38045742
  hypo

SEQ ID NO: 310608 - DNA, 413 bp, Homo sapiens; identical to SEQ ID NO: 201713
  chr9:38067708-38068121
  hypo

SEQ ID NO: 310609 - DNA, 749 bp, Homo sapiens; identical to SEQ ID NO: 201714
  chr9:38068158-38068907
  hypo

SEQ ID NO: 310610 - DNA, 92 bp, Homo sapiens; identical to SEQ ID NO: 260199
  chr9:38075105-38075197
  hypo

SEQ ID NO: 310611 - DNA, 33 bp, Homo sapiens; identical to SEQ ID NO: 212774
  chr9:38131932-38131965
  hypo

SEQ ID NO: 310612 - DNA, 178 bp, Homo sapiens; identical to SEQ ID NO: 260201
  chr9:38290209-38290387
  hypo

SEQ ID NO: 310613 - DNA, 154 bp, Homo sapiens; identical to SEQ ID NO: 260202
  chr9:38397125-38397279
  hypo

SEQ ID NO: 310614 - DNA, 36 bp, Homo sapiens; identical to SEQ ID NO: 260203
  chr9:38695225-38695261
  hypo

SEQ ID NO: 310615 - DNA, 36 bp, Homo sapiens; identical to SEQ ID NO: 260204
  chr9:38695501-38695537
  hypo

SEQ ID NO: 310616 - DNA, 33 bp, Homo sapiens; identical to SEQ ID NO: 260205
  chr9:39020901-39020934
  hypo

SEQ ID NO: 310617 - DNA, 44 bp, Homo sapiens; identical to SEQ ID NO: 260206
  chr9:43617175-43617219
  hypo

SEQ ID NO: 310618 - DNA, 40 bp, Homo sapiens; identical to SEQ ID NO: 260207
  chr9:71200385-71200425
  hypo

SEQ ID NO: 310619 - DNA, 77 bp, Homo sapiens; identical to SEQ ID NO: 260208
  chr9:71230118-71230195
  hypo

SEQ ID NO: 310620 - DNA, 42 bp, Homo sapiens; identical to SEQ ID NO: 212775
  chr9:71455000-71455042
  hypo

SEQ ID NO: 310621 - DNA, 63 bp, Homo sapiens; identical to SEQ ID NO: 260210
  chr9:71482150-71482213
  hypo

SEQ ID NO: 310622 - DNA, 43 bp, Homo sapiens; identical to SEQ ID NO: 260211
  chr9:71495144-71495187
  hypo

SEQ ID NO: 310623 - DNA, 33 bp, Homo sapiens; identical to SEQ ID NO: 260212
  chr9:71583985-71584018
  hypo

SEQ ID NO: 310624 - DNA, 82 bp, Homo sapiens; identical to SEQ ID NO: 260213
  chr9:71615753-71615835
  hypo

SEQ ID NO: 310625 - DNA, 35 bp, Homo sapiens; identical to SEQ ID NO: 212776
  chr9:71620576-71620611
  hypo

SEQ ID NO: 310626 - DNA, 102 bp, Homo sapiens; identical to SEQ ID NO: 260216
  chr9:71664072-71664174
  hypo

SEQ ID NO: 310627 - DNA, 157 bp, Homo sapiens; identical to SEQ ID NO: 260217
  chr9:71669729-71669886
  hypo

SEQ ID NO: 310628 - DNA, 42 bp, Homo sapiens; identical to SEQ ID NO: 223596
  chr9:71736563-71736605
  hypo

SEQ ID NO: 310629 - DNA, 103 bp, Homo sapiens; identical to SEQ ID NO: 212777
  chr9:71760275-71760378
  hypo

SEQ ID NO: 310630 - DNA, 400 bp, Homo sapiens; identical to SEQ ID NO: 201720
  chr9:71788550-71788950
  hypo

SEQ ID NO: 310631 - DNA, 35 bp, Homo sapiens; identical to SEQ ID NO: 260220
  chr9:71800810-71800845
  hypo

SEQ ID NO: 310632 - DNA, 35 bp, Homo sapiens; identical to SEQ ID NO: 260221
  chr9:71800965-71801000
  hypo

SEQ ID NO: 310633 - DNA, 33 bp, Homo sapiens; identical to SEQ ID NO: 260222
  chr9:72333375-72333408
  hypo

SEQ ID NO: 310634 - DNA, 111 bp, Homo sapiens; identical to SEQ ID NO: 260223
  chr9:72832133-72832244
  hypo

SEQ ID NO: 310635 - DNA, 178 bp, Homo sapiens; identical to SEQ ID NO: 286456
  chr9:72874088-72874266
  hypo

SEQ ID NO: 310636 - DNA, 385 bp, Homo sapiens; identical to SEQ ID NO: 201725
  chr9:73027584-73027969
  hypo

SEQ ID NO: 310637 - DNA, 733 bp, Homo sapiens; identical to SEQ ID NO: 201726
  chr9:73028305-73029038
  hypo

SEQ ID NO: 310638 - DNA, 34 bp, Homo sapiens; identical to SEQ ID NO: 260224
  chr9:73119015-73119049
  hypo

SEQ ID NO: 310639 - DNA, 60 bp, Homo sapiens; identical to SEQ ID NO: 260225
  chr9:73152153-73152213
  hypo

SEQ ID NO: 310640 - DNA, 35 bp, Homo sapiens; identical to SEQ ID NO: 260226
  chr9:73984598-73984633
  hypo

SEQ ID NO: 310641 - DNA, 169 bp, Homo sapiens; identical to SEQ ID NO: 201727
  chr9:74061493-74061662
  hypo

SEQ ID NO: 310642 - DNA, 38 bp, Homo sapiens; identical to SEQ ID NO: 260227
  chr9:74418835-74418873
  hypo

SEQ ID NO: 310643 - DNA, 279 bp, Homo sapiens; identical to SEQ ID NO: 286462
  chr9:74639982-74640261
  hypo

SEQ ID NO: 310644 - DNA, 31 bp, Homo sapiens; identical to SEQ ID NO: 260228
  chr9:74640499-74640530
  hypo

SEQ ID NO: 310645 - DNA, 154 bp, Homo sapiens; identical to SEQ ID NO: 260229
  chr9:74794876-74795030
  hypo

SEQ ID NO: 310646 - DNA, 213 bp, Homo sapiens; identical to SEQ ID NO: 212782
  chr9:74853849-74854062
  hypo

SEQ ID NO: 310647 - DNA, 162 bp, Homo sapiens; identical to SEQ ID NO: 260231
  chr9:75005076-75005238
  hypo

SEQ ID NO: 310648 - DNA, 97 bp, Homo sapiens; identical to SEQ ID NO: 260232
  chr9:75049396-75049493
  hypo

SEQ ID NO: 310649 - DNA, 206 bp, Homo sapiens; identical to SEQ ID NO: 260233
  chr9:75083052-75083258
  hypo

SEQ ID NO: 310650 - DNA, 100 bp, Homo sapiens; identical to SEQ ID NO: 260234
  chr9:75136042-75136142
  hypo

SEQ ID NO: 310651 - DNA, 134 bp, Homo sapiens; identical to SEQ ID NO: 260235
  chr9:75271061-75271195
  hypo

SEQ ID NO: 310652 - DNA, 167 bp, Homo sapiens; identical to SEQ ID NO: 260236
  chr9:75429003-75429170
  hypo

SEQ ID NO: 310653 - DNA, 84 bp, Homo sapiens
  chr9:75545774-75545858
  hypo
ccagcttggataatactcaccgccagcagcagacgatctctttcgattaaatcagccaacttgtataatagtcgccccctctcg

SEQ ID NO: 310654 - DNA, 41 bp, Homo sapiens
  chr9:75545888-75545929
  hypo
atctgaaaagcctgtcttgcggccttcactgccttgtcaac

SEQ ID NO: 310655 - DNA, 124 bp, Homo sapiens; identical to SEQ ID NO: 260238
  chr9:75580431-75580555
  hypo

SEQ ID NO: 310656 - DNA, 76 bp, Homo sapiens; identical to SEQ ID NO: 212783
  chr9:75715152-75715228
  hypo

SEQ ID NO: 310657 - DNA, 274 bp, Homo sapiens; identical to SEQ ID NO: 212784
  chr9:76089532-76089806
  hypo

SEQ ID NO: 310658 - DNA, 34 bp, Homo sapiens; identical to SEQ ID NO: 260241
  chr9:76744464-76744498
  hypo

SEQ ID NO: 310659 - DNA, 157 bp, Homo sapiens; identical to SEQ ID NO: 260242
  chr9:77257380-77257537
  hypo

SEQ ID NO: 310660 - DNA, 32 bp, Homo sapiens; identical to SEQ ID NO: 260243
  chr9:77401360-77401392
  hypo

SEQ ID NO: 310661 - DNA, 31 bp, Homo sapiens; identical to SEQ ID NO: 260244
  chr9:78017959-78017990
  hypo

SEQ ID NO: 310662 - DNA, 41 bp, Homo sapiens; identical to SEQ ID NO: 260245
  chr9:78550279-78550320
  hypo

SEQ ID NO: 310663 - DNA, 96 bp, Homo sapiens
  chr9:78557002-78557098
  hypo
agggccaggcaggagctcaccgggcatgcgccaaagcgtagcgcactcgttgcctgcccggagcagctgctaccaactgaggccggctgtcctcag

SEQ ID NO: 310664 - DNA, 155 bp, Homo sapiens; identical to SEQ ID NO: 260247
  chr9:78682860-78683015
  hypo

SEQ ID NO: 310665 - DNA, 135 bp, Homo sapiens; identical to SEQ ID NO: 212785
  chr9:78686691-78686826
  hypo

SEQ ID NO: 310666 - DNA, 41 bp, Homo sapiens; identical to SEQ ID NO: 212786
  chr9:78775008-78775049
  hypo

SEQ ID NO: 310667 - DNA, 39 bp, Homo sapiens; identical to SEQ ID NO: 212787
  chr9:78866884-78866923
  hypo

SEQ ID NO: 310668 - DNA, 66 bp, Homo sapiens; identical to SEQ ID NO: 260251
  chr9:78989902-78989968
  hypo

SEQ ID NO: 310669 - DNA, 40 bp, Homo sapiens; identical to SEQ ID NO: 260252
  chr9:79012636-79012676
  hypo

SEQ ID NO: 310670 - DNA, 180 bp, Homo sapiens; identical to SEQ ID NO: 260254
  chr9:79197274-79197454
  hypo

SEQ ID NO: 310671 - DNA, 41 bp, Homo sapiens; identical to SEQ ID NO: 212788
  chr9:79230962-79231003
  hypo

SEQ ID NO: 310672 - DNA, 109 bp, Homo sapiens; identical to SEQ ID NO: 260256
  chr9:79398985-79399094
  hypo

SEQ ID NO: 310673 - DNA, 36 bp, Homo sapiens; identical to SEQ ID NO: 212789
  chr9:79448382-79448418
  hypo

SEQ ID NO: 310674 - DNA, 429 bp, Homo sapiens; identical to SEQ ID NO: 201738
  chr9:79520874-79521303
  hypo

SEQ ID NO: 310675 - DNA, 231 bp, Homo sapiens; identical to SEQ ID NO: 201739
  chr9:79521333-79521564
  hypo

SEQ ID NO: 310676 - DNA, 472 bp, Homo sapiens; identical to SEQ ID NO: 201742
  chr9:79630544-79631016
  hypo

SEQ ID NO: 310677 - DNA, 124 bp, Homo sapiens; identical to SEQ ID NO: 260258
  chr9:80007510-80007634
  hypo

SEQ ID NO: 310678 - DNA, 165 bp, Homo sapiens; identical to SEQ ID NO: 260259
  chr9:80064832-80064997
  hypo

SEQ ID NO: 310679 - DNA, 208 bp, Homo sapiens; identical to SEQ ID NO: 260260
  chr9:80076052-80076260
  hypo

SEQ ID NO: 310680 - DNA, 90 bp, Homo sapiens; identical to SEQ ID NO: 212793
  chr9:80116554-80116644
  hypo

SEQ ID NO: 310681 - DNA, 205 bp, Homo sapiens; identical to SEQ ID NO: 260262
  chr9:80137040-80137245
  hypo

SEQ ID NO: 310682 - DNA, 43 bp, Homo sapiens; identical to SEQ ID NO: 260263
  chr9:80269586-80269629
  hypo

SEQ ID NO: 310683 - DNA, 89 bp, Homo sapiens; identical to SEQ ID NO: 212795
  chr9:80272830-80272919
  hypo

SEQ ID NO: 310684 - DNA, 37 bp, Homo sapiens; identical to SEQ ID NO: 212796
  chr9:80304150-80304187
  hypo

SEQ ID NO: 310685 - DNA, 34 bp, Homo sapiens; identical to SEQ ID NO: 212797
  chr9:80315386-80315420
  hypo

SEQ ID NO: 310686 - DNA, 41 bp, Homo sapiens; identical to SEQ ID NO: 212798
  chr9:80343172-80343213
  hypo

SEQ ID NO: 310687 - DNA, 180 bp, Homo sapiens; identical to SEQ ID NO: 212799
  chr9:80390584-80390764
  hypo

SEQ ID NO: 310688 - DNA, 41 bp, Homo sapiens; identical to SEQ ID NO: 260269
  chr9:80420642-80420683
  hypo

SEQ ID NO: 310689 - DNA, 149 bp, Homo sapiens; identical to SEQ ID NO: 212800
  chr9:80475567-80475716
  hypo

SEQ ID NO: 310690 - DNA, 37 bp, Homo sapiens; identical to SEQ ID NO: 260271
  chr9:80501726-80501763
  hypo

SEQ ID NO: 310691 - DNA, 89 bp, Homo sapiens; identical to SEQ ID NO: 212801
  chr9:80533774-80533863
  hypo

SEQ ID NO: 310692 - DNA, 87 bp, Homo sapiens; identical to SEQ ID NO: 260273
  chr9:80544725-80544812
  hypo

SEQ ID NO: 310693 - DNA, 158 bp, Homo sapiens; identical to SEQ ID NO: 212802
  chr9:80546076-80546234
  hypo

SEQ ID NO: 310694 - DNA, 203 bp, Homo sapiens; identical to SEQ ID NO: 260275
  chr9:80563224-80563427
  hypo

SEQ ID NO: 310695 - DNA, 88 bp, Homo sapiens; identical to SEQ ID NO: 212803
  chr9:80570363-80570451
  hypo

SEQ ID NO: 310696 - DNA, 79 bp, Homo sapiens; identical to SEQ ID NO: 260277
  chr9:80591582-80591661
  hypo

SEQ ID NO: 310697 - DNA, 421 bp, Homo sapiens; identical to SEQ ID NO: 201747
  chr9:80645902-80646323
  hypo

SEQ ID NO: 310698 - DNA, 662 bp, Homo sapiens; identical to SEQ ID NO: 201748
  chr9:80646509-80647171
  hypo

SEQ ID NO: 310699 - DNA, 55 bp, Homo sapiens; identical to SEQ ID NO: 212806
  chr9:80833878-80833933
  hypo

SEQ ID NO: 310700 - DNA, 203 bp, Homo sapiens; identical to SEQ ID NO: 212807
  chr9:80834011-80834214
  hypo

SEQ ID NO: 310701 - DNA, 365 bp, Homo sapiens; identical to SEQ ID NO: 212808
  chr9:81892877-81893242
  hypo

SEQ ID NO: 310702 - DNA, 76 bp, Homo sapiens; identical to SEQ ID NO: 260280
  chr9:81897888-81897964
  hypo

SEQ ID NO: 310703 - DNA, 37 bp, Homo sapiens; identical to SEQ ID NO: 260281
  chr9:82082370-82082407
  hypo

SEQ ID NO: 310704 - DNA, 260 bp, Homo sapiens; identical to SEQ ID NO: 286495
  chr9:82185383-82185643
  hypo

SEQ ID NO: 310705 - DNA, 974 bp, Homo sapiens; identical to SEQ ID NO: 286496
  chr9:82185703-82186677
  hypo

SEQ ID NO: 310706 - DNA, 492 bp, Homo sapiens; identical to SEQ ID NO: 286497
  chr9:82187755-82188247
  hypo

SEQ ID NO: 310707 - DNA, 89 bp, Homo sapiens; identical to SEQ ID NO: 223613
  chr9:82188485-82188574
  hypo

SEQ ID NO: 310708 - DNA, 66 bp, Homo sapiens; identical to SEQ ID NO: 260282
  chr9:82275744-82275810
  hypo

SEQ ID NO: 310709 - DNA, 49 bp, Homo sapiens; identical to SEQ ID NO: 260283
  chr9:82282622-82282671
  hypo

SEQ ID NO: 310710 - DNA, 120 bp, Homo sapiens; identical to SEQ ID NO: 260284
  chr9:84130018-84130138
  hypo

SEQ ID NO: 310711 - DNA, 186 bp, Homo sapiens; identical to SEQ ID NO: 260285
  chr9:84220198-84220384
  hypo

SEQ ID NO: 310712 - DNA, 34 bp, Homo sapiens; identical to SEQ ID NO: 260286
  chr9:84281396-84281430
  hypo

SEQ ID NO: 310713 - DNA, 159 bp, Homo sapiens
  chr9:84294990-84295149
  hypo
acgcacgaggtgctgggttctgcgggtgtatgctgggatggctcccaccatgcgagggaacaaacagacttttgtctagtctaaccctcattatacagagaggggaactgaagccagggaacgtgttcatgacttgcccagtcccgaatggaaatcccc

SEQ ID NO: 310714 - DNA, 1035 bp, Homo sapiens; identical to SEQ ID NO: 286499
  chr9:84302131-84303166
  hypo

SEQ ID NO: 310715 - DNA, 673 bp, Homo sapiens; identical to SEQ ID NO: 201755
  chr9:84303267-84303940
  hypo

SEQ ID NO: 310716 - DNA, 222 bp, Homo sapiens; identical to SEQ ID NO: 260288
  chr9:84441561-84441783
  hypo

SEQ ID NO: 310717 - DNA, 169 bp, Homo sapiens; identical to SEQ ID NO: 212813
  chr9:84530343-84530512
  hypo

SEQ ID NO: 310718 - DNA, 99 bp, Homo sapiens; identical to SEQ ID NO: 260290
  chr9:85673370-85673469
  hypo

SEQ ID NO: 310719 - DNA, 149 bp, Homo sapiens; identical to SEQ ID NO: 212814
  chr9:85843823-85843972
  hypo

SEQ ID NO: 310720 - DNA, 68 bp, Homo sapiens; identical to SEQ ID NO: 286504
  chr9:86152304-86152372
  hypo

SEQ ID NO: 310721 - DNA, 368 bp, Homo sapiens; identical to SEQ ID NO: 286505
  chr9:86152964-86153332
  hypo

SEQ ID NO: 310722 - DNA, 339 bp, Homo sapiens; identical to SEQ ID NO: 201757
  chr9:86238306-86238645
  hypo

SEQ ID NO: 310723 - DNA, 188 bp, Homo sapiens; identical to SEQ ID NO: 260292
  chr9:86586839-86587027
  hypo

SEQ ID NO: 310724 - DNA, 409 bp, Homo sapiens; identical to SEQ ID NO: 260293
  chr9:86590177-86590586
  hypo

SEQ ID NO: 310725 - DNA, 33 bp, Homo sapiens; identical to SEQ ID NO: 212817
  chr9:86600601-86600634
  hypo

SEQ ID NO: 310726 - DNA, 33 bp, Homo sapiens; identical to SEQ ID NO: 260295
  chr9:87655019-87655052
  hypo

SEQ ID NO: 310727 - DNA, 120 bp, Homo sapiens; identical to SEQ ID NO: 260296
  chr9:87904207-87904327
  hypo

SEQ ID NO: 310728 - DNA, 291 bp, Homo sapiens; identical to SEQ ID NO: 286512
  chr9:88355780-88356071
  hypo

SEQ ID NO: 310729 - DNA, 81 bp, Homo sapiens; identical to SEQ ID NO: 260297
  chr9:88490935-88491016
  hypo

SEQ ID NO: 310730 - DNA, 185 bp, Homo sapiens; identical to SEQ ID NO: 260298
  chr9:88651536-88651721
  hypo

SEQ ID NO: 310731 - DNA, 116 bp, Homo sapiens; identical to SEQ ID NO: 260299
  chr9:88661264-88661380
  hypo

SEQ ID NO: 310732 - DNA, 41 bp, Homo sapiens; identical to SEQ ID NO: 260300
  chr9:88672701-88672742
  hypo

SEQ ID NO: 310733 - DNA, 248 bp, Homo sapiens; identical to SEQ ID NO: 212818
  chr9:88694097-88694345
  hypo

SEQ ID NO: 310734 - DNA, 108 bp, Homo sapiens; identical to SEQ ID NO: 212819
  chr9:88694438-88694546
  hypo

SEQ ID NO: 310735 - DNA, 42 bp, Homo sapiens; identical to SEQ ID NO: 260302
  chr9:88712487-88712529
  hypo

SEQ ID NO: 310736 - DNA, 45 bp, Homo sapiens; identical to SEQ ID NO: 260303
  chr9:88977773-88977818
  hypo

SEQ ID NO: 310737 - DNA, 33 bp, Homo sapiens; identical to SEQ ID NO: 212820
  chr9:89301326-89301359
  hypo

SEQ ID NO: 310738 - DNA, 219 bp, Homo sapiens; identical to SEQ ID NO: 201762
  chr9:89560475-89560694
  hypo

SEQ ID NO: 310739 - DNA, 431 bp, Homo sapiens; identical to SEQ ID NO: 201763
  chr9:89561318-89561749
  hypo

SEQ ID NO: 310740 - DNA, 783 bp, Homo sapiens; identical to SEQ ID NO: 286519
  chr9:89561779-89562562
  hypo

SEQ ID NO: 310741 - DNA, 405 bp, Homo sapiens; identical to SEQ ID NO: 212824
  chr9:89699972-89700377
  hypo

SEQ ID NO: 310742 - DNA, 51 bp, Homo sapiens; identical to SEQ ID NO: 260306
  chr9:90112283-90112334
  hypo

SEQ ID NO: 310743 - DNA, 66 bp, Homo sapiens; identical to SEQ ID NO: 286520
  chr9:90112364-90112430
  hypo

SEQ ID NO: 310744 - DNA, 296 bp, Homo sapiens; identical to SEQ ID NO: 201766
  chr9:90112494-90112790
  hypo

SEQ ID NO: 310745 - DNA, 105 bp, Homo sapiens
  chr9:90287766-90287871
  hypo
ggagcccagaagcaggcaatgcctgtggaggacaccaggaaggggactgacctgcagttctaacttgggtcacctggaggaggagacaatcgggtacatgatcgg

SEQ ID NO: 310746 - DNA, 46 bp, Homo sapiens; identical to SEQ ID NO: 260308
  chr9:90290415-90290461
  hypo

SEQ ID NO: 310747 - DNA, 149 bp, Homo sapiens; identical to SEQ ID NO: 212827
  chr9:90346011-90346160
  hypo

SEQ ID NO: 310748 - DNA, 204 bp, Homo sapiens; identical to SEQ ID NO: 260310
  chr9:90439088-90439292
  hypo

SEQ ID NO: 310749 - DNA, 209 bp, Homo sapiens; identical to SEQ ID NO: 260311
  chr9:90457941-90458150
  hypo

SEQ ID NO: 310750 - DNA, 137 bp, Homo sapiens; identical to SEQ ID NO: 260312
  chr9:90472237-90472374
  hypo

SEQ ID NO: 310751 - DNA, 300 bp, Homo sapiens; identical to SEQ ID NO: 260313
  chr9:90472434-90472734
  hypo

SEQ ID NO: 310752 - DNA, 533 bp, Homo sapiens; identical to SEQ ID NO: 260314
  chr9:90474024-90474557
  hypo

SEQ ID NO: 310753 - DNA, 34 bp, Homo sapiens; identical to SEQ ID NO: 212828
  chr9:90482724-90482758
  hypo

SEQ ID NO: 310754 - DNA, 34 bp, Homo sapiens; identical to SEQ ID NO: 212829
  chr9:90482818-90482852
  hypo

SEQ ID NO: 310755 - DNA, 224 bp, Homo sapiens; identical to SEQ ID NO: 260317
  chr9:90483167-90483391
  hypo

SEQ ID NO: 310756 - DNA, 36 bp, Homo sapiens; identical to SEQ ID NO: 260318
  chr9:90485107-90485143
  hypo

SEQ ID NO: 310757 - DNA, 216 bp, Homo sapiens; identical to SEQ ID NO: 260319
  chr9:90485383-90485599
  hypo

SEQ ID NO: 310758 - DNA, 203 bp, Homo sapiens; identical to SEQ ID NO: 260320
  chr9:90499879-90500082
  hypo

SEQ ID NO: 310759 - DNA, 169 bp, Homo sapiens; identical to SEQ ID NO: 260321
  chr9:90500553-90500722
  hypo

SEQ ID NO: 310760 - DNA, 37 bp, Homo sapiens; identical to SEQ ID NO: 260322
  chr9:90583824-90583861
  hypo

SEQ ID NO: 310761 - DNA, 140 bp, Homo sapiens; identical to SEQ ID NO: 260323
  chr9:90670703-90670843
  hypo

SEQ ID NO: 310762 - DNA, 153 bp, Homo sapiens; identical to SEQ ID NO: 260324
  chr9:90888548-90888701
  hypo

SEQ ID NO: 310763 - DNA, 291 bp, Homo sapiens; identical to SEQ ID NO: 212830
  chr9:91119034-91119325
  hypo

SEQ ID NO: 310764 - DNA, 102 bp, Homo sapiens; identical to SEQ ID NO: 260326
  chr9:91138737-91138839
  hypo

SEQ ID NO: 310765 - DNA, 47 bp, Homo sapiens; identical to SEQ ID NO: 260327
  chr9:91140238-91140285
  hypo

SEQ ID NO: 310766 - DNA, 98 bp, Homo sapiens; identical to SEQ ID NO: 260328
  chr9:91161619-91161717
  hypo

SEQ ID NO: 310767 - DNA, 94 bp, Homo sapiens; identical to SEQ ID NO: 260329
  chr9:91187465-91187559
  hypo

SEQ ID NO: 310768 - DNA, 175 bp, Homo sapiens; identical to SEQ ID NO: 260330
  chr9:91312334-91312509
  hypo

SEQ ID NO: 310769 - DNA, 86 bp, Homo sapiens; identical to SEQ ID NO: 212831
  chr9:91614962-91615048
  hypo

SEQ ID NO: 310770 - DNA, 367 bp, Homo sapiens; identical to SEQ ID NO: 260332
  chr9:91616951-91617318
  hypo

SEQ ID NO: 310771 - DNA, 219 bp, Homo sapiens; identical to SEQ ID NO: 260333
  chr9:91663695-91663914
  hypo

SEQ ID NO: 310772 - DNA, 96 bp, Homo sapiens; identical to SEQ ID NO: 260334
  chr9:91666527-91666623
  hypo

SEQ ID NO: 310773 - DNA, 178 bp, Homo sapiens; identical to SEQ ID NO: 260335
  chr9:91993502-91993680
  hypo

SEQ ID NO: 310774 - DNA, 83 bp, Homo sapiens; identical to SEQ ID NO: 212834
  chr9:91996203-91996286
  hypo

SEQ ID NO: 310775 - DNA, 134 bp, Homo sapiens; identical to SEQ ID NO: 212835
  chr9:91997068-91997202
  hypo

SEQ ID NO: 310776 - DNA, 249 bp, Homo sapiens; identical to SEQ ID NO: 212836
  chr9:91997531-91997780
  hypo

SEQ ID NO: 310777 - DNA, 247 bp, Homo sapiens; identical to SEQ ID NO: 260339
  chr9:92049177-92049424
  hypo

SEQ ID NO: 310778 - DNA, 321 bp, Homo sapiens; identical to SEQ ID NO: 260340
  chr9:92053270-92053591
  hypo

SEQ ID NO: 310779 - DNA, 145 bp, Homo sapiens; identical to SEQ ID NO: 260341
  chr9:92056121-92056266
  hypo

SEQ ID NO: 310780 - DNA, 253 bp, Homo sapiens; identical to SEQ ID NO: 260342
  chr9:92058330-92058583
  hypo

SEQ ID NO: 310781 - DNA, 123 bp, Homo sapiens; identical to SEQ ID NO: 260343
  chr9:92075500-92075623
  hypo

SEQ ID NO: 310782 - DNA, 51 bp, Homo sapiens; identical to SEQ ID NO: 212839
  chr9:92140641-92140692
  hypo

SEQ ID NO: 310783 - DNA, 207 bp, Homo sapiens; identical to SEQ ID NO: 260345
  chr9:92178183-92178390
  hypo

SEQ ID NO: 310784 - DNA, 171 bp, Homo sapiens; identical to SEQ ID NO: 212841
  chr9:92227880-92228051
  hypo

SEQ ID NO: 310785 - DNA, 40 bp, Homo sapiens; identical to SEQ ID NO: 260347
  chr9:92231503-92231543
  hypo

SEQ ID NO: 310786 - DNA, 372 bp, Homo sapiens; identical to SEQ ID NO: 260348
  chr9:92235736-92236108
  hypo

SEQ ID NO: 310787 - DNA, 167 bp, Homo sapiens; identical to SEQ ID NO: 212842
  chr9:92237959-92238126
  hypo

SEQ ID NO: 310788 - DNA, 212 bp, Homo sapiens; identical to SEQ ID NO: 260350
  chr9:92249014-92249226
  hypo

SEQ ID NO: 310789 - DNA, 67 bp, Homo sapiens
  chr9:92277577-92277644
  hypo
ttgtggtggtggggcggggggtggtggtcagcatgcagtgattagcagccacctggggtactctacc

SEQ ID NO: 310790 - DNA, 98 bp, Homo sapiens; identical to SEQ ID NO: 162229
  chr9:92277734-92277832
  hypo

SEQ ID NO: 310791 - DNA, 200 bp, Homo sapiens; identical to SEQ ID NO: 260352
  chr9:92725474-92725674
  hypo

SEQ ID NO: 310792 - DNA, 78 bp, Homo sapiens; identical to SEQ ID NO: 260353
  chr9:92776739-92776817
  hypo

SEQ ID NO: 310793 - DNA, 239 bp, Homo sapiens; identical to SEQ ID NO: 260355
  chr9:93156039-93156278
  hypo

SEQ ID NO: 310794 - DNA, 242 bp, Homo sapiens; identical to SEQ ID NO: 260357
  chr9:93676597-93676839
  hypo

SEQ ID NO: 310795 - DNA, 158 bp, Homo sapiens; identical to SEQ ID NO: 260358
  chr9:93727466-93727624
  hypo

SEQ ID NO: 310796 - DNA, 315 bp, Homo sapiens; identical to SEQ ID NO: 260359
  chr9:93733024-93733339
  hypo

SEQ ID NO: 310797 - DNA, 42 bp, Homo sapiens; identical to SEQ ID NO: 260360
  chr9:93734262-93734304
  hypo

SEQ ID NO: 310798 - DNA, 546 bp, Homo sapiens; identical to SEQ ID NO: 286540
  chr9:93955383-93955929
  hypo

SEQ ID NO: 310799 - DNA, 267 bp, Homo sapiens; identical to SEQ ID NO: 201780
  chr9:93956177-93956444
  hypo

SEQ ID NO: 310800 - DNA, 120 bp, Homo sapiens; identical to SEQ ID NO: 260361
  chr9:94076014-94076134
  hypo

SEQ ID NO: 310801 - DNA, 223 bp, Homo sapiens; identical to SEQ ID NO: 212845
  chr9:94124707-94124930
  hypo

SEQ ID NO: 310802 - DNA, 35 bp, Homo sapiens; identical to SEQ ID NO: 201781
  chr9:94183954-94183989
  hypo

SEQ ID NO: 310803 - DNA, 75 bp, Homo sapiens; identical to SEQ ID NO: 260363
  chr9:94475885-94475960
  hypo

SEQ ID NO: 310804 - DNA, 393 bp, Homo sapiens; identical to SEQ ID NO: 260364
  chr9:94486727-94487120
  hypo

SEQ ID NO: 310805 - DNA, 123 bp, Homo sapiens
  chr9:94572962-94573085
  hypo
aaggctgccacaaggacaaccgcaggcagcaccgggagccctgcggtctgtgtcaccaggtgtggccggaacaggagggacgacgctggcctctgcatcccagtggagtctacgtttgcgggt

SEQ ID NO: 310806 - DNA, 39 bp, Homo sapiens; identical to SEQ ID NO: 212847
  chr9:94834642-94834681
  hypo

SEQ ID NO: 310807 - DNA, 210 bp, Homo sapiens; identical to SEQ ID NO: 260367
  chr9:94904617-94904827
  hypo

SEQ ID NO: 310808 - DNA, 100 bp, Homo sapiens; identical to SEQ ID NO: 212848
  chr9:95003570-95003670
  hypo

SEQ ID NO: 310809 - DNA, 38 bp, Homo sapiens; identical to SEQ ID NO: 212849
  chr9:95010672-95010710
  hypo

SEQ ID NO: 310810 - DNA, 104 bp, Homo sapiens; identical to SEQ ID NO: 212850
  chr9:95039646-95039750
  hypo

SEQ ID NO: 310811 - DNA, 226 bp, Homo sapiens; identical to SEQ ID NO: 260371
  chr9:95376169-95376395
  hypo

SEQ ID NO: 310812 - DNA, 96 bp, Homo sapiens; identical to SEQ ID NO: 260372
  chr9:95380371-95380467
  hypo

SEQ ID NO: 310813 - DNA, 174 bp, Homo sapiens; identical to SEQ ID NO: 260373
  chr9:95381219-95381393
  hypo

SEQ ID NO: 310814 - DNA, 231 bp, Homo sapiens; identical to SEQ ID NO: 260374
  chr9:95403858-95404089
  hypo

SEQ ID NO: 310815 - DNA, 220 bp, Homo sapiens
  chr9:95416105-95416325
  hypo
acagagcgagaatttgtctcaaaaacaaaaacaacaaaaaaagaaaattcgtaaattagatcatctcaagaagtccaagtactggctccactccaaagaaagcaaaagcacaaaaggcacgcatgccgactctggatgcctcgcgtgtgagaaccatcgcccaaaaccacacaaggccgtcactctgccttggcccccaccccacagcacatatggctgg

SEQ ID NO: 310816 - DNA, 45 bp, Homo sapiens; identical to SEQ ID NO: 260376
  chr9:95416854-95416899
  hypo

SEQ ID NO: 310817 - DNA, 65 bp, Homo sapiens; identical to SEQ ID NO: 212851
  chr9:95417140-95417205
  hypo

SEQ ID NO: 310818 - DNA, 235 bp, Homo sapiens
  chr9:95417651-95417886
  hypo
caagcaagctctgcttcactttgtcggtatcttaaggcagaggaaatgcgctcacaggcggccttgtgggttgagccctgtttgctgtgggttcattactgtgacccttcccactgaggacaaacctggagccagactgctcattgctggaaatgctcccctatcctgtcccctcagagcagtccctaacgctcaccccaccaggttgccaatgggacctcgagtctaatcccat

SEQ ID NO: 310819 - DNA, 605 bp, Homo sapiens; identical to SEQ ID NO: 212853
  chr9:95477240-95477845
  hypo

SEQ ID NO: 310820 - DNA, 66 bp, Homo sapiens; identical to SEQ ID NO: 212854
  chr9:95484977-95485043
  hypo

SEQ ID NO: 310821 - DNA, 339 bp, Homo sapiens; identical to SEQ ID NO: 212855
  chr9:95492113-95492452
  hypo

SEQ ID NO: 310822 - DNA, 50 bp, Homo sapiens
  chr9:95501276-95501326
  hypo
ccagcctcctgggaacggcgggcctgggcatcccaggaatcccactagtc

SEQ ID NO: 310823 - DNA, 99 bp, Homo sapiens
  chr9:95501356-95501455
  hypo
accacctgctaaggtggagacactgctgggctccttgtcagggctggtccaagcagggggaaggtctgatcctcatccactcgacgggctgtgaatacc

SEQ ID NO: 310824 - DNA, 60 bp, Homo sapiens; identical to SEQ ID NO: 201782
  chr9:95570721-95570781
  hypo

SEQ ID NO: 310825 - DNA, 369 bp, Homo sapiens; identical to SEQ ID NO: 201783
  chr9:95570986-95571355
  hypo

SEQ ID NO: 310826 - DNA, 85 bp, Homo sapiens; identical to SEQ ID NO: 260383
  chr9:95676050-95676135
  hypo

SEQ ID NO: 310827 - DNA, 203 bp, Homo sapiens; identical to SEQ ID NO: 260384
  chr9:95687862-95688065
  hypo

SEQ ID NO: 310828 - DNA, 91 bp, Homo sapiens; identical to SEQ ID NO: 260385
  chr9:95826254-95826345
  hypo

SEQ ID NO: 310829 - DNA, 248 bp, Homo sapiens; identical to SEQ ID NO: 260386
  chr9:95899553-95899801
  hypo

SEQ ID NO: 310830 - DNA, 34 bp, Homo sapiens; identical to SEQ ID NO: 260388
  chr9:95952714-95952748
  hypo

SEQ ID NO: 310831 - DNA, 396 bp, Homo sapiens; identical to SEQ ID NO: 260389
  chr9:96054920-96055316
  hypo

SEQ ID NO: 310832 - DNA, 411 bp, Homo sapiens; identical to SEQ ID NO: 260390
  chr9:96069018-96069429
  hypo

SEQ ID NO: 310833 - DNA, 34 bp, Homo sapiens; identical to SEQ ID NO: 260391
  chr9:96070699-96070733
  hypo

SEQ ID NO: 310834 - DNA, 103 bp, Homo sapiens; identical to SEQ ID NO: 260392
  chr9:96084519-96084622
  hypo

SEQ ID NO: 310835 - DNA, 96 bp, Homo sapiens; identical to SEQ ID NO: 260393
  chr9:96155805-96155901
  hypo

SEQ ID NO: 310836 - DNA, 41 bp, Homo sapiens; identical to SEQ ID NO: 260394
  chr9:96218214-96218255
  hypo

SEQ ID NO: 310837 - DNA, 36 bp, Homo sapiens; identical to SEQ ID NO: 212859
  chr9:96230446-96230482
  hypo

SEQ ID NO: 310838 - DNA, 178 bp, Homo sapiens; identical to SEQ ID NO: 212860
  chr9:96256151-96256329
  hypo

SEQ ID NO: 310839 - DNA, 410 bp, Homo sapiens; identical to SEQ ID NO: 212861
  chr9:96275710-96276120
  hypo

SEQ ID NO: 310840 - DNA, 187 bp, Homo sapiens; identical to SEQ ID NO: 212862
  chr9:96294481-96294668
  hypo

SEQ ID NO: 310841 - DNA, 246 bp, Homo sapiens; identical to SEQ ID NO: 260400
  chr9:96308695-96308941
  hypo

SEQ ID NO: 310842 - DNA, 299 bp, Homo sapiens; identical to SEQ ID NO: 260401
  chr9:96348817-96349116
  hypo

SEQ ID NO: 310843 - DNA, 178 bp, Homo sapiens; identical to SEQ ID NO: 212863
  chr9:96357852-96358030
  hypo

SEQ ID NO: 310844 - DNA, 119 bp, Homo sapiens
  chr9:96361906-96362025
  hypo
tcagccgagatattcggtggttacctgtgagtttcacctttcctggacttcactaaaccataacatgccaccacgagggctgatgtggtccagcacctcatttcacatgtgagctgctt

SEQ ID NO: 310845 - DNA, 153 bp, Homo sapiens
  chr9:96435974-96436127
  hypo
ggccaaggggagctcgctggctgcccatggtgcccggaagaatgggggtggcagtggcaagagtgcaggcaaacgactgctgaagagggctgccaagaacagtgtcgacctggacgactacgaggaagagcaggaccacctggatgcctgctt

SEQ ID NO: 310846 - DNA, 171 bp, Homo sapiens; identical to SEQ ID NO: 260405
  chr9:96446747-96446918
  hypo

SEQ ID NO: 310847 - DNA, 300 bp, Homo sapiens; identical to SEQ ID NO: 212864
  chr9:96573410-96573710
  hypo

SEQ ID NO: 310848 - DNA, 319 bp, Homo sapiens; identical to SEQ ID NO: 260407
  chr9:96673540-96673859
  hypo

SEQ ID NO: 310849 - DNA, 36 bp, Homo sapiens; identical to SEQ ID NO: 260408
  chr9:96687053-96687089
  hypo

SEQ ID NO: 310850 - DNA, 174 bp, Homo sapiens; identical to SEQ ID NO: 201793
  chr9:96717633-96717807
  hypo

SEQ ID NO: 310851 - DNA, 100 bp, Homo sapiens; identical to SEQ ID NO: 260409
  chr9:96910020-96910120
  hypo

SEQ ID NO: 310852 - DNA, 132 bp, Homo sapiens; identical to SEQ ID NO: 260410
  chr9:96910150-96910282
  hypo

SEQ ID NO: 310853 - DNA, 37 bp, Homo sapiens; identical to SEQ ID NO: 212866
  chr9:96945351-96945388
  hypo

SEQ ID NO: 310854 - DNA, 120 bp, Homo sapiens; identical to SEQ ID NO: 212867
  chr9:96945448-96945568
  hypo

SEQ ID NO: 310855 - DNA, 36 bp, Homo sapiens; identical to SEQ ID NO: 260413
  chr9:97010560-97010596
  hypo

SEQ ID NO: 310856 - DNA, 35 bp, Homo sapiens; identical to SEQ ID NO: 260414
  chr9:97010716-97010751
  hypo

SEQ ID NO: 310857 - DNA, 266 bp, Homo sapiens; identical to SEQ ID NO: 260415
  chr9:97062633-97062899
  hypo

SEQ ID NO: 310858 - DNA, 41 bp, Homo sapiens; identical to SEQ ID NO: 260416
  chr9:97107980-97108021
  hypo

SEQ ID NO: 310859 - DNA, 103 bp, Homo sapiens; identical to SEQ ID NO: 212868
  chr9:97162000-97162103
  hypo

SEQ ID NO: 310860 - DNA, 108 bp, Homo sapiens; identical to SEQ ID NO: 260418
  chr9:97203264-97203372
  hypo

SEQ ID NO: 310861 - DNA, 40 bp, Homo sapiens
  chr9:97317672-97317712
  hypo
aggaggagaaggcgttgcaaaaagacgatggggaaaagat

SEQ ID NO: 310862 - DNA, 107 bp, Homo sapiens; identical to SEQ ID NO: 260420
  chr9:97369213-97369320
  hypo

SEQ ID NO: 310863 - DNA, 313 bp, Homo sapiens; identical to SEQ ID NO: 260421
  chr9:97384560-97384873
  hypo

SEQ ID NO: 310864 - DNA, 37 bp, Homo sapiens; identical to SEQ ID NO: 260422
  chr9:97469746-97469783
  hypo

SEQ ID NO: 310865 - DNA, 212 bp, Homo sapiens; identical to SEQ ID NO: 260423
  chr9:97474710-97474922
  hypo

SEQ ID NO: 310866 - DNA, 42 bp, Homo sapiens; identical to SEQ ID NO: 260424
  chr9:97488328-97488370
  hypo

SEQ ID NO: 310867 - DNA, 37 bp, Homo sapiens; identical to SEQ ID NO: 260425
  chr9:97506389-97506426
  hypo

SEQ ID NO: 310868 - DNA, 131 bp, Homo sapiens; identical to SEQ ID NO: 260426
  chr9:97563055-97563186
  hypo

SEQ ID NO: 310869 - DNA, 37 bp, Homo sapiens; identical to SEQ ID NO: 212869
  chr9:97591478-97591515
  hypo

SEQ ID NO: 310870 - DNA, 96 bp, Homo sapiens; identical to SEQ ID NO: 260428
  chr9:97634477-97634573
  hypo

SEQ ID NO: 310871 - DNA, 163 bp, Homo sapiens; identical to SEQ ID NO: 260429
  chr9:97671389-97671552
  hypo

SEQ ID NO: 310872 - DNA, 85 bp, Homo sapiens
  chr9:97674974-97675059
  hypo
tgggaaaagttgctttcctgatgaaagggatcgttgttgctggcacagcgcgtttcttccatgttaaacacgaacatggtgcatg

SEQ ID NO: 310873 - DNA, 239 bp, Homo sapiens; identical to SEQ ID NO: 260431
  chr9:97678305-97678544
  hypo

SEQ ID NO: 310874 - DNA, 168 bp, Homo sapiens
  chr9:97679314-97679482
  hypo
tttgatgaccataaccggcagaacctgcccccaccccacccccaggctaaggcagagcagctgaggcaggtgaggccaactcctgagagtcagacagcagtgctgccctgttccgtatgcagggctgaggtctccacaacgttctctcgggatgtgttgccctggggt

SEQ ID NO: 310875 - DNA, 39 bp, Homo sapiens; identical to SEQ ID NO: 260433
  chr9:97682280-97682319
  hypo

SEQ ID NO: 310876 - DNA, 38 bp, Homo sapiens
  chr9:97682619-97682657
  hypo
aaacttgctctccatgaggggaattggggtctgctccc

SEQ ID NO: 310877 - DNA, 37 bp, Homo sapiens; identical to SEQ ID NO: 162391
  chr9:97682800-97682837
  hypo

SEQ ID NO: 310878 - DNA, 337 bp, Homo sapiens; identical to SEQ ID NO: 212870
  chr9:97719171-97719508
  hypo

SEQ ID NO: 310879 - DNA, 172 bp, Homo sapiens; identical to SEQ ID NO: 212871
  chr9:97727389-97727561
  hypo

SEQ ID NO: 310880 - DNA, 443 bp, Homo sapiens; identical to SEQ ID NO: 201796
  chr9:97767419-97767862
  hypo

SEQ ID NO: 310881 - DNA, 158 bp, Homo sapiens; identical to SEQ ID NO: 260437
  chr9:97808126-97808284
  hypo

SEQ ID NO: 310882 - DNA, 471 bp, Homo sapiens; identical to SEQ ID NO: 286569
  chr9:97810932-97811403
  hypo

SEQ ID NO: 310883 - DNA, 216 bp, Homo sapiens; identical to SEQ ID NO: 260438
  chr9:97847400-97847616
  hypo

SEQ ID NO: 310884 - DNA, 1027 bp, Homo sapiens; identical to SEQ ID NO: 260439
  chr9:97847891-97848918
  hypo

SEQ ID NO: 310885 - DNA, 223 bp, Homo sapiens; identical to SEQ ID NO: 212875
  chr9:97855923-97856146
  hypo

SEQ ID NO: 310886 - DNA, 144 bp, Homo sapiens
  chr9:97863724-97863868
  hypo
acggtctggccgggcgggcaccaggagtaccgaaggctcacttgagtcattagtgaacatgtctgactgagtctgggctgagggacctggctctgcattttgtaaaatagatactagcagattgtcccaagatgtgtacagctc

SEQ ID NO: 310887 - DNA, 178 bp, Homo sapiens
  chr9:97863898-97864076
  hypo
cacaaatgcgtggccacaggtcatcacctgtcctgtggccctggcgagcctgatccctcacgccgggcacccacacggcctgcgtgccttctagacttgagttcgcagctctttaaggagctctcgggccagtttttctgatctagggctttcaatgccaagacgattccatctgtac

SEQ ID NO: 310888 - DNA, 61 bp, Homo sapiens; identical to SEQ ID NO: 260442
  chr9:97864638-97864699
  hypo

SEQ ID NO: 310889 - DNA, 203 bp, Homo sapiens; identical to SEQ ID NO: 212876
  chr9:97865087-97865290
  hypo

SEQ ID NO: 310890 - DNA, 313 bp, Homo sapiens; identical to SEQ ID NO: 212877
  chr9:97867213-97867526
  hypo

SEQ ID NO: 310891 - DNA, 42 bp, Homo sapiens; identical to SEQ ID NO: 212878
  chr9:97867556-97867598
  hypo

SEQ ID NO: 310892 - DNA, 168 bp, Homo sapiens; identical to SEQ ID NO: 260445
  chr9:97868960-97869128
  hypo

SEQ ID NO: 310893 - DNA, 77 bp, Homo sapiens; identical to SEQ ID NO: 260446
  chr9:97887433-97887510
  hypo

SEQ ID NO: 310894 - DNA, 127 bp, Homo sapiens
  chr9:97891756-97891883
  hypo
tctgatcctgttttatttgtaaggtggggcactccggtaacacaccagaggtcacgctgcaagccagggctctgaagccccatgactgcggccattatcttttctataaaagcggggaaataaaata

SEQ ID NO: 310895 - DNA, 206 bp, Homo sapiens; identical to SEQ ID NO: 212879
  chr9:97913297-97913503
  hypo

SEQ ID NO: 310896 - DNA, 81 bp, Homo sapiens; identical to SEQ ID NO: 260449
  chr9:98145032-98145113
  hypo

SEQ ID NO: 310897 - DNA, 60 bp, Homo sapiens; identical to SEQ ID NO: 223636
  chr9:98189305-98189365
  hypo

SEQ ID NO: 310898 - DNA, 402 bp, Homo sapiens; identical to SEQ ID NO: 260451
  chr9:98240100-98240502
  hypo

SEQ ID NO: 310899 - DNA, 46 bp, Homo sapiens; identical to SEQ ID NO: 201798
  chr9:98268140-98268186
  hypo

SEQ ID NO: 310900 - DNA, 1283 bp, Homo sapiens; identical to SEQ ID NO: 223638
  chr9:98272638-98273921
  hypo

SEQ ID NO: 310901 - DNA, 313 bp, Homo sapiens; identical to SEQ ID NO: 286573
  chr9:98278353-98278666
  hypo

SEQ ID NO: 310902 - DNA, 468 bp, Homo sapiens; identical to SEQ ID NO: 286574
  chr9:98278719-98279187
  hypo

SEQ ID NO: 310903 - DNA, 45 bp, Homo sapiens; identical to SEQ ID NO: 212882
  chr9:98459835-98459880
  hypo

SEQ ID NO: 310904 - DNA, 207 bp, Homo sapiens; identical to SEQ ID NO: 260453
  chr9:98490544-98490751
  hypo

SEQ ID NO: 310905 - DNA, 59 bp, Homo sapiens; identical to SEQ ID NO: 260454
  chr9:98842605-98842664
  hypo

SEQ ID NO: 310906 - DNA, 231 bp, Homo sapiens; identical to SEQ ID NO: 260455
  chr9:98842927-98843158
  hypo

SEQ ID NO: 310907 - DNA, 80 bp, Homo sapiens; identical to SEQ ID NO: 260456
  chr9:99102564-99102644
  hypo

SEQ ID NO: 310908 - DNA, 329 bp, Homo sapiens; identical to SEQ ID NO: 212883
  chr9:99139192-99139521
  hypo

SEQ ID NO: 310909 - DNA, 491 bp, Homo sapiens; identical to SEQ ID NO: 286578
  chr9:99145529-99146020
  hypo

SEQ ID NO: 310910 - DNA, 37 bp, Homo sapiens; identical to SEQ ID NO: 260458
  chr9:99214210-99214247
  hypo

SEQ ID NO: 310911 - DNA, 37 bp, Homo sapiens; identical to SEQ ID NO: 260459
  chr9:99214487-99214524
  hypo

SEQ ID NO: 310912 - DNA, 122 bp, Homo sapiens; identical to SEQ ID NO: 260460
  chr9:99256191-99256313
  hypo

SEQ ID NO: 310913 - DNA, 736 bp, Homo sapiens
  chr9:99258626-99259362
  hypo
gacagccaaccatcgctggaaaagggaggagatggacagcgctgtacttaccaccaccaccaccaccacagggcctgtctcagggcttgagtttgtgtggacggcaaggactagcttcctgggccgctaactctcaaccgcaaggcaaacttgggttggggcccagaacggccgtcagccgttaccctccagcctggccagtgagtgctgagtggacactccgcggctacttaaggacacgccaaccgcggtcctgccggggcgctccgtgcgtctccctccggctgggtcccggctgaccccgcaatccaggcgcaggcaagggagaccccgctggctccaccgcccaggccaccctgaagtccccgctggaggaggtgcagcggacccgctcccggggagcccgtcccgcgccctccctccgagaagccccttcctccagctccttcctctgcccgccggcccgagagcaccgaggcggcttctctgtcctgtgtactgcccaggacaagcggcattggaagcgagtgagccgttcccagctgggggcagcaacagcccggggccagggaaacgcatgggggcctggaccgtccggtggcaccgagtaggcgggtgccaggacgccagacacgctgcattccccggagtcccacgccagggagaacggccccgcctgaaaagacgtcgtttaacacagagaaacacacccagggccaggagaaaccattgtcct

SEQ ID NO: 310914 - DNA, 272 bp, Homo sapiens
  chr9:99259405-99259677
  hypo
gcggagtcgtctacccctttagaaacagacttggcccattagagcctccgcggccaggccggggcctccttacctggggatttaggtgtggacccagcacgcgtcgtccagaagcgtgtcaaagccatgcagacttgctgccaaagagtcaggcggggttagaggcggggaggcaggggcggggaggcagaggcgggaggccccccactcccacacaggccagggacccccgaggcgctggggaggaatccggaaggctttgctcaggggga

SEQ ID NO: 310915 - DNA, 196 bp, Homo sapiens; identical to SEQ ID NO: 260462
  chr9:99267708-99267904
  hypo

SEQ ID NO: 310916 - DNA, 240 bp, Homo sapiens; identical to SEQ ID NO: 201803
  chr9:99416950-99417190
  hypo

SEQ ID NO: 310917 - DNA, 409 bp, Homo sapiens; identical to SEQ ID NO: 201804
  chr9:99417397-99417806
  hypo

SEQ ID NO: 310918 - DNA, 79 bp, Homo sapiens; identical to SEQ ID NO: 260463
  chr9:99446887-99446966
  hypo

SEQ ID NO: 310919 - DNA, 211 bp, Homo sapiens; identical to SEQ ID NO: 260464
  chr9:99450309-99450520
  hypo

SEQ ID NO: 310920 - DNA, 45 bp, Homo sapiens; identical to SEQ ID NO: 260465
  chr9:99641471-99641516
  hypo

SEQ ID NO: 310921 - DNA, 40 bp, Homo sapiens; identical to SEQ ID NO: 260466
  chr9:99803883-99803923
  hypo

SEQ ID NO: 310922 - DNA, 40 bp, Homo sapiens; identical to SEQ ID NO: 260467
  chr9:99818324-99818364
  hypo

SEQ ID NO: 310923 - DNA, 45 bp, Homo sapiens; identical to SEQ ID NO: 6930
  chr9:99984107-99984152
  hypo

SEQ ID NO: 310924 - DNA, 129 bp, Homo sapiens
  chr9:100267724-100267853
  hypo
gtgatgagttgtgaccactgcgttgttgctctccatgcccaaaggaatgaaggaaagcagaactgcctctgggcatccttcagcctccttcatagactcatcgctgctgcccatcgctttgctgttggt

SEQ ID NO: 310925 - DNA, 180 bp, Homo sapiens; identical to SEQ ID NO: 260469
  chr9:100297536-100297716
  hypo

SEQ ID NO: 310926 - DNA, 142 bp, Homo sapiens; identical to SEQ ID NO: 260470
  chr9:100299578-100299720
  hypo

SEQ ID NO: 310927 - DNA, 76 bp, Homo sapiens; identical to SEQ ID NO: 260471
  chr9:100308892-100308968
  hypo

SEQ ID NO: 310928 - DNA, 303 bp, Homo sapiens; identical to SEQ ID NO: 201811
  chr9:100565762-100566065
  hypo

SEQ ID NO: 310929 - DNA, 138 bp, Homo sapiens; identical to SEQ ID NO: 260475
  chr9:100690587-100690725
  hypo

SEQ ID NO: 310930 - DNA, 35 bp, Homo sapiens; identical to SEQ ID NO: 260476
  chr9:100820491-100820526
  hypo

SEQ ID NO: 310931 - DNA, 132 bp, Homo sapiens; identical to SEQ ID NO: 212890
  chr9:100843157-100843289
  hypo

SEQ ID NO: 310932 - DNA, 178 bp, Homo sapiens; identical to SEQ ID NO: 260479
  chr9:100849664-100849842
  hypo

SEQ ID NO: 310933 - DNA, 128 bp, Homo sapiens; identical to SEQ ID NO: 212891
  chr9:100890703-100890831
  hypo

SEQ ID NO: 310934 - DNA, 210 bp, Homo sapiens; identical to SEQ ID NO: 260481
  chr9:100924970-100925180
  hypo

SEQ ID NO: 310935 - DNA, 182 bp, Homo sapiens; identical to SEQ ID NO: 260482
  chr9:100933034-100933216
  hypo

SEQ ID NO: 310936 - DNA, 225 bp, Homo sapiens; identical to SEQ ID NO: 260483
  chr9:100935909-100936134
  hypo

SEQ ID NO: 310937 - DNA, 57 bp, Homo sapiens
  chr9:100981136-100981193
  hypo
tctgacccctgtgctgctctaccggggcttgcacagtggattccggcagtatgggtg

SEQ ID NO: 310938 - DNA, 120 bp, Homo sapiens; identical to SEQ ID NO: 260485
  chr9:101009639-101009759
  hypo

SEQ ID NO: 310939 - DNA, 174 bp, Homo sapiens; identical to SEQ ID NO: 260486
  chr9:101014052-101014226
  hypo

SEQ ID NO: 310940 - DNA, 118 bp, Homo sapiens; identical to SEQ ID NO: 212892
  chr9:101052972-101053090
  hypo

SEQ ID NO: 310941 - DNA, 196 bp, Homo sapiens; identical to SEQ ID NO: 212893
  chr9:101216242-101216438
  hypo

SEQ ID NO: 310942 - DNA, 110 bp, Homo sapiens; identical to SEQ ID NO: 212894
  chr9:101216476-101216586
  hypo

SEQ ID NO: 310943 - DNA, 156 bp, Homo sapiens; identical to SEQ ID NO: 212895
  chr9:101280572-101280728
  hypo

SEQ ID NO: 310944 - DNA, 98 bp, Homo sapiens; identical to SEQ ID NO: 260490
  chr9:101445882-101445980
  hypo

SEQ ID NO: 310945 - DNA, 224 bp, Homo sapiens; identical to SEQ ID NO: 260491
  chr9:101499001-101499225
  hypo

SEQ ID NO: 310946 - DNA, 118 bp, Homo sapiens; identical to SEQ ID NO: 212896
  chr9:101553997-101554115
  hypo

SEQ ID NO: 310947 - DNA, 165 bp, Homo sapiens
  chr9:101557774-101557939
  hypo
tactcatacattctacgcatacctcattctaccagtcctaccagctcgtgcacccaagcctttgcatgggcctcccatcatgccttcccacagcccacttgtaatgtcctggctaattctcaggtatccgcaggtctccacgtggatataaacatcttttctacc

SEQ ID NO: 310948 - DNA, 725 bp, Homo sapiens; identical to SEQ ID NO: 286605
  chr9:101569829-101570554
  hypo

SEQ ID NO: 310949 - DNA, 144 bp, Homo sapiens; identical to SEQ ID NO: 260494
  chr9:101813050-101813194
  hypo

SEQ ID NO: 310950 - DNA, 164 bp, Homo sapiens; identical to SEQ ID NO: 260495
  chr9:101904930-101905094
  hypo

SEQ ID NO: 310951 - DNA, 39 bp, Homo sapiens; identical to SEQ ID NO: 260496
  chr9:101949974-101950013
  hypo

SEQ ID NO: 310952 - DNA, 162 bp, Homo sapiens; identical to SEQ ID NO: 260497
  chr9:102068815-102068977
  hypo

SEQ ID NO: 310953 - DNA, 144 bp, Homo sapiens; identical to SEQ ID NO: 212898
  chr9:103174497-103174641
  hypo

SEQ ID NO: 310954 - DNA, 31 bp, Homo sapiens; identical to SEQ ID NO: 212899
  chr9:103174754-103174785
  hypo

SEQ ID NO: 310955 - DNA, 89 bp, Homo sapiens; identical to SEQ ID NO: 286611
  chr9:103190036-103190125
  hypo

SEQ ID NO: 310956 - DNA, 192 bp, Homo sapiens; identical to SEQ ID NO: 260500
  chr9:103493407-103493599
  hypo

SEQ ID NO: 310957 - DNA, 96 bp, Homo sapiens; identical to SEQ ID NO: 260501
  chr9:104138073-104138169
  hypo

SEQ ID NO: 310958 - DNA, 180 bp, Homo sapiens; identical to SEQ ID NO: 260502
  chr9:104238256-104238436
  hypo

SEQ ID NO: 310959 - DNA, 84 bp, Homo sapiens; identical to SEQ ID NO: 260503
  chr9:104238668-104238752
  hypo

SEQ ID NO: 310960 - DNA, 148 bp, Homo sapiens; identical to SEQ ID NO: 201823
  chr9:104248697-104248845
  hypo

SEQ ID NO: 310961 - DNA, 499 bp, Homo sapiens; identical to SEQ ID NO: 201824
  chr9:104248975-104249474
  hypo

SEQ ID NO: 310962 - DNA, 316 bp, Homo sapiens; identical to SEQ ID NO: 260504
  chr9:104305542-104305858
  hypo

SEQ ID NO: 310963 - DNA, 187 bp, Homo sapiens; identical to SEQ ID NO: 260505
  chr9:104365592-104365779
  hypo

SEQ ID NO: 310964 - DNA, 82 bp, Homo sapiens; identical to SEQ ID NO: 260506
  chr9:104473574-104473656
  hypo

SEQ ID NO: 310965 - DNA, 42 bp, Homo sapiens; identical to SEQ ID NO: 260507
  chr9:104605229-104605271
  hypo

SEQ ID NO: 310966 - DNA, 39 bp, Homo sapiens; identical to SEQ ID NO: 212903
  chr9:107144258-107144297
  hypo

SEQ ID NO: 310967 - DNA, 35 bp, Homo sapiens; identical to SEQ ID NO: 260509
  chr9:107260232-107260267
  hypo

SEQ ID NO: 310968 - DNA, 34 bp, Homo sapiens; identical to SEQ ID NO: 260510
  chr9:107260507-107260541
  hypo

SEQ ID NO: 310969 - DNA, 48 bp, Homo sapiens; identical to SEQ ID NO: 212904
  chr9:107396338-107396386
  hypo

SEQ ID NO: 310970 - DNA, 110 bp, Homo sapiens; identical to SEQ ID NO: 212905
  chr9:107396494-107396604
  hypo

SEQ ID NO: 310971 - DNA, 51 bp, Homo sapiens; identical to SEQ ID NO: 260512
  chr9:107528626-107528677
  hypo

SEQ ID NO: 310972 - DNA, 86 bp, Homo sapiens; identical to SEQ ID NO: 260513
  chr9:107554120-107554206
  hypo

SEQ ID NO: 310973 - DNA, 153 bp, Homo sapiens; identical to SEQ ID NO: 212906
  chr9:107729489-107729642
  hypo

SEQ ID NO: 310974 - DNA, 120 bp, Homo sapiens; identical to SEQ ID NO: 260515
  chr9:108257889-108258009
  hypo

SEQ ID NO: 310975 - DNA, 88 bp, Homo sapiens; identical to SEQ ID NO: 286621
  chr9:108418383-108418471
  hypo

SEQ ID NO: 310976 - DNA, 185 bp, Homo sapiens; identical to SEQ ID NO: 286622
  chr9:108418947-108419132
  hypo

SEQ ID NO: 310977 - DNA, 256 bp, Homo sapiens; identical to SEQ ID NO: 260516
  chr9:109687597-109687853
  hypo

SEQ ID NO: 310978 - DNA, 178 bp, Homo sapiens; identical to SEQ ID NO: 260517
  chr9:109688896-109689074
  hypo

SEQ ID NO: 310979 - DNA, 222 bp, Homo sapiens; identical to SEQ ID NO: 212907
  chr9:109689779-109690001
  hypo

SEQ ID NO: 310980 - DNA, 291 bp, Homo sapiens; identical to SEQ ID NO: 212908
  chr9:109690711-109691002
  hypo

SEQ ID NO: 310981 - DNA, 185 bp, Homo sapiens; identical to SEQ ID NO: 260520
  chr9:109691303-109691488
  hypo

SEQ ID NO: 310982 - DNA, 44 bp, Homo sapiens; identical to SEQ ID NO: 260521
  chr9:109693210-109693254
  hypo

SEQ ID NO: 310983 - DNA, 37 bp, Homo sapiens; identical to SEQ ID NO: 212909
  chr9:109865317-109865354
  hypo

SEQ ID NO: 310984 - DNA, 41 bp, Homo sapiens; identical to SEQ ID NO: 212910
  chr9:109894935-109894976
  hypo

SEQ ID NO: 310985 - DNA, 40 bp, Homo sapiens; identical to SEQ ID NO: 260524
  chr9:109895276-109895316
  hypo

SEQ ID NO: 310986 - DNA, 265 bp, Homo sapiens; identical to SEQ ID NO: 212911
  chr9:110096156-110096421
  hypo

SEQ ID NO: 310987 - DNA, 113 bp, Homo sapiens; identical to SEQ ID NO: 260526
  chr9:110121099-110121212
  hypo

SEQ ID NO: 310988 - DNA, 34 bp, Homo sapiens; identical to SEQ ID NO: 212912
  chr9:110160588-110160622
  hypo

SEQ ID NO: 310989 - DNA, 119 bp, Homo sapiens; identical to SEQ ID NO: 260529
  chr9:110185793-110185912
  hypo

SEQ ID NO: 310990 - DNA, 139 bp, Homo sapiens; identical to SEQ ID NO: 260530
  chr9:110335015-110335154
  hypo

SEQ ID NO: 310991 - DNA, 355 bp, Homo sapiens; identical to SEQ ID NO: 260531
  chr9:110390660-110391015
  hypo

SEQ ID NO: 310992 - DNA, 76 bp, Homo sapiens; identical to SEQ ID NO: 212914
  chr9:110478888-110478964
  hypo

SEQ ID NO: 310993 - DNA, 183 bp, Homo sapiens; identical to SEQ ID NO: 260533
  chr9:110531375-110531558
  hypo

SEQ ID NO: 310994 - DNA, 214 bp, Homo sapiens; identical to SEQ ID NO: 212915
  chr9:110779880-110780094
  hypo

SEQ ID NO: 310995 - DNA, 185 bp, Homo sapiens; identical to SEQ ID NO: 212916
  chr9:110842928-110843113
  hypo

SEQ ID NO: 310996 - DNA, 44 bp, Homo sapiens; identical to SEQ ID NO: 260536
  chr9:110861945-110861989
  hypo

SEQ ID NO: 310997 - DNA, 32 bp, Homo sapiens; identical to SEQ ID NO: 260537
  chr9:111446306-111446338
  hypo

SEQ ID NO: 310998 - DNA, 170 bp, Homo sapiens; identical to SEQ ID NO: 260538
  chr9:111465838-111466008
  hypo

SEQ ID NO: 310999 - DNA, 49 bp, Homo sapiens; identical to SEQ ID NO: 260539
  chr9:111617456-111617505
  hypo

SEQ ID NO: 311000 - DNA, 66 bp, Homo sapiens; identical to SEQ ID NO: 260540
  chr9:111617924-111617990
  hypo

SEQ ID NO: 311001 - DNA, 192 bp, Homo sapiens; identical to SEQ ID NO: 212917
  chr9:111835846-111836038
  hypo

SEQ ID NO: 311002 - DNA, 33 bp, Homo sapiens; identical to SEQ ID NO: 260542
  chr9:111876331-111876364
  hypo

SEQ ID NO: 311003 - DNA, 187 bp, Homo sapiens; identical to SEQ ID NO: 212918
  chr9:111951147-111951334
  hypo

SEQ ID NO: 311004 - DNA, 58 bp, Homo sapiens; identical to SEQ ID NO: 260544
  chr9:111952371-111952429
  hypo

SEQ ID NO: 311005 - DNA, 237 bp, Homo sapiens; identical to SEQ ID NO: 212919
  chr9:112040328-112040565
  hypo

SEQ ID NO: 311006 - DNA, 130 bp, Homo sapiens; identical to SEQ ID NO: 201836
  chr9:112081563-112081693
  hypo

SEQ ID NO: 311007 - DNA, 1729 bp, Homo sapiens; identical to SEQ ID NO: 286640
  chr9:112081773-112083502
  hypo

SEQ ID NO: 311008 - DNA, 78 bp, Homo sapiens; identical to SEQ ID NO: 260546
  chr9:112295751-112295829
  hypo

SEQ ID NO: 311009 - DNA, 84 bp, Homo sapiens; identical to SEQ ID NO: 260547
  chr9:112847321-112847405
  hypo

SEQ ID NO: 311010 - DNA, 243 bp, Homo sapiens; identical to SEQ ID NO: 286646
  chr9:113017456-113017699
  hypo

SEQ ID NO: 311011 - DNA, 31 bp, Homo sapiens; identical to SEQ ID NO: 286647
  chr9:113017729-113017760
  hypo

SEQ ID NO: 311012 - DNA, 101 bp, Homo sapiens; identical to SEQ ID NO: 286648
  chr9:113017835-113017936
  hypo

SEQ ID NO: 311013 - DNA, 203 bp, Homo sapiens; identical to SEQ ID NO: 212923
  chr9:113592870-113593073
  hypo

SEQ ID NO: 311014 - DNA, 45 bp, Homo sapiens; identical to SEQ ID NO: 260550
  chr9:113897404-113897449
  hypo

SEQ ID NO: 311015 - DNA, 91 bp, Homo sapiens; identical to SEQ ID NO: 260551
  chr9:114173538-114173629
  hypo

SEQ ID NO: 311016 - DNA, 120 bp, Homo sapiens; identical to SEQ ID NO: 260552
  chr9:114319645-114319765
  hypo

SEQ ID NO: 311017 - DNA, 220 bp, Homo sapiens; identical to SEQ ID NO: 260553
  chr9:114556868-114557088
  hypo

SEQ ID NO: 311018 - DNA, 240 bp, Homo sapiens; identical to SEQ ID NO: 212924
  chr9:114619240-114619480
  hypo

SEQ ID NO: 311019 - DNA, 180 bp, Homo sapiens; identical to SEQ ID NO: 260555
  chr9:114656964-114657144
  hypo

SEQ ID NO: 311020 - DNA, 37 bp, Homo sapiens; identical to SEQ ID NO: 212925
  chr9:114701511-114701548
  hypo

SEQ ID NO: 311021 - DNA, 157 bp, Homo sapiens; identical to SEQ ID NO: 212926
  chr9:114750309-114750466
  hypo

SEQ ID NO: 311022 - DNA, 32 bp, Homo sapiens; identical to SEQ ID NO: 260558
  chr9:114789967-114789999
  hypo

SEQ ID NO: 311023 - DNA, 181 bp, Homo sapiens; identical to SEQ ID NO: 260559
  chr9:114823149-114823330
  hypo

SEQ ID NO: 311024 - DNA, 202 bp, Homo sapiens; identical to SEQ ID NO: 212927
  chr9:114830992-114831194
  hypo

SEQ ID NO: 311025 - DNA, 137 bp, Homo sapiens; identical to SEQ ID NO: 212928
  chr9:114832553-114832690
  hypo

SEQ ID NO: 311026 - DNA, 181 bp, Homo sapiens; identical to SEQ ID NO: 260562
  chr9:114860722-114860903
  hypo

SEQ ID NO: 311027 - DNA, 192 bp, Homo sapiens; identical to SEQ ID NO: 223662
  chr9:114937755-114937947
  hypo

SEQ ID NO: 311028 - DNA, 198 bp, Homo sapiens; identical to SEQ ID NO: 260564
  chr9:115040853-115041051
  hypo

SEQ ID NO: 311029 - DNA, 77 bp, Homo sapiens; identical to SEQ ID NO: 260566
  chr9:115087416-115087493
  hypo

SEQ ID NO: 311030 - DNA, 82 bp, Homo sapiens; identical to SEQ ID NO: 260568
  chr9:115445176-115445258
  hypo

SEQ ID NO: 311031 - DNA, 94 bp, Homo sapiens; identical to SEQ ID NO: 212929
  chr9:115479262-115479356
  hypo

SEQ ID NO: 311032 - DNA, 78 bp, Homo sapiens; identical to SEQ ID NO: 260571
  chr9:115519017-115519095
  hypo

SEQ ID NO: 311033 - DNA, 199 bp, Homo sapiens; identical to SEQ ID NO: 260572
  chr9:115550632-115550831
  hypo

SEQ ID NO: 311034 - DNA, 209 bp, Homo sapiens; identical to SEQ ID NO: 260573
  chr9:115598523-115598732
  hypo

SEQ ID NO: 311035 - DNA, 38 bp, Homo sapiens
  chr9:115599335-115599373
  hypo
tgatcgcactggcatgggaagcacgttgaggattcccc

SEQ ID NO: 311036 - DNA, 273 bp, Homo sapiens; identical to SEQ ID NO: 260575
  chr9:115630952-115631225
  hypo

SEQ ID NO: 311037 - DNA, 144 bp, Homo sapiens; identical to SEQ ID NO: 260576
  chr9:115948533-115948677
  hypo

SEQ ID NO: 311038 - DNA, 101 bp, Homo sapiens; identical to SEQ ID NO: 212931
  chr9:116043449-116043550
  hypo

SEQ ID NO: 311039 - DNA, 64 bp, Homo sapiens; identical to SEQ ID NO: 260578
  chr9:116047380-116047444
  hypo

SEQ ID NO: 311040 - DNA, 97 bp, Homo sapiens; identical to SEQ ID NO: 260579
  chr9:116054117-116054214
  hypo

SEQ ID NO: 311041 - DNA, 287 bp, Homo sapiens
  chr9:116059811-116060098
  hypo
accaaatgaggctccgtagtcaccatacccagcagcaaccgaaaaaggtttggtttcttgtctgggaacagcactcaccccacaccccaaaggaactgcttggtccaaaagatggagaatatgagcaacagagtgacactgaggatgacggccatcaggtaggcaaagatgcggaactgagggttgcggaaacactccctcaaagagtggtggctggggatgaggatgggcgtagacacggtggcagaggccgtgtctgggggcggcccagtctggcccccaggctg

SEQ ID NO: 311042 - DNA, 645 bp, Homo sapiens
  chr9:116060128-116060773
  hypo
ctggcgcaggaagtagcggctcttgggctggtccttgaggcacagctgatggccttccaggatgacatggtggggctccaggcggagcagggcgagcatggcagtgtccgtgggcaagtcagtgacaggctgccctgaggccagcactgtgggctggcgacagagtgggcacagcaggcggcgccgggctggagtcacaaggctgaggtgggccagacattccacgcagaaggagtggcagcaatccagcattttgggggtatggaacgtgttgttgaaggggttccagcagacggggcactcagcctcaagctcccggccctgctgctcagccatcctcagccacacacggggaggcttcgcgggagacgtcctggcagaagggggaaaggagcaaaggaacagccatgaagtcccatccttgtgcttggcctggggcaaagtgttctgtgggtgttgaaaggtgtaatcaccacgttttacttaggttcaaaagcgttttgttcttgatcaccagttcctaacccatcgagttgagtcaaatgctcctacagcctcccctctgtcaaggtgaaggcctgggccacccctaccaagagcccccaagagagccggcattggagcagatgtcgccctgggctttgg

SEQ ID NO: 311043 - DNA, 233 bp, Homo sapiens; identical to SEQ ID NO: 212932
  chr9:116061763-116061996
  hypo

SEQ ID NO: 311044 - DNA, 127 bp, Homo sapiens; identical to SEQ ID NO: 260582
  chr9:116062911-116063038
  hypo

SEQ ID NO: 311045 - DNA, 210 bp, Homo sapiens
  chr9:116065580-116065790
  hypo
ttctctgaggggatcaagtgcgctcatccttgcaggcctctgttctgggtccgattgatctcctgccatcccctcggattccactgtcctctgtgcgctgacctgcctcgactcctggcttctgccgagatggatccttccctatgctgagtccctgtaaccaaaatacagatagctcttgcaaaatactgacaaaagcggccactaata

SEQ ID NO: 311046 - DNA, 373 bp, Homo sapiens
  chr9:116065827-116066200
  hypo
ctgaagagccagggttctcaagcaaggcacacttctaggtcagagttcagccctcactgagaatccaaactccgtttaactaccgatggagacttgagcaaattaattaacttctgccagcctcagtttcctcacctgaaaatggccataataacctacctacttgatctgtagattaaatgaggtaatacgtgtcgagatcgcgtaataacacagggcctggcagacagtaactcgctaaatgttaaccagaactattattgttataaccggtctgttcacgtggcccatcttttgttcccgctcaaattctttttgtacctatggtcctcttttctttctctctctctttctttctttttttttttctttc

SEQ ID NO: 311047 - DNA, 32 bp, Homo sapiens; identical to SEQ ID NO: 260584
  chr9:116076150-116076182
  hypo

SEQ ID NO: 311048 - DNA, 37 bp, Homo sapiens; identical to SEQ ID NO: 260585
  chr9:116076765-116076802
  hypo

SEQ ID NO: 311049 - DNA, 401 bp, Homo sapiens; identical to SEQ ID NO: 223663
  chr9:116111661-116112062
  hypo

SEQ ID NO: 311050 - DNA, 38 bp, Homo sapiens; identical to SEQ ID NO: 260586
  chr9:116222778-116222816
  hypo

SEQ ID NO: 311051 - DNA, 65 bp, Homo sapiens; identical to SEQ ID NO: 260587
  chr9:116259621-116259686
  hypo

SEQ ID NO: 311052 - DNA, 53 bp, Homo sapiens; identical to SEQ ID NO: 212934
  chr9:116269883-116269936
  hypo

SEQ ID NO: 311053 - DNA, 116 bp, Homo sapiens; identical to SEQ ID NO: 260589
  chr9:116299416-116299532
  hypo

SEQ ID NO: 311054 - DNA, 55 bp, Homo sapiens
  chr9:116331386-116331441
  hypo
ccgtggctcaggctgctgccggagaactgtcagcggctcccaacttagaaagggg

SEQ ID NO: 311055 - DNA, 182 bp, Homo sapiens; identical to SEQ ID NO: 212935
  chr9:116344624-116344806
  hypo

SEQ ID NO: 311056 - DNA, 148 bp, Homo sapiens; identical to SEQ ID NO: 260592
  chr9:116634761-116634909
  hypo

SEQ ID NO: 311057 - DNA, 242 bp, Homo sapiens; identical to SEQ ID NO: 286668
  chr9:116638746-116638988
  hypo

SEQ ID NO: 311058 - DNA, 233 bp, Homo sapiens; identical to SEQ ID NO: 260593
  chr9:116663446-116663679
  hypo

SEQ ID NO: 311059 - DNA, 81 bp, Homo sapiens; identical to SEQ ID NO: 212936
  chr9:116671457-116671538
  hypo

SEQ ID NO: 311060 - DNA, 137 bp, Homo sapiens; identical to SEQ ID NO: 212937
  chr9:116671888-116672025
  hypo

SEQ ID NO: 311061 - DNA, 151 bp, Homo sapiens; identical to SEQ ID NO: 78056
  chr9:116681838-116681989
  hypo

SEQ ID NO: 311062 - DNA, 128 bp, Homo sapiens; identical to SEQ ID NO: 260597
  chr9:116697028-116697156
  hypo

SEQ ID NO: 311063 - DNA, 163 bp, Homo sapiens; identical to SEQ ID NO: 212938
  chr9:116708859-116709022
  hypo

SEQ ID NO: 311064 - DNA, 155 bp, Homo sapiens; identical to SEQ ID NO: 212939
  chr9:116728166-116728321
  hypo

SEQ ID NO: 311065 - DNA, 216 bp, Homo sapiens; identical to SEQ ID NO: 260600
  chr9:116749791-116750007
  hypo

SEQ ID NO: 311066 - DNA, 35 bp, Homo sapiens; identical to SEQ ID NO: 260601
  chr9:116750067-116750102
  hypo

SEQ ID NO: 311067 - DNA, 314 bp, Homo sapiens; identical to SEQ ID NO: 212940
  chr9:116750640-116750954
  hypo

SEQ ID NO: 311068 - DNA, 150 bp, Homo sapiens; identical to SEQ ID NO: 260603
  chr9:116760431-116760581
  hypo

SEQ ID NO: 311069 - DNA, 163 bp, Homo sapiens; identical to SEQ ID NO: 212941
  chr9:116761525-116761688
  hypo

SEQ ID NO: 311070 - DNA, 279 bp, Homo sapiens; identical to SEQ ID NO: 260605
  chr9:116762418-116762697
  hypo

SEQ ID NO: 311071 - DNA, 254 bp, Homo sapiens; identical to SEQ ID NO: 260606
  chr9:116770600-116770854
  hypo

SEQ ID NO: 311072 - DNA, 340 bp, Homo sapiens; identical to SEQ ID NO: 212943
  chr9:116790929-116791269
  hypo

SEQ ID NO: 311073 - DNA, 132 bp, Homo sapiens; identical to SEQ ID NO: 260608
  chr9:116796579-116796711
  hypo

SEQ ID NO: 311074 - DNA, 323 bp, Homo sapiens; identical to SEQ ID NO: 212944
  chr9:116798287-116798610
  hypo

SEQ ID NO: 311075 - DNA, 62 bp, Homo sapiens; identical to SEQ ID NO: 212945
  chr9:116800627-116800689
  hypo

SEQ ID NO: 311076 - DNA, 572 bp, Homo sapiens
  chr9:116800730-116801302
  hypo
aatcccagccacactgaatcgggattaaaggcttggctccatagagagaaattaagcatcatgagctgcgcagttcacagcgccgacgataaggaggatcagccttgaataacaccaatctcattatggagctgctgaatggcacagggtaattcccgctaataaacttcctttctgtgctgtaggaaaacctggcgtgccttggtgacgttggagaagcatgctttggcagtaataataccaaagatagctacaattttgtgagtgctttctatgcgtcacttgtggcactgagagctttacgcaggttatttcatcagatcttcctgattaggtagttgacgttttcatccccattatgcagatgatgaaaccgaggctcagagaacataatcactggcccaaagttgcacagctcctaaaaaaagtatccaatagcatttgagcttttacgtggcgccaggccttgttctaagacttttacatatattcacttatttaattctcggaacaaccctcagagttaagtgcccataacagttccacttcatagctaacgaaacggaggcaca

SEQ ID NO: 311077 - DNA, 1451 bp, Homo sapiens; identical to SEQ ID NO: 212947
  chr9:116810952-116812403
  hypo

SEQ ID NO: 311078 - DNA, 98 bp, Homo sapiens; identical to SEQ ID NO: 212948
  chr9:116812706-116812804
  hypo

SEQ ID NO: 311079 - DNA, 419 bp, Homo sapiens; identical to SEQ ID NO: 260613
  chr9:116813598-116814017
  hypo

SEQ ID NO: 311080 - DNA, 421 bp, Homo sapiens; identical to SEQ ID NO: 260614
  chr9:116817234-116817655
  hypo

SEQ ID NO: 311081 - DNA, 201 bp, Homo sapiens; identical to SEQ ID NO: 260615
  chr9:116823662-116823863
  hypo

SEQ ID NO: 311082 - DNA, 43 bp, Homo sapiens; identical to SEQ ID NO: 260616
  chr9:116832918-116832961
  hypo

SEQ ID NO: 311083 - DNA, 200 bp, Homo sapiens; identical to SEQ ID NO: 212950
  chr9:116856485-116856685
  hypo

SEQ ID NO: 311084 - DNA, 245 bp, Homo sapiens; identical to SEQ ID NO: 212951
  chr9:116857252-116857497
  hypo

SEQ ID NO: 311085 - DNA, 432 bp, Homo sapiens; identical to SEQ ID NO: 260619
  chr9:116971563-116971995
  hypo

SEQ ID NO: 311086 - DNA, 175 bp, Homo sapiens; identical to SEQ ID NO: 212953
  chr9:116973314-116973489
  hypo

SEQ ID NO: 311087 - DNA, 54 bp, Homo sapiens; identical to SEQ ID NO: 260621
  chr9:117038006-117038060
  hypo

SEQ ID NO: 311088 - DNA, 152 bp, Homo sapiens; identical to SEQ ID NO: 260622
  chr9:117045885-117046037
  hypo

SEQ ID NO: 311089 - DNA, 49 bp, Homo sapiens; identical to SEQ ID NO: 260623
  chr9:117179587-117179636
  hypo

SEQ ID NO: 311090 - DNA, 45 bp, Homo sapiens; identical to SEQ ID NO: 260624
  chr9:117372622-117372667
  hypo

SEQ ID NO: 311091 - DNA, 241 bp, Homo sapiens; identical to SEQ ID NO: 260625
  chr9:117372697-117372938
  hypo

SEQ ID NO: 311092 - DNA, 129 bp, Homo sapiens; identical to SEQ ID NO: 260626
  chr9:119976901-119977030
  hypo

SEQ ID NO: 311093 - DNA, 60 bp, Homo sapiens; identical to SEQ ID NO: 260627
  chr9:123139935-123139995
  hypo

SEQ ID NO: 311094 - DNA, 203 bp, Homo sapiens; identical to SEQ ID NO: 260628
  chr9:123140239-123140442
  hypo

SEQ ID NO: 311095 - DNA, 213 bp, Homo sapiens; identical to SEQ ID NO: 260629
  chr9:123146243-123146456
  hypo

SEQ ID NO: 311096 - DNA, 484 bp, Homo sapiens; identical to SEQ ID NO: 212954
  chr9:123150759-123151243
  hypo

SEQ ID NO: 311097 - DNA, 55 bp, Homo sapiens; identical to SEQ ID NO: 260631
  chr9:123162810-123162865
  hypo

SEQ ID NO: 311098 - DNA, 110 bp, Homo sapiens; identical to SEQ ID NO: 260632
  chr9:123163101-123163211
  hypo

SEQ ID NO: 311099 - DNA, 166 bp, Homo sapiens; identical to SEQ ID NO: 260633
  chr9:123165255-123165421
  hypo

SEQ ID NO: 311100 - DNA, 104 bp, Homo sapiens; identical to SEQ ID NO: 260634
  chr9:123171454-123171558
  hypo

SEQ ID NO: 311101 - DNA, 155 bp, Homo sapiens; identical to SEQ ID NO: 212955
  chr9:123176127-123176282
  hypo

SEQ ID NO: 311102 - DNA, 421 bp, Homo sapiens; identical to SEQ ID NO: 260636
  chr9:123210115-123210536
  hypo

SEQ ID NO: 311103 - DNA, 71 bp, Homo sapiens; identical to SEQ ID NO: 260637
  chr9:123295277-123295348
  hypo

SEQ ID NO: 311104 - DNA, 124 bp, Homo sapiens; identical to SEQ ID NO: 260638
  chr9:123367536-123367660
  hypo

SEQ ID NO: 311105 - DNA, 42 bp, Homo sapiens; identical to SEQ ID NO: 260639
  chr9:123447413-123447455
  hypo

SEQ ID NO: 311106 - DNA, 77 bp, Homo sapiens; identical to SEQ ID NO: 260640
  chr9:123650230-123650307
  hypo

SEQ ID NO: 311107 - DNA, 82 bp, Homo sapiens; identical to SEQ ID NO: 260641
  chr9:123664361-123664443
  hypo

SEQ ID NO: 311108 - DNA, 33 bp, Homo sapiens; identical to SEQ ID NO: 260642
  chr9:123690272-123690305
  hypo

SEQ ID NO: 311109 - DNA, 104 bp, Homo sapiens; identical to SEQ ID NO: 212957
  chr9:123965022-123965126
  hypo

SEQ ID NO: 311110 - DNA, 64 bp, Homo sapiens; identical to SEQ ID NO: 260644
  chr9:124095120-124095184
  hypo

SEQ ID NO: 311111 - DNA, 1032 bp, Homo sapiens; identical to SEQ ID NO: 286685
  chr9:124131788-124132820
  hypo

SEQ ID NO: 311112 - DNA, 327 bp, Homo sapiens; identical to SEQ ID NO: 260645
  chr9:124289706-124290033
  hypo

SEQ ID NO: 311113 - DNA, 222 bp, Homo sapiens; identical to SEQ ID NO: 260646
  chr9:124339602-124339824
  hypo

SEQ ID NO: 311114 - DNA, 205 bp, Homo sapiens; identical to SEQ ID NO: 212959
  chr9:124422091-124422296
  hypo

SEQ ID NO: 311115 - DNA, 198 bp, Homo sapiens; identical to SEQ ID NO: 212960
  chr9:124443387-124443585
  hypo

SEQ ID NO: 311116 - DNA, 365 bp, Homo sapiens; identical to SEQ ID NO: 260649
  chr9:124479634-124479999
  hypo

SEQ ID NO: 311117 - DNA, 167 bp, Homo sapiens; identical to SEQ ID NO: 212961
  chr9:124499833-124500000
  hypo

SEQ ID NO: 311118 - DNA, 84 bp, Homo sapiens; identical to SEQ ID NO: 260651
  chr9:124512392-124512476
  hypo

SEQ ID NO: 311119 - DNA, 97 bp, Homo sapiens; identical to SEQ ID NO: 260652
  chr9:124513376-124513473
  hypo

SEQ ID NO: 311120 - DNA, 169 bp, Homo sapiens; identical to SEQ ID NO: 212962
  chr9:124545862-124546031
  hypo

SEQ ID NO: 311121 - DNA, 184 bp, Homo sapiens; identical to SEQ ID NO: 212963
  chr9:124548590-124548774
  hypo

SEQ ID NO: 311122 - DNA, 179 bp, Homo sapiens; identical to SEQ ID NO: 260655
  chr9:124549335-124549514
  hypo

SEQ ID NO: 311123 - DNA, 62 bp, Homo sapiens; identical to SEQ ID NO: 260656
  chr9:124581116-124581178
  hypo

SEQ ID NO: 311124 - DNA, 181 bp, Homo sapiens; identical to SEQ ID NO: 223669
  chr9:124622036-124622217
  hypo

SEQ ID NO: 311125 - DNA, 72 bp, Homo sapiens; identical to SEQ ID NO: 260657
  chr9:124639399-124639471
  hypo

SEQ ID NO: 311126 - DNA, 386 bp, Homo sapiens; identical to SEQ ID NO: 260658
  chr9:124666054-124666440
  hypo

SEQ ID NO: 311127 - DNA, 166 bp, Homo sapiens; identical to SEQ ID NO: 260659
  chr9:124736303-124736469
  hypo

SEQ ID NO: 311128 - DNA, 111 bp, Homo sapiens
  chr9:124751515-124751626
  hypo
ctggtagaagactttgagctctggagtcagcgcgatgaccgtcttaatcaccacggagatgatgtcagaccagaccttcttgatgtcaacgcctttggaagacagtctaca

SEQ ID NO: 311129 - DNA, 112 bp, Homo sapiens; identical to SEQ ID NO: 260661
  chr9:124815997-124816109
  hypo

SEQ ID NO: 311130 - DNA, 65 bp, Homo sapiens; identical to SEQ ID NO: 260662
  chr9:124967430-124967495
  hypo

SEQ ID NO: 311131 - DNA, 63 bp, Homo sapiens; identical to SEQ ID NO: 286691
  chr9:124981571-124981634
  hypo

SEQ ID NO: 311132 - DNA, 140 bp, Homo sapiens; identical to SEQ ID NO: 118090
  chr9:124981877-124982017
  hypo

SEQ ID NO: 311133 - DNA, 102 bp, Homo sapiens; identical to SEQ ID NO: 201862
  chr9:124990418-124990520
  hypo

SEQ ID NO: 311134 - DNA, 150 bp, Homo sapiens; identical to SEQ ID NO: 201863
  chr9:124991012-124991162
  hypo

SEQ ID NO: 311135 - DNA, 106 bp, Homo sapiens; identical to SEQ ID NO: 260663
  chr9:125126540-125126646
  hypo

SEQ ID NO: 311136 - DNA, 42 bp, Homo sapiens; identical to SEQ ID NO: 260664
  chr9:125573936-125573978
  hypo

SEQ ID NO: 311137 - DNA, 42 bp, Homo sapiens; identical to SEQ ID NO: 212966
  chr9:125574218-125574260
  hypo

SEQ ID NO: 311138 - DNA, 240 bp, Homo sapiens; identical to SEQ ID NO: 260666
  chr9:125591372-125591612
  hypo

SEQ ID NO: 311139 - DNA, 153 bp, Homo sapiens; identical to SEQ ID NO: 260667
  chr9:125622564-125622717
  hypo

SEQ ID NO: 311140 - DNA, 57 bp, Homo sapiens; identical to SEQ ID NO: 212967
  chr9:125870568-125870625
  hypo

SEQ ID NO: 311141 - DNA, 42 bp, Homo sapiens; identical to SEQ ID NO: 260669
  chr9:125878079-125878121
  hypo

SEQ ID NO: 311142 - DNA, 44 bp, Homo sapiens; identical to SEQ ID NO: 260670
  chr9:125927262-125927306
  hypo

SEQ ID NO: 311143 - DNA, 101 bp, Homo sapiens; identical to SEQ ID NO: 212968
  chr9:125986776-125986877
  hypo

SEQ ID NO: 311144 - DNA, 213 bp, Homo sapiens; identical to SEQ ID NO: 260672
  chr9:126092335-126092548
  hypo

SEQ ID NO: 311145 - DNA, 195 bp, Homo sapiens; identical to SEQ ID NO: 212969
  chr9:126100875-126101070
  hypo

SEQ ID NO: 311146 - DNA, 125 bp, Homo sapiens
  chr9:126110175-126110300
  hypo
cagagagaggtccaagcatgaagatcaggagtctttgttccaactttggcatgtgacgtgggtcagcccctgcccctatcaagcctcggtttccctgtctgggcagtgagcgccatgttgttcaa

SEQ ID NO: 311147 - DNA, 143 bp, Homo sapiens
  chr9:126139069-126139212
  hypo
cctccccttctctgcggtcttaggcctcggtgtcgtgtctcttgcagaagggcctgcccctgccgctgccattcccactgctggaggtggccgtacctgcagcctgtgcctgcctcctcctcctcctcctgggcctcctttca

SEQ ID NO: 311148 - DNA, 124 bp, Homo sapiens; identical to SEQ ID NO: 212970
  chr9:126153103-126153227
  hypo

SEQ ID NO: 311149 - DNA, 64 bp, Homo sapiens; identical to SEQ ID NO: 212971
  chr9:126154147-126154211
  hypo

SEQ ID NO: 311150 - DNA, 180 bp, Homo sapiens; identical to SEQ ID NO: 212972
  chr9:126158115-126158295
  hypo

SEQ ID NO: 311151 - DNA, 156 bp, Homo sapiens; identical to SEQ ID NO: 260679
  chr9:126162177-126162333
  hypo

SEQ ID NO: 311152 - DNA, 280 bp, Homo sapiens; identical to SEQ ID NO: 260680
  chr9:126165455-126165735
  hypo

SEQ ID NO: 311153 - DNA, 34 bp, Homo sapiens; identical to SEQ ID NO: 260681
  chr9:126168860-126168894
  hypo

SEQ ID NO: 311154 - DNA, 189 bp, Homo sapiens
  chr9:126169183-126169372
  hypo
ttgctacaataaaggcgggttaagaatgtgaacttgtggctgaaatggggggattaagtttgtggcaacttcaactgaacttgcaacgtggtgaaacatggggaaaaagaacaacagagctaattagacgagctgagctgtcagagtgccgctgaatggctcagcgccaacaaacaaaaggaatgggtt

SEQ ID NO: 311155 - DNA, 42 bp, Homo sapiens; identical to SEQ ID NO: 212974
  chr9:126169491-126169533
  hypo

SEQ ID NO: 311156 - DNA, 348 bp, Homo sapiens; identical to SEQ ID NO: 260683
  chr9:126169851-126170199
  hypo

SEQ ID NO: 311157 - DNA, 231 bp, Homo sapiens; identical to SEQ ID NO: 260684
  chr9:126180749-126180980
  hypo

SEQ ID NO: 311158 - DNA, 221 bp, Homo sapiens; identical to SEQ ID NO: 260685
  chr9:126187645-126187866
  hypo

SEQ ID NO: 311159 - DNA, 134 bp, Homo sapiens; identical to SEQ ID NO: 260686
  chr9:126198542-126198676
  hypo

SEQ ID NO: 311160 - DNA, 266 bp, Homo sapiens; identical to SEQ ID NO: 260687
  chr9:126208445-126208711
  hypo

SEQ ID NO: 311161 - DNA, 80 bp, Homo sapiens; identical to SEQ ID NO: 260688
  chr9:126243636-126243716
  hypo

SEQ ID NO: 311162 - DNA, 61 bp, Homo sapiens
  chr9:126314090-126314151
  hypo
ctccccaacaaacccgcagaaagcacagatggggaggagaagcctagctcctggcacaggg

SEQ ID NO: 311163 - DNA, 73 bp, Homo sapiens
  chr9:126314181-126314254
  hypo
ttccttctggatctggtaaagaaaacaaagctcaggagtcccccagccagctgcattctgaattttttcatta

SEQ ID NO: 311164 - DNA, 103 bp, Homo sapiens; identical to SEQ ID NO: 260690
  chr9:126314314-126314417
  hypo

SEQ ID NO: 311165 - DNA, 137 bp, Homo sapiens; identical to SEQ ID NO: 260691
  chr9:126321030-126321167
  hypo

SEQ ID NO: 311166 - DNA, 167 bp, Homo sapiens; identical to SEQ ID NO: 212975
  chr9:126323416-126323583
  hypo

SEQ ID NO: 311167 - DNA, 151 bp, Homo sapiens; identical to SEQ ID NO: 212976
  chr9:126348887-126349038
  hypo

SEQ ID NO: 311168 - DNA, 40 bp, Homo sapiens; identical to SEQ ID NO: 212977
  chr9:126349104-126349144
  hypo

SEQ ID NO: 311169 - DNA, 51 bp, Homo sapiens; identical to SEQ ID NO: 212978
  chr9:126349174-126349225
  hypo

SEQ ID NO: 311170 - DNA, 114 bp, Homo sapiens; identical to SEQ ID NO: 260694
  chr9:126368302-126368416
  hypo

SEQ ID NO: 311171 - DNA, 78 bp, Homo sapiens; identical to SEQ ID NO: 260695
  chr9:126403904-126403982
  hypo

SEQ ID NO: 311172 - DNA, 75 bp, Homo sapiens; identical to SEQ ID NO: 260696
  chr9:126406103-126406178
  hypo

SEQ ID NO: 311173 - DNA, 80 bp, Homo sapiens; identical to SEQ ID NO: 260697
  chr9:126440715-126440795
  hypo

SEQ ID NO: 311174 - DNA, 87 bp, Homo sapiens; identical to SEQ ID NO: 212979
  chr9:126442151-126442238
  hypo

SEQ ID NO: 311175 - DNA, 260 bp, Homo sapiens; identical to SEQ ID NO: 260699
  chr9:126487964-126488224
  hypo

SEQ ID NO: 311176 - DNA, 101 bp, Homo sapiens; identical to SEQ ID NO: 260700
  chr9:126707416-126707517
  hypo

SEQ ID NO: 311177 - DNA, 165 bp, Homo sapiens; identical to SEQ ID NO: 286698
  chr9:126762044-126762209
  hypo

SEQ ID NO: 311178 - DNA, 299 bp, Homo sapiens; identical to SEQ ID NO: 286699
  chr9:126762231-126762530
  hypo

SEQ ID NO: 311179 - DNA, 67 bp, Homo sapiens; identical to SEQ ID NO: 286700
  chr9:126762606-126762673
  hypo

SEQ ID NO: 311180 - DNA, 337 bp, Homo sapiens; identical to SEQ ID NO: 260701
  chr9:126975847-126976184
  hypo

SEQ ID NO: 311181 - DNA, 282 bp, Homo sapiens; identical to SEQ ID NO: 260702
  chr9:127019287-127019569
  hypo

SEQ ID NO: 311182 - DNA, 291 bp, Homo sapiens; identical to SEQ ID NO: 260703
  chr9:127071988-127072279
  hypo

SEQ ID NO: 311183 - DNA, 118 bp, Homo sapiens; identical to SEQ ID NO: 260704
  chr9:127120326-127120444
  hypo

SEQ ID NO: 311184 - DNA, 200 bp, Homo sapiens; identical to SEQ ID NO: 260705
  chr9:127214765-127214965
  hypo

SEQ ID NO: 311185 - DNA, 278 bp, Homo sapiens; identical to SEQ ID NO: 286720
  chr9:127215312-127215590
  hypo

SEQ ID NO: 311186 - DNA, 124 bp, Homo sapiens; identical to SEQ ID NO: 286721
  chr9:127215678-127215802
  hypo

SEQ ID NO: 311187 - DNA, 80 bp, Homo sapiens; identical to SEQ ID NO: 260706
  chr9:127219756-127219836
  hypo

SEQ ID NO: 311188 - DNA, 51 bp, Homo sapiens; identical to SEQ ID NO: 260707
  chr9:127230411-127230462
  hypo

SEQ ID NO: 311189 - DNA, 171 bp, Homo sapiens; identical to SEQ ID NO: 260708
  chr9:127241721-127241892
  hypo

SEQ ID NO: 311190 - DNA, 602 bp, Homo sapiens; identical to SEQ ID NO: 260709
  chr9:127262376-127262978
  hypo

SEQ ID NO: 311191 - DNA, 271 bp, Homo sapiens; identical to SEQ ID NO: 260710
  chr9:127268260-127268531
  hypo

SEQ ID NO: 311192 - DNA, 93 bp, Homo sapiens; identical to SEQ ID NO: 212981
  chr9:127308364-127308457
  hypo

SEQ ID NO: 311193 - DNA, 222 bp, Homo sapiens; identical to SEQ ID NO: 260712
  chr9:127361668-127361890
  hypo

SEQ ID NO: 311194 - DNA, 39 bp, Homo sapiens; identical to SEQ ID NO: 212982
  chr9:127420645-127420684
  hypo

SEQ ID NO: 311195 - DNA, 39 bp, Homo sapiens; identical to SEQ ID NO: 260714
  chr9:127457915-127457954
  hypo

SEQ ID NO: 311196 - DNA, 98 bp, Homo sapiens; identical to SEQ ID NO: 260715
  chr9:127481335-127481433
  hypo

SEQ ID NO: 311197 - DNA, 35 bp, Homo sapiens; identical to SEQ ID NO: 260716
  chr9:127482311-127482346
  hypo

SEQ ID NO: 311198 - DNA, 31 bp, Homo sapiens; identical to SEQ ID NO: 212983
  chr9:127500846-127500877
  hypo

SEQ ID NO: 311199 - DNA, 127 bp, Homo sapiens; identical to SEQ ID NO: 201874
  chr9:127534416-127534543
  hypo

SEQ ID NO: 311200 - DNA, 85 bp, Homo sapiens; identical to SEQ ID NO: 260718
  chr9:127538088-127538173
  hypo

SEQ ID NO: 311201 - DNA, 67 bp, Homo sapiens; identical to SEQ ID NO: 260719
  chr9:127570205-127570272
  hypo

SEQ ID NO: 311202 - DNA, 336 bp, Homo sapiens; identical to SEQ ID NO: 212985
  chr9:127572288-127572624
  hypo

SEQ ID NO: 311203 - DNA, 110 bp, Homo sapiens; identical to SEQ ID NO: 260721
  chr9:127573375-127573485
  hypo

SEQ ID NO: 311204 - DNA, 39 bp, Homo sapiens; identical to SEQ ID NO: 260722
  chr9:127577754-127577793
  hypo

SEQ ID NO: 311205 - DNA, 39 bp, Homo sapiens; identical to SEQ ID NO: 260723
  chr9:127577913-127577952
  hypo

SEQ ID NO: 311206 - DNA, 117 bp, Homo sapiens; identical to SEQ ID NO: 260724
  chr9:127616531-127616648
  hypo

SEQ ID NO: 311207 - DNA, 77 bp, Homo sapiens; identical to SEQ ID NO: 212986
  chr9:127657866-127657943
  hypo

SEQ ID NO: 311208 - DNA, 36 bp, Homo sapiens; identical to SEQ ID NO: 260726
  chr9:127861825-127861861
  hypo

SEQ ID NO: 311209 - DNA, 33 bp, Homo sapiens; identical to SEQ ID NO: 212987
  chr9:127955075-127955108
  hypo

SEQ ID NO: 311210 - DNA, 33 bp, Homo sapiens; identical to SEQ ID NO: 260728
  chr9:128029579-128029612
  hypo

SEQ ID NO: 311211 - DNA, 37 bp, Homo sapiens; identical to SEQ ID NO: 260729
  chr9:128032923-128032960
  hypo

SEQ ID NO: 311212 - DNA, 156 bp, Homo sapiens; identical to SEQ ID NO: 212988
  chr9:128103377-128103533
  hypo

SEQ ID NO: 311213 - DNA, 45 bp, Homo sapiens
  chr9:128118010-128118055
  hypo
catatggcaaaacgcgagtgaagaacagcttcaagatgcacagct

SEQ ID NO: 311214 - DNA, 50 bp, Homo sapiens
  chr9:128118095-128118145
  hypo
gccttctaccctaatcaagatggggacatacttcgcgaccagtaagtact

SEQ ID NO: 311215 - DNA, 138 bp, Homo sapiens; identical to SEQ ID NO: 212989
  chr9:128135749-128135887
  hypo

SEQ ID NO: 311216 - DNA, 159 bp, Homo sapiens; identical to SEQ ID NO: 260733
  chr9:128168027-128168186
  hypo

SEQ ID NO: 311217 - DNA, 116 bp, Homo sapiens
  chr9:128189978-128190094
  hypo
aaagggtgactcagcctcagcgaggtgaagggacttgcccagggtcacacagttaacaggcggtggcgccagtttgtctgactggagaccgcgctgtcagccggccactgccacgg

SEQ ID NO: 311218 - DNA, 158 bp, Homo sapiens
  chr9:128190140-128190298
  hypo
ctagacatgcgtgcatgcacttcggtcacaagtgtgcctggggaagttgcgtgtcacccccttcttggaacacagtgcacagtggcccgttgaaggctctgagggaccccgcaggagcaaaaactgccatgttcagcgtggagttcccagacctctgt

SEQ ID NO: 311219 - DNA, 480 bp, Homo sapiens; identical to SEQ ID NO: 212990
  chr9:128200052-128200532
  hypo

SEQ ID NO: 311220 - DNA, 245 bp, Homo sapiens; identical to SEQ ID NO: 260736
  chr9:128263221-128263466
  hypo

SEQ ID NO: 311221 - DNA, 168 bp, Homo sapiens; identical to SEQ ID NO: 260737
  chr9:128274068-128274236
  hypo

SEQ ID NO: 311222 - DNA, 87 bp, Homo sapiens; identical to SEQ ID NO: 260738
  chr9:128274769-128274856
  hypo

SEQ ID NO: 311223 - DNA, 93 bp, Homo sapiens; identical to SEQ ID NO: 212991
  chr9:128399989-128400082
  hypo

SEQ ID NO: 311224 - DNA, 159 bp, Homo sapiens; identical to SEQ ID NO: 212992
  chr9:128407606-128407765
  hypo

SEQ ID NO: 311225 - DNA, 264 bp, Homo sapiens; identical to SEQ ID NO: 212993
  chr9:128409706-128409970
  hypo

SEQ ID NO: 311226 - DNA, 81 bp, Homo sapiens; identical to SEQ ID NO: 212994
  chr9:128479564-128479645
  hypo

SEQ ID NO: 311227 - DNA, 50 bp, Homo sapiens; identical to SEQ ID NO: 260743
  chr9:128672789-128672839
  hypo

SEQ ID NO: 311228 - DNA, 57 bp, Homo sapiens; identical to SEQ ID NO: 260744
  chr9:128674628-128674685
  hypo

SEQ ID NO: 311229 - DNA, 239 bp, Homo sapiens; identical to SEQ ID NO: 260745
  chr9:128677870-128678109
  hypo

SEQ ID NO: 311230 - DNA, 105 bp, Homo sapiens; identical to SEQ ID NO: 260746
  chr9:128718758-128718863
  hypo

SEQ ID NO: 311231 - DNA, 40 bp, Homo sapiens; identical to SEQ ID NO: 260747
  chr9:128752498-128752538
  hypo

SEQ ID NO: 311232 - DNA, 145 bp, Homo sapiens; identical to SEQ ID NO: 212995
  chr9:128759707-128759852
  hypo

SEQ ID NO: 311233 - DNA, 59 bp, Homo sapiens; identical to SEQ ID NO: 260749
  chr9:128777744-128777803
  hypo

SEQ ID NO: 311234 - DNA, 175 bp, Homo sapiens; identical to SEQ ID NO: 260750
  chr9:128786731-128786906
  hypo

SEQ ID NO: 311235 - DNA, 147 bp, Homo sapiens; identical to SEQ ID NO: 260751
  chr9:128819865-128820012
  hypo

SEQ ID NO: 311236 - DNA, 165 bp, Homo sapiens
  chr9:128824393-128824558
  hypo
tcaccatcggcaaccggagcctgctggaattgtgaacaactggatgaatgaatgaattggaaaatataagaacaaatgattggataaagaagtcaatgaaagaatgaatttgagccacagggtctcatgcaggccacatggtcgttcaggctctgctgtgtgcca

SEQ ID NO: 311237 - DNA, 59 bp, Homo sapiens; identical to SEQ ID NO: 260753
  chr9:128890927-128890986
  hypo

SEQ ID NO: 311238 - DNA, 111 bp, Homo sapiens; identical to SEQ ID NO: 212996
  chr9:128925326-128925437
  hypo

SEQ ID NO: 311239 - DNA, 35 bp, Homo sapiens; identical to SEQ ID NO: 260755
  chr9:128926861-128926896
  hypo

SEQ ID NO: 311240 - DNA, 440 bp, Homo sapiens; identical to SEQ ID NO: 260756
  chr9:128997999-128998439
  hypo

SEQ ID NO: 311241 - DNA, 295 bp, Homo sapiens; identical to SEQ ID NO: 260757
  chr9:129038608-129038903
  hypo

SEQ ID NO: 311242 - DNA, 140 bp, Homo sapiens; identical to SEQ ID NO: 260758
  chr9:129265881-129266021
  hypo

SEQ ID NO: 311243 - DNA, 79 bp, Homo sapiens; identical to SEQ ID NO: 260759
  chr9:129316510-129316589
  hypo

SEQ ID NO: 311244 - DNA, 119 bp, Homo sapiens; identical to SEQ ID NO: 260760
  chr9:129454751-129454870
  hypo

SEQ ID NO: 311245 - DNA, 421 bp, Homo sapiens; identical to SEQ ID NO: 212997
  chr9:129455241-129455662
  hypo

SEQ ID NO: 311246 - DNA, 291 bp, Homo sapiens; identical to SEQ ID NO: 260762
  chr9:129458625-129458916
  hypo

SEQ ID NO: 311247 - DNA, 224 bp, Homo sapiens
  chr9:129517389-129517613
  hypo
tggggcgtgggtggcggccaatgcagtgccgggccctggcgggccgcagtgcgggcacagagcctcgtctttattgtacttataaaatatacatggccctttattgaattgcctgctgtcgaaatctgcaagaacgttattgccttttactgtcctggagagaagcagagcagcaacatctgtgtaatttcataagatgcaggagccataaatctgattgtgcc

SEQ ID NO: 311248 - DNA, 37 bp, Homo sapiens; identical to SEQ ID NO: 260764
  chr9:129560119-129560156
  hypo

SEQ ID NO: 311249 - DNA, 97 bp, Homo sapiens; identical to SEQ ID NO: 260765
  chr9:129562214-129562311
  hypo

SEQ ID NO: 311250 - DNA, 37 bp, Homo sapiens; identical to SEQ ID NO: 212998
  chr9:129627966-129628003
  hypo

SEQ ID NO: 311251 - DNA, 237 bp, Homo sapiens; identical to SEQ ID NO: 212999
  chr9:129628399-129628636
  hypo

SEQ ID NO: 311252 - DNA, 425 bp, Homo sapiens; identical to SEQ ID NO: 260768
  chr9:129630576-129631001
  hypo

SEQ ID NO: 311253 - DNA, 76 bp, Homo sapiens; identical to SEQ ID NO: 213000
  chr9:129633597-129633673
  hypo

SEQ ID NO: 311254 - DNA, 135 bp, Homo sapiens; identical to SEQ ID NO: 260770
  chr9:129643034-129643169
  hypo

SEQ ID NO: 311255 - DNA, 148 bp, Homo sapiens; identical to SEQ ID NO: 260771
  chr9:129644774-129644922
  hypo

SEQ ID NO: 311256 - DNA, 144 bp, Homo sapiens; identical to SEQ ID NO: 260772
  chr9:129645169-129645313
  hypo

SEQ ID NO: 311257 - DNA, 38 bp, Homo sapiens; identical to SEQ ID NO: 260773
  chr9:129648781-129648819
  hypo

SEQ ID NO: 311258 - DNA, 40 bp, Homo sapiens; identical to SEQ ID NO: 260774
  chr9:129834459-129834499
  hypo

SEQ ID NO: 311259 - DNA, 658 bp, Homo sapiens; identical to SEQ ID NO: 223678
  chr9:130158818-130159476
  hypo

SEQ ID NO: 311260 - DNA, 36 bp, Homo sapiens; identical to SEQ ID NO: 260775
  chr9:130172835-130172871
  hypo

SEQ ID NO: 311261 - DNA, 84 bp, Homo sapiens
  chr9:130248449-130248533
  hypo
gagaaactgtataacgcacccaaggaagcaagccagcaggtggcggagccaggatttgagcccggcagaggggaggggtgtgct

SEQ ID NO: 311262 - DNA, 190 bp, Homo sapiens; identical to SEQ ID NO: 260777
  chr9:130265601-130265791
  hypo

SEQ ID NO: 311263 - DNA, 167 bp, Homo sapiens; identical to SEQ ID NO: 213002
  chr9:130266739-130266906
  hypo

SEQ ID NO: 311264 - DNA, 273 bp, Homo sapiens; identical to SEQ ID NO: 260779
  chr9:130269317-130269590
  hypo

SEQ ID NO: 311265 - DNA, 317 bp, Homo sapiens; identical to SEQ ID NO: 260780
  chr9:130270528-130270845
  hypo

SEQ ID NO: 311266 - DNA, 198 bp, Homo sapiens; identical to SEQ ID NO: 213004
  chr9:130271243-130271441
  hypo

SEQ ID NO: 311267 - DNA, 163 bp, Homo sapiens; identical to SEQ ID NO: 213005
  chr9:130272563-130272726
  hypo

SEQ ID NO: 311268 - DNA, 71 bp, Homo sapiens; identical to SEQ ID NO: 260783
  chr9:130278830-130278901
  hypo

SEQ ID NO: 311269 - DNA, 69 bp, Homo sapiens; identical to SEQ ID NO: 213006
  chr9:130279231-130279300
  hypo

SEQ ID NO: 311270 - DNA, 326 bp, Homo sapiens; identical to SEQ ID NO: 260785
  chr9:130279874-130280200
  hypo

SEQ ID NO: 311271 - DNA, 37 bp, Homo sapiens; identical to SEQ ID NO: 260786
  chr9:130282274-130282311
  hypo

SEQ ID NO: 311272 - DNA, 34 bp, Homo sapiens; identical to SEQ ID NO: 260787
  chr9:130296359-130296393
  hypo

SEQ ID NO: 311273 - DNA, 203 bp, Homo sapiens; identical to SEQ ID NO: 260788
  chr9:130297782-130297985
  hypo

SEQ ID NO: 311274 - DNA, 300 bp, Homo sapiens; identical to SEQ ID NO: 260790
  chr9:130327523-130327823
  hypo

SEQ ID NO: 311275 - DNA, 473 bp, Homo sapiens; identical to SEQ ID NO: 201885
  chr9:130330786-130331259
  hypo

SEQ ID NO: 311276 - DNA, 158 bp, Homo sapiens; identical to SEQ ID NO: 223680
  chr9:130374196-130374354
  hypo

SEQ ID NO: 311277 - DNA, 36 bp, Homo sapiens; identical to SEQ ID NO: 223681
  chr9:130374657-130374693
  hypo

SEQ ID NO: 311278 - DNA, 180 bp, Homo sapiens; identical to SEQ ID NO: 260791
  chr9:130388085-130388265
  hypo

SEQ ID NO: 311279 - DNA, 199 bp, Homo sapiens; identical to SEQ ID NO: 260792
  chr9:130438945-130439144
  hypo

SEQ ID NO: 311280 - DNA, 45 bp, Homo sapiens; identical to SEQ ID NO: 260793
  chr9:130440870-130440915
  hypo

SEQ ID NO: 311281 - DNA, 191 bp, Homo sapiens; identical to SEQ ID NO: 260794
  chr9:130442501-130442692
  hypo

SEQ ID NO: 311282 - DNA, 162 bp, Homo sapiens; identical to SEQ ID NO: 213009
  chr9:130444669-130444831
  hypo

SEQ ID NO: 311283 - DNA, 191 bp, Homo sapiens; identical to SEQ ID NO: 213010
  chr9:130446345-130446536
  hypo

SEQ ID NO: 311284 - DNA, 33 bp, Homo sapiens; identical to SEQ ID NO: 213011
  chr9:130448210-130448243
  hypo

SEQ ID NO: 311285 - DNA, 201 bp, Homo sapiens; identical to SEQ ID NO: 260798
  chr9:130454485-130454686
  hypo

SEQ ID NO: 311286 - DNA, 39 bp, Homo sapiens; identical to SEQ ID NO: 260799
  chr9:130494892-130494931
  hypo

SEQ ID NO: 311287 - DNA, 215 bp, Homo sapiens; identical to SEQ ID NO: 260800
  chr9:130496543-130496758
  hypo

SEQ ID NO: 311288 - DNA, 154 bp, Homo sapiens; identical to SEQ ID NO: 260801
  chr9:130536485-130536639
  hypo

SEQ ID NO: 311289 - DNA, 345 bp, Homo sapiens; identical to SEQ ID NO: 213012
  chr9:130550821-130551166
  hypo

SEQ ID NO: 311290 - DNA, 36 bp, Homo sapiens; identical to SEQ ID NO: 260803
  chr9:130561820-130561856
  hypo

SEQ ID NO: 311291 - DNA, 37 bp, Homo sapiens; identical to SEQ ID NO: 260804
  chr9:130563064-130563101
  hypo

SEQ ID NO: 311292 - DNA, 67 bp, Homo sapiens
  chr9:130587468-130587535
  hypo
ggagtttgggttttgtgtcccgggagctgcgcacaactcacccagatctgcatgttgtggttggcgt

SEQ ID NO: 311293 - DNA, 55 bp, Homo sapiens
  chr9:130587565-130587620
  hypo
gcaggatgaggacggcatcgagatccccgggtgcgcagctcagttccaccttcac

SEQ ID NO: 311294 - DNA, 40 bp, Homo sapiens; identical to SEQ ID NO: 213013
  chr9:130589225-130589265
  hypo

SEQ ID NO: 311295 - DNA, 141 bp, Homo sapiens; identical to SEQ ID NO: 286753
  chr9:130616612-130616753
  hypo

SEQ ID NO: 311296 - DNA, 93 bp, Homo sapiens; identical to SEQ ID NO: 213014
  chr9:130630679-130630772
  hypo

SEQ ID NO: 311297 - DNA, 215 bp, Homo sapiens; identical to SEQ ID NO: 260808
  chr9:130633162-130633377
  hypo

SEQ ID NO: 311298 - DNA, 185 bp, Homo sapiens; identical to SEQ ID NO: 213015
  chr9:130635124-130635309
  hypo

SEQ ID NO: 311299 - DNA, 262 bp, Homo sapiens; identical to SEQ ID NO: 260810
  chr9:130637217-130637479
  hypo

SEQ ID NO: 311300 - DNA, 210 bp, Homo sapiens; identical to SEQ ID NO: 201886
  chr9:130639768-130639978
  hypo

SEQ ID NO: 311301 - DNA, 124 bp, Homo sapiens; identical to SEQ ID NO: 201887
  chr9:130640012-130640136
  hypo

SEQ ID NO: 311302 - DNA, 497 bp, Homo sapiens; identical to SEQ ID NO: 201889
  chr9:130674526-130675023
  hypo

SEQ ID NO: 311303 - DNA, 62 bp, Homo sapiens
  chr9:130676088-130676150
  hypo
ggctagggcaggcacatggacggggtgctcggcggccacacctactgcacactgctgcagct

SEQ ID NO: 311304 - DNA, 154 bp, Homo sapiens; identical to SEQ ID NO: 260814
  chr9:130712703-130712857
  hypo

SEQ ID NO: 311305 - DNA, 107 bp, Homo sapiens; identical to SEQ ID NO: 260815
  chr9:130716085-130716192
  hypo

SEQ ID NO: 311306 - DNA, 104 bp, Homo sapiens; identical to SEQ ID NO: 213020
  chr9:130737468-130737572
  hypo

SEQ ID NO: 311307 - DNA, 31 bp, Homo sapiens; identical to SEQ ID NO: 260817
  chr9:130744755-130744786
  hypo

SEQ ID NO: 311308 - DNA, 124 bp, Homo sapiens; identical to SEQ ID NO: 213021
  chr9:130868765-130868889
  hypo

SEQ ID NO: 311309 - DNA, 48 bp, Homo sapiens; identical to SEQ ID NO: 260819
  chr9:130877183-130877231
  hypo

SEQ ID NO: 311310 - DNA, 104 bp, Homo sapiens; identical to SEQ ID NO: 260820
  chr9:130878928-130879032
  hypo

SEQ ID NO: 311311 - DNA, 142 bp, Homo sapiens; identical to SEQ ID NO: 260821
  chr9:130906607-130906749
  hypo

SEQ ID NO: 311312 - DNA, 262 bp, Homo sapiens; identical to SEQ ID NO: 213022
  chr9:130907016-130907278
  hypo

SEQ ID NO: 311313 - DNA, 317 bp, Homo sapiens; identical to SEQ ID NO: 260823
  chr9:130914350-130914667
  hypo

SEQ ID NO: 311314 - DNA, 121 bp, Homo sapiens; identical to SEQ ID NO: 260824
  chr9:130945587-130945708
  hypo

SEQ ID NO: 311315 - DNA, 163 bp, Homo sapiens; identical to SEQ ID NO: 260825
  chr9:131048963-131049126
  hypo

SEQ ID NO: 311316 - DNA, 40 bp, Homo sapiens; identical to SEQ ID NO: 213024
  chr9:131060967-131061007
  hypo

SEQ ID NO: 311317 - DNA, 85 bp, Homo sapiens; identical to SEQ ID NO: 260827
  chr9:131061249-131061334
  hypo

SEQ ID NO: 311318 - DNA, 83 bp, Homo sapiens; identical to SEQ ID NO: 226543
  chr9:131132510-131132593
  hypo

SEQ ID NO: 311319 - DNA, 82 bp, Homo sapiens; identical to SEQ ID NO: 260829
  chr9:131145992-131146074
  hypo

SEQ ID NO: 311320 - DNA, 220 bp, Homo sapiens; identical to SEQ ID NO: 286764
  chr9:131183034-131183254
  hypo

SEQ ID NO: 311321 - DNA, 179 bp, Homo sapiens; identical to SEQ ID NO: 260831
  chr9:131396613-131396792
  hypo

SEQ ID NO: 311322 - DNA, 63 bp, Homo sapiens
  chr9:131399186-131399249
  hypo
tgccactcaccggccgtaggcacaggccaccacagagccagtggagttccaggagatgctggt

SEQ ID NO: 311323 - DNA, 33 bp, Homo sapiens
  chr9:131399291-131399324
  hypo
atacagacaagacacctgcggagacgtccccaa

SEQ ID NO: 311324 - DNA, 147 bp, Homo sapiens; identical to SEQ ID NO: 213026
  chr9:131411426-131411573
  hypo

SEQ ID NO: 311325 - DNA, 146 bp, Homo sapiens; identical to SEQ ID NO: 260834
  chr9:131417339-131417485
  hypo

SEQ ID NO: 311326 - DNA, 40 bp, Homo sapiens; identical to SEQ ID NO: 260835
  chr9:131461564-131461604
  hypo

SEQ ID NO: 311327 - DNA, 204 bp, Homo sapiens; identical to SEQ ID NO: 213027
  chr9:131483897-131484101
  hypo

SEQ ID NO: 311328 - DNA, 36 bp, Homo sapiens; identical to SEQ ID NO: 213028
  chr9:131574473-131574509
  hypo

SEQ ID NO: 311329 - DNA, 37 bp, Homo sapiens; identical to SEQ ID NO: 213029
  chr9:131579962-131579999
  hypo

SEQ ID NO: 311330 - DNA, 174 bp, Homo sapiens; identical to SEQ ID NO: 260839
  chr9:131600339-131600513
  hypo

SEQ ID NO: 311331 - DNA, 135 bp, Homo sapiens; identical to SEQ ID NO: 260840
  chr9:131607624-131607759
  hypo

SEQ ID NO: 311332 - DNA, 155 bp, Homo sapiens; identical to SEQ ID NO: 260841
  chr9:131647361-131647516
  hypo

SEQ ID NO: 311333 - DNA, 155 bp, Homo sapiens
  chr9:131652561-131652716
  hypo
tctgttgcgtcttgcgtcttgcagcaagtttgtctacatctaaacgtctcttgagggcttaaaacctcaaaattaaattgcttgctgcaatctaagcctcacgcctagagcaatgttccagtggagtaaaagtggctgtaaaattccatagcttt

SEQ ID NO: 311334 - DNA, 395 bp, Homo sapiens
  chr9:131652746-131653141
  hypo
actgccaaacctgcgccctctgacgggcagcatgacaaacgcactgaccagcagcgggggcggtgggcgggaatcctggccctgaagggacacctcgcatctcccagctgactccatgagtcaggatccctgggggtagcccccttccatcccagagagtcgggtaccaggcagctcaccctctgtcagaccccccagtcctccccctggctcacctagggcttggccagtgcccactcccctgggatctcagcagaagatgtgtctgctgcctctctagggtactggtggccacatttcataacctgtctaagaaggcagcgctggtattcataacaggttaagacctgtaaaccgtgtgtggccgtgactccatgtgcaaatatgagccaaca

SEQ ID NO: 311335 - DNA, 108 bp, Homo sapiens; identical to SEQ ID NO: 213031
  chr9:131675067-131675175
  hypo

SEQ ID NO: 311336 - DNA, 399 bp, Homo sapiens; identical to SEQ ID NO: 286768
  chr9:131709401-131709800
  hypo

SEQ ID NO: 311337 - DNA, 98 bp, Homo sapiens; identical to SEQ ID NO: 260844
  chr9:131749119-131749217
  hypo

SEQ ID NO: 311338 - DNA, 260 bp, Homo sapiens; identical to SEQ ID NO: 260845
  chr9:131770315-131770575
  hypo

SEQ ID NO: 311339 - DNA, 112 bp, Homo sapiens; identical to SEQ ID NO: 213033
  chr9:131776674-131776786
  hypo

SEQ ID NO: 311340 - DNA, 185 bp, Homo sapiens
  chr9:131821424-131821609
  hypo
tatggcagccagagtcacagcggaaggagtttgcagagaagctggagtccctgctgcaccgtgcctaccacctgcaggaggagttcggctccaccttccccgcagacagcatgctgctagacctcggtgagctgggcccagtgcaggtggggtgggcgtggagggtggcagggatggaggtgagg

SEQ ID NO: 311341 - DNA, 62 bp, Homo sapiens
  chr9:131821644-131821706
  hypo
gcgtccaatgaatcagaatccccagggctctccgacctcgcgtgatccagcaccttatggca

SEQ ID NO: 311342 - DNA, 200 bp, Homo sapiens; identical to SEQ ID NO: 213034
  chr9:131822190-131822390
  hypo

SEQ ID NO: 311343 - DNA, 702 bp, Homo sapiens; identical to SEQ ID NO: 286770
  chr9:131842946-131843648
  hypo

SEQ ID NO: 311344 - DNA, 201 bp, Homo sapiens
  chr9:131870087-131870288
  hypo
ctcacccagttctccgtcttcctggcccgacgctccagccccttctgcaggcgctcccctacacctcctgaggcctgaaactcatccaccagctgcttggtgtgggcccactcctcctcactcacgatgggctgcagcgccttcaggtagtggtccagggactgctggagagggggcacgggcagccgtggcagtgcatcc

SEQ ID NO: 311345 - DNA, 125 bp, Homo sapiens; identical to SEQ ID NO: 260852
  chr9:131870880-131871005
  hypo

SEQ ID NO: 311346 - DNA, 36 bp, Homo sapiens; identical to SEQ ID NO: 260853
  chr9:131897374-131897410
  hypo

SEQ ID NO: 311347 - DNA, 157 bp, Homo sapiens; identical to SEQ ID NO: 260854
  chr9:131919404-131919561
  hypo

SEQ ID NO: 311348 - DNA, 277 bp, Homo sapiens; identical to SEQ ID NO: 286771
  chr9:131940269-131940546
  hypo

SEQ ID NO: 311349 - DNA, 390 bp, Homo sapiens; identical to SEQ ID NO: 46623
  chr9:131940585-131940975
  hypo

SEQ ID NO: 311350 - DNA, 227 bp, Homo sapiens; identical to SEQ ID NO: 260855
  chr9:132004480-132004707
  hypo

SEQ ID NO: 311351 - DNA, 297 bp, Homo sapiens; identical to SEQ ID NO: 260856
  chr9:132071027-132071324
  hypo

SEQ ID NO: 311352 - DNA, 196 bp, Homo sapiens; identical to SEQ ID NO: 213038
  chr9:132112539-132112735
  hypo

SEQ ID NO: 311353 - DNA, 240 bp, Homo sapiens; identical to SEQ ID NO: 260858
  chr9:132123266-132123506
  hypo

SEQ ID NO: 311354 - DNA, 292 bp, Homo sapiens; identical to SEQ ID NO: 223690
  chr9:132145469-132145761
  hypo

SEQ ID NO: 311355 - DNA, 502 bp, Homo sapiens; identical to SEQ ID NO: 260859
  chr9:132162536-132163038
  hypo

SEQ ID NO: 311356 - DNA, 218 bp, Homo sapiens; identical to SEQ ID NO: 213040
  chr9:132163279-132163497
  hypo

SEQ ID NO: 311357 - DNA, 271 bp, Homo sapiens; identical to SEQ ID NO: 260861
  chr9:132166918-132167189
  hypo

SEQ ID NO: 311358 - DNA, 169 bp, Homo sapiens; identical to SEQ ID NO: 260862
  chr9:132189584-132189753
  hypo

SEQ ID NO: 311359 - DNA, 47 bp, Homo sapiens; identical to SEQ ID NO: 213041
  chr9:132211772-132211819
  hypo

SEQ ID NO: 311360 - DNA, 34 bp, Homo sapiens; identical to SEQ ID NO: 223691
  chr9:132222864-132222898
  hypo

SEQ ID NO: 311361 - DNA, 626 bp, Homo sapiens; identical to SEQ ID NO: 260864
  chr9:132230761-132231387
  hypo

SEQ ID NO: 311362 - DNA, 730 bp, Homo sapiens; identical to SEQ ID NO: 286782
  chr9:132245345-132246075
  hypo

SEQ ID NO: 311363 - DNA, 56 bp, Homo sapiens; identical to SEQ ID NO: 223693
  chr9:132250698-132250754
  hypo

SEQ ID NO: 311364 - DNA, 707 bp, Homo sapiens; identical to SEQ ID NO: 201901
  chr9:132258223-132258930
  hypo

SEQ ID NO: 311365 - DNA, 36 bp, Homo sapiens; identical to SEQ ID NO: 260865
  chr9:132285635-132285671
  hypo

SEQ ID NO: 311366 - DNA, 551 bp, Homo sapiens; identical to SEQ ID NO: 286787
  chr9:132330680-132331231
  hypo

SEQ ID NO: 311367 - DNA, 321 bp, Homo sapiens; identical to SEQ ID NO: 286788
  chr9:132331336-132331657
  hypo

SEQ ID NO: 311368 - DNA, 42 bp, Homo sapiens; identical to SEQ ID NO: 260866
  chr9:132356355-132356397
  hypo

SEQ ID NO: 311369 - DNA, 199 bp, Homo sapiens; identical to SEQ ID NO: 260867
  chr9:132370722-132370921
  hypo

SEQ ID NO: 311370 - DNA, 354 bp, Homo sapiens; identical to SEQ ID NO: 260868
  chr9:132393701-132394055
  hypo

SEQ ID NO: 311371 - DNA, 38 bp, Homo sapiens
  chr9:132403240-132403278
  hypo
ttgcccagagtccggtcgcagacttaggtacaaagcct

SEQ ID NO: 311372 - DNA, 42 bp, Homo sapiens; identical to SEQ ID NO: 260870
  chr9:132408623-132408665
  hypo

SEQ ID NO: 311373 - DNA, 101 bp, Homo sapiens; identical to SEQ ID NO: 260871
  chr9:132409736-132409837
  hypo

SEQ ID NO: 311374 - DNA, 168 bp, Homo sapiens; identical to SEQ ID NO: 260872
  chr9:132411516-132411684
  hypo

SEQ ID NO: 311375 - DNA, 137 bp, Homo sapiens; identical to SEQ ID NO: 260873
  chr9:132411887-132412024
  hypo

SEQ ID NO: 311376 - DNA, 37 bp, Homo sapiens; identical to SEQ ID NO: 260874
  chr9:132412333-132412370
  hypo

SEQ ID NO: 311377 - DNA, 42 bp, Homo sapiens; identical to SEQ ID NO: 260875
  chr9:132448117-132448159
  hypo

SEQ ID NO: 311378 - DNA, 84 bp, Homo sapiens; identical to SEQ ID NO: 260876
  chr9:132451960-132452044
  hypo

SEQ ID NO: 311379 - DNA, 136 bp, Homo sapiens; identical to SEQ ID NO: 260877
  chr9:132471798-132471934
  hypo

SEQ ID NO: 311380 - DNA, 209 bp, Homo sapiens; identical to SEQ ID NO: 260878
  chr9:132495391-132495600
  hypo

SEQ ID NO: 311381 - DNA, 322 bp, Homo sapiens; identical to SEQ ID NO: 213045
  chr9:132501746-132502068
  hypo

SEQ ID NO: 311382 - DNA, 96 bp, Homo sapiens; identical to SEQ ID NO: 213046
  chr9:132509434-132509530
  hypo

SEQ ID NO: 311383 - DNA, 94 bp, Homo sapiens; identical to SEQ ID NO: 213047
  chr9:132604072-132604166
  hypo

SEQ ID NO: 311384 - DNA, 202 bp, Homo sapiens; identical to SEQ ID NO: 260882
  chr9:132631149-132631351
  hypo

SEQ ID NO: 311385 - DNA, 305 bp, Homo sapiens; identical to SEQ ID NO: 213048
  chr9:132633590-132633895
  hypo

SEQ ID NO: 311386 - DNA, 202 bp, Homo sapiens; identical to SEQ ID NO: 213049
  chr9:132636600-132636802
  hypo

SEQ ID NO: 311387 - DNA, 53 bp, Homo sapiens; identical to SEQ ID NO: 213050
  chr9:132638505-132638558
  hypo

SEQ ID NO: 311388 - DNA, 49 bp, Homo sapiens
  chr9:132643742-132643791
  hypo
aggatcaaagcagacggggcgtgggtggggaaggggctctgggaccaga

SEQ ID NO: 311389 - DNA, 202 bp, Homo sapiens
  chr9:132643821-132644023
  hypo
cagtctttgtagaagcaggtggtggtggaaattccagcaggtgggtcccgcagaggccctgaggcctcacttttcggatcttctgtcccagatcctgctccctccctgctgagcctggggttcccctggcattggccccagccttctgaaagccggcgctgcagccagaggccgcacgctgcactgtcgcgacgcagagagg

SEQ ID NO: 311390 - DNA, 121 bp, Homo sapiens; identical to SEQ ID NO: 201904
  chr9:132804284-132804405
  hypo

SEQ ID NO: 311391 - DNA, 207 bp, Homo sapiens; identical to SEQ ID NO: 201905
  chr9:132804455-132804662
  hypo

SEQ ID NO: 311392 - DNA, 292 bp, Homo sapiens; identical to SEQ ID NO: 201908
  chr9:132805445-132805737
  hypo

SEQ ID NO: 311393 - DNA, 130 bp, Homo sapiens; identical to SEQ ID NO: 213054
  chr9:132821045-132821175
  hypo

SEQ ID NO: 311394 - DNA, 58 bp, Homo sapiens; identical to SEQ ID NO: 260889
  chr9:132850526-132850584
  hypo

SEQ ID NO: 311395 - DNA, 492 bp, Homo sapiens; identical to SEQ ID NO: 213055
  chr9:132874115-132874607
  hypo

SEQ ID NO: 311396 - DNA, 93 bp, Homo sapiens; identical to SEQ ID NO: 213056
  chr9:132874637-132874730
  hypo

SEQ ID NO: 311397 - DNA, 357 bp, Homo sapiens; identical to SEQ ID NO: 213057
  chr9:132881038-132881395
  hypo

SEQ ID NO: 311398 - DNA, 49 bp, Homo sapiens; identical to SEQ ID NO: 213058
  chr9:132881495-132881544
  hypo

SEQ ID NO: 311399 - DNA, 58 bp, Homo sapiens; identical to SEQ ID NO: 213059
  chr9:132881756-132881814
  hypo

SEQ ID NO: 311400 - DNA, 63 bp, Homo sapiens; identical to SEQ ID NO: 213060
  chr9:133223968-133224031
  hypo

SEQ ID NO: 311401 - DNA, 329 bp, Homo sapiens; identical to SEQ ID NO: 260895
  chr9:133230037-133230366
  hypo

SEQ ID NO: 311402 - DNA, 198 bp, Homo sapiens; identical to SEQ ID NO: 260896
  chr9:133258530-133258728
  hypo

SEQ ID NO: 311403 - DNA, 104 bp, Homo sapiens; identical to SEQ ID NO: 260897
  chr9:133264434-133264538
  hypo

SEQ ID NO: 311404 - DNA, 72 bp, Homo sapiens; identical to SEQ ID NO: 260898
  chr9:133265444-133265516
  hypo

SEQ ID NO: 311405 - DNA, 309 bp, Homo sapiens; identical to SEQ ID NO: 260899
  chr9:133266378-133266687
  hypo

SEQ ID NO: 311406 - DNA, 149 bp, Homo sapiens; identical to SEQ ID NO: 260900
  chr9:133281384-133281533
  hypo

SEQ ID NO: 311407 - DNA, 154 bp, Homo sapiens; identical to SEQ ID NO: 260901
  chr9:133300387-133300541
  hypo

SEQ ID NO: 311408 - DNA, 376 bp, Homo sapiens; identical to SEQ ID NO: 260902
  chr9:133303487-133303863
  hypo

SEQ ID NO: 311409 - DNA, 104 bp, Homo sapiens; identical to SEQ ID NO: 213062
  chr9:133304439-133304543
  hypo

SEQ ID NO: 311410 - DNA, 159 bp, Homo sapiens; identical to SEQ ID NO: 213063
  chr9:133304981-133305140
  hypo

SEQ ID NO: 311411 - DNA, 235 bp, Homo sapiens; identical to SEQ ID NO: 260905
  chr9:133305757-133305992
  hypo

SEQ ID NO: 311412 - DNA, 251 bp, Homo sapiens; identical to SEQ ID NO: 260906
  chr9:133306770-133307021
  hypo

SEQ ID NO: 311413 - DNA, 136 bp, Homo sapiens; identical to SEQ ID NO: 286802
  chr9:133308611-133308747
  hypo

SEQ ID NO: 311414 - DNA, 67 bp, Homo sapiens; identical to SEQ ID NO: 286803
  chr9:133308769-133308836
  hypo

SEQ ID NO: 311415 - DNA, 111 bp, Homo sapiens; identical to SEQ ID NO: 260907
  chr9:133314399-133314510
  hypo

SEQ ID NO: 311416 - DNA, 43 bp, Homo sapiens; identical to SEQ ID NO: 260908
  chr9:133345459-133345502
  hypo

SEQ ID NO: 311417 - DNA, 259 bp, Homo sapiens; identical to SEQ ID NO: 260909
  chr9:133346156-133346415
  hypo

SEQ ID NO: 311418 - DNA, 358 bp, Homo sapiens
  chr9:133366650-133367008
  hypo
gattttagttacaaagtgagagagtcattaagacgtggcggaggagagagcacctggccgggctgctccggggcctccacggaggctgatcccaccgtggccgcggccacggctgccacttatcctgccatcttgctgctaggctctgagctgggcacctgatggggtattatctaatattagctgcgcagaggtgaggaaacggaggcccccaggtgaagacactcacccaggctctcctggctggtgatgggcagctttgagccggggacaggccagctgtagcggccaagttcccagttactccaacagattccaggatgctcgtgatcaaggggcacggcggcacagacagggg

SEQ ID NO: 311419 - DNA, 136 bp, Homo sapiens
  chr9:133408939-133409075
  hypo
caatgcttgtgactacgacttgcagaacagagacctctcttggtctcactcctgcgcccagcctcttgtggcctcactggccctggctgtggtccctcctgcccctcaggggtcccttcccacctcagaaccttcc

SEQ ID NO: 311420 - DNA, 40 bp, Homo sapiens; identical to SEQ ID NO: 260912
  chr9:133421534-133421574
  hypo

SEQ ID NO: 311421 - DNA, 515 bp, Homo sapiens; identical to SEQ ID NO: 260913
  chr9:133426643-133427158
  hypo

SEQ ID NO: 311422 - DNA, 39 bp, Homo sapiens; identical to SEQ ID NO: 260914
  chr9:133433441-133433480
  hypo

SEQ ID NO: 311423 - DNA, 80 bp, Homo sapiens; identical to SEQ ID NO: 260915
  chr9:133450277-133450357
  hypo

SEQ ID NO: 311424 - DNA, 124 bp, Homo sapiens; identical to SEQ ID NO: 260916
  chr9:133484750-133484874
  hypo

SEQ ID NO: 311425 - DNA, 172 bp, Homo sapiens; identical to SEQ ID NO: 260917
  chr9:133513743-133513915
  hypo

SEQ ID NO: 311426 - DNA, 331 bp, Homo sapiens; identical to SEQ ID NO: 260918
  chr9:133527218-133527549
  hypo

SEQ ID NO: 311427 - DNA, 33 bp, Homo sapiens; identical to SEQ ID NO: 260919
  chr9:133580976-133581009
  hypo

SEQ ID NO: 311428 - DNA, 88 bp, Homo sapiens; identical to SEQ ID NO: 260920
  chr9:133583814-133583902
  hypo

SEQ ID NO: 311429 - DNA, 120 bp, Homo sapiens; identical to SEQ ID NO: 213065
  chr9:133585240-133585360
  hypo

SEQ ID NO: 311430 - DNA, 240 bp, Homo sapiens; identical to SEQ ID NO: 213066
  chr9:133592860-133593100
  hypo

SEQ ID NO: 311431 - DNA, 40 bp, Homo sapiens; identical to SEQ ID NO: 213067
  chr9:133606663-133606703
  hypo

SEQ ID NO: 311432 - DNA, 82 bp, Homo sapiens; identical to SEQ ID NO: 213068
  chr9:133609268-133609350
  hypo

SEQ ID NO: 311433 - DNA, 174 bp, Homo sapiens; identical to SEQ ID NO: 213069
  chr9:133641498-133641672
  hypo

SEQ ID NO: 311434 - DNA, 1392 bp, Homo sapiens; identical to SEQ ID NO: 201911
  chr9:133710035-133711427
  hypo

SEQ ID NO: 311435 - DNA, 109 bp, Homo sapiens; identical to SEQ ID NO: 260926
  chr9:133738141-133738250
  hypo

SEQ ID NO: 311436 - DNA, 34 bp, Homo sapiens; identical to SEQ ID NO: 260927
  chr9:133755899-133755933
  hypo

SEQ ID NO: 311437 - DNA, 364 bp, Homo sapiens; identical to SEQ ID NO: 260928
  chr9:133759676-133760040
  hypo

SEQ ID NO: 311438 - DNA, 499 bp, Homo sapiens; identical to SEQ ID NO: 260929
  chr9:133760400-133760899
  hypo

SEQ ID NO: 311439 - DNA, 523 bp, Homo sapiens; identical to SEQ ID NO: 260930
  chr9:133761107-133761630
  hypo

SEQ ID NO: 311440 - DNA, 110 bp, Homo sapiens; identical to SEQ ID NO: 213072
  chr9:133767699-133767809
  hypo

SEQ ID NO: 311441 - DNA, 123 bp, Homo sapiens; identical to SEQ ID NO: 213073
  chr9:133767878-133768001
  hypo

SEQ ID NO: 311442 - DNA, 120 bp, Homo sapiens
  chr9:133773572-133773692
  hypo
gccaggccccggcctcgcagacccctttaaccacatgtcactcccggactgggttccacagccggctcagccacagccagcctccacctcactgagcttcagatcctccgcctggctggg

SEQ ID NO: 311443 - DNA, 35 bp, Homo sapiens; identical to SEQ ID NO: 213075
  chr9:133779947-133779982
  hypo

SEQ ID NO: 311444 - DNA, 76 bp, Homo sapiens
  chr9:133799039-133799115
  hypo
gtaggaagctgctcggaatgcccgggttcaggtacacagcctcacggtccccggtgcctgccctgccgcccgccca

SEQ ID NO: 311445 - DNA, 405 bp, Homo sapiens
  chr9:133799196-133799601
  hypo
aaagacagagtagacgccatcgtcctgctgtccgcttaggaggacgtccagacagtctcggggccgggagcctgagggaggcaaggctgtcagggtggctgcggccccagcacgttcctgcccagccccctggccaaactgtctgtccatcgataatgcatgtggggtcccatggggttgagagagcactggccttggagtccgaccttggctctgccactccctgctgtggctgggtgagagaatcaccctctctgggacttactctcctcatctggagaatggaccgagagggcttcagcgcaggccacatggaagtagggtcgggccctggagtctcatggctggggaaccctcaccccaacttccccgctccccagagctgggacccgaggcaccggagga

SEQ ID NO: 311446 - DNA, 211 bp, Homo sapiens; identical to SEQ ID NO: 260935
  chr9:133802158-133802369
  hypo

SEQ ID NO: 311447 - DNA, 400 bp, Homo sapiens; identical to SEQ ID NO: 286810
  chr9:133814235-133814635
  hypo

SEQ ID NO: 311448 - DNA, 306 bp, Homo sapiens; identical to SEQ ID NO: 286811
  chr9:133814911-133815217
  hypo

SEQ ID NO: 311449 - DNA, 107 bp, Homo sapiens; identical to SEQ ID NO: 213076
  chr9:133911551-133911658
  hypo

SEQ ID NO: 311450 - DNA, 85 bp, Homo sapiens
  chr9:133911723-133911808
  hypo
gtgtctgagtgtcacagggcatcagggacccgaggctggtgttgcaggcggggaaaggaactccccaaaacgtcgtggtgggggc

SEQ ID NO: 311451 - DNA, 113 bp, Homo sapiens; identical to SEQ ID NO: 260937
  chr9:133926312-133926425
  hypo

SEQ ID NO: 311452 - DNA, 105 bp, Homo sapiens; identical to SEQ ID NO: 260938
  chr9:133927488-133927593
  hypo

SEQ ID NO: 311453 - DNA, 107 bp, Homo sapiens; identical to SEQ ID NO: 260939
  chr9:133945093-133945200
  hypo

SEQ ID NO: 311454 - DNA, 54 bp, Homo sapiens; identical to SEQ ID NO: 260940
  chr9:133951050-133951104
  hypo

SEQ ID NO: 311455 - DNA, 244 bp, Homo sapiens; identical to SEQ ID NO: 213078
  chr9:133967063-133967307
  hypo

SEQ ID NO: 311456 - DNA, 216 bp, Homo sapiens; identical to SEQ ID NO: 260942
  chr9:133967914-133968130
  hypo

SEQ ID NO: 311457 - DNA, 94 bp, Homo sapiens; identical to SEQ ID NO: 260943
  chr9:133982140-133982234
  hypo

SEQ ID NO: 311458 - DNA, 346 bp, Homo sapiens; identical to SEQ ID NO: 260944
  chr9:133987304-133987650
  hypo

SEQ ID NO: 311459 - DNA, 85 bp, Homo sapiens; identical to SEQ ID NO: 260945
  chr9:133987867-133987952
  hypo

SEQ ID NO: 311460 - DNA, 47 bp, Homo sapiens; identical to SEQ ID NO: 260946
  chr9:134110673-134110720
  hypo

SEQ ID NO: 311461 - DNA, 67 bp, Homo sapiens; identical to SEQ ID NO: 213079
  chr9:134126741-134126808
  hypo

SEQ ID NO: 311462 - DNA, 31 bp, Homo sapiens; identical to SEQ ID NO: 213080
  chr9:134132752-134132783
  hypo

SEQ ID NO: 311463 - DNA, 226 bp, Homo sapiens
  chr9:134136005-134136231
  hypo
tcctgcttagatctcccctctccctgaaaggaagcaggtgccgagagccggggaggccttcccgggggcatcagcacagtgagatccgcccgctggagagggtagaatggttgtatcttgctgaatgactgaagagtgagtctgagttttgttttcagcggtattattatttgtgagtctaacctagcgggtggtcctggctgtcaccggtgcttgggcgggatca

SEQ ID NO: 311464 - DNA, 221 bp, Homo sapiens
  chr9:134136325-134136546
  hypo
cttgctcaggattttgggctggtcctgggcgatgggctcccgcagccgggcgcgctggcccaggggccggttggggttcacctcgatgctgagctgcatgcgccagtgcagcgtctgcaggatgatcatgtcgttggtggaggtgttggtggccaccagccaggtggtgaagctctggtcccggtagatattggtgagcttggccacgttgctctcgctga

SEQ ID NO: 311465 - DNA, 225 bp, Homo sapiens; identical to SEQ ID NO: 260950
  chr9:134188222-134188447
  hypo

SEQ ID NO: 311466 - DNA, 154 bp, Homo sapiens; identical to SEQ ID NO: 260953
  chr9:134195896-134196050
  hypo

SEQ ID NO: 311467 - DNA, 112 bp, Homo sapiens; identical to SEQ ID NO: 260954
  chr9:134200644-134200756
  hypo

SEQ ID NO: 311468 - DNA, 42 bp, Homo sapiens
  chr9:134207874-134207916
  hypo
atatcagccaggcccagattcgaggcatagctccattactta

SEQ ID NO: 311469 - DNA, 32 bp, Homo sapiens; identical to SEQ ID NO: 260956
  chr9:134279022-134279054
  hypo

SEQ ID NO: 311470 - DNA, 258 bp, Homo sapiens; identical to SEQ ID NO: 260957
  chr9:134308039-134308297
  hypo

SEQ ID NO: 311471 - DNA, 120 bp, Homo sapiens; identical to SEQ ID NO: 260958
  chr9:134377410-134377530
  hypo

SEQ ID NO: 311472 - DNA, 184 bp, Homo sapiens; identical to SEQ ID NO: 213082
  chr9:134400291-134400475
  hypo

SEQ ID NO: 311473 - DNA, 31 bp, Homo sapiens; identical to SEQ ID NO: 260960
  chr9:134509059-134509090
  hypo

SEQ ID NO: 311474 - DNA, 38 bp, Homo sapiens; identical to SEQ ID NO: 213083
  chr9:134688853-134688891
  hypo

SEQ ID NO: 311475 - DNA, 370 bp, Homo sapiens; identical to SEQ ID NO: 260962
  chr9:134731512-134731882
  hypo

SEQ ID NO: 311476 - DNA, 186 bp, Homo sapiens; identical to SEQ ID NO: 213084
  chr9:134746467-134746653
  hypo

SEQ ID NO: 311477 - DNA, 337 bp, Homo sapiens; identical to SEQ ID NO: 260964
  chr9:134775011-134775348
  hypo

SEQ ID NO: 311478 - DNA, 249 bp, Homo sapiens; identical to SEQ ID NO: 260966
  chr9:134836480-134836729
  hypo

SEQ ID NO: 311479 - DNA, 138 bp, Homo sapiens; identical to SEQ ID NO: 213086
  chr9:134902645-134902783
  hypo

SEQ ID NO: 311480 - DNA, 196 bp, Homo sapiens; identical to SEQ ID NO: 213087
  chr9:134903267-134903463
  hypo

SEQ ID NO: 311481 - DNA, 97 bp, Homo sapiens; identical to SEQ ID NO: 260969
  chr9:134929560-134929657
  hypo

SEQ ID NO: 311482 - DNA, 120 bp, Homo sapiens; identical to SEQ ID NO: 201915
  chr9:135037440-135037560
  hypo

SEQ ID NO: 311483 - DNA, 879 bp, Homo sapiens; identical to SEQ ID NO: 213089
  chr9:135048988-135049867
  hypo

SEQ ID NO: 311484 - DNA, 45 bp, Homo sapiens; identical to SEQ ID NO: 260971
  chr9:135084416-135084461
  hypo

SEQ ID NO: 311485 - DNA, 48 bp, Homo sapiens
  chr9:135102284-135102332
  hypo
ctgcagtgcgagtgcgagcacaacaccaccggccccgactgcggcaag

SEQ ID NO: 311486 - DNA, 100 bp, Homo sapiens; identical to SEQ ID NO: 213090
  chr9:135195997-135196097
  hypo

SEQ ID NO: 311487 - DNA, 144 bp, Homo sapiens; identical to SEQ ID NO: 213091
  chr9:135196474-135196618
  hypo

SEQ ID NO: 311488 - DNA, 39 bp, Homo sapiens; identical to SEQ ID NO: 260975
  chr9:135239755-135239794
  hypo

SEQ ID NO: 311489 - DNA, 344 bp, Homo sapiens; identical to SEQ ID NO: 213092
  chr9:135267104-135267448
  hypo

SEQ ID NO: 311490 - DNA, 246 bp, Homo sapiens; identical to SEQ ID NO: 213093
  chr9:135275314-135275560
  hypo

SEQ ID NO: 311491 - DNA, 644 bp, Homo sapiens; identical to SEQ ID NO: 201918
  chr9:135286324-135286968
  hypo

SEQ ID NO: 311492 - DNA, 343 bp, Homo sapiens; identical to SEQ ID NO: 260978
  chr9:135331489-135331832
  hypo

SEQ ID NO: 311493 - DNA, 209 bp, Homo sapiens; identical to SEQ ID NO: 260979
  chr9:135338502-135338711
  hypo

SEQ ID NO: 311494 - DNA, 157 bp, Homo sapiens; identical to SEQ ID NO: 260980
  chr9:135360968-135361125
  hypo

SEQ ID NO: 311495 - DNA, 234 bp, Homo sapiens; identical to SEQ ID NO: 213095
  chr9:135384263-135384497
  hypo

SEQ ID NO: 311496 - DNA, 161 bp, Homo sapiens; identical to SEQ ID NO: 223714
  chr9:135395349-135395510
  hypo

SEQ ID NO: 311497 - DNA, 34 bp, Homo sapiens; identical to SEQ ID NO: 260982
  chr9:135447836-135447870
  hypo

SEQ ID NO: 311498 - DNA, 37 bp, Homo sapiens; identical to SEQ ID NO: 286828
  chr9:135464627-135464664
  hypo

SEQ ID NO: 311499 - DNA, 83 bp, Homo sapiens; identical to SEQ ID NO: 260983
  chr9:135479250-135479333
  hypo

SEQ ID NO: 311500 - DNA, 35 bp, Homo sapiens; identical to SEQ ID NO: 260984
  chr9:135507041-135507076
  hypo

SEQ ID NO: 311501 - DNA, 560 bp, Homo sapiens
  chr9:135513114-135513674
  hypo
ggagccgccaaaaaactggcaacatgagttagcgtaactgagtaaacagcaaacaatctccaaatgatctttccattaacgaaacaaaataaaacgaaaaagatacactttacctaaaaagcataccccagagaaaagcacgaaagtctacatttatttgggacacagaactgacattgtgactcttcacagccgtatctcctttgtctcctagcctcctggcacggtggaaattccccaggaggagaggaaattaagaactgcacagacagaacagtatgcttcaagcggaaaaaaatacggagaaggtggaggaaagcagcacaggtgatttaggtgcatcttctgaaaaagaaatgcacgcgccggacagccaaggaggatgccaagggacagttggcgcccagggcgggctgcaggtatctttcctttctgggaaaaaggtgactgcactccatccagggacaatcaaggacagccaccggagaccaacagaaaacctaatgtcagccttaaaatcaggtggcttagaaactccattttccggccattcggtggta

SEQ ID NO: 311502 - DNA, 320 bp, Homo sapiens; identical to SEQ ID NO: 260986
  chr9:135514394-135514714
  hypo

SEQ ID NO: 311503 - DNA, 236 bp, Homo sapiens; identical to SEQ ID NO: 260987
  chr9:135520063-135520299
  hypo

SEQ ID NO: 311504 - DNA, 163 bp, Homo sapiens; identical to SEQ ID NO: 260988
  chr9:135523837-135524000
  hypo

SEQ ID NO: 311505 - DNA, 112 bp, Homo sapiens; identical to SEQ ID NO: 260989
  chr9:135537995-135538107
  hypo

SEQ ID NO: 311506 - DNA, 245 bp, Homo sapiens; identical to SEQ ID NO: 260990
  chr9:135538541-135538786
  hypo

SEQ ID NO: 311507 - DNA, 44 bp, Homo sapiens; identical to SEQ ID NO: 213096
  chr9:135548276-135548320
  hypo

SEQ ID NO: 311508 - DNA, 78 bp, Homo sapiens; identical to SEQ ID NO: 260992
  chr9:135588873-135588951
  hypo

SEQ ID NO: 311509 - DNA, 334 bp, Homo sapiens; identical to SEQ ID NO: 260993
  chr9:135600616-135600950
  hypo

SEQ ID NO: 311510 - DNA, 153 bp, Homo sapiens; identical to SEQ ID NO: 213098
  chr9:135624734-135624887
  hypo

SEQ ID NO: 311511 - DNA, 347 bp, Homo sapiens; identical to SEQ ID NO: 260995
  chr9:135624917-135625264
  hypo

SEQ ID NO: 311512 - DNA, 203 bp, Homo sapiens; identical to SEQ ID NO: 213100
  chr9:135626043-135626246
  hypo

SEQ ID NO: 311513 - DNA, 283 bp, Homo sapiens; identical to SEQ ID NO: 260997
  chr9:135632487-135632770
  hypo

SEQ ID NO: 311514 - DNA, 164 bp, Homo sapiens; identical to SEQ ID NO: 260998
  chr9:135671075-135671239
  hypo

SEQ ID NO: 311515 - DNA, 171 bp, Homo sapiens; identical to SEQ ID NO: 260999
  chr9:135701621-135701792
  hypo

SEQ ID NO: 311516 - DNA, 387 bp, Homo sapiens; identical to SEQ ID NO: 261000
  chr9:135712695-135713082
  hypo

SEQ ID NO: 311517 - DNA, 45 bp, Homo sapiens; identical to SEQ ID NO: 261001
  chr9:135714354-135714399
  hypo

SEQ ID NO: 311518 - DNA, 65 bp, Homo sapiens; identical to SEQ ID NO: 213101
  chr9:135735333-135735398
  hypo

SEQ ID NO: 311519 - DNA, 141 bp, Homo sapiens; identical to SEQ ID NO: 213102
  chr9:135745917-135746058
  hypo

SEQ ID NO: 311520 - DNA, 115 bp, Homo sapiens; identical to SEQ ID NO: 213103
  chr9:135767903-135768018
  hypo

SEQ ID NO: 311521 - DNA, 231 bp, Homo sapiens; identical to SEQ ID NO: 261005
  chr9:135781249-135781480
  hypo

SEQ ID NO: 311522 - DNA, 48 bp, Homo sapiens; identical to SEQ ID NO: 213104
  chr9:135865230-135865278
  hypo

SEQ ID NO: 311523 - DNA, 84 bp, Homo sapiens; identical to SEQ ID NO: 261008
  chr9:135904330-135904414
  hypo

SEQ ID NO: 311524 - DNA, 180 bp, Homo sapiens; identical to SEQ ID NO: 201921
  chr9:135906376-135906556
  hypo

SEQ ID NO: 311525 - DNA, 135 bp, Homo sapiens; identical to SEQ ID NO: 261009
  chr9:135907665-135907800
  hypo

SEQ ID NO: 311526 - DNA, 127 bp, Homo sapiens
  chr9:135908016-135908143
  hypo
tttgtctgaataaggcggggggaaattggaggttagtgagagctgtctccgtaagtctttgtattaaccctcaggcacagggtatgatacaacatcctacgagaataaacacgtttattacaatggc

SEQ ID NO: 311527 - DNA, 142 bp, Homo sapiens; identical to SEQ ID NO: 261011
  chr9:135908536-135908678
  hypo

SEQ ID NO: 311528 - DNA, 247 bp, Homo sapiens; identical to SEQ ID NO: 261012
  chr9:135920656-135920903
  hypo

SEQ ID NO: 311529 - DNA, 138 bp, Homo sapiens; identical to SEQ ID NO: 261013
  chr9:135922416-135922554
  hypo

SEQ ID NO: 311530 - DNA, 36 bp, Homo sapiens; identical to SEQ ID NO: 261014
  chr9:135926317-135926353
  hypo

SEQ ID NO: 311531 - DNA, 275 bp, Homo sapiens; identical to SEQ ID NO: 261015
  chr9:135926581-135926856
  hypo

SEQ ID NO: 311532 - DNA, 237 bp, Homo sapiens; identical to SEQ ID NO: 213107
  chr9:135945847-135946084
  hypo

SEQ ID NO: 311533 - DNA, 45 bp, Homo sapiens; identical to SEQ ID NO: 213108
  chr9:135962412-135962457
  hypo

SEQ ID NO: 311534 - DNA, 126 bp, Homo sapiens; identical to SEQ ID NO: 261018
  chr9:135979097-135979223
  hypo

SEQ ID NO: 311535 - DNA, 104 bp, Homo sapiens; identical to SEQ ID NO: 261019
  chr9:135991327-135991431
  hypo

SEQ ID NO: 311536 - DNA, 305 bp, Homo sapiens; identical to SEQ ID NO: 261020
  chr9:136044289-136044594
  hypo

SEQ ID NO: 311537 - DNA, 150 bp, Homo sapiens; identical to SEQ ID NO: 261021
  chr9:136369631-136369781
  hypo

SEQ ID NO: 311538 - DNA, 422 bp, Homo sapiens; identical to SEQ ID NO: 213109
  chr9:136372633-136373055
  hypo

SEQ ID NO: 311539 - DNA, 39 bp, Homo sapiens; identical to SEQ ID NO: 261023
  chr9:136375448-136375487
  hypo

SEQ ID NO: 311540 - DNA, 1137 bp, Homo sapiens; identical to SEQ ID NO: 261025
  chr9:136376182-136377319
  hypo

SEQ ID NO: 311541 - DNA, 313 bp, Homo sapiens; identical to SEQ ID NO: 261026
  chr9:136377539-136377852
  hypo

SEQ ID NO: 311542 - DNA, 226 bp, Homo sapiens
  chr9:136378203-136378429
  hypo
ggtgtcagagcgaccgtatgggggaggggcctagagggccaccctgtccccagcccaggagcggagccagctatctcccagccctggaggcaacagggggtgactctaggacaaataaccgccctctttccatgggcagtggacctgggcaaccactcccaagccggtggcaccgtctggaaacacaaacaggccccagacaggtgtaggtaacttcctgcctgac

SEQ ID NO: 311543 - DNA, 50 bp, Homo sapiens
  chr9:136378519-136378569
  hypo
acagcaccgcccatcacgcagcagggaggcccagccgagggagcccggca

SEQ ID NO: 311544 - DNA, 349 bp, Homo sapiens; identical to SEQ ID NO: 213111
  chr9:136380583-136380932
  hypo

SEQ ID NO: 311545 - DNA, 119 bp, Homo sapiens; identical to SEQ ID NO: 213112
  chr9:136381250-136381369
  hypo

SEQ ID NO: 311546 - DNA, 188 bp, Homo sapiens; identical to SEQ ID NO: 213113
  chr9:136382129-136382317
  hypo

SEQ ID NO: 311547 - DNA, 176 bp, Homo sapiens; identical to SEQ ID NO: 213114
  chr9:136382777-136382953
  hypo

SEQ ID NO: 311548 - DNA, 38 bp, Homo sapiens; identical to SEQ ID NO: 213115
  chr9:136383897-136383935
  hypo

SEQ ID NO: 311549 - DNA, 136 bp, Homo sapiens; identical to SEQ ID NO: 213116
  chr9:136384021-136384157
  hypo

SEQ ID NO: 311550 - DNA, 598 bp, Homo sapiens; identical to SEQ ID NO: 213117
  chr9:136385191-136385789
  hypo

SEQ ID NO: 311551 - DNA, 174 bp, Homo sapiens; identical to SEQ ID NO: 261034
  chr9:136393621-136393795
  hypo

SEQ ID NO: 311552 - DNA, 75 bp, Homo sapiens
  chr9:136395959-136396034
  hypo
agctggagagagacggagtcaggatttgaacccaaagagtccggttccaggcactcacgcgtgaggctgctgttg

SEQ ID NO: 311553 - DNA, 334 bp, Homo sapiens; identical to SEQ ID NO: 213118
  chr9:136397022-136397356
  hypo

SEQ ID NO: 311554 - DNA, 669 bp, Homo sapiens; identical to SEQ ID NO: 261037
  chr9:136402172-136402841
  hypo

SEQ ID NO: 311555 - DNA, 112 bp, Homo sapiens; identical to SEQ ID NO: 261038
  chr9:136412218-136412330
  hypo

SEQ ID NO: 311556 - DNA, 74 bp, Homo sapiens; identical to SEQ ID NO: 261039
  chr9:136412360-136412434
  hypo

SEQ ID NO: 311557 - DNA, 41 bp, Homo sapiens; identical to SEQ ID NO: 213120
  chr9:136501758-136501799
  hypo

SEQ ID NO: 311558 - DNA, 147 bp, Homo sapiens; identical to SEQ ID NO: 261041
  chr9:136507436-136507583
  hypo

SEQ ID NO: 311559 - DNA, 198 bp, Homo sapiens; identical to SEQ ID NO: 261042
  chr9:136508531-136508729
  hypo

SEQ ID NO: 311560 - DNA, 495 bp, Homo sapiens; identical to SEQ ID NO: 261043
  chr9:136537810-136538305
  hypo

SEQ ID NO: 311561 - DNA, 510 bp, Homo sapiens; identical to SEQ ID NO: 261044
  chr9:136546765-136547275
  hypo

SEQ ID NO: 311562 - DNA, 210 bp, Homo sapiens; identical to SEQ ID NO: 261045
  chr9:136549274-136549484
  hypo

SEQ ID NO: 311563 - DNA, 164 bp, Homo sapiens; identical to SEQ ID NO: 261046
  chr9:136553360-136553524
  hypo

SEQ ID NO: 311564 - DNA, 358 bp, Homo sapiens; identical to SEQ ID NO: 261047
  chr9:136557802-136558160
  hypo

SEQ ID NO: 311565 - DNA, 241 bp, Homo sapiens; identical to SEQ ID NO: 261048
  chr9:136569905-136570146
  hypo

SEQ ID NO: 311566 - DNA, 81 bp, Homo sapiens; identical to SEQ ID NO: 261049
  chr9:136575502-136575583
  hypo

SEQ ID NO: 311567 - DNA, 133 bp, Homo sapiens; identical to SEQ ID NO: 261050
  chr9:136575613-136575746
  hypo

SEQ ID NO: 311568 - DNA, 155 bp, Homo sapiens; identical to SEQ ID NO: 261051
  chr9:136575776-136575931
  hypo

SEQ ID NO: 311569 - DNA, 323 bp, Homo sapiens; identical to SEQ ID NO: 261052
  chr9:136593120-136593443
  hypo

SEQ ID NO: 311570 - DNA, 105 bp, Homo sapiens; identical to SEQ ID NO: 261053
  chr9:136607053-136607158
  hypo

SEQ ID NO: 311571 - DNA, 103 bp, Homo sapiens; identical to SEQ ID NO: 261054
  chr9:136621773-136621876
  hypo

SEQ ID NO: 311572 - DNA, 74 bp, Homo sapiens; identical to SEQ ID NO: 213121
  chr9:136641169-136641243
  hypo

SEQ ID NO: 311573 - DNA, 196 bp, Homo sapiens; identical to SEQ ID NO: 261056
  chr9:136645036-136645232
  hypo

SEQ ID NO: 311574 - DNA, 172 bp, Homo sapiens; identical to SEQ ID NO: 213122
  chr9:136648156-136648328
  hypo

SEQ ID NO: 311575 - DNA, 135 bp, Homo sapiens; identical to SEQ ID NO: 261058
  chr9:136649606-136649741
  hypo

SEQ ID NO: 311576 - DNA, 208 bp, Homo sapiens; identical to SEQ ID NO: 213123
  chr9:136651136-136651344
  hypo

SEQ ID NO: 311577 - DNA, 288 bp, Homo sapiens; identical to SEQ ID NO: 213124
  chr9:136655639-136655927
  hypo

SEQ ID NO: 311578 - DNA, 163 bp, Homo sapiens; identical to SEQ ID NO: 213125
  chr9:136664524-136664687
  hypo

SEQ ID NO: 311579 - DNA, 111 bp, Homo sapiens; identical to SEQ ID NO: 261062
  chr9:136665006-136665117
  hypo

SEQ ID NO: 311580 - DNA, 225 bp, Homo sapiens; identical to SEQ ID NO: 261063
  chr9:136667521-136667746
  hypo

SEQ ID NO: 311581 - DNA, 72 bp, Homo sapiens; identical to SEQ ID NO: 261064
  chr9:136669074-136669146
  hypo

SEQ ID NO: 311582 - DNA, 344 bp, Homo sapiens; identical to SEQ ID NO: 261065
  chr9:136669406-136669750
  hypo

SEQ ID NO: 311583 - DNA, 153 bp, Homo sapiens; identical to SEQ ID NO: 261066
  chr9:136670534-136670687
  hypo

SEQ ID NO: 311584 - DNA, 496 bp, Homo sapiens; identical to SEQ ID NO: 261067
  chr9:136671074-136671570
  hypo

SEQ ID NO: 311585 - DNA, 471 bp, Homo sapiens; identical to SEQ ID NO: 261068
  chr9:136671901-136672372
  hypo

SEQ ID NO: 311586 - DNA, 179 bp, Homo sapiens; identical to SEQ ID NO: 261069
  chr9:136676092-136676271
  hypo

SEQ ID NO: 311587 - DNA, 300 bp, Homo sapiens; identical to SEQ ID NO: 213127
  chr9:136677205-136677505
  hypo

SEQ ID NO: 311588 - DNA, 962 bp, Homo sapiens; identical to SEQ ID NO: 261071
  chr9:136680293-136681255
  hypo

SEQ ID NO: 311589 - DNA, 385 bp, Homo sapiens; identical to SEQ ID NO: 261072
  chr9:136686196-136686581
  hypo

SEQ ID NO: 311590 - DNA, 510 bp, Homo sapiens; identical to SEQ ID NO: 261073
  chr9:136689993-136690503
  hypo

SEQ ID NO: 311591 - DNA, 115 bp, Homo sapiens; identical to SEQ ID NO: 213130
  chr9:136691771-136691886
  hypo

SEQ ID NO: 311592 - DNA, 236 bp, Homo sapiens; identical to SEQ ID NO: 261075
  chr9:136693624-136693860
  hypo

SEQ ID NO: 311593 - DNA, 75 bp, Homo sapiens; identical to SEQ ID NO: 213131
  chr9:136694904-136694979
  hypo

SEQ ID NO: 311594 - DNA, 119 bp, Homo sapiens; identical to SEQ ID NO: 213132
  chr9:136698781-136698900
  hypo

SEQ ID NO: 311595 - DNA, 174 bp, Homo sapiens; identical to SEQ ID NO: 213133
  chr9:136699684-136699858
  hypo

SEQ ID NO: 311596 - DNA, 308 bp, Homo sapiens; identical to SEQ ID NO: 261079
  chr9:136714185-136714493
  hypo

SEQ ID NO: 311597 - DNA, 239 bp, Homo sapiens; identical to SEQ ID NO: 261080
  chr9:136718546-136718785
  hypo

SEQ ID NO: 311598 - DNA, 434 bp, Homo sapiens; identical to SEQ ID NO: 261081
  chr9:136722069-136722503
  hypo

SEQ ID NO: 311599 - DNA, 179 bp, Homo sapiens; identical to SEQ ID NO: 213137
  chr9:136723290-136723469
  hypo

SEQ ID NO: 311600 - DNA, 80 bp, Homo sapiens; identical to SEQ ID NO: 213138
  chr9:136725455-136725535
  hypo

SEQ ID NO: 311601 - DNA, 119 bp, Homo sapiens
  chr9:136728494-136728613
  hypo
acctgtttgtcaacctggagtcagcgcaaaggccccaggtcgggtcgtacagatggaaccgggtcgtacagatggaaccggagacagagaggaggcgtggcgggcgagccagccaaggc

SEQ ID NO: 311602 - DNA, 65 bp, Homo sapiens; identical to SEQ ID NO: 261085
  chr9:136729692-136729757
  hypo

SEQ ID NO: 311603 - DNA, 47 bp, Homo sapiens; identical to SEQ ID NO: 261086
  chr9:136729989-136730036
  hypo

SEQ ID NO: 311604 - DNA, 35 bp, Homo sapiens; identical to SEQ ID NO: 213139
  chr9:136731601-136731636
  hypo

SEQ ID NO: 311605 - DNA, 172 bp, Homo sapiens; identical to SEQ ID NO: 261088
  chr9:136732402-136732574
  hypo

SEQ ID NO: 311606 - DNA, 455 bp, Homo sapiens; identical to SEQ ID NO: 261089
  chr9:136733334-136733789
  hypo

SEQ ID NO: 311607 - DNA, 335 bp, Homo sapiens; identical to SEQ ID NO: 261090
  chr9:136737403-136737738
  hypo

SEQ ID NO: 311608 - DNA, 114 bp, Homo sapiens; identical to SEQ ID NO: 261091
  chr9:136739160-136739274
  hypo

SEQ ID NO: 311609 - DNA, 100 bp, Homo sapiens; identical to SEQ ID NO: 213142
  chr9:136743438-136743538
  hypo

SEQ ID NO: 311610 - DNA, 47 bp, Homo sapiens; identical to SEQ ID NO: 213143
  chr9:136743950-136743997
  hypo

SEQ ID NO: 311611 - DNA, 253 bp, Homo sapiens; identical to SEQ ID NO: 261094
  chr9:136746362-136746615
  hypo

SEQ ID NO: 311612 - DNA, 171 bp, Homo sapiens; identical to SEQ ID NO: 213144
  chr9:136751547-136751718
  hypo

SEQ ID NO: 311613 - DNA, 75 bp, Homo sapiens; identical to SEQ ID NO: 261096
  chr9:136754061-136754136
  hypo

SEQ ID NO: 311614 - DNA, 363 bp, Homo sapiens; identical to SEQ ID NO: 261097
  chr9:136758751-136759114
  hypo

SEQ ID NO: 311615 - DNA, 77 bp, Homo sapiens; identical to SEQ ID NO: 213146
  chr9:136762226-136762303
  hypo

SEQ ID NO: 311616 - DNA, 59 bp, Homo sapiens; identical to SEQ ID NO: 261099
  chr9:136763773-136763832
  hypo

SEQ ID NO: 311617 - DNA, 303 bp, Homo sapiens; identical to SEQ ID NO: 213147
  chr9:136766707-136767010
  hypo

SEQ ID NO: 311618 - DNA, 368 bp, Homo sapiens; identical to SEQ ID NO: 261101
  chr9:136771809-136772177
  hypo

SEQ ID NO: 311619 - DNA, 126 bp, Homo sapiens; identical to SEQ ID NO: 261102
  chr9:136773825-136773951
  hypo

SEQ ID NO: 311620 - DNA, 57 bp, Homo sapiens; identical to SEQ ID NO: 213149
  chr9:136785103-136785160
  hypo

SEQ ID NO: 311621 - DNA, 39 bp, Homo sapiens; identical to SEQ ID NO: 261104
  chr9:136786010-136786049
  hypo

SEQ ID NO: 311622 - DNA, 193 bp, Homo sapiens; identical to SEQ ID NO: 261105
  chr9:136795959-136796152
  hypo

SEQ ID NO: 311623 - DNA, 161 bp, Homo sapiens; identical to SEQ ID NO: 261107
  chr9:136802014-136802175
  hypo

SEQ ID NO: 311624 - DNA, 138 bp, Homo sapiens; identical to SEQ ID NO: 261108
  chr9:136834267-136834405
  hypo

SEQ ID NO: 311625 - DNA, 303 bp, Homo sapiens; identical to SEQ ID NO: 213150
  chr9:136835362-136835665
  hypo

SEQ ID NO: 311626 - DNA, 281 bp, Homo sapiens; identical to SEQ ID NO: 261110
  chr9:136836266-136836547
  hypo

SEQ ID NO: 311627 - DNA, 196 bp, Homo sapiens; identical to SEQ ID NO: 261111
  chr9:136852629-136852825
  hypo

SEQ ID NO: 311628 - DNA, 191 bp, Homo sapiens; identical to SEQ ID NO: 213151
  chr9:136905412-136905603
  hypo

SEQ ID NO: 311629 - DNA, 34 bp, Homo sapiens; identical to SEQ ID NO: 261113
  chr9:136915611-136915645
  hypo

SEQ ID NO: 311630 - DNA, 230 bp, Homo sapiens; identical to SEQ ID NO: 261114
  chr9:136920306-136920536
  hypo

SEQ ID NO: 311631 - DNA, 84 bp, Homo sapiens; identical to SEQ ID NO: 261115
  chr9:136993426-136993510
  hypo

SEQ ID NO: 311632 - DNA, 111 bp, Homo sapiens
  chr9:136999417-136999528
  hypo
cccggccggattttctcatttttactagaaggttctatctcctgggggtggggtgaggtggtgagaccaattcacctggaagtggaagctgggaacttggtttgagttctg

SEQ ID NO: 311633 - DNA, 438 bp, Homo sapiens; identical to SEQ ID NO: 261117
  chr9:137017038-137017476
  hypo

SEQ ID NO: 311634 - DNA, 219 bp, Homo sapiens; identical to SEQ ID NO: 286838
  chr9:137273878-137274097
  hypo

SEQ ID NO: 311635 - DNA, 44 bp, Homo sapiens; identical to SEQ ID NO: 261118
  chr9:137280523-137280567
  hypo

SEQ ID NO: 311636 - DNA, 64 bp, Homo sapiens
  chr9:137280948-137281012
  hypo
atccgccacctggccggtcctgtcgtggacgccctcagctcgctcccgtcccctgcccctctgg

SEQ ID NO: 311637 - DNA, 217 bp, Homo sapiens; identical to SEQ ID NO: 261120
  chr9:137281713-137281930
  hypo

SEQ ID NO: 311638 - DNA, 182 bp, Homo sapiens; identical to SEQ ID NO: 261121
  chr9:137282423-137282605
  hypo

SEQ ID NO: 311639 - DNA, 96 bp, Homo sapiens; identical to SEQ ID NO: 261122
  chr9:137282869-137282965
  hypo

SEQ ID NO: 311640 - DNA, 48 bp, Homo sapiens; identical to SEQ ID NO: 261123
  chr9:137293295-137293343
  hypo

SEQ ID NO: 311641 - DNA, 82 bp, Homo sapiens; identical to SEQ ID NO: 261124
  chr9:137314810-137314892
  hypo

SEQ ID NO: 311642 - DNA, 34 bp, Homo sapiens; identical to SEQ ID NO: 213152
  chr9:137330715-137330749
  hypo

SEQ ID NO: 311643 - DNA, 60 bp, Homo sapiens; identical to SEQ ID NO: 261126
  chr9:137352256-137352316
  hypo

SEQ ID NO: 311644 - DNA, 250 bp, Homo sapiens; identical to SEQ ID NO: 261127
  chr9:137360364-137360614
  hypo

SEQ ID NO: 311645 - DNA, 93 bp, Homo sapiens; identical to SEQ ID NO: 261128
  chr9:137387911-137388004
  hypo

SEQ ID NO: 311646 - DNA, 153 bp, Homo sapiens; identical to SEQ ID NO: 261129
  chr9:137433016-137433169
  hypo

SEQ ID NO: 311647 - DNA, 59 bp, Homo sapiens
  chr9:137439057-137439116
  hypo
ggtgcagcacagggcggagggaggagttgagtggtgacgcggtcgtgaactcgggcgtc

SEQ ID NO: 311648 - DNA, 67 bp, Homo sapiens
  chr9:137439146-137439213
  hypo
gattccctttggagttgtcctgcgttgaggtaagcgggctgagcctccggaccgactcccatgcggt

SEQ ID NO: 311649 - DNA, 140 bp, Homo sapiens; identical to SEQ ID NO: 261131
  chr9:137474607-137474747
  hypo

SEQ ID NO: 311650 - DNA, 99 bp, Homo sapiens; identical to SEQ ID NO: 261132
  chr9:137497208-137497307
  hypo

SEQ ID NO: 311651 - DNA, 264 bp, Homo sapiens; identical to SEQ ID NO: 261133
  chr9:137515857-137516121
  hypo

SEQ ID NO: 311652 - DNA, 165 bp, Homo sapiens; identical to SEQ ID NO: 261134
  chr9:137542648-137542813
  hypo

SEQ ID NO: 311653 - DNA, 81 bp, Homo sapiens
  chr9:137575945-137576026
  hypo
ggccccacttccaaggggaggggctgctgagcctgagagatgctctccagcagggcaggctgtgaccgggccgaagttgcc

SEQ ID NO: 311654 - DNA, 132 bp, Homo sapiens; identical to SEQ ID NO: 261136
  chr9:137580163-137580295
  hypo

SEQ ID NO: 311655 - DNA, 36 bp, Homo sapiens; identical to SEQ ID NO: 261137
  chr9:137583040-137583076
  hypo

SEQ ID NO: 311656 - DNA, 106 bp, Homo sapiens; identical to SEQ ID NO: 261138
  chr9:137601996-137602102
  hypo

SEQ ID NO: 311657 - DNA, 80 bp, Homo sapiens; identical to SEQ ID NO: 261139
  chr9:137602132-137602212
  hypo

SEQ ID NO: 311658 - DNA, 199 bp, Homo sapiens; identical to SEQ ID NO: 261140
  chr9:137609684-137609883
  hypo

SEQ ID NO: 311659 - DNA, 352 bp, Homo sapiens; identical to SEQ ID NO: 261141
  chr9:137620492-137620844
  hypo

SEQ ID NO: 311660 - DNA, 615 bp, Homo sapiens; identical to SEQ ID NO: 261142
  chr9:137621052-137621667
  hypo

SEQ ID NO: 311661 - DNA, 159 bp, Homo sapiens; identical to SEQ ID NO: 261143
  chr9:137622086-137622245
  hypo

SEQ ID NO: 311662 - DNA, 253 bp, Homo sapiens; identical to SEQ ID NO: 261144
  chr9:137622810-137623063
  hypo

SEQ ID NO: 311663 - DNA, 58 bp, Homo sapiens
  chr9:137623293-137623351
  hypo
gcctggtgcgtttgcgaggcaaccctgcgccttcctctccctctgcagccagctccgc

SEQ ID NO: 311664 - DNA, 167 bp, Homo sapiens
  chr9:137623543-137623710
  hypo
tggggggctggtggggcatcatgggggctcctgcccaagagcctcctcaggggtgggcctctacgggcagctcaagtgttacaccctattcccaaaactttatttttaaagagacctcggtgcctcgaatttgctctgaataacgtgtgtatcggagcatactctcc

SEQ ID NO: 311665 - DNA, 109 bp, Homo sapiens; identical to SEQ ID NO: 261146
  chr9:137632038-137632147
  hypo

SEQ ID NO: 311666 - DNA, 126 bp, Homo sapiens; identical to SEQ ID NO: 261147
  chr9:137632911-137633037
  hypo

SEQ ID NO: 311667 - DNA, 478 bp, Homo sapiens; identical to SEQ ID NO: 261148
  chr9:137642192-137642670
  hypo

SEQ ID NO: 311668 - DNA, 340 bp, Homo sapiens; identical to SEQ ID NO: 261149
  chr9:137645494-137645834
  hypo

SEQ ID NO: 311669 - DNA, 204 bp, Homo sapiens; identical to SEQ ID NO: 213154
  chr9:137646059-137646263
  hypo

SEQ ID NO: 311670 - DNA, 202 bp, Homo sapiens; identical to SEQ ID NO: 261151
  chr9:137648332-137648534
  hypo

SEQ ID NO: 311671 - DNA, 113 bp, Homo sapiens; identical to SEQ ID NO: 261152
  chr9:137650028-137650141
  hypo

SEQ ID NO: 311672 - DNA, 109 bp, Homo sapiens; identical to SEQ ID NO: 261153
  chr9:137650639-137650748
  hypo

SEQ ID NO: 311673 - DNA, 81 bp, Homo sapiens; identical to SEQ ID NO: 261155
  chr9:137708698-137708779
  hypo

SEQ ID NO: 311674 - DNA, 40 bp, Homo sapiens; identical to SEQ ID NO: 213155
  chr9:137709404-137709444
  hypo

SEQ ID NO: 311675 - DNA, 227 bp, Homo sapiens; identical to SEQ ID NO: 261157
  chr9:137709949-137710176
  hypo

SEQ ID NO: 311676 - DNA, 79 bp, Homo sapiens; identical to SEQ ID NO: 261158
  chr9:137710620-137710699
  hypo

SEQ ID NO: 311677 - DNA, 90 bp, Homo sapiens; identical to SEQ ID NO: 261159
  chr9:137716485-137716575
  hypo

SEQ ID NO: 311678 - DNA, 50 bp, Homo sapiens; identical to SEQ ID NO: 213156
  chr9:137718800-137718850
  hypo

SEQ ID NO: 311679 - DNA, 33 bp, Homo sapiens; identical to SEQ ID NO: 261162
  chr9:137727555-137727588
  hypo

SEQ ID NO: 311680 - DNA, 552 bp, Homo sapiens; identical to SEQ ID NO: 261163
  chr9:137760000-137760552
  hypo

SEQ ID NO: 311681 - DNA, 136 bp, Homo sapiens
  chr9:137774781-137774917
  hypo
ttcccacctcaacacggaggccatgacactcttctccacctgtctcagatgaggaaactgaggctcagagagtccagggatttcgctctgttctcacacttggaaggaaaagagccgagattctacccatggtctc

SEQ ID NO: 311682 - DNA, 82 bp, Homo sapiens
  chr9:137774947-137775029
  hypo
caggagagccccgtgaggcctgggtcctggatctagaaccttctggtgcaggatgggcaagcctgggcggggccacagtcac

SEQ ID NO: 311683 - DNA, 82 bp, Homo sapiens; identical to SEQ ID NO: 261165
  chr9:137926909-137926991
  hypo

SEQ ID NO: 311684 - DNA, 1026 bp, Homo sapiens; identical to SEQ ID NO: 213157
  chr9:138011453-138012479
  hypo

SEQ ID NO: 311685 - DNA, 186 bp, Homo sapiens; identical to SEQ ID NO: 261167
  chr9:138060951-138061137
  hypo

SEQ ID NO: 311686 - DNA, 68 bp, Homo sapiens; identical to SEQ ID NO: 261168
  chr9:138068322-138068390
  hypo

SEQ ID NO: 311687 - DNA, 164 bp, Homo sapiens; identical to SEQ ID NO: 261169
  chr9:138077116-138077280
  hypo

SEQ ID NO: 311688 - DNA, 37 bp, Homo sapiens; identical to SEQ ID NO: 213158
  chr9:138106859-138106896
  hypo

SEQ ID NO: 311689 - DNA, 376 bp, Homo sapiens; identical to SEQ ID NO: 213159
  chr9:138143894-138144270
  hypo

SEQ ID NO: 311690 - DNA, 209 bp, Homo sapiens; identical to SEQ ID NO: 261172
  chr9:138148459-138148668
  hypo

SEQ ID NO: 311691 - DNA, 43 bp, Homo sapiens; identical to SEQ ID NO: 261173
  chr9:138150429-138150472
  hypo

SEQ ID NO: 311692 - DNA, 724 bp, Homo sapiens; identical to SEQ ID NO: 261174
  chr9:138150502-138151226
  hypo

SEQ ID NO: 311693 - DNA, 109 bp, Homo sapiens; identical to SEQ ID NO: 261175
  chr9:138163500-138163609
  hypo

SEQ ID NO: 311694 - DNA, 43 bp, Homo sapiens; identical to SEQ ID NO: 261176
  chr9:138190748-138190791
  hypo

SEQ ID NO: 311695 - DNA, 175 bp, Homo sapiens; identical to SEQ ID NO: 261177
  chr9:138247969-138248144
  hypo

SEQ ID NO: 311696 - DNA, 82 bp, Homo sapiens
  chr9:138265272-138265354
  hypo
ttagagtctgacctgagtccatttgtactggcagcttccacaacacccactgagacccacgccaacgcgccccgcccacgag

SEQ ID NO: 311697 - DNA, 84 bp, Homo sapiens
  chr9:138274930-138275014
  hypo
ccgtacccacttctcgatcagggctggcagcagaaggccccaagcccctcccactcttgtgtgccccccgctctccgacaactt

SEQ ID NO: 311698 - DNA, 48 bp, Homo sapiens
  chr9:138275044-138275092
  hypo
agccccaggcagggtcctcgtggccacggctgccggcaattcgtggac

SEQ ID NO: 311699 - DNA, 298 bp, Homo sapiens
  chr9:138289054-138289352
  hypo
atttgtcttcctttcgggaggagagcagcccagcggggaagtgcagcgtggcctctcccagtgcgcccagtgccaaggcagtctgcaggaagtggcacactgctggcgcagggacagggcaggtacacagggcagaggccgtgcccatcccaagcctgtgccctgagccagagccctgctcccagcccctcccagagaggatcgtcctcactcggtccgctgcaatgatgcccctgcatgaaagaagctccctgctccctcagagtgcctcacctgggagcctcctctgggcctggtg

SEQ ID NO: 311700 - DNA, 177 bp, Homo sapiens; identical to SEQ ID NO: 213161
  chr9:138289790-138289967
  hypo

SEQ ID NO: 311701 - DNA, 42 bp, Homo sapiens; identical to SEQ ID NO: 213162
  chr9:138296701-138296743
  hypo

SEQ ID NO: 311702 - DNA, 89 bp, Homo sapiens; identical to SEQ ID NO: 213163
  chr9:138297097-138297186
  hypo

SEQ ID NO: 311703 - DNA, 42 bp, Homo sapiens; identical to SEQ ID NO: 261183
  chr9:138339188-138339230
  hypo

SEQ ID NO: 311704 - DNA, 56 bp, Homo sapiens
  chr9:138353991-138354047
  hypo
gctctgggagggcacggctgagccctccctttttctgcattcccaaggctggctcc

SEQ ID NO: 311705 - DNA, 151 bp, Homo sapiens; identical to SEQ ID NO: 223720
  chr9:138372138-138372289
  hypo

SEQ ID NO: 311706 - DNA, 84 bp, Homo sapiens; identical to SEQ ID NO: 213164
  chr9:138456651-138456735
  hypo

SEQ ID NO: 311707 - DNA, 44 bp, Homo sapiens; identical to SEQ ID NO: 261187
  chr9:138507285-138507329
  hypo

SEQ ID NO: 311708 - DNA, 73 bp, Homo sapiens; identical to SEQ ID NO: 213165
  chr9:138563280-138563353
  hypo

SEQ ID NO: 311709 - DNA, 313 bp, Homo sapiens; identical to SEQ ID NO: 261190
  chr9:138569350-138569663
  hypo

SEQ ID NO: 311710 - DNA, 42 bp, Homo sapiens; identical to SEQ ID NO: 261191
  chr9:138603672-138603714
  hypo

SEQ ID NO: 311711 - DNA, 181 bp, Homo sapiens
  chr9:138637700-138637881
  hypo
ctctgaggagctagcggagccctccaggctaccagtgtccatgaacctctgccgcagcaaggaggcttgggccactctggcaggaaccaccaggcgggtctaccccagccgggtcggcctagagctgaccccagccaggcctctgcagccacaggctccctccccaggtgccgctgcgtga

SEQ ID NO: 311712 - DNA, 39 bp, Homo sapiens
  chr9:138638049-138638088
  hypo
ctcagggagtctgccaggccccagcgtttctctgcctcc

SEQ ID NO: 311713 - DNA, 44 bp, Homo sapiens; identical to SEQ ID NO: 261194
  chr9:138643904-138643948
  hypo

SEQ ID NO: 311714 - DNA, 32 bp, Homo sapiens; identical to SEQ ID NO: 261195
  chr9:138643978-138644010
  hypo

SEQ ID NO: 311715 - DNA, 198 bp, Homo sapiens; identical to SEQ ID NO: 213166
  chr9:138649885-138650083
  hypo

SEQ ID NO: 311716 - DNA, 206 bp, Homo sapiens
  chr9:138650227-138650433
  hypo
ctgcccgctgacagccaccactccttccacagaatgacttccaccgtgccatcctgcggacacagtcagccatgttcaaccaggtcctcatcctcttctgcaccctgctgtgcctcgttttcacggggtgagtgccggccgtcagtgtgagcaccccaggacgttgggagggcccgagaggcaagcagggccgggcgaggggatac

SEQ ID NO: 311717 - DNA, 209 bp, Homo sapiens
  chr9:138651325-138651534
  hypo
ggctccggcagagcttggggacagatgggcagggctgagggcctgatgccacccagctgtcaggagggcggggctcgcctggtgatgcacagctcagtctcctgggcagtgagggtcccgtgggcaggcaggatctctgaggggccacggccccccagctcctgggccccaggccgcccctcactgccaggggttgcaggacctgcggc

SEQ ID NO: 311718 - DNA, 148 bp, Homo sapiens
  chr9:138651701-138651849
  hypo
gcaggtgggtcctctgggcaccagccctgggtggcaccagcaaagggacaggcgggtgccagtagagggagggtgccactgaggctgtggcacagtgcgggggccactcccaggaggggacagtgaggccaggcgggtggtgcctgct

SEQ ID NO: 311719 - DNA, 37 bp, Homo sapiens; identical to SEQ ID NO: 213168
  chr9:138654778-138654815
  hypo

SEQ ID NO: 311720 - DNA, 294 bp, Homo sapiens; identical to SEQ ID NO: 213169
  chr9:138660477-138660771
  hypo

SEQ ID NO: 311721 - DNA, 72 bp, Homo sapiens; identical to SEQ ID NO: 213170
  chr9:138661962-138662034
  hypo

SEQ ID NO: 311722 - DNA, 329 bp, Homo sapiens
  chr9:138662685-138663014
  hypo
ccggtgcctctgcccaggtatggcgtgtgcctcatcgggctgaagcgggaggacaacaagagcatcctgctgaacccggggccccggcacatcctggccgcctctgacacctgcttctacatcaacatcaccaaggaggagaactcggccttcatcttcaagcaggaggagaagcggaagaagagggccttctcggggcaggggctgcacgagggtccggcccgcctgcccgtgcacagcatcatcgcctccatgggtgagccgggacaggcgcgcgggactccctgggcctgctcctttggcgggagaccaggcgggacaccggcagg

SEQ ID NO: 311723 - DNA, 137 bp, Homo sapiens; identical to SEQ ID NO: 261202
  chr9:138663355-138663492
  hypo

SEQ ID NO: 311724 - DNA, 141 bp, Homo sapiens
  chr9:138670510-138670651
  hypo
cgggccctcggtcccgccaccagcctggacagcctgctgcagtgtggcatcatctatgcggacaacctggtggtggtggacaaggagagcaccatgagcgccgaggaggactacatggcggacgccaagaccatcgtcaac

SEQ ID NO: 311725 - DNA, 36 bp, Homo sapiens
  chr9:138670778-138670814
  hypo
acagccacgaccacgggccctcgccctgagaccgcc

SEQ ID NO: 311726 - DNA, 203 bp, Homo sapiens; identical to SEQ ID NO: 213171
  chr9:138718007-138718210
  hypo

SEQ ID NO: 311727 - DNA, 214 bp, Homo sapiens; identical to SEQ ID NO: 213172
  chr9:138719254-138719468
  hypo

SEQ ID NO: 311728 - DNA, 118 bp, Homo sapiens; identical to SEQ ID NO: 213173
  chr9:138743579-138743697
  hypo

SEQ ID NO: 311729 - DNA, 246 bp, Homo sapiens; identical to SEQ ID NO: 261208
  chr9:138770462-138770708
  hypo

SEQ ID NO: 311730 - DNA, 183 bp, Homo sapiens; identical to SEQ ID NO: 261209
  chr9:138774057-138774240
  hypo

SEQ ID NO: 311731 - DNA, 117 bp, Homo sapiens; identical to SEQ ID NO: 213174
  chr9:138774512-138774629
  hypo

SEQ ID NO: 311732 - DNA, 180 bp, Homo sapiens
  chr9:138780870-138781050
  hypo
aggggagaggatcccagagaagagggggctggatagggagaccctctaaatctgtgtcacatcctggccactcctgaagcaactacagtggcacagcagccactctgagggccacagcccacagcccagccagagcggcaggacgaagaccgaaaatgaaacctacgctcaactgtatgt

SEQ ID NO: 311733 - DNA, 77 bp, Homo sapiens; identical to SEQ ID NO: 261212
  chr9:138796491-138796568
  hypo

SEQ ID NO: 311734 - DNA, 77 bp, Homo sapiens; identical to SEQ ID NO: 213175
  chr9:138796808-138796885
  hypo

SEQ ID NO: 311735 - DNA, 40 bp, Homo sapiens; identical to SEQ ID NO: 213176
  chr9:138824557-138824597
  hypo

SEQ ID NO: 311736 - DNA, 308 bp, Homo sapiens; identical to SEQ ID NO: 213177
  chr9:138836303-138836611
  hypo

SEQ ID NO: 311737 - DNA, 244 bp, Homo sapiens; identical to SEQ ID NO: 261217
  chr9:138841434-138841678
  hypo

SEQ ID NO: 311738 - DNA, 60 bp, Homo sapiens; identical to SEQ ID NO: 261218
  chr9:138867841-138867901
  hypo

SEQ ID NO: 311739 - DNA, 154 bp, Homo sapiens; identical to SEQ ID NO: 261219
  chr9:138871837-138871991
  hypo

SEQ ID NO: 311740 - DNA, 199 bp, Homo sapiens; identical to SEQ ID NO: 213178
  chr9:138873215-138873414
  hypo

SEQ ID NO: 311741 - DNA, 177 bp, Homo sapiens; identical to SEQ ID NO: 261221
  chr9:138874536-138874713
  hypo

SEQ ID NO: 311742 - DNA, 76 bp, Homo sapiens; identical to SEQ ID NO: 261222
  chr9:138875025-138875101
  hypo

SEQ ID NO: 311743 - DNA, 51 bp, Homo sapiens; identical to SEQ ID NO: 261223
  chr9:138875479-138875530
  hypo

SEQ ID NO: 311744 - DNA, 555 bp, Homo sapiens; identical to SEQ ID NO: 261224
  chr9:138877539-138878094
  hypo

SEQ ID NO: 311745 - DNA, 298 bp, Homo sapiens; identical to SEQ ID NO: 261225
  chr9:138878431-138878729
  hypo

SEQ ID NO: 311746 - DNA, 335 bp, Homo sapiens; identical to SEQ ID NO: 261226
  chr9:138880242-138880577
  hypo

SEQ ID NO: 311747 - DNA, 690 bp, Homo sapiens; identical to SEQ ID NO: 261227
  chr9:138887921-138888611
  hypo

SEQ ID NO: 311748 - DNA, 209 bp, Homo sapiens; identical to SEQ ID NO: 261228
  chr9:138890407-138890616
  hypo

SEQ ID NO: 311749 - DNA, 100 bp, Homo sapiens; identical to SEQ ID NO: 213180
  chr9:138901527-138901627
  hypo

SEQ ID NO: 311750 - DNA, 161 bp, Homo sapiens; identical to SEQ ID NO: 213181
  chr9:138902149-138902310
  hypo

SEQ ID NO: 311751 - DNA, 48 bp, Homo sapiens; identical to SEQ ID NO: 213182
  chr9:138906092-138906140
  hypo

SEQ ID NO: 311752 - DNA, 55 bp, Homo sapiens; identical to SEQ ID NO: 213183
  chr9:138907131-138907186
  hypo

SEQ ID NO: 311753 - DNA, 39 bp, Homo sapiens; identical to SEQ ID NO: 261233
  chr9:138909964-138910003
  hypo

SEQ ID NO: 311754 - DNA, 184 bp, Homo sapiens; identical to SEQ ID NO: 213184
  chr9:138910983-138911167
  hypo

SEQ ID NO: 311755 - DNA, 569 bp, Homo sapiens; identical to SEQ ID NO: 261235
  chr9:138911434-138912003
  hypo

SEQ ID NO: 311756 - DNA, 31 bp, Homo sapiens; identical to SEQ ID NO: 261236
  chr9:138922161-138922192
  hypo

SEQ ID NO: 311757 - DNA, 239 bp, Homo sapiens; identical to SEQ ID NO: 261237
  chr9:138948881-138949120
  hypo

SEQ ID NO: 311758 - DNA, 432 bp, Homo sapiens; identical to SEQ ID NO: 261238
  chr9:138950492-138950924
  hypo

SEQ ID NO: 311759 - DNA, 85 bp, Homo sapiens; identical to SEQ ID NO: 261239
  chr9:138954964-138955049
  hypo

SEQ ID NO: 311760 - DNA, 36 bp, Homo sapiens; identical to SEQ ID NO: 213187
  chr9:138970475-138970511
  hypo

SEQ ID NO: 311761 - DNA, 172 bp, Homo sapiens; identical to SEQ ID NO: 261241
  chr9:138974809-138974981
  hypo

SEQ ID NO: 311762 - DNA, 192 bp, Homo sapiens; identical to SEQ ID NO: 261242
  chr9:138975400-138975592
  hypo

SEQ ID NO: 311763 - DNA, 258 bp, Homo sapiens; identical to SEQ ID NO: 261243
  chr9:138976374-138976632
  hypo

SEQ ID NO: 311764 - DNA, 212 bp, Homo sapiens; identical to SEQ ID NO: 261244
  chr9:138979354-138979566
  hypo

SEQ ID NO: 311765 - DNA, 113 bp, Homo sapiens; identical to SEQ ID NO: 201926
  chr9:138986159-138986272
  hypo

SEQ ID NO: 311766 - DNA, 824 bp, Homo sapiens; identical to SEQ ID NO: 201927
  chr9:138986333-138987157
  hypo

SEQ ID NO: 311767 - DNA, 560 bp, Homo sapiens; identical to SEQ ID NO: 46735
  chr9:138987167-138987727
  hypo

SEQ ID NO: 311768 - DNA, 122 bp, Homo sapiens; identical to SEQ ID NO: 261246
  chr9:139006538-139006660
  hypo

SEQ ID NO: 311769 - DNA, 496 bp, Homo sapiens; identical to SEQ ID NO: 261248
  chr9:139028141-139028637
  hypo

SEQ ID NO: 311770 - DNA, 184 bp, Homo sapiens; identical to SEQ ID NO: 261249
  chr9:139041469-139041653
  hypo

SEQ ID NO: 311771 - DNA, 59 bp, Homo sapiens; identical to SEQ ID NO: 261250
  chr9:139043908-139043967
  hypo

SEQ ID NO: 311772 - DNA, 66 bp, Homo sapiens; identical to SEQ ID NO: 213191
  chr9:139044756-139044822
  hypo

SEQ ID NO: 311773 - DNA, 814 bp, Homo sapiens; identical to SEQ ID NO: 213192
  chr9:139051193-139052007
  hypo

SEQ ID NO: 311774 - DNA, 235 bp, Homo sapiens; identical to SEQ ID NO: 261254
  chr9:139061803-139062038
  hypo

SEQ ID NO: 311775 - DNA, 170 bp, Homo sapiens; identical to SEQ ID NO: 213193
  chr9:139069742-139069912
  hypo

SEQ ID NO: 311776 - DNA, 70 bp, Homo sapiens; identical to SEQ ID NO: 261256
  chr9:139071634-139071704
  hypo

SEQ ID NO: 311777 - DNA, 251 bp, Homo sapiens; identical to SEQ ID NO: 261257
  chr9:139075039-139075290
  hypo

SEQ ID NO: 311778 - DNA, 112 bp, Homo sapiens; identical to SEQ ID NO: 213194
  chr9:139079354-139079466
  hypo

SEQ ID NO: 311779 - DNA, 207 bp, Homo sapiens; identical to SEQ ID NO: 213195
  chr9:139079780-139079987
  hypo

SEQ ID NO: 311780 - DNA, 105 bp, Homo sapiens; identical to SEQ ID NO: 213196
  chr9:139101084-139101189
  hypo

SEQ ID NO: 311781 - DNA, 34 bp, Homo sapiens; identical to SEQ ID NO: 213197
  chr9:139103914-139103948
  hypo

SEQ ID NO: 311782 - DNA, 236 bp, Homo sapiens; identical to SEQ ID NO: 213198
  chr9:139106806-139107042
  hypo

SEQ ID NO: 311783 - DNA, 278 bp, Homo sapiens; identical to SEQ ID NO: 213199
  chr9:139110883-139111161
  hypo

SEQ ID NO: 311784 - DNA, 102 bp, Homo sapiens; identical to SEQ ID NO: 213200
  chr9:139111384-139111486
  hypo

SEQ ID NO: 311785 - DNA, 52 bp, Homo sapiens
  chr9:139114399-139114451
  hypo
aggtgtgaactgggcgccccgcgtggccgtgcctctcctgagctgggtgtgt

SEQ ID NO: 311786 - DNA, 848 bp, Homo sapiens
  chr9:139114481-139115329
  hypo
acactggtctctgctctgggccatgccgtgactctgtgctgaagagcactcctcctgcacgagtggagcctggctgccccgaacgcaccagcatgccaggcaggtaggggagcgtgcccggcaccaagacggtcccacacccgcctcttctcaggggaacacctgcctctggtctgcgtgtgtggaggccccgcccgagacagcaagggcacgaggggccttgggacaggggtgaggggtctgggagagccacacactgctagcggttcctcagccctccacagagaatcctggccaaccatctggaggcagcctggcgtcaccatcaaacctggagggggcggtgctggggtgccaggagggcagccagggcacaaagcgagacggtcacagtgcaggtgtctgcagctgccttcccaagtgcgtctccaaaagccctcgcaggggcaaagctgtttcctacattcaccgcaaggcccctcacagtggacagaaaaacagtcgcctatcaagttgcaaggaggaggaggagaagctcagggtgagtgctgggcgaacgcatgtgcagtgaggcctttctctcgtctccgggaagactgtcagcaataatgactctccgtgagctgcccctgcacctggtccctggaccttatttagacttggccagaagcaaggcttcagaactgtacgtgtgaaatcaaagtatgacgatagaaacgacgttttacagaatcttggatttggcaaaaatgttgagagttcagaatacggcaacgaaaaaaatcttagtaataatgcatacaaaatacagaatgacctcaaggtgagctgggcgtgtcataaaaatg

SEQ ID NO: 311787 - DNA, 235 bp, Homo sapiens; identical to SEQ ID NO: 213203
  chr9:139118753-139118988
  hypo

SEQ ID NO: 311788 - DNA, 138 bp, Homo sapiens; identical to SEQ ID NO: 261266
  chr9:139121427-139121565
  hypo

SEQ ID NO: 311789 - DNA, 244 bp, Homo sapiens; identical to SEQ ID NO: 213204
  chr9:139128188-139128432
  hypo

SEQ ID NO: 311790 - DNA, 89 bp, Homo sapiens; identical to SEQ ID NO: 213205
  chr9:139130639-139130728
  hypo

SEQ ID NO: 311791 - DNA, 306 bp, Homo sapiens
  chr9:139132822-139133128
  hypo
tgacacagcggagacggctccctggacgtggctgtaaggccctcttagcaaaccatcccgtcttacttcaacaacaagtaagtggcctgggtctctcggtgtagtctcagacgcaccaaccacagccactggggaggccagcggggagcccggctgctccgatgcaccatcctttctgtaaaatactcatgtggtcgccacagcggggctacattaagccatttctgggcccgtaaggagacaggaggcctccactgcccaactcttcctccttccaccctctccatcctcccgagtccagtgagc

SEQ ID NO: 311792 - DNA, 640 bp, Homo sapiens
  chr9:139133183-139133823
  hypo
gtccccctccctctggcccttattgtttctttttccagtaaacggacaatgagcctgtggggaacaccaagttctaattcatctccaagaagcctgcagcctagtcgagtagacaagaaaccagaccaagtgggacagaggagctggcagcaatcacagaatgccctacccttccttcaagagatgtcggatgtgtccagctcccaacccccacctgtcctctacaaagacacaggaatgaactgccatggctccaggtcacccacacctggacacccatcccggcctgtcactcagctgcgtgaccgtgactatcccacgcaacctcacgtgctatcacctgcaacatgagcgcccccgcactcctgaggacaggtgtgggaggactcggcctgttccacgcaacctcatgtgctatcatctacaacataagcgttcccgccctcctgagggcaggtctaggaggactcagcctgttgtgggtggtggcctgccctgttttctcaggctgaccaagtgaaggagatgggagggaacaggcaccagggccacagagggcgcacggggacacaggccctgcctttagggtgcaccctcttgtccactcaagactgcagaggcatttcggagatctcaccgg

SEQ ID NO: 311793 - DNA, 55 bp, Homo sapiens; identical to SEQ ID NO: 261270
  chr9:139134454-139134509
  hypo

SEQ ID NO: 311794 - DNA, 168 bp, Homo sapiens; identical to SEQ ID NO: 261271
  chr9:139256371-139256539
  hypo

SEQ ID NO: 311795 - DNA, 80 bp, Homo sapiens; identical to SEQ ID NO: 213208
  chr9:139264125-139264205
  hypo

SEQ ID NO: 311796 - DNA, 198 bp, Homo sapiens
  chr9:139268624-139268822
  hypo
acacgggggagaaacgtcccttccagaagtgtcgttatcctcgttatccccatcatgaggcatccctgctctccaccaggatgcatgtgaggactgaggccactctcggggtcccccaaaccagcttcagaagagccggtgacagcagggcacagctcggcccccatccagggacaacggacagcagagtctgccctg

SEQ ID NO: 311797 - DNA, 127 bp, Homo sapiens
  chr9:139268912-139269039
  hypo
aactgagttgccacccaacaggttcgagaaggggccgccaggctggaaggcaaggaagctggtgtggagcttgcctaaccgttctcagcctccagccctcaggcctctgtgcggacaacgtctgaca

SEQ ID NO: 311798 - DNA, 456 bp, Homo sapiens
  chr9:139269121-139269577
  hypo
cccctcaccatcaacatgagcgagtgtgcaggccggggccatcctgggccctgccagggagcgaaccggagctggcaccaggccctcatgacccagtgtttccccagcgtttaaaacgcggaccttagtgacttccctgtggtgtgtgtccttaggagtgaacacacataccatgttctctaaccatatcggaagctaaaaatcggtaacagatatcggcaaaatctctaaatatttggaaattaaataatataccgctaaataacccacagatcagagtggcccccagactaggcaccagactagagaaccaggcacagcaacacatactcaggagtgaggtcggccatgggaccgtcccgtctgccaggtgcccagggctgaggccccacagtggctccagtgaaggatcgaagcccagatagccaagggcctgggggcgctgctgccacagag

SEQ ID NO: 311799 - DNA, 34 bp, Homo sapiens; identical to SEQ ID NO: 213210
  chr9:139272165-139272199
  hypo

SEQ ID NO: 311800 - DNA, 47 bp, Homo sapiens; identical to SEQ ID NO: 261275
  chr9:139292779-139292826
  hypo

SEQ ID NO: 311801 - DNA, 56 bp, Homo sapiens; identical to SEQ ID NO: 201930
  chr9:139294771-139294827
  hypo

SEQ ID NO: 311802 - DNA, 148 bp, Homo sapiens; identical to SEQ ID NO: 213212
  chr9:139300480-139300628
  hypo

SEQ ID NO: 311803 - DNA, 289 bp, Homo sapiens; identical to SEQ ID NO: 261277
  chr9:139302051-139302340
  hypo

SEQ ID NO: 311804 - DNA, 144 bp, Homo sapiens; identical to SEQ ID NO: 213214
  chr9:139317510-139317654
  hypo

SEQ ID NO: 311805 - DNA, 394 bp, Homo sapiens; identical to SEQ ID NO: 213215
  chr9:139317866-139318260
  hypo

SEQ ID NO: 311806 - DNA, 54 bp, Homo sapiens; identical to SEQ ID NO: 261279
  chr9:139324913-139324967
  hypo

SEQ ID NO: 311807 - DNA, 489 bp, Homo sapiens; identical to SEQ ID NO: 261280
  chr9:139330350-139330839
  hypo

SEQ ID NO: 311808 - DNA, 247 bp, Homo sapiens; identical to SEQ ID NO: 286849
  chr9:139334259-139334506
  hypo

SEQ ID NO: 311809 - DNA, 365 bp, Homo sapiens; identical to SEQ ID NO: 213217
  chr9:139345460-139345825
  hypo

SEQ ID NO: 311810 - DNA, 275 bp, Homo sapiens; identical to SEQ ID NO: 213218
  chr9:139347810-139348085
  hypo

SEQ ID NO: 311811 - DNA, 141 bp, Homo sapiens; identical to SEQ ID NO: 213219
  chr9:139349659-139349800
  hypo

SEQ ID NO: 311812 - DNA, 96 bp, Homo sapiens; identical to SEQ ID NO: 213220
  chr9:139351904-139352000
  hypo

SEQ ID NO: 311813 - DNA, 249 bp, Homo sapiens; identical to SEQ ID NO: 261285
  chr9:139360042-139360291
  hypo

SEQ ID NO: 311814 - DNA, 67 bp, Homo sapiens; identical to SEQ ID NO: 213222
  chr9:139361592-139361659
  hypo

SEQ ID NO: 311815 - DNA, 80 bp, Homo sapiens
  chr9:139367958-139368038
  hypo
tgcccgcaccaccacgtgctgacagcagcttgcgggactccgcctcgcttagctgatgcgtgtggctcatgctccaaaac

SEQ ID NO: 311816 - DNA, 262 bp, Homo sapiens; identical to SEQ ID NO: 261288
  chr9:139374824-139375086
  hypo

SEQ ID NO: 311817 - DNA, 143 bp, Homo sapiens; identical to SEQ ID NO: 261290
  chr9:139381429-139381572
  hypo

SEQ ID NO: 311818 - DNA, 165 bp, Homo sapiens; identical to SEQ ID NO: 261291
  chr9:139382433-139382598
  hypo

SEQ ID NO: 311819 - DNA, 192 bp, Homo sapiens; identical to SEQ ID NO: 261292
  chr9:139384213-139384405
  hypo

SEQ ID NO: 311820 - DNA, 89 bp, Homo sapiens; identical to SEQ ID NO: 213223
  chr9:139384888-139384977
  hypo

SEQ ID NO: 311821 - DNA, 76 bp, Homo sapiens; identical to SEQ ID NO: 261294
  chr9:139389075-139389151
  hypo

SEQ ID NO: 311822 - DNA, 382 bp, Homo sapiens; identical to SEQ ID NO: 286851
  chr9:139401222-139401604
  hypo

SEQ ID NO: 311823 - DNA, 424 bp, Homo sapiens; identical to SEQ ID NO: 213224
  chr9:139421470-139421894
  hypo

SEQ ID NO: 311824 - DNA, 121 bp, Homo sapiens
  chr9:139422123-139422244
  hypo
ccacgccaggtgtgcccccgtggactccccttccgtgcgtccctcttagggtcacccggcacctgcctgtcccatcccccacgctcagtggcctggcggcgctggggtaacctgtcctatc

SEQ ID NO: 311825 - DNA, 215 bp, Homo sapiens; identical to SEQ ID NO: 286852
  chr9:139440690-139440905
  hypo

SEQ ID NO: 311826 - DNA, 34 bp, Homo sapiens; identical to SEQ ID NO: 213227
  chr9:139456527-139456561
  hypo

SEQ ID NO: 311827 - DNA, 204 bp, Homo sapiens; identical to SEQ ID NO: 261298
  chr9:139480859-139481063
  hypo

SEQ ID NO: 311828 - DNA, 416 bp, Homo sapiens; identical to SEQ ID NO: 261299
  chr9:139484035-139484451
  hypo

SEQ ID NO: 311829 - DNA, 104 bp, Homo sapiens; identical to SEQ ID NO: 261300
  chr9:139490202-139490306
  hypo

SEQ ID NO: 311830 - DNA, 158 bp, Homo sapiens; identical to SEQ ID NO: 261301
  chr9:139497760-139497918
  hypo

SEQ ID NO: 311831 - DNA, 89 bp, Homo sapiens; identical to SEQ ID NO: 213229
  chr9:139501902-139501991
  hypo

SEQ ID NO: 311832 - DNA, 297 bp, Homo sapiens
  chr9:139506143-139506440
  hypo
cccctgcgcgtgcccggtccccactcacattgccacctgcctccggtgtggctgcgaagtcggagggaggagagagccagccaggggtgtgggcgccaagatcagagactcgcacgctgctggacggaatgtggaccggcccagctgctgggtcacctgccggcagctcccgaaacaaccagtcaccacgagacccagcaactccacccctaggtgtgcgcccaagataaacggaagctcctgtccgcacaaacacccgtgcggcttccttcactaagggtggaaacggcccgggtg

SEQ ID NO: 311833 - DNA, 44 bp, Homo sapiens
  chr9:139506516-139506560
  hypo
agaaattcggacgcaggcttcagtacggacggggtttaaagttg

SEQ ID NO: 311834 - DNA, 173 bp, Homo sapiens; identical to SEQ ID NO: 213230
  chr9:139509481-139509654
  hypo

SEQ ID NO: 311835 - DNA, 104 bp, Homo sapiens
  chr9:139517134-139517238
  hypo
gcccccaggacctgcgccctgcctcttctgcctcatcacacagacacgtggggagcagcctggatcttctcttctgtgcaggggctttgcccgggcaccgctct

SEQ ID NO: 311836 - DNA, 66 bp, Homo sapiens
  chr9:139517268-139517334
  hypo
tcaggcacatcggtcggtctgcagccgcctggggcatgaaacgcctcttcccgggagcctccccgg

SEQ ID NO: 311837 - DNA, 298 bp, Homo sapiens; identical to SEQ ID NO: 261306
  chr9:139517555-139517853
  hypo

SEQ ID NO: 311838 - DNA, 92 bp, Homo sapiens; identical to SEQ ID NO: 261308
  chr9:139571844-139571936
  hypo

SEQ ID NO: 311839 - DNA, 109 bp, Homo sapiens; identical to SEQ ID NO: 201935
  chr9:139580674-139580783
  hypo

SEQ ID NO: 311840 - DNA, 45 bp, Homo sapiens; identical to SEQ ID NO: 261309
  chr9:139580886-139580931
  hypo

SEQ ID NO: 311841 - DNA, 283 bp, Homo sapiens; identical to SEQ ID NO: 286855
  chr9:139580987-139581270
  hypo

SEQ ID NO: 311842 - DNA, 144 bp, Homo sapiens; identical to SEQ ID NO: 223733
  chr9:139581731-139581875
  hypo

SEQ ID NO: 311843 - DNA, 321 bp, Homo sapiens; identical to SEQ ID NO: 213233
  chr9:139585994-139586315
  hypo

SEQ ID NO: 311844 - DNA, 682 bp, Homo sapiens; identical to SEQ ID NO: 261311
  chr9:139586516-139587198
  hypo

SEQ ID NO: 311845 - DNA, 159 bp, Homo sapiens; identical to SEQ ID NO: 213235
  chr9:139598243-139598402
  hypo

SEQ ID NO: 311846 - DNA, 243 bp, Homo sapiens; identical to SEQ ID NO: 286857
  chr9:139606720-139606963
  hypo

SEQ ID NO: 311847 - DNA, 403 bp, Homo sapiens; identical to SEQ ID NO: 286858
  chr9:139607299-139607702
  hypo

SEQ ID NO: 311848 - DNA, 283 bp, Homo sapiens; identical to SEQ ID NO: 261313
  chr9:139611137-139611420
  hypo

SEQ ID NO: 311849 - DNA, 474 bp, Homo sapiens; identical to SEQ ID NO: 261314
  chr9:139617709-139618183
  hypo

SEQ ID NO: 311850 - DNA, 347 bp, Homo sapiens; identical to SEQ ID NO: 261315
  chr9:139630437-139630784
  hypo

SEQ ID NO: 311851 - DNA, 60 bp, Homo sapiens
  chr9:139638538-139638598
  hypo
ctggccgaggtcacaggaccctgtgggcgccatccctactggggacgcagcactcactga

SEQ ID NO: 311852 - DNA, 31 bp, Homo sapiens; identical to SEQ ID NO: 261317
  chr9:139666885-139666916
  hypo

SEQ ID NO: 311853 - DNA, 86 bp, Homo sapiens; identical to SEQ ID NO: 261318
  chr9:139687831-139687917
  hypo

SEQ ID NO: 311854 - DNA, 220 bp, Homo sapiens; identical to SEQ ID NO: 213236
  chr9:139698438-139698658
  hypo

SEQ ID NO: 311855 - DNA, 42 bp, Homo sapiens; identical to SEQ ID NO: 213237
  chr9:139699253-139699295
  hypo

SEQ ID NO: 311856 - DNA, 41 bp, Homo sapiens; identical to SEQ ID NO: 261320
  chr9:139703929-139703970
  hypo

SEQ ID NO: 311857 - DNA, 242 bp, Homo sapiens
  chr9:139721706-139721948
  hypo
gcagccagggcggccggtggggagtgcattggagggggttgaggtctcttgggcacctggtgagttctcaagggtgagaggaagccgaggccatcaggcttagctgacgctgcatggggcaggctgccaagagggaggctgaatggagcagcctcaggtgagccgacaatcctcacctccgcctggtcagccaggacccggctcccctccagtcccgcctgctttccccaaagcagatccag

SEQ ID NO: 311858 - DNA, 100 bp, Homo sapiens; identical to SEQ ID NO: 261324
  chr9:139724685-139724785
  hypo

SEQ ID NO: 311859 - DNA, 202 bp, Homo sapiens; identical to SEQ ID NO: 261325
  chr9:139729608-139729810
  hypo

SEQ ID NO: 311860 - DNA, 196 bp, Homo sapiens; identical to SEQ ID NO: 261326
  chr9:139730161-139730357
  hypo

SEQ ID NO: 311861 - DNA, 434 bp, Homo sapiens
  chr9:139735098-139735532
  hypo
agaggccgggcattggtggtccccaggctgggccctgcaggtgctgggccttcaggcccagtgtgagcctgctctgcaagaagggaggggacagctggcttcagccaggctcggtggacaccctggccctctcggggcagagccgccagtgtttctcagggatgtgactgaggcccaggagggacctgtgagggtctgtttacagaggctgggcaggggccgcttggctgtggggtgtgcgctgccccggcacctgcttgccctccgcgctcatctggggccgcagcatgcctatggttccgcttccggccgggagccctgaacacgggtgtgcagactcaccctaaagggcggcccaggccccacgctagaaggctggcgagaccgaaggcagcatgtgaggcctctcctgggagtgggggttgtgtttccca

SEQ ID NO: 311862 - DNA, 42 bp, Homo sapiens; identical to SEQ ID NO: 261328
  chr9:139754947-139754989
  hypo

SEQ ID NO: 311863 - DNA, 41 bp, Homo sapiens; identical to SEQ ID NO: 261330
  chr9:139782896-139782937
  hypo

SEQ ID NO: 311864 - DNA, 277 bp, Homo sapiens; identical to SEQ ID NO: 213239
  chr9:139787443-139787720
  hypo

SEQ ID NO: 311865 - DNA, 126 bp, Homo sapiens
  chr9:139793001-139793127
  hypo
caaggctccctgaagctctgcgattctgcttctctgagtcttgaccgcaggtcagtggggacccggcccctcaccatcgcctgctactgatcaccattggtttggttttgtctcgaggactgttct

SEQ ID NO: 311866 - DNA, 74 bp, Homo sapiens
  chr9:139793190-139793264
  hypo
tcatggctgcagctagcgtgaccccccctggctccctggagttgctacagcccggcttctccaagaccctcctg

SEQ ID NO: 311867 - DNA, 282 bp, Homo sapiens
  chr9:139794983-139795265
  hypo
tgcgtgtggcatggtgacagaagctccagcagtcgggagtcgtccacgctccccaagcagttatgaccttgtcctgcacgttcctctcactggggctgaagcctgtctgatgtctgtggaggaagagacggagctgctccttagagtatgtccatttagaaactcaagtagtgcagagcacagacctgcaccatggagcttgggctgtgtgacctcgggcgaggtatttaccctctctgtgcctcaggtttcttgtctgtcgatgggggtgcaggatcccac

SEQ ID NO: 311868 - DNA, 150 bp, Homo sapiens; identical to SEQ ID NO: 261334
  chr9:139798424-139798574
  hypo

SEQ ID NO: 311869 - DNA, 139 bp, Homo sapiens; identical to SEQ ID NO: 261335
  chr9:139803483-139803622
  hypo

SEQ ID NO: 311870 - DNA, 337 bp, Homo sapiens; identical to SEQ ID NO: 261336
  chr9:139803920-139804257
  hypo

SEQ ID NO: 311871 - DNA, 354 bp, Homo sapiens; identical to SEQ ID NO: 213243
  chr9:139804287-139804641
  hypo

SEQ ID NO: 311872 - DNA, 349 bp, Homo sapiens; identical to SEQ ID NO: 213244
  chr9:139805157-139805506
  hypo

SEQ ID NO: 311873 - DNA, 70 bp, Homo sapiens
  chr9:139809649-139809719
  hypo
tttgtaaaatggttacatggcaccaaagcgaaaactacaaaaaaggtgcattctgagacgtcagagggaa

SEQ ID NO: 311874 - DNA, 142 bp, Homo sapiens; identical to SEQ ID NO: 213245
  chr9:139814740-139814882
  hypo

SEQ ID NO: 311875 - DNA, 58 bp, Homo sapiens; identical to SEQ ID NO: 213246
  chr9:139818622-139818680
  hypo

SEQ ID NO: 311876 - DNA, 147 bp, Homo sapiens; identical to SEQ ID NO: 261342
  chr9:139821632-139821779
  hypo

SEQ ID NO: 311877 - DNA, 69 bp, Homo sapiens; identical to SEQ ID NO: 261343
  chr9:139822247-139822316
  hypo

SEQ ID NO: 311878 - DNA, 195 bp, Homo sapiens; identical to SEQ ID NO: 261344
  chr9:139833902-139834097
  hypo

SEQ ID NO: 311879 - DNA, 1809 bp, Homo sapiens
  chr9:139834953-139836762
  hypo
cacagcagcgtgaccggccgctcccaagccccgggcgcacaaccacagccaggagcagcccctgccaccactgggccaccgtccagggccccacaggaccagccgaaggtgccccgggccgaggccagctgggtcaggtgtacccctagcctggggttgagtgaggagcggcacccccagtatcctgtgtaccccaagttgcccaggaggccgagggggccttgggctccatctgcactggccaccccgtgccaagcatcacagctgcgtgagcaggtttgtgtgtgagcgtgtggcggggcctggttgtccccttcctaaggcgtaactgctataagcatctccacctctcccgctcgggaaaaagccacagagcctggcgatgtcctcaaggggtcccggtggctccagtgcacccagcacacctcagcgcctctggctggcaagccaggagaagaaggtgcgaggccgtgggcgaggtgcctggaggacgcgcatggtgcgtggggagcgccaggctttgatggtggcgtcgtcgctggccgtgagcagcagctcctgctcctggggactgaagaccactgagttgaccacatcctcgtgccgcagcctggccagacagatgttgtagtggcggtcccagatgtagccgtgccggtcctccgccccgctgcagaacagcgcctgggtgagccggccgcccgcccgctgctgcccacacccgccctgcaccacgccgcgccctgcacctggccacgaagtccctgctgacgtccaggaagatgaagaagcactcgtcgttgggcgtgtaggcgcggtgcgcacgcagagcccgcctcacctcccgcatggtcttgaggtcgaacaccagcaggtcaatctcctccgcgattggtggcggctgcatggggtcggccaccaccgcaccgttgggccaggcgcggctgttcacgtacaggtacctgggcgaggggcactgtgctaggtgtgggccgcctgcgggcaccccgcctgggacactggcaagaggcccacctgttgtcgggcgacaggcccatgccgatgatgtgtccgtgtatgtctatgacgtggtccagcgcgtcgaagaaggcatcggagccccggccctcacccagcacgggccctgccgtggtcatctggtgtggcaggatctgcttgatgcctgcagggagggctacggtgagggtccctgtccaatgccccaaggacatcactccagggcagcttcctacctcagtggtgtctctggggctgtgagcaccacagaggtccgtgggcactgcctgctccgggggccccagacctgaatcaggcccgtcggttgcttgctggccagcggccctgcctgcgtttgttttcactgctcatcccacaggccccaggtctgggcttgtgaccccaggggcgagtgaacgatcccagctttgcctgtggacttgcttgctgtctgcccctcaggacccctgcccggcctcccccaagctcctaggaccgaggcgggcagcatggcggcaggggtgtaccgatctggtgtggggagtaggtgaggcagccagtggtgaagatgaggtacttgctcttggcgcctgtggcactgcgctcgggtggcttggtgtggccctgggccagcagctcggccaccttggtctctagcatgcgctccgacagctgtggctgcgcccgcccctccagcacgcggtccagaaagtgccgcaagccctccttggcgtgggcgggggccgggccagccaccacctcctcgttgtcgctgcccaggtcaaagatgcg

SEQ ID NO: 311880 - DNA, 608 bp, Homo sapiens
  chr9:139836968-139837576
  hypo
gggcagccccgcccctagccccgcacgcacctggaaggcattgttgagccacagcaccgagcaggaggtgatatctccgatgcggtgcaggttccccgagatgaggctggtctcggtgagccaacagccaaacacgtcatagggcttgttccgcacgcgggacagcagcgcgaaggagtctgtggggaggccggggctggacaggctgtcggcgtggggcgggggcagggtcaacccgccgcccgtgctcacctaggctgatgacagcaatctcgccggatgaggagttgtgcggccccaggaacacccccgaggccagcagtagcgagtcgtccttgttgaactgggagaactgggtgtagctccagttgtagggccgcatgtccgcgctgtgcagcagcgagatggtcaggtcgttgctccagatctgttcggcaggggcggctgtagtgatcgcctggccaggtcgcggggcgggggcctgctactacacagccatgaggccccagctctgccagccctactcagaggccaccagggagcagggaccccttccagccactgtcatccactcggggggcattggtatagagcggaggagcctgccc

SEQ ID NO: 311881 - DNA, 741 bp, Homo sapiens; identical to SEQ ID NO: 261346
  chr9:139846909-139847650
  hypo

SEQ ID NO: 311882 - DNA, 247 bp, Homo sapiens; identical to SEQ ID NO: 261347
  chr9:139873673-139873920
  hypo

SEQ ID NO: 311883 - DNA, 35 bp, Homo sapiens
  chr9:139886028-139886063
  hypo
cttctttttttgtttgtttgagacagagtctcgct

SEQ ID NO: 311884 - DNA, 31 bp, Homo sapiens
  chr9:139889104-139889135
  hypo
tattgggcgacagacgcggggtggggcgcta

SEQ ID NO: 311885 - DNA, 227 bp, Homo sapiens; identical to SEQ ID NO: 261350
  chr9:139901957-139902184
  hypo

SEQ ID NO: 311886 - DNA, 495 bp, Homo sapiens
  chr9:139902479-139902974
  hypo
acttgtgctggcccgccccggccctcctgcaggctgggcctggacgcagggtctccccacgagctccctctgtgtctgggctctcccgggcctccgtctgccgagtctgggggccactgagtctacatcggtcccctgttccccggctctggtcccctctgccccacccttgctctgtgcccctcaaagactctagcaagtctggaccatgcagttacgtctctccaggcctatctgcaagtgtccctcgcccactctgcccccttgacctctggacagcaagcatcctggggccagttctcccccgaccccacccgcggctggagccaccaggcagcctgggtccagtgggcagagccctggacagccatgagagcagcctgctcacccgctcctcctcgaagctgatgaggccctcgtcctccgtgtccaggtcctcgggctcgtctgccacaagtgcccggagctccgtgggggcagaccggggccggagca

SEQ ID NO: 311887 - DNA, 197 bp, Homo sapiens
  chr9:139903035-139903232
  hypo
caggttgtcactctgcttcttggcaaagttcacgaacacctggtgggtggcgcaggcgtgtggggagggggctggtctggggtgaggaggggcagggcgggtgaggggaggggcaggtgtggtgcgcagtgcccttggggcgctcacattgtccagtgtggtctggctgaccgagtagtcctcgatgcccagcacgc

SEQ ID NO: 311888 - DNA, 54 bp, Homo sapiens; identical to SEQ ID NO: 213252
  chr9:139903847-139903901
  hypo

SEQ ID NO: 311889 - DNA, 170 bp, Homo sapiens
  chr9:139904532-139904702
  hypo
agtagccgaggctctgctgcacctggagcagctccttcagcacgctggggacacggcagctgtcagcgcgtgaggacgcggcggccccgcccacccagggctcccgccccacctgtgtccattgacgaaggcctcgccccccgtcgtgctctcgtcgccggtcagcatct

SEQ ID NO: 311890 - DNA, 97 bp, Homo sapiens; identical to SEQ ID NO: 261354
  chr9:139906300-139906397
  hypo

SEQ ID NO: 311891 - DNA, 148 bp, Homo sapiens; identical to SEQ ID NO: 261355
  chr9:139909028-139909176
  hypo

SEQ ID NO: 311892 - DNA, 43 bp, Homo sapiens; identical to SEQ ID NO: 261356
  chr9:139910704-139910747
  hypo

SEQ ID NO: 311893 - DNA, 341 bp, Homo sapiens
  chr9:139913401-139913742
  hypo
ccagctgctgcaggagggccatgccactgggcagcgagaagttgtcctgtctcagggccggcggcagctcatccagtgacaggttcagtgcctcggggtgcagccgcagctctgctacatacttggggtggaggggcggctcagagggggacctgcgcctgccgagccgggcagagaggggctccccacaccacccacagccgcctccctcgcgggcacccttggcacctgctgcagccagcgcaggtgttgctgcagcctgccctgctccaggaagctgcggatctccgccgagatgttgagccagacctgggcatagtgagtcacgttgcccacaaaag

SEQ ID NO: 311894 - DNA, 712 bp, Homo sapiens; identical to SEQ ID NO: 213254
  chr9:139934675-139935387
  hypo

SEQ ID NO: 311895 - DNA, 531 bp, Homo sapiens; identical to SEQ ID NO: 286868
  chr9:139948373-139948904
  hypo

SEQ ID NO: 311896 - DNA, 265 bp, Homo sapiens; identical to SEQ ID NO: 261360
  chr9:139990642-139990907
  hypo

SEQ ID NO: 311897 - DNA, 85 bp, Homo sapiens; identical to SEQ ID NO: 261361
  chr9:140001323-140001408
  hypo

SEQ ID NO: 311898 - DNA, 711 bp, Homo sapiens; identical to SEQ ID NO: 286870
  chr9:140023901-140024612
  hypo

SEQ ID NO: 311899 - DNA, 67 bp, Homo sapiens
  chr9:140041684-140041751
  hypo
ccatgcagctccagcgccacacacacacctggacacgtactcaggtgcgctcctcacacacacacct

SEQ ID NO: 311900 - DNA, 43 bp, Homo sapiens
  chr9:140041849-140041892
  hypo
acacacatgcacacacgcacacacgtgcacaggcacacacatg

SEQ ID NO: 311901 - DNA, 78 bp, Homo sapiens; identical to SEQ ID NO: 261364
  chr9:140071514-140071592
  hypo

SEQ ID NO: 311902 - DNA, 33 bp, Homo sapiens; identical to SEQ ID NO: 261365
  chr9:140078705-140078738
  hypo

SEQ ID NO: 311903 - DNA, 87 bp, Homo sapiens; identical to SEQ ID NO: 261366
  chr9:140081900-140081987
  hypo

SEQ ID NO: 311904 - DNA, 71 bp, Homo sapiens; identical to SEQ ID NO: 261367
  chr9:140089726-140089797
  hypo

SEQ ID NO: 311905 - DNA, 150 bp, Homo sapiens; identical to SEQ ID NO: 261368
  chr9:140106339-140106489
  hypo

SEQ ID NO: 311906 - DNA, 302 bp, Homo sapiens
  chr9:140107736-140108038
  hypo
gggaggccgctgccgacagcgttcccagggaggagcgtgacccagagccagtcatgcctcggaaccagagtgagaagagaaactgacccccgggaagatgcctggctctctccccagcacagagtttctcagctgaggagtgacccacatcttggctgggggcctggaggcctcagctgcctcaagtccctgcccagggatgagggcccatcagtgggacgaggccgcctgctcccacccacacaggctcattctctgcgagcagaggacctgctgcttggcaccctggcagctgccctggt

SEQ ID NO: 311907 - DNA, 201 bp, Homo sapiens
  chr9:140108461-140108662
  hypo
agggttctggggctgtacccgccgcctccgggcctcactgagatccctcccggagtcccgtgagtgtgggccccgggtcacccacaggcgcagcagacccaacctggcctggggacctcgccctgggtccctcccgtgtgggtgggcggcccctggggagtgggtcctggtctgaccagcgtgccctcccacagcctgccc

SEQ ID NO: 311908 - DNA, 629 bp, Homo sapiens; identical to SEQ ID NO: 261370
  chr9:140110574-140111203
  hypo

SEQ ID NO: 311909 - DNA, 120 bp, Homo sapiens; identical to SEQ ID NO: 261371
  chr9:140112978-140113098
  hypo

SEQ ID NO: 311910 - DNA, 347 bp, Homo sapiens; identical to SEQ ID NO: 261372
  chr9:140125871-140126218
  hypo

SEQ ID NO: 311911 - DNA, 277 bp, Homo sapiens; identical to SEQ ID NO: 261373
  chr9:140133507-140133784
  hypo

SEQ ID NO: 311912 - DNA, 46 bp, Homo sapiens; identical to SEQ ID NO: 213258
  chr9:140137588-140137634
  hypo

SEQ ID NO: 311913 - DNA, 277 bp, Homo sapiens; identical to SEQ ID NO: 261375
  chr9:140137948-140138225
  hypo

SEQ ID NO: 311914 - DNA, 72 bp, Homo sapiens; identical to SEQ ID NO: 261376
  chr9:140140640-140140712
  hypo

SEQ ID NO: 311915 - DNA, 168 bp, Homo sapiens; identical to SEQ ID NO: 213259
  chr9:140157484-140157652
  hypo

SEQ ID NO: 311916 - DNA, 123 bp, Homo sapiens; identical to SEQ ID NO: 261379
  chr9:140166592-140166715
  hypo

SEQ ID NO: 311917 - DNA, 80 bp, Homo sapiens; identical to SEQ ID NO: 213260
  chr9:140166925-140167005
  hypo

SEQ ID NO: 311918 - DNA, 292 bp, Homo sapiens
  chr9:140167091-140167383
  hypo
tgaaggcacctggtccctaccagcccgtgtgtgcttgccaagctgcccttgtggtgcttgtgtgtggtcggtgggcacccacccctgtgccccctgggcctgcccatgcgcctcgcctgccccatggtgtggttccccgcagagcggagaggcagtgaaggagctttactcccagctcggcgagaagctggaacagctggatcaccggaagcccagcccggcacaggctgcggagacgccggccctggagctgcccctccccagcgtgcccgcccctgccccgctctgaggg

SEQ ID NO: 311919 - DNA, 336 bp, Homo sapiens
  chr9:140167413-140167749
  hypo
tgccgagtcgcggccctgctcagccggaagaggctcccggacctggatgtacagggcagtctctcttcccggggctatggctgggcctgtcctgccgtcatggccccctgcttcctgctccttggagctggctcccggaccttgcccaccatccatgcagtggctcccagggcagagcctctccttgtactttggcagccatagaaagcgtgctcattttctgttttcctgtgttaggaaaaaaccacctgttttccaaggggagagggcggggcctgagggtgggggcggggcctcttcattggcccagcttggcgaaagcgaggcacactgctt

SEQ ID NO: 311920 - DNA, 926 bp, Homo sapiens; identical to SEQ ID NO: 286876
  chr9:140196196-140197122
  hypo

SEQ ID NO: 311921 - DNA, 154 bp, Homo sapiens; identical to SEQ ID NO: 201946
  chr9:140197263-140197417
  hypo

SEQ ID NO: 311922 - DNA, 155 bp, Homo sapiens; identical to SEQ ID NO: 213265
  chr9:140198185-140198340
  hypo

SEQ ID NO: 311923 - DNA, 208 bp, Homo sapiens; identical to SEQ ID NO: 261383
  chr9:140206332-140206540
  hypo

SEQ ID NO: 311924 - DNA, 108 bp, Homo sapiens
  chr9:140208418-140208526
  hypo
atgctggcgggggtcgccagtgtgccgtcccaggatggacattgcacatttggtccctggcaagcccctgggtgggtcctgaggcccccaggctgccctgtgcactct

SEQ ID NO: 311925 - DNA, 426 bp, Homo sapiens
  chr9:140208564-140208990
  hypo
gggtgtgggcctgacaccttgctggacagggcgagccagcggcccaggaagaagcaatcaggcaccaacctgcccgccgaggcctgggtctggcccacacctcaccttcccacgctgtccccagagtgccttgcagccctgggctgcccgccccaaaggtgacccgacactgtcccctgctgtggcactgtgagcctcttcagagagaagggagttgcgagtttgccaaaagaacctggccagtcccggcactgactttccactggagacagtgctggggtgggcggaaggccgagcccctggcccctggggaggtgtgtgcagctggggatagcggccgtcttttgggaagcttttaaaacccagtctatccccgtggagcaagctggtagccacccgctcagtgacccccgccctaaggccccg

SEQ ID NO: 311926 - DNA, 68 bp, Homo sapiens; identical to SEQ ID NO: 213266
  chr9:140216162-140216230
  hypo

SEQ ID NO: 311927 - DNA, 102 bp, Homo sapiens; identical to SEQ ID NO: 213267
  chr9:140216260-140216362
  hypo

SEQ ID NO: 311928 - DNA, 32 bp, Homo sapiens; identical to SEQ ID NO: 261386
  chr9:140216846-140216878
  hypo

SEQ ID NO: 311929 - DNA, 54 bp, Homo sapiens; identical to SEQ ID NO: 261387
  chr9:140218253-140218307
  hypo

SEQ ID NO: 311930 - DNA, 131 bp, Homo sapiens
  chr9:140243517-140243648
  hypo
tccccaagaatgctgacaaacggaccctgcggggcttcacccacctgcctgggtgcggccggtgctgacgctttctgcaggccgggtggcttccgtgcccctggtctctctctgtgcctgggcctccggct

SEQ ID NO: 311931 - DNA, 87 bp, Homo sapiens; identical to SEQ ID NO: 261389
  chr9:140263678-140263765
  hypo

SEQ ID NO: 311932 - DNA, 384 bp, Homo sapiens; identical to SEQ ID NO: 213268
  chr9:140265350-140265734
  hypo

SEQ ID NO: 311933 - DNA, 204 bp, Homo sapiens
  chr9:140265902-140266106
  hypo
ggttccaatgcacctcctcacggtgaggggtcttgctgggaagaggaacccagggtgccatcgggacggcgtctcagcagcagggtcccacgtgggcaggcagcggggtggtggccttcacgctcggccctgaagtaagggggccctaatggggcggggagtggaccagtgcccctgagtgccggcctcctcatacatgatcag

SEQ ID NO: 311934 - DNA, 425 bp, Homo sapiens; identical to SEQ ID NO: 213270
  chr9:140267957-140268382
  hypo

SEQ ID NO: 311935 - DNA, 120 bp, Homo sapiens; identical to SEQ ID NO: 261392
  chr9:140268625-140268745
  hypo

SEQ ID NO: 311936 - DNA, 65 bp, Homo sapiens
  chr9:140273999-140274064
  hypo
gtttgcttctgaagcgatgaaccattctgaaaccagaagaggtgcacaggttgtgaagatgtaga

SEQ ID NO: 311937 - DNA, 354 bp, Homo sapiens
  chr9:140274262-140274616
  hypo
ccgccttccctcactcctgcttcagtcccgtaaaccttctgcaaaatcctggccctccagaccccagctgggtcctcccctccaggcccccagtggcagctgtgccccttgtgtgcccacgtcggccagcgcaagccacacatggacccagtgcccactgcacccctgccagcctcagggtcccagcccgttgttccgggagacttcagtcctggcccaggcatctccttccagctcctgtccttatcttggtggcctcaatgaacgtgccaagacccttgggacccatggctctgagactgggctccccttgcgctgcctgcctccctcccggggtccctgtgaaggaagccg

SEQ ID NO: 311938 - DNA, 151 bp, Homo sapiens; identical to SEQ ID NO: 261394
  chr9:140290859-140291010
  hypo

SEQ ID NO: 311939 - DNA, 236 bp, Homo sapiens
  chr9:140325645-140325881
  hypo
agtcagatgggcagggcctgagagcctccctcctctccctaggtccctaatcatggactccccaagagctggcacccaccagggccccctcgatgcagagacagaggtcggtgctgaccgctgcacgtcgactgcctaccaggagcaggtgcgtgggcctgggcctcttcccctgctgggggtcggtgcttctgctgcctccgcagactggggaccacaatgggaccaacatgagg

SEQ ID NO: 311940 - DNA, 41 bp, Homo sapiens; identical to SEQ ID NO: 261396
  chr9:140327520-140327561
  hypo

SEQ ID NO: 311941 - DNA, 369 bp, Homo sapiens; identical to SEQ ID NO: 261397
  chr9:140328418-140328787
  hypo

SEQ ID NO: 311942 - DNA, 154 bp, Homo sapiens; identical to SEQ ID NO: 213272
  chr9:140333146-140333300
  hypo

SEQ ID NO: 311943 - DNA, 259 bp, Homo sapiens
  chr9:140351846-140352105
  hypo
caaacccctcaccagacacacggtcaacgctgtacatcctctccagcttcttgcggcgaccggaggtctcaggcagaggtggctggtccagcccaaaggcccgaggggtggggccaggagccagctgggcacatccggggcactccttggagccctggcggctgcccgcccagctctggcagggcctgctgacgtcctcccggctgccaccagggctggcgcgcaggggctggctgtgatggtgagggtgccgctgccg

SEQ ID NO: 311944 - DNA, 180 bp, Homo sapiens; identical to SEQ ID NO: 213274
  chr9:140352153-140352333
  hypo

SEQ ID NO: 311945 - DNA, 184 bp, Homo sapiens; identical to SEQ ID NO: 261400
  chr9:140355149-140355333
  hypo

SEQ ID NO: 311946 - DNA, 625 bp, Homo sapiens; identical to SEQ ID NO: 261401
  chr9:140358867-140359492
  hypo

SEQ ID NO: 311947 - DNA, 260 bp, Homo sapiens; identical to SEQ ID NO: 213276
  chr9:140379673-140379933
  hypo

SEQ ID NO: 311948 - DNA, 119 bp, Homo sapiens; identical to SEQ ID NO: 213277
  chr9:140379963-140380082
  hypo

SEQ ID NO: 311949 - DNA, 325 bp, Homo sapiens
  chr9:140382232-140382557
  hypo
ggcccccgagaggccgtcccatccagcctccacctgcctgtcaggggcatctcaggagcctgggccaccaccacaacctggcacgccctgcgaggtgtccccagcatcaccttcaccgcacgcacttcagcccctcactgcagctgagccttggccacacgggaggagcgggggactcaggcccagatgatgtgtctccgcctctaggcgctgagtggaaggcaggtggcttctataatcaggaggaaataactcccagatagcaaacaaacaatgcacacacacaccaaagtgctgctgagcacagaaagacggagaaccgcct

SEQ ID NO: 311950 - DNA, 99 bp, Homo sapiens
  chr9:140382625-140382724
  hypo
gtctgatgtctcgtcccgagcttcggcccgaacgcggctctcgcggtctgatgtctcgtcccgagcttcggcccgaacgtggctctctgatgtggattt

SEQ ID NO: 311951 - DNA, 308 bp, Homo sapiens
  chr9:140389001-140389309
  hypo
cgcgccctcacctgctctgcgccctcacctgctccgcaccctcacctgcgccctgccctcacctgctccgtgacctcatccactccgcaccctcacctgctccgcgccctcacctgtgccctgccctcacctgctccatgacctcatccactctgtgccttcacctgctctgcgccctcaccagctccgcaccctcacctgcgccctgccctcacctgctccgtgacctcatccactccgcaccctcacctgcgccctgccctcacctgctccgtgacctcatccactctgcaccctcacctgcgccc

SEQ ID NO: 311952 - DNA, 119 bp, Homo sapiens
  chr9:140389523-140389642
  hypo
cggcagcttggccaattctgagtcccgaacggcatgcaccgtggtcgcccgggcctggtgggtcagtgtctccacctgaggacaggagccggctgctggggccgcgggcttgggagggc

SEQ ID NO: 311953 - DNA, 164 bp, Homo sapiens
  chr9:140392858-140393022
  hypo
cctgccccacggcacagcactgcccaccacgtgcccagtggccagcagctgttggggagcccagagagccccctcctggcaggcccgcgagtgccccttggacacgggccctgtgtcaggctgcggtcctggcaggggactgcacatgccgtcaggagctgcat

SEQ ID NO: 311954 - DNA, 240 bp, Homo sapiens; identical to SEQ ID NO: 213279
  chr9:140396742-140396982
  hypo

SEQ ID NO: 311955 - DNA, 215 bp, Homo sapiens
  chr9:140397203-140397418
  hypo
agccggccacggtgacatggacgaggccgctggacaggggggcactgaacgcacggctgaagtcatttggccattttaaggattactgttaagtattcagaaatgataagagtattgtggttagagatgaatcctgaaatatccaccagtgacgtgctatgatgatgggatttgcttcaagggggggcacccgaacggtacggaaggggtgcaga

SEQ ID NO: 311956 - DNA, 406 bp, Homo sapiens
  chr9:140400469-140400875
  hypo
agtgcaggaagaccctggcacggtcacatgccatccccagatcagaagtggcactgcctgggccccctacacacagaggggacactcaggacacggttcgctaggccactgacacaaacgtccgcggtgtgggctgagcacaccctgcagtctaaccacacagaccccggcagctccctcgagggagtcgggccctgagatccctccacaccctgctttctttcggcatctgcctcaatggctctgtgacccaccagctacaggttttctccgcagcttaaacccacacggtgccttcaacatttctgggcactgataaaggtagcccggtcggtacctaaaacacggaaggaaaccagccctggtcctgagccaaattcctcaaaccttgccatgcgtgccacac

SEQ ID NO: 311957 - DNA, 516 bp, Homo sapiens
  chr9:140400905-140401421
  hypo
agagcaccctttctcttgctgtccatctcagggatgctgccgccctctgtatgtgagctcccctaacgggtgccctgggccgtcacgctggtgctttgggcttggctctttgcagtcccagccccatctcagaggttcgctcttcgcagtccagccccatcttggagggagggggttgaggcaccccctccaaagagctcccctgttgctgcttttgggcggcctcgggctgagcgggatgaagcagtgtgcacccttttacagcctgccctcagcattacacatcactacacacacagcgtatctgacctctggaccagctgctgtggattctgaggaagggtgcacgctttgcacgacggggtcacgcacttccaggcacagatccagcccttcgtgtgcagctgcgcatgcgagcgagtcatctgcactgcggtttcccatccatactggaattcgcaacacccatttctcagcggaatacagaggaaccgcgcagacactaaccgcagacac

SEQ ID NO: 311958 - DNA, 37 bp, Homo sapiens; identical to SEQ ID NO: 261408
  chr9:140418788-140418825
  hypo

SEQ ID NO: 311959 - DNA, 729 bp, Homo sapiens; identical to SEQ ID NO: 286878
  chr9:140445746-140446475
  hypo

SEQ ID NO: 311960 - DNA, 122 bp, Homo sapiens; identical to SEQ ID NO: 201948
  chr9:140473437-140473559
  hypo

SEQ ID NO: 311961 - DNA, 81 bp, Homo sapiens; identical to SEQ ID NO: 213284
  chr9:140487908-140487989
  hypo

SEQ ID NO: 311962 - DNA, 146 bp, Homo sapiens; identical to SEQ ID NO: 213285
  chr9:140538082-140538228
  hypo

SEQ ID NO: 311963 - DNA, 42 bp, Homo sapiens; identical to SEQ ID NO: 213286
  chr9:140576167-140576209
  hypo

SEQ ID NO: 311964 - DNA, 174 bp, Homo sapiens; identical to SEQ ID NO: 213287
  chr9:140577314-140577488
  hypo

SEQ ID NO: 311965 - DNA, 269 bp, Homo sapiens; identical to SEQ ID NO: 261413
  chr9:140582120-140582389
  hypo

SEQ ID NO: 311966 - DNA, 700 bp, Homo sapiens; identical to SEQ ID NO: 213288
  chr9:140587006-140587706
  hypo

SEQ ID NO: 311967 - DNA, 79 bp, Homo sapiens; identical to SEQ ID NO: 213289
  chr9:140588766-140588845
  hypo

SEQ ID NO: 311968 - DNA, 333 bp, Homo sapiens; identical to SEQ ID NO: 261416
  chr9:140592377-140592710
  hypo

SEQ ID NO: 311969 - DNA, 544 bp, Homo sapiens; identical to SEQ ID NO: 213291
  chr9:140606073-140606617
  hypo

SEQ ID NO: 311970 - DNA, 283 bp, Homo sapiens; identical to SEQ ID NO: 213292
  chr9:140611160-140611443
  hypo

SEQ ID NO: 311971 - DNA, 151 bp, Homo sapiens; identical to SEQ ID NO: 261419
  chr9:140612587-140612738
  hypo

SEQ ID NO: 311972 - DNA, 381 bp, Homo sapiens; identical to SEQ ID NO: 213293
  chr9:140615063-140615444
  hypo

SEQ ID NO: 311973 - DNA, 79 bp, Homo sapiens; identical to SEQ ID NO: 213294
  chr9:140615492-140615571
  hypo

SEQ ID NO: 311974 - DNA, 141 bp, Homo sapiens; identical to SEQ ID NO: 261421
  chr9:140617090-140617231
  hypo

SEQ ID NO: 311975 - DNA, 861 bp, Homo sapiens; identical to SEQ ID NO: 261422
  chr9:140620043-140620904
  hypo

SEQ ID NO: 311976 - DNA, 328 bp, Homo sapiens; identical to SEQ ID NO: 261423
  chr9:140622680-140623008
  hypo

SEQ ID NO: 311977 - DNA, 257 bp, Homo sapiens; identical to SEQ ID NO: 213298
  chr9:140623353-140623610
  hypo

SEQ ID NO: 311978 - DNA, 40 bp, Homo sapiens; identical to SEQ ID NO: 213299
  chr9:140633524-140633564
  hypo

SEQ ID NO: 311979 - DNA, 208 bp, Homo sapiens; identical to SEQ ID NO: 261426
  chr9:140636513-140636721
  hypo

SEQ ID NO: 311980 - DNA, 248 bp, Homo sapiens; identical to SEQ ID NO: 213300
  chr9:140645187-140645435
  hypo

SEQ ID NO: 311981 - DNA, 180 bp, Homo sapiens; identical to SEQ ID NO: 213301
  chr9:140647980-140648160
  hypo

SEQ ID NO: 311982 - DNA, 674 bp, Homo sapiens; identical to SEQ ID NO: 213302
  chr9:140653937-140654611
  hypo

SEQ ID NO: 311983 - DNA, 361 bp, Homo sapiens
  chr9:140657349-140657710
  hypo
ccctcgagtgagttgtgctgcgtgaccagggcgggagcctgagtggattctgcgcagaaccaatcgagcagatcccaacagtgaaatcacggcagatgatgaaacacaggtctagagcttgttaaaaaggaggactgtgtagacaaagtctttgaatgaaaatggcctgttgtatttcttttttatgatcatggttttgtcaaggtttttcctaccttgctataaacaaagtgagtagattgaggcaggatagtcacaccaaggtgagtccagaactgcccagaactgtggtttcctgcagggcaggccccgcaagggccgggcctcggccacctccctcctttcaccggggatcacagac

SEQ ID NO: 311984 - DNA, 543 bp, Homo sapiens
  chr9:140657995-140658538
  hypo
cgtctgcttcctgaggggtgtgtcaggctgttgcttccacgagtttcctggtcttattggccagcggatccatcttcagctcgattattgcgtcttagctgcacattgtggaagtaagtgagctgtgaacaggacaaccatccgtgtagcaatgctgggcattattccaagccttttgcgtagggcgctcctccaggtccacggcagcctgtgcagcatcggccgtcgcccaggtgatacaggtgaggcccgtgagaggggccaggtggcgcctccagactcactggcctgctgtgaggaaggcaggaatgggagccttgttccaaaggtcaggcccgaccgctgtgtcggggagcatgggcaacacccgggaggagcgggcagagccctggaacaggccagtcagtttcgcccatggccctcaccctggtgcctgttggcgtggccggggtttctgattcagcaggtctggcctggctgggattttgcttttctaaagtgttccccgtttctcctgatgcttctggtccagggaccacactt

SEQ ID NO: 311985 - DNA, 290 bp, Homo sapiens
  chr9:140658568-140658858
  hypo
ttctccgtaggtgttaaacaggatccagtggagtcagatccccgtgtgacacgtgcttccctgtgacttttctctctgtatctccacgtttccggtgcacatgcctttactcagactccgacactggcgttgcttttgtctcatcccagctaggcgacgtctgcgtcagcgcctctcatctgtggcacgtgtgcccagcgggctccctatgtgacggcttttcccacctctgagtgttcatgtcactcgctgcatgttctgccacactcggcccctctgcagagcctctc

SEQ ID NO: 311986 - DNA, 90 bp, Homo sapiens; identical to SEQ ID NO: 261431
  chr9:140659467-140659557
  hypo

SEQ ID NO: 311987 - DNA, 188 bp, Homo sapiens
  chr9:140664660-140664848
  hypo
cattgtcccacagctcttcaatgccctcctctttttttctccttccattttagttttagataatttatgttggcctttaaaattattcaccagttcttccttgttgagtatacttctgagccagtcaaaggcatttatctctggtactgtttgtttctagcgttttacgctgacgttcttgaaattcc

SEQ ID NO: 311988 - DNA, 88 bp, Homo sapiens; identical to SEQ ID NO: 213305
  chr9:140680232-140680320
  hypo

SEQ ID NO: 311989 - DNA, 177 bp, Homo sapiens
  chr9:140680365-140680542
  hypo
aacctttatgctaactgagttgtccagcgtgagttcctttgtgtctgcttccgtcagtcaggaaaacaagggagtgtagaaaagggacatggctgtggggctgagtggcctggccctgccagggctccctgctgactgcctgtgctctgtgcttgtctgaaacgtcgtctttgggga

SEQ ID NO: 311990 - DNA, 88 bp, Homo sapiens; identical to SEQ ID NO: 213307
  chr9:140682707-140682795
  hypo

SEQ ID NO: 311991 - DNA, 189 bp, Homo sapiens
  chr9:140682922-140683111
  hypo
tagggagattgcaggtgtagggaagttgcaggtgtaggggtccttgcaggtgcagggatcttgtaggtgaagggaggttgcaggtgtagggggccttgcgggcttagagggcctcacaggtgtaggggattgccgtgctgcaggtgtctcttgtcccctcggggactgggagagcgactgtgcctctgg

SEQ ID NO: 311992 - DNA, 106 bp, Homo sapiens; identical to SEQ ID NO: 261436
  chr9:140691709-140691815
  hypo

SEQ ID NO: 311993 - DNA, 323 bp, Homo sapiens; identical to SEQ ID NO: 261437
  chr9:140692092-140692415
  hypo

SEQ ID NO: 311994 - DNA, 147 bp, Homo sapiens; identical to SEQ ID NO: 261438
  chr9:140693486-140693633
  hypo

SEQ ID NO: 311995 - DNA, 257 bp, Homo sapiens; identical to SEQ ID NO: 261439
  chr9:140697268-140697525
  hypo

SEQ ID NO: 311996 - DNA, 208 bp, Homo sapiens; identical to SEQ ID NO: 201949
  chr9:140703838-140704046
  hypo

SEQ ID NO: 311997 - DNA, 328 bp, Homo sapiens; identical to SEQ ID NO: 201950
  chr9:140704131-140704459
  hypo

SEQ ID NO: 311998 - DNA, 101 bp, Homo sapiens; identical to SEQ ID NO: 213311
  chr9:140704676-140704777
  hypo

SEQ ID NO: 311999 - DNA, 146 bp, Homo sapiens; identical to SEQ ID NO: 213312
  chr9:140707364-140707510
  hypo

SEQ ID NO: 312000 - DNA, 72 bp, Homo sapiens; identical to SEQ ID NO: 213313
  chr9:140707900-140707972
  hypo

SEQ ID NO: 312001 - DNA, 492 bp, Homo sapiens; identical to SEQ ID NO: 213314
  chr9:140708200-140708692
  hypo

SEQ ID NO: 312002 - DNA, 215 bp, Homo sapiens; identical to SEQ ID NO: 213315
  chr9:140708771-140708986
  hypo

SEQ ID NO: 312003 - DNA, 466 bp, Homo sapiens; identical to SEQ ID NO: 261444
  chr9:140709436-140709902
  hypo

SEQ ID NO: 312004 - DNA, 54 bp, Homo sapiens
  chr9:140723525-140723579
  hypo
cctggtctcacagacgttgccactggagctcgtgccgtgcgcccactgccacca

SEQ ID NO: 312005 - DNA, 45 bp, Homo sapiens; identical to SEQ ID NO: 213317
  chr9:140727426-140727471
  hypo

SEQ ID NO: 312006 - DNA, 136 bp, Homo sapiens; identical to SEQ ID NO: 213318
  chr9:140731431-140731567
  hypo

SEQ ID NO: 312007 - DNA, 804 bp, Homo sapiens; identical to SEQ ID NO: 261448
  chr9:140937910-140938714
  hypo

SEQ ID NO: 312008 - DNA, 135 bp, Homo sapiens
  chr9:140969119-140969254
  hypo
acaggtggatgcaccgtggtgttcttgagggctgcatgggctcccgcccagtgatggtagggtgtcggggcacaggtcagaatgggtgctggctgtgtggtggaggcgcgttggagcacagctgtgtttgccgag

SEQ ID NO: 312009 - DNA, 272 bp, Homo sapiens; identical to SEQ ID NO: 261450
  chr9:140970055-140970327
  hypo

SEQ ID NO: 312010 - DNA, 222 bp, Homo sapiens; identical to SEQ ID NO: 261451
  chr9:140996899-140997121
  hypo

SEQ ID NO: 312011 - DNA, 456 bp, Homo sapiens; identical to SEQ ID NO: 261452
  chr9:141015968-141016424
  hypo

SEQ ID NO: 312012 - DNA, 206 bp, Homo sapiens; identical to SEQ ID NO: 213319
  chr9:141069527-141069733
  hypo

SEQ ID NO: 312013 - DNA, 44 bp, Homo sapiens; identical to SEQ ID NO: 261455
  chr10:353591-353635
  hypo

SEQ ID NO: 312014 - DNA, 194 bp, Homo sapiens; identical to SEQ ID NO: 213320
  chr10:373930-374124
  hypo

SEQ ID NO: 312015 - DNA, 47 bp, Homo sapiens; identical to SEQ ID NO: 261457
  chr10:385014-385061
  hypo

SEQ ID NO: 312016 - DNA, 221 bp, Homo sapiens; identical to SEQ ID NO: 261458
  chr10:396923-397144
  hypo

SEQ ID NO: 312017 - DNA, 74 bp, Homo sapiens; identical to SEQ ID NO: 261459
  chr10:397174-397248
  hypo

SEQ ID NO: 312018 - DNA, 123 bp, Homo sapiens; identical to SEQ ID NO: 261460
  chr10:415397-415520
  hypo

SEQ ID NO: 312019 - DNA, 85 bp, Homo sapiens; identical to SEQ ID NO: 261461
  chr10:416218-416303
  hypo

SEQ ID NO: 312020 - DNA, 172 bp, Homo sapiens; identical to SEQ ID NO: 213321
  chr10:422173-422345
  hypo

SEQ ID NO: 312021 - DNA, 520 bp, Homo sapiens; identical to SEQ ID NO: 261463
  chr10:425873-426393
  hypo

SEQ ID NO: 312022 - DNA, 44 bp, Homo sapiens; identical to SEQ ID NO: 261464
  chr10:463657-463701
  hypo

SEQ ID NO: 312023 - DNA, 269 bp, Homo sapiens; identical to SEQ ID NO: 213323
  chr10:482019-482288
  hypo

SEQ ID NO: 312024 - DNA, 158 bp, Homo sapiens; identical to SEQ ID NO: 213324
  chr10:482318-482476
  hypo

SEQ ID NO: 312025 - DNA, 141 bp, Homo sapiens; identical to SEQ ID NO: 213325
  chr10:482840-482981
  hypo

SEQ ID NO: 312026 - DNA, 159 bp, Homo sapiens; identical to SEQ ID NO: 261467
  chr10:483296-483455
  hypo

SEQ ID NO: 312027 - DNA, 43 bp, Homo sapiens
  chr10:518266-518309
  hypo
gtgctgcaggtccacgcccactgcacttctgcctcgcccagtg

SEQ ID NO: 312028 - DNA, 146 bp, Homo sapiens
  chr10:518339-518485
  hypo
ggcagatggacgtattgtatcaccccaccccgtgcttacctgaccgatagcgctcatctcgtgaccctgaagaccgtcggcggtggtagcgagaggcggaggaaggagtgacaggagcccggcgttcttgcggcaaagcttggtcc

SEQ ID NO: 312029 - DNA, 121 bp, Homo sapiens; identical to SEQ ID NO: 213326
  chr10:524387-524508
  hypo

SEQ ID NO: 312030 - DNA, 83 bp, Homo sapiens; identical to SEQ ID NO: 213327
  chr10:524671-524754
  hypo

SEQ ID NO: 312031 - DNA, 158 bp, Homo sapiens; identical to SEQ ID NO: 213328
  chr10:545443-545601
  hypo

SEQ ID NO: 312032 - DNA, 427 bp, Homo sapiens; identical to SEQ ID NO: 261471
  chr10:583336-583763
  hypo

SEQ ID NO: 312033 - DNA, 180 bp, Homo sapiens; identical to SEQ ID NO: 261472
  chr10:603006-603186
  hypo

SEQ ID NO: 312034 - DNA, 335 bp, Homo sapiens; identical to SEQ ID NO: 261473
  chr10:606109-606444
  hypo

SEQ ID NO: 312035 - DNA, 298 bp, Homo sapiens; identical to SEQ ID NO: 261474
  chr10:630294-630592
  hypo

SEQ ID NO: 312036 - DNA, 319 bp, Homo sapiens; identical to SEQ ID NO: 261475
  chr10:632981-633300
  hypo

SEQ ID NO: 312037 - DNA, 69 bp, Homo sapiens; identical to SEQ ID NO: 261476
  chr10:658726-658795
  hypo

SEQ ID NO: 312038 - DNA, 352 bp, Homo sapiens; identical to SEQ ID NO: 213330
  chr10:669050-669402
  hypo

SEQ ID NO: 312039 - DNA, 219 bp, Homo sapiens; identical to SEQ ID NO: 213331
  chr10:669947-670166
  hypo

SEQ ID NO: 312040 - DNA, 217 bp, Homo sapiens; identical to SEQ ID NO: 261479
  chr10:673213-673430
  hypo

SEQ ID NO: 312041 - DNA, 92 bp, Homo sapiens
  chr10:673704-673796
  hypo
acaaacagaccgcacggctcagccacgtggacgcttacaggacttcacgagaggcaccaccgtggtacacgtgaagacgtgcacttcattca

SEQ ID NO: 312042 - DNA, 363 bp, Homo sapiens; identical to SEQ ID NO: 261481
  chr10:676525-676888
  hypo

SEQ ID NO: 312043 - DNA, 43 bp, Homo sapiens; identical to SEQ ID NO: 213332
  chr10:678906-678949
  hypo

SEQ ID NO: 312044 - DNA, 213 bp, Homo sapiens; identical to SEQ ID NO: 213333
  chr10:679150-679363
  hypo

SEQ ID NO: 312045 - DNA, 105 bp, Homo sapiens; identical to SEQ ID NO: 213334
  chr10:679402-679507
  hypo

SEQ ID NO: 312046 - DNA, 40 bp, Homo sapiens; identical to SEQ ID NO: 213335
  chr10:685212-685252
  hypo

SEQ ID NO: 312047 - DNA, 90 bp, Homo sapiens; identical to SEQ ID NO: 213336
  chr10:685282-685372
  hypo

SEQ ID NO: 312048 - DNA, 332 bp, Homo sapiens; identical to SEQ ID NO: 261486
  chr10:698147-698479
  hypo

SEQ ID NO: 312049 - DNA, 42 bp, Homo sapiens; identical to SEQ ID NO: 79203
  chr10:712415-712457
  hypo

SEQ ID NO: 312050 - DNA, 552 bp, Homo sapiens
  chr10:741587-742139
  hypo
ggaacacgcgtggctgtgacccacccatggccacatgacagccgctggaggatggggcacccagcctacagcgcccgagcagcctcgctgagaaccaccacatgtcagctgggcagaaaccaggaacccgcaggctcacatccaccaagcagtgtgtccgggcagatggcgtctcagagggtgaggatcccccatgatctctggggacccacaggtgaggatcctgtgtgacctctggggacccacagctcctcatatccagcgagcagtgcgtccaggcggatggcatctcagagggtgagggtcctgcatgatgtctggggacccgcgggtgaggatcctgtgtgatctctggggacccgcaggtgaggatcctgtatgatctctggggacccacagctgctcacatccaccaagcagtgcgtccaggtggacggcatctcagagggtgagggtcctgtgtgatctctgaactcgcaggtgagggtcccttgtgatttctggggacccgcagctgctcacatccaacaggcagtgcgtccgggtgtacgg

SEQ ID NO: 312051 - DNA, 87 bp, Homo sapiens; identical to SEQ ID NO: 213338
  chr10:746703-746790
  hypo

SEQ ID NO: 312052 - DNA, 229 bp, Homo sapiens; identical to SEQ ID NO: 213339
  chr10:769017-769246
  hypo

SEQ ID NO: 312053 - DNA, 131 bp, Homo sapiens; identical to SEQ ID NO: 261491
  chr10:802983-803114
  hypo

SEQ ID NO: 312054 - DNA, 79 bp, Homo sapiens; identical to SEQ ID NO: 261492
  chr10:818533-818612
  hypo

SEQ ID NO: 312055 - DNA, 223 bp, Homo sapiens; identical to SEQ ID NO: 261493
  chr10:818868-819091
  hypo

SEQ ID NO: 312056 - DNA, 423 bp, Homo sapiens; identical to SEQ ID NO: 213341
  chr10:819611-820034
  hypo

SEQ ID NO: 312057 - DNA, 164 bp, Homo sapiens
  chr10:832976-833140
  hypo
agctgtcacaggtgcagccacgggcagcaccgcatcccccaaatccattcactgaagtctcagcttcgacgtgtggtatttggagacgcagccttttcagaggtagttagggtaactgagccgggagtgtggggtcctgatcccatgggccgtggcctccagga

SEQ ID NO: 312058 - DNA, 150 bp, Homo sapiens
  chr10:833386-833536
  hypo
ccagcccggctgcacgcaccgaggcagcgtccagactcgagacatcctccagccacgggcgaaatcacagccattgctgcaaagttcttgcgtcctgtgaaaactggatgtgagcctctctctggtggcagcttctactagtgctttttt

SEQ ID NO: 312059 - DNA, 144 bp, Homo sapiens
  chr10:851105-851249
  hypo
gggcggctggaggtcgagggcgcgtggggggcctggagggtgcaggggacgccgagggcgcggggcccaacctccggccagccgcctggattctggtctctgctctgagcgaggtgcgtgggtgcctccctgcttttgagcggg

SEQ ID NO: 312060 - DNA, 173 bp, Homo sapiens
  chr10:851504-851677
  hypo
cgaggaatggacccggaagcgtcccctgcccagggggtgctgcaggtacccaggggaagagcattcacgggtgccaggcccaaggggctcacgccagaagtagaccaattagacgactacaaacggtgctcagtgctgcagaagcagccggggacaggcggctgtcggagagg

SEQ ID NO: 312061 - DNA, 290 bp, Homo sapiens; identical to SEQ ID NO: 261498
  chr10:851917-852207
  hypo

SEQ ID NO: 312062 - DNA, 194 bp, Homo sapiens; identical to SEQ ID NO: 213343
  chr10:863715-863909
  hypo

SEQ ID NO: 312063 - DNA, 168 bp, Homo sapiens; identical to SEQ ID NO: 261500
  chr10:865348-865516
  hypo

SEQ ID NO: 312064 - DNA, 186 bp, Homo sapiens; identical to SEQ ID NO: 213344
  chr10:868640-868826
  hypo

SEQ ID NO: 312065 - DNA, 285 bp, Homo sapiens; identical to SEQ ID NO: 261502
  chr10:894781-895066
  hypo

SEQ ID NO: 312066 - DNA, 154 bp, Homo sapiens; identical to SEQ ID NO: 213346
  chr10:978657-978811
  hypo

SEQ ID NO: 312067 - DNA, 108 bp, Homo sapiens; identical to SEQ ID NO: 213347
  chr10:986578-986686
  hypo

SEQ ID NO: 312068 - DNA, 52 bp, Homo sapiens; identical to SEQ ID NO: 261505
  chr10:1007455-1007507
  hypo

SEQ ID NO: 312069 - DNA, 240 bp, Homo sapiens; identical to SEQ ID NO: 261506
  chr10:1020587-1020827
  hypo

SEQ ID NO: 312070 - DNA, 45 bp, Homo sapiens; identical to SEQ ID NO: 261507
  chr10:1031930-1031975
  hypo

SEQ ID NO: 312071 - DNA, 43 bp, Homo sapiens; identical to SEQ ID NO: 261508
  chr10:1043354-1043397
  hypo

SEQ ID NO: 312072 - DNA, 255 bp, Homo sapiens; identical to SEQ ID NO: 261509
  chr10:1053557-1053812
  hypo

SEQ ID NO: 312073 - DNA, 210 bp, Homo sapiens; identical to SEQ ID NO: 261511
  chr10:1106060-1106270
  hypo

SEQ ID NO: 312074 - DNA, 69 bp, Homo sapiens; identical to SEQ ID NO: 213348
  chr10:1120709-1120778
  hypo

SEQ ID NO: 312075 - DNA, 62 bp, Homo sapiens; identical to SEQ ID NO: 213349
  chr10:1120937-1120999
  hypo

SEQ ID NO: 312076 - DNA, 56 bp, Homo sapiens; identical to SEQ ID NO: 261513
  chr10:1130124-1130180
  hypo

SEQ ID NO: 312077 - DNA, 171 bp, Homo sapiens; identical to SEQ ID NO: 213350
  chr10:1147965-1148136
  hypo

SEQ ID NO: 312078 - DNA, 90 bp, Homo sapiens; identical to SEQ ID NO: 213351
  chr10:1148461-1148551
  hypo

SEQ ID NO: 312079 - DNA, 55 bp, Homo sapiens; identical to SEQ ID NO: 261516
  chr10:1163782-1163837
  hypo

SEQ ID NO: 312080 - DNA, 60 bp, Homo sapiens; identical to SEQ ID NO: 261517
  chr10:1163867-1163927
  hypo

SEQ ID NO: 312081 - DNA, 374 bp, Homo sapiens; identical to SEQ ID NO: 213352
  chr10:1167465-1167839
  hypo

SEQ ID NO: 312082 - DNA, 164 bp, Homo sapiens; identical to SEQ ID NO: 213353
  chr10:1206577-1206741
  hypo

SEQ ID NO: 312083 - DNA, 308 bp, Homo sapiens; identical to SEQ ID NO: 261521
  chr10:1219203-1219511
  hypo

SEQ ID NO: 312084 - DNA, 43 bp, Homo sapiens; identical to SEQ ID NO: 213354
  chr10:1230858-1230901
  hypo

SEQ ID NO: 312085 - DNA, 137 bp, Homo sapiens; identical to SEQ ID NO: 261523
  chr10:1230982-1231119
  hypo

SEQ ID NO: 312086 - DNA, 38 bp, Homo sapiens
  chr10:1233052-1233090
  hypo
acccaagcgaatcccgttcatgtcagctcttccttttt

SEQ ID NO: 312087 - DNA, 81 bp, Homo sapiens
  chr10:1233240-1233321
  hypo
gcagtcactaccctgatctgcgtgcactgggcagcctcccctcctcctcccactcccgtcaccaggcggcctcccctcctc

SEQ ID NO: 312088 - DNA, 149 bp, Homo sapiens; identical to SEQ ID NO: 261525
  chr10:1233559-1233708
  hypo

SEQ ID NO: 312089 - DNA, 163 bp, Homo sapiens; identical to SEQ ID NO: 261527
  chr10:1250512-1250675
  hypo

SEQ ID NO: 312090 - DNA, 163 bp, Homo sapiens; identical to SEQ ID NO: 213356
  chr10:1251714-1251877
  hypo

SEQ ID NO: 312091 - DNA, 235 bp, Homo sapiens; identical to SEQ ID NO: 213357
  chr10:1252355-1252590
  hypo

SEQ ID NO: 312092 - DNA, 128 bp, Homo sapiens; identical to SEQ ID NO: 213358
  chr10:1252620-1252748
  hypo

SEQ ID NO: 312093 - DNA, 363 bp, Homo sapiens; identical to SEQ ID NO: 213359
  chr10:1260018-1260381
  hypo

SEQ ID NO: 312094 - DNA, 117 bp, Homo sapiens; identical to SEQ ID NO: 213360
  chr10:1260416-1260533
  hypo

SEQ ID NO: 312095 - DNA, 724 bp, Homo sapiens; identical to SEQ ID NO: 261532
  chr10:1283790-1284514
  hypo

SEQ ID NO: 312096 - DNA, 211 bp, Homo sapiens; identical to SEQ ID NO: 261533
  chr10:1286699-1286910
  hypo

SEQ ID NO: 312097 - DNA, 81 bp, Homo sapiens; identical to SEQ ID NO: 261534
  chr10:1357511-1357592
  hypo

SEQ ID NO: 312098 - DNA, 203 bp, Homo sapiens; identical to SEQ ID NO: 261535
  chr10:1376282-1376485
  hypo

SEQ ID NO: 312099 - DNA, 120 bp, Homo sapiens; identical to SEQ ID NO: 261536
  chr10:1418033-1418153
  hypo

SEQ ID NO: 312100 - DNA, 48 bp, Homo sapiens
  chr10:1418213-1418261
  hypo
cacacaccccacacacgtgcacgtaccacacaccacacataccacatg

SEQ ID NO: 312101 - DNA, 68 bp, Homo sapiens
  chr10:1418291-1418359
  hypo
cacgcacatctttttctaccttcccgtgcatctggattacaaatggataaggccgcgctggcaatgcc

SEQ ID NO: 312102 - DNA, 175 bp, Homo sapiens; identical to SEQ ID NO: 213361
  chr10:1443299-1443474
  hypo

SEQ ID NO: 312103 - DNA, 322 bp, Homo sapiens
  chr10:1443566-1443888
  hypo
aagcctgggtcctctccctgtcagagaagacagctgggttctggggtttcacagcacacgggtacccccggttccaggactgaccatggagggcaggtgccagcgctgttcggggcctccggtgatggtcccagctcccttcccacaaaggccaggtgcagccttggaatcctctgacacttggatccccatggattcaatgggagctcgcatgctgtgaagaccgcggtgcattttaaacggcaccagcaaggaggctacactgtgtatcccgtgtccccatttctaccgaagagcggcggcttcacggcggtttgggagt

SEQ ID NO: 312104 - DNA, 103 bp, Homo sapiens; identical to SEQ ID NO: 261539
  chr10:1445193-1445296
  hypo

SEQ ID NO: 312105 - DNA, 195 bp, Homo sapiens; identical to SEQ ID NO: 261540
  chr10:1476322-1476517
  hypo

SEQ ID NO: 312106 - DNA, 109 bp, Homo sapiens
  chr10:1506143-1506252
  hypo
taggaaagcgcaaacgcaaacccccataagacgcctggacacacctgcgagagtggctgcaataaaacaaccacagagaagctgatgacagtgaatgctgacaaggatg

SEQ ID NO: 312107 - DNA, 39 bp, Homo sapiens
  chr10:1506584-1506623
  hypo
ggtggacacacactcccccacacacgcgcgggggccagt

SEQ ID NO: 312108 - DNA, 143 bp, Homo sapiens; identical to SEQ ID NO: 261543
  chr10:1527766-1527909
  hypo

SEQ ID NO: 312109 - DNA, 100 bp, Homo sapiens; identical to SEQ ID NO: 261544
  chr10:1547438-1547538
  hypo

SEQ ID NO: 312110 - DNA, 44 bp, Homo sapiens; identical to SEQ ID NO: 261545
  chr10:1555732-1555776
  hypo

SEQ ID NO: 312111 - DNA, 65 bp, Homo sapiens; identical to SEQ ID NO: 213363
  chr10:1558527-1558592
  hypo

SEQ ID NO: 312112 - DNA, 53 bp, Homo sapiens; identical to SEQ ID NO: 213364
  chr10:1558836-1558889
  hypo

SEQ ID NO: 312113 - DNA, 389 bp, Homo sapiens; identical to SEQ ID NO: 261547
  chr10:1574918-1575307
  hypo

SEQ ID NO: 312114 - DNA, 53 bp, Homo sapiens; identical to SEQ ID NO: 213365
  chr10:1585239-1585292
  hypo

SEQ ID NO: 312115 - DNA, 94 bp, Homo sapiens; identical to SEQ ID NO: 213366
  chr10:1585421-1585515
  hypo

SEQ ID NO: 312116 - DNA, 96 bp, Homo sapiens; identical to SEQ ID NO: 261549
  chr10:1607155-1607251
  hypo

SEQ ID NO: 312117 - DNA, 34 bp, Homo sapiens; identical to SEQ ID NO: 261550
  chr10:1649863-1649897
  hypo

SEQ ID NO: 312118 - DNA, 111 bp, Homo sapiens; identical to SEQ ID NO: 261551
  chr10:1668891-1669002
  hypo

SEQ ID NO: 312119 - DNA, 187 bp, Homo sapiens; identical to SEQ ID NO: 261552
  chr10:1701552-1701739
  hypo

SEQ ID NO: 312120 - DNA, 110 bp, Homo sapiens
  chr10:1708217-1708327
  hypo
ccaggtggaaggaccgggcatggaggctccaggctgagaccagcattggatagggtgggtgggcagggattacttaggtgccaataacccaggagtagaggagatggcac

SEQ ID NO: 312121 - DNA, 173 bp, Homo sapiens; identical to SEQ ID NO: 213368
  chr10:1708478-1708651
  hypo

SEQ ID NO: 312122 - DNA, 151 bp, Homo sapiens; identical to SEQ ID NO: 213369
  chr10:1708689-1708840
  hypo

SEQ ID NO: 312123 - DNA, 73 bp, Homo sapiens
  chr10:1767929-1768002
  hypo
tgttatgagtgacaagaacgctgacacaagacactaacctttctagaggtgcgggtgaagctatcctgggaaa

SEQ ID NO: 312124 - DNA, 52 bp, Homo sapiens
  chr10:1789173-1789225
  hypo
catgaatcgcgtgacgtgtatgcgagtgtcacatgaatcgcctgatgtgtac

SEQ ID NO: 312125 - DNA, 140 bp, Homo sapiens
  chr10:1789266-1789406
  hypo
gatcgcctgatgtgtatgtgtcacatggattgcgtgacgtgtatgcgagtgtcacatggatcgcgtgatgtgtatgcgagtgtcacatggatcgcgtgatgtgtatgcgagtgtcacatggatcgcgtgatgtgtatgcg

SEQ ID NO: 312126 - DNA, 67 bp, Homo sapiens; identical to SEQ ID NO: 261556
  chr10:1814098-1814165
  hypo

SEQ ID NO: 312127 - DNA, 169 bp, Homo sapiens; identical to SEQ ID NO: 261557
  chr10:1828704-1828873
  hypo

SEQ ID NO: 312128 - DNA, 33 bp, Homo sapiens; identical to SEQ ID NO: 261558
  chr10:1852466-1852499
  hypo

SEQ ID NO: 312129 - DNA, 323 bp, Homo sapiens; identical to SEQ ID NO: 261559
  chr10:1986624-1986947
  hypo

SEQ ID NO: 312130 - DNA, 286 bp, Homo sapiens; identical to SEQ ID NO: 261560
  chr10:1994486-1994772
  hypo

SEQ ID NO: 312131 - DNA, 107 bp, Homo sapiens; identical to SEQ ID NO: 213371
  chr10:1994802-1994909
  hypo

SEQ ID NO: 312132 - DNA, 190 bp, Homo sapiens
  chr10:1995298-1995488
  hypo
gagacaaaccgcagacagtaggtgcaggtggccctgagaggcgtcctgcacagcacagcaaaagccagggtcctagttagtgggcgaagtgagttccagactttgggaaaataatcgcgttttgtactgctgtaaatgagcggaagaaagggagaggccgggcgcggtggctgaggcctgtactcccagc

SEQ ID NO: 312133 - DNA, 207 bp, Homo sapiens; identical to SEQ ID NO: 213373
  chr10:2006676-2006883
  hypo

SEQ ID NO: 312134 - DNA, 63 bp, Homo sapiens; identical to SEQ ID NO: 261563
  chr10:2140551-2140614
  hypo

SEQ ID NO: 312135 - DNA, 51 bp, Homo sapiens; identical to SEQ ID NO: 261564
  chr10:2358814-2358865
  hypo

SEQ ID NO: 312136 - DNA, 79 bp, Homo sapiens; identical to SEQ ID NO: 261565
  chr10:2364622-2364701
  hypo

SEQ ID NO: 312137 - DNA, 172 bp, Homo sapiens; identical to SEQ ID NO: 213374
  chr10:2416382-2416554
  hypo

SEQ ID NO: 312138 - DNA, 185 bp, Homo sapiens; identical to SEQ ID NO: 213375
  chr10:2610008-2610193
  hypo

SEQ ID NO: 312139 - DNA, 221 bp, Homo sapiens; identical to SEQ ID NO: 213376
  chr10:2620065-2620286
  hypo

SEQ ID NO: 312140 - DNA, 64 bp, Homo sapiens; identical to SEQ ID NO: 213377
  chr10:2620526-2620590
  hypo

SEQ ID NO: 312141 - DNA, 42 bp, Homo sapiens; identical to SEQ ID NO: 261570
  chr10:2782246-2782288
  hypo

SEQ ID NO: 312142 - DNA, 457 bp, Homo sapiens; identical to SEQ ID NO: 213378
  chr10:2932055-2932512
  hypo

SEQ ID NO: 312143 - DNA, 110 bp, Homo sapiens; identical to SEQ ID NO: 261572
  chr10:2936339-2936449
  hypo

SEQ ID NO: 312144 - DNA, 192 bp, Homo sapiens; identical to SEQ ID NO: 286895
  chr10:3109168-3109360
  hypo

SEQ ID NO: 312145 - DNA, 1901 bp, Homo sapiens; identical to SEQ ID NO: 286896
  chr10:3109459-3111360
  hypo

SEQ ID NO: 312146 - DNA, 556 bp, Homo sapiens; identical to SEQ ID NO: 261573
  chr10:3121874-3122430
  hypo

SEQ ID NO: 312147 - DNA, 66 bp, Homo sapiens; identical to SEQ ID NO: 261574
  chr10:3141466-3141532
  hypo

SEQ ID NO: 312148 - DNA, 54 bp, Homo sapiens; identical to SEQ ID NO: 261575
  chr10:3146043-3146097
  hypo

SEQ ID NO: 312149 - DNA, 275 bp, Homo sapiens; identical to SEQ ID NO: 261576
  chr10:3150860-3151135
  hypo

SEQ ID NO: 312150 - DNA, 442 bp, Homo sapiens; identical to SEQ ID NO: 261577
  chr10:3151597-3152039
  hypo

SEQ ID NO: 312151 - DNA, 425 bp, Homo sapiens; identical to SEQ ID NO: 164516
  chr10:3155318-3155743
  hypo

SEQ ID NO: 312152 - DNA, 291 bp, Homo sapiens; identical to SEQ ID NO: 261579
  chr10:3158926-3159217
  hypo

SEQ ID NO: 312153 - DNA, 181 bp, Homo sapiens; identical to SEQ ID NO: 213385
  chr10:3160807-3160988
  hypo

SEQ ID NO: 312154 - DNA, 146 bp, Homo sapiens; identical to SEQ ID NO: 213386
  chr10:3161171-3161317
  hypo

SEQ ID NO: 312155 - DNA, 45 bp, Homo sapiens; identical to SEQ ID NO: 213387
  chr10:3168655-3168700
  hypo

SEQ ID NO: 312156 - DNA, 55 bp, Homo sapiens; identical to SEQ ID NO: 261582
  chr10:3171106-3171161
  hypo

SEQ ID NO: 312157 - DNA, 232 bp, Homo sapiens; identical to SEQ ID NO: 261583
  chr10:3179620-3179852
  hypo

SEQ ID NO: 312158 - DNA, 197 bp, Homo sapiens; identical to SEQ ID NO: 261584
  chr10:3185690-3185887
  hypo

SEQ ID NO: 312159 - DNA, 96 bp, Homo sapiens; identical to SEQ ID NO: 213388
  chr10:3192559-3192655
  hypo

SEQ ID NO: 312160 - DNA, 39 bp, Homo sapiens; identical to SEQ ID NO: 213389
  chr10:3192934-3192973
  hypo

SEQ ID NO: 312161 - DNA, 234 bp, Homo sapiens; identical to SEQ ID NO: 261587
  chr10:3194433-3194667
  hypo

SEQ ID NO: 312162 - DNA, 129 bp, Homo sapiens; identical to SEQ ID NO: 213390
  chr10:3196875-3197004
  hypo

SEQ ID NO: 312163 - DNA, 308 bp, Homo sapiens; identical to SEQ ID NO: 213391
  chr10:3197113-3197421
  hypo

SEQ ID NO: 312164 - DNA, 117 bp, Homo sapiens; identical to SEQ ID NO: 261589
  chr10:3197636-3197753
  hypo

SEQ ID NO: 312165 - DNA, 96 bp, Homo sapiens; identical to SEQ ID NO: 261590
  chr10:3206003-3206099
  hypo

SEQ ID NO: 312166 - DNA, 81 bp, Homo sapiens; identical to SEQ ID NO: 261591
  chr10:3206323-3206404
  hypo

SEQ ID NO: 312167 - DNA, 70 bp, Homo sapiens; identical to SEQ ID NO: 213392
  chr10:3243876-3243946
  hypo

SEQ ID NO: 312168 - DNA, 188 bp, Homo sapiens; identical to SEQ ID NO: 213393
  chr10:3277176-3277364
  hypo

SEQ ID NO: 312169 - DNA, 69 bp, Homo sapiens; identical to SEQ ID NO: 261596
  chr10:3284260-3284329
  hypo

SEQ ID NO: 312170 - DNA, 46 bp, Homo sapiens; identical to SEQ ID NO: 261597
  chr10:3285012-3285058
  hypo

SEQ ID NO: 312171 - DNA, 307 bp, Homo sapiens; identical to SEQ ID NO: 213394
  chr10:3329809-3330116
  hypo

SEQ ID NO: 312172 - DNA, 226 bp, Homo sapiens
  chr10:3330188-3330414
  hypo
gtatttgcacacatgtgtgttcaatctgtggatacggtacctacgtgcacttctgtacctggtttcttcctttttctacacatacattatttatctgttttttaaaattcaacttttattgctccttgtcctgccggtggccctggcaacatgccacgccggactccagcttagtttccttgttgccttgcagccaaacttacgcagtgtgcagacggagctgctc

SEQ ID NO: 312173 - DNA, 285 bp, Homo sapiens; identical to SEQ ID NO: 213396
  chr10:3342840-3343125
  hypo

SEQ ID NO: 312174 - DNA, 82 bp, Homo sapiens; identical to SEQ ID NO: 213397
  chr10:3343155-3343237
  hypo

SEQ ID NO: 312175 - DNA, 52 bp, Homo sapiens; identical to SEQ ID NO: 261602
  chr10:3365239-3365291
  hypo

SEQ ID NO: 312176 - DNA, 50 bp, Homo sapiens; identical to SEQ ID NO: 261603
  chr10:3438497-3438547
  hypo

SEQ ID NO: 312177 - DNA, 230 bp, Homo sapiens; identical to SEQ ID NO: 261604
  chr10:3512565-3512795
  hypo

SEQ ID NO: 312178 - DNA, 42 bp, Homo sapiens; identical to SEQ ID NO: 261605
  chr10:3518835-3518877
  hypo

SEQ ID NO: 312179 - DNA, 246 bp, Homo sapiens; identical to SEQ ID NO: 261606
  chr10:3572532-3572778
  hypo

SEQ ID NO: 312180 - DNA, 31 bp, Homo sapiens; identical to SEQ ID NO: 79322
  chr10:3641660-3641691
  hypo

SEQ ID NO: 312181 - DNA, 311 bp, Homo sapiens
  chr10:3678862-3679173
  hypo
agatcagccctagaatgaaagcaaaaccgagatgatggacggcgcaggctccttggagatccgtgttcatgacacctgcaaggactgtgggcaagctgccaaccagacatgaaattagcaattagttgcatattcttccgagtgggtcatgtgctccttgcaatccaggcacatctctttccatctggcaggggtgtggcgtatttccagagggcttcaatgcgcaatccggcagcgcactgctgggagccccggcacaggacgcctgaccacactgacatacacatattcgcgtccgtctttccctctct

SEQ ID NO: 312182 - DNA, 122 bp, Homo sapiens; identical to SEQ ID NO: 261610
  chr10:3712903-3713025
  hypo

SEQ ID NO: 312183 - DNA, 255 bp, Homo sapiens; identical to SEQ ID NO: 286901
  chr10:3862675-3862930
  hypo

SEQ ID NO: 312184 - DNA, 205 bp, Homo sapiens; identical to SEQ ID NO: 261612
  chr10:3954896-3955101
  hypo

SEQ ID NO: 312185 - DNA, 68 bp, Homo sapiens; identical to SEQ ID NO: 261613
  chr10:4082781-4082849
  hypo

SEQ ID NO: 312186 - DNA, 138 bp, Homo sapiens; identical to SEQ ID NO: 261614
  chr10:4191045-4191183
  hypo

SEQ ID NO: 312187 - DNA, 69 bp, Homo sapiens; identical to SEQ ID NO: 261615
  chr10:4773957-4774026
  hypo

SEQ ID NO: 312188 - DNA, 160 bp, Homo sapiens; identical to SEQ ID NO: 261616
  chr10:4867812-4867972
  hypo

SEQ ID NO: 312189 - DNA, 37 bp, Homo sapiens; identical to SEQ ID NO: 261617
  chr10:4872906-4872943
  hypo

SEQ ID NO: 312190 - DNA, 223 bp, Homo sapiens; identical to SEQ ID NO: 261618
  chr10:4886024-4886247
  hypo

SEQ ID NO: 312191 - DNA, 157 bp, Homo sapiens; identical to SEQ ID NO: 223749
  chr10:5488421-5488578
  hypo

SEQ ID NO: 312192 - DNA, 69 bp, Homo sapiens; identical to SEQ ID NO: 261619
  chr10:5495770-5495839
  hypo

SEQ ID NO: 312193 - DNA, 128 bp, Homo sapiens; identical to SEQ ID NO: 261620
  chr10:5509144-5509272
  hypo

SEQ ID NO: 312194 - DNA, 68 bp, Homo sapiens; identical to SEQ ID NO: 213400
  chr10:5523192-5523260
  hypo

SEQ ID NO: 312195 - DNA, 175 bp, Homo sapiens; identical to SEQ ID NO: 261622
  chr10:5527430-5527605
  hypo

SEQ ID NO: 312196 - DNA, 500 bp, Homo sapiens; identical to SEQ ID NO: 261623
  chr10:5529520-5530020
  hypo

SEQ ID NO: 312197 - DNA, 504 bp, Homo sapiens
  chr10:5530260-5530764
  hypo
ttccagttgtgagtcaccgtgcccggtccaaaacactgagatttgacttcttcctaggccaaaggtcatctgggcagcaaggcaggagctcccggatcaggaaagtgcaggcacaccatgtctctgagtggtggggtggggacagaggctggcaggccaccaacagggcagcatctgctcccaaccaaggtgactcagacctcgccttgtccaacctgcaggcctcccaacagtggggctctataaggctggcgttcgcctccagggttctccccgacactggatgccaacctgcccaggggcagaagggaggttgggcgtggggagtgccgggtacagtcagagttgccaggacagtttggagcagtgcctcttaatcttggccgcacagcacctgggagctttaaatagacccccacgcctgggcgcccccaccgctgacccaccagggctcagtgcagggggatggctcacacggcacattctccagaagctcctggggta

SEQ ID NO: 312198 - DNA, 182 bp, Homo sapiens; identical to SEQ ID NO: 261625
  chr10:5535380-5535562
  hypo

SEQ ID NO: 312199 - DNA, 138 bp, Homo sapiens; identical to SEQ ID NO: 261626
  chr10:5536521-5536659
  hypo

SEQ ID NO: 312200 - DNA, 102 bp, Homo sapiens; identical to SEQ ID NO: 261627
  chr10:5537076-5537178
  hypo

SEQ ID NO: 312201 - DNA, 89 bp, Homo sapiens; identical to SEQ ID NO: 213403
  chr10:5538686-5538775
  hypo

SEQ ID NO: 312202 - DNA, 193 bp, Homo sapiens; identical to SEQ ID NO: 213404
  chr10:5538938-5539131
  hypo

SEQ ID NO: 312203 - DNA, 400 bp, Homo sapiens; identical to SEQ ID NO: 213405
  chr10:5540251-5540651
  hypo

SEQ ID NO: 312204 - DNA, 213 bp, Homo sapiens; identical to SEQ ID NO: 213406
  chr10:5541528-5541741
  hypo

SEQ ID NO: 312205 - DNA, 62 bp, Homo sapiens; identical to SEQ ID NO: 261630
  chr10:5548690-5548752
  hypo

SEQ ID NO: 312206 - DNA, 64 bp, Homo sapiens
  chr10:5551897-5551961
  hypo
gtgggaggaagagcactggccgtgccgggaagaggtggcaattcgggcccgctctgcctcccac

SEQ ID NO: 312207 - DNA, 215 bp, Homo sapiens
  chr10:5566908-5567123
  hypo
gtctcaagccagggcgagacagcccgccggccgcccggatctccacctgccaccccagagctgggacagcagccgggctgcggcactgggagggagaccccacagtggcctcttctgccacccacgcccccacccctggcatggccgaccagctgactgaggagcaggtcacagaattcaaggaggccttctccctgtttgacaaggatggggac

SEQ ID NO: 312208 - DNA, 326 bp, Homo sapiens; identical to SEQ ID NO: 213408
  chr10:5567210-5567536
  hypo

SEQ ID NO: 312209 - DNA, 103 bp, Homo sapiens; identical to SEQ ID NO: 213409
  chr10:5567566-5567669
  hypo

SEQ ID NO: 312210 - DNA, 153 bp, Homo sapiens; identical to SEQ ID NO: 261633
  chr10:5572907-5573060
  hypo

SEQ ID NO: 312211 - DNA, 189 bp, Homo sapiens; identical to SEQ ID NO: 261634
  chr10:5574191-5574380
  hypo

SEQ ID NO: 312212 - DNA, 145 bp, Homo sapiens; identical to SEQ ID NO: 213410
  chr10:5576085-5576230
  hypo

SEQ ID NO: 312213 - DNA, 289 bp, Homo sapiens; identical to SEQ ID NO: 261636
  chr10:5638904-5639193
  hypo

SEQ ID NO: 312214 - DNA, 215 bp, Homo sapiens; identical to SEQ ID NO: 261637
  chr10:5666828-5667043
  hypo

SEQ ID NO: 312215 - DNA, 40 bp, Homo sapiens; identical to SEQ ID NO: 261638
  chr10:5680699-5680739
  hypo

SEQ ID NO: 312216 - DNA, 58 bp, Homo sapiens; identical to SEQ ID NO: 261639
  chr10:5681054-5681112
  hypo

SEQ ID NO: 312217 - DNA, 101 bp, Homo sapiens; identical to SEQ ID NO: 213411
  chr10:5683749-5683850
  hypo

SEQ ID NO: 312218 - DNA, 855 bp, Homo sapiens; identical to SEQ ID NO: 286904
  chr10:5707985-5708840
  hypo

SEQ ID NO: 312219 - DNA, 36 bp, Homo sapiens; identical to SEQ ID NO: 213413
  chr10:5796177-5796213
  hypo

SEQ ID NO: 312220 - DNA, 114 bp, Homo sapiens; identical to SEQ ID NO: 213414
  chr10:5796243-5796357
  hypo

SEQ ID NO: 312221 - DNA, 82 bp, Homo sapiens; identical to SEQ ID NO: 213415
  chr10:5863290-5863372
  hypo

SEQ ID NO: 312222 - DNA, 147 bp, Homo sapiens; identical to SEQ ID NO: 261645
  chr10:5898120-5898267
  hypo

SEQ ID NO: 312223 - DNA, 90 bp, Homo sapiens; identical to SEQ ID NO: 213416
  chr10:5901982-5902072
  hypo

SEQ ID NO: 312224 - DNA, 78 bp, Homo sapiens; identical to SEQ ID NO: 261647
  chr10:5902471-5902549
  hypo

SEQ ID NO: 312225 - DNA, 33 bp, Homo sapiens; identical to SEQ ID NO: 261648
  chr10:5952451-5952484
  hypo

SEQ ID NO: 312226 - DNA, 631 bp, Homo sapiens; identical to SEQ ID NO: 213417
  chr10:5953029-5953660
  hypo

SEQ ID NO: 312227 - DNA, 462 bp, Homo sapiens; identical to SEQ ID NO: 213418
  chr10:5960338-5960800
  hypo

SEQ ID NO: 312228 - DNA, 168 bp, Homo sapiens; identical to SEQ ID NO: 213419
  chr10:5962672-5962840
  hypo

SEQ ID NO: 312229 - DNA, 138 bp, Homo sapiens; identical to SEQ ID NO: 261652
  chr10:5979160-5979298
  hypo

SEQ ID NO: 312230 - DNA, 148 bp, Homo sapiens
  chr10:6003855-6004003
  hypo
tgtcaccacctttcatataacttgccctacgctcactgccaatgctccagggctccctgcacaggacgcaccaaggcatcctcagccaagtgcccacggtcgtgccagctcgggtcaaaggctgctgtcacatcggggcttctgactg

SEQ ID NO: 312231 - DNA, 158 bp, Homo sapiens; identical to SEQ ID NO: 261654
  chr10:6023434-6023592
  hypo

SEQ ID NO: 312232 - DNA, 103 bp, Homo sapiens
  chr10:6024478-6024581
  hypo
ataagtgtaagaaaacgattgtttgtaagggtagcccataaattcagagtcagagtcaggaatggtggtgatgccaatcatccgcagatgttcacgtgggtga

SEQ ID NO: 312233 - DNA, 62 bp, Homo sapiens; identical to SEQ ID NO: 261657
  chr10:6055609-6055671
  hypo

SEQ ID NO: 312234 - DNA, 150 bp, Homo sapiens; identical to SEQ ID NO: 261658
  chr10:6065692-6065842
  hypo

SEQ ID NO: 312235 - DNA, 270 bp, Homo sapiens; identical to SEQ ID NO: 261659
  chr10:6078743-6079013
  hypo

SEQ ID NO: 312236 - DNA, 46 bp, Homo sapiens; identical to SEQ ID NO: 261660
  chr10:6089449-6089495
  hypo

SEQ ID NO: 312237 - DNA, 49 bp, Homo sapiens; identical to SEQ ID NO: 213421
  chr10:6135599-6135648
  hypo

SEQ ID NO: 312238 - DNA, 256 bp, Homo sapiens; identical to SEQ ID NO: 261662
  chr10:6151972-6152228
  hypo

SEQ ID NO: 312239 - DNA, 160 bp, Homo sapiens; identical to SEQ ID NO: 213422
  chr10:6161978-6162138
  hypo

SEQ ID NO: 312240 - DNA, 153 bp, Homo sapiens; identical to SEQ ID NO: 261665
  chr10:6167800-6167953
  hypo

SEQ ID NO: 312241 - DNA, 264 bp, Homo sapiens; identical to SEQ ID NO: 261666
  chr10:6211184-6211448
  hypo

SEQ ID NO: 312242 - DNA, 41 bp, Homo sapiens
  chr10:6372302-6372343
  hypo
gtgctggagggcagcgtgggcggcgggagcacgggtggagg

SEQ ID NO: 312243 - DNA, 34 bp, Homo sapiens; identical to SEQ ID NO: 261668
  chr10:6372696-6372730
  hypo

SEQ ID NO: 312244 - DNA, 207 bp, Homo sapiens; identical to SEQ ID NO: 213423
  chr10:6531176-6531383
  hypo

SEQ ID NO: 312245 - DNA, 82 bp, Homo sapiens; identical to SEQ ID NO: 261670
  chr10:6547162-6547244
  hypo

SEQ ID NO: 312246 - DNA, 218 bp, Homo sapiens; identical to SEQ ID NO: 261671
  chr10:6578876-6579094
  hypo

SEQ ID NO: 312247 - DNA, 680 bp, Homo sapiens; identical to SEQ ID NO: 286911
  chr10:6621840-6622520
  hypo

SEQ ID NO: 312248 - DNA, 101 bp, Homo sapiens; identical to SEQ ID NO: 286912
  chr10:6622706-6622807
  hypo

SEQ ID NO: 312249 - DNA, 44 bp, Homo sapiens; identical to SEQ ID NO: 213424
  chr10:6647894-6647938
  hypo

SEQ ID NO: 312250 - DNA, 143 bp, Homo sapiens; identical to SEQ ID NO: 261673
  chr10:6664620-6664763
  hypo

SEQ ID NO: 312251 - DNA, 195 bp, Homo sapiens; identical to SEQ ID NO: 261674
  chr10:6852535-6852730
  hypo

SEQ ID NO: 312252 - DNA, 89 bp, Homo sapiens; identical to SEQ ID NO: 261675
  chr10:6864689-6864778
  hypo

SEQ ID NO: 312253 - DNA, 103 bp, Homo sapiens; identical to SEQ ID NO: 261676
  chr10:6956297-6956400
  hypo

SEQ ID NO: 312254 - DNA, 70 bp, Homo sapiens; identical to SEQ ID NO: 261677
  chr10:6975463-6975533
  hypo

SEQ ID NO: 312255 - DNA, 42 bp, Homo sapiens; identical to SEQ ID NO: 261679
  chr10:7083317-7083359
  hypo

SEQ ID NO: 312256 - DNA, 82 bp, Homo sapiens; identical to SEQ ID NO: 261680
  chr10:7138552-7138634
  hypo

SEQ ID NO: 312257 - DNA, 37 bp, Homo sapiens
  chr10:7156189-7156226
  hypo
tgacacatgctctgaatggccgctaggcgagcactga

SEQ ID NO: 312258 - DNA, 145 bp, Homo sapiens; identical to SEQ ID NO: 261683
  chr10:7175436-7175581
  hypo

SEQ ID NO: 312259 - DNA, 90 bp, Homo sapiens; identical to SEQ ID NO: 213425
  chr10:7202879-7202969
  hypo

SEQ ID NO: 312260 - DNA, 39 bp, Homo sapiens; identical to SEQ ID NO: 213426
  chr10:7203127-7203166
  hypo

SEQ ID NO: 312261 - DNA, 264 bp, Homo sapiens; identical to SEQ ID NO: 261685
  chr10:7204511-7204775
  hypo

SEQ ID NO: 312262 - DNA, 296 bp, Homo sapiens
  chr10:7205787-7206083
  hypo
acttgatggcaggccccagcttcagctccatgcactcctgcaccgtcggaagggtcagaagcaggagtgcttggccgtcaatatcctgcaggaaaagaaaggcaggttagagaaggggcagtgtgcactggggtacacagatgcgtcacagcaggctccagtccggggccaaacatgacaacaggatgctcttgtttcattcaattcaggggattgttggtagagataccagcccggcttgatgactgtctaatctttgtgttactaaaatctttttgtagccgggcacagtggct

SEQ ID NO: 312263 - DNA, 84 bp, Homo sapiens; identical to SEQ ID NO: 261687
  chr10:7209416-7209500
  hypo

SEQ ID NO: 312264 - DNA, 48 bp, Homo sapiens; identical to SEQ ID NO: 213427
  chr10:7212697-7212745
  hypo

SEQ ID NO: 312265 - DNA, 121 bp, Homo sapiens; identical to SEQ ID NO: 213428
  chr10:7214457-7214578
  hypo

SEQ ID NO: 312266 - DNA, 95 bp, Homo sapiens; identical to SEQ ID NO: 261692
  chr10:7235749-7235844
  hypo

SEQ ID NO: 312267 - DNA, 318 bp, Homo sapiens
  chr10:7236245-7236563
  hypo
ccccactcaactctaacacccatcaagtgagtagagccatgcattaaagaccacttttgccagaaacttcgtcctctcttataaagcggcccactcagacagaacccagaactggactctgcagcctgcactgagccttgccaaagaccatgtctgcatccacaccccgagacgtctatttctggcagaacagatcagggtgaaccgctctcactgcacatctcctacacataaagtgttcaagttcctaataacaccgatggccaggaaaagcaatgcactctgtctttacttccattacctcgttctctttaacta

SEQ ID NO: 312268 - DNA, 138 bp, Homo sapiens; identical to SEQ ID NO: 261694
  chr10:7238964-7239102
  hypo

SEQ ID NO: 312269 - DNA, 39 bp, Homo sapiens; identical to SEQ ID NO: 261695
  chr10:7239512-7239551
  hypo

SEQ ID NO: 312270 - DNA, 177 bp, Homo sapiens; identical to SEQ ID NO: 261696
  chr10:7239774-7239951
  hypo

SEQ ID NO: 312271 - DNA, 87 bp, Homo sapiens; identical to SEQ ID NO: 261697
  chr10:7246836-7246923
  hypo

SEQ ID NO: 312272 - DNA, 214 bp, Homo sapiens; identical to SEQ ID NO: 213429
  chr10:7252611-7252825
  hypo

SEQ ID NO: 312273 - DNA, 157 bp, Homo sapiens; identical to SEQ ID NO: 261699
  chr10:7256061-7256218
  hypo

SEQ ID NO: 312274 - DNA, 195 bp, Homo sapiens; identical to SEQ ID NO: 261700
  chr10:7262331-7262526
  hypo

SEQ ID NO: 312275 - DNA, 152 bp, Homo sapiens; identical to SEQ ID NO: 213430
  chr10:7290536-7290688
  hypo

SEQ ID NO: 312276 - DNA, 105 bp, Homo sapiens; identical to SEQ ID NO: 261704
  chr10:7304466-7304571
  hypo

SEQ ID NO: 312277 - DNA, 168 bp, Homo sapiens; identical to SEQ ID NO: 261705
  chr10:7317009-7317177
  hypo

SEQ ID NO: 312278 - DNA, 100 bp, Homo sapiens; identical to SEQ ID NO: 261706
  chr10:7330644-7330744
  hypo

SEQ ID NO: 312279 - DNA, 42 bp, Homo sapiens; identical to SEQ ID NO: 213431
  chr10:7352682-7352724
  hypo

SEQ ID NO: 312280 - DNA, 78 bp, Homo sapiens; identical to SEQ ID NO: 261708
  chr10:7367242-7367320
  hypo

SEQ ID NO: 312281 - DNA, 133 bp, Homo sapiens; identical to SEQ ID NO: 261709
  chr10:7381915-7382048
  hypo

SEQ ID NO: 312282 - DNA, 231 bp, Homo sapiens
  chr10:7401000-7401231
  hypo
gacggtcagtggcacgaagaagagtgaacaggtggaggtggagggggaataaagggaggtcaacgaggcagggtcaagcctggagcagccagacatcctgcaggccgagctgtgcccgggggccttgtctgtgtaaagctgccacggggcttcccatacaagtgaaacccaaggatcattcaggacgttcaaaggtccacccagagcaggaacggggccagatgggagctg

SEQ ID NO: 312283 - DNA, 55 bp, Homo sapiens; identical to SEQ ID NO: 213432
  chr10:7409503-7409558
  hypo

SEQ ID NO: 312284 - DNA, 172 bp, Homo sapiens; identical to SEQ ID NO: 213433
  chr10:7409632-7409804
  hypo

SEQ ID NO: 312285 - DNA, 195 bp, Homo sapiens; identical to SEQ ID NO: 261712
  chr10:7412692-7412887
  hypo

SEQ ID NO: 312286 - DNA, 82 bp, Homo sapiens; identical to SEQ ID NO: 261713
  chr10:7415788-7415870
  hypo

SEQ ID NO: 312287 - DNA, 72 bp, Homo sapiens
  chr10:7424554-7424626
  hypo
taagacactccccccgccttgaagctatgtagcagcaacctccaccccccacacaacctcagcatcccacgc

SEQ ID NO: 312288 - DNA, 99 bp, Homo sapiens
  chr10:7424687-7424786
  hypo
ctgttaccaaaaccagttaaagtatcgatgtttgtcaataatgtgctttttcacaaagcagaaatggagacaagactttccctacgatagcactgctat

SEQ ID NO: 312289 - DNA, 138 bp, Homo sapiens; identical to SEQ ID NO: 261715
  chr10:7426168-7426306
  hypo

SEQ ID NO: 312290 - DNA, 131 bp, Homo sapiens
  chr10:7436209-7436340
  hypo
ttttttatatcagagttacatctgcatataattttgaaagccaaatattctctataaggcctgtgcgtcgatgcccacccctaaaaatcaaacccagtcatctcctgcccttctcccgcgtccccatctcc

SEQ ID NO: 312291 - DNA, 36 bp, Homo sapiens; identical to SEQ ID NO: 261717
  chr10:7442791-7442827
  hypo

SEQ ID NO: 312292 - DNA, 60 bp, Homo sapiens; identical to SEQ ID NO: 201967
  chr10:7453036-7453096
  hypo

SEQ ID NO: 312293 - DNA, 38 bp, Homo sapiens; identical to SEQ ID NO: 261718
  chr10:7471887-7471925
  hypo

SEQ ID NO: 312294 - DNA, 56 bp, Homo sapiens; identical to SEQ ID NO: 261719
  chr10:7498707-7498763
  hypo

SEQ ID NO: 312295 - DNA, 51 bp, Homo sapiens; identical to SEQ ID NO: 213435
  chr10:7583452-7583503
  hypo

SEQ ID NO: 312296 - DNA, 88 bp, Homo sapiens
  chr10:7608166-7608254
  hypo
cccagctccccaccaccacactctggttgcaggggagcaccagtctgtccccaccatccaagatgactctgctcggtgtgatctcgag

SEQ ID NO: 312297 - DNA, 331 bp, Homo sapiens; identical to SEQ ID NO: 213436
  chr10:7618357-7618688
  hypo

SEQ ID NO: 312298 - DNA, 41 bp, Homo sapiens; identical to SEQ ID NO: 213437
  chr10:7679269-7679310
  hypo

SEQ ID NO: 312299 - DNA, 171 bp, Homo sapiens; identical to SEQ ID NO: 213438
  chr10:7780611-7780782
  hypo

SEQ ID NO: 312300 - DNA, 91 bp, Homo sapiens; identical to SEQ ID NO: 261725
  chr10:7790290-7790381
  hypo

SEQ ID NO: 312301 - DNA, 34 bp, Homo sapiens; identical to SEQ ID NO: 261726
  chr10:7852584-7852618
  hypo

SEQ ID NO: 312302 - DNA, 184 bp, Homo sapiens; identical to SEQ ID NO: 213439
  chr10:7871223-7871407
  hypo

SEQ ID NO: 312303 - DNA, 202 bp, Homo sapiens; identical to SEQ ID NO: 261728
  chr10:7945962-7946164
  hypo

SEQ ID NO: 312304 - DNA, 126 bp, Homo sapiens; identical to SEQ ID NO: 213440
  chr10:7985034-7985160
  hypo

SEQ ID NO: 312305 - DNA, 113 bp, Homo sapiens; identical to SEQ ID NO: 213441
  chr10:7985194-7985307
  hypo

SEQ ID NO: 312306 - DNA, 32 bp, Homo sapiens; identical to SEQ ID NO: 261730
  chr10:8024999-8025031
  hypo

SEQ ID NO: 312307 - DNA, 197 bp, Homo sapiens; identical to SEQ ID NO: 213442
  chr10:8055484-8055681
  hypo

SEQ ID NO: 312308 - DNA, 107 bp, Homo sapiens; identical to SEQ ID NO: 213443
  chr10:8055764-8055871
  hypo

SEQ ID NO: 312309 - DNA, 131 bp, Homo sapiens; identical to SEQ ID NO: 286920
  chr10:8075799-8075930
  hypo

SEQ ID NO: 312310 - DNA, 51 bp, Homo sapiens; identical to SEQ ID NO: 286936
  chr10:8097537-8097588
  hypo

SEQ ID NO: 312311 - DNA, 42 bp, Homo sapiens; identical to SEQ ID NO: 261732
  chr10:8124885-8124927
  hypo

SEQ ID NO: 312312 - DNA, 122 bp, Homo sapiens; identical to SEQ ID NO: 261733
  chr10:8192083-8192205
  hypo

SEQ ID NO: 312313 - DNA, 174 bp, Homo sapiens; identical to SEQ ID NO: 261734
  chr10:8203924-8204098
  hypo

SEQ ID NO: 312314 - DNA, 48 bp, Homo sapiens
  chr10:8556148-8556196
  hypo
gggaccggctgatgttccggttcatctcggagatctcagtctttgtac

SEQ ID NO: 312315 - DNA, 93 bp, Homo sapiens; identical to SEQ ID NO: 261736
  chr10:9043112-9043205
  hypo

SEQ ID NO: 312316 - DNA, 43 bp, Homo sapiens; identical to SEQ ID NO: 261737
  chr10:9141899-9141942
  hypo

SEQ ID NO: 312317 - DNA, 444 bp, Homo sapiens; identical to SEQ ID NO: 261738
  chr10:9919835-9920279
  hypo

SEQ ID NO: 312318 - DNA, 82 bp, Homo sapiens; identical to SEQ ID NO: 261739
  chr10:10661818-10661900
  hypo

SEQ ID NO: 312319 - DNA, 42 bp, Homo sapiens; identical to SEQ ID NO: 261740
  chr10:10964610-10964652
  hypo

SEQ ID NO: 312320 - DNA, 212 bp, Homo sapiens; identical to SEQ ID NO: 164809
  chr10:10965181-10965393
  hypo

SEQ ID NO: 312321 - DNA, 42 bp, Homo sapiens; identical to SEQ ID NO: 261742
  chr10:10979086-10979128
  hypo

SEQ ID NO: 312322 - DNA, 63 bp, Homo sapiens; identical to SEQ ID NO: 201978
  chr10:11060746-11060809
  hypo

SEQ ID NO: 312323 - DNA, 32 bp, Homo sapiens; identical to SEQ ID NO: 213445
  chr10:11081058-11081090
  hypo

SEQ ID NO: 312324 - DNA, 41 bp, Homo sapiens; identical to SEQ ID NO: 213446
  chr10:11184680-11184721
  hypo

SEQ ID NO: 312325 - DNA, 311 bp, Homo sapiens; identical to SEQ ID NO: 213447
  chr10:11198992-11199303
  hypo

SEQ ID NO: 312326 - DNA, 176 bp, Homo sapiens; identical to SEQ ID NO: 261746
  chr10:11204046-11204222
  hypo

SEQ ID NO: 312327 - DNA, 395 bp, Homo sapiens; identical to SEQ ID NO: 261747
  chr10:11296956-11297351
  hypo

SEQ ID NO: 312328 - DNA, 221 bp, Homo sapiens; identical to SEQ ID NO: 213449
  chr10:11317672-11317893
  hypo

SEQ ID NO: 312329 - DNA, 106 bp, Homo sapiens; identical to SEQ ID NO: 261749
  chr10:11338049-11338155
  hypo

SEQ ID NO: 312330 - DNA, 200 bp, Homo sapiens; identical to SEQ ID NO: 213450
  chr10:11344065-11344265
  hypo

SEQ ID NO: 312331 - DNA, 252 bp, Homo sapiens; identical to SEQ ID NO: 261751
  chr10:11360789-11361041
  hypo

SEQ ID NO: 312332 - DNA, 121 bp, Homo sapiens
  chr10:11381580-11381701
  hypo
tcccaaatggaagacttgcccgctatgaggtcaagccacctcagatgtcccgtcatctctttctgcacccgctcaggaacattttctatctcgacagaagtttaacatctgagatcagaac

SEQ ID NO: 312333 - DNA, 228 bp, Homo sapiens; identical to SEQ ID NO: 213451
  chr10:11381731-11381959
  hypo

SEQ ID NO: 312334 - DNA, 81 bp, Homo sapiens; identical to SEQ ID NO: 261753
  chr10:11405331-11405412
  hypo

SEQ ID NO: 312335 - DNA, 174 bp, Homo sapiens; identical to SEQ ID NO: 213452
  chr10:11472668-11472842
  hypo

SEQ ID NO: 312336 - DNA, 144 bp, Homo sapiens; identical to SEQ ID NO: 261755
  chr10:11504537-11504681
  hypo

SEQ ID NO: 312337 - DNA, 199 bp, Homo sapiens; identical to SEQ ID NO: 261756
  chr10:11505266-11505465
  hypo

SEQ ID NO: 312338 - DNA, 81 bp, Homo sapiens; identical to SEQ ID NO: 261757
  chr10:11661767-11661848
  hypo

SEQ ID NO: 312339 - DNA, 454 bp, Homo sapiens; identical to SEQ ID NO: 261759
  chr10:11731795-11732249
  hypo

SEQ ID NO: 312340 - DNA, 169 bp, Homo sapiens; identical to SEQ ID NO: 261760
  chr10:11761571-11761740
  hypo

SEQ ID NO: 312341 - DNA, 78 bp, Homo sapiens; identical to SEQ ID NO: 261761
  chr10:11830180-11830258
  hypo

SEQ ID NO: 312342 - DNA, 452 bp, Homo sapiens; identical to SEQ ID NO: 261762
  chr10:11846786-11847238
  hypo

SEQ ID NO: 312343 - DNA, 75 bp, Homo sapiens; identical to SEQ ID NO: 261763
  chr10:11847448-11847523
  hypo

SEQ ID NO: 312344 - DNA, 870 bp, Homo sapiens; identical to SEQ ID NO: 286943
  chr10:11865127-11865997
  hypo

SEQ ID NO: 312345 - DNA, 193 bp, Homo sapiens; identical to SEQ ID NO: 213454
  chr10:11870932-11871125
  hypo

SEQ ID NO: 312346 - DNA, 35 bp, Homo sapiens; identical to SEQ ID NO: 261765
  chr10:11878794-11878829
  hypo

SEQ ID NO: 312347 - DNA, 150 bp, Homo sapiens; identical to SEQ ID NO: 213455
  chr10:11894859-11895009
  hypo

SEQ ID NO: 312348 - DNA, 46 bp, Homo sapiens; identical to SEQ ID NO: 213456
  chr10:11898439-11898485
  hypo

SEQ ID NO: 312349 - DNA, 78 bp, Homo sapiens; identical to SEQ ID NO: 261768
  chr10:11911399-11911477
  hypo

SEQ ID NO: 312350 - DNA, 32 bp, Homo sapiens; identical to SEQ ID NO: 261769
  chr10:11914996-11915028
  hypo

SEQ ID NO: 312351 - DNA, 116 bp, Homo sapiens; identical to SEQ ID NO: 261770
  chr10:11920973-11921089
  hypo

SEQ ID NO: 312352 - DNA, 151 bp, Homo sapiens; identical to SEQ ID NO: 261771
  chr10:11923032-11923183
  hypo

SEQ ID NO: 312353 - DNA, 50 bp, Homo sapiens; identical to SEQ ID NO: 261772
  chr10:11941266-11941316
  hypo

SEQ ID NO: 312354 - DNA, 158 bp, Homo sapiens; identical to SEQ ID NO: 261773
  chr10:11952452-11952610
  hypo

SEQ ID NO: 312355 - DNA, 181 bp, Homo sapiens; identical to SEQ ID NO: 261774
  chr10:11972974-11973155
  hypo

SEQ ID NO: 312356 - DNA, 151 bp, Homo sapiens; identical to SEQ ID NO: 261775
  chr10:12139550-12139701
  hypo

SEQ ID NO: 312357 - DNA, 61 bp, Homo sapiens; identical to SEQ ID NO: 261776
  chr10:12211464-12211525
  hypo

SEQ ID NO: 312358 - DNA, 44 bp, Homo sapiens; identical to SEQ ID NO: 261777
  chr10:12308422-12308466
  hypo

SEQ ID NO: 312359 - DNA, 40 bp, Homo sapiens; identical to SEQ ID NO: 261778
  chr10:12309043-12309083
  hypo

SEQ ID NO: 312360 - DNA, 42 bp, Homo sapiens; identical to SEQ ID NO: 261779
  chr10:12346516-12346558
  hypo

SEQ ID NO: 312361 - DNA, 127 bp, Homo sapiens; identical to SEQ ID NO: 286947
  chr10:12390698-12390825
  hypo

SEQ ID NO: 312362 - DNA, 875 bp, Homo sapiens; identical to SEQ ID NO: 201983
  chr10:12390995-12391870
  hypo

SEQ ID NO: 312363 - DNA, 338 bp, Homo sapiens; identical to SEQ ID NO: 201984
  chr10:12392327-12392665
  hypo

SEQ ID NO: 312364 - DNA, 132 bp, Homo sapiens; identical to SEQ ID NO: 261780
  chr10:12460855-12460987
  hypo

SEQ ID NO: 312365 - DNA, 66 bp, Homo sapiens; identical to SEQ ID NO: 261781
  chr10:12485160-12485226
  hypo

SEQ ID NO: 312366 - DNA, 134 bp, Homo sapiens
  chr10:12531842-12531976
  hypo
agctggttctgcagggaccacgggctgatgtccctgcagctgccagacgccccgacacctccgagtctgcattccggcattcagcccgagaggaatgtgttgctggatgtgatgttccctggcttgagggagcg

SEQ ID NO: 312367 - DNA, 245 bp, Homo sapiens; identical to SEQ ID NO: 261784
  chr10:12545239-12545484
  hypo

SEQ ID NO: 312368 - DNA, 147 bp, Homo sapiens; identical to SEQ ID NO: 261785
  chr10:12548783-12548930
  hypo

SEQ ID NO: 312369 - DNA, 59 bp, Homo sapiens; identical to SEQ ID NO: 261786
  chr10:12553847-12553906
  hypo

SEQ ID NO: 312370 - DNA, 117 bp, Homo sapiens; identical to SEQ ID NO: 261787
  chr10:12554254-12554371
  hypo

SEQ ID NO: 312371 - DNA, 76 bp, Homo sapiens; identical to SEQ ID NO: 261788
  chr10:12589996-12590072
  hypo

SEQ ID NO: 312372 - DNA, 54 bp, Homo sapiens; identical to SEQ ID NO: 261789
  chr10:12595203-12595257
  hypo

SEQ ID NO: 312373 - DNA, 37 bp, Homo sapiens; identical to SEQ ID NO: 213460
  chr10:12602247-12602284
  hypo

SEQ ID NO: 312374 - DNA, 57 bp, Homo sapiens; identical to SEQ ID NO: 261791
  chr10:12611335-12611392
  hypo

SEQ ID NO: 312375 - DNA, 42 bp, Homo sapiens; identical to SEQ ID NO: 213461
  chr10:12671580-12671622
  hypo

SEQ ID NO: 312376 - DNA, 177 bp, Homo sapiens; identical to SEQ ID NO: 213462
  chr10:12707812-12707989
  hypo

SEQ ID NO: 312377 - DNA, 181 bp, Homo sapiens; identical to SEQ ID NO: 261794
  chr10:12768863-12769044
  hypo

SEQ ID NO: 312378 - DNA, 398 bp, Homo sapiens; identical to SEQ ID NO: 261795
  chr10:12827568-12827966
  hypo

SEQ ID NO: 312379 - DNA, 284 bp, Homo sapiens; identical to SEQ ID NO: 261796
  chr10:12837375-12837659
  hypo

SEQ ID NO: 312380 - DNA, 42 bp, Homo sapiens; identical to SEQ ID NO: 261797
  chr10:12872606-12872648
  hypo

SEQ ID NO: 312381 - DNA, 90 bp, Homo sapiens; identical to SEQ ID NO: 261798
  chr10:12875520-12875610
  hypo

SEQ ID NO: 312382 - DNA, 95 bp, Homo sapiens; identical to SEQ ID NO: 261799
  chr10:12940456-12940551
  hypo

SEQ ID NO: 312383 - DNA, 71 bp, Homo sapiens; identical to SEQ ID NO: 261800
  chr10:12965605-12965676
  hypo

SEQ ID NO: 312384 - DNA, 34 bp, Homo sapiens; identical to SEQ ID NO: 213463
  chr10:13146884-13146918
  hypo

SEQ ID NO: 312385 - DNA, 37 bp, Homo sapiens; identical to SEQ ID NO: 213464
  chr10:13150491-13150528
  hypo

SEQ ID NO: 312386 - DNA, 201 bp, Homo sapiens; identical to SEQ ID NO: 213465
  chr10:13263527-13263728
  hypo

SEQ ID NO: 312387 - DNA, 241 bp, Homo sapiens; identical to SEQ ID NO: 201985
  chr10:13341387-13341628
  hypo

SEQ ID NO: 312388 - DNA, 32 bp, Homo sapiens
  chr10:13405240-13405272
  hypo
ggaagcacacctccatgcgatgcggtgagggg

SEQ ID NO: 312389 - DNA, 88 bp, Homo sapiens; identical to SEQ ID NO: 261806
  chr10:13451816-13451904
  hypo

SEQ ID NO: 312390 - DNA, 172 bp, Homo sapiens; identical to SEQ ID NO: 261807
  chr10:13480544-13480716
  hypo

SEQ ID NO: 312391 - DNA, 35 bp, Homo sapiens; identical to SEQ ID NO: 261808
  chr10:13516622-13516657
  hypo

SEQ ID NO: 312392 - DNA, 97 bp, Homo sapiens; identical to SEQ ID NO: 261809
  chr10:13630041-13630138
  hypo

SEQ ID NO: 312393 - DNA, 132 bp, Homo sapiens; identical to SEQ ID NO: 261810
  chr10:13688016-13688148
  hypo

SEQ ID NO: 312394 - DNA, 170 bp, Homo sapiens; identical to SEQ ID NO: 213467
  chr10:13692405-13692575
  hypo

SEQ ID NO: 312395 - DNA, 93 bp, Homo sapiens; identical to SEQ ID NO: 213468
  chr10:13711293-13711386
  hypo

SEQ ID NO: 312396 - DNA, 78 bp, Homo sapiens; identical to SEQ ID NO: 261814
  chr10:13725168-13725246
  hypo

SEQ ID NO: 312397 - DNA, 263 bp, Homo sapiens; identical to SEQ ID NO: 261815
  chr10:13735188-13735451
  hypo

SEQ ID NO: 312398 - DNA, 85 bp, Homo sapiens; identical to SEQ ID NO: 261816
  chr10:13737448-13737533
  hypo

SEQ ID NO: 312399 - DNA, 95 bp, Homo sapiens; identical to SEQ ID NO: 213470
  chr10:13739454-13739549
  hypo

SEQ ID NO: 312400 - DNA, 333 bp, Homo sapiens; identical to SEQ ID NO: 261818
  chr10:13769492-13769825
  hypo

SEQ ID NO: 312401 - DNA, 32 bp, Homo sapiens; identical to SEQ ID NO: 261819
  chr10:13769885-13769917
  hypo

SEQ ID NO: 312402 - DNA, 289 bp, Homo sapiens; identical to SEQ ID NO: 213471
  chr10:13771117-13771406
  hypo

SEQ ID NO: 312403 - DNA, 141 bp, Homo sapiens; identical to SEQ ID NO: 213472
  chr10:13771447-13771588
  hypo

SEQ ID NO: 312404 - DNA, 56 bp, Homo sapiens; identical to SEQ ID NO: 261821
  chr10:13776212-13776268
  hypo

SEQ ID NO: 312405 - DNA, 190 bp, Homo sapiens; identical to SEQ ID NO: 201987
  chr10:13933246-13933436
  hypo

SEQ ID NO: 312406 - DNA, 138 bp, Homo sapiens; identical to SEQ ID NO: 261822
  chr10:14195996-14196134
  hypo

SEQ ID NO: 312407 - DNA, 353 bp, Homo sapiens; identical to SEQ ID NO: 261823
  chr10:14575212-14575565
  hypo

SEQ ID NO: 312408 - DNA, 160 bp, Homo sapiens; identical to SEQ ID NO: 213474
  chr10:14626301-14626461
  hypo

SEQ ID NO: 312409 - DNA, 71 bp, Homo sapiens; identical to SEQ ID NO: 223767
  chr10:14646262-14646333
  hypo

SEQ ID NO: 312410 - DNA, 100 bp, Homo sapiens; identical to SEQ ID NO: 223768
  chr10:14646654-14646754
  hypo

SEQ ID NO: 312411 - DNA, 435 bp, Homo sapiens; identical to SEQ ID NO: 213475
  chr10:14816084-14816519
  hypo

SEQ ID NO: 312412 - DNA, 74 bp, Homo sapiens; identical to SEQ ID NO: 261826
  chr10:14818702-14818776
  hypo

SEQ ID NO: 312413 - DNA, 36 bp, Homo sapiens; identical to SEQ ID NO: 213476
  chr10:14851282-14851318
  hypo

SEQ ID NO: 312414 - DNA, 34 bp, Homo sapiens; identical to SEQ ID NO: 261828
  chr10:14947696-14947730
  hypo

SEQ ID NO: 312415 - DNA, 36 bp, Homo sapiens; identical to SEQ ID NO: 213477
  chr10:14966552-14966588
  hypo

SEQ ID NO: 312416 - DNA, 167 bp, Homo sapiens; identical to SEQ ID NO: 261831
  chr10:14979023-14979190
  hypo

SEQ ID NO: 312417 - DNA, 142 bp, Homo sapiens
  chr10:15000459-15000601
  hypo
gcttgtatttaacaacgagctcagaaaaattcctaaaaatttaattactgagtctccagagctctaatgagctggctccagcacacaattgctcctttctttcattcaacaatttgacaagtcctgatggctctacattcaa

SEQ ID NO: 312418 - DNA, 81 bp, Homo sapiens; identical to SEQ ID NO: 261833
  chr10:15009625-15009706
  hypo

SEQ ID NO: 312419 - DNA, 101 bp, Homo sapiens; identical to SEQ ID NO: 261834
  chr10:15022595-15022696
  hypo

SEQ ID NO: 312420 - DNA, 167 bp, Homo sapiens; identical to SEQ ID NO: 261836
  chr10:15154756-15154923
  hypo

SEQ ID NO: 312421 - DNA, 246 bp, Homo sapiens; identical to SEQ ID NO: 261837
  chr10:15174784-15175030
  hypo

SEQ ID NO: 312422 - DNA, 205 bp, Homo sapiens; identical to SEQ ID NO: 261838
  chr10:15254633-15254838
  hypo

SEQ ID NO: 312423 - DNA, 203 bp, Homo sapiens; identical to SEQ ID NO: 261839
  chr10:15255041-15255244
  hypo

SEQ ID NO: 312424 - DNA, 35 bp, Homo sapiens; identical to SEQ ID NO: 261840
  chr10:15261860-15261895
  hypo

SEQ ID NO: 312425 - DNA, 291 bp, Homo sapiens; identical to SEQ ID NO: 261841
  chr10:15264100-15264391
  hypo

SEQ ID NO: 312426 - DNA, 83 bp, Homo sapiens; identical to SEQ ID NO: 261842
  chr10:15273618-15273701
  hypo

SEQ ID NO: 312427 - DNA, 60 bp, Homo sapiens; identical to SEQ ID NO: 213478
  chr10:15345843-15345903
  hypo

SEQ ID NO: 312428 - DNA, 40 bp, Homo sapiens; identical to SEQ ID NO: 261844
  chr10:15355003-15355043
  hypo

SEQ ID NO: 312429 - DNA, 285 bp, Homo sapiens; identical to SEQ ID NO: 261845
  chr10:15356716-15357001
  hypo

SEQ ID NO: 312430 - DNA, 44 bp, Homo sapiens; identical to SEQ ID NO: 213479
  chr10:15484068-15484112
  hypo

SEQ ID NO: 312431 - DNA, 261 bp, Homo sapiens
  chr10:15484142-15484403
  hypo
tttctagcgtcatggctccacactgcgtttccttatctgggaatcccagccttactgaactttcagcttctgcagccagccacgctctttctggcctccggctttgctgtgtgctgtttctccagcctggcgatttgctctgtccccagcccctgcactcctttacctgatctgctccgattgatcctgcagtcctccgcggctgagtcacttccttctgcagggaagccgtcctgggttctcctccgaggactgtctcag

SEQ ID NO: 312432 - DNA, 178 bp, Homo sapiens; identical to SEQ ID NO: 286964
  chr10:15762154-15762332
  hypo

SEQ ID NO: 312433 - DNA, 171 bp, Homo sapiens; identical to SEQ ID NO: 261847
  chr10:15828305-15828476
  hypo

SEQ ID NO: 312434 - DNA, 167 bp, Homo sapiens; identical to SEQ ID NO: 213482
  chr10:16715632-16715799
  hypo

SEQ ID NO: 312435 - DNA, 342 bp, Homo sapiens; identical to SEQ ID NO: 261849
  chr10:16716463-16716805
  hypo

SEQ ID NO: 312436 - DNA, 322 bp, Homo sapiens; identical to SEQ ID NO: 213483
  chr10:16769206-16769528
  hypo

SEQ ID NO: 312437 - DNA, 108 bp, Homo sapiens; identical to SEQ ID NO: 261851
  chr10:16806477-16806585
  hypo

SEQ ID NO: 312438 - DNA, 47 bp, Homo sapiens; identical to SEQ ID NO: 261852
  chr10:16866978-16867025
  hypo

SEQ ID NO: 312439 - DNA, 32 bp, Homo sapiens; identical to SEQ ID NO: 261853
  chr10:16915427-16915459
  hypo

SEQ ID NO: 312440 - DNA, 50 bp, Homo sapiens; identical to SEQ ID NO: 261854
  chr10:16916365-16916415
  hypo

SEQ ID NO: 312441 - DNA, 97 bp, Homo sapiens; identical to SEQ ID NO: 261855
  chr10:16955825-16955922
  hypo

SEQ ID NO: 312442 - DNA, 62 bp, Homo sapiens; identical to SEQ ID NO: 261856
  chr10:16990540-16990602
  hypo

SEQ ID NO: 312443 - DNA, 149 bp, Homo sapiens; identical to SEQ ID NO: 213484
  chr10:17157465-17157614
  hypo

SEQ ID NO: 312444 - DNA, 125 bp, Homo sapiens; identical to SEQ ID NO: 261858
  chr10:17157644-17157769
  hypo

SEQ ID NO: 312445 - DNA, 208 bp, Homo sapiens; identical to SEQ ID NO: 201993
  chr10:17270445-17270653
  hypo

SEQ ID NO: 312446 - DNA, 32 bp, Homo sapiens; identical to SEQ ID NO: 261859
  chr10:17331810-17331842
  hypo

SEQ ID NO: 312447 - DNA, 63 bp, Homo sapiens
  chr10:17347073-17347136
  hypo
cctatgatagcggtcgtaatattcagagggagatagggtgatagtacccctaatgtcgcaggg

SEQ ID NO: 312448 - DNA, 286 bp, Homo sapiens
  chr10:17347174-17347460
  hypo
aggggggacagaatgatagtaccccccatatcacatgtggcgttttcactcccctgtgattccggatattatttccaggaagggacaggatgatagtgaccccaatgtcgcagagagtttgtactcccctttatgatactggtcaaaaaacccagcggggggaagattcatagtacccccgatatcgcagggcatgtatacacccccctatgatagcggtcgtaatatccaggaagagaaaggatgatagtacccctatgtcgcagggggtgtgtacactcccctg

SEQ ID NO: 312449 - DNA, 39 bp, Homo sapiens; identical to SEQ ID NO: 261861
  chr10:17378259-17378298
  hypo

SEQ ID NO: 312450 - DNA, 272 bp, Homo sapiens; identical to SEQ ID NO: 201995
  chr10:17495120-17495392
  hypo

SEQ ID NO: 312451 - DNA, 322 bp, Homo sapiens; identical to SEQ ID NO: 201996
  chr10:17495680-17496002
  hypo

SEQ ID NO: 312452 - DNA, 113 bp, Homo sapiens; identical to SEQ ID NO: 261863
  chr10:17507084-17507197
  hypo

SEQ ID NO: 312453 - DNA, 81 bp, Homo sapiens; identical to SEQ ID NO: 213489
  chr10:17509666-17509747
  hypo

SEQ ID NO: 312454 - DNA, 44 bp, Homo sapiens; identical to SEQ ID NO: 261865
  chr10:17512861-17512905
  hypo

SEQ ID NO: 312455 - DNA, 38 bp, Homo sapiens; identical to SEQ ID NO: 261866
  chr10:17608667-17608705
  hypo

SEQ ID NO: 312456 - DNA, 190 bp, Homo sapiens; identical to SEQ ID NO: 261867
  chr10:18579867-18580057
  hypo

SEQ ID NO: 312457 - DNA, 204 bp, Homo sapiens; identical to SEQ ID NO: 261868
  chr10:18914961-18915165
  hypo

SEQ ID NO: 312458 - DNA, 146 bp, Homo sapiens; identical to SEQ ID NO: 261869
  chr10:20538375-20538521
  hypo

SEQ ID NO: 312459 - DNA, 34 bp, Homo sapiens; identical to SEQ ID NO: 261870
  chr10:21606054-21606088
  hypo

SEQ ID NO: 312460 - DNA, 38 bp, Homo sapiens; identical to SEQ ID NO: 261871
  chr10:21623890-21623928
  hypo

SEQ ID NO: 312461 - DNA, 203 bp, Homo sapiens; identical to SEQ ID NO: 202007
  chr10:21785547-21785750
  hypo

SEQ ID NO: 312462 - DNA, 49 bp, Homo sapiens; identical to SEQ ID NO: 286985
  chr10:21785786-21785835
  hypo

SEQ ID NO: 312463 - DNA, 465 bp, Homo sapiens; identical to SEQ ID NO: 213492
  chr10:21797635-21798100
  hypo

SEQ ID NO: 312464 - DNA, 153 bp, Homo sapiens; identical to SEQ ID NO: 223775
  chr10:21805907-21806060
  hypo

SEQ ID NO: 312465 - DNA, 318 bp, Homo sapiens; identical to SEQ ID NO: 286988
  chr10:21814235-21814553
  hypo

SEQ ID NO: 312466 - DNA, 886 bp, Homo sapiens; identical to SEQ ID NO: 223777
  chr10:21815634-21816520
  hypo

SEQ ID NO: 312467 - DNA, 142 bp, Homo sapiens; identical to SEQ ID NO: 223778
  chr10:21824264-21824406
  hypo

SEQ ID NO: 312468 - DNA, 168 bp, Homo sapiens; identical to SEQ ID NO: 213493
  chr10:21915224-21915392
  hypo

SEQ ID NO: 312469 - DNA, 82 bp, Homo sapiens; identical to SEQ ID NO: 261874
  chr10:21983925-21984007
  hypo

SEQ ID NO: 312470 - DNA, 60 bp, Homo sapiens; identical to SEQ ID NO: 261875
  chr10:22004067-22004127
  hypo

SEQ ID NO: 312471 - DNA, 240 bp, Homo sapiens; identical to SEQ ID NO: 286993
  chr10:22032716-22032956
  hypo

SEQ ID NO: 312472 - DNA, 101 bp, Homo sapiens
  chr10:22033349-22033450
  hypo
ctggcttcctggaggctccgggacgtcgacctcgtcatcctgggttgctgccctgcagggccctggcagctgctggttcacatgtgcgccttgtgctctgg

SEQ ID NO: 312473 - DNA, 301 bp, Homo sapiens; identical to SEQ ID NO: 261878
  chr10:22039219-22039520
  hypo

SEQ ID NO: 312474 - DNA, 34 bp, Homo sapiens
  chr10:22040719-22040753
  hypo
aggcattctaaggccgtgcacggggagctcttgc

SEQ ID NO: 312475 - DNA, 113 bp, Homo sapiens
  chr10:22040783-22040896
  hypo
catcccaaacattcctgaccctctgtgggcgggggggggggggggggcgggggcagaacccccattaaggataagtaagacaacaggtgagtgtgcttcgaaaactggcgcta

SEQ ID NO: 312476 - DNA, 312 bp, Homo sapiens; identical to SEQ ID NO: 213494
  chr10:22042721-22043033
  hypo

SEQ ID NO: 312477 - DNA, 105 bp, Homo sapiens
  chr10:22047231-22047336
  hypo
tgttcctggttcctcgactaacaatctagctacagggaaagaagcctcaagagacactgtgttaggatcacaccctggggctctctgcagcgcctcatggccaga

SEQ ID NO: 312478 - DNA, 163 bp, Homo sapiens; identical to SEQ ID NO: 261882
  chr10:22048281-22048444
  hypo

SEQ ID NO: 312479 - DNA, 131 bp, Homo sapiens; identical to SEQ ID NO: 261883
  chr10:22099945-22100076
  hypo

SEQ ID NO: 312480 - DNA, 36 bp, Homo sapiens; identical to SEQ ID NO: 261884
  chr10:22477766-22477802
  hypo

SEQ ID NO: 312481 - DNA, 36 bp, Homo sapiens; identical to SEQ ID NO: 261885
  chr10:22478102-22478138
  hypo

SEQ ID NO: 312482 - DNA, 77 bp, Homo sapiens; identical to SEQ ID NO: 202012
  chr10:22540630-22540707
  hypo

SEQ ID NO: 312483 - DNA, 966 bp, Homo sapiens; identical to SEQ ID NO: 287001
  chr10:22614079-22615045
  hypo

SEQ ID NO: 312484 - DNA, 102 bp, Homo sapiens
  chr10:22833844-22833946
  hypo
agtctgggtgtttagggcaccgcacactcctccccagtgacacggggcctcgctgcacattcattttgttggagtatttgagcgacttctctctttcccaag

SEQ ID NO: 312485 - DNA, 91 bp, Homo sapiens
  chr10:22834010-22834101
  hypo
agagggctcgggaaagtattcggcacttgttggacaagtgaatgggatgcttgttacttcttccctatccgtcccaactctccctaattct

SEQ ID NO: 312486 - DNA, 291 bp, Homo sapiens; identical to SEQ ID NO: 261888
  chr10:22849147-22849438
  hypo

SEQ ID NO: 312487 - DNA, 135 bp, Homo sapiens; identical to SEQ ID NO: 261889
  chr10:22849866-22850001
  hypo

SEQ ID NO: 312488 - DNA, 163 bp, Homo sapiens; identical to SEQ ID NO: 213496
  chr10:22869773-22869936
  hypo

SEQ ID NO: 312489 - DNA, 103 bp, Homo sapiens; identical to SEQ ID NO: 261891
  chr10:22883124-22883227
  hypo

SEQ ID NO: 312490 - DNA, 235 bp, Homo sapiens; identical to SEQ ID NO: 261892
  chr10:22922576-22922811
  hypo

SEQ ID NO: 312491 - DNA, 214 bp, Homo sapiens; identical to SEQ ID NO: 287005
  chr10:23001984-23002198
  hypo

SEQ ID NO: 312492 - DNA, 301 bp, Homo sapiens; identical to SEQ ID NO: 287006
  chr10:23002228-23002529
  hypo

SEQ ID NO: 312493 - DNA, 161 bp, Homo sapiens; identical to SEQ ID NO: 261893
  chr10:23294127-23294288
  hypo

SEQ ID NO: 312494 - DNA, 77 bp, Homo sapiens; identical to SEQ ID NO: 261894
  chr10:24839342-24839419
  hypo

SEQ ID NO: 312495 - DNA, 223 bp, Homo sapiens; identical to SEQ ID NO: 261895
  chr10:24841855-24842078
  hypo

SEQ ID NO: 312496 - DNA, 264 bp, Homo sapiens; identical to SEQ ID NO: 213499
  chr10:24863017-24863281
  hypo

SEQ ID NO: 312497 - DNA, 87 bp, Homo sapiens; identical to SEQ ID NO: 213500
  chr10:24908462-24908549
  hypo

SEQ ID NO: 312498 - DNA, 37 bp, Homo sapiens; identical to SEQ ID NO: 261898
  chr10:24966120-24966157
  hypo

SEQ ID NO: 312499 - DNA, 96 bp, Homo sapiens; identical to SEQ ID NO: 213501
  chr10:24988619-24988715
  hypo

SEQ ID NO: 312500 - DNA, 241 bp, Homo sapiens; identical to SEQ ID NO: 287011
  chr10:25011170-25011411
  hypo

SEQ ID NO: 312501 - DNA, 164 bp, Homo sapiens; identical to SEQ ID NO: 202016
  chr10:25012546-25012710
  hypo

SEQ ID NO: 312502 - DNA, 33 bp, Homo sapiens; identical to SEQ ID NO: 213503
  chr10:25097337-25097370
  hypo

SEQ ID NO: 312503 - DNA, 112 bp, Homo sapiens; identical to SEQ ID NO: 287016
  chr10:25463329-25463441
  hypo

SEQ ID NO: 312504 - DNA, 627 bp, Homo sapiens; identical to SEQ ID NO: 202018
  chr10:25463893-25464520
  hypo

SEQ ID NO: 312505 - DNA, 33 bp, Homo sapiens; identical to SEQ ID NO: 261902
  chr10:26819343-26819376
  hypo

SEQ ID NO: 312506 - DNA, 157 bp, Homo sapiens; identical to SEQ ID NO: 261903
  chr10:26822792-26822949
  hypo

SEQ ID NO: 312507 - DNA, 289 bp, Homo sapiens; identical to SEQ ID NO: 261904
  chr10:26868625-26868914
  hypo

SEQ ID NO: 312508 - DNA, 36 bp, Homo sapiens; identical to SEQ ID NO: 261905
  chr10:27020722-27020758
  hypo

SEQ ID NO: 312509 - DNA, 275 bp, Homo sapiens; identical to SEQ ID NO: 213505
  chr10:27020878-27021153
  hypo

SEQ ID NO: 312510 - DNA, 89 bp, Homo sapiens; identical to SEQ ID NO: 213506
  chr10:27089296-27089385
  hypo

SEQ ID NO: 312511 - DNA, 36 bp, Homo sapiens; identical to SEQ ID NO: 213507
  chr10:27096989-27097025
  hypo

SEQ ID NO: 312512 - DNA, 77 bp, Homo sapiens; identical to SEQ ID NO: 213508
  chr10:27144551-27144628
  hypo

SEQ ID NO: 312513 - DNA, 42 bp, Homo sapiens; identical to SEQ ID NO: 261910
  chr10:27233078-27233120
  hypo

SEQ ID NO: 312514 - DNA, 281 bp, Homo sapiens; identical to SEQ ID NO: 261911
  chr10:27233410-27233691
  hypo

SEQ ID NO: 312515 - DNA, 102 bp, Homo sapiens; identical to SEQ ID NO: 213510
  chr10:27478219-27478321
  hypo

SEQ ID NO: 312516 - DNA, 82 bp, Homo sapiens; identical to SEQ ID NO: 261913
  chr10:27825968-27826050
  hypo

SEQ ID NO: 312517 - DNA, 31 bp, Homo sapiens; identical to SEQ ID NO: 213511
  chr10:27846958-27846989
  hypo

SEQ ID NO: 312518 - DNA, 60 bp, Homo sapiens; identical to SEQ ID NO: 213512
  chr10:27978843-27978903
  hypo

SEQ ID NO: 312519 - DNA, 74 bp, Homo sapiens; identical to SEQ ID NO: 261917
  chr10:27990194-27990268
  hypo

SEQ ID NO: 312520 - DNA, 43 bp, Homo sapiens; identical to SEQ ID NO: 261918
  chr10:28551685-28551728
  hypo

SEQ ID NO: 312521 - DNA, 42 bp, Homo sapiens; identical to SEQ ID NO: 261919
  chr10:28558917-28558959
  hypo

SEQ ID NO: 312522 - DNA, 59 bp, Homo sapiens; identical to SEQ ID NO: 213513
  chr10:28824511-28824570
  hypo

SEQ ID NO: 312523 - DNA, 87 bp, Homo sapiens; identical to SEQ ID NO: 261921
  chr10:28833066-28833153
  hypo

SEQ ID NO: 312524 - DNA, 420 bp, Homo sapiens; identical to SEQ ID NO: 287037
  chr10:28965881-28966301
  hypo

SEQ ID NO: 312525 - DNA, 239 bp, Homo sapiens; identical to SEQ ID NO: 202029
  chr10:28966598-28966837
  hypo

SEQ ID NO: 312526 - DNA, 172 bp, Homo sapiens; identical to SEQ ID NO: 261922
  chr10:29186603-29186775
  hypo

SEQ ID NO: 312527 - DNA, 79 bp, Homo sapiens; identical to SEQ ID NO: 261923
  chr10:29213404-29213483
  hypo

SEQ ID NO: 312528 - DNA, 76 bp, Homo sapiens; identical to SEQ ID NO: 261924
  chr10:29296565-29296641
  hypo

SEQ ID NO: 312529 - DNA, 86 bp, Homo sapiens; identical to SEQ ID NO: 213516
  chr10:29300155-29300241
  hypo

SEQ ID NO: 312530 - DNA, 228 bp, Homo sapiens; identical to SEQ ID NO: 213517
  chr10:29311385-29311613
  hypo

SEQ ID NO: 312531 - DNA, 367 bp, Homo sapiens; identical to SEQ ID NO: 261927
  chr10:29518368-29518735
  hypo

SEQ ID NO: 312532 - DNA, 117 bp, Homo sapiens; identical to SEQ ID NO: 261928
  chr10:29581546-29581663
  hypo

SEQ ID NO: 312533 - DNA, 80 bp, Homo sapiens; identical to SEQ ID NO: 261929
  chr10:29666997-29667077
  hypo

SEQ ID NO: 312534 - DNA, 78 bp, Homo sapiens; identical to SEQ ID NO: 202031
  chr10:29738055-29738133
  hypo

SEQ ID NO: 312535 - DNA, 107 bp, Homo sapiens; identical to SEQ ID NO: 261930
  chr10:29769273-29769380
  hypo

SEQ ID NO: 312536 - DNA, 45 bp, Homo sapiens; identical to SEQ ID NO: 261931
  chr10:29777545-29777590
  hypo

SEQ ID NO: 312537 - DNA, 171 bp, Homo sapiens; identical to SEQ ID NO: 261932
  chr10:29805522-29805693
  hypo

SEQ ID NO: 312538 - DNA, 145 bp, Homo sapiens; identical to SEQ ID NO: 261933
  chr10:29815841-29815986
  hypo

SEQ ID NO: 312539 - DNA, 158 bp, Homo sapiens; identical to SEQ ID NO: 261934
  chr10:29821666-29821824
  hypo

SEQ ID NO: 312540 - DNA, 39 bp, Homo sapiens; identical to SEQ ID NO: 261935
  chr10:29840087-29840126
  hypo

SEQ ID NO: 312541 - DNA, 35 bp, Homo sapiens; identical to SEQ ID NO: 261936
  chr10:29857037-29857072
  hypo

SEQ ID NO: 312542 - DNA, 207 bp, Homo sapiens; identical to SEQ ID NO: 261937
  chr10:29884472-29884679
  hypo

SEQ ID NO: 312543 - DNA, 734 bp, Homo sapiens; identical to SEQ ID NO: 202032
  chr10:30024793-30025527
  hypo

SEQ ID NO: 312544 - DNA, 43 bp, Homo sapiens; identical to SEQ ID NO: 261938
  chr10:30270177-30270220
  hypo

SEQ ID NO: 312545 - DNA, 47 bp, Homo sapiens; identical to SEQ ID NO: 261939
  chr10:30280769-30280816
  hypo

SEQ ID NO: 312546 - DNA, 119 bp, Homo sapiens; identical to SEQ ID NO: 261940
  chr10:30282371-30282490
  hypo

SEQ ID NO: 312547 - DNA, 240 bp, Homo sapiens; identical to SEQ ID NO: 261941
  chr10:30454426-30454666
  hypo

SEQ ID NO: 312548 - DNA, 96 bp, Homo sapiens; identical to SEQ ID NO: 261942
  chr10:30496158-30496254
  hypo

SEQ ID NO: 312549 - DNA, 34 bp, Homo sapiens; identical to SEQ ID NO: 261943
  chr10:30692599-30692633
  hypo

SEQ ID NO: 312550 - DNA, 178 bp, Homo sapiens; identical to SEQ ID NO: 261944
  chr10:30736711-30736889
  hypo

SEQ ID NO: 312551 - DNA, 81 bp, Homo sapiens; identical to SEQ ID NO: 261945
  chr10:30798127-30798208
  hypo

SEQ ID NO: 312552 - DNA, 34 bp, Homo sapiens; identical to SEQ ID NO: 213520
  chr10:30981747-30981781
  hypo

SEQ ID NO: 312553 - DNA, 287 bp, Homo sapiens; identical to SEQ ID NO: 213521
  chr10:31108014-31108301
  hypo

SEQ ID NO: 312554 - DNA, 84 bp, Homo sapiens; identical to SEQ ID NO: 261948
  chr10:31121497-31121581
  hypo

SEQ ID NO: 312555 - DNA, 106 bp, Homo sapiens; identical to SEQ ID NO: 261949
  chr10:31134747-31134853
  hypo

SEQ ID NO: 312556 - DNA, 42 bp, Homo sapiens; identical to SEQ ID NO: 261950
  chr10:31389890-31389932
  hypo

SEQ ID NO: 312557 - DNA, 803 bp, Homo sapiens; identical to SEQ ID NO: 287053
  chr10:31607941-31608744
  hypo

SEQ ID NO: 312558 - DNA, 252 bp, Homo sapiens; identical to SEQ ID NO: 202037
  chr10:31609416-31609668
  hypo

SEQ ID NO: 312559 - DNA, 106 bp, Homo sapiens; identical to SEQ ID NO: 261951
  chr10:31810654-31810760
  hypo

SEQ ID NO: 312560 - DNA, 186 bp, Homo sapiens; identical to SEQ ID NO: 261953
  chr10:32038297-32038483
  hypo

SEQ ID NO: 312561 - DNA, 33 bp, Homo sapiens; identical to SEQ ID NO: 261954
  chr10:32080305-32080338
  hypo

SEQ ID NO: 312562 - DNA, 155 bp, Homo sapiens; identical to SEQ ID NO: 213524
  chr10:32205149-32205304
  hypo

SEQ ID NO: 312563 - DNA, 36 bp, Homo sapiens; identical to SEQ ID NO: 213525
  chr10:32333609-32333645
  hypo

SEQ ID NO: 312564 - DNA, 33 bp, Homo sapiens; identical to SEQ ID NO: 261959
  chr10:32587053-32587086
  hypo

SEQ ID NO: 312565 - DNA, 40 bp, Homo sapiens; identical to SEQ ID NO: 213526
  chr10:33293520-33293560
  hypo

SEQ ID NO: 312566 - DNA, 104 bp, Homo sapiens; identical to SEQ ID NO: 261962
  chr10:33432805-33432909
  hypo

SEQ ID NO: 312567 - DNA, 43 bp, Homo sapiens; identical to SEQ ID NO: 213527
  chr10:34063092-34063135
  hypo

SEQ ID NO: 312568 - DNA, 47 bp, Homo sapiens; identical to SEQ ID NO: 261964
  chr10:34151694-34151741
  hypo

SEQ ID NO: 312569 - DNA, 182 bp, Homo sapiens; identical to SEQ ID NO: 213528
  chr10:34276837-34277019
  hypo

SEQ ID NO: 312570 - DNA, 171 bp, Homo sapiens; identical to SEQ ID NO: 261966
  chr10:34333800-34333971
  hypo

SEQ ID NO: 312571 - DNA, 76 bp, Homo sapiens; identical to SEQ ID NO: 261967
  chr10:34345647-34345723
  hypo

SEQ ID NO: 312572 - DNA, 160 bp, Homo sapiens; identical to SEQ ID NO: 261968
  chr10:34472412-34472572
  hypo

SEQ ID NO: 312573 - DNA, 40 bp, Homo sapiens; identical to SEQ ID NO: 261969
  chr10:34532753-34532793
  hypo

SEQ ID NO: 312574 - DNA, 167 bp, Homo sapiens; identical to SEQ ID NO: 261970
  chr10:34558597-34558764
  hypo

SEQ ID NO: 312575 - DNA, 78 bp, Homo sapiens; identical to SEQ ID NO: 261971
  chr10:34845266-34845344
  hypo

SEQ ID NO: 312576 - DNA, 77 bp, Homo sapiens; identical to SEQ ID NO: 261972
  chr10:34845584-34845661
  hypo

SEQ ID NO: 312577 - DNA, 93 bp, Homo sapiens; identical to SEQ ID NO: 213529
  chr10:35043969-35044062
  hypo

SEQ ID NO: 312578 - DNA, 544 bp, Homo sapiens; identical to SEQ ID NO: 202046
  chr10:35103534-35104078
  hypo

SEQ ID NO: 312579 - DNA, 340 bp, Homo sapiens; identical to SEQ ID NO: 287067
  chr10:35105213-35105553
  hypo

SEQ ID NO: 312580 - DNA, 116 bp, Homo sapiens
  chr10:35152217-35152333
  hypo
tagcaaaaagttttataagacgttatcaaataacaaatacttaatttcttttctttttttttttttgagacggagtcttgccaccatacctggcctatttacaggcatcctgttta

SEQ ID NO: 312581 - DNA, 31 bp, Homo sapiens; identical to SEQ ID NO: 261975
  chr10:35243813-35243844
  hypo

SEQ ID NO: 312582 - DNA, 81 bp, Homo sapiens; identical to SEQ ID NO: 213531
  chr10:35254596-35254677
  hypo

SEQ ID NO: 312583 - DNA, 35 bp, Homo sapiens; identical to SEQ ID NO: 261977
  chr10:35394058-35394093
  hypo

SEQ ID NO: 312584 - DNA, 122 bp, Homo sapiens; identical to SEQ ID NO: 213532
  chr10:35503793-35503915
  hypo

SEQ ID NO: 312585 - DNA, 34 bp, Homo sapiens; identical to SEQ ID NO: 213533
  chr10:35621534-35621568
  hypo

SEQ ID NO: 312586 - DNA, 33 bp, Homo sapiens; identical to SEQ ID NO: 261980
  chr10:35621808-35621841
  hypo

SEQ ID NO: 312587 - DNA, 198 bp, Homo sapiens; identical to SEQ ID NO: 213534
  chr10:36639323-36639521
  hypo

SEQ ID NO: 312588 - DNA, 42 bp, Homo sapiens; identical to SEQ ID NO: 213535
  chr10:36930096-36930138
  hypo

SEQ ID NO: 312589 - DNA, 34 bp, Homo sapiens; identical to SEQ ID NO: 213536
  chr10:43131976-43132010
  hypo

SEQ ID NO: 312590 - DNA, 300 bp, Homo sapiens; identical to SEQ ID NO: 261984
  chr10:43185746-43186046
  hypo

SEQ ID NO: 312591 - DNA, 285 bp, Homo sapiens; identical to SEQ ID NO: 261985
  chr10:43186655-43186940
  hypo

SEQ ID NO: 312592 - DNA, 175 bp, Homo sapiens
  chr10:43265253-43265428
  hypo
cagcctggctgaggaaagcacaaatcctgctctgcaactgctggctccgtggccttgggaagtcagcaccaactccccagggtttttgaggaggtggtgtgacttagtgactgcaaatgcaaggcgtgccttgccttccactgaacatgcgcagtgttggcgctgttttactgtt

SEQ ID NO: 312593 - DNA, 257 bp, Homo sapiens; identical to SEQ ID NO: 287079
  chr10:43361723-43361980
  hypo

SEQ ID NO: 312594 - DNA, 47 bp, Homo sapiens; identical to SEQ ID NO: 287082
  chr10:43571919-43571966
  hypo

SEQ ID NO: 312595 - DNA, 49 bp, Homo sapiens; identical to SEQ ID NO: 261987
  chr10:43584498-43584547
  hypo

SEQ ID NO: 312596 - DNA, 34 bp, Homo sapiens; identical to SEQ ID NO: 287084
  chr10:43600323-43600357
  hypo

SEQ ID NO: 312597 - DNA, 168 bp, Homo sapiens; identical to SEQ ID NO: 261988
  chr10:43604494-43604662
  hypo

SEQ ID NO: 312598 - DNA, 78 bp, Homo sapiens; identical to SEQ ID NO: 213537
  chr10:43605297-43605375
  hypo

SEQ ID NO: 312599 - DNA, 77 bp, Homo sapiens; identical to SEQ ID NO: 213538
  chr10:43605405-43605482
  hypo

SEQ ID NO: 312600 - DNA, 53 bp, Homo sapiens; identical to SEQ ID NO: 261991
  chr10:43626346-43626399
  hypo

SEQ ID NO: 312601 - DNA, 168 bp, Homo sapiens; identical to SEQ ID NO: 261992
  chr10:43626884-43627052
  hypo

SEQ ID NO: 312602 - DNA, 239 bp, Homo sapiens; identical to SEQ ID NO: 261993
  chr10:43701717-43701956
  hypo

SEQ ID NO: 312603 - DNA, 326 bp, Homo sapiens; identical to SEQ ID NO: 261995
  chr10:43872976-43873302
  hypo

SEQ ID NO: 312604 - DNA, 37 bp, Homo sapiens; identical to SEQ ID NO: 213539
  chr10:43906027-43906064
  hypo

SEQ ID NO: 312605 - DNA, 272 bp, Homo sapiens; identical to SEQ ID NO: 213540
  chr10:44163388-44163660
  hypo

SEQ ID NO: 312606 - DNA, 91 bp, Homo sapiens; identical to SEQ ID NO: 213541
  chr10:44163720-44163811
  hypo

SEQ ID NO: 312607 - DNA, 159 bp, Homo sapiens; identical to SEQ ID NO: 261999
  chr10:44184096-44184255
  hypo

SEQ ID NO: 312608 - DNA, 182 bp, Homo sapiens
  chr10:44197651-44197833
  hypo
aagcaagataagaggtgttttctttctgtccctaccggtgccctctgtctggggcttcttcaacagggtgcatggcaggcggtgttagtgttgaactcatggagacgcctgtggccagcccgcgggggcagttcagaggggcaggaggcactacacaggtggctgggtacaggtgcattccc

SEQ ID NO: 312609 - DNA, 422 bp, Homo sapiens; identical to SEQ ID NO: 262001
  chr10:44198150-44198572
  hypo

SEQ ID NO: 312610 - DNA, 303 bp, Homo sapiens; identical to SEQ ID NO: 213543
  chr10:44874108-44874411
  hypo

SEQ ID NO: 312611 - DNA, 272 bp, Homo sapiens; identical to SEQ ID NO: 262004
  chr10:45566820-45567092
  hypo

SEQ ID NO: 312612 - DNA, 34 bp, Homo sapiens; identical to SEQ ID NO: 262005
  chr10:45986735-45986769
  hypo

SEQ ID NO: 312613 - DNA, 120 bp, Homo sapiens; identical to SEQ ID NO: 213544
  chr10:46009889-46010009
  hypo

SEQ ID NO: 312614 - DNA, 31 bp, Homo sapiens; identical to SEQ ID NO: 213545
  chr10:46195657-46195688
  hypo

SEQ ID NO: 312615 - DNA, 50 bp, Homo sapiens; identical to SEQ ID NO: 202066
  chr10:49514479-49514529
  hypo

SEQ ID NO: 312616 - DNA, 130 bp, Homo sapiens; identical to SEQ ID NO: 213547
  chr10:49541833-49541963
  hypo

SEQ ID NO: 312617 - DNA, 106 bp, Homo sapiens; identical to SEQ ID NO: 213548
  chr10:49541993-49542099
  hypo

SEQ ID NO: 312618 - DNA, 40 bp, Homo sapiens; identical to SEQ ID NO: 213549
  chr10:49592262-49592302
  hypo

SEQ ID NO: 312619 - DNA, 283 bp, Homo sapiens; identical to SEQ ID NO: 262011
  chr10:49658306-49658589
  hypo

SEQ ID NO: 312620 - DNA, 153 bp, Homo sapiens; identical to SEQ ID NO: 262012
  chr10:50099026-50099179
  hypo

SEQ ID NO: 312621 - DNA, 42 bp, Homo sapiens; identical to SEQ ID NO: 262013
  chr10:50158397-50158439
  hypo

SEQ ID NO: 312622 - DNA, 118 bp, Homo sapiens; identical to SEQ ID NO: 262014
  chr10:50178208-50178326
  hypo

SEQ ID NO: 312623 - DNA, 86 bp, Homo sapiens; identical to SEQ ID NO: 213550
  chr10:50340033-50340119
  hypo

SEQ ID NO: 312624 - DNA, 39 bp, Homo sapiens; identical to SEQ ID NO: 213551
  chr10:50340149-50340188
  hypo

SEQ ID NO: 312625 - DNA, 368 bp, Homo sapiens; identical to SEQ ID NO: 262016
  chr10:50530629-50530997
  hypo

SEQ ID NO: 312626 - DNA, 115 bp, Homo sapiens; identical to SEQ ID NO: 202069
  chr10:50606762-50606877
  hypo

SEQ ID NO: 312627 - DNA, 153 bp, Homo sapiens; identical to SEQ ID NO: 262017
  chr10:50680406-50680559
  hypo

SEQ ID NO: 312628 - DNA, 193 bp, Homo sapiens; identical to SEQ ID NO: 213553
  chr10:50724153-50724346
  hypo

SEQ ID NO: 312629 - DNA, 313 bp, Homo sapiens; identical to SEQ ID NO: 262020
  chr10:50854541-50854854
  hypo

SEQ ID NO: 312630 - DNA, 102 bp, Homo sapiens; identical to SEQ ID NO: 262021
  chr10:50948750-50948852
  hypo

SEQ ID NO: 312631 - DNA, 224 bp, Homo sapiens; identical to SEQ ID NO: 287114
  chr10:50969672-50969896
  hypo

SEQ ID NO: 312632 - DNA, 194 bp, Homo sapiens; identical to SEQ ID NO: 202073
  chr10:50970412-50970606
  hypo

SEQ ID NO: 312633 - DNA, 31 bp, Homo sapiens; identical to SEQ ID NO: 202074
  chr10:52177704-52177735
  hypo

SEQ ID NO: 312634 - DNA, 209 bp, Homo sapiens; identical to SEQ ID NO: 213557
  chr10:52180040-52180249
  hypo

SEQ ID NO: 312635 - DNA, 126 bp, Homo sapiens; identical to SEQ ID NO: 213558
  chr10:52369822-52369948
  hypo

SEQ ID NO: 312636 - DNA, 139 bp, Homo sapiens; identical to SEQ ID NO: 287123
  chr10:52833429-52833568
  hypo

SEQ ID NO: 312637 - DNA, 289 bp, Homo sapiens; identical to SEQ ID NO: 213560
  chr10:59866613-59866902
  hypo

SEQ ID NO: 312638 - DNA, 146 bp, Homo sapiens; identical to SEQ ID NO: 213561
  chr10:61552612-61552758
  hypo

SEQ ID NO: 312639 - DNA, 52 bp, Homo sapiens; identical to SEQ ID NO: 262026
  chr10:61552788-61552840
  hypo

SEQ ID NO: 312640 - DNA, 50 bp, Homo sapiens; identical to SEQ ID NO: 262027
  chr10:61652231-61652281
  hypo

SEQ ID NO: 312641 - DNA, 179 bp, Homo sapiens; identical to SEQ ID NO: 262028
  chr10:62662663-62662842
  hypo

SEQ ID NO: 312642 - DNA, 192 bp, Homo sapiens; identical to SEQ ID NO: 287144
  chr10:62703331-62703523
  hypo

SEQ ID NO: 312643 - DNA, 180 bp, Homo sapiens; identical to SEQ ID NO: 202090
  chr10:62703652-62703832
  hypo

SEQ ID NO: 312644 - DNA, 101 bp, Homo sapiens; identical to SEQ ID NO: 287146
  chr10:62704082-62704183
  hypo

SEQ ID NO: 312645 - DNA, 43 bp, Homo sapiens; identical to SEQ ID NO: 213563
  chr10:63669383-63669426
  hypo

SEQ ID NO: 312646 - DNA, 41 bp, Homo sapiens; identical to SEQ ID NO: 213564
  chr10:63757869-63757910
  hypo

SEQ ID NO: 312647 - DNA, 206 bp, Homo sapiens; identical to SEQ ID NO: 223828
  chr10:64028003-64028209
  hypo

SEQ ID NO: 312648 - DNA, 111 bp, Homo sapiens; identical to SEQ ID NO: 262031
  chr10:64914130-64914241
  hypo

SEQ ID NO: 312649 - DNA, 103 bp, Homo sapiens; identical to SEQ ID NO: 213565
  chr10:64945157-64945260
  hypo

SEQ ID NO: 312650 - DNA, 82 bp, Homo sapiens; identical to SEQ ID NO: 262033
  chr10:64997098-64997180
  hypo

SEQ ID NO: 312651 - DNA, 114 bp, Homo sapiens; identical to SEQ ID NO: 262034
  chr10:65186891-65187005
  hypo

SEQ ID NO: 312652 - DNA, 444 bp, Homo sapiens; identical to SEQ ID NO: 287159
  chr10:65225896-65226340
  hypo

SEQ ID NO: 312653 - DNA, 33 bp, Homo sapiens; identical to SEQ ID NO: 262035
  chr10:69253021-69253054
  hypo

SEQ ID NO: 312654 - DNA, 41 bp, Homo sapiens; identical to SEQ ID NO: 262036
  chr10:69578804-69578845
  hypo

SEQ ID NO: 312655 - DNA, 42 bp, Homo sapiens; identical to SEQ ID NO: 262037
  chr10:69606878-69606920
  hypo

SEQ ID NO: 312656 - DNA, 79 bp, Homo sapiens; identical to SEQ ID NO: 262038
  chr10:69646548-69646627
  hypo

SEQ ID NO: 312657 - DNA, 120 bp, Homo sapiens; identical to SEQ ID NO: 213566
  chr10:69853849-69853969
  hypo

SEQ ID NO: 312658 - DNA, 439 bp, Homo sapiens; identical to SEQ ID NO: 213567
  chr10:70184274-70184713
  hypo

SEQ ID NO: 312659 - DNA, 168 bp, Homo sapiens; identical to SEQ ID NO: 213568
  chr10:70218971-70219139
  hypo

SEQ ID NO: 312660 - DNA, 34 bp, Homo sapiens; identical to SEQ ID NO: 213569
  chr10:70266166-70266200
  hypo

SEQ ID NO: 312661 - DNA, 240 bp, Homo sapiens; identical to SEQ ID NO: 262044
  chr10:70288835-70289075
  hypo

SEQ ID NO: 312662 - DNA, 35 bp, Homo sapiens; identical to SEQ ID NO: 262045
  chr10:70472770-70472805
  hypo

SEQ ID NO: 312663 - DNA, 43 bp, Homo sapiens; identical to SEQ ID NO: 262046
  chr10:70478654-70478697
  hypo

SEQ ID NO: 312664 - DNA, 112 bp, Homo sapiens; identical to SEQ ID NO: 213570
  chr10:70483199-70483311
  hypo

SEQ ID NO: 312665 - DNA, 139 bp, Homo sapiens; identical to SEQ ID NO: 262048
  chr10:70530864-70531003
  hypo

SEQ ID NO: 312666 - DNA, 98 bp, Homo sapiens; identical to SEQ ID NO: 262049
  chr10:70992569-70992667
  hypo

SEQ ID NO: 312667 - DNA, 51 bp, Homo sapiens; identical to SEQ ID NO: 262050
  chr10:70993020-70993071
  hypo

SEQ ID NO: 312668 - DNA, 159 bp, Homo sapiens; identical to SEQ ID NO: 262051
  chr10:71007178-71007337
  hypo

SEQ ID NO: 312669 - DNA, 1257 bp, Homo sapiens; identical to SEQ ID NO: 202102
  chr10:71078140-71079397
  hypo

SEQ ID NO: 312670 - DNA, 196 bp, Homo sapiens; identical to SEQ ID NO: 262052
  chr10:71097944-71098140
  hypo

SEQ ID NO: 312671 - DNA, 653 bp, Homo sapiens; identical to SEQ ID NO: 262053
  chr10:71133919-71134572
  hypo

SEQ ID NO: 312672 - DNA, 173 bp, Homo sapiens; identical to SEQ ID NO: 262054
  chr10:71136632-71136805
  hypo

SEQ ID NO: 312673 - DNA, 42 bp, Homo sapiens; identical to SEQ ID NO: 262055
  chr10:71144262-71144304
  hypo

SEQ ID NO: 312674 - DNA, 72 bp, Homo sapiens; identical to SEQ ID NO: 213572
  chr10:71144613-71144685
  hypo

SEQ ID NO: 312675 - DNA, 48 bp, Homo sapiens; identical to SEQ ID NO: 262057
  chr10:71154729-71154777
  hypo

SEQ ID NO: 312676 - DNA, 224 bp, Homo sapiens; identical to SEQ ID NO: 262058
  chr10:71158355-71158579
  hypo

SEQ ID NO: 312677 - DNA, 50 bp, Homo sapiens; identical to SEQ ID NO: 213573
  chr10:71174693-71174743
  hypo

SEQ ID NO: 312678 - DNA, 106 bp, Homo sapiens; identical to SEQ ID NO: 262060
  chr10:71218535-71218641
  hypo

SEQ ID NO: 312679 - DNA, 190 bp, Homo sapiens; identical to SEQ ID NO: 213574
  chr10:71245588-71245778
  hypo

SEQ ID NO: 312680 - DNA, 247 bp, Homo sapiens; identical to SEQ ID NO: 262062
  chr10:71405329-71405576
  hypo

SEQ ID NO: 312681 - DNA, 70 bp, Homo sapiens; identical to SEQ ID NO: 262063
  chr10:71566071-71566141
  hypo

SEQ ID NO: 312682 - DNA, 166 bp, Homo sapiens; identical to SEQ ID NO: 213575
  chr10:71639773-71639939
  hypo

SEQ ID NO: 312683 - DNA, 183 bp, Homo sapiens; identical to SEQ ID NO: 262065
  chr10:71703276-71703459
  hypo

SEQ ID NO: 312684 - DNA, 93 bp, Homo sapiens; identical to SEQ ID NO: 262066
  chr10:71706826-71706919
  hypo

SEQ ID NO: 312685 - DNA, 53 bp, Homo sapiens; identical to SEQ ID NO: 213576
  chr10:71871350-71871403
  hypo

SEQ ID NO: 312686 - DNA, 699 bp, Homo sapiens; identical to SEQ ID NO: 287198
  chr10:71892160-71892859
  hypo

SEQ ID NO: 312687 - DNA, 128 bp, Homo sapiens; identical to SEQ ID NO: 287199
  chr10:71892896-71893024
  hypo

SEQ ID NO: 312688 - DNA, 326 bp, Homo sapiens; identical to SEQ ID NO: 287204
  chr10:72238258-72238584
  hypo

SEQ ID NO: 312689 - DNA, 50 bp, Homo sapiens; identical to SEQ ID NO: 287205
  chr10:72238858-72238908
  hypo

SEQ ID NO: 312690 - DNA, 185 bp, Homo sapiens; identical to SEQ ID NO: 213578
  chr10:72288400-72288585
  hypo

SEQ ID NO: 312691 - DNA, 160 bp, Homo sapiens; identical to SEQ ID NO: 262069
  chr10:72300744-72300904
  hypo

SEQ ID NO: 312692 - DNA, 223 bp, Homo sapiens; identical to SEQ ID NO: 213579
  chr10:72442676-72442899
  hypo

SEQ ID NO: 312693 - DNA, 165 bp, Homo sapiens; identical to SEQ ID NO: 262072
  chr10:72491962-72492127
  hypo

SEQ ID NO: 312694 - DNA, 37 bp, Homo sapiens; identical to SEQ ID NO: 262073
  chr10:72503444-72503481
  hypo

SEQ ID NO: 312695 - DNA, 56 bp, Homo sapiens; identical to SEQ ID NO: 262074
  chr10:72509555-72509611
  hypo

SEQ ID NO: 312696 - DNA, 261 bp, Homo sapiens; identical to SEQ ID NO: 262075
  chr10:72695180-72695441
  hypo

SEQ ID NO: 312697 - DNA, 251 bp, Homo sapiens; identical to SEQ ID NO: 213580
  chr10:72765320-72765571
  hypo

SEQ ID NO: 312698 - DNA, 109 bp, Homo sapiens
  chr10:72784966-72785075
  hypo
aggaccaggctactcgaactgcatgcagcaacttgtatgaatcgcaaaggcttatgctgagcagaagccactatcacaaggttaccttctgcatgattttatctatact

SEQ ID NO: 312699 - DNA, 150 bp, Homo sapiens; identical to SEQ ID NO: 262078
  chr10:72793046-72793196
  hypo

SEQ ID NO: 312700 - DNA, 133 bp, Homo sapiens; identical to SEQ ID NO: 262079
  chr10:72820038-72820171
  hypo

SEQ ID NO: 312701 - DNA, 212 bp, Homo sapiens; identical to SEQ ID NO: 262080
  chr10:72838755-72838967
  hypo

SEQ ID NO: 312702 - DNA, 175 bp, Homo sapiens; identical to SEQ ID NO: 262081
  chr10:72847942-72848117
  hypo

SEQ ID NO: 312703 - DNA, 202 bp, Homo sapiens; identical to SEQ ID NO: 262082
  chr10:72887226-72887428
  hypo

SEQ ID NO: 312704 - DNA, 99 bp, Homo sapiens; identical to SEQ ID NO: 262083
  chr10:73036106-73036205
  hypo

SEQ ID NO: 312705 - DNA, 37 bp, Homo sapiens; identical to SEQ ID NO: 202115
  chr10:73113223-73113260
  hypo

SEQ ID NO: 312706 - DNA, 192 bp, Homo sapiens; identical to SEQ ID NO: 213582
  chr10:73288226-73288418
  hypo

SEQ ID NO: 312707 - DNA, 34 bp, Homo sapiens; identical to SEQ ID NO: 262085
  chr10:73326700-73326734
  hypo

SEQ ID NO: 312708 - DNA, 36 bp, Homo sapiens; identical to SEQ ID NO: 262086
  chr10:73395989-73396025
  hypo

SEQ ID NO: 312709 - DNA, 138 bp, Homo sapiens; identical to SEQ ID NO: 262087
  chr10:73418336-73418474
  hypo

SEQ ID NO: 312710 - DNA, 196 bp, Homo sapiens; identical to SEQ ID NO: 213583
  chr10:73445871-73446067
  hypo

SEQ ID NO: 312711 - DNA, 123 bp, Homo sapiens; identical to SEQ ID NO: 213584
  chr10:73455053-73455176
  hypo

SEQ ID NO: 312712 - DNA, 239 bp, Homo sapiens; identical to SEQ ID NO: 213585
  chr10:73514960-73515199
  hypo

SEQ ID NO: 312713 - DNA, 53 bp, Homo sapiens; identical to SEQ ID NO: 213586
  chr10:73553163-73553216
  hypo

SEQ ID NO: 312714 - DNA, 92 bp, Homo sapiens; identical to SEQ ID NO: 213587
  chr10:73574841-73574933
  hypo

SEQ ID NO: 312715 - DNA, 166 bp, Homo sapiens; identical to SEQ ID NO: 262093
  chr10:73576259-73576425
  hypo

SEQ ID NO: 312716 - DNA, 175 bp, Homo sapiens; identical to SEQ ID NO: 262094
  chr10:73591508-73591683
  hypo

SEQ ID NO: 312717 - DNA, 407 bp, Homo sapiens; identical to SEQ ID NO: 213588
  chr10:73767529-73767936
  hypo

SEQ ID NO: 312718 - DNA, 147 bp, Homo sapiens; identical to SEQ ID NO: 287217
  chr10:73848222-73848369
  hypo

SEQ ID NO: 312719 - DNA, 38 bp, Homo sapiens; identical to SEQ ID NO: 262096
  chr10:73929856-73929894
  hypo

SEQ ID NO: 312720 - DNA, 92 bp, Homo sapiens; identical to SEQ ID NO: 262097
  chr10:73970690-73970782
  hypo

SEQ ID NO: 312721 - DNA, 151 bp, Homo sapiens; identical to SEQ ID NO: 262098
  chr10:74003510-74003661
  hypo

SEQ ID NO: 312722 - DNA, 466 bp, Homo sapiens; identical to SEQ ID NO: 287219
  chr10:74032435-74032901
  hypo

SEQ ID NO: 312723 - DNA, 418 bp, Homo sapiens; identical to SEQ ID NO: 202125
  chr10:74079275-74079693
  hypo

SEQ ID NO: 312724 - DNA, 193 bp, Homo sapiens; identical to SEQ ID NO: 7426
  chr10:74079752-74079945
  hypo

SEQ ID NO: 312725 - DNA, 62 bp, Homo sapiens
  chr10:74100515-74100577
  hypo
ccgcgctgtccctggcgccctcctcactcacatcaccctggttgtccctgcggtcctgcctt

SEQ ID NO: 312726 - DNA, 155 bp, Homo sapiens; identical to SEQ ID NO: 262100
  chr10:74108259-74108414
  hypo

SEQ ID NO: 312727 - DNA, 42 bp, Homo sapiens; identical to SEQ ID NO: 262101
  chr10:74439298-74439340
  hypo

SEQ ID NO: 312728 - DNA, 40 bp, Homo sapiens; identical to SEQ ID NO: 262102
  chr10:74451110-74451150
  hypo

SEQ ID NO: 312729 - DNA, 31 bp, Homo sapiens; identical to SEQ ID NO: 262103
  chr10:74467239-74467270
  hypo

SEQ ID NO: 312730 - DNA, 84 bp, Homo sapiens; identical to SEQ ID NO: 213593
  chr10:74518790-74518874
  hypo

SEQ ID NO: 312731 - DNA, 252 bp, Homo sapiens; identical to SEQ ID NO: 262105
  chr10:74684078-74684330
  hypo

SEQ ID NO: 312732 - DNA, 31 bp, Homo sapiens; identical to SEQ ID NO: 262106
  chr10:74880401-74880432
  hypo

SEQ ID NO: 312733 - DNA, 33 bp, Homo sapiens; identical to SEQ ID NO: 262107
  chr10:75128352-75128385
  hypo

SEQ ID NO: 312734 - DNA, 222 bp, Homo sapiens; identical to SEQ ID NO: 262108
  chr10:75184111-75184333
  hypo

SEQ ID NO: 312735 - DNA, 276 bp, Homo sapiens; identical to SEQ ID NO: 287235
  chr10:75408169-75408445
  hypo

SEQ ID NO: 312736 - DNA, 226 bp, Homo sapiens; identical to SEQ ID NO: 262111
  chr10:75423485-75423711
  hypo

SEQ ID NO: 312737 - DNA, 143 bp, Homo sapiens; identical to SEQ ID NO: 262112
  chr10:75491399-75491542
  hypo

SEQ ID NO: 312738 - DNA, 34 bp, Homo sapiens; identical to SEQ ID NO: 213594
  chr10:75493101-75493135
  hypo

SEQ ID NO: 312739 - DNA, 67 bp, Homo sapiens; identical to SEQ ID NO: 262115
  chr10:75548868-75548935
  hypo

SEQ ID NO: 312740 - DNA, 144 bp, Homo sapiens; identical to SEQ ID NO: 262116
  chr10:75574063-75574207
  hypo

SEQ ID NO: 312741 - DNA, 60 bp, Homo sapiens; identical to SEQ ID NO: 262117
  chr10:75606977-75607037
  hypo

SEQ ID NO: 312742 - DNA, 136 bp, Homo sapiens
  chr10:75632895-75633031
  hypo
acacacttcaagtctggggacgatgatgctcccaccaccagacctctagtcacactcacgtacatgcacacacaccggcgctgtgaccaccaccatccaacatgaggcaaaaggacgcggccaccgcaggacactg

SEQ ID NO: 312743 - DNA, 96 bp, Homo sapiens
  chr10:75832593-75832689
  hypo
gccagttctcatttcaggtacttcctgcctgtactttattttataggggggaaaaatgttagcatgttctaaactctgaggttcattttgttttct

SEQ ID NO: 312744 - DNA, 99 bp, Homo sapiens; identical to SEQ ID NO: 262120
  chr10:75874043-75874142
  hypo

SEQ ID NO: 312745 - DNA, 159 bp, Homo sapiens; identical to SEQ ID NO: 262121
  chr10:75893717-75893876
  hypo

SEQ ID NO: 312746 - DNA, 86 bp, Homo sapiens; identical to SEQ ID NO: 262122
  chr10:75966600-75966686
  hypo

SEQ ID NO: 312747 - DNA, 31 bp, Homo sapiens; identical to SEQ ID NO: 213595
  chr10:76013804-76013835
  hypo

SEQ ID NO: 312748 - DNA, 31 bp, Homo sapiens; identical to SEQ ID NO: 213596
  chr10:76019176-76019207
  hypo

SEQ ID NO: 312749 - DNA, 130 bp, Homo sapiens; identical to SEQ ID NO: 262125
  chr10:76287770-76287900
  hypo

SEQ ID NO: 312750 - DNA, 196 bp, Homo sapiens; identical to SEQ ID NO: 262126
  chr10:76524048-76524244
  hypo

SEQ ID NO: 312751 - DNA, 34 bp, Homo sapiens; identical to SEQ ID NO: 213597
  chr10:76538433-76538467
  hypo

SEQ ID NO: 312752 - DNA, 146 bp, Homo sapiens; identical to SEQ ID NO: 262128
  chr10:76588593-76588739
  hypo

SEQ ID NO: 312753 - DNA, 44 bp, Homo sapiens; identical to SEQ ID NO: 262129
  chr10:76693644-76693688
  hypo

SEQ ID NO: 312754 - DNA, 366 bp, Homo sapiens; identical to SEQ ID NO: 262130
  chr10:76780147-76780513
  hypo

SEQ ID NO: 312755 - DNA, 88 bp, Homo sapiens
  chr10:76784642-76784730
  hypo
tgtctactgcatatcgactcaaccatttaatttctcatgagctcttatgtgttatgtttggaattaatttcagaggccttttgtacta

SEQ ID NO: 312756 - DNA, 173 bp, Homo sapiens; identical to SEQ ID NO: 213599
  chr10:76796613-76796786
  hypo

SEQ ID NO: 312757 - DNA, 496 bp, Homo sapiens; identical to SEQ ID NO: 262133
  chr10:76797023-76797519
  hypo

SEQ ID NO: 312758 - DNA, 187 bp, Homo sapiens; identical to SEQ ID NO: 213601
  chr10:76818035-76818222
  hypo

SEQ ID NO: 312759 - DNA, 35 bp, Homo sapiens; identical to SEQ ID NO: 262135
  chr10:76845053-76845088
  hypo

SEQ ID NO: 312760 - DNA, 146 bp, Homo sapiens; identical to SEQ ID NO: 262136
  chr10:76857399-76857545
  hypo

SEQ ID NO: 312761 - DNA, 33 bp, Homo sapiens; identical to SEQ ID NO: 213602
  chr10:76875399-76875432
  hypo

SEQ ID NO: 312762 - DNA, 108 bp, Homo sapiens; identical to SEQ ID NO: 262138
  chr10:76961624-76961732
  hypo

SEQ ID NO: 312763 - DNA, 89 bp, Homo sapiens; identical to SEQ ID NO: 262139
  chr10:76966475-76966564
  hypo

SEQ ID NO: 312764 - DNA, 88 bp, Homo sapiens; identical to SEQ ID NO: 213603
  chr10:76968431-76968519
  hypo

SEQ ID NO: 312765 - DNA, 44 bp, Homo sapiens; identical to SEQ ID NO: 262141
  chr10:76992470-76992514
  hypo

SEQ ID NO: 312766 - DNA, 432 bp, Homo sapiens; identical to SEQ ID NO: 262142
  chr10:76998412-76998844
  hypo

SEQ ID NO: 312767 - DNA, 31 bp, Homo sapiens; identical to SEQ ID NO: 262143
  chr10:77003406-77003437
  hypo

SEQ ID NO: 312768 - DNA, 389 bp, Homo sapiens; identical to SEQ ID NO: 287248
  chr10:77054513-77054902
  hypo

SEQ ID NO: 312769 - DNA, 1015 bp, Homo sapiens; identical to SEQ ID NO: 287250
  chr10:77160017-77161032
  hypo

SEQ ID NO: 312770 - DNA, 178 bp, Homo sapiens; identical to SEQ ID NO: 262144
  chr10:77242295-77242473
  hypo

SEQ ID NO: 312771 - DNA, 130 bp, Homo sapiens; identical to SEQ ID NO: 262145
  chr10:77499938-77500068
  hypo

SEQ ID NO: 312772 - DNA, 221 bp, Homo sapiens; identical to SEQ ID NO: 262146
  chr10:77794551-77794772
  hypo

SEQ ID NO: 312773 - DNA, 62 bp, Homo sapiens
  chr10:77892386-77892448
  hypo
ctgggaaagttttgtgggagcgtgtatgtttacatgtgtaggtgagcgcatgagtacgagta

SEQ ID NO: 312774 - DNA, 112 bp, Homo sapiens
  chr10:77892478-77892590
  hypo
ctggagtccactagagagtgaaacttacagagtcttgaccattcatcattctgattctcagatttcaccagctgacaagcaccttcttttttggcggggggggtcagagttt

SEQ ID NO: 312775 - DNA, 44 bp, Homo sapiens; identical to SEQ ID NO: 262148
  chr10:79540286-79540330
  hypo

SEQ ID NO: 312776 - DNA, 106 bp, Homo sapiens; identical to SEQ ID NO: 262149
  chr10:79581129-79581235
  hypo

SEQ ID NO: 312777 - DNA, 506 bp, Homo sapiens; identical to SEQ ID NO: 262150
  chr10:79598456-79598962
  hypo

SEQ ID NO: 312778 - DNA, 540 bp, Homo sapiens; identical to SEQ ID NO: 213606
  chr10:79601537-79602077
  hypo

SEQ ID NO: 312779 - DNA, 448 bp, Homo sapiens; identical to SEQ ID NO: 262152
  chr10:79610503-79610951
  hypo

SEQ ID NO: 312780 - DNA, 31 bp, Homo sapiens; identical to SEQ ID NO: 262153
  chr10:79670435-79670466
  hypo

SEQ ID NO: 312781 - DNA, 45 bp, Homo sapiens; identical to SEQ ID NO: 223849
  chr10:79686268-79686313
  hypo

SEQ ID NO: 312782 - DNA, 469 bp, Homo sapiens; identical to SEQ ID NO: 223850
  chr10:79686575-79687044
  hypo

SEQ ID NO: 312783 - DNA, 42 bp, Homo sapiens; identical to SEQ ID NO: 262154
  chr10:79713478-79713520
  hypo

SEQ ID NO: 312784 - DNA, 104 bp, Homo sapiens; identical to SEQ ID NO: 262155
  chr10:79770245-79770349
  hypo

SEQ ID NO: 312785 - DNA, 101 bp, Homo sapiens; identical to SEQ ID NO: 262156
  chr10:80061832-80061933
  hypo

SEQ ID NO: 312786 - DNA, 63 bp, Homo sapiens; identical to SEQ ID NO: 262157
  chr10:80232427-80232490
  hypo

SEQ ID NO: 312787 - DNA, 212 bp, Homo sapiens; identical to SEQ ID NO: 262158
  chr10:80540448-80540660
  hypo

SEQ ID NO: 312788 - DNA, 180 bp, Homo sapiens; identical to SEQ ID NO: 262159
  chr10:80588139-80588319
  hypo

SEQ ID NO: 312789 - DNA, 99 bp, Homo sapiens; identical to SEQ ID NO: 262160
  chr10:80726030-80726129
  hypo

SEQ ID NO: 312790 - DNA, 115 bp, Homo sapiens; identical to SEQ ID NO: 202151
  chr10:80733746-80733861
  hypo

SEQ ID NO: 312791 - DNA, 63 bp, Homo sapiens; identical to SEQ ID NO: 213610
  chr10:80739956-80740019
  hypo

SEQ ID NO: 312792 - DNA, 77 bp, Homo sapiens; identical to SEQ ID NO: 262162
  chr10:80763042-80763119
  hypo

SEQ ID NO: 312793 - DNA, 194 bp, Homo sapiens; identical to SEQ ID NO: 262163
  chr10:80766188-80766382
  hypo

SEQ ID NO: 312794 - DNA, 379 bp, Homo sapiens; identical to SEQ ID NO: 262164
  chr10:80793778-80794157
  hypo

SEQ ID NO: 312795 - DNA, 115 bp, Homo sapiens; identical to SEQ ID NO: 202152
  chr10:80827233-80827348
  hypo

SEQ ID NO: 312796 - DNA, 407 bp, Homo sapiens; identical to SEQ ID NO: 287267
  chr10:80828532-80828939
  hypo

SEQ ID NO: 312797 - DNA, 189 bp, Homo sapiens; identical to SEQ ID NO: 287268
  chr10:80830746-80830935
  hypo

SEQ ID NO: 312798 - DNA, 75 bp, Homo sapiens; identical to SEQ ID NO: 213613
  chr10:80840369-80840444
  hypo

SEQ ID NO: 312799 - DNA, 142 bp, Homo sapiens; identical to SEQ ID NO: 262166
  chr10:80848858-80849000
  hypo

SEQ ID NO: 312800 - DNA, 243 bp, Homo sapiens; identical to SEQ ID NO: 262167
  chr10:80855251-80855494
  hypo

SEQ ID NO: 312801 - DNA, 38 bp, Homo sapiens; identical to SEQ ID NO: 213614
  chr10:80870193-80870231
  hypo

SEQ ID NO: 312802 - DNA, 451 bp, Homo sapiens; identical to SEQ ID NO: 262169
  chr10:80878241-80878692
  hypo

SEQ ID NO: 312803 - DNA, 167 bp, Homo sapiens; identical to SEQ ID NO: 262170
  chr10:80879966-80880133
  hypo

SEQ ID NO: 312804 - DNA, 384 bp, Homo sapiens; identical to SEQ ID NO: 262171
  chr10:80900704-80901088
  hypo

SEQ ID NO: 312805 - DNA, 282 bp, Homo sapiens; identical to SEQ ID NO: 213616
  chr10:80921746-80922028
  hypo

SEQ ID NO: 312806 - DNA, 193 bp, Homo sapiens; identical to SEQ ID NO: 262173
  chr10:80928400-80928593
  hypo

SEQ ID NO: 312807 - DNA, 425 bp, Homo sapiens; identical to SEQ ID NO: 262174
  chr10:80930708-80931133
  hypo

SEQ ID NO: 312808 - DNA, 316 bp, Homo sapiens; identical to SEQ ID NO: 262175
  chr10:80953306-80953622
  hypo

SEQ ID NO: 312809 - DNA, 128 bp, Homo sapiens; identical to SEQ ID NO: 262176
  chr10:80954541-80954669
  hypo

SEQ ID NO: 312810 - DNA, 336 bp, Homo sapiens; identical to SEQ ID NO: 262177
  chr10:80955982-80956318
  hypo

SEQ ID NO: 312811 - DNA, 32 bp, Homo sapiens; identical to SEQ ID NO: 213619
  chr10:80958501-80958533
  hypo

SEQ ID NO: 312812 - DNA, 240 bp, Homo sapiens; identical to SEQ ID NO: 262179
  chr10:80958773-80959013
  hypo

SEQ ID NO: 312813 - DNA, 239 bp, Homo sapiens; identical to SEQ ID NO: 262180
  chr10:80961348-80961587
  hypo

SEQ ID NO: 312814 - DNA, 57 bp, Homo sapiens; identical to SEQ ID NO: 262181
  chr10:80962989-80963046
  hypo

SEQ ID NO: 312815 - DNA, 546 bp, Homo sapiens; identical to SEQ ID NO: 262182
  chr10:80966388-80966934
  hypo

SEQ ID NO: 312816 - DNA, 184 bp, Homo sapiens; identical to SEQ ID NO: 262183
  chr10:80969929-80970113
  hypo

SEQ ID NO: 312817 - DNA, 171 bp, Homo sapiens; identical to SEQ ID NO: 213622
  chr10:80971586-80971757
  hypo

SEQ ID NO: 312818 - DNA, 498 bp, Homo sapiens; identical to SEQ ID NO: 213623
  chr10:80974593-80975091
  hypo

SEQ ID NO: 312819 - DNA, 423 bp, Homo sapiens; identical to SEQ ID NO: 262186
  chr10:80975646-80976069
  hypo

SEQ ID NO: 312820 - DNA, 146 bp, Homo sapiens; identical to SEQ ID NO: 119197
  chr10:81002562-81002708
  hypo

SEQ ID NO: 312821 - DNA, 32 bp, Homo sapiens; identical to SEQ ID NO: 213625
  chr10:81017844-81017876
  hypo

SEQ ID NO: 312822 - DNA, 50 bp, Homo sapiens; identical to SEQ ID NO: 262188
  chr10:81020970-81021020
  hypo

SEQ ID NO: 312823 - DNA, 77 bp, Homo sapiens; identical to SEQ ID NO: 213626
  chr10:81023807-81023884
  hypo

SEQ ID NO: 312824 - DNA, 83 bp, Homo sapiens; identical to SEQ ID NO: 213627
  chr10:81023914-81023997
  hypo

SEQ ID NO: 312825 - DNA, 47 bp, Homo sapiens; identical to SEQ ID NO: 262190
  chr10:81029634-81029681
  hypo

SEQ ID NO: 312826 - DNA, 269 bp, Homo sapiens; identical to SEQ ID NO: 262191
  chr10:81032443-81032712
  hypo

SEQ ID NO: 312827 - DNA, 226 bp, Homo sapiens; identical to SEQ ID NO: 262192
  chr10:81035988-81036214
  hypo

SEQ ID NO: 312828 - DNA, 433 bp, Homo sapiens; identical to SEQ ID NO: 213630
  chr10:81036657-81037090
  hypo

SEQ ID NO: 312829 - DNA, 290 bp, Homo sapiens; identical to SEQ ID NO: 213631
  chr10:81050747-81051037
  hypo

SEQ ID NO: 312830 - DNA, 187 bp, Homo sapiens; identical to SEQ ID NO: 213632
  chr10:81058000-81058187
  hypo

SEQ ID NO: 312831 - DNA, 77 bp, Homo sapiens; identical to SEQ ID NO: 213633
  chr10:81059003-81059080
  hypo

SEQ ID NO: 312832 - DNA, 111 bp, Homo sapiens; identical to SEQ ID NO: 213634
  chr10:81060509-81060620
  hypo

SEQ ID NO: 312833 - DNA, 475 bp, Homo sapiens; identical to SEQ ID NO: 213635
  chr10:81063477-81063952
  hypo

SEQ ID NO: 312834 - DNA, 389 bp, Homo sapiens; identical to SEQ ID NO: 213636
  chr10:81065710-81066099
  hypo

SEQ ID NO: 312835 - DNA, 42 bp, Homo sapiens; identical to SEQ ID NO: 262201
  chr10:81072192-81072234
  hypo

SEQ ID NO: 312836 - DNA, 181 bp, Homo sapiens; identical to SEQ ID NO: 213637
  chr10:81073340-81073521
  hypo

SEQ ID NO: 312837 - DNA, 165 bp, Homo sapiens; identical to SEQ ID NO: 213638
  chr10:81142185-81142350
  hypo

SEQ ID NO: 312838 - DNA, 263 bp, Homo sapiens; identical to SEQ ID NO: 213639
  chr10:81145945-81146208
  hypo

SEQ ID NO: 312839 - DNA, 162 bp, Homo sapiens; identical to SEQ ID NO: 262205
  chr10:81861006-81861168
  hypo

SEQ ID NO: 312840 - DNA, 33 bp, Homo sapiens; identical to SEQ ID NO: 165803
  chr10:81915176-81915209
  hypo

SEQ ID NO: 312841 - DNA, 107 bp, Homo sapiens; identical to SEQ ID NO: 262207
  chr10:81931376-81931483
  hypo

SEQ ID NO: 312842 - DNA, 105 bp, Homo sapiens; identical to SEQ ID NO: 213640
  chr10:81966466-81966571
  hypo

SEQ ID NO: 312843 - DNA, 35 bp, Homo sapiens; identical to SEQ ID NO: 213641
  chr10:81966596-81966631
  hypo

SEQ ID NO: 312844 - DNA, 142 bp, Homo sapiens; identical to SEQ ID NO: 262209
  chr10:81968101-81968243
  hypo

SEQ ID NO: 312845 - DNA, 146 bp, Homo sapiens; identical to SEQ ID NO: 202156
  chr10:82213597-82213743
  hypo

SEQ ID NO: 312846 - DNA, 79 bp, Homo sapiens; identical to SEQ ID NO: 262210
  chr10:82363370-82363449
  hypo

SEQ ID NO: 312847 - DNA, 62 bp, Homo sapiens
  chr10:82573991-82574053
  hypo
ccaacgggagttccgggtgggcatggtctcagtgggcccgcactcagcggctggccgtccca

SEQ ID NO: 312848 - DNA, 162 bp, Homo sapiens; identical to SEQ ID NO: 213643
  chr10:84618971-84619133
  hypo

SEQ ID NO: 312849 - DNA, 33 bp, Homo sapiens; identical to SEQ ID NO: 213644
  chr10:86016117-86016150
  hypo

SEQ ID NO: 312850 - DNA, 42 bp, Homo sapiens; identical to SEQ ID NO: 202161
  chr10:86088147-86088189
  hypo

SEQ ID NO: 312851 - DNA, 177 bp, Homo sapiens; identical to SEQ ID NO: 262214
  chr10:86175509-86175686
  hypo

SEQ ID NO: 312852 - DNA, 178 bp, Homo sapiens; identical to SEQ ID NO: 213646
  chr10:86306481-86306659
  hypo

SEQ ID NO: 312853 - DNA, 266 bp, Homo sapiens; identical to SEQ ID NO: 262216
  chr10:86361898-86362164
  hypo

SEQ ID NO: 312854 - DNA, 56 bp, Homo sapiens; identical to SEQ ID NO: 223859
  chr10:87493570-87493626
  hypo

SEQ ID NO: 312855 - DNA, 147 bp, Homo sapiens; identical to SEQ ID NO: 262217
  chr10:87965994-87966141
  hypo

SEQ ID NO: 312856 - DNA, 203 bp, Homo sapiens; identical to SEQ ID NO: 262218
  chr10:88200328-88200531
  hypo

SEQ ID NO: 312857 - DNA, 82 bp, Homo sapiens; identical to SEQ ID NO: 287290
  chr10:88224575-88224657
  hypo

SEQ ID NO: 312858 - DNA, 35 bp, Homo sapiens; identical to SEQ ID NO: 262220
  chr10:88241398-88241433
  hypo

SEQ ID NO: 312859 - DNA, 52 bp, Homo sapiens
  chr10:88280113-88280165
  hypo
catagtgaaatactgatgaaataacgtcagcgattttccaacattaaggaat

SEQ ID NO: 312860 - DNA, 33 bp, Homo sapiens; identical to SEQ ID NO: 262222
  chr10:88286949-88286982
  hypo

SEQ ID NO: 312861 - DNA, 212 bp, Homo sapiens; identical to SEQ ID NO: 287292
  chr10:88294492-88294704
  hypo

SEQ ID NO: 312862 - DNA, 164 bp, Homo sapiens; identical to SEQ ID NO: 262224
  chr10:88422751-88422915
  hypo

SEQ ID NO: 312863 - DNA, 653 bp, Homo sapiens; identical to SEQ ID NO: 213648
  chr10:88441137-88441790
  hypo

SEQ ID NO: 312864 - DNA, 224 bp, Homo sapiens; identical to SEQ ID NO: 262226
  chr10:88470510-88470734
  hypo

SEQ ID NO: 312865 - DNA, 35 bp, Homo sapiens; identical to SEQ ID NO: 262227
  chr10:88587611-88587646
  hypo

SEQ ID NO: 312866 - DNA, 781 bp, Homo sapiens; identical to SEQ ID NO: 262228
  chr10:88702274-88703055
  hypo

SEQ ID NO: 312867 - DNA, 120 bp, Homo sapiens; identical to SEQ ID NO: 262229
  chr10:88857179-88857299
  hypo

SEQ ID NO: 312868 - DNA, 39 bp, Homo sapiens; identical to SEQ ID NO: 262230
  chr10:89362124-89362163
  hypo

SEQ ID NO: 312869 - DNA, 116 bp, Homo sapiens; identical to SEQ ID NO: 262231
  chr10:89892095-89892211
  hypo

SEQ ID NO: 312870 - DNA, 277 bp, Homo sapiens; identical to SEQ ID NO: 213650
  chr10:90029772-90030049
  hypo

SEQ ID NO: 312871 - DNA, 183 bp, Homo sapiens; identical to SEQ ID NO: 287308
  chr10:90750730-90750913
  hypo

SEQ ID NO: 312872 - DNA, 31 bp, Homo sapiens; identical to SEQ ID NO: 262233
  chr10:91589220-91589251
  hypo

SEQ ID NO: 312873 - DNA, 81 bp, Homo sapiens; identical to SEQ ID NO: 287311
  chr10:92617016-92617097
  hypo

SEQ ID NO: 312874 - DNA, 508 bp, Homo sapiens; identical to SEQ ID NO: 287312
  chr10:92617539-92618047
  hypo

SEQ ID NO: 312875 - DNA, 79 bp, Homo sapiens; identical to SEQ ID NO: 287313
  chr10:92618077-92618156
  hypo

SEQ ID NO: 312876 - DNA, 317 bp, Homo sapiens
  chr10:92913473-92913790
  hypo
tgggggcgcagtctccactgcagatcagcacccgcccgcggggaggtggccacgtttctctcctgaacaccagttgatggcccgccttcctaaaaggccgtgtggcgtctccagtggctacaacggggcgcgccaatggctcgtgcgtggaggtaacggtgccgcggggttgccaggggcgtaccacgaccgggccgcgcactctcgctgccgccctggcgttttggttgtaaattgagagattttgacctctggaaaagctcccaaatggaaagtgctggggttgaggacatcttcctaacgacaataaaattagc

SEQ ID NO: 312877 - DNA, 136 bp, Homo sapiens; identical to SEQ ID NO: 213652
  chr10:93567140-93567276
  hypo

SEQ ID NO: 312878 - DNA, 214 bp, Homo sapiens; identical to SEQ ID NO: 213653
  chr10:93572698-93572912
  hypo

SEQ ID NO: 312879 - DNA, 78 bp, Homo sapiens; identical to SEQ ID NO: 202176
  chr10:93647662-93647740
  hypo

SEQ ID NO: 312880 - DNA, 42 bp, Homo sapiens; identical to SEQ ID NO: 262237
  chr10:93744096-93744138
  hypo

SEQ ID NO: 312881 - DNA, 319 bp, Homo sapiens; identical to SEQ ID NO: 213655
  chr10:93811840-93812159
  hypo

SEQ ID NO: 312882 - DNA, 37 bp, Homo sapiens; identical to SEQ ID NO: 213656
  chr10:93843638-93843675
  hypo

SEQ ID NO: 312883 - DNA, 85 bp, Homo sapiens; identical to SEQ ID NO: 262240
  chr10:94156009-94156094
  hypo

SEQ ID NO: 312884 - DNA, 77 bp, Homo sapiens; identical to SEQ ID NO: 262241
  chr10:94156300-94156377
  hypo

SEQ ID NO: 312885 - DNA, 37 bp, Homo sapiens; identical to SEQ ID NO: 262242
  chr10:94219877-94219914
  hypo

SEQ ID NO: 312886 - DNA, 37 bp, Homo sapiens; identical to SEQ ID NO: 213657
  chr10:94310596-94310633
  hypo

SEQ ID NO: 312887 - DNA, 79 bp, Homo sapiens; identical to SEQ ID NO: 287325
  chr10:94449318-94449397
  hypo

SEQ ID NO: 312888 - DNA, 102 bp, Homo sapiens; identical to SEQ ID NO: 262245
  chr10:94770433-94770535
  hypo

SEQ ID NO: 312889 - DNA, 384 bp, Homo sapiens; identical to SEQ ID NO: 287332
  chr10:94833649-94834033
  hypo

SEQ ID NO: 312890 - DNA, 80 bp, Homo sapiens; identical to SEQ ID NO: 262246
  chr10:95143644-95143724
  hypo

SEQ ID NO: 312891 - DNA, 126 bp, Homo sapiens; identical to SEQ ID NO: 287337
  chr10:95753358-95753484
  hypo

SEQ ID NO: 312892 - DNA, 372 bp, Homo sapiens; identical to SEQ ID NO: 287338
  chr10:95753760-95754132
  hypo

SEQ ID NO: 312893 - DNA, 151 bp, Homo sapiens; identical to SEQ ID NO: 202189
  chr10:96122665-96122816
  hypo

SEQ ID NO: 312894 - DNA, 158 bp, Homo sapiens; identical to SEQ ID NO: 262247
  chr10:96154781-96154939
  hypo

SEQ ID NO: 312895 - DNA, 1666 bp, Homo sapiens; identical to SEQ ID NO: 287341
  chr10:96161937-96163603
  hypo

SEQ ID NO: 312896 - DNA, 189 bp, Homo sapiens; identical to SEQ ID NO: 287342
  chr10:97051016-97051205
  hypo

SEQ ID NO: 312897 - DNA, 92 bp, Homo sapiens; identical to SEQ ID NO: 262248
  chr10:97096180-97096272
  hypo

SEQ ID NO: 312898 - DNA, 37 bp, Homo sapiens; identical to SEQ ID NO: 213663
  chr10:97118425-97118462
  hypo

SEQ ID NO: 312899 - DNA, 80 bp, Homo sapiens; identical to SEQ ID NO: 262250
  chr10:97317229-97317309
  hypo

SEQ ID NO: 312900 - DNA, 191 bp, Homo sapiens; identical to SEQ ID NO: 202193
  chr10:97321201-97321392
  hypo

SEQ ID NO: 312901 - DNA, 79 bp, Homo sapiens; identical to SEQ ID NO: 262251
  chr10:97322744-97322823
  hypo

SEQ ID NO: 312902 - DNA, 74 bp, Homo sapiens; identical to SEQ ID NO: 262252
  chr10:97326022-97326096
  hypo

SEQ ID NO: 312903 - DNA, 44 bp, Homo sapiens; identical to SEQ ID NO: 213665
  chr10:97617586-97617630
  hypo

SEQ ID NO: 312904 - DNA, 94 bp, Homo sapiens; identical to SEQ ID NO: 262254
  chr10:97801082-97801176
  hypo

SEQ ID NO: 312905 - DNA, 96 bp, Homo sapiens; identical to SEQ ID NO: 262256
  chr10:98144322-98144418
  hypo

SEQ ID NO: 312906 - DNA, 65 bp, Homo sapiens
  chr10:98292796-98292861
  hypo
attctctttaccattttttctccggtataggacgaggcacagcattgacacgacaaggaaagttg

SEQ ID NO: 312907 - DNA, 38 bp, Homo sapiens; identical to SEQ ID NO: 262258
  chr10:98338545-98338583
  hypo

SEQ ID NO: 312908 - DNA, 136 bp, Homo sapiens; identical to SEQ ID NO: 213666
  chr10:98350862-98350998
  hypo

SEQ ID NO: 312909 - DNA, 81 bp, Homo sapiens; identical to SEQ ID NO: 262260
  chr10:98364556-98364637
  hypo

SEQ ID NO: 312910 - DNA, 176 bp, Homo sapiens; identical to SEQ ID NO: 262261
  chr10:98380115-98380291
  hypo

SEQ ID NO: 312911 - DNA, 144 bp, Homo sapiens; identical to SEQ ID NO: 213667
  chr10:98469423-98469567
  hypo

SEQ ID NO: 312912 - DNA, 95 bp, Homo sapiens; identical to SEQ ID NO: 262263
  chr10:98482590-98482685
  hypo

SEQ ID NO: 312913 - DNA, 120 bp, Homo sapiens; identical to SEQ ID NO: 213668
  chr10:98526399-98526519
  hypo

SEQ ID NO: 312914 - DNA, 228 bp, Homo sapiens; identical to SEQ ID NO: 223880
  chr10:98593370-98593598
  hypo

SEQ ID NO: 312915 - DNA, 34 bp, Homo sapiens; identical to SEQ ID NO: 262266
  chr10:98676070-98676104
  hypo

SEQ ID NO: 312916 - DNA, 45 bp, Homo sapiens; identical to SEQ ID NO: 262267
  chr10:98713009-98713054
  hypo

SEQ ID NO: 312917 - DNA, 54 bp, Homo sapiens; identical to SEQ ID NO: 262268
  chr10:98746417-98746471
  hypo

SEQ ID NO: 312918 - DNA, 60 bp, Homo sapiens; identical to SEQ ID NO: 262269
  chr10:98982990-98983050
  hypo

SEQ ID NO: 312919 - DNA, 37 bp, Homo sapiens; identical to SEQ ID NO: 262270
  chr10:99108579-99108616
  hypo

SEQ ID NO: 312920 - DNA, 393 bp, Homo sapiens; identical to SEQ ID NO: 262271
  chr10:99206759-99207152
  hypo

SEQ ID NO: 312921 - DNA, 251 bp, Homo sapiens; identical to SEQ ID NO: 262272
  chr10:99240758-99241009
  hypo

SEQ ID NO: 312922 - DNA, 336 bp, Homo sapiens; identical to SEQ ID NO: 223881
  chr10:99259373-99259709
  hypo

SEQ ID NO: 312923 - DNA, 124 bp, Homo sapiens; identical to SEQ ID NO: 262273
  chr10:99329947-99330071
  hypo

SEQ ID NO: 312924 - DNA, 328 bp, Homo sapiens; identical to SEQ ID NO: 262274
  chr10:99358763-99359091
  hypo

SEQ ID NO: 312925 - DNA, 122 bp, Homo sapiens; identical to SEQ ID NO: 223882
  chr10:99447292-99447414
  hypo

SEQ ID NO: 312926 - DNA, 110 bp, Homo sapiens; identical to SEQ ID NO: 287368
  chr10:99474283-99474393
  hypo

SEQ ID NO: 312927 - DNA, 76 bp, Homo sapiens; identical to SEQ ID NO: 287369
  chr10:99474467-99474543
  hypo

SEQ ID NO: 312928 - DNA, 195 bp, Homo sapiens; identical to SEQ ID NO: 287371
  chr10:99530902-99531097
  hypo

SEQ ID NO: 312929 - DNA, 191 bp, Homo sapiens; identical to SEQ ID NO: 213670
  chr10:99626199-99626390
  hypo

SEQ ID NO: 312930 - DNA, 172 bp, Homo sapiens; identical to SEQ ID NO: 262276
  chr10:100013352-100013524
  hypo

SEQ ID NO: 312931 - DNA, 78 bp, Homo sapiens; identical to SEQ ID NO: 262277
  chr10:100127560-100127638
  hypo

SEQ ID NO: 312932 - DNA, 174 bp, Homo sapiens; identical to SEQ ID NO: 213671
  chr10:100170637-100170811
  hypo

SEQ ID NO: 312933 - DNA, 142 bp, Homo sapiens; identical to SEQ ID NO: 213672
  chr10:100171092-100171234
  hypo

SEQ ID NO: 312934 - DNA, 426 bp, Homo sapiens; identical to SEQ ID NO: 213673
  chr10:100178510-100178936
  hypo

SEQ ID NO: 312935 - DNA, 211 bp, Homo sapiens; identical to SEQ ID NO: 262281
  chr10:100194215-100194426
  hypo

SEQ ID NO: 312936 - DNA, 86 bp, Homo sapiens; identical to SEQ ID NO: 262282
  chr10:100207454-100207540
  hypo

SEQ ID NO: 312937 - DNA, 58 bp, Homo sapiens
  chr10:100217102-100217160
  hypo
tctggattatttcgcgctcggcaacccatttccccgggtgcccctgggcgagccatgg

SEQ ID NO: 312938 - DNA, 264 bp, Homo sapiens; identical to SEQ ID NO: 287389
  chr10:101296800-101297064
  hypo

SEQ ID NO: 312939 - DNA, 236 bp, Homo sapiens; identical to SEQ ID NO: 287390
  chr10:101297130-101297366
  hypo

SEQ ID NO: 312940 - DNA, 239 bp, Homo sapiens; identical to SEQ ID NO: 213674
  chr10:101493074-101493313
  hypo

SEQ ID NO: 312941 - DNA, 43 bp, Homo sapiens; identical to SEQ ID NO: 213675
  chr10:101493373-101493416
  hypo

SEQ ID NO: 312942 - DNA, 37 bp, Homo sapiens; identical to SEQ ID NO: 262286
  chr10:101769082-101769119
  hypo

SEQ ID NO: 312943 - DNA, 223 bp, Homo sapiens; identical to SEQ ID NO: 262287
  chr10:102180363-102180586
  hypo

SEQ ID NO: 312944 - DNA, 203 bp, Homo sapiens; identical to SEQ ID NO: 262288
  chr10:102409486-102409689
  hypo

SEQ ID NO: 312945 - DNA, 287 bp, Homo sapiens; identical to SEQ ID NO: 287412
  chr10:102507993-102508280
  hypo

SEQ ID NO: 312946 - DNA, 203 bp, Homo sapiens; identical to SEQ ID NO: 262289
  chr10:102748645-102748848
  hypo

SEQ ID NO: 312947 - DNA, 317 bp, Homo sapiens; identical to SEQ ID NO: 213676
  chr10:102766308-102766625
  hypo

SEQ ID NO: 312948 - DNA, 262 bp, Homo sapiens; identical to SEQ ID NO: 262291
  chr10:102770159-102770421
  hypo

SEQ ID NO: 312949 - DNA, 381 bp, Homo sapiens; identical to SEQ ID NO: 287423
  chr10:102802620-102803001
  hypo

SEQ ID NO: 312950 - DNA, 598 bp, Homo sapiens; identical to SEQ ID NO: 223895
  chr10:102822296-102822894
  hypo

SEQ ID NO: 312951 - DNA, 61 bp, Homo sapiens; identical to SEQ ID NO: 213679
  chr10:102872322-102872383
  hypo

SEQ ID NO: 312952 - DNA, 120 bp, Homo sapiens; identical to SEQ ID NO: 202233
  chr10:102973524-102973644
  hypo

SEQ ID NO: 312953 - DNA, 246 bp, Homo sapiens; identical to SEQ ID NO: 287435
  chr10:102988365-102988611
  hypo

SEQ ID NO: 312954 - DNA, 88 bp, Homo sapiens; identical to SEQ ID NO: 262293
  chr10:103033097-103033185
  hypo

SEQ ID NO: 312955 - DNA, 34 bp, Homo sapiens; identical to SEQ ID NO: 262295
  chr10:103259007-103259041
  hypo

SEQ ID NO: 312956 - DNA, 202 bp, Homo sapiens; identical to SEQ ID NO: 202237
  chr10:103348788-103348990
  hypo

SEQ ID NO: 312957 - DNA, 167 bp, Homo sapiens; identical to SEQ ID NO: 262296
  chr10:103372828-103372995
  hypo

SEQ ID NO: 312958 - DNA, 57 bp, Homo sapiens; identical to SEQ ID NO: 213682
  chr10:103425893-103425950
  hypo

SEQ ID NO: 312959 - DNA, 126 bp, Homo sapiens; identical to SEQ ID NO: 287446
  chr10:103535496-103535622
  hypo

SEQ ID NO: 312960 - DNA, 211 bp, Homo sapiens; identical to SEQ ID NO: 202239
  chr10:103535916-103536127
  hypo

SEQ ID NO: 312961 - DNA, 73 bp, Homo sapiens; identical to SEQ ID NO: 213684
  chr10:103553397-103553470
  hypo

SEQ ID NO: 312962 - DNA, 124 bp, Homo sapiens; identical to SEQ ID NO: 262299
  chr10:103555064-103555188
  hypo

SEQ ID NO: 312963 - DNA, 129 bp, Homo sapiens; identical to SEQ ID NO: 262300
  chr10:103588893-103589022
  hypo

SEQ ID NO: 312964 - DNA, 91 bp, Homo sapiens; identical to SEQ ID NO: 262301
  chr10:103720633-103720724
  hypo

SEQ ID NO: 312965 - DNA, 201 bp, Homo sapiens; identical to SEQ ID NO: 262302
  chr10:103817633-103817834
  hypo

SEQ ID NO: 312966 - DNA, 136 bp, Homo sapiens; identical to SEQ ID NO: 287456
  chr10:103985871-103986007
  hypo

SEQ ID NO: 312967 - DNA, 144 bp, Homo sapiens; identical to SEQ ID NO: 262304
  chr10:104140854-104140998
  hypo

SEQ ID NO: 312968 - DNA, 61 bp, Homo sapiens
  chr10:104161594-104161655
  hypo
agcgtctggggctgcgcagcctggtagacacgtaccgacagacaacctcacccagtggcag

SEQ ID NO: 312969 - DNA, 42 bp, Homo sapiens; identical to SEQ ID NO: 262306
  chr10:104198522-104198564
  hypo

SEQ ID NO: 312970 - DNA, 34 bp, Homo sapiens; identical to SEQ ID NO: 213685
  chr10:104230570-104230604
  hypo

SEQ ID NO: 312971 - DNA, 199 bp, Homo sapiens; identical to SEQ ID NO: 213686
  chr10:104239074-104239273
  hypo

SEQ ID NO: 312972 - DNA, 129 bp, Homo sapiens; identical to SEQ ID NO: 262309
  chr10:104384282-104384411
  hypo

SEQ ID NO: 312973 - DNA, 299 bp, Homo sapiens; identical to SEQ ID NO: 213687
  chr10:104416699-104416998
  hypo

SEQ ID NO: 312974 - DNA, 163 bp, Homo sapiens; identical to SEQ ID NO: 213688
  chr10:104417062-104417225
  hypo

SEQ ID NO: 312975 - DNA, 57 bp, Homo sapiens; identical to SEQ ID NO: 262311
  chr10:104456328-104456385
  hypo

SEQ ID NO: 312976 - DNA, 101 bp, Homo sapiens; identical to SEQ ID NO: 262312
  chr10:104737943-104738044
  hypo

SEQ ID NO: 312977 - DNA, 120 bp, Homo sapiens; identical to SEQ ID NO: 262313
  chr10:104746123-104746243
  hypo

SEQ ID NO: 312978 - DNA, 41 bp, Homo sapiens; identical to SEQ ID NO: 262314
  chr10:104793215-104793256
  hypo

SEQ ID NO: 312979 - DNA, 336 bp, Homo sapiens; identical to SEQ ID NO: 213689
  chr10:104837797-104838133
  hypo

SEQ ID NO: 312980 - DNA, 31 bp, Homo sapiens; identical to SEQ ID NO: 262317
  chr10:104874862-104874893
  hypo

SEQ ID NO: 312981 - DNA, 85 bp, Homo sapiens
  chr10:105127076-105127161
  hypo
aaagtaaaaatgacaaaaaaaaaaaaaaagtaagcactattcaggtcaaaatgtaaaactaccagtatctcggaagcctccctct

SEQ ID NO: 312982 - DNA, 33 bp, Homo sapiens; identical to SEQ ID NO: 213691
  chr10:105238592-105238625
  hypo

SEQ ID NO: 312983 - DNA, 321 bp, Homo sapiens; identical to SEQ ID NO: 262320
  chr10:105345023-105345344
  hypo

SEQ ID NO: 312984 - DNA, 144 bp, Homo sapiens; identical to SEQ ID NO: 262321
  chr10:105403459-105403603
  hypo

SEQ ID NO: 312985 - DNA, 282 bp, Homo sapiens; identical to SEQ ID NO: 262323
  chr10:105436790-105437072
  hypo

SEQ ID NO: 312986 - DNA, 42 bp, Homo sapiens; identical to SEQ ID NO: 262324
  chr10:105440561-105440603
  hypo

SEQ ID NO: 312987 - DNA, 38 bp, Homo sapiens; identical to SEQ ID NO: 262325
  chr10:105487458-105487496
  hypo

SEQ ID NO: 312988 - DNA, 65 bp, Homo sapiens; identical to SEQ ID NO: 262326
  chr10:105639324-105639389
  hypo

SEQ ID NO: 312989 - DNA, 33 bp, Homo sapiens; identical to SEQ ID NO: 213692
  chr10:105725850-105725883
  hypo

SEQ ID NO: 312990 - DNA, 76 bp, Homo sapiens; identical to SEQ ID NO: 262328
  chr10:106029646-106029722
  hypo

SEQ ID NO: 312991 - DNA, 75 bp, Homo sapiens; identical to SEQ ID NO: 262329
  chr10:106030047-106030122
  hypo

SEQ ID NO: 312992 - DNA, 35 bp, Homo sapiens; identical to SEQ ID NO: 262330
  chr10:106032651-106032686
  hypo

SEQ ID NO: 312993 - DNA, 55 bp, Homo sapiens; identical to SEQ ID NO: 213693
  chr10:106075696-106075751
  hypo

SEQ ID NO: 312994 - DNA, 93 bp, Homo sapiens; identical to SEQ ID NO: 262332
  chr10:106094618-106094711
  hypo

SEQ ID NO: 312995 - DNA, 736 bp, Homo sapiens; identical to SEQ ID NO: 287488
  chr10:106097223-106097959
  hypo

SEQ ID NO: 312996 - DNA, 681 bp, Homo sapiens; identical to SEQ ID NO: 119661
  chr10:106098025-106098706
  hypo

SEQ ID NO: 312997 - DNA, 102 bp, Homo sapiens; identical to SEQ ID NO: 223913
  chr10:106098946-106099048
  hypo

SEQ ID NO: 312998 - DNA, 336 bp, Homo sapiens; identical to SEQ ID NO: 47663
  chr10:106113480-106113816
  hypo

SEQ ID NO: 312999 - DNA, 94 bp, Homo sapiens; identical to SEQ ID NO: 262333
  chr10:106174643-106174737
  hypo

SEQ ID NO: 313000 - DNA, 36 bp, Homo sapiens; identical to SEQ ID NO: 262334
  chr10:106199914-106199950
  hypo

SEQ ID NO: 313001 - DNA, 37 bp, Homo sapiens; identical to SEQ ID NO: 262335
  chr10:111668073-111668110
  hypo

SEQ ID NO: 313002 - DNA, 187 bp, Homo sapiens; identical to SEQ ID NO: 213694
  chr10:111684022-111684209
  hypo

SEQ ID NO: 313003 - DNA, 32 bp, Homo sapiens; identical to SEQ ID NO: 262338
  chr10:111696450-111696482
  hypo

SEQ ID NO: 313004 - DNA, 766 bp, Homo sapiens; identical to SEQ ID NO: 202254
  chr10:111767116-111767882
  hypo

SEQ ID NO: 313005 - DNA, 299 bp, Homo sapiens
  chr10:111921293-111921592
  hypo
ctgggatttataggcgtgaaccaccatgcccaactgtcaatcagttatcaaccaggatgccaggaccattcaatggtgaaaataagagtcttttcaacaaatggtgctggtgcaaatggagattgacatgcaaagacaggtcaggactacacttcgtgtttcctgtgtccggtgtcaatgtgtgaagctgccttggattaaacatccaacgagaaaggaaaaaccctcgtctcctcttcctgggatcccagccgccagagcaggggcaccaggcagtactcagcaccacctaaagaagt

SEQ ID NO: 313006 - DNA, 201 bp, Homo sapiens; identical to SEQ ID NO: 262341
  chr10:111987863-111988064
  hypo

SEQ ID NO: 313007 - DNA, 266 bp, Homo sapiens; identical to SEQ ID NO: 262343
  chr10:112170716-112170982
  hypo

SEQ ID NO: 313008 - DNA, 40 bp, Homo sapiens; identical to SEQ ID NO: 262344
  chr10:112326386-112326426
  hypo

SEQ ID NO: 313009 - DNA, 385 bp, Homo sapiens; identical to SEQ ID NO: 287505
  chr10:112327397-112327782
  hypo

SEQ ID NO: 313010 - DNA, 76 bp, Homo sapiens; identical to SEQ ID NO: 202262
  chr10:112328695-112328771
  hypo

SEQ ID NO: 313011 - DNA, 39 bp, Homo sapiens; identical to SEQ ID NO: 202263
  chr10:112333464-112333503
  hypo

SEQ ID NO: 313012 - DNA, 68 bp, Homo sapiens; identical to SEQ ID NO: 202264
  chr10:112335093-112335161
  hypo

SEQ ID NO: 313013 - DNA, 72 bp, Homo sapiens; identical to SEQ ID NO: 202265
  chr10:112337178-112337250
  hypo

SEQ ID NO: 313014 - DNA, 80 bp, Homo sapiens; identical to SEQ ID NO: 202266
  chr10:112337592-112337672
  hypo

SEQ ID NO: 313015 - DNA, 79 bp, Homo sapiens; identical to SEQ ID NO: 202267
  chr10:112338385-112338464
  hypo

SEQ ID NO: 313016 - DNA, 118 bp, Homo sapiens; identical to SEQ ID NO: 202268
  chr10:112340661-112340779
  hypo

SEQ ID NO: 313017 - DNA, 176 bp, Homo sapiens; identical to SEQ ID NO: 202269
  chr10:112341680-112341856
  hypo

SEQ ID NO: 313018 - DNA, 81 bp, Homo sapiens; identical to SEQ ID NO: 202270
  chr10:112342319-112342400
  hypo

SEQ ID NO: 313019 - DNA, 165 bp, Homo sapiens; identical to SEQ ID NO: 202271
  chr10:112343141-112343306
  hypo

SEQ ID NO: 313020 - DNA, 122 bp, Homo sapiens; identical to SEQ ID NO: 202272
  chr10:112343598-112343720
  hypo

SEQ ID NO: 313021 - DNA, 214 bp, Homo sapiens; identical to SEQ ID NO: 202273
  chr10:112343940-112344154
  hypo

SEQ ID NO: 313022 - DNA, 387 bp, Homo sapiens; identical to SEQ ID NO: 202274
  chr10:112349362-112349749
  hypo

SEQ ID NO: 313023 - DNA, 161 bp, Homo sapiens; identical to SEQ ID NO: 202275
  chr10:112350169-112350330
  hypo

SEQ ID NO: 313024 - DNA, 142 bp, Homo sapiens; identical to SEQ ID NO: 202276
  chr10:112350748-112350890
  hypo

SEQ ID NO: 313025 - DNA, 151 bp, Homo sapiens; identical to SEQ ID NO: 202277
  chr10:112352830-112352981
  hypo

SEQ ID NO: 313026 - DNA, 153 bp, Homo sapiens; identical to SEQ ID NO: 202278
  chr10:112356155-112356308
  hypo

SEQ ID NO: 313027 - DNA, 152 bp, Homo sapiens; identical to SEQ ID NO: 202279
  chr10:112357896-112358048
  hypo

SEQ ID NO: 313028 - DNA, 159 bp, Homo sapiens; identical to SEQ ID NO: 202280
  chr10:112359411-112359570
  hypo

SEQ ID NO: 313029 - DNA, 108 bp, Homo sapiens; identical to SEQ ID NO: 202281
  chr10:112360196-112360304
  hypo

SEQ ID NO: 313030 - DNA, 109 bp, Homo sapiens; identical to SEQ ID NO: 202282
  chr10:112360779-112360888
  hypo

SEQ ID NO: 313031 - DNA, 542 bp, Homo sapiens; identical to SEQ ID NO: 202283
  chr10:112361394-112361936
  hypo

SEQ ID NO: 313032 - DNA, 817 bp, Homo sapiens; identical to SEQ ID NO: 202284
  chr10:112362231-112363048
  hypo

SEQ ID NO: 313033 - DNA, 404 bp, Homo sapiens; identical to SEQ ID NO: 202285
  chr10:112363988-112364392
  hypo

SEQ ID NO: 313034 - DNA, 232 bp, Homo sapiens; identical to SEQ ID NO: 287530
  chr10:112403994-112404226
  hypo

SEQ ID NO: 313035 - DNA, 57 bp, Homo sapiens; identical to SEQ ID NO: 202287
  chr10:112431815-112431872
  hypo

SEQ ID NO: 313036 - DNA, 235 bp, Homo sapiens; identical to SEQ ID NO: 202288
  chr10:112432125-112432360
  hypo

SEQ ID NO: 313037 - DNA, 260 bp, Homo sapiens; identical to SEQ ID NO: 213724
  chr10:112524228-112524488
  hypo

SEQ ID NO: 313038 - DNA, 224 bp, Homo sapiens; identical to SEQ ID NO: 262346
  chr10:112540576-112540800
  hypo

SEQ ID NO: 313039 - DNA, 43 bp, Homo sapiens; identical to SEQ ID NO: 262348
  chr10:112595366-112595409
  hypo

SEQ ID NO: 313040 - DNA, 35 bp, Homo sapiens; identical to SEQ ID NO: 262349
  chr10:112761502-112761537
  hypo

SEQ ID NO: 313041 - DNA, 210 bp, Homo sapiens; identical to SEQ ID NO: 213725
  chr10:114200386-114200596
  hypo

SEQ ID NO: 313042 - DNA, 106 bp, Homo sapiens; identical to SEQ ID NO: 262351
  chr10:114252634-114252740
  hypo

SEQ ID NO: 313043 - DNA, 73 bp, Homo sapiens; identical to SEQ ID NO: 262352
  chr10:114343131-114343204
  hypo

SEQ ID NO: 313044 - DNA, 96 bp, Homo sapiens; identical to SEQ ID NO: 262353
  chr10:114410445-114410541
  hypo

SEQ ID NO: 313045 - DNA, 47 bp, Homo sapiens; identical to SEQ ID NO: 262354
  chr10:114498664-114498711
  hypo

SEQ ID NO: 313046 - DNA, 232 bp, Homo sapiens; identical to SEQ ID NO: 262355
  chr10:114542054-114542286
  hypo

SEQ ID NO: 313047 - DNA, 59 bp, Homo sapiens; identical to SEQ ID NO: 213726
  chr10:114571439-114571498
  hypo

SEQ ID NO: 313048 - DNA, 121 bp, Homo sapiens; identical to SEQ ID NO: 213727
  chr10:114571537-114571658
  hypo

SEQ ID NO: 313049 - DNA, 250 bp, Homo sapiens; identical to SEQ ID NO: 262358
  chr10:114591112-114591362
  hypo

SEQ ID NO: 313050 - DNA, 228 bp, Homo sapiens; identical to SEQ ID NO: 213728
  chr10:114591692-114591920
  hypo

SEQ ID NO: 313051 - DNA, 33 bp, Homo sapiens; identical to SEQ ID NO: 202295
  chr10:114709864-114709897
  hypo

SEQ ID NO: 313052 - DNA, 56 bp, Homo sapiens; identical to SEQ ID NO: 223949
  chr10:114710115-114710171
  hypo

SEQ ID NO: 313053 - DNA, 290 bp, Homo sapiens; identical to SEQ ID NO: 287545
  chr10:114710660-114710950
  hypo

SEQ ID NO: 313054 - DNA, 46 bp, Homo sapiens; identical to SEQ ID NO: 223951
  chr10:114711334-114711380
  hypo

SEQ ID NO: 313055 - DNA, 182 bp, Homo sapiens; identical to SEQ ID NO: 287547
  chr10:114711918-114712100
  hypo

SEQ ID NO: 313056 - DNA, 430 bp, Homo sapiens; identical to SEQ ID NO: 287548
  chr10:114712446-114712876
  hypo

SEQ ID NO: 313057 - DNA, 262 bp, Homo sapiens
  chr10:114752107-114752369
  hypo
gccctgggagggatgcatgccctccgggagacacccagacccgacagagaggcctttgttggagctggaggtgagaatctgtgggcgttgggattcctgggttcgagttccagctcactgccaattgcccgagtgctgggcgaacatttctggaatcaaaaggagtgcagcctgcccagcagggcctacgggagccggaggctgcagggtgctaagattgcgttatctttaccaagtgcccggagctcctgggagggaagag

SEQ ID NO: 313058 - DNA, 147 bp, Homo sapiens; identical to SEQ ID NO: 262361
  chr10:114834271-114834418
  hypo

SEQ ID NO: 313059 - DNA, 86 bp, Homo sapiens; identical to SEQ ID NO: 262362
  chr10:114858115-114858201
  hypo

SEQ ID NO: 313060 - DNA, 102 bp, Homo sapiens; identical to SEQ ID NO: 213730
  chr10:114867548-114867650
  hypo

SEQ ID NO: 313061 - DNA, 138 bp, Homo sapiens; identical to SEQ ID NO: 262364
  chr10:114868048-114868186
  hypo

SEQ ID NO: 313062 - DNA, 109 bp, Homo sapiens; identical to SEQ ID NO: 262365
  chr10:114868454-114868563
  hypo

SEQ ID NO: 313063 - DNA, 321 bp, Homo sapiens; identical to SEQ ID NO: 262366
  chr10:114877412-114877733
  hypo

SEQ ID NO: 313064 - DNA, 241 bp, Homo sapiens; identical to SEQ ID NO: 262367
  chr10:114878744-114878985
  hypo

SEQ ID NO: 313065 - DNA, 296 bp, Homo sapiens; identical to SEQ ID NO: 262368
  chr10:114902488-114902784
  hypo

SEQ ID NO: 313066 - DNA, 41 bp, Homo sapiens; identical to SEQ ID NO: 262369
  chr10:114913258-114913299
  hypo

SEQ ID NO: 313067 - DNA, 237 bp, Homo sapiens; identical to SEQ ID NO: 262370
  chr10:114925528-114925765
  hypo

SEQ ID NO: 313068 - DNA, 204 bp, Homo sapiens; identical to SEQ ID NO: 262371
  chr10:115201245-115201449
  hypo

SEQ ID NO: 313069 - DNA, 83 bp, Homo sapiens; identical to SEQ ID NO: 262372
  chr10:115548281-115548364
  hypo

SEQ ID NO: 313070 - DNA, 85 bp, Homo sapiens
  chr10:115585200-115585285
  hypo
aaccaatgagtcgtacaggttaaatgtgtgaatcgtatggtatgtgaatcatttctcaataaaactgttttaaaaacattttaaa

SEQ ID NO: 313071 - DNA, 37 bp, Homo sapiens; identical to SEQ ID NO: 262374
  chr10:115612073-115612110
  hypo

SEQ ID NO: 313072 - DNA, 37 bp, Homo sapiens; identical to SEQ ID NO: 213731
  chr10:115671808-115671845
  hypo

SEQ ID NO: 313073 - DNA, 141 bp, Homo sapiens; identical to SEQ ID NO: 287555
  chr10:115804398-115804539
  hypo

SEQ ID NO: 313074 - DNA, 201 bp, Homo sapiens; identical to SEQ ID NO: 202298
  chr10:115805287-115805488
  hypo

SEQ ID NO: 313075 - DNA, 92 bp, Homo sapiens
  chr10:115844855-115844947
  hypo
ggtgtgaagactgcatggtctgtgaacaaggtcaccaagtggagaagaataatgatcatcctggcctctcagaacagcgtggcacctgcaga

SEQ ID NO: 313076 - DNA, 33 bp, Homo sapiens; identical to SEQ ID NO: 213733
  chr10:115925581-115925614
  hypo

SEQ ID NO: 313077 - DNA, 95 bp, Homo sapiens; identical to SEQ ID NO: 262378
  chr10:115940180-115940275
  hypo

SEQ ID NO: 313078 - DNA, 37 bp, Homo sapiens; identical to SEQ ID NO: 262379
  chr10:116007333-116007370
  hypo

SEQ ID NO: 313079 - DNA, 81 bp, Homo sapiens; identical to SEQ ID NO: 213734
  chr10:116011528-116011609
  hypo

SEQ ID NO: 313080 - DNA, 105 bp, Homo sapiens; identical to SEQ ID NO: 213735
  chr10:116028357-116028462
  hypo

SEQ ID NO: 313081 - DNA, 156 bp, Homo sapiens; identical to SEQ ID NO: 262382
  chr10:116034555-116034711
  hypo

SEQ ID NO: 313082 - DNA, 112 bp, Homo sapiens; identical to SEQ ID NO: 213736
  chr10:116045866-116045978
  hypo

SEQ ID NO: 313083 - DNA, 194 bp, Homo sapiens; identical to SEQ ID NO: 213737
  chr10:116046022-116046216
  hypo

SEQ ID NO: 313084 - DNA, 143 bp, Homo sapiens; identical to SEQ ID NO: 262384
  chr10:116050042-116050185
  hypo

SEQ ID NO: 313085 - DNA, 38 bp, Homo sapiens; identical to SEQ ID NO: 262385
  chr10:116188468-116188506
  hypo

SEQ ID NO: 313086 - DNA, 151 bp, Homo sapiens; identical to SEQ ID NO: 262386
  chr10:116190955-116191106
  hypo

SEQ ID NO: 313087 - DNA, 186 bp, Homo sapiens; identical to SEQ ID NO: 262387
  chr10:116203666-116203852
  hypo

SEQ ID NO: 313088 - DNA, 38 bp, Homo sapiens; identical to SEQ ID NO: 213738
  chr10:116282622-116282660
  hypo

SEQ ID NO: 313089 - DNA, 95 bp, Homo sapiens; identical to SEQ ID NO: 262389
  chr10:116304716-116304811
  hypo

SEQ ID NO: 313090 - DNA, 117 bp, Homo sapiens
  chr10:116331009-116331126
  hypo
ctggactacataggtattcacgtcagtgggtcaccggggcacttactgctggagaaggtggtttctttcggactggacgacatcggctgtgcacagagttgacaaaggcagtctctc

SEQ ID NO: 313091 - DNA, 933 bp, Homo sapiens; identical to SEQ ID NO: 202303
  chr10:116527400-116528333
  hypo

SEQ ID NO: 313092 - DNA, 74 bp, Homo sapiens; identical to SEQ ID NO: 287572
  chr10:116852172-116852246
  hypo

SEQ ID NO: 313093 - DNA, 206 bp, Homo sapiens; identical to SEQ ID NO: 287573
  chr10:116852441-116852647
  hypo

SEQ ID NO: 313094 - DNA, 89 bp, Homo sapiens; identical to SEQ ID NO: 262391
  chr10:118740858-118740947
  hypo

SEQ ID NO: 313095 - DNA, 33 bp, Homo sapiens; identical to SEQ ID NO: 262392
  chr10:118742173-118742206
  hypo

SEQ ID NO: 313096 - DNA, 571 bp, Homo sapiens; identical to SEQ ID NO: 287578
  chr10:118764187-118764758
  hypo

SEQ ID NO: 313097 - DNA, 180 bp, Homo sapiens; identical to SEQ ID NO: 287579
  chr10:118764980-118765160
  hypo

SEQ ID NO: 313098 - DNA, 72 bp, Homo sapiens; identical to SEQ ID NO: 202310
  chr10:119001564-119001636
  hypo

SEQ ID NO: 313099 - DNA, 99 bp, Homo sapiens; identical to SEQ ID NO: 213743
  chr10:119180987-119181086
  hypo

SEQ ID NO: 313100 - DNA, 308 bp, Homo sapiens; identical to SEQ ID NO: 202311
  chr10:119256046-119256354
  hypo

SEQ ID NO: 313101 - DNA, 234 bp, Homo sapiens; identical to SEQ ID NO: 287600
  chr10:119302459-119302693
  hypo

SEQ ID NO: 313102 - DNA, 102 bp, Homo sapiens; identical to SEQ ID NO: 262394
  chr10:119374701-119374803
  hypo

SEQ ID NO: 313103 - DNA, 204 bp, Homo sapiens; identical to SEQ ID NO: 262395
  chr10:119543606-119543810
  hypo

SEQ ID NO: 313104 - DNA, 75 bp, Homo sapiens; identical to SEQ ID NO: 262396
  chr10:119680912-119680987
  hypo

SEQ ID NO: 313105 - DNA, 107 bp, Homo sapiens
  chr10:119807131-119807238
  hypo
tgtggtggactgtgcaaatcatgtggagaccatgccccaaacacgggtttcgagtttcaggggataatacatgtgcctttcctagcacaatgcggcacataaatctc

SEQ ID NO: 313106 - DNA, 63 bp, Homo sapiens; identical to SEQ ID NO: 262398
  chr10:119876202-119876265
  hypo

SEQ ID NO: 313107 - DNA, 47 bp, Homo sapiens; identical to SEQ ID NO: 213746
  chr10:120011733-120011780
  hypo

SEQ ID NO: 313108 - DNA, 189 bp, Homo sapiens; identical to SEQ ID NO: 262400
  chr10:120170438-120170627
  hypo

SEQ ID NO: 313109 - DNA, 441 bp, Homo sapiens; identical to SEQ ID NO: 287614
  chr10:120514800-120515241
  hypo

SEQ ID NO: 313110 - DNA, 41 bp, Homo sapiens; identical to SEQ ID NO: 262401
  chr10:120518464-120518505
  hypo

SEQ ID NO: 313111 - DNA, 34 bp, Homo sapiens; identical to SEQ ID NO: 262402
  chr10:120584843-120584877
  hypo

SEQ ID NO: 313112 - DNA, 108 bp, Homo sapiens; identical to SEQ ID NO: 213747
  chr10:120601821-120601929
  hypo

SEQ ID NO: 313113 - DNA, 93 bp, Homo sapiens; identical to SEQ ID NO: 213748
  chr10:120822534-120822627
  hypo

SEQ ID NO: 313114 - DNA, 151 bp, Homo sapiens; identical to SEQ ID NO: 213749
  chr10:120926967-120927118
  hypo

SEQ ID NO: 313115 - DNA, 49 bp, Homo sapiens; identical to SEQ ID NO: 262407
  chr10:120966063-120966112
  hypo

SEQ ID NO: 313116 - DNA, 35 bp, Homo sapiens; identical to SEQ ID NO: 262408
  chr10:120996576-120996611
  hypo

SEQ ID NO: 313117 - DNA, 155 bp, Homo sapiens; identical to SEQ ID NO: 262409
  chr10:121103957-121104112
  hypo

SEQ ID NO: 313118 - DNA, 214 bp, Homo sapiens; identical to SEQ ID NO: 262410
  chr10:121182611-121182825
  hypo

SEQ ID NO: 313119 - DNA, 112 bp, Homo sapiens
  chr10:121228865-121228977
  hypo
caggagcgcttcaccgggggcctggaggtggtaagtgccaagaaacagtggccatgttcctgtggtctcgagtgatgttacaactccctggcaaggtgggcagtggcacccg

SEQ ID NO: 313120 - DNA, 149 bp, Homo sapiens; identical to SEQ ID NO: 262412
  chr10:121260422-121260571
  hypo

SEQ ID NO: 313121 - DNA, 174 bp, Homo sapiens; identical to SEQ ID NO: 262413
  chr10:121264282-121264456
  hypo

SEQ ID NO: 313122 - DNA, 80 bp, Homo sapiens; identical to SEQ ID NO: 262414
  chr10:121264730-121264810
  hypo

SEQ ID NO: 313123 - DNA, 131 bp, Homo sapiens; identical to SEQ ID NO: 213750
  chr10:121265440-121265571
  hypo

SEQ ID NO: 313124 - DNA, 251 bp, Homo sapiens; identical to SEQ ID NO: 262416
  chr10:121265790-121266041
  hypo

SEQ ID NO: 313125 - DNA, 84 bp, Homo sapiens; identical to SEQ ID NO: 223965
  chr10:121271622-121271706
  hypo

SEQ ID NO: 313126 - DNA, 128 bp, Homo sapiens; identical to SEQ ID NO: 287616
  chr10:121301366-121301494
  hypo

SEQ ID NO: 313127 - DNA, 761 bp, Homo sapiens; identical to SEQ ID NO: 287617
  chr10:121301911-121302672
  hypo

SEQ ID NO: 313128 - DNA, 43 bp, Homo sapiens; identical to SEQ ID NO: 202334
  chr10:121356079-121356122
  hypo

SEQ ID NO: 313129 - DNA, 41 bp, Homo sapiens
  chr10:121397983-121398024
  hypo
acaactggcacaagcgccgcaagactggcagcaagagaaag

SEQ ID NO: 313130 - DNA, 230 bp, Homo sapiens
  chr10:121398054-121398284
  hypo
gggcacctggctgccaacaccaagattggcccccaccacatccacacagtccgtgtgcggggaggtaacaataaatacggtgccctgaggcgggacatggggaatttctcctggggttcagagtgttgtactcgcaaaacaaggatcactgatgttgtctacgatgcgcccaatagcaagctggtccgtaccaagaccctggtggagaactgcttcgtgctcactgacag

SEQ ID NO: 313131 - DNA, 279 bp, Homo sapiens; identical to SEQ ID NO: 213755
  chr10:121429483-121429762
  hypo

SEQ ID NO: 313132 - DNA, 174 bp, Homo sapiens; identical to SEQ ID NO: 213756
  chr10:121550361-121550535
  hypo

SEQ ID NO: 313133 - DNA, 61 bp, Homo sapiens; identical to SEQ ID NO: 213757
  chr10:121591477-121591538
  hypo

SEQ ID NO: 313134 - DNA, 126 bp, Homo sapiens; identical to SEQ ID NO: 262421
  chr10:121663600-121663726
  hypo

SEQ ID NO: 313135 - DNA, 165 bp, Homo sapiens; identical to SEQ ID NO: 262422
  chr10:121702239-121702404
  hypo

SEQ ID NO: 313136 - DNA, 42 bp, Homo sapiens; identical to SEQ ID NO: 262423
  chr10:122214596-122214638
  hypo

SEQ ID NO: 313137 - DNA, 34 bp, Homo sapiens; identical to SEQ ID NO: 213758
  chr10:123037580-123037614
  hypo

SEQ ID NO: 313138 - DNA, 34 bp, Homo sapiens; identical to SEQ ID NO: 213759
  chr10:123037854-123037888
  hypo

SEQ ID NO: 313139 - DNA, 84 bp, Homo sapiens; identical to SEQ ID NO: 213760
  chr10:123063523-123063607
  hypo

SEQ ID NO: 313140 - DNA, 77 bp, Homo sapiens; identical to SEQ ID NO: 262427
  chr10:123335738-123335815
  hypo

SEQ ID NO: 313141 - DNA, 137 bp, Homo sapiens; identical to SEQ ID NO: 262428
  chr10:123492975-123493112
  hypo

SEQ ID NO: 313142 - DNA, 196 bp, Homo sapiens; identical to SEQ ID NO: 262429
  chr10:123757357-123757553
  hypo

SEQ ID NO: 313143 - DNA, 103 bp, Homo sapiens; identical to SEQ ID NO: 262430
  chr10:123837325-123837428
  hypo

SEQ ID NO: 313144 - DNA, 238 bp, Homo sapiens; identical to SEQ ID NO: 262431
  chr10:123842298-123842536
  hypo

SEQ ID NO: 313145 - DNA, 334 bp, Homo sapiens; identical to SEQ ID NO: 262432
  chr10:123879960-123880294
  hypo

SEQ ID NO: 313146 - DNA, 237 bp, Homo sapiens; identical to SEQ ID NO: 262433
  chr10:123910181-123910418
  hypo

SEQ ID NO: 313147 - DNA, 176 bp, Homo sapiens; identical to SEQ ID NO: 262434
  chr10:123952375-123952551
  hypo

SEQ ID NO: 313148 - DNA, 42 bp, Homo sapiens; identical to SEQ ID NO: 213763
  chr10:123971195-123971237
  hypo

SEQ ID NO: 313149 - DNA, 39 bp, Homo sapiens; identical to SEQ ID NO: 213764
  chr10:123977732-123977771
  hypo

SEQ ID NO: 313150 - DNA, 179 bp, Homo sapiens; identical to SEQ ID NO: 262437
  chr10:123988940-123989119
  hypo

SEQ ID NO: 313151 - DNA, 87 bp, Homo sapiens; identical to SEQ ID NO: 262438
  chr10:124028462-124028549
  hypo

SEQ ID NO: 313152 - DNA, 723 bp, Homo sapiens; identical to SEQ ID NO: 202345
  chr10:124134313-124135036
  hypo

SEQ ID NO: 313153 - DNA, 284 bp, Homo sapiens; identical to SEQ ID NO: 262439
  chr10:124248922-124249206
  hypo

SEQ ID NO: 313154 - DNA, 189 bp, Homo sapiens; identical to SEQ ID NO: 262440
  chr10:124609891-124610080
  hypo

SEQ ID NO: 313155 - DNA, 45 bp, Homo sapiens; identical to SEQ ID NO: 213766
  chr10:124712595-124712640
  hypo

SEQ ID NO: 313156 - DNA, 120 bp, Homo sapiens; identical to SEQ ID NO: 262442
  chr10:124738944-124739064
  hypo

SEQ ID NO: 313157 - DNA, 78 bp, Homo sapiens; identical to SEQ ID NO: 262443
  chr10:124922178-124922256
  hypo

SEQ ID NO: 313158 - DNA, 31 bp, Homo sapiens; identical to SEQ ID NO: 262444
  chr10:124931354-124931385
  hypo

SEQ ID NO: 313159 - DNA, 124 bp, Homo sapiens; identical to SEQ ID NO: 262445
  chr10:124964477-124964601
  hypo

SEQ ID NO: 313160 - DNA, 162 bp, Homo sapiens; identical to SEQ ID NO: 262446
  chr10:125017526-125017688
  hypo

SEQ ID NO: 313161 - DNA, 290 bp, Homo sapiens; identical to SEQ ID NO: 213767
  chr10:125617037-125617327
  hypo

SEQ ID NO: 313162 - DNA, 58 bp, Homo sapiens; identical to SEQ ID NO: 262448
  chr10:125769654-125769712
  hypo

SEQ ID NO: 313163 - DNA, 80 bp, Homo sapiens; identical to SEQ ID NO: 262449
  chr10:125984183-125984263
  hypo

SEQ ID NO: 313164 - DNA, 45 bp, Homo sapiens; identical to SEQ ID NO: 262451
  chr10:126102246-126102291
  hypo

SEQ ID NO: 313165 - DNA, 1217 bp, Homo sapiens; identical to SEQ ID NO: 223973
  chr10:126106654-126107871
  hypo

SEQ ID NO: 313166 - DNA, 120 bp, Homo sapiens; identical to SEQ ID NO: 262452
  chr10:126114966-126115086
  hypo

SEQ ID NO: 313167 - DNA, 120 bp, Homo sapiens; identical to SEQ ID NO: 262453
  chr10:126115344-126115464
  hypo

SEQ ID NO: 313168 - DNA, 81 bp, Homo sapiens; identical to SEQ ID NO: 262454
  chr10:126186174-126186255
  hypo

SEQ ID NO: 313169 - DNA, 93 bp, Homo sapiens; identical to SEQ ID NO: 213769
  chr10:126190197-126190290
  hypo

SEQ ID NO: 313170 - DNA, 71 bp, Homo sapiens; identical to SEQ ID NO: 213770
  chr10:126198878-126198949
  hypo

SEQ ID NO: 313171 - DNA, 387 bp, Homo sapiens; identical to SEQ ID NO: 262457
  chr10:126238653-126239040
  hypo

SEQ ID NO: 313172 - DNA, 34 bp, Homo sapiens; identical to SEQ ID NO: 262458
  chr10:126240418-126240452
  hypo

SEQ ID NO: 313173 - DNA, 39 bp, Homo sapiens
  chr10:126254748-126254787
  hypo
gtgggccaggtcctggagaccgggcgtgtggttatgggc

SEQ ID NO: 313174 - DNA, 151 bp, Homo sapiens; identical to SEQ ID NO: 213772
  chr10:126265312-126265463
  hypo

SEQ ID NO: 313175 - DNA, 34 bp, Homo sapiens; identical to SEQ ID NO: 262461
  chr10:126267744-126267778
  hypo

SEQ ID NO: 313176 - DNA, 77 bp, Homo sapiens; identical to SEQ ID NO: 213773
  chr10:126287226-126287303
  hypo

SEQ ID NO: 313177 - DNA, 362 bp, Homo sapiens; identical to SEQ ID NO: 262463
  chr10:126296072-126296434
  hypo

SEQ ID NO: 313178 - DNA, 411 bp, Homo sapiens; identical to SEQ ID NO: 213775
  chr10:126305757-126306168
  hypo

SEQ ID NO: 313179 - DNA, 317 bp, Homo sapiens; identical to SEQ ID NO: 262465
  chr10:126307213-126307530
  hypo

SEQ ID NO: 313180 - DNA, 240 bp, Homo sapiens; identical to SEQ ID NO: 262466
  chr10:126309753-126309993
  hypo

SEQ ID NO: 313181 - DNA, 119 bp, Homo sapiens; identical to SEQ ID NO: 262467
  chr10:126311518-126311637
  hypo

SEQ ID NO: 313182 - DNA, 219 bp, Homo sapiens; identical to SEQ ID NO: 262468
  chr10:126311864-126312083
  hypo

SEQ ID NO: 313183 - DNA, 184 bp, Homo sapiens; identical to SEQ ID NO: 213776
  chr10:126312314-126312498
  hypo

SEQ ID NO: 313184 - DNA, 229 bp, Homo sapiens; identical to SEQ ID NO: 262470
  chr10:126313238-126313467
  hypo

SEQ ID NO: 313185 - DNA, 75 bp, Homo sapiens; identical to SEQ ID NO: 213777
  chr10:126314663-126314738
  hypo

SEQ ID NO: 313186 - DNA, 217 bp, Homo sapiens; identical to SEQ ID NO: 213778
  chr10:126317368-126317585
  hypo

SEQ ID NO: 313187 - DNA, 331 bp, Homo sapiens; identical to SEQ ID NO: 262474
  chr10:126321123-126321454
  hypo

SEQ ID NO: 313188 - DNA, 190 bp, Homo sapiens; identical to SEQ ID NO: 213779
  chr10:126325797-126325987
  hypo

SEQ ID NO: 313189 - DNA, 32 bp, Homo sapiens; identical to SEQ ID NO: 213780
  chr10:126331895-126331927
  hypo

SEQ ID NO: 313190 - DNA, 185 bp, Homo sapiens; identical to SEQ ID NO: 213781
  chr10:126332086-126332271
  hypo

SEQ ID NO: 313191 - DNA, 354 bp, Homo sapiens; identical to SEQ ID NO: 262477
  chr10:126354232-126354586
  hypo

SEQ ID NO: 313192 - DNA, 328 bp, Homo sapiens; identical to SEQ ID NO: 262478
  chr10:126367644-126367972
  hypo

SEQ ID NO: 313193 - DNA, 310 bp, Homo sapiens; identical to SEQ ID NO: 213782
  chr10:126370268-126370578
  hypo

SEQ ID NO: 313194 - DNA, 256 bp, Homo sapiens; identical to SEQ ID NO: 262480
  chr10:126386075-126386331
  hypo

SEQ ID NO: 313195 - DNA, 128 bp, Homo sapiens; identical to SEQ ID NO: 262481
  chr10:126420270-126420398
  hypo

SEQ ID NO: 313196 - DNA, 79 bp, Homo sapiens; identical to SEQ ID NO: 262482
  chr10:126435116-126435195
  hypo

SEQ ID NO: 313197 - DNA, 1148 bp, Homo sapiens; identical to SEQ ID NO: 262483
  chr10:126690291-126691439
  hypo

SEQ ID NO: 313198 - DNA, 238 bp, Homo sapiens; identical to SEQ ID NO: 262484
  chr10:126694641-126694879
  hypo

SEQ ID NO: 313199 - DNA, 264 bp, Homo sapiens; identical to SEQ ID NO: 262485
  chr10:126696783-126697047
  hypo

SEQ ID NO: 313200 - DNA, 55 bp, Homo sapiens
  chr10:126698107-126698162
  hypo
ttaagtggccgctttctgcaatccagcatgacccgatccccactggctgagctca

SEQ ID NO: 313201 - DNA, 80 bp, Homo sapiens; identical to SEQ ID NO: 262487
  chr10:126701135-126701215
  hypo

SEQ ID NO: 313202 - DNA, 53 bp, Homo sapiens; identical to SEQ ID NO: 262488
  chr10:126702213-126702266
  hypo

SEQ ID NO: 313203 - DNA, 215 bp, Homo sapiens; identical to SEQ ID NO: 262489
  chr10:126702577-126702792
  hypo

SEQ ID NO: 313204 - DNA, 36 bp, Homo sapiens; identical to SEQ ID NO: 213784
  chr10:126709396-126709432
  hypo

SEQ ID NO: 313205 - DNA, 105 bp, Homo sapiens; identical to SEQ ID NO: 262491
  chr10:126710674-126710779
  hypo

SEQ ID NO: 313206 - DNA, 136 bp, Homo sapiens; identical to SEQ ID NO: 262492
  chr10:126711480-126711616
  hypo

SEQ ID NO: 313207 - DNA, 1831 bp, Homo sapiens; identical to SEQ ID NO: 262493
  chr10:126714618-126716449
  hypo

SEQ ID NO: 313208 - DNA, 313 bp, Homo sapiens; identical to SEQ ID NO: 262494
  chr10:126721932-126722245
  hypo

SEQ ID NO: 313209 - DNA, 40 bp, Homo sapiens; identical to SEQ ID NO: 262495
  chr10:126726953-126726993
  hypo

SEQ ID NO: 313210 - DNA, 306 bp, Homo sapiens; identical to SEQ ID NO: 213786
  chr10:126732716-126733022
  hypo

SEQ ID NO: 313211 - DNA, 42 bp, Homo sapiens; identical to SEQ ID NO: 262497
  chr10:126738868-126738910
  hypo

SEQ ID NO: 313212 - DNA, 89 bp, Homo sapiens; identical to SEQ ID NO: 213787
  chr10:126751063-126751152
  hypo

SEQ ID NO: 313213 - DNA, 181 bp, Homo sapiens; identical to SEQ ID NO: 262499
  chr10:126763482-126763663
  hypo

SEQ ID NO: 313214 - DNA, 285 bp, Homo sapiens; identical to SEQ ID NO: 213788
  chr10:126767711-126767996
  hypo

SEQ ID NO: 313215 - DNA, 578 bp, Homo sapiens; identical to SEQ ID NO: 262501
  chr10:126771762-126772340
  hypo

SEQ ID NO: 313216 - DNA, 38 bp, Homo sapiens; identical to SEQ ID NO: 213790
  chr10:126772640-126772678
  hypo

SEQ ID NO: 313217 - DNA, 120 bp, Homo sapiens; identical to SEQ ID NO: 262503
  chr10:126774972-126775092
  hypo

SEQ ID NO: 313218 - DNA, 199 bp, Homo sapiens; identical to SEQ ID NO: 213791
  chr10:126775428-126775627
  hypo

SEQ ID NO: 313219 - DNA, 51 bp, Homo sapiens; identical to SEQ ID NO: 262505
  chr10:126786130-126786181
  hypo

SEQ ID NO: 313220 - DNA, 334 bp, Homo sapiens; identical to SEQ ID NO: 262506
  chr10:126786698-126787032
  hypo

SEQ ID NO: 313221 - DNA, 92 bp, Homo sapiens; identical to SEQ ID NO: 262507
  chr10:126787572-126787664
  hypo

SEQ ID NO: 313222 - DNA, 291 bp, Homo sapiens; identical to SEQ ID NO: 262508
  chr10:126789760-126790051
  hypo

SEQ ID NO: 313223 - DNA, 193 bp, Homo sapiens; identical to SEQ ID NO: 262509
  chr10:126792667-126792860
  hypo

SEQ ID NO: 313224 - DNA, 437 bp, Homo sapiens; identical to SEQ ID NO: 262510
  chr10:126794866-126795303
  hypo

SEQ ID NO: 313225 - DNA, 50 bp, Homo sapiens; identical to SEQ ID NO: 262511
  chr10:126809817-126809867
  hypo

SEQ ID NO: 313226 - DNA, 229 bp, Homo sapiens; identical to SEQ ID NO: 262512
  chr10:126811107-126811336
  hypo

SEQ ID NO: 313227 - DNA, 421 bp, Homo sapiens; identical to SEQ ID NO: 213793
  chr10:126819309-126819730
  hypo

SEQ ID NO: 313228 - DNA, 79 bp, Homo sapiens
  chr10:126828915-126828994
  hypo
atcacgatgactgccgcttaaacctgccctcagcctgactgatgtgatgagggaaggggacaaagaatgagctccgaaa

SEQ ID NO: 313229 - DNA, 404 bp, Homo sapiens; identical to SEQ ID NO: 213794
  chr10:126830138-126830542
  hypo

SEQ ID NO: 313230 - DNA, 120 bp, Homo sapiens; identical to SEQ ID NO: 262516
  chr10:126839532-126839652
  hypo

SEQ ID NO: 313231 - DNA, 285 bp, Homo sapiens; identical to SEQ ID NO: 287655
  chr10:126847584-126847869
  hypo

SEQ ID NO: 313232 - DNA, 123 bp, Homo sapiens; identical to SEQ ID NO: 47906
  chr10:126847900-126848023
  hypo

SEQ ID NO: 313233 - DNA, 647 bp, Homo sapiens; identical to SEQ ID NO: 287659
  chr10:126849498-126850145
  hypo

SEQ ID NO: 313234 - DNA, 136 bp, Homo sapiens; identical to SEQ ID NO: 262517
  chr10:126912092-126912228
  hypo

SEQ ID NO: 313235 - DNA, 149 bp, Homo sapiens; identical to SEQ ID NO: 262518
  chr10:127263257-127263406
  hypo

SEQ ID NO: 313236 - DNA, 37 bp, Homo sapiens; identical to SEQ ID NO: 262519
  chr10:127277450-127277487
  hypo

SEQ ID NO: 313237 - DNA, 274 bp, Homo sapiens; identical to SEQ ID NO: 262520
  chr10:127314344-127314618
  hypo

SEQ ID NO: 313238 - DNA, 171 bp, Homo sapiens; identical to SEQ ID NO: 262521
  chr10:127415615-127415786
  hypo

SEQ ID NO: 313239 - DNA, 155 bp, Homo sapiens
  chr10:127451804-127451959
  hypo
gacctctgaattgtcggtaggcattgctggtcccttacctgtctctttttcttttttaaccctagcaataacatcgaagatgacacaattctcaaaaccaacaagcacatttactcccagcttttgagagcaactgcaaataaaaccgcgactct

SEQ ID NO: 313240 - DNA, 59 bp, Homo sapiens
  chr10:127452067-127452126
  hypo
ctgtcagtgccttcaacacggagccggtttgttcattcggtgctttgtttcattaaata

SEQ ID NO: 313241 - DNA, 252 bp, Homo sapiens
  chr10:127464203-127464455
  hypo
tgctgttcttccagcttcctcctacctgagcagcgtggaggtcggcaatgggcttggcctggcgcagtggggacggctccaggtccgagcggtcccggctgtggaagagactctcgggctgggtgggccagggagcagccagccagcagagcagcagtgtcggacggaagatggaggcggcgagcattggcctggtctgaacccttgccctccctgcctggcttcttccccgtccccgtcacctctccttaa

SEQ ID NO: 313242 - DNA, 91 bp, Homo sapiens; identical to SEQ ID NO: 262525
  chr10:127616426-127616517
  hypo

SEQ ID NO: 313243 - DNA, 85 bp, Homo sapiens; identical to SEQ ID NO: 262526
  chr10:127659356-127659441
  hypo

SEQ ID NO: 313244 - DNA, 259 bp, Homo sapiens; identical to SEQ ID NO: 213798
  chr10:127817216-127817475
  hypo

SEQ ID NO: 313245 - DNA, 36 bp, Homo sapiens; identical to SEQ ID NO: 213799
  chr10:127937968-127938004
  hypo

SEQ ID NO: 313246 - DNA, 84 bp, Homo sapiens; identical to SEQ ID NO: 262530
  chr10:128767291-128767375
  hypo

SEQ ID NO: 313247 - DNA, 34 bp, Homo sapiens; identical to SEQ ID NO: 213800
  chr10:128767590-128767624
  hypo

SEQ ID NO: 313248 - DNA, 44 bp, Homo sapiens; identical to SEQ ID NO: 213801
  chr10:128779079-128779123
  hypo

SEQ ID NO: 313249 - DNA, 135 bp, Homo sapiens; identical to SEQ ID NO: 262533
  chr10:128804389-128804524
  hypo

SEQ ID NO: 313250 - DNA, 140 bp, Homo sapiens; identical to SEQ ID NO: 213802
  chr10:128804853-128804993
  hypo

SEQ ID NO: 313251 - DNA, 254 bp, Homo sapiens; identical to SEQ ID NO: 213803
  chr10:128813792-128814046
  hypo

SEQ ID NO: 313252 - DNA, 116 bp, Homo sapiens; identical to SEQ ID NO: 213804
  chr10:128816343-128816459
  hypo

SEQ ID NO: 313253 - DNA, 115 bp, Homo sapiens; identical to SEQ ID NO: 262537
  chr10:128819000-128819115
  hypo

SEQ ID NO: 313254 - DNA, 76 bp, Homo sapiens; identical to SEQ ID NO: 262538
  chr10:128863994-128864070
  hypo

SEQ ID NO: 313255 - DNA, 38 bp, Homo sapiens; identical to SEQ ID NO: 213805
  chr10:128874462-128874500
  hypo

SEQ ID NO: 313256 - DNA, 89 bp, Homo sapiens
  chr10:128888487-128888576
  hypo
tgggtaccaggcagtggcaccggaactcattaagaaggtgactaatttcagggccgtgttaacatagactgaggctccatcatggttcc

SEQ ID NO: 313257 - DNA, 31 bp, Homo sapiens; identical to SEQ ID NO: 213806
  chr10:128891890-128891921
  hypo

SEQ ID NO: 313258 - DNA, 78 bp, Homo sapiens; identical to SEQ ID NO: 262542
  chr10:128897856-128897934
  hypo

SEQ ID NO: 313259 - DNA, 204 bp, Homo sapiens; identical to SEQ ID NO: 262543
  chr10:128898512-128898716
  hypo

SEQ ID NO: 313260 - DNA, 194 bp, Homo sapiens; identical to SEQ ID NO: 262544
  chr10:128899935-128900129
  hypo

SEQ ID NO: 313261 - DNA, 203 bp, Homo sapiens; identical to SEQ ID NO: 262545
  chr10:128904395-128904598
  hypo

SEQ ID NO: 313262 - DNA, 62 bp, Homo sapiens; identical to SEQ ID NO: 262546
  chr10:128930828-128930890
  hypo

SEQ ID NO: 313263 - DNA, 194 bp, Homo sapiens; identical to SEQ ID NO: 262547
  chr10:128936062-128936256
  hypo

SEQ ID NO: 313264 - DNA, 418 bp, Homo sapiens; identical to SEQ ID NO: 262548
  chr10:128973759-128974177
  hypo

SEQ ID NO: 313265 - DNA, 204 bp, Homo sapiens; identical to SEQ ID NO: 213807
  chr10:128999161-128999365
  hypo

SEQ ID NO: 313266 - DNA, 41 bp, Homo sapiens; identical to SEQ ID NO: 262550
  chr10:129057988-129058029
  hypo

SEQ ID NO: 313267 - DNA, 131 bp, Homo sapiens; identical to SEQ ID NO: 213808
  chr10:129065863-129065994
  hypo

SEQ ID NO: 313268 - DNA, 95 bp, Homo sapiens; identical to SEQ ID NO: 262552
  chr10:129144158-129144253
  hypo

SEQ ID NO: 313269 - DNA, 146 bp, Homo sapiens; identical to SEQ ID NO: 262553
  chr10:129144283-129144429
  hypo

SEQ ID NO: 313270 - DNA, 91 bp, Homo sapiens; identical to SEQ ID NO: 262554
  chr10:129156702-129156793
  hypo

SEQ ID NO: 313271 - DNA, 214 bp, Homo sapiens; identical to SEQ ID NO: 262555
  chr10:129165713-129165927
  hypo

SEQ ID NO: 313272 - DNA, 94 bp, Homo sapiens; identical to SEQ ID NO: 262556
  chr10:129182943-129183037
  hypo

SEQ ID NO: 313273 - DNA, 327 bp, Homo sapiens; identical to SEQ ID NO: 213809
  chr10:129195281-129195608
  hypo

SEQ ID NO: 313274 - DNA, 447 bp, Homo sapiens; identical to SEQ ID NO: 213810
  chr10:129195668-129196115
  hypo

SEQ ID NO: 313275 - DNA, 47 bp, Homo sapiens; identical to SEQ ID NO: 262559
  chr10:129199502-129199549
  hypo

SEQ ID NO: 313276 - DNA, 159 bp, Homo sapiens; identical to SEQ ID NO: 262560
  chr10:129218388-129218547
  hypo

SEQ ID NO: 313277 - DNA, 116 bp, Homo sapiens; identical to SEQ ID NO: 262561
  chr10:129227987-129228103
  hypo

SEQ ID NO: 313278 - DNA, 196 bp, Homo sapiens; identical to SEQ ID NO: 213811
  chr10:129236892-129237088
  hypo

SEQ ID NO: 313279 - DNA, 200 bp, Homo sapiens; identical to SEQ ID NO: 213812
  chr10:129237715-129237915
  hypo

SEQ ID NO: 313280 - DNA, 205 bp, Homo sapiens; identical to SEQ ID NO: 262564
  chr10:129239688-129239893
  hypo

SEQ ID NO: 313281 - DNA, 201 bp, Homo sapiens; identical to SEQ ID NO: 262565
  chr10:129241061-129241262
  hypo

SEQ ID NO: 313282 - DNA, 168 bp, Homo sapiens; identical to SEQ ID NO: 262566
  chr10:129242400-129242568
  hypo

SEQ ID NO: 313283 - DNA, 698 bp, Homo sapiens; identical to SEQ ID NO: 213813
  chr10:129245252-129245950
  hypo

SEQ ID NO: 313284 - DNA, 48 bp, Homo sapiens; identical to SEQ ID NO: 213814
  chr10:129245980-129246028
  hypo

SEQ ID NO: 313285 - DNA, 90 bp, Homo sapiens; identical to SEQ ID NO: 262569
  chr10:129249788-129249878
  hypo

SEQ ID NO: 313286 - DNA, 99 bp, Homo sapiens; identical to SEQ ID NO: 262570
  chr10:129721602-129721701
  hypo

SEQ ID NO: 313287 - DNA, 84 bp, Homo sapiens; identical to SEQ ID NO: 262571
  chr10:129865329-129865413
  hypo

SEQ ID NO: 313288 - DNA, 130 bp, Homo sapiens; identical to SEQ ID NO: 213815
  chr10:129907594-129907724
  hypo

SEQ ID NO: 313289 - DNA, 62 bp, Homo sapiens; identical to SEQ ID NO: 213816
  chr10:129907754-129907816
  hypo

SEQ ID NO: 313290 - DNA, 260 bp, Homo sapiens; identical to SEQ ID NO: 262574
  chr10:130123679-130123939
  hypo

SEQ ID NO: 313291 - DNA, 401 bp, Homo sapiens; identical to SEQ ID NO: 262575
  chr10:130185248-130185649
  hypo

SEQ ID NO: 313292 - DNA, 44 bp, Homo sapiens; identical to SEQ ID NO: 213817
  chr10:130203290-130203334
  hypo

SEQ ID NO: 313293 - DNA, 52 bp, Homo sapiens; identical to SEQ ID NO: 262577
  chr10:130259851-130259903
  hypo

SEQ ID NO: 313294 - DNA, 122 bp, Homo sapiens; identical to SEQ ID NO: 262578
  chr10:130265103-130265225
  hypo

SEQ ID NO: 313295 - DNA, 216 bp, Homo sapiens; identical to SEQ ID NO: 213818
  chr10:130300171-130300387
  hypo

SEQ ID NO: 313296 - DNA, 302 bp, Homo sapiens; identical to SEQ ID NO: 262581
  chr10:130748864-130749166
  hypo

SEQ ID NO: 313297 - DNA, 40 bp, Homo sapiens; identical to SEQ ID NO: 262582
  chr10:130828604-130828644
  hypo

SEQ ID NO: 313298 - DNA, 183 bp, Homo sapiens; identical to SEQ ID NO: 262583
  chr10:130828912-130829095
  hypo

SEQ ID NO: 313299 - DNA, 42 bp, Homo sapiens; identical to SEQ ID NO: 262584
  chr10:130911838-130911880
  hypo

SEQ ID NO: 313300 - DNA, 71 bp, Homo sapiens; identical to SEQ ID NO: 262585
  chr10:131301187-131301258
  hypo

SEQ ID NO: 313301 - DNA, 221 bp, Homo sapiens; identical to SEQ ID NO: 262586
  chr10:131329753-131329974
  hypo

SEQ ID NO: 313302 - DNA, 125 bp, Homo sapiens
  chr10:131348388-131348513
  hypo
ctgcatctgccatttgtgaacgtacagttgagcgacattagttggtgccatctgtgagtgcacagtgcagcaactttagggggttcacaatgttccgcagccatcaccgccgcccagcactggca

SEQ ID NO: 313303 - DNA, 207 bp, Homo sapiens
  chr10:131377660-131377867
  hypo
cagagctttctgctcatccccggatcatggcagcgtcagatggaactcggcctgccccgtttctgtgcagctgtcaggatgtatggggttttcccatgctccgtgcctccatgcctgcggcactttggaaggacgttaaggcaggacatctttaggagaatgtctttattgactttgtctttatttaccttgggcctggcgctgtta

SEQ ID NO: 313304 - DNA, 265 bp, Homo sapiens; identical to SEQ ID NO: 262589
  chr10:131378237-131378502
  hypo

SEQ ID NO: 313305 - DNA, 124 bp, Homo sapiens; identical to SEQ ID NO: 262590
  chr10:131412743-131412867
  hypo

SEQ ID NO: 313306 - DNA, 126 bp, Homo sapiens; identical to SEQ ID NO: 262591
  chr10:131428277-131428403
  hypo

SEQ ID NO: 313307 - DNA, 189 bp, Homo sapiens; identical to SEQ ID NO: 213819
  chr10:131566934-131567123
  hypo

SEQ ID NO: 313308 - DNA, 191 bp, Homo sapiens; identical to SEQ ID NO: 213820
  chr10:131577565-131577756
  hypo

SEQ ID NO: 313309 - DNA, 218 bp, Homo sapiens
  chr10:131592426-131592644
  hypo
ggagcagccgcagccgcgctgtgcacccaggaacctgtccttcaggaaggaggcggcggtagaaattaatctgctcagattttccaactaatgaagtattcccaggaccgaaggggccacacagagacgtctgcggcgctgcttcccattcgcgcagatgcacacggattccgggcccagcgctaactcggatgtgttttccagctccgtttattgtc

SEQ ID NO: 313310 - DNA, 392 bp, Homo sapiens; identical to SEQ ID NO: 213821
  chr10:131638468-131638860
  hypo

SEQ ID NO: 313311 - DNA, 309 bp, Homo sapiens
  chr10:131647410-131647719
  hypo
cagtgcatgaatcacggccgggactccgtccgactgcacacactgtgtttaacaagctttataaggagccatcgggctttattatggctctgcctgactccaacaaaaactgagcctggaggcccggggacacgagttaagatgaaaatacttattggagtacattacttcttgatgtagatggcgttttccgtggagtcactccacggtgcgtggcacaacataaatcagaggtttttcggagactaataagacctgccaccatctattcattactctgcctgcaatttgggccatcactcattagta

SEQ ID NO: 313312 - DNA, 54 bp, Homo sapiens; identical to SEQ ID NO: 262597
  chr10:131660294-131660348
  hypo

SEQ ID NO: 313313 - DNA, 140 bp, Homo sapiens; identical to SEQ ID NO: 262598
  chr10:131660570-131660710
  hypo

SEQ ID NO: 313314 - DNA, 175 bp, Homo sapiens; identical to SEQ ID NO: 213823
  chr10:131686725-131686900
  hypo

SEQ ID NO: 313315 - DNA, 86 bp, Homo sapiens
  chr10:131694682-131694768
  hypo
gccacgcggccaccgtcagccaccctggcctggcgtcgcccgccattcctggcccctccgagcagctggctggacggggcgggggc

SEQ ID NO: 313316 - DNA, 161 bp, Homo sapiens; identical to SEQ ID NO: 80897
  chr10:131694792-131694953
  hypo

SEQ ID NO: 313317 - DNA, 120 bp, Homo sapiens; identical to SEQ ID NO: 262601
  chr10:131713787-131713907
  hypo

SEQ ID NO: 313318 - DNA, 240 bp, Homo sapiens; identical to SEQ ID NO: 262602
  chr10:131735251-131735491
  hypo

SEQ ID NO: 313319 - DNA, 132 bp, Homo sapiens; identical to SEQ ID NO: 262603
  chr10:131811606-131811738
  hypo

SEQ ID NO: 313320 - DNA, 152 bp, Homo sapiens; identical to SEQ ID NO: 262605
  chr10:131826126-131826278
  hypo

SEQ ID NO: 313321 - DNA, 260 bp, Homo sapiens
  chr10:131844765-131845025
  hypo
gttactgcagggaattcttcataaccgaagtgtgttttccccgaggagttatgctaccatttgatttaatttttaatttttacattttaatcaaaaatagatcaaatggtggtggtctctccggggaaacacacttcagataggaagccggccatgctcctttaaatatggaaactgccgtctccgcgctgcgggctgggcgtgtcctttctgggaggggccttgggccatgcacctgaggccaccagctcgcccacgcc

SEQ ID NO: 313322 - DNA, 128 bp, Homo sapiens
  chr10:131937484-131937612
  hypo
gaaatggcccaggaaacaatgtgcactttccttagtgactagttcaaacggacacgtgataaatgatgtgtggcatctggggaaggagcacatttctgcagcttttttggtgaagatggagacattta

SEQ ID NO: 313323 - DNA, 73 bp, Homo sapiens; identical to SEQ ID NO: 262609
  chr10:131975644-131975717
  hypo

SEQ ID NO: 313324 - DNA, 155 bp, Homo sapiens
  chr10:131987122-131987277
  hypo
caaagctcttatccaaggggcgagtggctcagccagggttcattaccaggctccggatcctgcttctcccggatcacagcaagcgctgtgcttaggcctggggtgggggacggattctccctgaaggcaggtctgacgcgggcgggagcacccac

SEQ ID NO: 313325 - DNA, 38 bp, Homo sapiens
  chr10:131987316-131987354
  hypo
cagagggtgaggtcgccgtgggcaccctgggagcagca

SEQ ID NO: 313326 - DNA, 190 bp, Homo sapiens; identical to SEQ ID NO: 262611
  chr10:132237997-132238187
  hypo

SEQ ID NO: 313327 - DNA, 38 bp, Homo sapiens; identical to SEQ ID NO: 262612
  chr10:132251719-132251757
  hypo

SEQ ID NO: 313328 - DNA, 36 bp, Homo sapiens; identical to SEQ ID NO: 262613
  chr10:132284135-132284171
  hypo

SEQ ID NO: 313329 - DNA, 54 bp, Homo sapiens
  chr10:132365917-132365971
  hypo
ccaggcacctgcctttgcccacgccggggaggcgcttcctgtgagtcaggactc

SEQ ID NO: 313330 - DNA, 54 bp, Homo sapiens; identical to SEQ ID NO: 262615
  chr10:132421233-132421287
  hypo

SEQ ID NO: 313331 - DNA, 139 bp, Homo sapiens; identical to SEQ ID NO: 262616
  chr10:132869742-132869881
  hypo

SEQ ID NO: 313332 - DNA, 38 bp, Homo sapiens
  chr10:132873694-132873732
  hypo
ttaggcctccgtgcgctgggcgcacctgggtccggctc

SEQ ID NO: 313333 - DNA, 78 bp, Homo sapiens; identical to SEQ ID NO: 262618
  chr10:132933678-132933756
  hypo

SEQ ID NO: 313334 - DNA, 42 bp, Homo sapiens; identical to SEQ ID NO: 262619
  chr10:132956922-132956964
  hypo

SEQ ID NO: 313335 - DNA, 163 bp, Homo sapiens; identical to SEQ ID NO: 262620
  chr10:132958985-132959148
  hypo

SEQ ID NO: 313336 - DNA, 154 bp, Homo sapiens
  chr10:132977235-132977389
  hypo
acactcctacgtgtcatcacggagggttccgtctcatgatggcaccagcccagcctccagcccctctgacagcaggggaggctgagcccgcgtcggcaccatgctggtggaagccggggcttctgtgaacacacctgcccggctctctccacgg

SEQ ID NO: 313337 - DNA, 192 bp, Homo sapiens; identical to SEQ ID NO: 213824
  chr10:132992257-132992449
  hypo

SEQ ID NO: 313338 - DNA, 174 bp, Homo sapiens; identical to SEQ ID NO: 213825
  chr10:133058420-133058594
  hypo

SEQ ID NO: 313339 - DNA, 34 bp, Homo sapiens; identical to SEQ ID NO: 262624
  chr10:133146661-133146695
  hypo

SEQ ID NO: 313340 - DNA, 83 bp, Homo sapiens; identical to SEQ ID NO: 262625
  chr10:133218245-133218328
  hypo

SEQ ID NO: 313341 - DNA, 32 bp, Homo sapiens; identical to SEQ ID NO: 262626
  chr10:133229420-133229452
  hypo

SEQ ID NO: 313342 - DNA, 114 bp, Homo sapiens; identical to SEQ ID NO: 262627
  chr10:133514941-133515055
  hypo

SEQ ID NO: 313343 - DNA, 89 bp, Homo sapiens; identical to SEQ ID NO: 213826
  chr10:133557718-133557807
  hypo

SEQ ID NO: 313344 - DNA, 158 bp, Homo sapiens; identical to SEQ ID NO: 262629
  chr10:133572409-133572567
  hypo

SEQ ID NO: 313345 - DNA, 41 bp, Homo sapiens
  chr10:133590168-133590209
  hypo
ttgcaggcactcagggtgagaaggagcggcaacgtcacaca

SEQ ID NO: 313346 - DNA, 202 bp, Homo sapiens; identical to SEQ ID NO: 213827
  chr10:133783038-133783240
  hypo

SEQ ID NO: 313347 - DNA, 34 bp, Homo sapiens; identical to SEQ ID NO: 213828
  chr10:133790491-133790525
  hypo

SEQ ID NO: 313348 - DNA, 279 bp, Homo sapiens; identical to SEQ ID NO: 262634
  chr10:133834565-133834844
  hypo

SEQ ID NO: 313349 - DNA, 368 bp, Homo sapiens
  chr10:133920809-133921177
  hypo
caaaacacatccatctgtgacgccccgagggacacacgctccttgatggtcaacaggccaggcttgcgggctccccaggtgccggcaaggttccagggccggcgtctgagggctgcaacccagacccgctgggcaccctgcggggcatgtttagttgtacctggaggagaggatgtgctctcttggcacaacgtgcagaaggcaccggaggaaaggaatggagaagaagcctgtttgcctcagagctcctcatcctggacgccctcgccagagggttcatgttatggtttcctgcataagcgatctgagccctgcctcctcaagcgtaactgacagcatgctggatgcacaggcagcaactccctttt

SEQ ID NO: 313350 - DNA, 177 bp, Homo sapiens
  chr10:133921207-133921384
  hypo
gttccacgtggaacagtgcagctggcacaagctcgtccatgttattcacatgccccaccgtggtgggcctgtcgacggcatccaggctgattcgattctcggctgatactgcagccctgtacctgggtcttggactacatgcaaaagaactcctgcaggagacgttcttgcaagcca

SEQ ID NO: 313351 - DNA, 592 bp, Homo sapiens; identical to SEQ ID NO: 213830
  chr10:133953707-133954299
  hypo

SEQ ID NO: 313352 - DNA, 72 bp, Homo sapiens; identical to SEQ ID NO: 213831
  chr10:133955513-133955585
  hypo

SEQ ID NO: 313353 - DNA, 143 bp, Homo sapiens
  chr10:133979227-133979370
  hypo
atccaccctagccctgccccgcccctcgtaggcggtgacacccatgcccttccactgggcactcactgccgcctgtgagaatcatcatcctgaggaacgagttactcaaggcacagcctttgaggccccggtggactccaggc

SEQ ID NO: 313354 - DNA, 291 bp, Homo sapiens; identical to SEQ ID NO: 262640
  chr10:133981379-133981670
  hypo

SEQ ID NO: 313355 - DNA, 381 bp, Homo sapiens
  chr10:133982428-133982809
  hypo
agcagcccaggtggggatggcgggcgcaagaagggaaccgcggggacggcctttcccctcccgccctgtgtggggacgctgcacgagccgtggaccaagaggctgacaggtaagggctgccatctgtccgcggggagggcctttgcaccctccctgcgaggtgagctccagcttcttcacacctctgtgtccccgtctgcacatgcgtgacgctgccaccccgtccactgctgacccgtcaagatcacctctcccgccactgacgggacagggcctgggggctggtgtggagcgtggcgtgagctgtcgctggggcagggtctgcagacatggtgctccacggggacctggcgtctggcagagctggtcctcctcccactt

SEQ ID NO: 313356 - DNA, 478 bp, Homo sapiens
  chr10:133982961-133983439
  hypo
actctgggtgctcccagcagggagggagggaggtcaggactctgggcatgctccaccgtggagctttcctcgccagcggggttccctatgggagggtttgtggatccgttgtgtctgtgggactcagcggggccctggggcagggtgagccggttcttggggaggcagtggcagccccatggggggccgcccagggagcgctccatctcccccacctccgacccacaccgtgtctgagagccacctgtgtctcctgcagtgggcagcggctgtgggccacgggcactgttgttcccgggagatgctccctgcgtagaaaatgggagggggaggaggaggtgcgaccaccaccctggactcaggagagggcggcagctccatcttcacccttgactcaggaggggtccgcagcgaggaggaggtgcgaagggggcggcggctccgtcttgcaggtcccctggggcgcgttcttcaggtg

SEQ ID NO: 313357 - DNA, 219 bp, Homo sapiens; identical to SEQ ID NO: 213834
  chr10:133983713-133983932
  hypo

SEQ ID NO: 313358 - DNA, 53 bp, Homo sapiens; identical to SEQ ID NO: 262643
  chr10:134002751-134002804
  hypo

SEQ ID NO: 313359 - DNA, 138 bp, Homo sapiens; identical to SEQ ID NO: 262644
  chr10:134013835-134013973
  hypo

SEQ ID NO: 313360 - DNA, 134 bp, Homo sapiens; identical to SEQ ID NO: 262645
  chr10:134014003-134014137
  hypo

SEQ ID NO: 313361 - DNA, 40 bp, Homo sapiens
  chr10:134019294-134019334
  hypo
cctctcccccacgccgtctctgcacaggcggggcctggct

SEQ ID NO: 313362 - DNA, 408 bp, Homo sapiens
  chr10:134019364-134019772
  hypo
ccgcagctcttctcccctcaatggcagggaggagcgcaccctctcacagggaagagggccggcagggcagccaacatccagggcggggcagagggcagccaacatccagggcgggacagaggcccccccccccccccgcctacattctcaccggacagcccgagccaccccagaaggccggggagcatgcacgggagtgtgtggaagtgaagcacacaccaccgccacccaggtgggcgctgctcacagacgcaggcccagcactcaaggccgggcagctatgaggctgacccgagcccccggtgtgtgactgcggtgctggcgcgtgctgtgtctcaaagggtgcgtggacgttcccagacggttgtcctcatcccaagagcggggcctggtcgcagtcactgggca

SEQ ID NO: 313363 - DNA, 286 bp, Homo sapiens; identical to SEQ ID NO: 262649
  chr10:134024097-134024383
  hypo

SEQ ID NO: 313364 - DNA, 349 bp, Homo sapiens; identical to SEQ ID NO: 262650
  chr10:134035687-134036036
  hypo

SEQ ID NO: 313365 - DNA, 301 bp, Homo sapiens; identical to SEQ ID NO: 262651
  chr10:134036086-134036387
  hypo

SEQ ID NO: 313366 - DNA, 301 bp, Homo sapiens; identical to SEQ ID NO: 262652
  chr10:134038775-134039076
  hypo

SEQ ID NO: 313367 - DNA, 105 bp, Homo sapiens; identical to SEQ ID NO: 213835
  chr10:134044632-134044737
  hypo

SEQ ID NO: 313368 - DNA, 455 bp, Homo sapiens; identical to SEQ ID NO: 262654
  chr10:134049509-134049964
  hypo

SEQ ID NO: 313369 - DNA, 333 bp, Homo sapiens; identical to SEQ ID NO: 213836
  chr10:134053690-134054023
  hypo

SEQ ID NO: 313370 - DNA, 161 bp, Homo sapiens; identical to SEQ ID NO: 262656
  chr10:134056818-134056979
  hypo

SEQ ID NO: 313371 - DNA, 128 bp, Homo sapiens; identical to SEQ ID NO: 262657
  chr10:134057208-134057336
  hypo

SEQ ID NO: 313372 - DNA, 115 bp, Homo sapiens; identical to SEQ ID NO: 262658
  chr10:134058332-134058447
  hypo

SEQ ID NO: 313373 - DNA, 87 bp, Homo sapiens; identical to SEQ ID NO: 213837
  chr10:134065942-134066029
  hypo

SEQ ID NO: 313374 - DNA, 118 bp, Homo sapiens; identical to SEQ ID NO: 262660
  chr10:134089039-134089157
  hypo

SEQ ID NO: 313375 - DNA, 174 bp, Homo sapiens; identical to SEQ ID NO: 262662
  chr10:134104519-134104693
  hypo

SEQ ID NO: 313376 - DNA, 280 bp, Homo sapiens; identical to SEQ ID NO: 262663
  chr10:134106506-134106786
  hypo

SEQ ID NO: 313377 - DNA, 421 bp, Homo sapiens; identical to SEQ ID NO: 262664
  chr10:134116364-134116785
  hypo

SEQ ID NO: 313378 - DNA, 37 bp, Homo sapiens; identical to SEQ ID NO: 202373
  chr10:134120669-134120706
  hypo

SEQ ID NO: 313379 - DNA, 387 bp, Homo sapiens; identical to SEQ ID NO: 202374
  chr10:134121014-134121401
  hypo

SEQ ID NO: 313380 - DNA, 104 bp, Homo sapiens; identical to SEQ ID NO: 213840
  chr10:134164631-134164735
  hypo

SEQ ID NO: 313381 - DNA, 44 bp, Homo sapiens; identical to SEQ ID NO: 262666
  chr10:134168482-134168526
  hypo

SEQ ID NO: 313382 - DNA, 44 bp, Homo sapiens; identical to SEQ ID NO: 262667
  chr10:134171806-134171850
  hypo

SEQ ID NO: 313383 - DNA, 384 bp, Homo sapiens; identical to SEQ ID NO: 262668
  chr10:134188501-134188885
  hypo

SEQ ID NO: 313384 - DNA, 129 bp, Homo sapiens; identical to SEQ ID NO: 202375
  chr10:134209484-134209613
  hypo

SEQ ID NO: 313385 - DNA, 128 bp, Homo sapiens; identical to SEQ ID NO: 202376
  chr10:134209650-134209778
  hypo

SEQ ID NO: 313386 - DNA, 945 bp, Homo sapiens; identical to SEQ ID NO: 287688
  chr10:134210377-134211322
  hypo

SEQ ID NO: 313387 - DNA, 401 bp, Homo sapiens; identical to SEQ ID NO: 262669
  chr10:134212591-134212992
  hypo

SEQ ID NO: 313388 - DNA, 687 bp, Homo sapiens; identical to SEQ ID NO: 262670
  chr10:134217026-134217713
  hypo

SEQ ID NO: 313389 - DNA, 201 bp, Homo sapiens; identical to SEQ ID NO: 262671
  chr10:134269926-134270127
  hypo

SEQ ID NO: 313390 - DNA, 38 bp, Homo sapiens
  chr10:134273156-134273194
  hypo
gccgggctgcaggcttcggaaaggtggtggaggagtct

SEQ ID NO: 313391 - DNA, 43 bp, Homo sapiens; identical to SEQ ID NO: 213845
  chr10:134276612-134276655
  hypo

SEQ ID NO: 313392 - DNA, 81 bp, Homo sapiens; identical to SEQ ID NO: 213846
  chr10:134279122-134279203
  hypo

SEQ ID NO: 313393 - DNA, 105 bp, Homo sapiens; identical to SEQ ID NO: 213847
  chr10:134279498-134279603
  hypo

SEQ ID NO: 313394 - DNA, 106 bp, Homo sapiens; identical to SEQ ID NO: 213848
  chr10:134280450-134280556
  hypo

SEQ ID NO: 313395 - DNA, 65 bp, Homo sapiens
  chr10:134292419-134292484
  hypo
gcatgtgagtggctaagacacgtgtttgctcccacagtgctggaggccacgtgcctgcagtcaag

SEQ ID NO: 313396 - DNA, 185 bp, Homo sapiens; identical to SEQ ID NO: 262678
  chr10:134298547-134298732
  hypo

SEQ ID NO: 313397 - DNA, 181 bp, Homo sapiens
  chr10:134300836-134301017
  hypo
acctccagctggtgaagagtcgcaccaggtgtgggtgcaggaggacgtctggttagaggtcagaggcgtcatccccaaccccggccgatgttatcttacgtgcggggaaaggcaaggactggactcgttcatcttttacggaacgtggtgagtcaggcaagagacccgggccctgtgctcc

SEQ ID NO: 313398 - DNA, 53 bp, Homo sapiens; identical to SEQ ID NO: 213849
  chr10:134302492-134302545
  hypo

SEQ ID NO: 313399 - DNA, 85 bp, Homo sapiens; identical to SEQ ID NO: 262681
  chr10:134304827-134304912
  hypo

SEQ ID NO: 313400 - DNA, 122 bp, Homo sapiens; identical to SEQ ID NO: 262682
  chr10:134346519-134346641
  hypo

SEQ ID NO: 313401 - DNA, 770 bp, Homo sapiens; identical to SEQ ID NO: 287690
  chr10:134351009-134351779
  hypo

SEQ ID NO: 313402 - DNA, 274 bp, Homo sapiens; identical to SEQ ID NO: 262683
  chr10:134370565-134370839
  hypo

SEQ ID NO: 313403 - DNA, 55 bp, Homo sapiens; identical to SEQ ID NO: 213851
  chr10:134421293-134421348
  hypo

SEQ ID NO: 313404 - DNA, 45 bp, Homo sapiens; identical to SEQ ID NO: 262685
  chr10:134421771-134421816
  hypo

SEQ ID NO: 313405 - DNA, 55 bp, Homo sapiens; identical to SEQ ID NO: 262686
  chr10:134427568-134427623
  hypo

SEQ ID NO: 313406 - DNA, 36 bp, Homo sapiens; identical to SEQ ID NO: 213852
  chr10:134457709-134457745
  hypo

SEQ ID NO: 313407 - DNA, 201 bp, Homo sapiens; identical to SEQ ID NO: 262688
  chr10:134459516-134459717
  hypo

SEQ ID NO: 313408 - DNA, 55 bp, Homo sapiens; identical to SEQ ID NO: 262689
  chr10:134460290-134460345
  hypo

SEQ ID NO: 313409 - DNA, 39 bp, Homo sapiens; identical to SEQ ID NO: 262690
  chr10:134467311-134467350
  hypo

SEQ ID NO: 313410 - DNA, 209 bp, Homo sapiens; identical to SEQ ID NO: 213853
  chr10:134477300-134477509
  hypo

SEQ ID NO: 313411 - DNA, 281 bp, Homo sapiens; identical to SEQ ID NO: 213854
  chr10:134491114-134491395
  hypo

SEQ ID NO: 313412 - DNA, 58 bp, Homo sapiens; identical to SEQ ID NO: 262694
  chr10:134492043-134492101
  hypo

SEQ ID NO: 313413 - DNA, 32 bp, Homo sapiens
  chr10:134499296-134499328
  hypo
aagtggtctgctcccgccctgagttggctgtg

SEQ ID NO: 313414 - DNA, 240 bp, Homo sapiens
  chr10:134499533-134499773
  hypo
ttggtgtggaagcctgatggtggtgactgggagcttcagttgcccattagctcccaggctgccttcagagaccagggtcccaccagtgcagccccagccagggcccaggttagccggggtctggatctcctgtgtggcccgcaccggatcgacttttcggtgccccaggggcttggctttgtccagtggaggccgcttcccggctgtgccgtggcctccgggggctggaggactcctgcc

SEQ ID NO: 313415 - DNA, 405 bp, Homo sapiens; identical to SEQ ID NO: 262696
  chr10:134503266-134503671
  hypo

SEQ ID NO: 313416 - DNA, 192 bp, Homo sapiens; identical to SEQ ID NO: 262697
  chr10:134504489-134504681
  hypo

SEQ ID NO: 313417 - DNA, 350 bp, Homo sapiens; identical to SEQ ID NO: 262698
  chr10:134517971-134518321
  hypo

SEQ ID NO: 313418 - DNA, 88 bp, Homo sapiens
  chr10:134518523-134518611
  hypo
ggacaggtggcaggcggctcgtctggagtgcaggctgagtggaggggagagagtccaagcattgggggtgtcccagctgcaccgttgg

SEQ ID NO: 313419 - DNA, 40 bp, Homo sapiens
  chr10:134518778-134518818
  hypo
tcagagacaagtgtctggtgcagcacgcagggagcctgcc

SEQ ID NO: 313420 - DNA, 605 bp, Homo sapiens
  chr10:134527001-134527606
  hypo
tgtgctgttattagcgggtatatggccttggctctcctctgcatctggcccttgctgagggccctgaggcgtggccccttatcccctctgaccgcccctgacctccgtctccagagtgatggagccctggtcccctgccactagcctggtcccggggagggtggcaactgcgaggcctgggtgctgctgtgctcgtggccacacactgaggccggccctcagccctgtgcacggccacaccctctgcaggggacctgtccggcctcccggatatctctggagctggcactgacaccgaggcagggatcggtctgagcctggggactgtgctctcaactgcccaccgtagggaagcagcacaggtgggggatgggggcctggggctttgtcagcgacaaagtgactgatgaccgcctgtgccctgggcgccctccctggacagcatgtcagtcgcccagggagaagggcctcacccacaggagcggcgcggttcttcctgcctgatcagccctcggcttgcaggcaccaagcgtctcggggacctcccacggagcccaggagcagggagggccctgccgtgtctgctgttgggtcttggtgacagc

SEQ ID NO: 313421 - DNA, 354 bp, Homo sapiens; identical to SEQ ID NO: 167014
  chr10:134527839-134528193
  hypo

SEQ ID NO: 313422 - DNA, 124 bp, Homo sapiens; identical to SEQ ID NO: 262701
  chr10:134528539-134528663
  hypo

SEQ ID NO: 313423 - DNA, 557 bp, Homo sapiens; identical to SEQ ID NO: 262702
  chr10:134529078-134529635
  hypo

SEQ ID NO: 313424 - DNA, 49 bp, Homo sapiens; identical to SEQ ID NO: 262703
  chr10:134540684-134540733
  hypo

SEQ ID NO: 313425 - DNA, 127 bp, Homo sapiens
  chr10:134542025-134542152
  hypo
ggaagcggcatttccggcaggtctggaacatctctgagtgagctcatttctaacctgttactcgagagccagtgagtccacagtgcacataagtacttcccgctctgactgggaggggccaggatga

SEQ ID NO: 313426 - DNA, 224 bp, Homo sapiens
  chr10:134542212-134542436
  hypo
gaaaggtcagggagcttggaaagggccttttccttctggtagagcaaatgtcacagtaaagggcagctggtcctggccgggtcagagccgtggtgaggcacgcactggagcagccgcgggagcctccctggtgaagggagccagctgctgagcccggtggccgggccgtgtgaccacaaggcgtcgggggcagtgggaagcctgggctccggtgcctgtggggc

SEQ ID NO: 313427 - DNA, 67 bp, Homo sapiens; identical to SEQ ID NO: 262705
  chr10:134546239-134546306
  hypo

SEQ ID NO: 313428 - DNA, 400 bp, Homo sapiens; identical to SEQ ID NO: 262706
  chr10:134556147-134556547
  hypo

SEQ ID NO: 313429 - DNA, 172 bp, Homo sapiens; identical to SEQ ID NO: 213858
  chr10:134559539-134559711
  hypo

SEQ ID NO: 313430 - DNA, 266 bp, Homo sapiens
  chr10:134562453-134562719
  hypo
cccaccccagcctgcgccccagggactggtttgagcctgttaacaccacaaagcaggcgtgtgacctcagccatccctcccacgtcagcttcacccagatgagcctgttgagacggttcccggtcaagccgcctgcagcccttgcccgttgtcacagtcgaacagctctcgagggagttcagggacgggagagagcgagcgggaggaggccggccatgtgcccccgcaggcaccctctttgctgttctcagtgctgctgtgccttc

SEQ ID NO: 313431 - DNA, 324 bp, Homo sapiens
  chr10:134562783-134563107
  hypo
ggtgtcctcacggttgcagccacgctttgttggggagcagccagcctcaggcccttcgcacgtgtgagggtcggctgttgcgggagtggcccctgaccccaggtgcggaaatctgggtgtgacaccagctgctgtctggaaccagccatcctatcccactgactcggggtgtcgggtgacgctgccatgggcaggtgggcccccctgggacttatctccgttgctgtctttctgcagacgctctgcacaaaagccaccatgcagacggtccgggccgccgacaccaatgaagtggtgaagctcatatttcgtgagtcggacaac

SEQ ID NO: 313432 - DNA, 84 bp, Homo sapiens; identical to SEQ ID NO: 167033
  chr10:134567165-134567249
  hypo

SEQ ID NO: 313433 - DNA, 58 bp, Homo sapiens; identical to SEQ ID NO: 262712
  chr10:134575252-134575310
  hypo

SEQ ID NO: 313434 - DNA, 144 bp, Homo sapiens; identical to SEQ ID NO: 213860
  chr10:134577903-134578047
  hypo

SEQ ID NO: 313435 - DNA, 100 bp, Homo sapiens; identical to SEQ ID NO: 262714
  chr10:134583322-134583422
  hypo

SEQ ID NO: 313436 - DNA, 208 bp, Homo sapiens; identical to SEQ ID NO: 262715
  chr10:134588784-134588992
  hypo

SEQ ID NO: 313437 - DNA, 45 bp, Homo sapiens
  chr10:134589352-134589397
  hypo
gacgccaggtggcacgggctctccaagctccatggggtgcatgag

SEQ ID NO: 313438 - DNA, 166 bp, Homo sapiens
  chr10:134589427-134589593
  hypo
atttagaagtcacctattgtgtgctgtgtgcatgtgtgtccggggggcagtggacgtgtgtgcggatgcaatggacatgtgtccaggggcagtggacgtgtgtcaggggctgggcaggcccctgcctgcatccagtttccactcgtgtccgcggttgggatcagct

SEQ ID NO: 313439 - DNA, 535 bp, Homo sapiens; identical to SEQ ID NO: 262717
  chr10:134589801-134590336
  hypo

SEQ ID NO: 313440 - DNA, 428 bp, Homo sapiens
  chr10:134592901-134593329
  hypo
ccctgggaaaacgtcggaggtcacgcgagtgcagattggtgagcagcgcccaagggcagaaggctggcagggctgtggcctccccacattgtgctgccgctgccagggctccaccagctcagagcagggcagcgttgcagcccgttttccattcactcacagcctctcgggttctctggatccgggacttgacactttatgctcagggtgggggacagagcctcacaacacacacctggcggcctttgacagcccctgccttctggggctggagtttggacaggctctccccatggggccacccagtgggcagcgggtgtgcaggacaagcagacgggcgccgggcgcgctccgcagcctcatccatcatgacacgcgccgtcacctcgtcaccaagctccgttctgcctccggagccctaaaacacc

SEQ ID NO: 313441 - DNA, 148 bp, Homo sapiens; identical to SEQ ID NO: 213863
  chr10:134593416-134593564
  hypo

SEQ ID NO: 313442 - DNA, 93 bp, Homo sapiens; identical to SEQ ID NO: 262719
  chr10:134595971-134596064
  hypo

SEQ ID NO: 313443 - DNA, 131 bp, Homo sapiens; identical to SEQ ID NO: 202380
  chr10:134602414-134602545
  hypo

SEQ ID NO: 313444 - DNA, 262 bp, Homo sapiens; identical to SEQ ID NO: 262720
  chr10:134606292-134606554
  hypo

SEQ ID NO: 313445 - DNA, 131 bp, Homo sapiens
  chr10:134607701-134607832
  hypo
ctccccacaatgggcgccccctgctgatgggcacctcccgacaatggcgcctcccagtgatggacgcctccacaggtcctcggggccccttcccgtccaggtcttcacagaggccccggcactgggtgccc

SEQ ID NO: 313446 - DNA, 54 bp, Homo sapiens; identical to SEQ ID NO: 213866
  chr10:134610520-134610574
  hypo

SEQ ID NO: 313447 - DNA, 153 bp, Homo sapiens
  chr10:134611774-134611927
  hypo
ggacggtgtgacccggaggtgggccgaggctggacgaggtgccccagaggtgggccgaggcggctgggctggacggtgtgatcctgaggtgggccgaggcggctgggctggacggtgtgacccggaggtgggccgaggcggctgggctggacg

SEQ ID NO: 313448 - DNA, 50 bp, Homo sapiens; identical to SEQ ID NO: 213867
  chr10:134620149-134620199
  hypo

SEQ ID NO: 313449 - DNA, 127 bp, Homo sapiens; identical to SEQ ID NO: 213868
  chr10:134620229-134620356
  hypo

SEQ ID NO: 313450 - DNA, 225 bp, Homo sapiens; identical to SEQ ID NO: 262726
  chr10:134639768-134639993
  hypo

SEQ ID NO: 313451 - DNA, 362 bp, Homo sapiens
  chr10:134651401-134651763
  hypo
gatgaacacatacacggacccagacacgcagacatgcacggacacagacacgcacgtgtacacagacgcacacactcacgcagacatgcacggacacacgtgtacacagtgcagactcagagccgtgcccccatgctcccctggggaaggccctctcttcctggccttaggcccctgggatgccagtcggctgtggtcaggtggtgcaggcagcagctccggcccgtccgctcccgtggactatgagtctgtctaataccagacccggcacgcagttcaggctcctcaccaccagcggcaggcggccaccacagcccctgagggccagccagagggctcctggaggcttgggcctctccgca

SEQ ID NO: 313452 - DNA, 417 bp, Homo sapiens
  chr10:134651793-134652210
  hypo
ctggttctgagtcatagcttcaagtttgcacaaacaaagcagtttttataaaacttactatcaaagtagaatatacagaaagtggcgtaaaagcccatgcgtgaaaagctcgatggatttttgcagtgggcacacctgtgtggccaggcaaagagatgggacattgccggccactggccctcgtccccacaaggggaccacaacagattctagcagctcaggtgggcttttctgccgggcctctggcttgcgccgtgggcttcacccaggtggagcgtggggctggccttcctccctgcagatgccacagctggtaatgccacagctgggaatgccacagcgtcttcatccgttctgtggccaagggcatctgggtggcttcccgtcaatgggggtcatgagcgatgctgctctctg

SEQ ID NO: 313453 - DNA, 65 bp, Homo sapiens
  chr10:134659606-134659671
  hypo
gtggtggtcctgtcttggcaccggagctggtgctgtagctgcagcagggccgccagctgtgagct

SEQ ID NO: 313454 - DNA, 147 bp, Homo sapiens; identical to SEQ ID NO: 262729
  chr10:134663732-134663879
  hypo

SEQ ID NO: 313455 - DNA, 201 bp, Homo sapiens; identical to SEQ ID NO: 213869
  chr10:134664806-134665007
  hypo

SEQ ID NO: 313456 - DNA, 118 bp, Homo sapiens; identical to SEQ ID NO: 262732
  chr10:134680049-134680167
  hypo

SEQ ID NO: 313457 - DNA, 114 bp, Homo sapiens; identical to SEQ ID NO: 262733
  chr10:134680625-134680739
  hypo

SEQ ID NO: 313458 - DNA, 769 bp, Homo sapiens; identical to SEQ ID NO: 262734
  chr10:134680972-134681741
  hypo

SEQ ID NO: 313459 - DNA, 145 bp, Homo sapiens
  chr10:134682472-134682617
  hypo
cgcccagcacccagcgcccaagggtccagggcccggcagccagcctttctgtcctccggggaggggctcgggccaccctggagagcccccctcaccgcccctccctccctctgtgaggagcacctccccacaacccacctccagc

SEQ ID NO: 313460 - DNA, 270 bp, Homo sapiens
  chr10:134682847-134683117
  hypo
gcttcagctcggagcacgcgtgggcgaggctgtggggagtgtggccgaaagagtcagtgttgcacgggcgcagagggagccagaaacgaagctactagtgtgcttcacagaaaacggtcaactaacacatcgaggcacacttggatggtattttcaatcatttttaaaggtaagcgaaattactagggaaaagtgcccggtagctccatcaaatttcaagtgggattcttctcccgctccttcacagatctcgtgcgaggcattatctgt

SEQ ID NO: 313461 - DNA, 257 bp, Homo sapiens; identical to SEQ ID NO: 262736
  chr10:134683320-134683577
  hypo

SEQ ID NO: 313462 - DNA, 140 bp, Homo sapiens; identical to SEQ ID NO: 262738
  chr10:134694272-134694412
  hypo

SEQ ID NO: 313463 - DNA, 277 bp, Homo sapiens; identical to SEQ ID NO: 262739
  chr10:134698448-134698725
  hypo

SEQ ID NO: 313464 - DNA, 242 bp, Homo sapiens
  chr10:134699406-134699648
  hypo
ggctgtggaagagcaggccgtagagcgcagcacggagcgccaggtcgtcctcagcccctgggagggagaaggaggggtgtccttggagccgcctgatccctcatcaaaggcgccctcggacctcccagactaagctgcccatcacagtgcccctgaggtggaaccgcggctacagaggtgcccaggccagcgcatgccccgcagggctgaagtgagctgtggacctgcatggcccctccagc

SEQ ID NO: 313465 - DNA, 365 bp, Homo sapiens; identical to SEQ ID NO: 262741
  chr10:134716710-134717075
  hypo

SEQ ID NO: 313466 - DNA, 669 bp, Homo sapiens; identical to SEQ ID NO: 262742
  chr10:134722154-134722823
  hypo

SEQ ID NO: 313467 - DNA, 43 bp, Homo sapiens; identical to SEQ ID NO: 262743
  chr10:134723477-134723520
  hypo

SEQ ID NO: 313468 - DNA, 178 bp, Homo sapiens; identical to SEQ ID NO: 262744
  chr10:134724608-134724786
  hypo

SEQ ID NO: 313469 - DNA, 178 bp, Homo sapiens
  chr10:134729784-134729962
  hypo
aagacactcctgaacgtttcctcgtagtaacagcaaactacgcctggggtcttgcgaggaacgacggctaaaaacaggagaggccacgtcaccccattttctctttcatggtctcagtcatttacgtgacgatggacacgtcccccacgcaagaagccggtgtccttacgaatgcaaa

SEQ ID NO: 313470 - DNA, 230 bp, Homo sapiens
  chr10:134733835-134734065
  hypo
gagctcctcacagagctgcagagtggcattgcctgtgtctcctgccggcgatgaggccgagccagtgctcctctgagtgggggaggctccaggaactttggagcagagtctgccaagaccctcctgctgctctgctggctgcgctgtccagctgccctccaagcagaggcacccggcctcagactcccgagctcccacccagcccctgcgtagcaccccaagtcccagca

SEQ ID NO: 313471 - DNA, 162 bp, Homo sapiens
  chr10:134734534-134734696
  hypo
cggcagccccttcccgctccaagagtcgccaaccttcccttgcagggcgcgacccaccctgcgtctgcccatctcctcgtctcagacccgagacatgacccagcagctccactcccgaccaccatctccacaggctgcagtctgggtgacacctggttcgtc

SEQ ID NO: 313472 - DNA, 154 bp, Homo sapiens; identical to SEQ ID NO: 213874
  chr10:134736024-134736178
  hypo

SEQ ID NO: 313473 - DNA, 127 bp, Homo sapiens; identical to SEQ ID NO: 213875
  chr10:134738018-134738145
  hypo

SEQ ID NO: 313474 - DNA, 478 bp, Homo sapiens; identical to SEQ ID NO: 213876
  chr10:134738688-134739166
  hypo

SEQ ID NO: 313475 - DNA, 188 bp, Homo sapiens
  chr10:134739760-134739948
  hypo
gcatcaccacacggcggggagggggcagctccgtgggggctgcaggaggagggtcagagggagtcgcatcccagcccccacctgcacgaccccaccccaccagggcggcgtgtaggcccctgtgcgcaggacagggagtgtggcactggaggctggactcacacccgctgtcacgggagccagggcga

SEQ ID NO: 313476 - DNA, 70 bp, Homo sapiens; identical to SEQ ID NO: 213877
  chr10:134740788-134740858
  hypo

SEQ ID NO: 313477 - DNA, 56 bp, Homo sapiens; identical to SEQ ID NO: 213878
  chr10:134740911-134740967
  hypo

SEQ ID NO: 313478 - DNA, 272 bp, Homo sapiens; identical to SEQ ID NO: 262752
  chr10:134746663-134746935
  hypo

SEQ ID NO: 313479 - DNA, 193 bp, Homo sapiens; identical to SEQ ID NO: 213879
  chr10:134758118-134758311
  hypo

SEQ ID NO: 313480 - DNA, 127 bp, Homo sapiens
  chr10:134787903-134788030
  hypo
caggtgggctctgccgctgcctgtgagatgaggccagatcctcgccgcccgcacctgcctctccccaactcgccctgcgcgggacaggtggacgccgcccacacctacctctcccccactcaccctg

SEQ ID NO: 313481 - DNA, 299 bp, Homo sapiens; identical to SEQ ID NO: 262755
  chr10:134790701-134791000
  hypo

SEQ ID NO: 313482 - DNA, 70 bp, Homo sapiens; identical to SEQ ID NO: 213880
  chr10:134793862-134793932
  hypo

SEQ ID NO: 313483 - DNA, 150 bp, Homo sapiens; identical to SEQ ID NO: 213881
  chr10:134793968-134794118
  hypo

SEQ ID NO: 313484 - DNA, 198 bp, Homo sapiens; identical to SEQ ID NO: 213882
  chr10:134794148-134794346
  hypo

SEQ ID NO: 313485 - DNA, 110 bp, Homo sapiens; identical to SEQ ID NO: 262758
  chr10:134795408-134795518
  hypo

SEQ ID NO: 313486 - DNA, 140 bp, Homo sapiens
  chr10:134796042-134796182
  hypo
tgatggtccagttgcctgcggaagtaggtctgtgcacagtggaccttttaaaagagacacgaaacctgggagggcctggccttccctctgtgcgctgctgctgtttgtctttttcctcagcttcccgttgttcgatggag

SEQ ID NO: 313487 - DNA, 381 bp, Homo sapiens; identical to SEQ ID NO: 213883
  chr10:134797188-134797569
  hypo

SEQ ID NO: 313488 - DNA, 43 bp, Homo sapiens; identical to SEQ ID NO: 213884
  chr10:134797730-134797773
  hypo

SEQ ID NO: 313489 - DNA, 345 bp, Homo sapiens; identical to SEQ ID NO: 262761
  chr10:134803434-134803779
  hypo

SEQ ID NO: 313490 - DNA, 100 bp, Homo sapiens; identical to SEQ ID NO: 213885
  chr10:134807156-134807256
  hypo

SEQ ID NO: 313491 - DNA, 158 bp, Homo sapiens
  chr10:134807307-134807465
  hypo
gtgagtcccgataagcggaaaccgcaacgctccttcagcaccagtgcaggttcacggtttcatggggggaacgtcaattcagtaagacgagtgacgaggcgcgtctcagcggaaccccacccactgccgtcaccatcgctgaccactccattggttga

SEQ ID NO: 313492 - DNA, 222 bp, Homo sapiens; identical to SEQ ID NO: 262763
  chr10:134817170-134817392
  hypo

SEQ ID NO: 313493 - DNA, 224 bp, Homo sapiens; identical to SEQ ID NO: 262764
  chr10:134827960-134828184
  hypo

SEQ ID NO: 313494 - DNA, 504 bp, Homo sapiens; identical to SEQ ID NO: 213887
  chr10:134829385-134829889
  hypo

SEQ ID NO: 313495 - DNA, 400 bp, Homo sapiens
  chr10:134830234-134830634
  hypo
gagatggtctcatccgctgggcgagcaggccagggctgcccgtctccacctttgtgctggaccatttacaatcaaagcgcagcatcgagatacccaggaaagagccaggaacaggccaggaagctgctgccccaccactgaccccaccgctctccttccctccttccttcccgctgggctgggcacaggtggagctcaccgtcgtcccccttcatcccttggcccctccaaggctcaaggactggaggccgactgggcagcagacatgtcaccatcaccatgctccccgtcaccacgctccctgtcgccatggtcactgtcaccatgctccctgtcgccatgctccccctcgccacgctccctctcgccacgctccccgtcgccacggtccccgtcgcca

SEQ ID NO: 313496 - DNA, 78 bp, Homo sapiens
  chr10:134830671-134830749
  hypo
cgtcgccacggtccccgtcgccacgctccccgtcgccacgctccccgtcgccacgctccccatcgccacagtccctgt

SEQ ID NO: 313497 - DNA, 95 bp, Homo sapiens
  chr10:134833358-134833453
  hypo
ctgaattcatgtccgcccatgcccgcccccagctacttccagaggcatttgaagggaggacctgtgccctgcacagctgcttctcaaaggggtgc

SEQ ID NO: 313498 - DNA, 51 bp, Homo sapiens
  chr10:134833483-134833534
  hypo
ctccatgccgggcacaggctgggcgtcagagccaccgaaacaccaacctct

SEQ ID NO: 313499 - DNA, 50 bp, Homo sapiens; identical to SEQ ID NO: 262768
  chr10:134833860-134833910
  hypo

SEQ ID NO: 313500 - DNA, 380 bp, Homo sapiens
  chr10:134836851-134837231
  hypo
tcaggtgacaccaacgtgaccacggcaagagcgagctggagcggagcctcgggtagccatgactaacagacatggttcgcaaacccacgcacaccttccaaaaacgccaggctggcctcacatgaccaggggcctcaccaagtgcagtgggtccctgcgtgtcagggaggctgcccagagctgtggctgctcctgtcttagcctcaacctgtgcccggggccctgtggatggatccgcgtggggcggtggtgttccaagtccacgtggggcggtggtgttccaggtccacgtggggcggtggtgttccaggtccacgtggggcggtggtgttccaggtccacgtggggtggtggtgttccaagtccacgtgggacggcgg

SEQ ID NO: 313501 - DNA, 134 bp, Homo sapiens
  chr10:134875676-134875810
  hypo
gtcccagcacacaccgcatgaaaatagccagttccgggggctccgcacccgcgtagggggcgcgtcggtcctttccattttagctgcgtgggggagggtgttggcggcaccattgtgctttcattccacgtttc

SEQ ID NO: 313502 - DNA, 91 bp, Homo sapiens; identical to SEQ ID NO: 213888
  chr10:134878528-134878619
  hypo

SEQ ID NO: 313503 - DNA, 150 bp, Homo sapiens; identical to SEQ ID NO: 262773
  chr10:134886535-134886685
  hypo

SEQ ID NO: 313504 - DNA, 249 bp, Homo sapiens
  chr10:134894586-134894835
  hypo
agacctgggagccagctgggcgggacgcactgctctgatacagggaagctggagcctcggacctgtcccaggttgagatcagggtagatggtcttggagccagctgggcgggatgcgccgctctgatgaagggaagccagagccttggacctagatgtaaaagctctgtgttcacaaatcttcccggggacccacattaacttccgagtcgggaaggaatcatctgcatgaaatcgggggtttcacggt

SEQ ID NO: 313505 - DNA, 281 bp, Homo sapiens; identical to SEQ ID NO: 262775
  chr10:134907950-134908231
  hypo

SEQ ID NO: 313506 - DNA, 156 bp, Homo sapiens
  chr10:134911962-134912118
  hypo
actcagggcagactcggacgacccatctgctctcccctgaccgggtcctcggacagctgcccctgaccccacggagagcccggacttcccggggacagagcctgcgccccagggggctcccttccacgcctccccctgcagagcctctgctcatgt

SEQ ID NO: 313507 - DNA, 46 bp, Homo sapiens; identical to SEQ ID NO: 213890
  chr10:134912336-134912382
  hypo

SEQ ID NO: 313508 - DNA, 44 bp, Homo sapiens
  chr10:134913649-134913693
  hypo
gactgccaggaggccgtgcccccggcctgggcctgggcctgggc

SEQ ID NO: 313509 - DNA, 258 bp, Homo sapiens; identical to SEQ ID NO: 262778
  chr10:134920248-134920506
  hypo

SEQ ID NO: 313510 - DNA, 96 bp, Homo sapiens; identical to SEQ ID NO: 262779
  chr10:134926796-134926892
  hypo

SEQ ID NO: 313511 - DNA, 557 bp, Homo sapiens; identical to SEQ ID NO: 213891
  chr10:134941895-134942452
  hypo

SEQ ID NO: 313512 - DNA, 166 bp, Homo sapiens
  chr10:134944405-134944571
  hypo
taacacacacttgcacctgctgtgcacatgtgcacacacacgtagtagtgtgttttccagccacccacacactgggtttgcattggagattgtttcaccctgcaaacgtcaacgtcagcagactcgtcggtgcgctgtgctatccggttgggaggtctcaccagga

SEQ ID NO: 313513 - DNA, 115 bp, Homo sapiens; identical to SEQ ID NO: 262784
  chr10:134945553-134945668
  hypo

SEQ ID NO: 313514 - DNA, 70 bp, Homo sapiens
  chr10:134945723-134945793
  hypo
gtgcgtgcatgctggcctgtgcgagtgtgcctgtgtgcctgtgtgtgtgtgagtccgtgtgcctgcgtgt

SEQ ID NO: 313515 - DNA, 375 bp, Homo sapiens; identical to SEQ ID NO: 262786
  chr10:134978859-134979234
  hypo

SEQ ID NO: 313516 - DNA, 681 bp, Homo sapiens
  chr10:134980289-134980970
  hypo
acagctgagccctcgcggagtccaggagcccactcggatttggaggtgagcccacatgggggcggccgagccacatggagggaaccgccgtgactgtgtcctccgtgtgaattgcctggaacaaatgttggcagcgcgtgtggttgtaagtcatgtgagtgtcaggatcacgccccgttagctctgcacgagtccacagttggggatgtccactccgtcgcctcgctcatctgttggcagcctccacaggccagtccagccgtgagcctgcggggtcggggtgctccacggagcaggtgacccagcagctctggccgagcctccgggaggaaggccccgtgcccaggctccaggagccgacacctgctctgggcagcacgccgacggtgccaccaaatgttccgtggctctgacgtccagggaacagcaggacgactcttgaaacaaaatgagacgtggtctaaagccctttccctgacccacgcgttgaaacgctgccacgagtcgtccgtttccccagggaatcgtctcggtgggggtgccggggcctggctgggggtcctgccgggctcacggccagggccggtcttggcaggagaacgtgtctctggctgacatcctctccctgcgggaccgcggcctcagcgagcaggaagcctgggccgtgtgcctggagtgcag

SEQ ID NO: 313517 - DNA, 42 bp, Homo sapiens; identical to SEQ ID NO: 213894
  chr10:134996909-134996951
  hypo

SEQ ID NO: 313518 - DNA, 191 bp, Homo sapiens; identical to SEQ ID NO: 262789
  chr10:135001613-135001804
  hypo

SEQ ID NO: 313519 - DNA, 232 bp, Homo sapiens
  chr10:135002202-135002434
  hypo
ctgctgttccaccccccaccgccgtcccacacccccgccgtcccaccccccacaccgtcccacgcccccccactgtcccatcacccctgccgtcccatgcgtaactggcccccacctgaaccaagggacccaggggcagccaggacagtgtctccggtgaacggaacaggcggctcccgtctggagcaccttgtgggtgcctgctgggttgcagcaccgagggaggtgtggg

SEQ ID NO: 313520 - DNA, 158 bp, Homo sapiens; identical to SEQ ID NO: 213895
  chr10:135002833-135002991
  hypo

SEQ ID NO: 313521 - DNA, 83 bp, Homo sapiens
  chr10:135008714-135008797
  hypo
acaggcggtgtgttcgctcggagagccagttgttagccatgtagcagcacggcaccagtcggggggcttccgggagcaggcac

SEQ ID NO: 313522 - DNA, 116 bp, Homo sapiens
  chr10:135008833-135008949
  hypo
atgctggccagttctcctcaaaccctcgagctgctgccttcgtgaggagagtggaaggtgggaaagtccagttgaggcttccaaccctctggtgtttaaaacgcggacagaaccat

SEQ ID NO: 313523 - DNA, 353 bp, Homo sapiens; identical to SEQ ID NO: 213896
  chr10:135009175-135009528
  hypo

SEQ ID NO: 313524 - DNA, 46 bp, Homo sapiens; identical to SEQ ID NO: 213897
  chr10:135014642-135014688
  hypo

SEQ ID NO: 313525 - DNA, 242 bp, Homo sapiens
  chr10:135016807-135017049
  hypo
actcggcccccaaactcatggtgtccagcagggagcactcggcccccaaacacacagcgtccggcccatggccacagcctcacgtttctcttggaggagctactgtgtctctttcaaaacaggaggctcagaaacacagcaagggcaaaaaccacctggagacagactttcacatccgcagcccaaaacgcacacggtgcagcgagggccgttctctggggcggctggagcagccggtgggc

SEQ ID NO: 313526 - DNA, 398 bp, Homo sapiens
  chr10:135017612-135018010
  hypo
ggccccatggtgcaggccatgggggaacgtggccaccaccatcctcagaagccaggaccaggtgccccggcagcagaacacagctccatggggacacctgcgtttaccaacctcaacctgcccagcccggtaggtccttccttgatgatggaatgttctagacgctgtccaccgggtagccaacagccacgtgtggctactgagctctggaaacatggcccacgtgactgaggacctgatgttttaatttcactgcactttaggcagccacggcagcctgcagctcagtgtgggaggcagggtcgcacttggctgggtggcagcggggtccggagggcttggggaacctggcttagtggccgaggttctgcagaggcctggtctttacgcagctggga

SEQ ID NO: 313527 - DNA, 282 bp, Homo sapiens; identical to SEQ ID NO: 213899
  chr10:135018070-135018352
  hypo

SEQ ID NO: 313528 - DNA, 158 bp, Homo sapiens
  chr10:135018667-135018825
  hypo
ccagcctctacgcccgtgtgcctgtcccgtaggacagaaggagtgctcagacgagggctgcccggccaggcgtgggaggcatcctgggacaacgcggcgccctctccctgaatgtagagtcccgtccagggaggcgctcagccccagctgctgtctgt

SEQ ID NO: 313529 - DNA, 41 bp, Homo sapiens
  chr10:135018992-135019033
  hypo
gggcgtgcactcacatttacactcaacgctcatgctctatg

SEQ ID NO: 313530 - DNA, 97 bp, Homo sapiens
  chr10:135022966-135023063
  hypo
gtggcttgtgtgcgcgtgtgtggtgtgcgcgtctggttgtggagttctgtgtggctttgtgcatgtgtgtggtgtgcgcgtctggttgtcgagttct

SEQ ID NO: 313531 - DNA, 180 bp, Homo sapiens; identical to SEQ ID NO: 262799
  chr10:135025085-135025265
  hypo

SEQ ID NO: 313532 - DNA, 175 bp, Homo sapiens; identical to SEQ ID NO: 213900
  chr10:135025540-135025715
  hypo

SEQ ID NO: 313533 - DNA, 166 bp, Homo sapiens; identical to SEQ ID NO: 213901
  chr10:135025748-135025914
  hypo

SEQ ID NO: 313534 - DNA, 146 bp, Homo sapiens; identical to SEQ ID NO: 262801
  chr10:135026335-135026481
  hypo

SEQ ID NO: 313535 - DNA, 220 bp, Homo sapiens; identical to SEQ ID NO: 213902
  chr10:135030353-135030573
  hypo

SEQ ID NO: 313536 - DNA, 134 bp, Homo sapiens; identical to SEQ ID NO: 262804
  chr10:135067365-135067499
  hypo

SEQ ID NO: 313537 - DNA, 99 bp, Homo sapiens; identical to SEQ ID NO: 262805
  chr10:135069286-135069385
  hypo

SEQ ID NO: 313538 - DNA, 158 bp, Homo sapiens
  chr10:135069625-135069783
  hypo
ctgaggaagttatatatatttgttaaacatacgtgtccttctcagaatctgtgagaagcgcagatacaattgtcaacagattccagaaacacggggagcagcagagctttgccgccgcctctctccagcaagctttgaacagccattgttttcattta

SEQ ID NO: 313539 - DNA, 40 bp, Homo sapiens; identical to SEQ ID NO: 213903
  chr10:135073971-135074011
  hypo

SEQ ID NO: 313540 - DNA, 114 bp, Homo sapiens
  chr10:135076254-135076368
  hypo
gtgctgcctggaaccgggtgcccagggcagccggctcagcaggccccagagcaggggcaggtgtggctgggaggggctgtatatgtggcctcctgaacacagcgggagaccagc

SEQ ID NO: 313541 - DNA, 146 bp, Homo sapiens; identical to SEQ ID NO: 213904
  chr10:135081994-135082140
  hypo

SEQ ID NO: 313542 - DNA, 192 bp, Homo sapiens; identical to SEQ ID NO: 262810
  chr10:135085113-135085305
  hypo

SEQ ID NO: 313543 - DNA, 177 bp, Homo sapiens
  chr10:135087235-135087412
  hypo
ggagccctggcgttcgtccgccacacccacctgaggccggcacaggtgctgaggctggcggctgagtccgggtacccctctacgtggccctggtagaagcagtggtcctgcgggggaagcaggagaggggtccacaggctgtgcccccatggccccacaggctcggggagggccgcc

SEQ ID NO: 313544 - DNA, 121 bp, Homo sapiens
  chr10:135087645-135087766
  hypo
acccgagacccactcacctgttcttccgcaggtggagggtgaagttgtgccctgtggccccaaggacgtagctcaccctctctgggtgcaggccctgagcgaggagggaagggtcccaggt

SEQ ID NO: 313545 - DNA, 77 bp, Homo sapiens; identical to SEQ ID NO: 213906
  chr10:135102837-135102914
  hypo

SEQ ID NO: 313546 - DNA, 193 bp, Homo sapiens; identical to SEQ ID NO: 262814
  chr10:135107041-135107234
  hypo

SEQ ID NO: 313547 - DNA, 74 bp, Homo sapiens; identical to SEQ ID NO: 262815
  chr10:135111401-135111475
  hypo

SEQ ID NO: 313548 - DNA, 37 bp, Homo sapiens; identical to SEQ ID NO: 262816
  chr10:135113437-135113474
  hypo

SEQ ID NO: 313549 - DNA, 579 bp, Homo sapiens; identical to SEQ ID NO: 213907
  chr10:135120291-135120870
  hypo

SEQ ID NO: 313550 - DNA, 83 bp, Homo sapiens; identical to SEQ ID NO: 262819
  chr10:135125636-135125719
  hypo

SEQ ID NO: 313551 - DNA, 202 bp, Homo sapiens; identical to SEQ ID NO: 262820
  chr10:135128535-135128737
  hypo

SEQ ID NO: 313552 - DNA, 120 bp, Homo sapiens; identical to SEQ ID NO: 287707
  chr10:135149102-135149222
  hypo

SEQ ID NO: 313553 - DNA, 456 bp, Homo sapiens; identical to SEQ ID NO: 287708
  chr10:135149869-135150325
  hypo

SEQ ID NO: 313554 - DNA, 239 bp, Homo sapiens; identical to SEQ ID NO: 213909
  chr10:135153717-135153956
  hypo

SEQ ID NO: 313555 - DNA, 37 bp, Homo sapiens; identical to SEQ ID NO: 213910
  chr10:135154001-135154038
  hypo

SEQ ID NO: 313556 - DNA, 114 bp, Homo sapiens; identical to SEQ ID NO: 262822
  chr10:135202198-135202312
  hypo

SEQ ID NO: 313557 - DNA, 201 bp, Homo sapiens; identical to SEQ ID NO: 213911
  chr10:135204811-135205012
  hypo

SEQ ID NO: 313558 - DNA, 148 bp, Homo sapiens; identical to SEQ ID NO: 262824
  chr10:135228980-135229128
  hypo

SEQ ID NO: 313559 - DNA, 611 bp, Homo sapiens; identical to SEQ ID NO: 262825
  chr10:135269750-135270361
  hypo

SEQ ID NO: 313560 - DNA, 37 bp, Homo sapiens; identical to SEQ ID NO: 262826
  chr10:135381713-135381750
  hypo

SEQ ID NO: 313561 - DNA, 86 bp, Homo sapiens; identical to SEQ ID NO: 262827
  chr10:135381780-135381866
  hypo

SEQ ID NO: 313562 - DNA, 39 bp, Homo sapiens; identical to SEQ ID NO: 213912
  chr11:232824-232863
  hypo

SEQ ID NO: 313563 - DNA, 161 bp, Homo sapiens; identical to SEQ ID NO: 213913
  chr11:233062-233223
  hypo

SEQ ID NO: 313564 - DNA, 138 bp, Homo sapiens; identical to SEQ ID NO: 262829
  chr11:251677-251815
  hypo

SEQ ID NO: 313565 - DNA, 412 bp, Homo sapiens; identical to SEQ ID NO: 202387
  chr11:314083-314495
  hypo

SEQ ID NO: 313566 - DNA, 38 bp, Homo sapiens; identical to SEQ ID NO: 262830
  chr11:367112-367150
  hypo

SEQ ID NO: 313567 - DNA, 155 bp, Homo sapiens; identical to SEQ ID NO: 262831
  chr11:372118-372273
  hypo

SEQ ID NO: 313568 - DNA, 1659 bp, Homo sapiens; identical to SEQ ID NO: 213915
  chr11:375766-377425
  hypo

SEQ ID NO: 313569 - DNA, 209 bp, Homo sapiens; identical to SEQ ID NO: 262833
  chr11:380579-380788
  hypo

SEQ ID NO: 313570 - DNA, 36 bp, Homo sapiens; identical to SEQ ID NO: 262834
  chr11:381324-381360
  hypo

SEQ ID NO: 313571 - DNA, 185 bp, Homo sapiens; identical to SEQ ID NO: 262835
  chr11:390912-391097
  hypo

SEQ ID NO: 313572 - DNA, 717 bp, Homo sapiens
  chr11:391859-392576
  hypo
gcggcccgaggctccgtgcagattccgggccccacagacaaccgcttcctccaggaagcctaccgtcaagcccccctccagggctcctgtgtcaggagctggctccagggagagtgcgaccctcagggctggtcacagggatcagatgagactccgccgagcctggagctggaagctgcagcggtggcctagcaggcatcgccatccgtctggcccggccgcagtgagggaaggtgcaccccagattcctggctttgccaaaactgtgcctggcgggcaccacgcatcctcagggaggcgccgcagctctgggggggggcacccacagccctctctgccaaggggaggagggaaggtgggcagagtcggccctgggggccctgcaggccgcggggtaccggcgttcccatcatagctccagccgcacggaagccccttcactgagtcctcttgtgagcccttcggcctgactgggctgcagaggccctccaggctggcttccccctcatgccgcccagcctggcccctgcagggccccaggtgggcctggggtggacctgggtgcagggcgggacccagcccatgccaggcacatacctccaggcccgctctgcgccgcacaaacttgtctcccaggatttttccacacgaaacctgtctcccagggaatcagccagtccgatgagctgggcgttcccaccccgccctccgaggccc

SEQ ID NO: 313573 - DNA, 108 bp, Homo sapiens; identical to SEQ ID NO: 24822
  chr11:393555-393663
  hypo

SEQ ID NO: 313574 - DNA, 145 bp, Homo sapiens; identical to SEQ ID NO: 262838
  chr11:394012-394157
  hypo

SEQ ID NO: 313575 - DNA, 33 bp, Homo sapiens; identical to SEQ ID NO: 262839
  chr11:394430-394463
  hypo

SEQ ID NO: 313576 - DNA, 101 bp, Homo sapiens
  chr11:395057-395158
  hypo
agatttctctgtgggaacagcaggtggaggagcacccctcggtgccagccagacccacctgtggcggaatcctggccccactcacgcgagtgtgtgtgcat

SEQ ID NO: 313577 - DNA, 39 bp, Homo sapiens; identical to SEQ ID NO: 262841
  chr11:404582-404621
  hypo

SEQ ID NO: 313578 - DNA, 52 bp, Homo sapiens; identical to SEQ ID NO: 262842
  chr11:405079-405131
  hypo

SEQ ID NO: 313579 - DNA, 953 bp, Homo sapiens; identical to SEQ ID NO: 287719
  chr11:416597-417550
  hypo

SEQ ID NO: 313580 - DNA, 153 bp, Homo sapiens; identical to SEQ ID NO: 262843
  chr11:419276-419429
  hypo

SEQ ID NO: 313581 - DNA, 425 bp, Homo sapiens; identical to SEQ ID NO: 262844
  chr11:421330-421755
  hypo

SEQ ID NO: 313582 - DNA, 177 bp, Homo sapiens; identical to SEQ ID NO: 213919
  chr11:429289-429466
  hypo

SEQ ID NO: 313583 - DNA, 51 bp, Homo sapiens; identical to SEQ ID NO: 213920
  chr11:429759-429810
  hypo

SEQ ID NO: 313584 - DNA, 144 bp, Homo sapiens; identical to SEQ ID NO: 213921
  chr11:431645-431789
  hypo

SEQ ID NO: 313585 - DNA, 134 bp, Homo sapiens; identical to SEQ ID NO: 262847
  chr11:438117-438251
  hypo

SEQ ID NO: 313586 - DNA, 137 bp, Homo sapiens; identical to SEQ ID NO: 213922
  chr11:449377-449514
  hypo

SEQ ID NO: 313587 - DNA, 268 bp, Homo sapiens; identical to SEQ ID NO: 202390
  chr11:450011-450279
  hypo

SEQ ID NO: 313588 - DNA, 203 bp, Homo sapiens; identical to SEQ ID NO: 213924
  chr11:455934-456137
  hypo

SEQ ID NO: 313589 - DNA, 101 bp, Homo sapiens; identical to SEQ ID NO: 213925
  chr11:464468-464569
  hypo

SEQ ID NO: 313590 - DNA, 34 bp, Homo sapiens; identical to SEQ ID NO: 213926
  chr11:471551-471585
  hypo

SEQ ID NO: 313591 - DNA, 195 bp, Homo sapiens; identical to SEQ ID NO: 213927
  chr11:472768-472963
  hypo

SEQ ID NO: 313592 - DNA, 42 bp, Homo sapiens; identical to SEQ ID NO: 262854
  chr11:475001-475043
  hypo

SEQ ID NO: 313593 - DNA, 49 bp, Homo sapiens; identical to SEQ ID NO: 262855
  chr11:476445-476494
  hypo

SEQ ID NO: 313594 - DNA, 105 bp, Homo sapiens; identical to SEQ ID NO: 287722
  chr11:485908-486013
  hypo

SEQ ID NO: 313595 - DNA, 79 bp, Homo sapiens; identical to SEQ ID NO: 287723
  chr11:486095-486174
  hypo

SEQ ID NO: 313596 - DNA, 104 bp, Homo sapiens
  chr11:487199-487303
  hypo
ctgaggccctgtccgtctggatggtgctcatggtgggcagggggcccctgctctctaggctgtcgtggacgtggtctccacaggccacggcagcacctgtgagt

SEQ ID NO: 313597 - DNA, 279 bp, Homo sapiens
  chr11:487548-487827
  hypo
agttgagctcagggtgctctgagtgtggtgggagggtgtcgcactgcagccacccagaggttcgagaagccgtggggctcccggacctcccagaagccctgatcctggtcgggtccccgctccgtcctcagggtcggggcggtggaaagaggcggcagggcaggaagtcccgcccctgcctgggcttgggcactgccccatcccacttctgagggaccctgtgctacctatggggctaagagcagtgcctgcttgaccctgcagcccaccctggcagag

SEQ ID NO: 313598 - DNA, 1014 bp, Homo sapiens
  chr11:487857-488871
  hypo
tgccttgtttgctgacagtcgtacatcgaggctgctggaggggcagccacccaccccacgctcaccctgagacctcactgggggccctgccagtgctgtcgactccaagaatgctgccagccggggtgggggctgcacgcacccgtgggcagggccgggcgtggcctgcgtcccatactctggctgccagccgggtgggggctgcacgcacccgtgggcagggccgggcgtggccggcgtcccatactctggctgccagccggggtgggggctgcacgcacccgtgggcagggccgggtgtggccggcgtcccatactctggctgaccctggcgcccacagaccctgatgatccgagactggtggatgtgcatgatcatcagcgtgatgttcgagttcctggagtacagcctggagcaccagctgcccaacttcagcgagtgctggtgggatcacgtaggtgccagcacagcccccggggcagtcggtgcaggctgaggggcattctcggaacccctgtgcccagcgcggcccctggaccccctcattctccccggggggcagtgggtgcaggctgaggggcattctcggttcccctgtgctcttccggggtcctcctcggggggctcgttacccctcacccctgcaacgagtgctggcccctccctgcagtggatcatggacgtgctcgtctgcaacgggctgggcatctactgcggcatgaagacccttgagtggctgtccctgaagacgtacaagtggcagggcctctggaacattccgacctacaagtacgtcgtgggggctgcgagggcagggccgggtgggggttacctggaggcagcctcagcgtccgtgctccagcagaccccgagcaccaggcccgtccagtgtgcggctcaggaggggtgaccgtggggctttgcctcctggaacctccctctgacctggtgtcactcaagcccggccgcccctcacagtggccatggcgtctgacccacgtacctccctcctc

SEQ ID NO: 313599 - DNA, 136 bp, Homo sapiens; identical to SEQ ID NO: 262858
  chr11:489087-489223
  hypo

SEQ ID NO: 313600 - DNA, 594 bp, Homo sapiens; identical to SEQ ID NO: 213931
  chr11:492551-493145
  hypo

SEQ ID NO: 313601 - DNA, 81 bp, Homo sapiens; identical to SEQ ID NO: 213932
  chr11:493199-493280
  hypo

SEQ ID NO: 313602 - DNA, 182 bp, Homo sapiens; identical to SEQ ID NO: 202391
  chr11:518712-518894
  hypo

SEQ ID NO: 313603 - DNA, 61 bp, Homo sapiens; identical to SEQ ID NO: 287725
  chr11:518933-518994
  hypo

SEQ ID NO: 313604 - DNA, 64 bp, Homo sapiens; identical to SEQ ID NO: 262860
  chr11:528257-528321
  hypo

SEQ ID NO: 313605 - DNA, 261 bp, Homo sapiens; identical to SEQ ID NO: 262861
  chr11:528626-528887
  hypo

SEQ ID NO: 313606 - DNA, 38 bp, Homo sapiens; identical to SEQ ID NO: 262862
  chr11:532700-532738
  hypo

SEQ ID NO: 313607 - DNA, 37 bp, Homo sapiens; identical to SEQ ID NO: 213934
  chr11:534210-534247
  hypo

SEQ ID NO: 313608 - DNA, 36 bp, Homo sapiens; identical to SEQ ID NO: 262865
  chr11:539725-539761
  hypo

SEQ ID NO: 313609 - DNA, 31 bp, Homo sapiens
  chr11:548735-548766
  hypo
gcgtgaaccaccgcgcccggcctcaagtggt

SEQ ID NO: 313610 - DNA, 177 bp, Homo sapiens
  chr11:548800-548977
  hypo
acgtcgccacagtggacactggaacgaaaggctttgcagcctcctgggaagaggcgtgaactgagagtctgacacccagcctaatggctgcataagctcacagccagcaaacatctgtgagtcagagatcaaggggtttccattagctgctcttgaagaaatcactagacacaaatc

SEQ ID NO: 313611 - DNA, 65 bp, Homo sapiens
  chr11:549007-549072
  hypo
attgaaggcagcaggctgaggacagacactgactccacagcgcgaaaggacggaccaccgggaat

SEQ ID NO: 313612 - DNA, 152 bp, Homo sapiens; identical to SEQ ID NO: 262867
  chr11:550045-550197
  hypo

SEQ ID NO: 313613 - DNA, 342 bp, Homo sapiens; identical to SEQ ID NO: 213935
  chr11:561904-562246
  hypo

SEQ ID NO: 313614 - DNA, 641 bp, Homo sapiens
  chr11:562884-563525
  hypo
ctgtcactcccccacccctgacgtgggcagatatgggggtcacagggtctgactcgggaggcaggtgagcccgcggacctgatcccctgtcactcccccacccctgacgtgggcagatacgggggtcacagggtcccactcgggaggcaggtgagcccggggacctgatcccctgtcactccccaacccctgacgtgggcagatatgggggtcacagggcccgaccagggaaagtgctccctccggagcacaagggctgtggagcccagtggctgtgcctcctaaggatctcatgtgtccccaggctcaggctcaggagctggaggagctgaaccgagagctccgtcagtgcaacctgcagcagttcatccagcagaccggggctgcgctgccaccgcccccacggcctgacaggggccctcctggcactcaggtcggagtggttctggggggaggctgggaggtgaggacctggcccagccccactccaagctgacttcccaacccacagggccctctgcctccagccagagaggagtccctcctgggcgctccctctgagtcccatgctggtgcccagcctaggccccgagggtatgtctgtgccccacctccccctggggcaccgggccctcctgtgg

SEQ ID NO: 313615 - DNA, 159 bp, Homo sapiens; identical to SEQ ID NO: 213937
  chr11:563846-564005
  hypo

SEQ ID NO: 313616 - DNA, 57 bp, Homo sapiens; identical to SEQ ID NO: 213938
  chr11:567175-567232
  hypo

SEQ ID NO: 313617 - DNA, 69 bp, Homo sapiens; identical to SEQ ID NO: 213939
  chr11:567262-567331
  hypo

SEQ ID NO: 313618 - DNA, 211 bp, Homo sapiens; identical to SEQ ID NO: 287727
  chr11:568188-568399
  hypo

SEQ ID NO: 313619 - DNA, 221 bp, Homo sapiens; identical to SEQ ID NO: 202394
  chr11:575604-575825
  hypo

SEQ ID NO: 313620 - DNA, 102 bp, Homo sapiens; identical to SEQ ID NO: 213941
  chr11:590964-591066
  hypo

SEQ ID NO: 313621 - DNA, 197 bp, Homo sapiens; identical to SEQ ID NO: 213942
  chr11:591096-591293
  hypo

SEQ ID NO: 313622 - DNA, 110 bp, Homo sapiens; identical to SEQ ID NO: 213943
  chr11:593651-593761
  hypo

SEQ ID NO: 313623 - DNA, 122 bp, Homo sapiens; identical to SEQ ID NO: 213944
  chr11:601646-601768
  hypo

SEQ ID NO: 313624 - DNA, 129 bp, Homo sapiens; identical to SEQ ID NO: 262875
  chr11:605030-605159
  hypo

SEQ ID NO: 313625 - DNA, 60 bp, Homo sapiens; identical to SEQ ID NO: 213945
  chr11:609531-609591
  hypo

SEQ ID NO: 313626 - DNA, 116 bp, Homo sapiens; identical to SEQ ID NO: 213946
  chr11:618979-619095
  hypo

SEQ ID NO: 313627 - DNA, 302 bp, Homo sapiens; identical to SEQ ID NO: 262878
  chr11:625775-626077
  hypo

SEQ ID NO: 313628 - DNA, 131 bp, Homo sapiens; identical to SEQ ID NO: 262879
  chr11:644102-644233
  hypo

SEQ ID NO: 313629 - DNA, 164 bp, Homo sapiens; identical to SEQ ID NO: 213947
  chr11:688383-688547
  hypo

SEQ ID NO: 313630 - DNA, 268 bp, Homo sapiens; identical to SEQ ID NO: 287733
  chr11:694728-694996
  hypo

SEQ ID NO: 313631 - DNA, 152 bp, Homo sapiens; identical to SEQ ID NO: 213948
  chr11:700514-700666
  hypo

SEQ ID NO: 313632 - DNA, 68 bp, Homo sapiens; identical to SEQ ID NO: 262882
  chr11:702894-702962
  hypo

SEQ ID NO: 313633 - DNA, 687 bp, Homo sapiens; identical to SEQ ID NO: 224017
  chr11:705951-706638
  hypo

SEQ ID NO: 313634 - DNA, 189 bp, Homo sapiens; identical to SEQ ID NO: 224019
  chr11:721128-721317
  hypo

SEQ ID NO: 313635 - DNA, 135 bp, Homo sapiens; identical to SEQ ID NO: 262883
  chr11:727709-727844
  hypo

SEQ ID NO: 313636 - DNA, 310 bp, Homo sapiens; identical to SEQ ID NO: 262884
  chr11:733218-733528
  hypo

SEQ ID NO: 313637 - DNA, 32 bp, Homo sapiens; identical to SEQ ID NO: 262885
  chr11:739281-739313
  hypo

SEQ ID NO: 313638 - DNA, 33 bp, Homo sapiens; identical to SEQ ID NO: 213950
  chr11:744542-744575
  hypo

SEQ ID NO: 313639 - DNA, 109 bp, Homo sapiens; identical to SEQ ID NO: 213951
  chr11:763193-763302
  hypo

SEQ ID NO: 313640 - DNA, 83 bp, Homo sapiens
  chr11:764018-764101
  hypo
gatccctcccacctgtggggcgagctcatcttgggagacatgagggtgaagtagacctcaacggagggcttggctttcctaac

SEQ ID NO: 313641 - DNA, 626 bp, Homo sapiens; identical to SEQ ID NO: 262889
  chr11:772495-773121
  hypo

SEQ ID NO: 313642 - DNA, 187 bp, Homo sapiens
  chr11:775074-775261
  hypo
ggccacctgcaggttgaaggcggtgctggccatcgtgaaacagtggaggaaggactgggccgacacacctgcagaaggtcccagtgagtgtgggctcgacaggactagcgtgccccgcctcagggggctacccagacacccccatggcctcgactgaccccagaacacgctgaggagcagccctctc

SEQ ID NO: 313643 - DNA, 391 bp, Homo sapiens; identical to SEQ ID NO: 262892
  chr11:799207-799598
  hypo

SEQ ID NO: 313644 - DNA, 316 bp, Homo sapiens; identical to SEQ ID NO: 262893
  chr11:799830-800146
  hypo

SEQ ID NO: 313645 - DNA, 92 bp, Homo sapiens
  chr11:823372-823464
  hypo
tgtacagctttgatcttgttctggatctaggataggttttggggttgggagctgcgggtagtgaagggaggtggctgttgggggtgccaggg

SEQ ID NO: 313646 - DNA, 409 bp, Homo sapiens
  chr11:823494-823903
  hypo
ccctccgctccatttaaccctcctcactgcaggtgctgcgagagatgtgcaagcagggataccgggatggcctgcgctttctgcagcggaacggtgcgcggacccgggcgggagagggcggggtgggctcggctctgctaccccctgcgggccgcggccgcgctgatgaactgagaatcccttctctccccaaccccaggcctcctgaaccggcccaaccccttgctggcgttgccccccgcccgcccccacggcccagaggacaaggaccaggcagtggagagcgcccaagcggaggattactcgcagctgcccggagaagatcacatcctggagcacctgcccgcccggctcaatgagggtgcgcacctgggggacgggaggggaggaggggaggcaggagggaaag

SEQ ID NO: 313647 - DNA, 321 bp, Homo sapiens
  chr11:824507-824828
  hypo
atccctgccccgcaggctgccggagcaggtggagctgcgccgcgtccagtcgctgccgtccgtgccgctgtcctgcgccgcctacagagaggcactgcccggctggatgcgcaacaacctctcgctgggggacgcgctggccaagtgggaggagtgccagcgccagctgctgctcggcctcttctgcaccaacgtggccttcccgcccgaagctctgcgcatgcgcgcacccgccgacccggctcccgcccccgcggacccagcatccccgcagcaccagctggccgggcctgcccccttgctgagcacccctgctcccga

SEQ ID NO: 313648 - DNA, 143 bp, Homo sapiens; identical to SEQ ID NO: 262895
  chr11:826059-826202
  hypo

SEQ ID NO: 313649 - DNA, 34 bp, Homo sapiens; identical to SEQ ID NO: 202396
  chr11:832781-832815
  hypo

SEQ ID NO: 313650 - DNA, 104 bp, Homo sapiens
  chr11:850442-850546
  hypo
gtcggagtcgctgccccggccaggcgttgggtgcggttgtggggatggtcccgggaggacccaagaccgctgctccggctaggagcctggactgggcgggtggg

SEQ ID NO: 313651 - DNA, 43 bp, Homo sapiens; identical to SEQ ID NO: 262897
  chr11:858811-858854
  hypo

SEQ ID NO: 313652 - DNA, 272 bp, Homo sapiens
  chr11:859386-859658
  hypo
ggctcacatgcaccccggctcacacgcaccccctctcacacgcaccccggctcacacgcacccccctcacacgcaccccgggctcacacgcaccccgggctcacacgcaccccgggctcacacgcaccccctcttacacgcaccccgggcccacatgcactccggctcacacacaccctcactcatgcaccccgggcccacacgcaccccagctcccatgtacccctgctcacatgcaccccagctcccatgcatcccgggctcacacacaa

SEQ ID NO: 313653 - DNA, 110 bp, Homo sapiens
  chr11:864622-864732
  hypo
ggcagccaggacagcgggtgtggatttaccaggcctggaggggcagcgccagcgaccctgggaggctgtgctgtggctctatagcgactggggcacaagggcactgctac

SEQ ID NO: 313654 - DNA, 34 bp, Homo sapiens; identical to SEQ ID NO: 262901
  chr11:865452-865486
  hypo

SEQ ID NO: 313655 - DNA, 141 bp, Homo sapiens
  chr11:865516-865657
  hypo
acaggtatgcccagcaagacctgaagaaaggcttgcacctgtacggcacgcagggcaacgtgggcctcaccaacgcctggagcatcatccagaccgacgtgaggcgtgggcaggtgggcggggtcggcgggtgccccctcc

SEQ ID NO: 313656 - DNA, 70 bp, Homo sapiens; identical to SEQ ID NO: 262903
  chr11:873624-873694
  hypo

SEQ ID NO: 313657 - DNA, 61 bp, Homo sapiens; identical to SEQ ID NO: 262904
  chr11:873724-873785
  hypo

SEQ ID NO: 313658 - DNA, 171 bp, Homo sapiens
  chr11:875517-875688
  hypo
cctggctcctcgtcactggctatcggagagcgctggggtgttaggagaacacggtgagcatgaggccggggatcggggctggggttgctgaaactcttagcgccacatgaggccgagggagtcaagtcctggggtggccatgaggggctcgccacaccattctatgcactt

SEQ ID NO: 313659 - DNA, 206 bp, Homo sapiens; identical to SEQ ID NO: 262906
  chr11:898338-898544
  hypo

SEQ ID NO: 313660 - DNA, 79 bp, Homo sapiens; identical to SEQ ID NO: 213955
  chr11:907472-907551
  hypo

SEQ ID NO: 313661 - DNA, 83 bp, Homo sapiens; identical to SEQ ID NO: 262908
  chr11:937330-937413
  hypo

SEQ ID NO: 313662 - DNA, 37 bp, Homo sapiens; identical to SEQ ID NO: 262909
  chr11:938960-938997
  hypo

SEQ ID NO: 313663 - DNA, 144 bp, Homo sapiens; identical to SEQ ID NO: 262910
  chr11:946374-946518
  hypo

SEQ ID NO: 313664 - DNA, 98 bp, Homo sapiens
  chr11:971727-971825
  hypo
tgatgtccggaacactcagacgcgtggcccacagtgaagtgagtgggaccggggggtccagttcctgttggcatctggctcgtggcacgctagtcagg

SEQ ID NO: 313665 - DNA, 129 bp, Homo sapiens
  chr11:971860-971989
  hypo
gtagcagaggcatcctcggttccactggaacagacgtttgccgaatcctgagaggcgccgctcccacagcagtgccctgggtgcgtgggtggtgcctgggctgcttccgcatctgtgtgtcactgattg

SEQ ID NO: 313666 - DNA, 96 bp, Homo sapiens; identical to SEQ ID NO: 262912
  chr11:980553-980649
  hypo

SEQ ID NO: 313667 - DNA, 525 bp, Homo sapiens; identical to SEQ ID NO: 213956
  chr11:985466-985991
  hypo

SEQ ID NO: 313668 - DNA, 101 bp, Homo sapiens; identical to SEQ ID NO: 262914
  chr11:986394-986495
  hypo

SEQ ID NO: 313669 - DNA, 294 bp, Homo sapiens; identical to SEQ ID NO: 213957
  chr11:991642-991936
  hypo

SEQ ID NO: 313670 - DNA, 529 bp, Homo sapiens; identical to SEQ ID NO: 262917
  chr11:993204-993733
  hypo

SEQ ID NO: 313671 - DNA, 301 bp, Homo sapiens; identical to SEQ ID NO: 213959
  chr11:996128-996429
  hypo

SEQ ID NO: 313672 - DNA, 263 bp, Homo sapiens; identical to SEQ ID NO: 213960
  chr11:998037-998300
  hypo

SEQ ID NO: 313673 - DNA, 56 bp, Homo sapiens; identical to SEQ ID NO: 213961
  chr11:1000519-1000575
  hypo

SEQ ID NO: 313674 - DNA, 99 bp, Homo sapiens; identical to SEQ ID NO: 213962
  chr11:1005978-1006077
  hypo

SEQ ID NO: 313675 - DNA, 240 bp, Homo sapiens; identical to SEQ ID NO: 213963
  chr11:1006107-1006347
  hypo

SEQ ID NO: 313676 - DNA, 169 bp, Homo sapiens; identical to SEQ ID NO: 213964
  chr11:1006970-1007139
  hypo

SEQ ID NO: 313677 - DNA, 44 bp, Homo sapiens
  chr11:1008031-1008075
  hypo
cccgtggacccgaccgtggaggggggcgcgcaggtgcagcaggt

SEQ ID NO: 313678 - DNA, 292 bp, Homo sapiens
  chr11:1008125-1008417
  hypo
ttcagttcaggtaagagccgcctgtgcgccccgggccaaggggtgtgtgggcgcctgagctgtgtgcctgggctccatgactgtgcctccgtgtccttcctgaggggacccggggcgtgcgggtgctcacggtgcatggatgcggcctgagctattgctgcccccggctctgcagagcgcaggaaacaaggggaggcggagccctgggctccgggacggcaggtggcagctcccacatggggccttgctaggatctttctgggcaccatggggcccacctcatggggtggca

SEQ ID NO: 313679 - DNA, 59 bp, Homo sapiens; identical to SEQ ID NO: 262924
  chr11:1008941-1009000
  hypo

SEQ ID NO: 313680 - DNA, 63 bp, Homo sapiens; identical to SEQ ID NO: 262925
  chr11:1011267-1011330
  hypo

SEQ ID NO: 313681 - DNA, 452 bp, Homo sapiens; identical to SEQ ID NO: 262926
  chr11:1013508-1013960
  hypo

SEQ ID NO: 313682 - DNA, 187 bp, Homo sapiens; identical to SEQ ID NO: 262927
  chr11:1015847-1016034
  hypo

SEQ ID NO: 313683 - DNA, 230 bp, Homo sapiens
  chr11:1025210-1025440
  hypo
tggtcatgtgcctgttccagatgagcgtcaggttgtacctcccggggatgctgatgtccacgacaaggctcagcgcacccggcgtcaccccgagctgcacgtggggctcctccccggtgaccgtgtagtttctgtccgccagcaccacggacaggccctgtggggtggggttggcataggactgcctgtctgtctcccccggcccctggcacagccgtgctggaccgagc

SEQ ID NO: 313684 - DNA, 163 bp, Homo sapiens
  chr11:1029015-1029178
  hypo
tggcagggatgggcgcaggaaaggccttacctgcctggagaggtagaccacagccaccagggaggtctcggagtgtgagacgccggacttgtcgtacacagccatgagggcaccgtcctcgggaagctgggggctctgcgagggggcggggctcagacacggg

SEQ ID NO: 313685 - DNA, 268 bp, Homo sapiens; identical to SEQ ID NO: 262930
  chr11:1035491-1035759
  hypo

SEQ ID NO: 313686 - DNA, 167 bp, Homo sapiens
  chr11:1043703-1043870
  hypo
gaggcggatgcgtgcgcacacatgctcccaggaggtgtttgtaacaaccccaaactggaaatgacccagatgtccatcagagcgcagcctgttcacctgctcttccagcttcagcaattacaaacaaagcagttagaacacgtgtgtccgtgtctcagaggagcatg

SEQ ID NO: 313687 - DNA, 118 bp, Homo sapiens
  chr11:1043921-1044039
  hypo
aatttttcagaaacggccaaactgttttccggcatggctgtgccattgtgcctcccacccgtgatgtgagttccagcccctcctcaccctcctgtatgcttgacgtcgtccgttttta

SEQ ID NO: 313688 - DNA, 69 bp, Homo sapiens; identical to SEQ ID NO: 262932
  chr11:1047107-1047176
  hypo

SEQ ID NO: 313689 - DNA, 38 bp, Homo sapiens; identical to SEQ ID NO: 262933
  chr11:1056099-1056137
  hypo

SEQ ID NO: 313690 - DNA, 45 bp, Homo sapiens; identical to SEQ ID NO: 262934
  chr11:1060630-1060675
  hypo

SEQ ID NO: 313691 - DNA, 80 bp, Homo sapiens; identical to SEQ ID NO: 262935
  chr11:1061401-1061481
  hypo

SEQ ID NO: 313692 - DNA, 147 bp, Homo sapiens
  chr11:1082517-1082664
  hypo
gcatctgtgagcgccgggccacactctgcctccctgcctcactgcccgtccaccttgctctgtcgcccagaggtgcaaatatgacacgtgtaactgtcagaacaatgaggactgcctgtgcgccgccctgtcctcctacgcgcgcgc

SEQ ID NO: 313693 - DNA, 180 bp, Homo sapiens
  chr11:1082694-1082874
  hypo
ctggcgggagcatgtctgcagtgagtgccgtccccgtgggctgcatcctggggatggggtccgggctttgagctcctgggacggggctgggggccctgagcacgggtggtccagggagaggggtcggccccctgcagccacggaccaggctccagcttcgtcagccggtggtagcaggaa

SEQ ID NO: 313694 - DNA, 502 bp, Homo sapiens; identical to SEQ ID NO: 262938
  chr11:1088802-1089304
  hypo

SEQ ID NO: 313695 - DNA, 160 bp, Homo sapiens
  chr11:1095391-1095551
  hypo
ctgcgcagcatgtccgggcagctgaggccccaggcaccacttcctgctggtcgtctgagggccgaggcctccagcaacccttgggtgcagggtctgccgagccctccacattttcaccgtgccccgctgtgcctggcgaggtggctggctgcagtgaggt

SEQ ID NO: 313696 - DNA, 379 bp, Homo sapiens; identical to SEQ ID NO: 213966
  chr11:1096252-1096631
  hypo

SEQ ID NO: 313697 - DNA, 267 bp, Homo sapiens; identical to SEQ ID NO: 213967
  chr11:1098559-1098826
  hypo

SEQ ID NO: 313698 - DNA, 512 bp, Homo sapiens
  chr11:1103462-1103974
  hypo
gcagcagctacccccgcccacggcatcgtgggaaggtgctctcatccccaggaatgtccgggggtcccgggctcattctcctttccctctagggctccatcacattcatgcccaatggatgctgcaagacctgtgagtacagggcacagcctggggggtaggcagggtgggggcacaagggctggtgccctcagccccgcctggggtggctggaggctggacaacggcctctgggtgggcagtgagggctgggggctgaggccgagcctggggaggggacgcagcgagggagagcctcctcgaagatgtggaggccctgccctaagccgctgcccgctctccccaggcacccctcgcaatgagaccagggtgccctgctccaccgtccccgtcaccacggaggtttcgtacgccggctgcaccaagaccgtcctcatgaatcattgctccgggtcctgcgggacatttgtcatgtgagtcccaggctgggagtgtgcctggagggggtggtg

SEQ ID NO: 313699 - DNA, 325 bp, Homo sapiens
  chr11:1104214-1104539
  hypo
cacctcccgccgggcccggcgctcccctaggcatctggggagcgggtgagcggggtgggcacagcccccttcactgccctcgacagctttacctcccccggaccctctgagcctcctaagctcggcttcctctcttcagatatttattgtctgagtctttgttcagtccttgctttccaataataaactcagggggacatgctgtactgtgtggtttaggttggtgctgcaggggtgcggcttggccactgtgcatggcggaggccaccaggctctgcgtgcaggacacgggggcaccacacacacgccacgcggttggcaaatc

SEQ ID NO: 313700 - DNA, 345 bp, Homo sapiens; identical to SEQ ID NO: 213970
  chr11:1105012-1105357
  hypo

SEQ ID NO: 313701 - DNA, 68 bp, Homo sapiens
  chr11:1155528-1155596
  hypo
aacccggcgcacaacgggcgggtgtgcagcacctggggcagcttccactacaagaccttcgacggcga

SEQ ID NO: 313702 - DNA, 284 bp, Homo sapiens; identical to SEQ ID NO: 262946
  chr11:1161252-1161536
  hypo

SEQ ID NO: 313703 - DNA, 43 bp, Homo sapiens; identical to SEQ ID NO: 262947
  chr11:1161745-1161788
  hypo

SEQ ID NO: 313704 - DNA, 260 bp, Homo sapiens; identical to SEQ ID NO: 262948
  chr11:1162084-1162344
  hypo

SEQ ID NO: 313705 - DNA, 251 bp, Homo sapiens; identical to SEQ ID NO: 262949
  chr11:1213296-1213547
  hypo

SEQ ID NO: 313706 - DNA, 428 bp, Homo sapiens
  chr11:1214967-1215395
  hypo
ggcttggctgaagcagaaaagaattgggtgggacagcaggaaggacttcccagcatcaaggcggggccgcatggggccgagcctccccgcttaggggtgctgagtgaatccctgtgagcctcggagcagcctggctggagaaggtggaggagtctgtccctgcctcgctccagccttgtcaagcgcccgctggatggagctctgtgcggacgctggccacgtgtgttctgatgacgtgagggtcttgtgcgccctgtgagatgagacggtggggggtcagggacagatgtgacctgttgggaggaaagccccagggccatggtgccaccacccgagccacccgtaaggctgcccctggggcctggcaggtgtgtgcagcggctggggtgacccccactacatcaccttcgacggcacctactacacct

SEQ ID NO: 313707 - DNA, 304 bp, Homo sapiens; identical to SEQ ID NO: 213973
  chr11:1215429-1215733
  hypo

SEQ ID NO: 313708 - DNA, 215 bp, Homo sapiens
  chr11:1221488-1221703
  hypo
ggtgggactgttggcgcctggggaactggcaaaggagagctggttgtcagacactggcagcatgcctccaggagcagggaacacgatgaggccgcccagagcttggcacggcgccggcttacggcaggaggctggggtggcgcagcagctggtgctgagcagcccctgcccacaggtactcgctcgagggcaacacggtggagcacaggtgccag

SEQ ID NO: 313709 - DNA, 35 bp, Homo sapiens
  chr11:1228795-1228830
  hypo
gctcaggaagccaccggtagctccactgagaccag

SEQ ID NO: 313710 - DNA, 150 bp, Homo sapiens
  chr11:1228883-1229033
  hypo
tgggtctccacagcagcgccggccgagctggtttgcagactctgcctctggagaatcgtgggcggtggctcctgtttgcctacgtgtgtgctgcatggacagagctgcaaggccccgggcgaacatgcaggcagacggacgtggatacac

SEQ ID NO: 313711 - DNA, 79 bp, Homo sapiens
  chr11:1254260-1254339
  hypo
gccccaagtcccagcgctacgcctacgtggtggatgcctgccagcccacttgccgcggcctgagtgaggccgacgtcac

SEQ ID NO: 313712 - DNA, 72 bp, Homo sapiens
  chr11:1254423-1254495
  hypo
ccaggagtgcccctgctacgctcacggcaccgtgctggctcctggagaggtggtgcacgacgagggcgccgt

SEQ ID NO: 313713 - DNA, 71 bp, Homo sapiens
  chr11:1256517-1256588
  hypo
ctctttctggcccaggactactgtggggacaacaccacccacgggaccttccgcatcgtcaccgagaacat

SEQ ID NO: 313714 - DNA, 358 bp, Homo sapiens; identical to SEQ ID NO: 262957
  chr11:1261378-1261736
  hypo

SEQ ID NO: 313715 - DNA, 1102 bp, Homo sapiens
  chr11:1262078-1263180
  hypo
aggcccggccctcccggtctccaccgtgtgtgtccgcgaggtctgccgctggtccagctggtacaatgggcaccgcccagagcccggcctgggaggcggagactttgagacgtttgaaaacctgaggcagagagggtaccaggtatgccctgtgctggctgacatcgagtgccgggcggcgcagcttcccgacatgccgctggaggagctgggccagcaggtggactgtgaccgcatgcgggggctgatgtgcgccaacagccaacagagtcccccgctctgtcacgactacgagctgcgggttctctgctgcgaatacgtgccctgtggcccctccccggccccaggcaccagccctcagccctccctcagtgccagcacggagcctgctgtgcctaccccaacccagaccacagcaaccgaaaagaccaccctatgggtgaccccgagcatccggtcgacggcggccctcacctcgcagactgggtccagctcaggccccgtgacggtcaccccctcggccccaggtaccaccacctgccagccccggtgtcagtggacagagtggtttgatgaggactaccccaagtctgaacaacttggaggggacgttgagtcctacgataagatcagggccgctggagggcacttatgccagcagcctaaggacatagagtgccaggccgagagcttccccaactggaccctggcacaggtggggcagaaggtgcactgtgacgtccacttcggcctggtgtgcaggaactgggagcaggagggcgtcttcaagatgtgctacaactacaggatccgggtcctctgctgcagtgacgaccactgcaggggacgtgccacaaccccgccaccgaccacagagctggagacggccaccaccaccaccacccaggccctgttctcaacgccgcagcctacgagtagcccggggctgaccagggctcccccggccagcaccacagcagtccccaccctctcagaaggactgacatcccccagatacacaagcacccttggtacagccaccacgggaggccccacgacgcctgcaggctccacagaacccactgtcccaggggtggccaca

SEQ ID NO: 313716 - DNA, 128 bp, Homo sapiens; identical to SEQ ID NO: 213975
  chr11:1263764-1263892
  hypo

SEQ ID NO: 313717 - DNA, 238 bp, Homo sapiens; identical to SEQ ID NO: 213976
  chr11:1275398-1275636
  hypo

SEQ ID NO: 313718 - DNA, 525 bp, Homo sapiens
  chr11:1275755-1276280
  hypo
aaatgcagccagctggagactccaggcccccagggaagatctgggctttggggtgggggatacacaggggggtctctgcacatggaggcagagccccaaagagaagccctgctccccgagcccacctggcactgcctcccagctcagggttcccctggattcccccagatcctgtttgaccaaattccggtgagcagcggtttcagcaagaacggcgtgcttgtgtctgtgctggggaccaccaccatgcgtgtggacattcctgccctgggcgtgagcgtcaccttcaatggccaagtcttccaggcccggctgccctacagcctcttccacaacaacaccgagggccagtgcggtgagtgggcggcgggtcctgccccggccagggctgctgctgggcctgacaacccagtgagcataggggaagcctggggaggggaatgagtgggggaggggggtgggggctgtgaaaggctccccagattccagccccgcggtgacgcccccactcccaggcacctgcac

SEQ ID NO: 313719 - DNA, 31 bp, Homo sapiens; identical to SEQ ID NO: 262961
  chr11:1281709-1281740
  hypo

SEQ ID NO: 313720 - DNA, 233 bp, Homo sapiens; identical to SEQ ID NO: 262962
  chr11:1298242-1298475
  hypo

SEQ ID NO: 313721 - DNA, 96 bp, Homo sapiens; identical to SEQ ID NO: 213978
  chr11:1301051-1301147
  hypo

SEQ ID NO: 313722 - DNA, 138 bp, Homo sapiens; identical to SEQ ID NO: 262964
  chr11:1306745-1306883
  hypo

SEQ ID NO: 313723 - DNA, 139 bp, Homo sapiens; identical to SEQ ID NO: 213979
  chr11:1307128-1307267
  hypo

SEQ ID NO: 313724 - DNA, 109 bp, Homo sapiens; identical to SEQ ID NO: 213980
  chr11:1312471-1312580
  hypo

SEQ ID NO: 313725 - DNA, 55 bp, Homo sapiens; identical to SEQ ID NO: 262967
  chr11:1312883-1312938
  hypo

SEQ ID NO: 313726 - DNA, 278 bp, Homo sapiens; identical to SEQ ID NO: 262968
  chr11:1360071-1360349
  hypo

SEQ ID NO: 313727 - DNA, 277 bp, Homo sapiens
  chr11:1374621-1374898
  hypo
ctctttccagcccacggagcagagtgccacctccctgcctacctcagccccagttccctcaaagggcaaacgttccacctgccgacccattttcctgctttgggccggccagggccaggcctggtcttcccagccctactgcggtgcccgacccacaggacagcctggggggcatcaagcccaatgcctctgagagcctgtgagtgagtggcctccatggtgctggggccgctccagccgccttgcttggcccccgggcctcccttcaggatctaga

SEQ ID NO: 313728 - DNA, 178 bp, Homo sapiens; identical to SEQ ID NO: 262970
  chr11:1375494-1375672
  hypo

SEQ ID NO: 313729 - DNA, 58 bp, Homo sapiens; identical to SEQ ID NO: 262971
  chr11:1390811-1390869
  hypo

SEQ ID NO: 313730 - DNA, 150 bp, Homo sapiens; identical to SEQ ID NO: 262972
  chr11:1397882-1398032
  hypo

SEQ ID NO: 313731 - DNA, 732 bp, Homo sapiens; identical to SEQ ID NO: 287745
  chr11:1410710-1411442
  hypo

SEQ ID NO: 313732 - DNA, 636 bp, Homo sapiens; identical to SEQ ID NO: 262973
  chr11:1417382-1418018
  hypo

SEQ ID NO: 313733 - DNA, 284 bp, Homo sapiens
  chr11:1431201-1431485
  hypo
ttggggggtttgtgacgagtccgtgtttgggggggtttgtgacgtcggcctcgcagagcggtgacggtcgcagagtctgtgttttggggggtttgtgacgagtctgtgtttgggggggtttgtgacgtcggcctcgcagagcggtgacggtcgcagagtctgtgttttggggggtttgtgacgagttcgtgtttgggggggtttgtgacgtcggcctcgcagagtggtgacggacacagagtccgtgtttgggggggtttgtgacgtcggcctcgcagagcggt

SEQ ID NO: 313734 - DNA, 87 bp, Homo sapiens; identical to SEQ ID NO: 262975
  chr11:1433176-1433263
  hypo

SEQ ID NO: 313735 - DNA, 57 bp, Homo sapiens; identical to SEQ ID NO: 213983
  chr11:1433608-1433665
  hypo

SEQ ID NO: 313736 - DNA, 190 bp, Homo sapiens; identical to SEQ ID NO: 262977
  chr11:1434052-1434242
  hypo

SEQ ID NO: 313737 - DNA, 185 bp, Homo sapiens; identical to SEQ ID NO: 213984
  chr11:1446145-1446330
  hypo

SEQ ID NO: 313738 - DNA, 71 bp, Homo sapiens; identical to SEQ ID NO: 213985
  chr11:1446400-1446471
  hypo

SEQ ID NO: 313739 - DNA, 478 bp, Homo sapiens
  chr11:1446896-1447374
  hypo
cccacacccccgctcgtctcccactctgtgtcctctccactggccttggggtagatgagctgcccccgtcctttctttgggaacccacccccttctgggcgagggtgggtagcaggcacccgacagggtccccaggtggcactccaggccgtggcactagatgtgcactgtggagatgggaagaggtgtggggcaggggagggcgtggggggaacgctgagtttcctgggtacacctgccccggggccagtgcctcaggcctctggagagcggatttgcggcctcatggctggggagggctgaggttctgctgtccggtgtggtgccacggtgagcacacctcacctgtccagccttccccctaaacccagtgctctggacggtgggctggcccctggctcctagcctgtgcgcgcccattcaggaaagcaaacaccagcacacaccggtccctgtggggccttgggtgctctgggca

SEQ ID NO: 313740 - DNA, 49 bp, Homo sapiens
  chr11:1450676-1450725
  hypo
cacaggtgcatgtctgtgtgcgtggccacacgtgctgtccctgcccagg

SEQ ID NO: 313741 - DNA, 44 bp, Homo sapiens
  chr11:1464971-1465015
  hypo
gtgtgtgggtcggtgcccaggtgtgtggacgtgtgcacaggtgt

SEQ ID NO: 313742 - DNA, 346 bp, Homo sapiens; identical to SEQ ID NO: 213986
  chr11:1466357-1466703
  hypo

SEQ ID NO: 313743 - DNA, 42 bp, Homo sapiens; identical to SEQ ID NO: 213987
  chr11:1467211-1467253
  hypo

SEQ ID NO: 313744 - DNA, 208 bp, Homo sapiens
  chr11:1468915-1469123
  hypo
cggcctcagagccacgtggagttcttacccggtgtggcccgggccctgggggccgacctgtgcccgcgtgtggccgtcagtaactgtgttttctcgctctgttctgctgtagtaaagcaatgttcagtaaaagcctggatatcgctgaggcccatccccaattcagcaaagaagacaggtatacaccccgaccacccgtccccgcacc

SEQ ID NO: 313745 - DNA, 105 bp, Homo sapiens; identical to SEQ ID NO: 213988
  chr11:1471460-1471565
  hypo

SEQ ID NO: 313746 - DNA, 71 bp, Homo sapiens
  chr11:1472058-1472129
  hypo
gggagagagcagaggctgccttggggagggccccgcccggcagtgccagaccagtccgaggggcctgtagc

SEQ ID NO: 313747 - DNA, 102 bp, Homo sapiens
  chr11:1477650-1477752
  hypo
ccgtgttccagaagccggtcaagttccaggttgatatcacctacacggagggtggggaggcgcagaaggagaacggcatctactccgtcaccttcaccctgc

SEQ ID NO: 313748 - DNA, 80 bp, Homo sapiens
  chr11:1478347-1478427
  hypo
cctgagcagggccctccatgcccacccacaggtctcggccctggacaggccaagcatgccccgggcggcccatctgctag

SEQ ID NO: 313749 - DNA, 329 bp, Homo sapiens
  chr11:1483177-1483506
  hypo
gtagcgggcggcagcgccagcgcccctctgtcaggctggggcaatcttggttttgtgtccaaaggtgaaggggtaggaggagggccctcagctggccctccccacacacaggacggcaggggcactgtgaggcttttcttattaaaatgaaaaaattgaaaaaaaaggacaaagagtcggtggcgctcctctgcagggcgttctgtgcagagcgaggcccagggcgcagccctcagagggctgcaggcccaccctgcccagtgcccgccgccgtgcttcaccccagctccagcttctgtgttcccttccgcccatgtgcccagccctcc

SEQ ID NO: 313750 - DNA, 96 bp, Homo sapiens
  chr11:1483938-1484034
  hypo
gggcagggcgggcgcgcagggctctgtgacagcccgggacagcttcttgttccccacttgcagcccctgggctgcgccagtgtgaatgcagctacc

SEQ ID NO: 313751 - DNA, 161 bp, Homo sapiens; identical to SEQ ID NO: 213991
  chr11:1494354-1494515
  hypo

SEQ ID NO: 313752 - DNA, 283 bp, Homo sapiens; identical to SEQ ID NO: 213992
  chr11:1497177-1497460
  hypo

SEQ ID NO: 313753 - DNA, 162 bp, Homo sapiens; identical to SEQ ID NO: 262992
  chr11:1508342-1508504
  hypo

SEQ ID NO: 313754 - DNA, 482 bp, Homo sapiens; identical to SEQ ID NO: 262993
  chr11:1509374-1509856
  hypo

SEQ ID NO: 313755 - DNA, 239 bp, Homo sapiens; identical to SEQ ID NO: 262994
  chr11:1521173-1521412
  hypo

SEQ ID NO: 313756 - DNA, 725 bp, Homo sapiens
  chr11:1535822-1536547
  hypo
tcttcagcatcctagtgggacgggagcacccagggaacacaagtgcaccatgacgcggagcccttcatcaccgcaggccacggcgcttgtccttcccagaggcccccaaccacagctgctgagcgacacccacaccgcttctctcttcacacagcggactgatgaggagtcccgccaagcaggagctctgagccacagcacagagtgtgctggcccaagtccacgcctgcatgcaagctcagccatgcgtctaatggcaataaccgtggaatgagctcgtgaggttcggagagtcccaccccgacggggagagccacagggagccccaatctcggcagtgaccggctccaggtccccacgtaccgtgagagtggggacagcggtggacagcagcccttgagcagggcacaaccttcagagagacctcgacaagtgaacacttaaaccaaggtcgaccctgggggaaacgcagacctcctcccagtgcccccttcagaaaaggtactcaaacactggctcccatcatgagctgggcacggaaccaggcatgggtactacctgcctccagggcttggagctcgggaggggaaccaatcccgggccctcgacctgggaggtgccagaaggccctcacacaagactccagcactagggtggggaggttaaagtaaacaggacagaggggttcaactaagacaatacctttgctcacggtcagaggcgaa

SEQ ID NO: 313757 - DNA, 109 bp, Homo sapiens
  chr11:1536583-1536692
  hypo
cacaagctctcccgccgcggctgcaccacatgcctgataaagggacagccctggatgtctagttcctcaggcacgtgtgcacacatgtgtgctgcgtagcactggcacc

SEQ ID NO: 313758 - DNA, 208 bp, Homo sapiens; identical to SEQ ID NO: 213994
  chr11:1552162-1552370
  hypo

SEQ ID NO: 313759 - DNA, 197 bp, Homo sapiens; identical to SEQ ID NO: 262997
  chr11:1553266-1553463
  hypo

SEQ ID NO: 313760 - DNA, 190 bp, Homo sapiens; identical to SEQ ID NO: 262998
  chr11:1555916-1556106
  hypo

SEQ ID NO: 313761 - DNA, 120 bp, Homo sapiens; identical to SEQ ID NO: 262999
  chr11:1560263-1560383
  hypo

SEQ ID NO: 313762 - DNA, 39 bp, Homo sapiens; identical to SEQ ID NO: 213995
  chr11:1584969-1585008
  hypo

SEQ ID NO: 313763 - DNA, 38 bp, Homo sapiens; identical to SEQ ID NO: 213996
  chr11:1586817-1586855
  hypo

SEQ ID NO: 313764 - DNA, 498 bp, Homo sapiens; identical to SEQ ID NO: 224022
  chr11:1592747-1593245
  hypo

SEQ ID NO: 313765 - DNA, 117 bp, Homo sapiens; identical to SEQ ID NO: 202402
  chr11:1594039-1594156
  hypo

SEQ ID NO: 313766 - DNA, 613 bp, Homo sapiens; identical to SEQ ID NO: 263002
  chr11:1602581-1603194
  hypo

SEQ ID NO: 313767 - DNA, 212 bp, Homo sapiens; identical to SEQ ID NO: 213999
  chr11:1749039-1749251
  hypo

SEQ ID NO: 313768 - DNA, 224 bp, Homo sapiens; identical to SEQ ID NO: 263004
  chr11:1759618-1759842
  hypo

SEQ ID NO: 313769 - DNA, 223 bp, Homo sapiens; identical to SEQ ID NO: 214000
  chr11:1795687-1795910
  hypo

SEQ ID NO: 313770 - DNA, 191 bp, Homo sapiens; identical to SEQ ID NO: 214001
  chr11:1800816-1801007
  hypo

SEQ ID NO: 313771 - DNA, 94 bp, Homo sapiens; identical to SEQ ID NO: 263007
  chr11:1801339-1801433
  hypo

SEQ ID NO: 313772 - DNA, 93 bp, Homo sapiens; identical to SEQ ID NO: 263008
  chr11:1805366-1805459
  hypo

SEQ ID NO: 313773 - DNA, 222 bp, Homo sapiens; identical to SEQ ID NO: 263009
  chr11:1806143-1806365
  hypo

SEQ ID NO: 313774 - DNA, 31 bp, Homo sapiens; identical to SEQ ID NO: 263010
  chr11:1811101-1811132
  hypo

SEQ ID NO: 313775 - DNA, 38 bp, Homo sapiens; identical to SEQ ID NO: 263011
  chr11:1819538-1819576
  hypo

SEQ ID NO: 313776 - DNA, 41 bp, Homo sapiens; identical to SEQ ID NO: 214002
  chr11:1824257-1824298
  hypo

SEQ ID NO: 313777 - DNA, 441 bp, Homo sapiens; identical to SEQ ID NO: 214003
  chr11:1824638-1825079
  hypo

SEQ ID NO: 313778 - DNA, 32 bp, Homo sapiens; identical to SEQ ID NO: 214004
  chr11:1825139-1825171
  hypo

SEQ ID NO: 313779 - DNA, 40 bp, Homo sapiens; identical to SEQ ID NO: 214005
  chr11:1825529-1825569
  hypo

SEQ ID NO: 313780 - DNA, 234 bp, Homo sapiens
  chr11:1826944-1827178
  hypo
catcaaggacacgcggagctcagcctccgagtcacaccagtgtagggaggcgtgataaccaccctcatcaaggacacgcggagctcagcctcgagtcacaccagtgtagggaagcgtgatagctgccttggacatctgtcaagaccccaagggtcattccttaggggcacagagtaagctccaagataggatgttcccccgagacacatctagatatcccgataactcttaaag

SEQ ID NO: 313781 - DNA, 65 bp, Homo sapiens; identical to SEQ ID NO: 263017
  chr11:1842377-1842442
  hypo

SEQ ID NO: 313782 - DNA, 163 bp, Homo sapiens; identical to SEQ ID NO: 263018
  chr11:1845539-1845702
  hypo

SEQ ID NO: 313783 - DNA, 123 bp, Homo sapiens; identical to SEQ ID NO: 214006
  chr11:1847136-1847259
  hypo

SEQ ID NO: 313784 - DNA, 124 bp, Homo sapiens; identical to SEQ ID NO: 214007
  chr11:1847321-1847445
  hypo

SEQ ID NO: 313785 - DNA, 328 bp, Homo sapiens
  chr11:1857545-1857873
  hypo
ggacggctggatgggcctgggctgggtgggcctgggcagctgggtgggcctgggcagctgggtgggcctgagctagggcagcagggcctggctcacgccgctgcctcagatcccgcaggcggagctgccaggggccaccctgcaggtgcagcttttcaacttcaagcgcttctcggggcatgagcccctgggtgagctccgtctgccactgggcaccgtggatctgcagcatgttctggagcactggtacctgctgggcccgccggctgccactcaggtgaggtgctggtcaccaggccacagcccaaggcagagctggcagggaccc

SEQ ID NO: 313786 - DNA, 129 bp, Homo sapiens
  chr11:1857933-1858062
  hypo
caactcggccagaatcaccctcccgggctgaagcccctcttgctgcccacagcccgagcaggtcggggagctgtgcttctctctccggtacgtgcccagctcaggccggctgaccgtggtggtgctgga

SEQ ID NO: 313787 - DNA, 54 bp, Homo sapiens
  chr11:1858535-1858589
  hypo
gacatgctggcccacgcccggcggcccattgcccagcggcaccccctgcggcca

SEQ ID NO: 313788 - DNA, 128 bp, Homo sapiens
  chr11:1858652-1858780
  hypo
cactcctgaatgcaccacatgcctctgtctccccgctgagcccaggcacttgcccaggccgccctgcaggaccactgcaataaacgccttctcctgccactgtgtgtccggctggagcctggagggga

SEQ ID NO: 313789 - DNA, 49 bp, Homo sapiens; identical to SEQ ID NO: 263022
  chr11:1858842-1858891
  hypo

SEQ ID NO: 313790 - DNA, 622 bp, Homo sapiens; identical to SEQ ID NO: 263025
  chr11:1869646-1870268
  hypo

SEQ ID NO: 313791 - DNA, 85 bp, Homo sapiens; identical to SEQ ID NO: 263026
  chr11:1919472-1919557
  hypo

SEQ ID NO: 313792 - DNA, 66 bp, Homo sapiens
  chr11:1950284-1950350
  hypo
tgctcccccgcagccgcactggcttttctcttgcatgtgtgcttgtgccttttgccacctggaaga

SEQ ID NO: 313793 - DNA, 589 bp, Homo sapiens
  chr11:1950634-1951223
  hypo
gtgccagagcccgggccgggcacgcccccctcccctttctcccaagcccctttcctcccaatcttcttcccgagcccctgtcctctttgctccgtctcctcccttcccagccttcaaggacgcggcctgtctcgctcctatttcttccctacctcttcctcacccttcctcctggccccaggccctgagctcttcccctccaaccctgccaggggcttttgcaggcctagagcagaaacaggaccctcttgtttctgggggttgggggtactcccagctgaaaaggacggtggccttcagtgaaggggaacccagggccgcaggccgcccagtctcacccaggctgtctctctccctctccccacgctggtgtccctctccctacgctggtgctgtgtggaccagaggagaaaccgagacccaagtgagtgtggggtcctggcaggcccgctgctgagtgtgttctggggtgggggtggtcaagtgagtgtggggtcctggcaggcccagtgccgagtgtgttctggggtggcggtggccaagtgagtgtggggtcctggcaggcccagcgcctcgtgtgttccgtggt

SEQ ID NO: 313794 - DNA, 53 bp, Homo sapiens
  chr11:1955098-1955151
  hypo
ctggtggactccctcggaggagccggggacagggctgagcagacccccttctc

SEQ ID NO: 313795 - DNA, 86 bp, Homo sapiens; identical to SEQ ID NO: 214008
  chr11:1956448-1956534
  hypo

SEQ ID NO: 313796 - DNA, 235 bp, Homo sapiens; identical to SEQ ID NO: 263031
  chr11:1956828-1957063
  hypo

SEQ ID NO: 313797 - DNA, 36 bp, Homo sapiens
  chr11:1958360-1958396
  hypo
caggccacccaggccagcatgcgcaggcctgtggcc

SEQ ID NO: 313798 - DNA, 89 bp, Homo sapiens; identical to SEQ ID NO: 263034
  chr11:1962757-1962846
  hypo

SEQ ID NO: 313799 - DNA, 34 bp, Homo sapiens; identical to SEQ ID NO: 263035
  chr11:1975868-1975902
  hypo

SEQ ID NO: 313800 - DNA, 32 bp, Homo sapiens
  chr11:1975932-1975964
  hypo
cgcaggaatgaagggcgcacgacatgagaggc

SEQ ID NO: 313801 - DNA, 50 bp, Homo sapiens; identical to SEQ ID NO: 263037
  chr11:1980680-1980730
  hypo

SEQ ID NO: 313802 - DNA, 114 bp, Homo sapiens; identical to SEQ ID NO: 263038
  chr11:1982883-1982997
  hypo

SEQ ID NO: 313803 - DNA, 99 bp, Homo sapiens; identical to SEQ ID NO: 214009
  chr11:1985748-1985847
  hypo

SEQ ID NO: 313804 - DNA, 333 bp, Homo sapiens; identical to SEQ ID NO: 263040
  chr11:2005410-2005743
  hypo

SEQ ID NO: 313805 - DNA, 176 bp, Homo sapiens; identical to SEQ ID NO: 263041
  chr11:2013349-2013525
  hypo

SEQ ID NO: 313806 - DNA, 54 bp, Homo sapiens; identical to SEQ ID NO: 263042
  chr11:2013555-2013609
  hypo

SEQ ID NO: 313807 - DNA, 292 bp, Homo sapiens; identical to SEQ ID NO: 263043
  chr11:2026725-2027017
  hypo

SEQ ID NO: 313808 - DNA, 146 bp, Homo sapiens; identical to SEQ ID NO: 263044
  chr11:2027241-2027387
  hypo

SEQ ID NO: 313809 - DNA, 220 bp, Homo sapiens; identical to SEQ ID NO: 263045
  chr11:2029642-2029862
  hypo

SEQ ID NO: 313810 - DNA, 96 bp, Homo sapiens
  chr11:2037138-2037234
  hypo
cagcagcctgaccagacagaggcctcctcagccccgcaccgaaggaggatggaggggccgggccggctcctgtcggttgcccgtgctggccgaccc

SEQ ID NO: 313811 - DNA, 191 bp, Homo sapiens; identical to SEQ ID NO: 263047
  chr11:2051191-2051382
  hypo

SEQ ID NO: 313812 - DNA, 54 bp, Homo sapiens; identical to SEQ ID NO: 263048
  chr11:2054681-2054735
  hypo

SEQ ID NO: 313813 - DNA, 305 bp, Homo sapiens; identical to SEQ ID NO: 263049
  chr11:2055187-2055492
  hypo

SEQ ID NO: 313814 - DNA, 159 bp, Homo sapiens; identical to SEQ ID NO: 263050
  chr11:2096090-2096249
  hypo

SEQ ID NO: 313815 - DNA, 152 bp, Homo sapiens; identical to SEQ ID NO: 263051
  chr11:2107097-2107249
  hypo

SEQ ID NO: 313816 - DNA, 41 bp, Homo sapiens
  chr11:2108013-2108054
  hypo
taccgaggaatgcacgtcagaaccagtaggacagctgccat

SEQ ID NO: 313817 - DNA, 78 bp, Homo sapiens
  chr11:2108109-2108187
  hypo
tgctggggatgggccgtggtgccaacgctatggggccgtgggctcctcacacatgtaaacctacggttgccattccac

SEQ ID NO: 313818 - DNA, 32 bp, Homo sapiens
  chr11:2109250-2109282
  hypo
atagagacagaaagcgccaggggtaccagggg

SEQ ID NO: 313819 - DNA, 84 bp, Homo sapiens
  chr11:2109312-2109396
  hypo
atgggggtgggggttcagtgtgggaaggtgagaaagttctggagatggatgccggtgacatctgcacgacgtcgtgaatgtaca

SEQ ID NO: 313820 - DNA, 188 bp, Homo sapiens; identical to SEQ ID NO: 263054
  chr11:2113263-2113451
  hypo

SEQ ID NO: 313821 - DNA, 359 bp, Homo sapiens; identical to SEQ ID NO: 263055
  chr11:2117527-2117886
  hypo

SEQ ID NO: 313822 - DNA, 54 bp, Homo sapiens; identical to SEQ ID NO: 263056
  chr11:2119433-2119487
  hypo

SEQ ID NO: 313823 - DNA, 36 bp, Homo sapiens; identical to SEQ ID NO: 263057
  chr11:2119758-2119794
  hypo

SEQ ID NO: 313824 - DNA, 56 bp, Homo sapiens
  chr11:2122493-2122549
  hypo
gctgggtccctggactcaccaccttccctcactggacccctcggcagccatgcagg

SEQ ID NO: 313825 - DNA, 478 bp, Homo sapiens; identical to SEQ ID NO: 263059
  chr11:2124957-2125435
  hypo

SEQ ID NO: 313826 - DNA, 42 bp, Homo sapiens; identical to SEQ ID NO: 263060
  chr11:2125676-2125718
  hypo

SEQ ID NO: 313827 - DNA, 282 bp, Homo sapiens; identical to SEQ ID NO: 263061
  chr11:2125778-2126060
  hypo

SEQ ID NO: 313828 - DNA, 171 bp, Homo sapiens; identical to SEQ ID NO: 263062
  chr11:2136032-2136203
  hypo

SEQ ID NO: 313829 - DNA, 57 bp, Homo sapiens; identical to SEQ ID NO: 263063
  chr11:2136427-2136484
  hypo

SEQ ID NO: 313830 - DNA, 178 bp, Homo sapiens
  chr11:2152091-2152269
  hypo
gggtccccaggagacgggcaaagatgatccctaggtgtgctccggtgggggggtccccaagatcttccttccaggagcacaccagggagtcaggctactcgtgggggcatgtctgctcagctaccgccatctccaatgtggccaaactccttcctcactctggctgggccaacacaca

SEQ ID NO: 313831 - DNA, 323 bp, Homo sapiens; identical to SEQ ID NO: 263065
  chr11:2175988-2176311
  hypo

SEQ ID NO: 313832 - DNA, 190 bp, Homo sapiens; identical to SEQ ID NO: 263066
  chr11:2176341-2176531
  hypo

SEQ ID NO: 313833 - DNA, 200 bp, Homo sapiens; identical to SEQ ID NO: 263067
  chr11:2183694-2183894
  hypo

SEQ ID NO: 313834 - DNA, 40 bp, Homo sapiens; identical to SEQ ID NO: 214010
  chr11:2209803-2209843
  hypo

SEQ ID NO: 313835 - DNA, 204 bp, Homo sapiens; identical to SEQ ID NO: 263069
  chr11:2210733-2210937
  hypo

SEQ ID NO: 313836 - DNA, 411 bp, Homo sapiens; identical to SEQ ID NO: 263070
  chr11:2221258-2221669
  hypo

SEQ ID NO: 313837 - DNA, 72 bp, Homo sapiens; identical to SEQ ID NO: 263071
  chr11:2225630-2225702
  hypo

SEQ ID NO: 313838 - DNA, 38 bp, Homo sapiens
  chr11:2226010-2226048
  hypo
ctcctaggaccctccggagcctgagggtcagaaggtgg

SEQ ID NO: 313839 - DNA, 57 bp, Homo sapiens
  chr11:2226078-2226135
  hypo
agtgtctgtacggcaccatcctgtcccgctgcctaaagggagcgcctgcttcaattc

SEQ ID NO: 313840 - DNA, 70 bp, Homo sapiens; identical to SEQ ID NO: 263073
  chr11:2229025-2229095
  hypo

SEQ ID NO: 313841 - DNA, 182 bp, Homo sapiens; identical to SEQ ID NO: 263074
  chr11:2229125-2229307
  hypo

SEQ ID NO: 313842 - DNA, 202 bp, Homo sapiens; identical to SEQ ID NO: 263075
  chr11:2235851-2236053
  hypo

SEQ ID NO: 313843 - DNA, 180 bp, Homo sapiens; identical to SEQ ID NO: 263077
  chr11:2237500-2237680
  hypo

SEQ ID NO: 313844 - DNA, 46 bp, Homo sapiens; identical to SEQ ID NO: 263078
  chr11:2269906-2269952
  hypo

SEQ ID NO: 313845 - DNA, 92 bp, Homo sapiens; identical to SEQ ID NO: 263079
  chr11:2277665-2277757
  hypo

SEQ ID NO: 313846 - DNA, 305 bp, Homo sapiens
  chr11:2278017-2278322
  hypo
cgtgtgcgtttctgcgtgtgtgtgtgtgtgtgtgtccatgcatgtgtctctatgaatatatgtgctgtatttgcatgtgtgtgtgtgtctatgtgtgcatatgtctgtgtctgtgtgtctttctgtgtgtgcggtctgtgtctgtgggtctacacgtgtatatgtgcatgtgtctgtgtgtgtcgcagtgtgttactgtgtctgcgcgtgtgtgcatgcatatgtgcaggagggagggagggctcaggccttagcagagtccctggggctctgggagtggagggcagtgaggctgaggctggtgc

SEQ ID NO: 313847 - DNA, 100 bp, Homo sapiens
  chr11:2278839-2278939
  hypo
tggaatgcctccctgcctgcacagcaggagtgtttggctgaggtctgcagccccgacacaggtcacctcccacgcctatgggggcttcagaaagtcccgg

SEQ ID NO: 313848 - DNA, 228 bp, Homo sapiens
  chr11:2288976-2289204
  hypo
cgccctaaagaaaccgggggagccccacaacccctcccccaccaggacactaaaaggcagctttcggtacagtgagacatcaaagcctcctaggccctgagtcaaaggtatagccgtgtaatatcccagtgccagctctccggctgcggggagcctggcgcaaagcttccaagccttccttgttcctttcaagagccgctcttagaattcaggtgagcggagacctgc

SEQ ID NO: 313849 - DNA, 41 bp, Homo sapiens; identical to SEQ ID NO: 263082
  chr11:2294016-2294057
  hypo

SEQ ID NO: 313850 - DNA, 106 bp, Homo sapiens; identical to SEQ ID NO: 214011
  chr11:2294685-2294791
  hypo

SEQ ID NO: 313851 - DNA, 89 bp, Homo sapiens; identical to SEQ ID NO: 214012
  chr11:2328966-2329055
  hypo

SEQ ID NO: 313852 - DNA, 39 bp, Homo sapiens; identical to SEQ ID NO: 263085
  chr11:2330508-2330547
  hypo

SEQ ID NO: 313853 - DNA, 71 bp, Homo sapiens; identical to SEQ ID NO: 263086
  chr11:2330577-2330648
  hypo

SEQ ID NO: 313854 - DNA, 350 bp, Homo sapiens; identical to SEQ ID NO: 263087
  chr11:2334646-2334996
  hypo

SEQ ID NO: 313855 - DNA, 390 bp, Homo sapiens; identical to SEQ ID NO: 263088
  chr11:2337176-2337566
  hypo

SEQ ID NO: 313856 - DNA, 142 bp, Homo sapiens; identical to SEQ ID NO: 263089
  chr11:2348407-2348549
  hypo

SEQ ID NO: 313857 - DNA, 222 bp, Homo sapiens; identical to SEQ ID NO: 263090
  chr11:2362552-2362774
  hypo

SEQ ID NO: 313858 - DNA, 33 bp, Homo sapiens; identical to SEQ ID NO: 263091
  chr11:2375968-2376001
  hypo

SEQ ID NO: 313859 - DNA, 565 bp, Homo sapiens; identical to SEQ ID NO: 287755
  chr11:2398758-2399323
  hypo

SEQ ID NO: 313860 - DNA, 415 bp, Homo sapiens; identical to SEQ ID NO: 120183
  chr11:2399399-2399814
  hypo

SEQ ID NO: 313861 - DNA, 572 bp, Homo sapiens; identical to SEQ ID NO: 263092
  chr11:2412913-2413485
  hypo

SEQ ID NO: 313862 - DNA, 174 bp, Homo sapiens; identical to SEQ ID NO: 263093
  chr11:2413789-2413963
  hypo

SEQ ID NO: 313863 - DNA, 157 bp, Homo sapiens; identical to SEQ ID NO: 214014
  chr11:2414473-2414630
  hypo

SEQ ID NO: 313864 - DNA, 218 bp, Homo sapiens; identical to SEQ ID NO: 263095
  chr11:2423368-2423586
  hypo

SEQ ID NO: 313865 - DNA, 197 bp, Homo sapiens; identical to SEQ ID NO: 263096
  chr11:2423833-2424030
  hypo

SEQ ID NO: 313866 - DNA, 160 bp, Homo sapiens; identical to SEQ ID NO: 263097
  chr11:2428378-2428538
  hypo

SEQ ID NO: 313867 - DNA, 558 bp, Homo sapiens
  chr11:2435414-2435972
  hypo
ctgtagcactcggagaagaggtctgcccccggaggccctggccgctaggacgagacgccgatgcccggcccggcccccgacgcccctcctccatcccctgcccagacctgggctctgcagccgcaccctgcgttcaacacgcagggcccagccaggccttctgccccctccggcctgctccgggcccttcctgaacctccgtccttctccggctctgtccctcccccagcaggacaaagggaacctctgccacgctaaatgtccctcgtcctgcggcagggcccagtgtatgcccggggtgtgaggctgtatcgtcctcaccacgtgcacagcggtcccacactcagggtctggggccgcctccaccccaggcagagccgtctgtcctctcctatggaggaggcccctgagggcacctggagccccacggcggtaacaggcagccctggcgaggcccaggacccttcgtccgacccctccgtcacatcctcccccgcgcgcgggcccggccccagccgccggtcactcaccaagggccagccgctcgtatttcgcctc

SEQ ID NO: 313868 - DNA, 407 bp, Homo sapiens; identical to SEQ ID NO: 214016
  chr11:2436014-2436421
  hypo

SEQ ID NO: 313869 - DNA, 157 bp, Homo sapiens; identical to SEQ ID NO: 214017
  chr11:2436611-2436768
  hypo

SEQ ID NO: 313870 - DNA, 258 bp, Homo sapiens; identical to SEQ ID NO: 263099
  chr11:2441484-2441742
  hypo

SEQ ID NO: 313871 - DNA, 33 bp, Homo sapiens; identical to SEQ ID NO: 263100
  chr11:2441826-2441859
  hypo

SEQ ID NO: 313872 - DNA, 95 bp, Homo sapiens; identical to SEQ ID NO: 263101
  chr11:2446552-2446647
  hypo

SEQ ID NO: 313873 - DNA, 57 bp, Homo sapiens; identical to SEQ ID NO: 263102
  chr11:2448567-2448624
  hypo

SEQ ID NO: 313874 - DNA, 299 bp, Homo sapiens; identical to SEQ ID NO: 263103
  chr11:2485035-2485334
  hypo

SEQ ID NO: 313875 - DNA, 50 bp, Homo sapiens
  chr11:2543213-2543263
  hypo
ctcccacagcgtctcgggctatgaccctggcagggttcctgcattctcct

SEQ ID NO: 313876 - DNA, 109 bp, Homo sapiens; identical to SEQ ID NO: 202408
  chr11:2554316-2554425
  hypo

SEQ ID NO: 313877 - DNA, 64 bp, Homo sapiens; identical to SEQ ID NO: 202409
  chr11:2554454-2554518
  hypo

SEQ ID NO: 313878 - DNA, 182 bp, Homo sapiens; identical to SEQ ID NO: 263105
  chr11:2560627-2560809
  hypo

SEQ ID NO: 313879 - DNA, 38 bp, Homo sapiens; identical to SEQ ID NO: 214020
  chr11:2562214-2562252
  hypo

SEQ ID NO: 313880 - DNA, 353 bp, Homo sapiens; identical to SEQ ID NO: 263107
  chr11:2569188-2569541
  hypo

SEQ ID NO: 313881 - DNA, 41 bp, Homo sapiens; identical to SEQ ID NO: 263108
  chr11:2579781-2579822
  hypo

SEQ ID NO: 313882 - DNA, 43 bp, Homo sapiens; identical to SEQ ID NO: 263109
  chr11:2581754-2581797
  hypo

SEQ ID NO: 313883 - DNA, 130 bp, Homo sapiens; identical to SEQ ID NO: 214021
  chr11:2594826-2594956
  hypo

SEQ ID NO: 313884 - DNA, 63 bp, Homo sapiens; identical to SEQ ID NO: 263111
  chr11:2595670-2595733
  hypo

SEQ ID NO: 313885 - DNA, 149 bp, Homo sapiens; identical to SEQ ID NO: 214022
  chr11:2596284-2596433
  hypo

SEQ ID NO: 313886 - DNA, 31 bp, Homo sapiens; identical to SEQ ID NO: 214023
  chr11:2597548-2597579
  hypo

SEQ ID NO: 313887 - DNA, 66 bp, Homo sapiens; identical to SEQ ID NO: 263114
  chr11:2610097-2610163
  hypo

SEQ ID NO: 313888 - DNA, 143 bp, Homo sapiens; identical to SEQ ID NO: 263115
  chr11:2720203-2720346
  hypo

SEQ ID NO: 313889 - DNA, 263 bp, Homo sapiens; identical to SEQ ID NO: 263116
  chr11:2750149-2750412
  hypo

SEQ ID NO: 313890 - DNA, 493 bp, Homo sapiens; identical to SEQ ID NO: 263118
  chr11:2757685-2758178
  hypo

SEQ ID NO: 313891 - DNA, 80 bp, Homo sapiens
  chr11:2758867-2758947
  hypo
taaaatgccgggaagccttcgtgctgactcggccctcgcagaccataaaacacggctggtgggtccgagcccggcaggga

SEQ ID NO: 313892 - DNA, 385 bp, Homo sapiens; identical to SEQ ID NO: 214024
  chr11:2772656-2773041
  hypo

SEQ ID NO: 313893 - DNA, 330 bp, Homo sapiens; identical to SEQ ID NO: 263121
  chr11:2781507-2781837
  hypo

SEQ ID NO: 313894 - DNA, 180 bp, Homo sapiens; identical to SEQ ID NO: 214025
  chr11:2782400-2782580
  hypo

SEQ ID NO: 313895 - DNA, 175 bp, Homo sapiens; identical to SEQ ID NO: 214026
  chr11:2818020-2818195
  hypo

SEQ ID NO: 313896 - DNA, 155 bp, Homo sapiens; identical to SEQ ID NO: 263125
  chr11:2826847-2827002
  hypo

SEQ ID NO: 313897 - DNA, 131 bp, Homo sapiens; identical to SEQ ID NO: 263126
  chr11:2864467-2864598
  hypo

SEQ ID NO: 313898 - DNA, 218 bp, Homo sapiens; identical to SEQ ID NO: 263127
  chr11:2865183-2865401
  hypo

SEQ ID NO: 313899 - DNA, 295 bp, Homo sapiens; identical to SEQ ID NO: 214027
  chr11:2868805-2869100
  hypo

SEQ ID NO: 313900 - DNA, 215 bp, Homo sapiens; identical to SEQ ID NO: 263129
  chr11:2874227-2874442
  hypo

SEQ ID NO: 313901 - DNA, 160 bp, Homo sapiens; identical to SEQ ID NO: 263130
  chr11:2874823-2874983
  hypo

SEQ ID NO: 313902 - DNA, 54 bp, Homo sapiens; identical to SEQ ID NO: 263131
  chr11:2885741-2885795
  hypo

SEQ ID NO: 313903 - DNA, 349 bp, Homo sapiens; identical to SEQ ID NO: 287765
  chr11:2905510-2905859
  hypo

SEQ ID NO: 313904 - DNA, 269 bp, Homo sapiens; identical to SEQ ID NO: 202412
  chr11:2906036-2906305
  hypo

SEQ ID NO: 313905 - DNA, 201 bp, Homo sapiens; identical to SEQ ID NO: 202413
  chr11:2906580-2906781
  hypo

SEQ ID NO: 313906 - DNA, 170 bp, Homo sapiens; identical to SEQ ID NO: 202414
  chr11:2906971-2907141
  hypo

SEQ ID NO: 313907 - DNA, 102 bp, Homo sapiens; identical to SEQ ID NO: 263132
  chr11:2910403-2910505
  hypo

SEQ ID NO: 313908 - DNA, 201 bp, Homo sapiens; identical to SEQ ID NO: 263133
  chr11:2934242-2934443
  hypo

SEQ ID NO: 313909 - DNA, 97 bp, Homo sapiens; identical to SEQ ID NO: 263134
  chr11:2934473-2934570
  hypo

SEQ ID NO: 313910 - DNA, 197 bp, Homo sapiens; identical to SEQ ID NO: 214033
  chr11:2939101-2939298
  hypo

SEQ ID NO: 313911 - DNA, 304 bp, Homo sapiens; identical to SEQ ID NO: 214034
  chr11:2942534-2942838
  hypo

SEQ ID NO: 313912 - DNA, 433 bp, Homo sapiens; identical to SEQ ID NO: 224029
  chr11:2951691-2952124
  hypo

SEQ ID NO: 313913 - DNA, 41 bp, Homo sapiens; identical to SEQ ID NO: 263137
  chr11:2963522-2963563
  hypo

SEQ ID NO: 313914 - DNA, 385 bp, Homo sapiens; identical to SEQ ID NO: 263138
  chr11:2965737-2966122
  hypo

SEQ ID NO: 313915 - DNA, 84 bp, Homo sapiens; identical to SEQ ID NO: 214036
  chr11:2987080-2987164
  hypo

SEQ ID NO: 313916 - DNA, 273 bp, Homo sapiens; identical to SEQ ID NO: 263140
  chr11:3021376-3021649
  hypo

SEQ ID NO: 313917 - DNA, 107 bp, Homo sapiens; identical to SEQ ID NO: 263141
  chr11:3031444-3031551
  hypo

SEQ ID NO: 313918 - DNA, 158 bp, Homo sapiens; identical to SEQ ID NO: 263142
  chr11:3035022-3035180
  hypo

SEQ ID NO: 313919 - DNA, 33 bp, Homo sapiens; identical to SEQ ID NO: 263143
  chr11:3046728-3046761
  hypo

SEQ ID NO: 313920 - DNA, 166 bp, Homo sapiens; identical to SEQ ID NO: 263144
  chr11:3050212-3050378
  hypo

SEQ ID NO: 313921 - DNA, 52 bp, Homo sapiens; identical to SEQ ID NO: 214037
  chr11:3060355-3060407
  hypo

SEQ ID NO: 313922 - DNA, 53 bp, Homo sapiens; identical to SEQ ID NO: 214038
  chr11:3109135-3109188
  hypo

SEQ ID NO: 313923 - DNA, 299 bp, Homo sapiens
  chr11:3110995-3111294
  hypo
cccacctcccgccctagctctaccaggtctctcgcactctctgacccggagtctggatggacaccctgagtgtggcccacctgtgcagctcctgctgggcctctcggatggagaggatggcctcgtgcagggcctgcagccgccgcgcctccttcctgcaccgagggcatgggctctcaccgcctgggacggccccgagtgagacaaaggaggggaggggaggagtgaggatgagctggaggtccagtggggctggcacgtgggtcacagggtcatatccagctcgggcctccacccca

SEQ ID NO: 313924 - DNA, 59 bp, Homo sapiens; identical to SEQ ID NO: 263148
  chr11:3122919-3122978
  hypo

SEQ ID NO: 313925 - DNA, 43 bp, Homo sapiens; identical to SEQ ID NO: 263149
  chr11:3127001-3127044
  hypo

SEQ ID NO: 313926 - DNA, 181 bp, Homo sapiens; identical to SEQ ID NO: 214040
  chr11:3128518-3128699
  hypo

SEQ ID NO: 313927 - DNA, 425 bp, Homo sapiens; identical to SEQ ID NO: 214041
  chr11:3141593-3142018
  hypo

SEQ ID NO: 313928 - DNA, 311 bp, Homo sapiens; identical to SEQ ID NO: 263152
  chr11:3143176-3143487
  hypo

SEQ ID NO: 313929 - DNA, 281 bp, Homo sapiens; identical to SEQ ID NO: 214042
  chr11:3145124-3145405
  hypo

SEQ ID NO: 313930 - DNA, 275 bp, Homo sapiens; identical to SEQ ID NO: 263154
  chr11:3162893-3163168
  hypo

SEQ ID NO: 313931 - DNA, 89 bp, Homo sapiens; identical to SEQ ID NO: 214043
  chr11:3164463-3164552
  hypo

SEQ ID NO: 313932 - DNA, 393 bp, Homo sapiens; identical to SEQ ID NO: 263157
  chr11:3167019-3167412
  hypo

SEQ ID NO: 313933 - DNA, 63 bp, Homo sapiens; identical to SEQ ID NO: 263158
  chr11:3168979-3169042
  hypo

SEQ ID NO: 313934 - DNA, 123 bp, Homo sapiens; identical to SEQ ID NO: 263160
  chr11:3172032-3172155
  hypo

SEQ ID NO: 313935 - DNA, 54 bp, Homo sapiens; identical to SEQ ID NO: 263161
  chr11:3179502-3179556
  hypo

SEQ ID NO: 313936 - DNA, 290 bp, Homo sapiens; identical to SEQ ID NO: 202417
  chr11:3186311-3186601
  hypo

SEQ ID NO: 313937 - DNA, 169 bp, Homo sapiens; identical to SEQ ID NO: 214045
  chr11:3187736-3187905
  hypo

SEQ ID NO: 313938 - DNA, 78 bp, Homo sapiens; identical to SEQ ID NO: 214046
  chr11:3187953-3188031
  hypo

SEQ ID NO: 313939 - DNA, 216 bp, Homo sapiens; identical to SEQ ID NO: 263163
  chr11:3212407-3212623
  hypo

SEQ ID NO: 313940 - DNA, 35 bp, Homo sapiens; identical to SEQ ID NO: 263164
  chr11:3212863-3212898
  hypo

SEQ ID NO: 313941 - DNA, 757 bp, Homo sapiens; identical to SEQ ID NO: 214047
  chr11:3243293-3244050
  hypo

SEQ ID NO: 313942 - DNA, 272 bp, Homo sapiens; identical to SEQ ID NO: 263166
  chr11:3246365-3246637
  hypo

SEQ ID NO: 313943 - DNA, 34 bp, Homo sapiens; identical to SEQ ID NO: 263167
  chr11:3247717-3247751
  hypo

SEQ ID NO: 313944 - DNA, 154 bp, Homo sapiens; identical to SEQ ID NO: 214048
  chr11:3254282-3254436
  hypo

SEQ ID NO: 313945 - DNA, 242 bp, Homo sapiens; identical to SEQ ID NO: 202418
  chr11:3444553-3444795
  hypo

SEQ ID NO: 313946 - DNA, 86 bp, Homo sapiens; identical to SEQ ID NO: 263170
  chr11:3511141-3511227
  hypo

SEQ ID NO: 313947 - DNA, 125 bp, Homo sapiens; identical to SEQ ID NO: 263171
  chr11:3681140-3681265
  hypo

SEQ ID NO: 313948 - DNA, 225 bp, Homo sapiens; identical to SEQ ID NO: 263172
  chr11:3688512-3688737
  hypo

SEQ ID NO: 313949 - DNA, 50 bp, Homo sapiens; identical to SEQ ID NO: 214050
  chr11:3688971-3689021
  hypo

SEQ ID NO: 313950 - DNA, 124 bp, Homo sapiens; identical to SEQ ID NO: 214051
  chr11:3697491-3697615
  hypo

SEQ ID NO: 313951 - DNA, 149 bp, Homo sapiens; identical to SEQ ID NO: 263175
  chr11:3705440-3705589
  hypo

SEQ ID NO: 313952 - DNA, 359 bp, Homo sapiens; identical to SEQ ID NO: 263178
  chr11:3845111-3845470
  hypo

SEQ ID NO: 313953 - DNA, 33 bp, Homo sapiens
  chr11:4095786-4095819
  hypo
gaaaagaagctgcgcgatgagatcaaccttgct

SEQ ID NO: 313954 - DNA, 37 bp, Homo sapiens; identical to SEQ ID NO: 263180
  chr11:4494114-4494151
  hypo

SEQ ID NO: 313955 - DNA, 152 bp, Homo sapiens; identical to SEQ ID NO: 214052
  chr11:4599983-4600135
  hypo

SEQ ID NO: 313956 - DNA, 120 bp, Homo sapiens; identical to SEQ ID NO: 214053
  chr11:5177827-5177947
  hypo

SEQ ID NO: 313957 - DNA, 158 bp, Homo sapiens; identical to SEQ ID NO: 263183
  chr11:5687849-5688007
  hypo

SEQ ID NO: 313958 - DNA, 164 bp, Homo sapiens; identical to SEQ ID NO: 263184
  chr11:5950918-5951082
  hypo

SEQ ID NO: 313959 - DNA, 46 bp, Homo sapiens
  chr11:5951401-5951447
  hypo
ttaccaagttgggcaagcagggcgtcgccgccgggacataatggtt

SEQ ID NO: 313960 - DNA, 34 bp, Homo sapiens; identical to SEQ ID NO: 263186
  chr11:6432992-6433026
  hypo

SEQ ID NO: 313961 - DNA, 236 bp, Homo sapiens; identical to SEQ ID NO: 263187
  chr11:6477624-6477860
  hypo

SEQ ID NO: 313962 - DNA, 80 bp, Homo sapiens; identical to SEQ ID NO: 263188
  chr11:6478112-6478192
  hypo

SEQ ID NO: 313963 - DNA, 218 bp, Homo sapiens; identical to SEQ ID NO: 287790
  chr11:6502787-6503005
  hypo

SEQ ID NO: 313964 - DNA, 120 bp, Homo sapiens; identical to SEQ ID NO: 263190
  chr11:6521106-6521226
  hypo

SEQ ID NO: 313965 - DNA, 113 bp, Homo sapiens; identical to SEQ ID NO: 263191
  chr11:6585065-6585178
  hypo

SEQ ID NO: 313966 - DNA, 89 bp, Homo sapiens; identical to SEQ ID NO: 263192
  chr11:6730930-6731019
  hypo

SEQ ID NO: 313967 - DNA, 155 bp, Homo sapiens; identical to SEQ ID NO: 287798
  chr11:7694731-7694886
  hypo

SEQ ID NO: 313968 - DNA, 164 bp, Homo sapiens; identical to SEQ ID NO: 120256
  chr11:7695108-7695272
  hypo

SEQ ID NO: 313969 - DNA, 344 bp, Homo sapiens; identical to SEQ ID NO: 287800
  chr11:8041149-8041493
  hypo

SEQ ID NO: 313970 - DNA, 40 bp, Homo sapiens; identical to SEQ ID NO: 202425
  chr11:8103155-8103195
  hypo

SEQ ID NO: 313971 - DNA, 94 bp, Homo sapiens; identical to SEQ ID NO: 214056
  chr11:8254114-8254208
  hypo

SEQ ID NO: 313972 - DNA, 160 bp, Homo sapiens; identical to SEQ ID NO: 263194
  chr11:8255452-8255612
  hypo

SEQ ID NO: 313973 - DNA, 202 bp, Homo sapiens; identical to SEQ ID NO: 263195
  chr11:8269570-8269772
  hypo

SEQ ID NO: 313974 - DNA, 533 bp, Homo sapiens; identical to SEQ ID NO: 263196
  chr11:8336904-8337437
  hypo

SEQ ID NO: 313975 - DNA, 214 bp, Homo sapiens; identical to SEQ ID NO: 263197
  chr11:8358361-8358575
  hypo

SEQ ID NO: 313976 - DNA, 144 bp, Homo sapiens; identical to SEQ ID NO: 202429
  chr11:8615887-8616031
  hypo

SEQ ID NO: 313977 - DNA, 166 bp, Homo sapiens; identical to SEQ ID NO: 214058
  chr11:8656271-8656437
  hypo

SEQ ID NO: 313978 - DNA, 169 bp, Homo sapiens; identical to SEQ ID NO: 263199
  chr11:8725356-8725525
  hypo

SEQ ID NO: 313979 - DNA, 31 bp, Homo sapiens; identical to SEQ ID NO: 263200
  chr11:8735205-8735236
  hypo

SEQ ID NO: 313980 - DNA, 41 bp, Homo sapiens; identical to SEQ ID NO: 263201
  chr11:8751526-8751567
  hypo

SEQ ID NO: 313981 - DNA, 366 bp, Homo sapiens; identical to SEQ ID NO: 263202
  chr11:8752347-8752713
  hypo

SEQ ID NO: 313982 - DNA, 179 bp, Homo sapiens; identical to SEQ ID NO: 214060
  chr11:8759790-8759969
  hypo

SEQ ID NO: 313983 - DNA, 35 bp, Homo sapiens; identical to SEQ ID NO: 263204
  chr11:8791120-8791155
  hypo

SEQ ID NO: 313984 - DNA, 125 bp, Homo sapiens; identical to SEQ ID NO: 263205
  chr11:8829417-8829542
  hypo

SEQ ID NO: 313985 - DNA, 190 bp, Homo sapiens; identical to SEQ ID NO: 263206
  chr11:9074512-9074702
  hypo

SEQ ID NO: 313986 - DNA, 60 bp, Homo sapiens; identical to SEQ ID NO: 287811
  chr11:9112971-9113031
  hypo

SEQ ID NO: 313987 - DNA, 77 bp, Homo sapiens; identical to SEQ ID NO: 214061
  chr11:9328213-9328290
  hypo

SEQ ID NO: 313988 - DNA, 42 bp, Homo sapiens; identical to SEQ ID NO: 263208
  chr11:9343803-9343845
  hypo

SEQ ID NO: 313989 - DNA, 129 bp, Homo sapiens; identical to SEQ ID NO: 214062
  chr11:9405263-9405392
  hypo

SEQ ID NO: 313990 - DNA, 36 bp, Homo sapiens; identical to SEQ ID NO: 214063
  chr11:9418901-9418937
  hypo

SEQ ID NO: 313991 - DNA, 36 bp, Homo sapiens; identical to SEQ ID NO: 214064
  chr11:9422432-9422468
  hypo

SEQ ID NO: 313992 - DNA, 41 bp, Homo sapiens; identical to SEQ ID NO: 214065
  chr11:9531940-9531981
  hypo

SEQ ID NO: 313993 - DNA, 41 bp, Homo sapiens; identical to SEQ ID NO: 263213
  chr11:9540962-9541003
  hypo

SEQ ID NO: 313994 - DNA, 93 bp, Homo sapiens; identical to SEQ ID NO: 263214
  chr11:9548319-9548412
  hypo

SEQ ID NO: 313995 - DNA, 151 bp, Homo sapiens; identical to SEQ ID NO: 214066
  chr11:9552471-9552622
  hypo

SEQ ID NO: 313996 - DNA, 323 bp, Homo sapiens; identical to SEQ ID NO: 214067
  chr11:9554672-9554995
  hypo

SEQ ID NO: 313997 - DNA, 105 bp, Homo sapiens; identical to SEQ ID NO: 214068
  chr11:9567905-9568010
  hypo

SEQ ID NO: 313998 - DNA, 36 bp, Homo sapiens; identical to SEQ ID NO: 263218
  chr11:9593563-9593599
  hypo

SEQ ID NO: 313999 - DNA, 721 bp, Homo sapiens; identical to SEQ ID NO: 287816
  chr11:9596147-9596868
  hypo

SEQ ID NO: 314000 - DNA, 69 bp, Homo sapiens; identical to SEQ ID NO: 263219
  chr11:9596898-9596967
  hypo

SEQ ID NO: 314001 - DNA, 49 bp, Homo sapiens; identical to SEQ ID NO: 263220
  chr11:9620658-9620707
  hypo

SEQ ID NO: 314002 - DNA, 823 bp, Homo sapiens; identical to SEQ ID NO: 120296
  chr11:9685218-9686041
  hypo

SEQ ID NO: 314003 - DNA, 35 bp, Homo sapiens; identical to SEQ ID NO: 214071
  chr11:9771063-9771098
  hypo

SEQ ID NO: 314004 - DNA, 84 bp, Homo sapiens; identical to SEQ ID NO: 263222
  chr11:10004724-10004808
  hypo

SEQ ID NO: 314005 - DNA, 112 bp, Homo sapiens; identical to SEQ ID NO: 263224
  chr11:10512606-10512718
  hypo

SEQ ID NO: 314006 - DNA, 192 bp, Homo sapiens; identical to SEQ ID NO: 214072
  chr11:10519312-10519504
  hypo

SEQ ID NO: 314007 - DNA, 267 bp, Homo sapiens; identical to SEQ ID NO: 263226
  chr11:10522099-10522366
  hypo

SEQ ID NO: 314008 - DNA, 193 bp, Homo sapiens; identical to SEQ ID NO: 214073
  chr11:10712069-10712262
  hypo

SEQ ID NO: 314009 - DNA, 34 bp, Homo sapiens; identical to SEQ ID NO: 214074
  chr11:10811103-10811137
  hypo

SEQ ID NO: 314010 - DNA, 44 bp, Homo sapiens; identical to SEQ ID NO: 214075
  chr11:10865158-10865202
  hypo

SEQ ID NO: 314011 - DNA, 139 bp, Homo sapiens; identical to SEQ ID NO: 263230
  chr11:11177834-11177973
  hypo

SEQ ID NO: 314012 - DNA, 42 bp, Homo sapiens; identical to SEQ ID NO: 263231
  chr11:11178003-11178045
  hypo

SEQ ID NO: 314013 - DNA, 206 bp, Homo sapiens; identical to SEQ ID NO: 214076
  chr11:11534254-11534460
  hypo

SEQ ID NO: 314014 - DNA, 207 bp, Homo sapiens; identical to SEQ ID NO: 263233
  chr11:11601780-11601987
  hypo

SEQ ID NO: 314015 - DNA, 437 bp, Homo sapiens; identical to SEQ ID NO: 263234
  chr11:11833040-11833477
  hypo

SEQ ID NO: 314016 - DNA, 75 bp, Homo sapiens; identical to SEQ ID NO: 263235
  chr11:11862893-11862968
  hypo

SEQ ID NO: 314017 - DNA, 111 bp, Homo sapiens; identical to SEQ ID NO: 263236
  chr11:11960215-11960326
  hypo

SEQ ID NO: 314018 - DNA, 245 bp, Homo sapiens; identical to SEQ ID NO: 263237
  chr11:11991422-11991667
  hypo

SEQ ID NO: 314019 - DNA, 262 bp, Homo sapiens; identical to SEQ ID NO: 202440
  chr11:12030561-12030823
  hypo

SEQ ID NO: 314020 - DNA, 54 bp, Homo sapiens; identical to SEQ ID NO: 202441
  chr11:12031006-12031060
  hypo

SEQ ID NO: 314021 - DNA, 168 bp, Homo sapiens; identical to SEQ ID NO: 214079
  chr11:12073851-12074019
  hypo

SEQ ID NO: 314022 - DNA, 43 bp, Homo sapiens; identical to SEQ ID NO: 263239
  chr11:12106316-12106359
  hypo

SEQ ID NO: 314023 - DNA, 262 bp, Homo sapiens; identical to SEQ ID NO: 263240
  chr11:12115688-12115950
  hypo

SEQ ID NO: 314024 - DNA, 287 bp, Homo sapiens; identical to SEQ ID NO: 202443
  chr11:12132212-12132499
  hypo

SEQ ID NO: 314025 - DNA, 102 bp, Homo sapiens; identical to SEQ ID NO: 263241
  chr11:12145846-12145948
  hypo

SEQ ID NO: 314026 - DNA, 86 bp, Homo sapiens; identical to SEQ ID NO: 263242
  chr11:12158740-12158826
  hypo

SEQ ID NO: 314027 - DNA, 50 bp, Homo sapiens; identical to SEQ ID NO: 263243
  chr11:12172361-12172411
  hypo

SEQ ID NO: 314028 - DNA, 69 bp, Homo sapiens; identical to SEQ ID NO: 263244
  chr11:12172441-12172510
  hypo

SEQ ID NO: 314029 - DNA, 398 bp, Homo sapiens; identical to SEQ ID NO: 263245
  chr11:12182000-12182398
  hypo

SEQ ID NO: 314030 - DNA, 406 bp, Homo sapiens; identical to SEQ ID NO: 263246
  chr11:12183611-12184017
  hypo

SEQ ID NO: 314031 - DNA, 133 bp, Homo sapiens; identical to SEQ ID NO: 263247
  chr11:12205861-12205994
  hypo

SEQ ID NO: 314032 - DNA, 427 bp, Homo sapiens; identical to SEQ ID NO: 214082
  chr11:12209618-12210045
  hypo

SEQ ID NO: 314033 - DNA, 41 bp, Homo sapiens; identical to SEQ ID NO: 214083
  chr11:12214008-12214049
  hypo

SEQ ID NO: 314034 - DNA, 99 bp, Homo sapiens; identical to SEQ ID NO: 263250
  chr11:12225814-12225913
  hypo

SEQ ID NO: 314035 - DNA, 77 bp, Homo sapiens; identical to SEQ ID NO: 214084
  chr11:12230962-12231039
  hypo

SEQ ID NO: 314036 - DNA, 65 bp, Homo sapiens; identical to SEQ ID NO: 214085
  chr11:12231069-12231134
  hypo

SEQ ID NO: 314037 - DNA, 287 bp, Homo sapiens; identical to SEQ ID NO: 214086
  chr11:12240002-12240289
  hypo

SEQ ID NO: 314038 - DNA, 280 bp, Homo sapiens; identical to SEQ ID NO: 214087
  chr11:12247647-12247927
  hypo

SEQ ID NO: 314039 - DNA, 344 bp, Homo sapiens; identical to SEQ ID NO: 214088
  chr11:12248494-12248838
  hypo

SEQ ID NO: 314040 - DNA, 131 bp, Homo sapiens; identical to SEQ ID NO: 263255
  chr11:12250137-12250268
  hypo

SEQ ID NO: 314041 - DNA, 54 bp, Homo sapiens; identical to SEQ ID NO: 214089
  chr11:12253012-12253066
  hypo

SEQ ID NO: 314042 - DNA, 118 bp, Homo sapiens; identical to SEQ ID NO: 214090
  chr11:12260726-12260844
  hypo

SEQ ID NO: 314043 - DNA, 138 bp, Homo sapiens; identical to SEQ ID NO: 263258
  chr11:12262549-12262687
  hypo

SEQ ID NO: 314044 - DNA, 208 bp, Homo sapiens; identical to SEQ ID NO: 263259
  chr11:12267673-12267881
  hypo

SEQ ID NO: 314045 - DNA, 218 bp, Homo sapiens; identical to SEQ ID NO: 263260
  chr11:12276133-12276351
  hypo

SEQ ID NO: 314046 - DNA, 317 bp, Homo sapiens; identical to SEQ ID NO: 214091
  chr11:12276763-12277080
  hypo

SEQ ID NO: 314047 - DNA, 381 bp, Homo sapiens; identical to SEQ ID NO: 214092
  chr11:12278213-12278594
  hypo

SEQ ID NO: 314048 - DNA, 170 bp, Homo sapiens; identical to SEQ ID NO: 214093
  chr11:12279381-12279551
  hypo

SEQ ID NO: 314049 - DNA, 320 bp, Homo sapiens; identical to SEQ ID NO: 214094
  chr11:12281098-12281418
  hypo

SEQ ID NO: 314050 - DNA, 469 bp, Homo sapiens; identical to SEQ ID NO: 214095
  chr11:12283307-12283776
  hypo

SEQ ID NO: 314051 - DNA, 395 bp, Homo sapiens; identical to SEQ ID NO: 214096
  chr11:12283996-12284391
  hypo

SEQ ID NO: 314052 - DNA, 198 bp, Homo sapiens; identical to SEQ ID NO: 263267
  chr11:12296625-12296823
  hypo

SEQ ID NO: 314053 - DNA, 362 bp, Homo sapiens; identical to SEQ ID NO: 263268
  chr11:12298408-12298770
  hypo

SEQ ID NO: 314054 - DNA, 191 bp, Homo sapiens; identical to SEQ ID NO: 214097
  chr11:12315587-12315778
  hypo

SEQ ID NO: 314055 - DNA, 33 bp, Homo sapiens; identical to SEQ ID NO: 214098
  chr11:12554120-12554153
  hypo

SEQ ID NO: 314056 - DNA, 139 bp, Homo sapiens; identical to SEQ ID NO: 263271
  chr11:12769804-12769943
  hypo

SEQ ID NO: 314057 - DNA, 215 bp, Homo sapiens; identical to SEQ ID NO: 214099
  chr11:12823851-12824066
  hypo

SEQ ID NO: 314058 - DNA, 33 bp, Homo sapiens; identical to SEQ ID NO: 263273
  chr11:12841278-12841311
  hypo

SEQ ID NO: 314059 - DNA, 129 bp, Homo sapiens; identical to SEQ ID NO: 214100
  chr11:12944977-12945106
  hypo

SEQ ID NO: 314060 - DNA, 104 bp, Homo sapiens; identical to SEQ ID NO: 263275
  chr11:12990320-12990424
  hypo

SEQ ID NO: 314061 - DNA, 86 bp, Homo sapiens; identical to SEQ ID NO: 263276
  chr11:13114153-13114239
  hypo

SEQ ID NO: 314062 - DNA, 70 bp, Homo sapiens; identical to SEQ ID NO: 214101
  chr11:13185770-13185840
  hypo

SEQ ID NO: 314063 - DNA, 304 bp, Homo sapiens; identical to SEQ ID NO: 287846
  chr11:13298519-13298823
  hypo

SEQ ID NO: 314064 - DNA, 206 bp, Homo sapiens; identical to SEQ ID NO: 287847
  chr11:13300228-13300434
  hypo

SEQ ID NO: 314065 - DNA, 184 bp, Homo sapiens; identical to SEQ ID NO: 263278
  chr11:13334701-13334885
  hypo

SEQ ID NO: 314066 - DNA, 519 bp, Homo sapiens; identical to SEQ ID NO: 263279
  chr11:13375541-13376060
  hypo

SEQ ID NO: 314067 - DNA, 671 bp, Homo sapiens; identical to SEQ ID NO: 287850
  chr11:13689450-13690121
  hypo

SEQ ID NO: 314068 - DNA, 560 bp, Homo sapiens; identical to SEQ ID NO: 202452
  chr11:13690157-13690717
  hypo

SEQ ID NO: 314069 - DNA, 33 bp, Homo sapiens; identical to SEQ ID NO: 214105
  chr11:13700080-13700113
  hypo

SEQ ID NO: 314070 - DNA, 147 bp, Homo sapiens; identical to SEQ ID NO: 214106
  chr11:14498537-14498684
  hypo

SEQ ID NO: 314071 - DNA, 92 bp, Homo sapiens
  chr11:14520358-14520450
  hypo
ttctcaaaataatatcgaagtttacctagatcattttttaagctaatttcagatggtggttctgaatccattggcacgttaattaacgtgta

SEQ ID NO: 314072 - DNA, 120 bp, Homo sapiens; identical to SEQ ID NO: 214107
  chr11:14542801-14542921
  hypo

SEQ ID NO: 314073 - DNA, 45 bp, Homo sapiens; identical to SEQ ID NO: 263285
  chr11:14674976-14675021
  hypo

SEQ ID NO: 314074 - DNA, 251 bp, Homo sapiens; identical to SEQ ID NO: 202457
  chr11:15671676-15671927
  hypo

SEQ ID NO: 314075 - DNA, 63 bp, Homo sapiens; identical to SEQ ID NO: 214109
  chr11:15959967-15960030
  hypo

SEQ ID NO: 314076 - DNA, 42 bp, Homo sapiens; identical to SEQ ID NO: 263287
  chr11:16050846-16050888
  hypo

SEQ ID NO: 314077 - DNA, 42 bp, Homo sapiens; identical to SEQ ID NO: 263288
  chr11:16051188-16051230
  hypo

SEQ ID NO: 314078 - DNA, 37 bp, Homo sapiens; identical to SEQ ID NO: 263289
  chr11:16790662-16790699
  hypo

SEQ ID NO: 314079 - DNA, 142 bp, Homo sapiens; identical to SEQ ID NO: 263290
  chr11:16847524-16847666
  hypo

SEQ ID NO: 314080 - DNA, 123 bp, Homo sapiens; identical to SEQ ID NO: 263291
  chr11:16863137-16863260
  hypo

SEQ ID NO: 314081 - DNA, 1614 bp, Homo sapiens; identical to SEQ ID NO: 287875
  chr11:17034985-17036599
  hypo

SEQ ID NO: 314082 - DNA, 32 bp, Homo sapiens
  chr11:17037344-17037376
  hypo
tgtgcaacagcgagactcagtctaaaaaaaaa

SEQ ID NO: 314083 - DNA, 110 bp, Homo sapiens; identical to SEQ ID NO: 214111
  chr11:17100561-17100671
  hypo

SEQ ID NO: 314084 - DNA, 79 bp, Homo sapiens; identical to SEQ ID NO: 263294
  chr11:17101060-17101139
  hypo

SEQ ID NO: 314085 - DNA, 121 bp, Homo sapiens; identical to SEQ ID NO: 263295
  chr11:17430256-17430377
  hypo

SEQ ID NO: 314086 - DNA, 481 bp, Homo sapiens; identical to SEQ ID NO: 287883
  chr11:17498265-17498746
  hypo

SEQ ID NO: 314087 - DNA, 35 bp, Homo sapiens; identical to SEQ ID NO: 263296
  chr11:17566571-17566606
  hypo

SEQ ID NO: 314088 - DNA, 58 bp, Homo sapiens
  chr11:17653729-17653787
  hypo
caaatttcatgtgtgcatcgagtggcggcgctctgactactgccgtgagtttgcgggg

SEQ ID NO: 314089 - DNA, 81 bp, Homo sapiens; identical to SEQ ID NO: 287886
  chr11:17741598-17741679
  hypo

SEQ ID NO: 314090 - DNA, 402 bp, Homo sapiens; identical to SEQ ID NO: 287888
  chr11:17742811-17743213
  hypo

SEQ ID NO: 314091 - DNA, 39 bp, Homo sapiens; identical to SEQ ID NO: 287889
  chr11:17743245-17743284
  hypo

SEQ ID NO: 314092 - DNA, 158 bp, Homo sapiens; identical to SEQ ID NO: 263298
  chr11:17905736-17905894
  hypo

SEQ ID NO: 314093 - DNA, 35 bp, Homo sapiens
  chr11:18100061-18100096
  hypo
cataaggtccttgtgcttcccgttttaaaacacgc

SEQ ID NO: 314094 - DNA, 32 bp, Homo sapiens; identical to SEQ ID NO: 263300
  chr11:18401403-18401435
  hypo

SEQ ID NO: 314095 - DNA, 84 bp, Homo sapiens; identical to SEQ ID NO: 214113
  chr11:18512439-18512523
  hypo

SEQ ID NO: 314096 - DNA, 55 bp, Homo sapiens; identical to SEQ ID NO: 202475
  chr11:18610408-18610463
  hypo

SEQ ID NO: 314097 - DNA, 173 bp, Homo sapiens; identical to SEQ ID NO: 202476
  chr11:18610571-18610744
  hypo

SEQ ID NO: 314098 - DNA, 64 bp, Homo sapiens
  chr11:18656775-18656839
  hypo
actcgggatcttttcggtgggatggaaatgcctccaaactggattgtggggatggttgcactat

SEQ ID NO: 314099 - DNA, 34 bp, Homo sapiens
  chr11:18656882-18656916
  hypo
cagtatgtaaatatgtcaagctgttaaaacatgc

SEQ ID NO: 314100 - DNA, 98 bp, Homo sapiens; identical to SEQ ID NO: 263304
  chr11:18657233-18657331
  hypo

SEQ ID NO: 314101 - DNA, 229 bp, Homo sapiens; identical to SEQ ID NO: 263305
  chr11:18978176-18978405
  hypo

SEQ ID NO: 314102 - DNA, 36 bp, Homo sapiens; identical to SEQ ID NO: 263306
  chr11:19080253-19080289
  hypo

SEQ ID NO: 314103 - DNA, 32 bp, Homo sapiens; identical to SEQ ID NO: 263307
  chr11:19140970-19141002
  hypo

SEQ ID NO: 314104 - DNA, 39 bp, Homo sapiens; identical to SEQ ID NO: 214116
  chr11:19238182-19238221
  hypo

SEQ ID NO: 314105 - DNA, 117 bp, Homo sapiens; identical to SEQ ID NO: 263309
  chr11:19240816-19240933
  hypo

SEQ ID NO: 314106 - DNA, 93 bp, Homo sapiens; identical to SEQ ID NO: 263310
  chr11:19247019-19247112
  hypo

SEQ ID NO: 314107 - DNA, 229 bp, Homo sapiens; identical to SEQ ID NO: 214117
  chr11:19256431-19256660
  hypo

SEQ ID NO: 314108 - DNA, 1278 bp, Homo sapiens; identical to SEQ ID NO: 287907
  chr11:19733695-19734973
  hypo

SEQ ID NO: 314109 - DNA, 338 bp, Homo sapiens; identical to SEQ ID NO: 202485
  chr11:19735066-19735404
  hypo

SEQ ID NO: 314110 - DNA, 109 bp, Homo sapiens; identical to SEQ ID NO: 263312
  chr11:19913974-19914083
  hypo

SEQ ID NO: 314111 - DNA, 98 bp, Homo sapiens; identical to SEQ ID NO: 287912
  chr11:20179003-20179101
  hypo

SEQ ID NO: 314112 - DNA, 97 bp, Homo sapiens; identical to SEQ ID NO: 263313
  chr11:27380960-27381057
  hypo

SEQ ID NO: 314113 - DNA, 36 bp, Homo sapiens; identical to SEQ ID NO: 263314
  chr11:27381177-27381213
  hypo

SEQ ID NO: 314114 - DNA, 97 bp, Homo sapiens; identical to SEQ ID NO: 214121
  chr11:27485359-27485456
  hypo

SEQ ID NO: 314115 - DNA, 34 bp, Homo sapiens; identical to SEQ ID NO: 263317
  chr11:27526853-27526887
  hypo

SEQ ID NO: 314116 - DNA, 104 bp, Homo sapiens; identical to SEQ ID NO: 263318
  chr11:27678524-27678628
  hypo

SEQ ID NO: 314117 - DNA, 337 bp, Homo sapiens; identical to SEQ ID NO: 214122
  chr11:30445728-30446065
  hypo

SEQ ID NO: 314118 - DNA, 336 bp, Homo sapiens; identical to SEQ ID NO: 202493
  chr11:30607762-30608098
  hypo

SEQ ID NO: 314119 - DNA, 44 bp, Homo sapiens
  chr11:31533857-31533901
  hypo
cattttactactgccaccgtgacgtcattgtaattttaaacatg

SEQ ID NO: 314120 - DNA, 83 bp, Homo sapiens; identical to SEQ ID NO: 263321
  chr11:31760147-31760230
  hypo

SEQ ID NO: 314121 - DNA, 212 bp, Homo sapiens; identical to SEQ ID NO: 214124
  chr11:31808822-31809034
  hypo

SEQ ID NO: 314122 - DNA, 44 bp, Homo sapiens; identical to SEQ ID NO: 263323
  chr11:32535832-32535876
  hypo

SEQ ID NO: 314123 - DNA, 96 bp, Homo sapiens; identical to SEQ ID NO: 263324
  chr11:32727120-32727216
  hypo

SEQ ID NO: 314124 - DNA, 412 bp, Homo sapiens; identical to SEQ ID NO: 202504
  chr11:32851553-32851965
  hypo

SEQ ID NO: 314125 - DNA, 40 bp, Homo sapiens; identical to SEQ ID NO: 263325
  chr11:32907343-32907383
  hypo

SEQ ID NO: 314126 - DNA, 54 bp, Homo sapiens; identical to SEQ ID NO: 263326
  chr11:32912159-32912213
  hypo

SEQ ID NO: 314127 - DNA, 941 bp, Homo sapiens; identical to SEQ ID NO: 202505
  chr11:32915115-32916056
  hypo

SEQ ID NO: 314128 - DNA, 42 bp, Homo sapiens; identical to SEQ ID NO: 214127
  chr11:33183722-33183764
  hypo

SEQ ID NO: 314129 - DNA, 86 bp, Homo sapiens; identical to SEQ ID NO: 263330
  chr11:33277374-33277460
  hypo

SEQ ID NO: 314130 - DNA, 162 bp, Homo sapiens; identical to SEQ ID NO: 287971
  chr11:33397373-33397535
  hypo

SEQ ID NO: 314131 - DNA, 852 bp, Homo sapiens; identical to SEQ ID NO: 287972
  chr11:33397642-33398494
  hypo

SEQ ID NO: 314132 - DNA, 127 bp, Homo sapiens; identical to SEQ ID NO: 263331
  chr11:33667398-33667525
  hypo

SEQ ID NO: 314133 - DNA, 603 bp, Homo sapiens; identical to SEQ ID NO: 287973
  chr11:33890633-33891236
  hypo

SEQ ID NO: 314134 - DNA, 65 bp, Homo sapiens; identical to SEQ ID NO: 263334
  chr11:34097799-34097864
  hypo

SEQ ID NO: 314135 - DNA, 42 bp, Homo sapiens; identical to SEQ ID NO: 214129
  chr11:34109547-34109589
  hypo

SEQ ID NO: 314136 - DNA, 61 bp, Homo sapiens; identical to SEQ ID NO: 263336
  chr11:34190350-34190411
  hypo

SEQ ID NO: 314137 - DNA, 111 bp, Homo sapiens; identical to SEQ ID NO: 263337
  chr11:34190793-34190904
  hypo

SEQ ID NO: 314138 - DNA, 38 bp, Homo sapiens; identical to SEQ ID NO: 214130
  chr11:34192314-34192352
  hypo

SEQ ID NO: 314139 - DNA, 34 bp, Homo sapiens; identical to SEQ ID NO: 263339
  chr11:34264829-34264863
  hypo

SEQ ID NO: 314140 - DNA, 393 bp, Homo sapiens; identical to SEQ ID NO: 263340
  chr11:34264983-34265376
  hypo

SEQ ID NO: 314141 - DNA, 75 bp, Homo sapiens; identical to SEQ ID NO: 263341
  chr11:34270689-34270764
  hypo

SEQ ID NO: 314142 - DNA, 101 bp, Homo sapiens; identical to SEQ ID NO: 263342
  chr11:34407511-34407612
  hypo

SEQ ID NO: 314143 - DNA, 200 bp, Homo sapiens; identical to SEQ ID NO: 214132
  chr11:34511230-34511430
  hypo

SEQ ID NO: 314144 - DNA, 574 bp, Homo sapiens; identical to SEQ ID NO: 263344
  chr11:34516981-34517555
  hypo

SEQ ID NO: 314145 - DNA, 92 bp, Homo sapiens; identical to SEQ ID NO: 263345
  chr11:34518320-34518412
  hypo

SEQ ID NO: 314146 - DNA, 36 bp, Homo sapiens
  chr11:34535008-34535044
  hypo
ggctggtggccacacggcctgcggaggcaagcaggt

SEQ ID NO: 314147 - DNA, 62 bp, Homo sapiens
  chr11:34535248-34535310
  hypo
aagaggaggctttcaaggcaagagaaggcaggcgctcccagcaccagcgtgcagtggaaata

SEQ ID NO: 314148 - DNA, 44 bp, Homo sapiens; identical to SEQ ID NO: 263347
  chr11:34592834-34592878
  hypo

SEQ ID NO: 314149 - DNA, 169 bp, Homo sapiens; identical to SEQ ID NO: 263348
  chr11:34631595-34631764
  hypo

SEQ ID NO: 314150 - DNA, 42 bp, Homo sapiens; identical to SEQ ID NO: 263349
  chr11:34666542-34666584
  hypo

SEQ ID NO: 314151 - DNA, 156 bp, Homo sapiens; identical to SEQ ID NO: 263350
  chr11:34897219-34897375
  hypo

SEQ ID NO: 314152 - DNA, 103 bp, Homo sapiens; identical to SEQ ID NO: 263351
  chr11:35016467-35016570
  hypo

SEQ ID NO: 314153 - DNA, 77 bp, Homo sapiens; identical to SEQ ID NO: 263352
  chr11:35150808-35150885
  hypo

SEQ ID NO: 314154 - DNA, 202 bp, Homo sapiens; identical to SEQ ID NO: 287979
  chr11:35439896-35440098
  hypo

SEQ ID NO: 314155 - DNA, 238 bp, Homo sapiens; identical to SEQ ID NO: 202513
  chr11:35440137-35440375
  hypo

SEQ ID NO: 314156 - DNA, 37 bp, Homo sapiens; identical to SEQ ID NO: 214136
  chr11:35516160-35516197
  hypo

SEQ ID NO: 314157 - DNA, 66 bp, Homo sapiens; identical to SEQ ID NO: 202518
  chr11:35641617-35641683
  hypo

SEQ ID NO: 314158 - DNA, 74 bp, Homo sapiens; identical to SEQ ID NO: 214138
  chr11:35661156-35661230
  hypo

SEQ ID NO: 314159 - DNA, 38 bp, Homo sapiens; identical to SEQ ID NO: 214139
  chr11:36060520-36060558
  hypo

SEQ ID NO: 314160 - DNA, 37 bp, Homo sapiens; identical to SEQ ID NO: 214140
  chr11:36060798-36060835
  hypo

SEQ ID NO: 314161 - DNA, 316 bp, Homo sapiens; identical to SEQ ID NO: 263358
  chr11:36100376-36100692
  hypo

SEQ ID NO: 314162 - DNA, 120 bp, Homo sapiens; identical to SEQ ID NO: 263359
  chr11:36245105-36245225
  hypo

SEQ ID NO: 314163 - DNA, 49 bp, Homo sapiens; identical to SEQ ID NO: 214141
  chr11:36248992-36249041
  hypo

SEQ ID NO: 314164 - DNA, 207 bp, Homo sapiens; identical to SEQ ID NO: 263361
  chr11:36277915-36278122
  hypo

SEQ ID NO: 314165 - DNA, 42 bp, Homo sapiens; identical to SEQ ID NO: 263362
  chr11:36292455-36292497
  hypo

SEQ ID NO: 314166 - DNA, 183 bp, Homo sapiens; identical to SEQ ID NO: 263363
  chr11:36300631-36300814
  hypo

SEQ ID NO: 314167 - DNA, 42 bp, Homo sapiens; identical to SEQ ID NO: 263364
  chr11:36419756-36419798
  hypo

SEQ ID NO: 314168 - DNA, 190 bp, Homo sapiens; identical to SEQ ID NO: 214142
  chr11:36476161-36476351
  hypo

SEQ ID NO: 314169 - DNA, 37 bp, Homo sapiens; identical to SEQ ID NO: 263366
  chr11:36823633-36823670
  hypo

SEQ ID NO: 314170 - DNA, 46 bp, Homo sapiens; identical to SEQ ID NO: 263367
  chr11:37929404-37929450
  hypo

SEQ ID NO: 314171 - DNA, 43 bp, Homo sapiens; identical to SEQ ID NO: 263368
  chr11:37929480-37929523
  hypo

SEQ ID NO: 314172 - DNA, 45 bp, Homo sapiens; identical to SEQ ID NO: 263369
  chr11:38195082-38195127
  hypo

SEQ ID NO: 314173 - DNA, 39 bp, Homo sapiens; identical to SEQ ID NO: 263370
  chr11:38358533-38358572
  hypo

SEQ ID NO: 314174 - DNA, 82 bp, Homo sapiens; identical to SEQ ID NO: 263371
  chr11:38525522-38525604
  hypo

SEQ ID NO: 314175 - DNA, 159 bp, Homo sapiens; identical to SEQ ID NO: 263372
  chr11:39766926-39767085
  hypo

SEQ ID NO: 314176 - DNA, 82 bp, Homo sapiens; identical to SEQ ID NO: 214143
  chr11:40039796-40039878
  hypo

SEQ ID NO: 314177 - DNA, 230 bp, Homo sapiens
  chr11:43543794-43544024
  hypo
ttcaaggccctgagagtgatcgtgtggatagacagtggcaacgacaacgtggacatcaaggctgccgcgagctcggaattgttgtgtgcaacatcccgtccggagccctggaagagacagccgactccaccgtctgcgacatcctcaatctgtaccggaggaacacgtgggtgtgccaggcactgcgggaagggacgtgggttcagagcatggagcaaatcctcgaggtg

SEQ ID NO: 314178 - DNA, 119 bp, Homo sapiens
  chr11:43544070-43544189
  hypo
gagctttggtcgcacgaggcaggcagttgcatttcaagccaaggcctttggattcagcgtcatattttatgacccctacttgcaggatgggatagaacggtccctgggcattcaatggg

SEQ ID NO: 314179 - DNA, 205 bp, Homo sapiens; identical to SEQ ID NO: 202529
  chr11:43965299-43965504
  hypo

SEQ ID NO: 314180 - DNA, 140 bp, Homo sapiens; identical to SEQ ID NO: 263375
  chr11:44594534-44594674
  hypo

SEQ ID NO: 314181 - DNA, 166 bp, Homo sapiens; identical to SEQ ID NO: 214145
  chr11:44608908-44609074
  hypo

SEQ ID NO: 314182 - DNA, 200 bp, Homo sapiens; identical to SEQ ID NO: 214146
  chr11:44609415-44609615
  hypo

SEQ ID NO: 314183 - DNA, 41 bp, Homo sapiens; identical to SEQ ID NO: 214147
  chr11:44611373-44611414
  hypo

SEQ ID NO: 314184 - DNA, 41 bp, Homo sapiens; identical to SEQ ID NO: 214148
  chr11:44611654-44611695
  hypo

SEQ ID NO: 314185 - DNA, 180 bp, Homo sapiens; identical to SEQ ID NO: 214149
  chr11:44621700-44621880
  hypo

SEQ ID NO: 314186 - DNA, 256 bp, Homo sapiens; identical to SEQ ID NO: 263381
  chr11:44625096-44625352
  hypo

SEQ ID NO: 314187 - DNA, 175 bp, Homo sapiens; identical to SEQ ID NO: 263382
  chr11:44637485-44637660
  hypo

SEQ ID NO: 314188 - DNA, 485 bp, Homo sapiens; identical to SEQ ID NO: 263383
  chr11:44639741-44640226
  hypo

SEQ ID NO: 314189 - DNA, 519 bp, Homo sapiens; identical to SEQ ID NO: 214151
  chr11:44640525-44641044
  hypo

SEQ ID NO: 314190 - DNA, 206 bp, Homo sapiens; identical to SEQ ID NO: 263385
  chr11:44675159-44675365
  hypo

SEQ ID NO: 314191 - DNA, 313 bp, Homo sapiens; identical to SEQ ID NO: 202533
  chr11:44748871-44749184
  hypo

SEQ ID NO: 314192 - DNA, 86 bp, Homo sapiens; identical to SEQ ID NO: 214153
  chr11:44944309-44944395
  hypo

SEQ ID NO: 314193 - DNA, 33 bp, Homo sapiens; identical to SEQ ID NO: 263388
  chr11:44993090-44993123
  hypo

SEQ ID NO: 314194 - DNA, 371 bp, Homo sapiens; identical to SEQ ID NO: 263389
  chr11:45011418-45011789
  hypo

SEQ ID NO: 314195 - DNA, 47 bp, Homo sapiens; identical to SEQ ID NO: 214154
  chr11:45195184-45195231
  hypo

SEQ ID NO: 314196 - DNA, 102 bp, Homo sapiens; identical to SEQ ID NO: 263391
  chr11:45230781-45230883
  hypo

SEQ ID NO: 314197 - DNA, 90 bp, Homo sapiens; identical to SEQ ID NO: 263392
  chr11:45234259-45234349
  hypo

SEQ ID NO: 314198 - DNA, 61 bp, Homo sapiens; identical to SEQ ID NO: 263393
  chr11:45248080-45248141
  hypo

SEQ ID NO: 314199 - DNA, 191 bp, Homo sapiens; identical to SEQ ID NO: 263394
  chr11:45417059-45417250
  hypo

SEQ ID NO: 314200 - DNA, 96 bp, Homo sapiens; identical to SEQ ID NO: 202537
  chr11:45684299-45684395
  hypo

SEQ ID NO: 314201 - DNA, 42 bp, Homo sapiens; identical to SEQ ID NO: 263395
  chr11:45773610-45773652
  hypo

SEQ ID NO: 314202 - DNA, 186 bp, Homo sapiens; identical to SEQ ID NO: 202538
  chr11:45825485-45825671
  hypo

SEQ ID NO: 314203 - DNA, 80 bp, Homo sapiens; identical to SEQ ID NO: 263396
  chr11:45838883-45838963
  hypo

SEQ ID NO: 314204 - DNA, 195 bp, Homo sapiens; identical to SEQ ID NO: 214157
  chr11:45951099-45951294
  hypo

SEQ ID NO: 314205 - DNA, 499 bp, Homo sapiens; identical to SEQ ID NO: 214158
  chr11:45953589-45954088
  hypo

SEQ ID NO: 314206 - DNA, 189 bp, Homo sapiens; identical to SEQ ID NO: 263399
  chr11:45955789-45955978
  hypo

SEQ ID NO: 314207 - DNA, 157 bp, Homo sapiens; identical to SEQ ID NO: 214159
  chr11:45956742-45956899
  hypo

SEQ ID NO: 314208 - DNA, 62 bp, Homo sapiens; identical to SEQ ID NO: 202540
  chr11:46264958-46265020
  hypo

SEQ ID NO: 314209 - DNA, 56 bp, Homo sapiens; identical to SEQ ID NO: 263401
  chr11:46275737-46275793
  hypo

SEQ ID NO: 314210 - DNA, 593 bp, Homo sapiens; identical to SEQ ID NO: 288033
  chr11:46299154-46299747
  hypo

SEQ ID NO: 314211 - DNA, 590 bp, Homo sapiens; identical to SEQ ID NO: 263403
  chr11:46337893-46338483
  hypo

SEQ ID NO: 314212 - DNA, 41 bp, Homo sapiens; identical to SEQ ID NO: 263404
  chr11:46390759-46390800
  hypo

SEQ ID NO: 314213 - DNA, 623 bp, Homo sapiens; identical to SEQ ID NO: 263405
  chr11:46391520-46392143
  hypo

SEQ ID NO: 314214 - DNA, 206 bp, Homo sapiens; identical to SEQ ID NO: 288035
  chr11:46412034-46412240
  hypo

SEQ ID NO: 314215 - DNA, 308 bp, Homo sapiens; identical to SEQ ID NO: 120673
  chr11:46412276-46412584
  hypo

SEQ ID NO: 314216 - DNA, 470 bp, Homo sapiens; identical to SEQ ID NO: 288038
  chr11:46413304-46413774
  hypo

SEQ ID NO: 314217 - DNA, 32 bp, Homo sapiens; identical to SEQ ID NO: 263406
  chr11:46483754-46483786
  hypo

SEQ ID NO: 314218 - DNA, 42 bp, Homo sapiens; identical to SEQ ID NO: 263407
  chr11:46542429-46542471
  hypo

SEQ ID NO: 314219 - DNA, 333 bp, Homo sapiens; identical to SEQ ID NO: 224102
  chr11:46564032-46564365
  hypo

SEQ ID NO: 314220 - DNA, 34 bp, Homo sapiens; identical to SEQ ID NO: 214165
  chr11:46589409-46589443
  hypo

SEQ ID NO: 314221 - DNA, 180 bp, Homo sapiens; identical to SEQ ID NO: 214166
  chr11:46617388-46617568
  hypo

SEQ ID NO: 314222 - DNA, 53 bp, Homo sapiens
  chr11:46777060-46777113
  hypo
ttaaatataaataactagtccttagggattcagtcattcggcaaatatttact

SEQ ID NO: 314223 - DNA, 180 bp, Homo sapiens; identical to SEQ ID NO: 214167
  chr11:46783059-46783239
  hypo

SEQ ID NO: 314224 - DNA, 32 bp, Homo sapiens; identical to SEQ ID NO: 214168
  chr11:46844005-46844037
  hypo

SEQ ID NO: 314225 - DNA, 182 bp, Homo sapiens; identical to SEQ ID NO: 224103
  chr11:46848281-46848463
  hypo

SEQ ID NO: 314226 - DNA, 132 bp, Homo sapiens; identical to SEQ ID NO: 263413
  chr11:46916229-46916361
  hypo

SEQ ID NO: 314227 - DNA, 131 bp, Homo sapiens
  chr11:46920042-46920173
  hypo
ggcctctttggctccacaagccttctccttagttcaagcccaacctaattccatttccccactcactgcagttgcgctcatcagactggtcatcacagtccgcgtcaccatcgcagcgccagcctgcattg

SEQ ID NO: 314228 - DNA, 34 bp, Homo sapiens; identical to SEQ ID NO: 224105
  chr11:46939597-46939631
  hypo

SEQ ID NO: 314229 - DNA, 34 bp, Homo sapiens; identical to SEQ ID NO: 214169
  chr11:46959101-46959135
  hypo

SEQ ID NO: 314230 - DNA, 31 bp, Homo sapiens; identical to SEQ ID NO: 263416
  chr11:47081353-47081384
  hypo

SEQ ID NO: 314231 - DNA, 186 bp, Homo sapiens; identical to SEQ ID NO: 214170
  chr11:47169578-47169764
  hypo

SEQ ID NO: 314232 - DNA, 611 bp, Homo sapiens; identical to SEQ ID NO: 263419
  chr11:47264239-47264850
  hypo

SEQ ID NO: 314233 - DNA, 251 bp, Homo sapiens; identical to SEQ ID NO: 263420
  chr11:47348746-47348997
  hypo

SEQ ID NO: 314234 - DNA, 36 bp, Homo sapiens; identical to SEQ ID NO: 214171
  chr11:47358890-47358926
  hypo

SEQ ID NO: 314235 - DNA, 111 bp, Homo sapiens; identical to SEQ ID NO: 214172
  chr11:47359237-47359348
  hypo

SEQ ID NO: 314236 - DNA, 80 bp, Homo sapiens; identical to SEQ ID NO: 263422
  chr11:47431265-47431345
  hypo

SEQ ID NO: 314237 - DNA, 180 bp, Homo sapiens; identical to SEQ ID NO: 263423
  chr11:47479675-47479855
  hypo

SEQ ID NO: 314238 - DNA, 37 bp, Homo sapiens; identical to SEQ ID NO: 214173
  chr11:47506517-47506554
  hypo

SEQ ID NO: 314239 - DNA, 78 bp, Homo sapiens; identical to SEQ ID NO: 214174
  chr11:47599039-47599117
  hypo

SEQ ID NO: 314240 - DNA, 108 bp, Homo sapiens
  chr11:47599315-47599423
  hypo
ttcaggttggaagtgaacatggatcggaagaagcagctctgagctgagaggaccagccgatggagctgaaactcccggccttccaccgaaatggtgacatcagcaaag

SEQ ID NO: 314241 - DNA, 50 bp, Homo sapiens; identical to SEQ ID NO: 224106
  chr11:48002696-48002746
  hypo

SEQ ID NO: 314242 - DNA, 44 bp, Homo sapiens; identical to SEQ ID NO: 263428
  chr11:48008070-48008114
  hypo

SEQ ID NO: 314243 - DNA, 197 bp, Homo sapiens; identical to SEQ ID NO: 263429
  chr11:48061635-48061832
  hypo

SEQ ID NO: 314244 - DNA, 74 bp, Homo sapiens; identical to SEQ ID NO: 263430
  chr11:48065754-48065828
  hypo

SEQ ID NO: 314245 - DNA, 89 bp, Homo sapiens; identical to SEQ ID NO: 263431
  chr11:48146569-48146658
  hypo

SEQ ID NO: 314246 - DNA, 31 bp, Homo sapiens; identical to SEQ ID NO: 263432
  chr11:48365007-48365038
  hypo

SEQ ID NO: 314247 - DNA, 50 bp, Homo sapiens; identical to SEQ ID NO: 263433
  chr11:49124076-49124126
  hypo

SEQ ID NO: 314248 - DNA, 43 bp, Homo sapiens
  chr11:49212565-49212608
  hypo
gtatacaaaaacaggttggccgggtgcggaggcaggcagatca

SEQ ID NO: 314249 - DNA, 98 bp, Homo sapiens; identical to SEQ ID NO: 263435
  chr11:50258375-50258473
  hypo

SEQ ID NO: 314250 - DNA, 58 bp, Homo sapiens; identical to SEQ ID NO: 263436
  chr11:55940876-55940934
  hypo

SEQ ID NO: 314251 - DNA, 158 bp, Homo sapiens; identical to SEQ ID NO: 263437
  chr11:57010762-57010920
  hypo

SEQ ID NO: 314252 - DNA, 72 bp, Homo sapiens; identical to SEQ ID NO: 263438
  chr11:57069626-57069698
  hypo

SEQ ID NO: 314253 - DNA, 136 bp, Homo sapiens
  chr11:57071397-57071533
  hypo
tctcactaactcatactgcccgccctgtccagcggccactccccaaaatgacacattcacattcatcaccatcacacacactcaggcagagagcttgtgcgctgtttgtcactcccccagatggacctcgcaccca

SEQ ID NO: 314254 - DNA, 147 bp, Homo sapiens; identical to SEQ ID NO: 263440
  chr11:57072387-57072534
  hypo

SEQ ID NO: 314255 - DNA, 38 bp, Homo sapiens; identical to SEQ ID NO: 263441
  chr11:57134905-57134943
  hypo

SEQ ID NO: 314256 - DNA, 42 bp, Homo sapiens; identical to SEQ ID NO: 214176
  chr11:57152967-57153009
  hypo

SEQ ID NO: 314257 - DNA, 390 bp, Homo sapiens; identical to SEQ ID NO: 214177
  chr11:57182504-57182894
  hypo

SEQ ID NO: 314258 - DNA, 246 bp, Homo sapiens; identical to SEQ ID NO: 263444
  chr11:57188497-57188743
  hypo

SEQ ID NO: 314259 - DNA, 281 bp, Homo sapiens; identical to SEQ ID NO: 263445
  chr11:57202848-57203129
  hypo

SEQ ID NO: 314260 - DNA, 165 bp, Homo sapiens; identical to SEQ ID NO: 263446
  chr11:57206942-57207107
  hypo

SEQ ID NO: 314261 - DNA, 67 bp, Homo sapiens; identical to SEQ ID NO: 214178
  chr11:57235458-57235525
  hypo

SEQ ID NO: 314262 - DNA, 431 bp, Homo sapiens; identical to SEQ ID NO: 202547
  chr11:57243735-57244166
  hypo

SEQ ID NO: 314263 - DNA, 174 bp, Homo sapiens; identical to SEQ ID NO: 263448
  chr11:57254651-57254825
  hypo

SEQ ID NO: 314264 - DNA, 84 bp, Homo sapiens
  chr11:57373338-57373422
  hypo
ggagtgggctggaccgcgctccaccatgccgtattcactaagtgagcagatagaaccatagaaagcatgctcactctcaaatcg

SEQ ID NO: 314265 - DNA, 51 bp, Homo sapiens; identical to SEQ ID NO: 202551
  chr11:57434928-57434979
  hypo

SEQ ID NO: 314266 - DNA, 39 bp, Homo sapiens; identical to SEQ ID NO: 263451
  chr11:57446669-57446708
  hypo

SEQ ID NO: 314267 - DNA, 32 bp, Homo sapiens; identical to SEQ ID NO: 214181
  chr11:57500993-57501025
  hypo

SEQ ID NO: 314268 - DNA, 121 bp, Homo sapiens; identical to SEQ ID NO: 214182
  chr11:57580247-57580368
  hypo

SEQ ID NO: 314269 - DNA, 120 bp, Homo sapiens; identical to SEQ ID NO: 263454
  chr11:58437898-58438018
  hypo

SEQ ID NO: 314270 - DNA, 61 bp, Homo sapiens; identical to SEQ ID NO: 263455
  chr11:58904855-58904916
  hypo

SEQ ID NO: 314271 - DNA, 42 bp, Homo sapiens; identical to SEQ ID NO: 214183
  chr11:58949204-58949246
  hypo

SEQ ID NO: 314272 - DNA, 42 bp, Homo sapiens; identical to SEQ ID NO: 263457
  chr11:59031094-59031136
  hypo

SEQ ID NO: 314273 - DNA, 66 bp, Homo sapiens
  chr11:59312681-59312747
  hypo
ctaagtagcaaaatggaggagaagtcgttgtgaaaccgcccaatgggctcaccttacccactgcct

SEQ ID NO: 314274 - DNA, 43 bp, Homo sapiens; identical to SEQ ID NO: 263459
  chr11:59316335-59316378
  hypo

SEQ ID NO: 314275 - DNA, 176 bp, Homo sapiens; identical to SEQ ID NO: 214184
  chr11:59423038-59423214
  hypo

SEQ ID NO: 314276 - DNA, 210 bp, Homo sapiens; identical to SEQ ID NO: 202557
  chr11:59523106-59523316
  hypo

SEQ ID NO: 314277 - DNA, 272 bp, Homo sapiens; identical to SEQ ID NO: 214186
  chr11:59665529-59665801
  hypo

SEQ ID NO: 314278 - DNA, 37 bp, Homo sapiens; identical to SEQ ID NO: 214187
  chr11:59809609-59809646
  hypo

SEQ ID NO: 314279 - DNA, 37 bp, Homo sapiens; identical to SEQ ID NO: 263464
  chr11:59834956-59834993
  hypo

SEQ ID NO: 314280 - DNA, 40 bp, Homo sapiens; identical to SEQ ID NO: 214188
  chr11:60143549-60143589
  hypo

SEQ ID NO: 314281 - DNA, 150 bp, Homo sapiens; identical to SEQ ID NO: 214189
  chr11:60282698-60282848
  hypo

SEQ ID NO: 314282 - DNA, 187 bp, Homo sapiens; identical to SEQ ID NO: 214190
  chr11:60282878-60283065
  hypo

SEQ ID NO: 314283 - DNA, 321 bp, Homo sapiens; identical to SEQ ID NO: 214191
  chr11:60514866-60515187
  hypo

SEQ ID NO: 314284 - DNA, 34 bp, Homo sapiens
  chr11:60524470-60524504
  hypo
acgtgatcgccttgaagttacgcttgaaggagga

SEQ ID NO: 314285 - DNA, 647 bp, Homo sapiens
  chr11:60524717-60525364
  hypo
tcggcaggaatgcccttggtttcctgatcaaggaaccttagacttgagttatggagcaggtaggtcactgcctgaaaacaggatgtgagcaaggtcattttactgaggttattgttttgaccacctgggcgccggtacactcggtgttgtatcctctttatctgccagattgcagtgggtcagaccgcccgtctttgcctgaagggaattcaggaggtttaaaggagaaggaagaacaggagccaaccaggacagcgggaggcgggcggggggtcctctctctacttcattcccttctgtagggcataaggaggatatttttttctagtgatcatgaggacggaccggagccttttcctccccctatagaaaagccattgccctcttttcctccacccttaaagggacctgtattcgttggccccgttcaggcaatggcgcctcccatcccccttgaggagtctggaggccgcccaagagatggttcttggataagacctccagtcagtgaatatctatatgatcgggtggccgtgtcctcaacgccaactcctcgtcaaactttcttagtagaggggtgcctccaagagggacttaggaagggagactctgaggcgctttttggcgcattccctgttattgttcaa

SEQ ID NO: 314286 - DNA, 42 bp, Homo sapiens; identical to SEQ ID NO: 263469
  chr11:60640963-60641005
  hypo

SEQ ID NO: 314287 - DNA, 269 bp, Homo sapiens; identical to SEQ ID NO: 263470
  chr11:60648547-60648816
  hypo

SEQ ID NO: 314288 - DNA, 33 bp, Homo sapiens; identical to SEQ ID NO: 263471
  chr11:60660676-60660709
  hypo

SEQ ID NO: 314289 - DNA, 93 bp, Homo sapiens; identical to SEQ ID NO: 263472
  chr11:60680209-60680302
  hypo

SEQ ID NO: 314290 - DNA, 33 bp, Homo sapiens; identical to SEQ ID NO: 263473
  chr11:60680362-60680395
  hypo

SEQ ID NO: 314291 - DNA, 230 bp, Homo sapiens; identical to SEQ ID NO: 214192
  chr11:60689401-60689631
  hypo

SEQ ID NO: 314292 - DNA, 49 bp, Homo sapiens; identical to SEQ ID NO: 202558
  chr11:60692121-60692170
  hypo

SEQ ID NO: 314293 - DNA, 132 bp, Homo sapiens; identical to SEQ ID NO: 263475
  chr11:60695104-60695236
  hypo

SEQ ID NO: 314294 - DNA, 159 bp, Homo sapiens; identical to SEQ ID NO: 263476
  chr11:60696096-60696255
  hypo

SEQ ID NO: 314295 - DNA, 164 bp, Homo sapiens; identical to SEQ ID NO: 214194
  chr11:60703904-60704068
  hypo

SEQ ID NO: 314296 - DNA, 220 bp, Homo sapiens; identical to SEQ ID NO: 263478
  chr11:60714069-60714289
  hypo

SEQ ID NO: 314297 - DNA, 32 bp, Homo sapiens; identical to SEQ ID NO: 263479
  chr11:60754318-60754350
  hypo

SEQ ID NO: 314298 - DNA, 155 bp, Homo sapiens; identical to SEQ ID NO: 48499
  chr11:60775226-60775381
  hypo

SEQ ID NO: 314299 - DNA, 153 bp, Homo sapiens; identical to SEQ ID NO: 263480
  chr11:60850614-60850767
  hypo

SEQ ID NO: 314300 - DNA, 173 bp, Homo sapiens; identical to SEQ ID NO: 214195
  chr11:60880738-60880911
  hypo

SEQ ID NO: 314301 - DNA, 189 bp, Homo sapiens; identical to SEQ ID NO: 214196
  chr11:60897022-60897211
  hypo

SEQ ID NO: 314302 - DNA, 103 bp, Homo sapiens; identical to SEQ ID NO: 263484
  chr11:60920711-60920814
  hypo

SEQ ID NO: 314303 - DNA, 32 bp, Homo sapiens; identical to SEQ ID NO: 214197
  chr11:60926976-60927008
  hypo

SEQ ID NO: 314304 - DNA, 66 bp, Homo sapiens; identical to SEQ ID NO: 214198
  chr11:60927368-60927434
  hypo

SEQ ID NO: 314305 - DNA, 115 bp, Homo sapiens
  chr11:61036547-61036662
  hypo
cgccctgcaaaagaaacagcaacgctgcaaactggccaaggcttgccctgaaaggcaacatgacgcggctggaagatggcaggtctcccctaaagaggatcggctacttgagaaa

SEQ ID NO: 314306 - DNA, 68 bp, Homo sapiens; identical to SEQ ID NO: 214199
  chr11:61049429-61049497
  hypo

SEQ ID NO: 314307 - DNA, 39 bp, Homo sapiens; identical to SEQ ID NO: 214200
  chr11:61049655-61049694
  hypo

SEQ ID NO: 314308 - DNA, 43 bp, Homo sapiens
  chr11:61049736-61049779
  hypo
aactcactgggctgctgaaggaaggcttcgggacaaataccta

SEQ ID NO: 314309 - DNA, 37 bp, Homo sapiens; identical to SEQ ID NO: 263489
  chr11:61056997-61057034
  hypo

SEQ ID NO: 314310 - DNA, 232 bp, Homo sapiens; identical to SEQ ID NO: 288089
  chr11:61062456-61062688
  hypo

SEQ ID NO: 314311 - DNA, 351 bp, Homo sapiens; identical to SEQ ID NO: 214202
  chr11:61076171-61076522
  hypo

SEQ ID NO: 314312 - DNA, 169 bp, Homo sapiens; identical to SEQ ID NO: 263491
  chr11:61094130-61094299
  hypo

SEQ ID NO: 314313 - DNA, 354 bp, Homo sapiens; identical to SEQ ID NO: 263492
  chr11:61106581-61106935
  hypo

SEQ ID NO: 314314 - DNA, 100 bp, Homo sapiens; identical to SEQ ID NO: 214204
  chr11:61108987-61109087
  hypo

SEQ ID NO: 314315 - DNA, 169 bp, Homo sapiens; identical to SEQ ID NO: 263494
  chr11:61110433-61110602
  hypo

SEQ ID NO: 314316 - DNA, 53 bp, Homo sapiens; identical to SEQ ID NO: 263495
  chr11:61118455-61118508
  hypo

SEQ ID NO: 314317 - DNA, 43 bp, Homo sapiens; identical to SEQ ID NO: 214205
  chr11:61122609-61122652
  hypo

SEQ ID NO: 314318 - DNA, 120 bp, Homo sapiens; identical to SEQ ID NO: 214206
  chr11:61263503-61263623
  hypo

SEQ ID NO: 314319 - DNA, 315 bp, Homo sapiens; identical to SEQ ID NO: 202562
  chr11:61276101-61276416
  hypo

SEQ ID NO: 314320 - DNA, 492 bp, Homo sapiens; identical to SEQ ID NO: 263498
  chr11:61292552-61293044
  hypo

SEQ ID NO: 314321 - DNA, 75 bp, Homo sapiens; identical to SEQ ID NO: 263499
  chr11:61302241-61302316
  hypo

SEQ ID NO: 314322 - DNA, 260 bp, Homo sapiens; identical to SEQ ID NO: 214208
  chr11:61305393-61305653
  hypo

SEQ ID NO: 314323 - DNA, 618 bp, Homo sapiens; identical to SEQ ID NO: 288098
  chr11:61347974-61348592
  hypo

SEQ ID NO: 314324 - DNA, 79 bp, Homo sapiens; identical to SEQ ID NO: 263501
  chr11:61464743-61464822
  hypo

SEQ ID NO: 314325 - DNA, 50 bp, Homo sapiens; identical to SEQ ID NO: 214209
  chr11:61474397-61474447
  hypo

SEQ ID NO: 314326 - DNA, 52 bp, Homo sapiens; identical to SEQ ID NO: 263504
  chr11:61475156-61475208
  hypo

SEQ ID NO: 314327 - DNA, 120 bp, Homo sapiens; identical to SEQ ID NO: 214210
  chr11:61475743-61475863
  hypo

SEQ ID NO: 314328 - DNA, 44 bp, Homo sapiens; identical to SEQ ID NO: 214211
  chr11:61476225-61476269
  hypo

SEQ ID NO: 314329 - DNA, 198 bp, Homo sapiens; identical to SEQ ID NO: 214212
  chr11:61478512-61478710
  hypo

SEQ ID NO: 314330 - DNA, 189 bp, Homo sapiens; identical to SEQ ID NO: 214213
  chr11:61479892-61480081
  hypo

SEQ ID NO: 314331 - DNA, 370 bp, Homo sapiens; identical to SEQ ID NO: 263509
  chr11:61488080-61488450
  hypo

SEQ ID NO: 314332 - DNA, 198 bp, Homo sapiens; identical to SEQ ID NO: 263510
  chr11:61490187-61490385
  hypo

SEQ ID NO: 314333 - DNA, 187 bp, Homo sapiens; identical to SEQ ID NO: 214215
  chr11:61490855-61491042
  hypo

SEQ ID NO: 314334 - DNA, 35 bp, Homo sapiens; identical to SEQ ID NO: 263512
  chr11:61494080-61494115
  hypo

SEQ ID NO: 314335 - DNA, 213 bp, Homo sapiens; identical to SEQ ID NO: 263513
  chr11:61495640-61495853
  hypo

SEQ ID NO: 314336 - DNA, 320 bp, Homo sapiens; identical to SEQ ID NO: 263514
  chr11:61498684-61499004
  hypo

SEQ ID NO: 314337 - DNA, 174 bp, Homo sapiens; identical to SEQ ID NO: 263515
  chr11:61502322-61502496
  hypo

SEQ ID NO: 314338 - DNA, 143 bp, Homo sapiens; identical to SEQ ID NO: 214216
  chr11:61508687-61508830
  hypo

SEQ ID NO: 314339 - DNA, 606 bp, Homo sapiens; identical to SEQ ID NO: 214217
  chr11:61511517-61512123
  hypo

SEQ ID NO: 314340 - DNA, 171 bp, Homo sapiens; identical to SEQ ID NO: 263518
  chr11:61514701-61514872
  hypo

SEQ ID NO: 314341 - DNA, 519 bp, Homo sapiens; identical to SEQ ID NO: 288101
  chr11:61519848-61520367
  hypo

SEQ ID NO: 314342 - DNA, 458 bp, Homo sapiens; identical to SEQ ID NO: 214219
  chr11:61522483-61522941
  hypo

SEQ ID NO: 314343 - DNA, 99 bp, Homo sapiens; identical to SEQ ID NO: 214220
  chr11:61525593-61525692
  hypo

SEQ ID NO: 314344 - DNA, 299 bp, Homo sapiens
  chr11:61536686-61536985
  hypo
aagctcagctgctcaccccccggccccttcccctggctctcgcagcacactgccggactctcccccagactcgggctccgaggcctactccccccagcaggtgaatggtgagtccagcgggcaccgccctcctgctccagggtttgggcaagtagttggggcggccttatcagggaggtaggggaggagggagggggccagcggctgcccaacgggctgagattatcgctggtcaaatactccctggcgcttggctattgtttccccacgggcgggtggggagcctggccctgcctctg

SEQ ID NO: 314345 - DNA, 83 bp, Homo sapiens
  chr11:61537014-61537097
  hypo
cctgcccgcctgcgccatcatggacgcacccttcggcggtaagtgggtggctggggaaggccgtgggtgcagcctgggtgcag

SEQ ID NO: 314346 - DNA, 259 bp, Homo sapiens; identical to SEQ ID NO: 202565
  chr11:61595492-61595751
  hypo

SEQ ID NO: 314347 - DNA, 48 bp, Homo sapiens; identical to SEQ ID NO: 202566
  chr11:61596695-61596743
  hypo

SEQ ID NO: 314348 - DNA, 46 bp, Homo sapiens; identical to SEQ ID NO: 263522
  chr11:61615510-61615556
  hypo

SEQ ID NO: 314349 - DNA, 407 bp, Homo sapiens; identical to SEQ ID NO: 214223
  chr11:61632399-61632806
  hypo

SEQ ID NO: 314350 - DNA, 176 bp, Homo sapiens; identical to SEQ ID NO: 214224
  chr11:61634597-61634773
  hypo

SEQ ID NO: 314351 - DNA, 42 bp, Homo sapiens; identical to SEQ ID NO: 214225
  chr11:61635271-61635313
  hypo

SEQ ID NO: 314352 - DNA, 329 bp, Homo sapiens; identical to SEQ ID NO: 263526
  chr11:61640576-61640905
  hypo

SEQ ID NO: 314353 - DNA, 155 bp, Homo sapiens
  chr11:61641255-61641410
  hypo
agcccttctctgcccgcctgggtgttgccttcactgatggaggtaggcgtccagccagatgtcaccagacttcttcagggacctgggaggtgggggtggcagtgggggtgggtgttaggagctcagttgcaagatcctaacacccctgtatcccc

SEQ ID NO: 314354 - DNA, 215 bp, Homo sapiens; identical to SEQ ID NO: 214226
  chr11:61644863-61645078
  hypo

SEQ ID NO: 314355 - DNA, 111 bp, Homo sapiens; identical to SEQ ID NO: 263529
  chr11:61646081-61646192
  hypo

SEQ ID NO: 314356 - DNA, 42 bp, Homo sapiens; identical to SEQ ID NO: 263530
  chr11:61653516-61653558
  hypo

SEQ ID NO: 314357 - DNA, 190 bp, Homo sapiens; identical to SEQ ID NO: 202567
  chr11:61659371-61659561
  hypo

SEQ ID NO: 314358 - DNA, 167 bp, Homo sapiens; identical to SEQ ID NO: 214228
  chr11:61662932-61663099
  hypo

SEQ ID NO: 314359 - DNA, 56 bp, Homo sapiens
  chr11:61665672-61665728
  hypo
gtctccctgtgtgtcggcttgttctggggtgggtgtttgctctgtctcagagctcc

SEQ ID NO: 314360 - DNA, 63 bp, Homo sapiens
  chr11:61666025-61666088
  hypo
gtgccgaccacacccgagggatctgtttgcactacactgacggccacccccacagcccgacgc

SEQ ID NO: 314361 - DNA, 143 bp, Homo sapiens; identical to SEQ ID NO: 214229
  chr11:61667785-61667928
  hypo

SEQ ID NO: 314362 - DNA, 229 bp, Homo sapiens; identical to SEQ ID NO: 214230
  chr11:61668805-61669034
  hypo

SEQ ID NO: 314363 - DNA, 248 bp, Homo sapiens; identical to SEQ ID NO: 214231
  chr11:61672904-61673152
  hypo

SEQ ID NO: 314364 - DNA, 396 bp, Homo sapiens; identical to SEQ ID NO: 263538
  chr11:61673894-61674290
  hypo

SEQ ID NO: 314365 - DNA, 116 bp, Homo sapiens; identical to SEQ ID NO: 214233
  chr11:61674740-61674856
  hypo

SEQ ID NO: 314366 - DNA, 99 bp, Homo sapiens; identical to SEQ ID NO: 214234
  chr11:61675100-61675199
  hypo

SEQ ID NO: 314367 - DNA, 154 bp, Homo sapiens; identical to SEQ ID NO: 214235
  chr11:61679898-61680052
  hypo

SEQ ID NO: 314368 - DNA, 66 bp, Homo sapiens; identical to SEQ ID NO: 214236
  chr11:61688731-61688797
  hypo

SEQ ID NO: 314369 - DNA, 94 bp, Homo sapiens; identical to SEQ ID NO: 263542
  chr11:61713860-61713954
  hypo

SEQ ID NO: 314370 - DNA, 221 bp, Homo sapiens; identical to SEQ ID NO: 214237
  chr11:61717670-61717891
  hypo

SEQ ID NO: 314371 - DNA, 125 bp, Homo sapiens; identical to SEQ ID NO: 214238
  chr11:61736227-61736352
  hypo

SEQ ID NO: 314372 - DNA, 76 bp, Homo sapiens; identical to SEQ ID NO: 214239
  chr11:61770026-61770102
  hypo

SEQ ID NO: 314373 - DNA, 148 bp, Homo sapiens; identical to SEQ ID NO: 214240
  chr11:61770721-61770869
  hypo

SEQ ID NO: 314374 - DNA, 33 bp, Homo sapiens; identical to SEQ ID NO: 263549
  chr11:61795462-61795495
  hypo

SEQ ID NO: 314375 - DNA, 39 bp, Homo sapiens; identical to SEQ ID NO: 263550
  chr11:61797090-61797129
  hypo

SEQ ID NO: 314376 - DNA, 31 bp, Homo sapiens; identical to SEQ ID NO: 214241
  chr11:61811795-61811826
  hypo

SEQ ID NO: 314377 - DNA, 44 bp, Homo sapiens; identical to SEQ ID NO: 214242
  chr11:61825693-61825737
  hypo

SEQ ID NO: 314378 - DNA, 55 bp, Homo sapiens; identical to SEQ ID NO: 263553
  chr11:61889939-61889994
  hypo

SEQ ID NO: 314379 - DNA, 129 bp, Homo sapiens; identical to SEQ ID NO: 263554
  chr11:61912296-61912425
  hypo

SEQ ID NO: 314380 - DNA, 236 bp, Homo sapiens; identical to SEQ ID NO: 263555
  chr11:62167973-62168209
  hypo

SEQ ID NO: 314381 - DNA, 112 bp, Homo sapiens
  chr11:62184162-62184274
  hypo
acgtgtgctcttaccggtgttaaggcgtctcggagtgggacggttccggggtcaccacagccttcaactgtcacatggcacaaaggcctcatgcatggattcattccaggga

SEQ ID NO: 314382 - DNA, 164 bp, Homo sapiens; identical to SEQ ID NO: 224119
  chr11:62192262-62192426
  hypo

SEQ ID NO: 314383 - DNA, 88 bp, Homo sapiens; identical to SEQ ID NO: 263557
  chr11:62257978-62258066
  hypo

SEQ ID NO: 314384 - DNA, 468 bp, Homo sapiens; identical to SEQ ID NO: 202568
  chr11:62313646-62314114
  hypo

SEQ ID NO: 314385 - DNA, 54 bp, Homo sapiens; identical to SEQ ID NO: 263558
  chr11:62356614-62356668
  hypo

SEQ ID NO: 314386 - DNA, 187 bp, Homo sapiens; identical to SEQ ID NO: 263559
  chr11:62361980-62362167
  hypo

SEQ ID NO: 314387 - DNA, 208 bp, Homo sapiens; identical to SEQ ID NO: 202570
  chr11:62369474-62369682
  hypo

SEQ ID NO: 314388 - DNA, 105 bp, Homo sapiens; identical to SEQ ID NO: 214245
  chr11:62387277-62387382
  hypo

SEQ ID NO: 314389 - DNA, 38 bp, Homo sapiens; identical to SEQ ID NO: 263561
  chr11:62418574-62418612
  hypo

SEQ ID NO: 314390 - DNA, 31 bp, Homo sapiens; identical to SEQ ID NO: 214246
  chr11:62423247-62423278
  hypo

SEQ ID NO: 314391 - DNA, 34 bp, Homo sapiens
  chr11:62440588-62440622
  hypo
tcaaaacaggtcatgtggtgtcaggttggagtgt

SEQ ID NO: 314392 - DNA, 49 bp, Homo sapiens
  chr11:62450079-62450128
  hypo
ggctggtctcgaacttgtgagctcaagccatcccctgccttgtgctgga

SEQ ID NO: 314393 - DNA, 239 bp, Homo sapiens; identical to SEQ ID NO: 224123
  chr11:62473884-62474123
  hypo

SEQ ID NO: 314394 - DNA, 197 bp, Homo sapiens; identical to SEQ ID NO: 214247
  chr11:62474896-62475093
  hypo

SEQ ID NO: 314395 - DNA, 101 bp, Homo sapiens; identical to SEQ ID NO: 263566
  chr11:62479575-62479676
  hypo

SEQ ID NO: 314396 - DNA, 51 bp, Homo sapiens
  chr11:62484466-62484517
  hypo
cttggccccggcttcggttctgccggttacgcttgtttcggttgtttcggc

SEQ ID NO: 314397 - DNA, 102 bp, Homo sapiens
  chr11:62484547-62484649
  hypo
gcttccttgcctcctccttgtacttagtgacaatgggctgagcttcctccttctccagctccccatatgtcacctcatccatatagtcgcatttttcaggca

SEQ ID NO: 314398 - DNA, 105 bp, Homo sapiens; identical to SEQ ID NO: 263568
  chr11:62527793-62527898
  hypo

SEQ ID NO: 314399 - DNA, 66 bp, Homo sapiens; identical to SEQ ID NO: 214248
  chr11:62532994-62533060
  hypo

SEQ ID NO: 314400 - DNA, 213 bp, Homo sapiens; identical to SEQ ID NO: 263570
  chr11:62541857-62542070
  hypo

SEQ ID NO: 314401 - DNA, 296 bp, Homo sapiens; identical to SEQ ID NO: 263571
  chr11:62581077-62581373
  hypo

SEQ ID NO: 314402 - DNA, 34 bp, Homo sapiens; identical to SEQ ID NO: 263572
  chr11:62617578-62617612
  hypo

SEQ ID NO: 314403 - DNA, 120 bp, Homo sapiens; identical to SEQ ID NO: 263573
  chr11:62658210-62658330
  hypo

SEQ ID NO: 314404 - DNA, 206 bp, Homo sapiens; identical to SEQ ID NO: 202576
  chr11:63258404-63258610
  hypo

SEQ ID NO: 314405 - DNA, 54 bp, Homo sapiens; identical to SEQ ID NO: 202577
  chr11:63258770-63258824
  hypo

SEQ ID NO: 314406 - DNA, 178 bp, Homo sapiens; identical to SEQ ID NO: 263574
  chr11:63325853-63326031
  hypo

SEQ ID NO: 314407 - DNA, 304 bp, Homo sapiens; identical to SEQ ID NO: 263575
  chr11:63377496-63377800
  hypo

SEQ ID NO: 314408 - DNA, 40 bp, Homo sapiens; identical to SEQ ID NO: 263576
  chr11:63389635-63389675
  hypo

SEQ ID NO: 314409 - DNA, 221 bp, Homo sapiens; identical to SEQ ID NO: 263577
  chr11:63398535-63398756
  hypo

SEQ ID NO: 314410 - DNA, 152 bp, Homo sapiens; identical to SEQ ID NO: 214252
  chr11:63399450-63399602
  hypo

SEQ ID NO: 314411 - DNA, 120 bp, Homo sapiens; identical to SEQ ID NO: 214253
  chr11:63431996-63432116
  hypo

SEQ ID NO: 314412 - DNA, 88 bp, Homo sapiens; identical to SEQ ID NO: 214254
  chr11:63434153-63434241
  hypo

SEQ ID NO: 314413 - DNA, 95 bp, Homo sapiens; identical to SEQ ID NO: 263581
  chr11:63529491-63529586
  hypo

SEQ ID NO: 314414 - DNA, 180 bp, Homo sapiens; identical to SEQ ID NO: 263582
  chr11:63562759-63562939
  hypo

SEQ ID NO: 314415 - DNA, 226 bp, Homo sapiens; identical to SEQ ID NO: 263585
  chr11:63675218-63675444
  hypo

SEQ ID NO: 314416 - DNA, 110 bp, Homo sapiens; identical to SEQ ID NO: 214256
  chr11:63675664-63675774
  hypo

SEQ ID NO: 314417 - DNA, 379 bp, Homo sapiens; identical to SEQ ID NO: 214257
  chr11:63676299-63676678
  hypo

SEQ ID NO: 314418 - DNA, 91 bp, Homo sapiens; identical to SEQ ID NO: 214258
  chr11:63676708-63676799
  hypo

SEQ ID NO: 314419 - DNA, 31 bp, Homo sapiens; identical to SEQ ID NO: 214259
  chr11:63743821-63743852
  hypo

SEQ ID NO: 314420 - DNA, 69 bp, Homo sapiens; identical to SEQ ID NO: 214260
  chr11:63764163-63764232
  hypo

SEQ ID NO: 314421 - DNA, 150 bp, Homo sapiens; identical to SEQ ID NO: 263591
  chr11:63764790-63764940
  hypo

SEQ ID NO: 314422 - DNA, 109 bp, Homo sapiens; identical to SEQ ID NO: 214261
  chr11:63779256-63779365
  hypo

SEQ ID NO: 314423 - DNA, 182 bp, Homo sapiens; identical to SEQ ID NO: 214262
  chr11:63784048-63784230
  hypo

SEQ ID NO: 314424 - DNA, 42 bp, Homo sapiens; identical to SEQ ID NO: 263595
  chr11:63786387-63786429
  hypo

SEQ ID NO: 314425 - DNA, 31 bp, Homo sapiens; identical to SEQ ID NO: 263596
  chr11:63814029-63814060
  hypo

SEQ ID NO: 314426 - DNA, 31 bp, Homo sapiens; identical to SEQ ID NO: 263597
  chr11:63814240-63814271
  hypo

SEQ ID NO: 314427 - DNA, 437 bp, Homo sapiens; identical to SEQ ID NO: 214263
  chr11:63832549-63832986
  hypo

SEQ ID NO: 314428 - DNA, 225 bp, Homo sapiens
  chr11:63849155-63849380
  hypo
ccatgcaggtgagggcgtgtggctgaagcctgttcctgcttgggggttggccacacagcatcccaactccaggtccagagccgagcctgacagccctcctccactgcctcctggagctgccggagagaggtccgggtccgttctccccaattcacagacatgaagactgaggccgtggttccagtggctgctcggtggtggggctggagcttggcagcatcctgc

SEQ ID NO: 314429 - DNA, 75 bp, Homo sapiens
  chr11:63849634-63849709
  hypo
agccaggagcaggccagagccaggagcaggcgcgaaacatcccttaaatattggtgctctcggcagcactgggcc

SEQ ID NO: 314430 - DNA, 79 bp, Homo sapiens; identical to SEQ ID NO: 263600
  chr11:63860749-63860828
  hypo

SEQ ID NO: 314431 - DNA, 95 bp, Homo sapiens; identical to SEQ ID NO: 263601
  chr11:63864328-63864423
  hypo

SEQ ID NO: 314432 - DNA, 280 bp, Homo sapiens; identical to SEQ ID NO: 263602
  chr11:63864923-63865203
  hypo

SEQ ID NO: 314433 - DNA, 77 bp, Homo sapiens; identical to SEQ ID NO: 214265
  chr11:63871583-63871660
  hypo

SEQ ID NO: 314434 - DNA, 258 bp, Homo sapiens; identical to SEQ ID NO: 263604
  chr11:63883405-63883663
  hypo

SEQ ID NO: 314435 - DNA, 330 bp, Homo sapiens; identical to SEQ ID NO: 214266
  chr11:63885570-63885900
  hypo

SEQ ID NO: 314436 - DNA, 254 bp, Homo sapiens; identical to SEQ ID NO: 263606
  chr11:63888534-63888788
  hypo

SEQ ID NO: 314437 - DNA, 33 bp, Homo sapiens; identical to SEQ ID NO: 263607
  chr11:63889204-63889237
  hypo

SEQ ID NO: 314438 - DNA, 144 bp, Homo sapiens; identical to SEQ ID NO: 263608
  chr11:63892468-63892612
  hypo

SEQ ID NO: 314439 - DNA, 82 bp, Homo sapiens; identical to SEQ ID NO: 263609
  chr11:63894386-63894468
  hypo

SEQ ID NO: 314440 - DNA, 93 bp, Homo sapiens; identical to SEQ ID NO: 214267
  chr11:63905995-63906088
  hypo

SEQ ID NO: 314441 - DNA, 64 bp, Homo sapiens; identical to SEQ ID NO: 214268
  chr11:63906118-63906182
  hypo

SEQ ID NO: 314442 - DNA, 402 bp, Homo sapiens; identical to SEQ ID NO: 263611
  chr11:63908846-63909248
  hypo

SEQ ID NO: 314443 - DNA, 144 bp, Homo sapiens; identical to SEQ ID NO: 214269
  chr11:63912569-63912713
  hypo

SEQ ID NO: 314444 - DNA, 252 bp, Homo sapiens; identical to SEQ ID NO: 263613
  chr11:63916439-63916691
  hypo

SEQ ID NO: 314445 - DNA, 80 bp, Homo sapiens; identical to SEQ ID NO: 214270
  chr11:63934619-63934699
  hypo

SEQ ID NO: 314446 - DNA, 271 bp, Homo sapiens; identical to SEQ ID NO: 214271
  chr11:63963859-63964130
  hypo

SEQ ID NO: 314447 - DNA, 164 bp, Homo sapiens; identical to SEQ ID NO: 263617
  chr11:63979092-63979256
  hypo

SEQ ID NO: 314448 - DNA, 215 bp, Homo sapiens; identical to SEQ ID NO: 214272
  chr11:63988354-63988569
  hypo

SEQ ID NO: 314449 - DNA, 161 bp, Homo sapiens; identical to SEQ ID NO: 214273
  chr11:63990015-63990176
  hypo

SEQ ID NO: 314450 - DNA, 31 bp, Homo sapiens; identical to SEQ ID NO: 263620
  chr11:64011977-64012008
  hypo

SEQ ID NO: 314451 - DNA, 217 bp, Homo sapiens; identical to SEQ ID NO: 224126
  chr11:64015094-64015311
  hypo

SEQ ID NO: 314452 - DNA, 58 bp, Homo sapiens; identical to SEQ ID NO: 214274
  chr11:64032945-64033003
  hypo

SEQ ID NO: 314453 - DNA, 88 bp, Homo sapiens; identical to SEQ ID NO: 263622
  chr11:64034944-64035032
  hypo

SEQ ID NO: 314454 - DNA, 460 bp, Homo sapiens; identical to SEQ ID NO: 263623
  chr11:64044375-64044835
  hypo

SEQ ID NO: 314455 - DNA, 61 bp, Homo sapiens
  chr11:64054225-64054286
  hypo
tctccttctacttccgagatactccccgcgccaaccgcctggggcccttgcccttctggct

SEQ ID NO: 314456 - DNA, 94 bp, Homo sapiens; identical to SEQ ID NO: 263625
  chr11:64055231-64055325
  hypo

SEQ ID NO: 314457 - DNA, 179 bp, Homo sapiens; identical to SEQ ID NO: 263626
  chr11:64056037-64056216
  hypo

SEQ ID NO: 314458 - DNA, 78 bp, Homo sapiens; identical to SEQ ID NO: 263627
  chr11:64069275-64069353
  hypo

SEQ ID NO: 314459 - DNA, 39 bp, Homo sapiens; identical to SEQ ID NO: 214276
  chr11:64078889-64078928
  hypo

SEQ ID NO: 314460 - DNA, 115 bp, Homo sapiens; identical to SEQ ID NO: 214277
  chr11:64081531-64081646
  hypo

SEQ ID NO: 314461 - DNA, 329 bp, Homo sapiens; identical to SEQ ID NO: 214278
  chr11:64088215-64088544
  hypo

SEQ ID NO: 314462 - DNA, 159 bp, Homo sapiens; identical to SEQ ID NO: 263631
  chr11:64089708-64089867
  hypo

SEQ ID NO: 314463 - DNA, 188 bp, Homo sapiens; identical to SEQ ID NO: 214279
  chr11:64112373-64112561
  hypo

SEQ ID NO: 314464 - DNA, 158 bp, Homo sapiens; identical to SEQ ID NO: 214280
  chr11:64118936-64119094
  hypo

SEQ ID NO: 314465 - DNA, 200 bp, Homo sapiens
  chr11:64120022-64120222
  hypo
gggttgggctccccgtggggctcacctattgggagtggtgggcacctggcatggcattctgcccaatggcttcctctgggggacctaggcttaggaggtgacagacccccccgccccgggtccagatagtccagccagctgcttgtggtggccataggttcacacagccctcttagccccttgtccatcccaggcacgag

SEQ ID NO: 314466 - DNA, 41 bp, Homo sapiens
  chr11:64120327-64120368
  hypo
gagctgcggaggcttcagagcgagcacgacaggtgccgccc

SEQ ID NO: 314467 - DNA, 229 bp, Homo sapiens; identical to SEQ ID NO: 214281
  chr11:64120593-64120822
  hypo

SEQ ID NO: 314468 - DNA, 171 bp, Homo sapiens; identical to SEQ ID NO: 214282
  chr11:64120948-64121119
  hypo

SEQ ID NO: 314469 - DNA, 362 bp, Homo sapiens
  chr11:64124342-64124704
  hypo
gcattctgggcagagggaaccgctgagggaacagcaggcgtggtgcagctggaagcggggggtattggcaggtcgggggtgggcagaaggtgctcgagcctgtgggcctcctgggactctgggagtcctcctgagggaagcagatctcagctgagcctttccctctaggccctgaggtacaggaaccggagaaacgtcccctcaccccatccctcagccagtgacaccgtgggaacagcaggcttgggagtgcagccttctcggcactggagtgtcagcggaggccccaggcagcccaagagctcagggagccagggaccccaaggggagtccttggacaaggaggcctgggccctgagatc

SEQ ID NO: 314470 - DNA, 309 bp, Homo sapiens
  chr11:64129093-64129402
  hypo
accccggctccacccggcaggctgtggactggtggagcctgggcatcttgctcttcgagctgctgacgggggcctcgcccttcaccctggagggcgagaggaacacgcaggctgaggtgtctcggtgagtagggctggacgtggagggcggccagagggctgcagggcctgcctgggcagggctgtgggtggggggcttgctgcccctgacacccccccaatcctcccagacggatcctgaagtgctcccctcccttcccccctcggatcgggcccgtggcgcaggacctgctgcagcggctgctttgt

SEQ ID NO: 314471 - DNA, 642 bp, Homo sapiens; identical to SEQ ID NO: 263639
  chr11:64135636-64136278
  hypo

SEQ ID NO: 314472 - DNA, 82 bp, Homo sapiens; identical to SEQ ID NO: 214285
  chr11:64143181-64143263
  hypo

SEQ ID NO: 314473 - DNA, 149 bp, Homo sapiens; identical to SEQ ID NO: 263641
  chr11:64150446-64150595
  hypo

SEQ ID NO: 314474 - DNA, 163 bp, Homo sapiens; identical to SEQ ID NO: 263642
  chr11:64160546-64160709
  hypo

SEQ ID NO: 314475 - DNA, 186 bp, Homo sapiens
  chr11:64168655-64168841
  hypo
tcagagccaggtggacacaatgatgagagcgtgagggagaatttctctgtggatgtcagttatcctctttccccagccagcccagtgcttgcccattgtgtccatgttcaacgtggccatggtggcagagatggaggttatgcaggggttcagcggcgaatgtgtacttctcggcaccagggcttc

SEQ ID NO: 314476 - DNA, 107 bp, Homo sapiens; identical to SEQ ID NO: 263644
  chr11:64310457-64310564
  hypo

SEQ ID NO: 314477 - DNA, 149 bp, Homo sapiens
  chr11:64313131-64313280
  hypo
gagtgggaaggggggctggggagaacgtatgcccccaggcttctgcctctccagttgtctgcgcaaagaacaaatcctagtgcgctgtggcaggggcggcacgtctgtttgctctcacgtgccactccgttccttgctccattgcctga

SEQ ID NO: 314478 - DNA, 52 bp, Homo sapiens; identical to SEQ ID NO: 263646
  chr11:64319242-64319294
  hypo

SEQ ID NO: 314479 - DNA, 187 bp, Homo sapiens
  chr11:64323492-64323679
  hypo
gagcaagccggaggcgtgggcctcttccagaccctgcaggtgctcaccttcatcctcccctgcctcatgataccttcccagatgctcctggagaacttctcagccgccatcccaggccaccgatgctggacacacatgctggacaatggctctgcggtttccacaaacatgacccccaaggcccttc

SEQ ID NO: 314480 - DNA, 336 bp, Homo sapiens
  chr11:64323741-64324077
  hypo
ccacagtggcagctcttggaccccaatgccacggccaccagctggagcgaagctgacacggagccgtgtgtggacggctgggtctatgaccgcagcgtcttcacctccaccatcgtggccaaggtagggcctcccccagagccactcgagtcccgtcaccttggaggtcagagtcatggatcaggttggttggactccaaggtccagtcctgggagggacccgcctcctctcgagcctctcagcccctcgtcagccacacacaggggagtgggcggcagggatcagtctacagatggggccagcccaggctcctggtagtgcggggggcacctggg

SEQ ID NO: 314481 - DNA, 42 bp, Homo sapiens; identical to SEQ ID NO: 214288
  chr11:64335474-64335516
  hypo

SEQ ID NO: 314482 - DNA, 87 bp, Homo sapiens; identical to SEQ ID NO: 214289
  chr11:64347188-64347275
  hypo

SEQ ID NO: 314483 - DNA, 222 bp, Homo sapiens; identical to SEQ ID NO: 263650
  chr11:64367275-64367497
  hypo

SEQ ID NO: 314484 - DNA, 101 bp, Homo sapiens; identical to SEQ ID NO: 263651
  chr11:64367837-64367938
  hypo

SEQ ID NO: 314485 - DNA, 49 bp, Homo sapiens; identical to SEQ ID NO: 263652
  chr11:64390387-64390436
  hypo

SEQ ID NO: 314486 - DNA, 202 bp, Homo sapiens; identical to SEQ ID NO: 288163
  chr11:64410436-64410638
  hypo

SEQ ID NO: 314487 - DNA, 58 bp, Homo sapiens; identical to SEQ ID NO: 214291
  chr11:64418855-64418913
  hypo

SEQ ID NO: 314488 - DNA, 240 bp, Homo sapiens; identical to SEQ ID NO: 288165
  chr11:64481256-64481496
  hypo

SEQ ID NO: 314489 - DNA, 98 bp, Homo sapiens; identical to SEQ ID NO: 263654
  chr11:64504253-64504351
  hypo

SEQ ID NO: 314490 - DNA, 702 bp, Homo sapiens; identical to SEQ ID NO: 202589
  chr11:64512196-64512898
  hypo

SEQ ID NO: 314491 - DNA, 65 bp, Homo sapiens; identical to SEQ ID NO: 263655
  chr11:64521038-64521103
  hypo

SEQ ID NO: 314492 - DNA, 300 bp, Homo sapiens; identical to SEQ ID NO: 263656
  chr11:64599005-64599305
  hypo

SEQ ID NO: 314493 - DNA, 177 bp, Homo sapiens; identical to SEQ ID NO: 263657
  chr11:64600135-64600312
  hypo

SEQ ID NO: 314494 - DNA, 494 bp, Homo sapiens; identical to SEQ ID NO: 263658
  chr11:64602459-64602953
  hypo

SEQ ID NO: 314495 - DNA, 83 bp, Homo sapiens; identical to SEQ ID NO: 214294
  chr11:64607057-64607140
  hypo

SEQ ID NO: 314496 - DNA, 123 bp, Homo sapiens
  chr11:64609226-64609349
  hypo
gggtgagcccagcccggtgtgaacacctccccccacctaccccaggccctttgctcacctccccaaaggctcctcggccgatcaccttcaagatctcaaagtcatctctctgcagacgcagtt

SEQ ID NO: 314497 - DNA, 66 bp, Homo sapiens
  chr11:64609407-64609473
  hypo
agggagggagggctccattccccctctcaccttgggcaagccaggagctgccgctcctgtgagccc

SEQ ID NO: 314498 - DNA, 221 bp, Homo sapiens; identical to SEQ ID NO: 263661
  chr11:64620283-64620504
  hypo

SEQ ID NO: 314499 - DNA, 400 bp, Homo sapiens; identical to SEQ ID NO: 214295
  chr11:64621797-64622197
  hypo

SEQ ID NO: 314500 - DNA, 86 bp, Homo sapiens; identical to SEQ ID NO: 214296
  chr11:64624927-64625013
  hypo

SEQ ID NO: 314501 - DNA, 78 bp, Homo sapiens
  chr11:64631090-64631168
  hypo
ataaacactcctgccgcctgccccggccccaggcccaagcgtgcttggcgccatctgtgagcccaaagccacaggggc

SEQ ID NO: 314502 - DNA, 331 bp, Homo sapiens; identical to SEQ ID NO: 214297
  chr11:64635186-64635517
  hypo

SEQ ID NO: 314503 - DNA, 59 bp, Homo sapiens; identical to SEQ ID NO: 263666
  chr11:64646831-64646890
  hypo

SEQ ID NO: 314504 - DNA, 105 bp, Homo sapiens; identical to SEQ ID NO: 263667
  chr11:64648942-64649047
  hypo

SEQ ID NO: 314505 - DNA, 101 bp, Homo sapiens; identical to SEQ ID NO: 263668
  chr11:64653030-64653131
  hypo

SEQ ID NO: 314506 - DNA, 98 bp, Homo sapiens
  chr11:64667889-64667987
  hypo
gctacacgtgacatcgagaacaaggcccgttgttctatgacacacacgtgtagtaggcactcgccaccccactcaccttgctcagctggatctccatg

SEQ ID NO: 314507 - DNA, 110 bp, Homo sapiens
  chr11:64668074-64668184
  hypo
ctgggacctgagaggccagttcttgccctgggaagagggacaggggccaagctgactcagaggaaccccattccctccccgtcctcagcgggccttttagcctgggacaa

SEQ ID NO: 314508 - DNA, 72 bp, Homo sapiens; identical to SEQ ID NO: 214298
  chr11:64672165-64672237
  hypo

SEQ ID NO: 314509 - DNA, 198 bp, Homo sapiens; identical to SEQ ID NO: 224132
  chr11:64698945-64699143
  hypo

SEQ ID NO: 314510 - DNA, 197 bp, Homo sapiens; identical to SEQ ID NO: 263671
  chr11:64774015-64774212
  hypo

SEQ ID NO: 314511 - DNA, 34 bp, Homo sapiens; identical to SEQ ID NO: 214299
  chr11:64804457-64804491
  hypo

SEQ ID NO: 314512 - DNA, 93 bp, Homo sapiens; identical to SEQ ID NO: 214300
  chr11:64809906-64809999
  hypo

SEQ ID NO: 314513 - DNA, 94 bp, Homo sapiens; identical to SEQ ID NO: 263674
  chr11:64820396-64820490
  hypo

SEQ ID NO: 314514 - DNA, 156 bp, Homo sapiens; identical to SEQ ID NO: 263675
  chr11:64833875-64834031
  hypo

SEQ ID NO: 314515 - DNA, 395 bp, Homo sapiens
  chr11:64875426-64875821
  hypo
cgcgccatccaggacgactgccaggtcatcacggcccgcctggcccagcagctgcggcagcgctttaggtgtggcccctctgccctgaccccagcgctcccgccagccccgagccccatctgtgcccggctcctgggccctcctggagctgtccccctgccctgtgtgtgctttgctttcctgctcctgccccatccaccggcagccccggccctgcccttcactacctctccctcgtgcagggagggcggctcaggcgccccggagcaggcagagtgcgtggagctgctgctggccctgggcgagcctgcggaggagctgtgcgaggagttcctggcgcacgcccgcggccggctggagaaggagctgagaaacctggaggccgagctggggcc

SEQ ID NO: 314516 - DNA, 203 bp, Homo sapiens; identical to SEQ ID NO: 214302
  chr11:64876158-64876361
  hypo

SEQ ID NO: 314517 - DNA, 230 bp, Homo sapiens; identical to SEQ ID NO: 263677
  chr11:64898551-64898781
  hypo

SEQ ID NO: 314518 - DNA, 107 bp, Homo sapiens
  chr11:64950374-64950481
  hypo
tgggttacaaggacctgggtcccaattcctccaagacctatggcatcaagtggaagcgtcccacggtgagaggggccatcctgggtgggactcggctaagccagatc

SEQ ID NO: 314519 - DNA, 189 bp, Homo sapiens; identical to SEQ ID NO: 214304
  chr11:64950870-64951059
  hypo

SEQ ID NO: 314520 - DNA, 403 bp, Homo sapiens; identical to SEQ ID NO: 214305
  chr11:64951332-64951735
  hypo

SEQ ID NO: 314521 - DNA, 211 bp, Homo sapiens; identical to SEQ ID NO: 214306
  chr11:64951894-64952105
  hypo

SEQ ID NO: 314522 - DNA, 77 bp, Homo sapiens; identical to SEQ ID NO: 263681
  chr11:64955443-64955520
  hypo

SEQ ID NO: 314523 - DNA, 302 bp, Homo sapiens; identical to SEQ ID NO: 263682
  chr11:64955905-64956207
  hypo

SEQ ID NO: 314524 - DNA, 218 bp, Homo sapiens; identical to SEQ ID NO: 263683
  chr11:64971912-64972130
  hypo

SEQ ID NO: 314525 - DNA, 180 bp, Homo sapiens; identical to SEQ ID NO: 263684
  chr11:64974941-64975121
  hypo

SEQ ID NO: 314526 - DNA, 99 bp, Homo sapiens
  chr11:64975361-64975460
  hypo
gtgacagagtgaaactccatctcaaaaagaaaagaaaagaaaagtgaggctcagagaagcgaagtgacttgtagcagatatgtgacctcagccctccct

SEQ ID NO: 314527 - DNA, 329 bp, Homo sapiens
  chr11:64975532-64975861
  hypo
tctcagaagaggagattgacgagaacttcaaggccctcttcaggcagctggcaggggaggtaggttggggcatggcaggttgggaggggcctgtgaggggcagccctctcctggggcaggtgccacctcctctctctccccaggacatggagatcagcgtgaaggagttgcggacaatcctcaataggatcatcagcaaacgtgagtccccgcggggctgtcccaccaccccaccatttcttccacatcagaatccaggctcctgctcacacattgagctgaacctcatcccttggtctgcatgagtcggggaatcctccagtttttct

SEQ ID NO: 314528 - DNA, 317 bp, Homo sapiens; identical to SEQ ID NO: 214309
  chr11:64977145-64977462
  hypo

SEQ ID NO: 314529 - DNA, 73 bp, Homo sapiens; identical to SEQ ID NO: 214310
  chr11:64977534-64977607
  hypo

SEQ ID NO: 314530 - DNA, 42 bp, Homo sapiens; identical to SEQ ID NO: 263687
  chr11:65023027-65023069
  hypo

SEQ ID NO: 314531 - DNA, 195 bp, Homo sapiens; identical to SEQ ID NO: 288182
  chr11:65081963-65082158
  hypo

SEQ ID NO: 314532 - DNA, 122 bp, Homo sapiens; identical to SEQ ID NO: 263689
  chr11:65120977-65121099
  hypo

SEQ ID NO: 314533 - DNA, 471 bp, Homo sapiens; identical to SEQ ID NO: 263690
  chr11:65123943-65124414
  hypo

SEQ ID NO: 314534 - DNA, 133 bp, Homo sapiens; identical to SEQ ID NO: 263691
  chr11:65145405-65145538
  hypo

SEQ ID NO: 314535 - DNA, 91 bp, Homo sapiens; identical to SEQ ID NO: 224135
  chr11:65147933-65148024
  hypo

SEQ ID NO: 314536 - DNA, 191 bp, Homo sapiens; identical to SEQ ID NO: 263692
  chr11:65168192-65168383
  hypo

SEQ ID NO: 314537 - DNA, 98 bp, Homo sapiens; identical to SEQ ID NO: 202592
  chr11:65189906-65190004
  hypo

SEQ ID NO: 314538 - DNA, 120 bp, Homo sapiens; identical to SEQ ID NO: 263693
  chr11:65276490-65276610
  hypo

SEQ ID NO: 314539 - DNA, 168 bp, Homo sapiens; identical to SEQ ID NO: 214312
  chr11:65306213-65306381
  hypo

SEQ ID NO: 314540 - DNA, 350 bp, Homo sapiens; identical to SEQ ID NO: 214313
  chr11:65306425-65306775
  hypo

SEQ ID NO: 314541 - DNA, 410 bp, Homo sapiens; identical to SEQ ID NO: 288196
  chr11:65306805-65307215
  hypo

SEQ ID NO: 314542 - DNA, 224 bp, Homo sapiens; identical to SEQ ID NO: 214315
  chr11:65353078-65353302
  hypo

SEQ ID NO: 314543 - DNA, 385 bp, Homo sapiens; identical to SEQ ID NO: 214316
  chr11:65366939-65367324
  hypo

SEQ ID NO: 314544 - DNA, 343 bp, Homo sapiens; identical to SEQ ID NO: 263698
  chr11:65374934-65375277
  hypo

SEQ ID NO: 314545 - DNA, 146 bp, Homo sapiens; identical to SEQ ID NO: 263699
  chr11:65385897-65386043
  hypo

SEQ ID NO: 314546 - DNA, 579 bp, Homo sapiens; identical to SEQ ID NO: 214317
  chr11:65386921-65387500
  hypo

SEQ ID NO: 314547 - DNA, 223 bp, Homo sapiens; identical to SEQ ID NO: 214318
  chr11:65388104-65388327
  hypo

SEQ ID NO: 314548 - DNA, 120 bp, Homo sapiens; identical to SEQ ID NO: 263702
  chr11:65393284-65393404
  hypo

SEQ ID NO: 314549 - DNA, 903 bp, Homo sapiens; identical to SEQ ID NO: 214319
  chr11:65397157-65398060
  hypo

SEQ ID NO: 314550 - DNA, 201 bp, Homo sapiens; identical to SEQ ID NO: 263704
  chr11:65402722-65402923
  hypo

SEQ ID NO: 314551 - DNA, 46 bp, Homo sapiens
  chr11:65413816-65413862
  hypo
acacacaccctgcacgccacacaccacctacaggtgggcaccggag

SEQ ID NO: 314552 - DNA, 188 bp, Homo sapiens
  chr11:65414113-65414301
  hypo
caagacctggccaccaacgaggtgaccactacgtcgctggactcggcttcacgcttcggcctgccctccctgggtgggaggcgccgggcggcccctcggggcccaggcgccgagctgcaggcagcgggctcactggtgtggggagtgcgcgcggcgcccggggcgcgggtcgccgccggggctcaggc

SEQ ID NO: 314553 - DNA, 144 bp, Homo sapiens; identical to SEQ ID NO: 202602
  chr11:65419839-65419983
  hypo

SEQ ID NO: 314554 - DNA, 49 bp, Homo sapiens; identical to SEQ ID NO: 214321
  chr11:65425914-65425963
  hypo

SEQ ID NO: 314555 - DNA, 32 bp, Homo sapiens; identical to SEQ ID NO: 263707
  chr11:65465492-65465524
  hypo

SEQ ID NO: 314556 - DNA, 77 bp, Homo sapiens; identical to SEQ ID NO: 263708
  chr11:65476358-65476435
  hypo

SEQ ID NO: 314557 - DNA, 61 bp, Homo sapiens
  chr11:65511331-65511392
  hypo
cagcggcagcccgtcgggagctgcagctgccaagatgcaggctgcagcgtgggagtcgcag

SEQ ID NO: 314558 - DNA, 37 bp, Homo sapiens; identical to SEQ ID NO: 214322
  chr11:65524510-65524547
  hypo

SEQ ID NO: 314559 - DNA, 206 bp, Homo sapiens; identical to SEQ ID NO: 224139
  chr11:65548872-65549078
  hypo

SEQ ID NO: 314560 - DNA, 32 bp, Homo sapiens; identical to SEQ ID NO: 202604
  chr11:65553781-65553813
  hypo

SEQ ID NO: 314561 - DNA, 227 bp, Homo sapiens; identical to SEQ ID NO: 202605
  chr11:65554410-65554637
  hypo

SEQ ID NO: 314562 - DNA, 1039 bp, Homo sapiens; identical to SEQ ID NO: 288211
  chr11:65554723-65555762
  hypo

SEQ ID NO: 314563 - DNA, 108 bp, Homo sapiens; identical to SEQ ID NO: 263712
  chr11:65561324-65561432
  hypo

SEQ ID NO: 314564 - DNA, 32 bp, Homo sapiens; identical to SEQ ID NO: 263713
  chr11:65577928-65577960
  hypo

SEQ ID NO: 314565 - DNA, 91 bp, Homo sapiens; identical to SEQ ID NO: 263714
  chr11:65578020-65578111
  hypo

SEQ ID NO: 314566 - DNA, 371 bp, Homo sapiens; identical to SEQ ID NO: 202607
  chr11:65582709-65583080
  hypo

SEQ ID NO: 314567 - DNA, 226 bp, Homo sapiens
  chr11:65629224-65629450
  hypo
ccacccactgccccgaaactgcctgctgttttatcccagatttgcagcggatcatcccatcacctggcccattttacagagaaggaaactgagagacaactgagtgacttacccagggccacaaagcctgctggggacttattcaaagatgactggctggctttcatgttcagaactcctctgtacctttcaggttcctgcccagcccaaagcgggaggctctggc

SEQ ID NO: 314568 - DNA, 92 bp, Homo sapiens; identical to SEQ ID NO: 214328
  chr11:65634006-65634098
  hypo

SEQ ID NO: 314569 - DNA, 98 bp, Homo sapiens; identical to SEQ ID NO: 214329
  chr11:65665116-65665214
  hypo

SEQ ID NO: 314570 - DNA, 173 bp, Homo sapiens; identical to SEQ ID NO: 214330
  chr11:65685172-65685345
  hypo

SEQ ID NO: 314571 - DNA, 277 bp, Homo sapiens; identical to SEQ ID NO: 214331
  chr11:65698237-65698514
  hypo

SEQ ID NO: 314572 - DNA, 65 bp, Homo sapiens; identical to SEQ ID NO: 214332
  chr11:65733942-65734007
  hypo

SEQ ID NO: 314573 - DNA, 199 bp, Homo sapiens; identical to SEQ ID NO: 263723
  chr11:65740976-65741175
  hypo

SEQ ID NO: 314574 - DNA, 314 bp, Homo sapiens; identical to SEQ ID NO: 214333
  chr11:65743837-65744151
  hypo

SEQ ID NO: 314575 - DNA, 120 bp, Homo sapiens; identical to SEQ ID NO: 288219
  chr11:65746278-65746398
  hypo

SEQ ID NO: 314576 - DNA, 39 bp, Homo sapiens; identical to SEQ ID NO: 214334
  chr11:65754937-65754976
  hypo

SEQ ID NO: 314577 - DNA, 240 bp, Homo sapiens; identical to SEQ ID NO: 214335
  chr11:65761070-65761310
  hypo

SEQ ID NO: 314578 - DNA, 34 bp, Homo sapiens; identical to SEQ ID NO: 263728
  chr11:65787645-65787679
  hypo

SEQ ID NO: 314579 - DNA, 41 bp, Homo sapiens; identical to SEQ ID NO: 214336
  chr11:65810130-65810171
  hypo

SEQ ID NO: 314580 - DNA, 78 bp, Homo sapiens; identical to SEQ ID NO: 214337
  chr11:65817722-65817800
  hypo

SEQ ID NO: 314581 - DNA, 241 bp, Homo sapiens; identical to SEQ ID NO: 263731
  chr11:65935759-65936000
  hypo

SEQ ID NO: 314582 - DNA, 40 bp, Homo sapiens; identical to SEQ ID NO: 263732
  chr11:65944154-65944194
  hypo

SEQ ID NO: 314583 - DNA, 60 bp, Homo sapiens; identical to SEQ ID NO: 263733
  chr11:65996092-65996152
  hypo

SEQ ID NO: 314584 - DNA, 284 bp, Homo sapiens; identical to SEQ ID NO: 288223
  chr11:66045217-66045501
  hypo

SEQ ID NO: 314585 - DNA, 70 bp, Homo sapiens; identical to SEQ ID NO: 214338
  chr11:66047173-66047243
  hypo

SEQ ID NO: 314586 - DNA, 268 bp, Homo sapiens; identical to SEQ ID NO: 214339
  chr11:66052169-66052437
  hypo

SEQ ID NO: 314587 - DNA, 1105 bp, Homo sapiens; identical to SEQ ID NO: 288226
  chr11:66079389-66080494
  hypo

SEQ ID NO: 314588 - DNA, 199 bp, Homo sapiens; identical to SEQ ID NO: 214341
  chr11:66099978-66100177
  hypo

SEQ ID NO: 314589 - DNA, 59 bp, Homo sapiens; identical to SEQ ID NO: 263737
  chr11:66101899-66101958
  hypo

SEQ ID NO: 314590 - DNA, 590 bp, Homo sapiens; identical to SEQ ID NO: 263738
  chr11:66101988-66102578
  hypo

SEQ ID NO: 314591 - DNA, 170 bp, Homo sapiens; identical to SEQ ID NO: 263739
  chr11:66113511-66113681
  hypo

SEQ ID NO: 314592 - DNA, 63 bp, Homo sapiens; identical to SEQ ID NO: 214342
  chr11:66113950-66114013
  hypo

SEQ ID NO: 314593 - DNA, 214 bp, Homo sapiens
  chr11:66114043-66114257
  hypo
aggggtcctgccaaggtaccacgtaggcgggccgcagcaagctctcttccggcaggttgacccagcgggaatagttggtgggtgcctggcagggggtgcacaacccataatagaagggccgcacctcgccaacctggtagagctgcaccagctcgtttttgttcatgggcatgcggcgggctcttcggatttcgaaggcaggcaccaccagcgc

SEQ ID NO: 314594 - DNA, 403 bp, Homo sapiens; identical to SEQ ID NO: 288228
  chr11:66176318-66176721
  hypo

SEQ ID NO: 314595 - DNA, 163 bp, Homo sapiens; identical to SEQ ID NO: 263741
  chr11:66243063-66243226
  hypo

SEQ ID NO: 314596 - DNA, 180 bp, Homo sapiens
  chr11:66325396-66325576
  hypo
ctcggtgagctctacacacattccctaggtgaccttgaggtccgtatcccatctgtacaatgggcaaaccgtgatggagcgcacccctgcctgctccacaggacatcgccaacgcctggcgggggctggagcaggtggaaaagggctatgaggactggctgctctcggagatccggcgcc

SEQ ID NO: 314597 - DNA, 233 bp, Homo sapiens; identical to SEQ ID NO: 263743
  chr11:66373085-66373318
  hypo

SEQ ID NO: 314598 - DNA, 98 bp, Homo sapiens; identical to SEQ ID NO: 214345
  chr11:66410884-66410982
  hypo

SEQ ID NO: 314599 - DNA, 356 bp, Homo sapiens; identical to SEQ ID NO: 214346
  chr11:66411012-66411368
  hypo

SEQ ID NO: 314600 - DNA, 41 bp, Homo sapiens; identical to SEQ ID NO: 214347
  chr11:66411557-66411598
  hypo

SEQ ID NO: 314601 - DNA, 81 bp, Homo sapiens; identical to SEQ ID NO: 263745
  chr11:66413515-66413596
  hypo

SEQ ID NO: 314602 - DNA, 36 bp, Homo sapiens; identical to SEQ ID NO: 214348
  chr11:66453719-66453755
  hypo

SEQ ID NO: 314603 - DNA, 248 bp, Homo sapiens; identical to SEQ ID NO: 214349
  chr11:66454454-66454702
  hypo

SEQ ID NO: 314604 - DNA, 265 bp, Homo sapiens; identical to SEQ ID NO: 263748
  chr11:66457265-66457530
  hypo

SEQ ID NO: 314605 - DNA, 119 bp, Homo sapiens; identical to SEQ ID NO: 263749
  chr11:66461612-66461731
  hypo

SEQ ID NO: 314606 - DNA, 130 bp, Homo sapiens; identical to SEQ ID NO: 263750
  chr11:66475123-66475253
  hypo

SEQ ID NO: 314607 - DNA, 75 bp, Homo sapiens; identical to SEQ ID NO: 263751
  chr11:66475610-66475685
  hypo

SEQ ID NO: 314608 - DNA, 50 bp, Homo sapiens; identical to SEQ ID NO: 263752
  chr11:66484936-66484986
  hypo

SEQ ID NO: 314609 - DNA, 80 bp, Homo sapiens; identical to SEQ ID NO: 214350
  chr11:66510746-66510826
  hypo

SEQ ID NO: 314610 - DNA, 164 bp, Homo sapiens; identical to SEQ ID NO: 214351
  chr11:66513646-66513810
  hypo

SEQ ID NO: 314611 - DNA, 88 bp, Homo sapiens; identical to SEQ ID NO: 214352
  chr11:66557750-66557838
  hypo

SEQ ID NO: 314612 - DNA, 145 bp, Homo sapiens; identical to SEQ ID NO: 263760
  chr11:66600088-66600233
  hypo

SEQ ID NO: 314613 - DNA, 34 bp, Homo sapiens; identical to SEQ ID NO: 263761
  chr11:66602481-66602515
  hypo

SEQ ID NO: 314614 - DNA, 338 bp, Homo sapiens
  chr11:66626187-66626525
  hypo
tcctcccgagcccgggctttccccaacgggaccttagagattggggtgaccggcgctggggacgctgggggctacacctgcatcgccaccaaccctgctggtgaggccacagcccgagtagaactgcgggtgctggccttgccccatggtgggaacagcagtgccgaggggggccgccccgggccctcggacatcgccgcctccgctcgcactgctgccgagggtgaggggacgctggagtctgagccagccgtgcaggtgacggaggtgaccgccacctcagggctggtgagctggggtcccgggcggccagccgacccagtgtggatgttccaaat

SEQ ID NO: 314615 - DNA, 34 bp, Homo sapiens; identical to SEQ ID NO: 214354
  chr11:66628276-66628310
  hypo

SEQ ID NO: 314616 - DNA, 200 bp, Homo sapiens; identical to SEQ ID NO: 263764
  chr11:66629459-66629659
  hypo

SEQ ID NO: 314617 - DNA, 114 bp, Homo sapiens; identical to SEQ ID NO: 214355
  chr11:66631165-66631279
  hypo

SEQ ID NO: 314618 - DNA, 298 bp, Homo sapiens
  chr11:66633441-66633739
  hypo
cctcctgacctgggcgcccagcagtctcttcccctgggaggcgccgcccctcctctgggcactgcctgcctccgtgtactctatgtccacttcagagcccacatgcgggtcctccctaactgccgggctgtggcaacttggcactgcagccccaggcaccaggcagaacctgtgcacaggtgagctggcatctccctctgctcgagctccgcccacctcaatgcggccggtgtccggctggaagctgcgcgcggggtcctcggtggtgacccggcactggatggcacacccgttgatg

SEQ ID NO: 314619 - DNA, 199 bp, Homo sapiens
  chr11:66633833-66634032
  hypo
gggggaggggggaaaggacgggagaaagggggaaacatgaggcgggggatagacgaggggcaccgcagccagtggggcgtccacacacagtgcgactcctgcccataggctctgggccagcctgaacagccggttcctcccaaccagtggctccaccagcccctgccctgctcccgccgggagccgactaaactacaca

SEQ ID NO: 314620 - DNA, 97 bp, Homo sapiens; identical to SEQ ID NO: 263768
  chr11:66637738-66637835
  hypo

SEQ ID NO: 314621 - DNA, 40 bp, Homo sapiens; identical to SEQ ID NO: 263769
  chr11:66639553-66639593
  hypo

SEQ ID NO: 314622 - DNA, 41 bp, Homo sapiens; identical to SEQ ID NO: 214356
  chr11:66643997-66644038
  hypo

SEQ ID NO: 314623 - DNA, 100 bp, Homo sapiens; identical to SEQ ID NO: 214357
  chr11:66644472-66644572
  hypo

SEQ ID NO: 314624 - DNA, 91 bp, Homo sapiens
  chr11:66649105-66649196
  hypo
gaggagggcacaatggtgggcagtgaccccagcagagccttgctccttgccaggcaggggccactgtggctcttcacgcagactcactcag

SEQ ID NO: 314625 - DNA, 138 bp, Homo sapiens; identical to SEQ ID NO: 214358
  chr11:66652536-66652674
  hypo

SEQ ID NO: 314626 - DNA, 100 bp, Homo sapiens; identical to SEQ ID NO: 263774
  chr11:66654307-66654407
  hypo

SEQ ID NO: 314627 - DNA, 356 bp, Homo sapiens; identical to SEQ ID NO: 263775
  chr11:66655204-66655560
  hypo

SEQ ID NO: 314628 - DNA, 38 bp, Homo sapiens; identical to SEQ ID NO: 263776
  chr11:66658551-66658589
  hypo

SEQ ID NO: 314629 - DNA, 100 bp, Homo sapiens; identical to SEQ ID NO: 263777
  chr11:66662144-66662244
  hypo

SEQ ID NO: 314630 - DNA, 92 bp, Homo sapiens; identical to SEQ ID NO: 214360
  chr11:66665004-66665096
  hypo

SEQ ID NO: 314631 - DNA, 298 bp, Homo sapiens; identical to SEQ ID NO: 214361
  chr11:66676020-66676318
  hypo

SEQ ID NO: 314632 - DNA, 223 bp, Homo sapiens; identical to SEQ ID NO: 263780
  chr11:66676878-66677101
  hypo

SEQ ID NO: 314633 - DNA, 304 bp, Homo sapiens; identical to SEQ ID NO: 263781
  chr11:66677363-66677667
  hypo

SEQ ID NO: 314634 - DNA, 199 bp, Homo sapiens; identical to SEQ ID NO: 263782
  chr11:66683036-66683235
  hypo

SEQ ID NO: 314635 - DNA, 86 bp, Homo sapiens; identical to SEQ ID NO: 214362
  chr11:66683850-66683936
  hypo

SEQ ID NO: 314636 - DNA, 147 bp, Homo sapiens; identical to SEQ ID NO: 214363
  chr11:66695456-66695603
  hypo

SEQ ID NO: 314637 - DNA, 346 bp, Homo sapiens; identical to SEQ ID NO: 214364
  chr11:66701354-66701700
  hypo

SEQ ID NO: 314638 - DNA, 33 bp, Homo sapiens; identical to SEQ ID NO: 263787
  chr11:66706997-66707030
  hypo

SEQ ID NO: 314639 - DNA, 44 bp, Homo sapiens; identical to SEQ ID NO: 214365
  chr11:66710160-66710204
  hypo

SEQ ID NO: 314640 - DNA, 87 bp, Homo sapiens; identical to SEQ ID NO: 263789
  chr11:66807525-66807612
  hypo

SEQ ID NO: 314641 - DNA, 33 bp, Homo sapiens; identical to SEQ ID NO: 263790
  chr11:66867270-66867303
  hypo

SEQ ID NO: 314642 - DNA, 127 bp, Homo sapiens; identical to SEQ ID NO: 48692
  chr11:66886029-66886156
  hypo

SEQ ID NO: 314643 - DNA, 120 bp, Homo sapiens; identical to SEQ ID NO: 202625
  chr11:66897392-66897512
  hypo

SEQ ID NO: 314644 - DNA, 49 bp, Homo sapiens; identical to SEQ ID NO: 214368
  chr11:66897763-66897812
  hypo

SEQ ID NO: 314645 - DNA, 150 bp, Homo sapiens; identical to SEQ ID NO: 263793
  chr11:66974946-66975096
  hypo

SEQ ID NO: 314646 - DNA, 31 bp, Homo sapiens; identical to SEQ ID NO: 214369
  chr11:67002080-67002111
  hypo

SEQ ID NO: 314647 - DNA, 84 bp, Homo sapiens; identical to SEQ ID NO: 263795
  chr11:67021693-67021777
  hypo

SEQ ID NO: 314648 - DNA, 77 bp, Homo sapiens; identical to SEQ ID NO: 214370
  chr11:67051193-67051270
  hypo

SEQ ID NO: 314649 - DNA, 49 bp, Homo sapiens; identical to SEQ ID NO: 214371
  chr11:67059786-67059835
  hypo

SEQ ID NO: 314650 - DNA, 209 bp, Homo sapiens; identical to SEQ ID NO: 263799
  chr11:67073281-67073490
  hypo

SEQ ID NO: 314651 - DNA, 99 bp, Homo sapiens; identical to SEQ ID NO: 263800
  chr11:67076905-67077004
  hypo

SEQ ID NO: 314652 - DNA, 170 bp, Homo sapiens; identical to SEQ ID NO: 263801
  chr11:67077277-67077447
  hypo

SEQ ID NO: 314653 - DNA, 461 bp, Homo sapiens; identical to SEQ ID NO: 263802
  chr11:67077697-67078158
  hypo

SEQ ID NO: 314654 - DNA, 217 bp, Homo sapiens; identical to SEQ ID NO: 214373
  chr11:67078398-67078615
  hypo

SEQ ID NO: 314655 - DNA, 361 bp, Homo sapiens; identical to SEQ ID NO: 214374
  chr11:67078645-67079006
  hypo

SEQ ID NO: 314656 - DNA, 41 bp, Homo sapiens; identical to SEQ ID NO: 214375
  chr11:67091662-67091703
  hypo

SEQ ID NO: 314657 - DNA, 714 bp, Homo sapiens; identical to SEQ ID NO: 288251
  chr11:67141093-67141807
  hypo

SEQ ID NO: 314658 - DNA, 76 bp, Homo sapiens; identical to SEQ ID NO: 263806
  chr11:67145532-67145608
  hypo

SEQ ID NO: 314659 - DNA, 41 bp, Homo sapiens; identical to SEQ ID NO: 214377
  chr11:67150726-67150767
  hypo

SEQ ID NO: 314660 - DNA, 183 bp, Homo sapiens; identical to SEQ ID NO: 214378
  chr11:67166353-67166536
  hypo

SEQ ID NO: 314661 - DNA, 442 bp, Homo sapiens; identical to SEQ ID NO: 263809
  chr11:67186967-67187409
  hypo

SEQ ID NO: 314662 - DNA, 235 bp, Homo sapiens; identical to SEQ ID NO: 263810
  chr11:67201983-67202218
  hypo

SEQ ID NO: 314663 - DNA, 583 bp, Homo sapiens; identical to SEQ ID NO: 263811
  chr11:67203183-67203766
  hypo

SEQ ID NO: 314664 - DNA, 201 bp, Homo sapiens; identical to SEQ ID NO: 263812
  chr11:67205682-67205883
  hypo

SEQ ID NO: 314665 - DNA, 213 bp, Homo sapiens; identical to SEQ ID NO: 263813
  chr11:67206219-67206432
  hypo

SEQ ID NO: 314666 - DNA, 34 bp, Homo sapiens; identical to SEQ ID NO: 214380
  chr11:67208822-67208856
  hypo

SEQ ID NO: 314667 - DNA, 56 bp, Homo sapiens; identical to SEQ ID NO: 263815
  chr11:67209515-67209571
  hypo

SEQ ID NO: 314668 - DNA, 234 bp, Homo sapiens; identical to SEQ ID NO: 202629
  chr11:67210770-67211004
  hypo

SEQ ID NO: 314669 - DNA, 61 bp, Homo sapiens; identical to SEQ ID NO: 263817
  chr11:67221670-67221731
  hypo

SEQ ID NO: 314670 - DNA, 289 bp, Homo sapiens; identical to SEQ ID NO: 263819
  chr11:67257336-67257625
  hypo

SEQ ID NO: 314671 - DNA, 36 bp, Homo sapiens; identical to SEQ ID NO: 263820
  chr11:67259309-67259345
  hypo

SEQ ID NO: 314672 - DNA, 383 bp, Homo sapiens; identical to SEQ ID NO: 214382
  chr11:67259386-67259769
  hypo

SEQ ID NO: 314673 - DNA, 127 bp, Homo sapiens; identical to SEQ ID NO: 263822
  chr11:67260399-67260526
  hypo

SEQ ID NO: 314674 - DNA, 376 bp, Homo sapiens; identical to SEQ ID NO: 263823
  chr11:67260761-67261137
  hypo

SEQ ID NO: 314675 - DNA, 35 bp, Homo sapiens; identical to SEQ ID NO: 214383
  chr11:67291006-67291041
  hypo

SEQ ID NO: 314676 - DNA, 143 bp, Homo sapiens
  chr11:67378802-67378945
  hypo
tcaggactaggcaggtgtgccggccccagccctgaccatgcatccctttggggaccgacttggggccccagggggtgtcacgggcggctgggacaacctccttgctgtgatccctggcggctcgtctaccccactgatcccca

SEQ ID NO: 314677 - DNA, 85 bp, Homo sapiens
  chr11:67378975-67379060
  hypo
tcgatgcgctggtgcaggcacagacaggcctgggcacagctgcggtgatcgtcatggaccgctcggtaagggttcacacaccagc

SEQ ID NO: 314678 - DNA, 214 bp, Homo sapiens; identical to SEQ ID NO: 288262
  chr11:67406911-67407125
  hypo

SEQ ID NO: 314679 - DNA, 37 bp, Homo sapiens; identical to SEQ ID NO: 263828
  chr11:67425589-67425626
  hypo

SEQ ID NO: 314680 - DNA, 184 bp, Homo sapiens; identical to SEQ ID NO: 263829
  chr11:67430155-67430339
  hypo

SEQ ID NO: 314681 - DNA, 267 bp, Homo sapiens; identical to SEQ ID NO: 263830
  chr11:67432665-67432932
  hypo

SEQ ID NO: 314682 - DNA, 94 bp, Homo sapiens; identical to SEQ ID NO: 263831
  chr11:67450464-67450558
  hypo

SEQ ID NO: 314683 - DNA, 91 bp, Homo sapiens; identical to SEQ ID NO: 214385
  chr11:67462527-67462618
  hypo

SEQ ID NO: 314684 - DNA, 408 bp, Homo sapiens; identical to SEQ ID NO: 214386
  chr11:67462833-67463241
  hypo

SEQ ID NO: 314685 - DNA, 95 bp, Homo sapiens; identical to SEQ ID NO: 202634
  chr11:67777602-67777697
  hypo

SEQ ID NO: 314686 - DNA, 132 bp, Homo sapiens; identical to SEQ ID NO: 214388
  chr11:67781064-67781196
  hypo

SEQ ID NO: 314687 - DNA, 180 bp, Homo sapiens; identical to SEQ ID NO: 263835
  chr11:67785446-67785626
  hypo

SEQ ID NO: 314688 - DNA, 257 bp, Homo sapiens; identical to SEQ ID NO: 263836
  chr11:67786112-67786369
  hypo

SEQ ID NO: 314689 - DNA, 185 bp, Homo sapiens; identical to SEQ ID NO: 263837
  chr11:67786588-67786773
  hypo

SEQ ID NO: 314690 - DNA, 87 bp, Homo sapiens; identical to SEQ ID NO: 263838
  chr11:67795520-67795607
  hypo

SEQ ID NO: 314691 - DNA, 742 bp, Homo sapiens; identical to SEQ ID NO: 214389
  chr11:67808550-67809292
  hypo

SEQ ID NO: 314692 - DNA, 64 bp, Homo sapiens; identical to SEQ ID NO: 214390
  chr11:67810254-67810318
  hypo

SEQ ID NO: 314693 - DNA, 326 bp, Homo sapiens
  chr11:67811379-67811705
  hypo
tgcccccggccttccggaggcgggtgtaggaggtgggtgcccccggcctcccggaggtgggtgcaggaggtgggtgccctggcctggcctccaggaggtgggtgcaggaggtgggtgccctggcctggcctccaggaggtgggtgcaggaggtgggtgcccccggcccagccaccccacctgcctgcccagcccccgctgactgcccactctggcgcaggtcctcggggagacagagcggttcctgagccaggtgctaggccgggtgctgcagctgctgccgccagggcaggtgcaggtccacaagatgaaggccgtgtacctggc

SEQ ID NO: 314694 - DNA, 100 bp, Homo sapiens; identical to SEQ ID NO: 214392
  chr11:67815195-67815295
  hypo

SEQ ID NO: 314695 - DNA, 729 bp, Homo sapiens; identical to SEQ ID NO: 263844
  chr11:67817080-67817809
  hypo

SEQ ID NO: 314696 - DNA, 210 bp, Homo sapiens; identical to SEQ ID NO: 214394
  chr11:67850480-67850690
  hypo

SEQ ID NO: 314697 - DNA, 77 bp, Homo sapiens; identical to SEQ ID NO: 214395
  chr11:67864777-67864854
  hypo

SEQ ID NO: 314698 - DNA, 386 bp, Homo sapiens; identical to SEQ ID NO: 224154
  chr11:67889354-67889740
  hypo

SEQ ID NO: 314699 - DNA, 142 bp, Homo sapiens; identical to SEQ ID NO: 202636
  chr11:67895653-67895795
  hypo

SEQ ID NO: 314700 - DNA, 43 bp, Homo sapiens; identical to SEQ ID NO: 263848
  chr11:67916579-67916622
  hypo

SEQ ID NO: 314701 - DNA, 172 bp, Homo sapiens; identical to SEQ ID NO: 263849
  chr11:67926119-67926291
  hypo

SEQ ID NO: 314702 - DNA, 320 bp, Homo sapiens; identical to SEQ ID NO: 214397
  chr11:67931311-67931631
  hypo

SEQ ID NO: 314703 - DNA, 155 bp, Homo sapiens; identical to SEQ ID NO: 263851
  chr11:67949302-67949457
  hypo

SEQ ID NO: 314704 - DNA, 216 bp, Homo sapiens; identical to SEQ ID NO: 263852
  chr11:67970707-67970923
  hypo

SEQ ID NO: 314705 - DNA, 257 bp, Homo sapiens; identical to SEQ ID NO: 214398
  chr11:67984063-67984320
  hypo

SEQ ID NO: 314706 - DNA, 44 bp, Homo sapiens
  chr11:67984388-67984432
  hypo
cattcctgagcaccactacccccggcaccattcttgctttccac

SEQ ID NO: 314707 - DNA, 110 bp, Homo sapiens; identical to SEQ ID NO: 224156
  chr11:68080104-68080214
  hypo

SEQ ID NO: 314708 - DNA, 202 bp, Homo sapiens; identical to SEQ ID NO: 202637
  chr11:68080741-68080943
  hypo

SEQ ID NO: 314709 - DNA, 179 bp, Homo sapiens; identical to SEQ ID NO: 263854
  chr11:68119117-68119296
  hypo

SEQ ID NO: 314710 - DNA, 95 bp, Homo sapiens; identical to SEQ ID NO: 214400
  chr11:68133213-68133308
  hypo

SEQ ID NO: 314711 - DNA, 148 bp, Homo sapiens
  chr11:68133368-68133516
  hypo
atcctgttttgttttgttttatttttgccccagatattttccacttttttactctccgccttggtcctcaggcacttggtgcttcctgggactgtgttgcagtgaggcatggctcttctcctctggggcaccggctgaggatctttct

SEQ ID NO: 314712 - DNA, 144 bp, Homo sapiens
  chr11:68133546-68133690
  hypo
gggaaatcacacacgttcaggatgcagctcgccttcggggatgctcccgggcctgggatagccagtctggcctctggggctgaccctggggcctggcaagcgagggggtaacgagaggtgtcaggaaagcgccatccctgggac

SEQ ID NO: 314713 - DNA, 192 bp, Homo sapiens; identical to SEQ ID NO: 214401
  chr11:68142591-68142783
  hypo

SEQ ID NO: 314714 - DNA, 76 bp, Homo sapiens; identical to SEQ ID NO: 263858
  chr11:68153340-68153416
  hypo

SEQ ID NO: 314715 - DNA, 94 bp, Homo sapiens; identical to SEQ ID NO: 214402
  chr11:68158724-68158818
  hypo

SEQ ID NO: 314716 - DNA, 393 bp, Homo sapiens; identical to SEQ ID NO: 263860
  chr11:68161251-68161644
  hypo

SEQ ID NO: 314717 - DNA, 145 bp, Homo sapiens; identical to SEQ ID NO: 214404
  chr11:68162351-68162496
  hypo

SEQ ID NO: 314718 - DNA, 33 bp, Homo sapiens; identical to SEQ ID NO: 263862
  chr11:68165099-68165132
  hypo

SEQ ID NO: 314719 - DNA, 99 bp, Homo sapiens; identical to SEQ ID NO: 214405
  chr11:68172056-68172155
  hypo

SEQ ID NO: 314720 - DNA, 196 bp, Homo sapiens; identical to SEQ ID NO: 214406
  chr11:68176056-68176252
  hypo

SEQ ID NO: 314721 - DNA, 128 bp, Homo sapiens; identical to SEQ ID NO: 214407
  chr11:68177518-68177646
  hypo

SEQ ID NO: 314722 - DNA, 225 bp, Homo sapiens; identical to SEQ ID NO: 263866
  chr11:68178823-68179048
  hypo

SEQ ID NO: 314723 - DNA, 68 bp, Homo sapiens; identical to SEQ ID NO: 263867
  chr11:68189965-68190033
  hypo

SEQ ID NO: 314724 - DNA, 362 bp, Homo sapiens; identical to SEQ ID NO: 263868
  chr11:68190242-68190604
  hypo

SEQ ID NO: 314725 - DNA, 388 bp, Homo sapiens; identical to SEQ ID NO: 214409
  chr11:68190854-68191242
  hypo

SEQ ID NO: 314726 - DNA, 263 bp, Homo sapiens; identical to SEQ ID NO: 263870
  chr11:68191537-68191800
  hypo

SEQ ID NO: 314727 - DNA, 253 bp, Homo sapiens; identical to SEQ ID NO: 214411
  chr11:68192497-68192750
  hypo

SEQ ID NO: 314728 - DNA, 136 bp, Homo sapiens; identical to SEQ ID NO: 263872
  chr11:68192960-68193096
  hypo

SEQ ID NO: 314729 - DNA, 251 bp, Homo sapiens; identical to SEQ ID NO: 263873
  chr11:68193464-68193715
  hypo

SEQ ID NO: 314730 - DNA, 41 bp, Homo sapiens; identical to SEQ ID NO: 214413
  chr11:68196105-68196146
  hypo

SEQ ID NO: 314731 - DNA, 77 bp, Homo sapiens; identical to SEQ ID NO: 214414
  chr11:68199350-68199427
  hypo

SEQ ID NO: 314732 - DNA, 192 bp, Homo sapiens; identical to SEQ ID NO: 214415
  chr11:68201117-68201309
  hypo

SEQ ID NO: 314733 - DNA, 140 bp, Homo sapiens; identical to SEQ ID NO: 214416
  chr11:68203449-68203589
  hypo

SEQ ID NO: 314734 - DNA, 441 bp, Homo sapiens; identical to SEQ ID NO: 263878
  chr11:68204359-68204800
  hypo

SEQ ID NO: 314735 - DNA, 62 bp, Homo sapiens; identical to SEQ ID NO: 214418
  chr11:68206026-68206088
  hypo

SEQ ID NO: 314736 - DNA, 128 bp, Homo sapiens; identical to SEQ ID NO: 214419
  chr11:68207214-68207342
  hypo

SEQ ID NO: 314737 - DNA, 194 bp, Homo sapiens; identical to SEQ ID NO: 214420
  chr11:68207880-68208074
  hypo

SEQ ID NO: 314738 - DNA, 94 bp, Homo sapiens
  chr11:68210132-68210226
  hypo
gctgttctgagcatttcggaggctcccagctgccgtgtgcaccctgcctagagctctaccgtaacccatctccgggaggaggtgctattgtttt

SEQ ID NO: 314739 - DNA, 127 bp, Homo sapiens; identical to SEQ ID NO: 214421
  chr11:68216740-68216867
  hypo

SEQ ID NO: 314740 - DNA, 218 bp, Homo sapiens; identical to SEQ ID NO: 263884
  chr11:68225539-68225757
  hypo

SEQ ID NO: 314741 - DNA, 256 bp, Homo sapiens; identical to SEQ ID NO: 214422
  chr11:68226749-68227005
  hypo

SEQ ID NO: 314742 - DNA, 156 bp, Homo sapiens; identical to SEQ ID NO: 263886
  chr11:68341483-68341639
  hypo

SEQ ID NO: 314743 - DNA, 232 bp, Homo sapiens; identical to SEQ ID NO: 263887
  chr11:68383036-68383268
  hypo

SEQ ID NO: 314744 - DNA, 33 bp, Homo sapiens; identical to SEQ ID NO: 263890
  chr11:68408313-68408346
  hypo

SEQ ID NO: 314745 - DNA, 137 bp, Homo sapiens; identical to SEQ ID NO: 263892
  chr11:68442013-68442150
  hypo

SEQ ID NO: 314746 - DNA, 244 bp, Homo sapiens; identical to SEQ ID NO: 263893
  chr11:68472884-68473128
  hypo

SEQ ID NO: 314747 - DNA, 37 bp, Homo sapiens; identical to SEQ ID NO: 214423
  chr11:68505095-68505132
  hypo

SEQ ID NO: 314748 - DNA, 113 bp, Homo sapiens; identical to SEQ ID NO: 214424
  chr11:68549945-68550058
  hypo

SEQ ID NO: 314749 - DNA, 85 bp, Homo sapiens
  chr11:68564260-68564345
  hypo
tctgtggacagacccgccgccccaccgtcctcgtcagacagcagcccgggcgggtggactcaccatggcataatagttgctgttc

SEQ ID NO: 314750 - DNA, 181 bp, Homo sapiens
  chr11:68564381-68564562
  hypo
tcctcccaccagtcgctcacctagtgggcgcaaacaccagacaaacccgcaggctcagcaggggccaggcaggctccctggcagcagcccagagccgcggggaagggcaggcagtgcttttggcagacatttcggcgtctaacaggggccattccagaacagggaacgcagtcctaactag

SEQ ID NO: 314751 - DNA, 625 bp, Homo sapiens; identical to SEQ ID NO: 202638
  chr11:68606633-68607258
  hypo

SEQ ID NO: 314752 - DNA, 161 bp, Homo sapiens; identical to SEQ ID NO: 263897
  chr11:68657683-68657844
  hypo

SEQ ID NO: 314753 - DNA, 246 bp, Homo sapiens; identical to SEQ ID NO: 263898
  chr11:68664617-68664863
  hypo

SEQ ID NO: 314754 - DNA, 198 bp, Homo sapiens; identical to SEQ ID NO: 263899
  chr11:68679246-68679444
  hypo

SEQ ID NO: 314755 - DNA, 340 bp, Homo sapiens; identical to SEQ ID NO: 263900
  chr11:68682153-68682493
  hypo

SEQ ID NO: 314756 - DNA, 73 bp, Homo sapiens; identical to SEQ ID NO: 263901
  chr11:68691889-68691962
  hypo

SEQ ID NO: 314757 - DNA, 227 bp, Homo sapiens; identical to SEQ ID NO: 263902
  chr11:68700807-68701034
  hypo

SEQ ID NO: 314758 - DNA, 203 bp, Homo sapiens; identical to SEQ ID NO: 263903
  chr11:68701352-68701555
  hypo

SEQ ID NO: 314759 - DNA, 87 bp, Homo sapiens; identical to SEQ ID NO: 214427
  chr11:68727156-68727243
  hypo

SEQ ID NO: 314760 - DNA, 48 bp, Homo sapiens; identical to SEQ ID NO: 263905
  chr11:68728254-68728302
  hypo

SEQ ID NO: 314761 - DNA, 127 bp, Homo sapiens; identical to SEQ ID NO: 263906
  chr11:68772696-68772823
  hypo

SEQ ID NO: 314762 - DNA, 243 bp, Homo sapiens; identical to SEQ ID NO: 263907
  chr11:68800914-68801157
  hypo

SEQ ID NO: 314763 - DNA, 281 bp, Homo sapiens; identical to SEQ ID NO: 263908
  chr11:68822121-68822402
  hypo

SEQ ID NO: 314764 - DNA, 63 bp, Homo sapiens; identical to SEQ ID NO: 263909
  chr11:68830513-68830576
  hypo

SEQ ID NO: 314765 - DNA, 176 bp, Homo sapiens; identical to SEQ ID NO: 214428
  chr11:68838712-68838888
  hypo

SEQ ID NO: 314766 - DNA, 71 bp, Homo sapiens; identical to SEQ ID NO: 214429
  chr11:68853901-68853972
  hypo

SEQ ID NO: 314767 - DNA, 76 bp, Homo sapiens; identical to SEQ ID NO: 263912
  chr11:68856610-68856686
  hypo

SEQ ID NO: 314768 - DNA, 196 bp, Homo sapiens; identical to SEQ ID NO: 263913
  chr11:68968788-68968984
  hypo

SEQ ID NO: 314769 - DNA, 199 bp, Homo sapiens; identical to SEQ ID NO: 263914
  chr11:68970085-68970284
  hypo

SEQ ID NO: 314770 - DNA, 210 bp, Homo sapiens; identical to SEQ ID NO: 263915
  chr11:68970656-68970866
  hypo

SEQ ID NO: 314771 - DNA, 174 bp, Homo sapiens; identical to SEQ ID NO: 263916
  chr11:68972048-68972222
  hypo

SEQ ID NO: 314772 - DNA, 250 bp, Homo sapiens; identical to SEQ ID NO: 263917
  chr11:69056019-69056269
  hypo

SEQ ID NO: 314773 - DNA, 45 bp, Homo sapiens; identical to SEQ ID NO: 263918
  chr11:69192163-69192208
  hypo

SEQ ID NO: 314774 - DNA, 193 bp, Homo sapiens; identical to SEQ ID NO: 214430
  chr11:69193143-69193336
  hypo

SEQ ID NO: 314775 - DNA, 134 bp, Homo sapiens; identical to SEQ ID NO: 263921
  chr11:69205855-69205989
  hypo

SEQ ID NO: 314776 - DNA, 184 bp, Homo sapiens; identical to SEQ ID NO: 214431
  chr11:69206200-69206384
  hypo

SEQ ID NO: 314777 - DNA, 320 bp, Homo sapiens; identical to SEQ ID NO: 214432
  chr11:69206414-69206734
  hypo

SEQ ID NO: 314778 - DNA, 217 bp, Homo sapiens; identical to SEQ ID NO: 263923
  chr11:69244619-69244836
  hypo

SEQ ID NO: 314779 - DNA, 253 bp, Homo sapiens; identical to SEQ ID NO: 224159
  chr11:69331403-69331656
  hypo

SEQ ID NO: 314780 - DNA, 75 bp, Homo sapiens; identical to SEQ ID NO: 263925
  chr11:69337266-69337341
  hypo

SEQ ID NO: 314781 - DNA, 289 bp, Homo sapiens
  chr11:69339659-69339948
  hypo
ctgtgtccaaagacaaatatcgctgctgtcatggaagccccaaggagctcacggtccccttgggggcaaatggctccctcgggaaatgacagcaaaacacccaagatggagaattttcatcaccctgcgcggtgtgatgaggggctggggggaactggggctggagttgccagggggcctgaaaggagaggctgcacaggtagagaggcaccctggagggccaccgcgggacctgctccctgggcctgcccccatgtctgcctgccccgtccccacacttgccccctct

SEQ ID NO: 314782 - DNA, 206 bp, Homo sapiens
  chr11:69340015-69340221
  hypo
gctgttcctgccgcacacctgcggtggccatcctctcactcagcatgacagctgctggtccgtggtgctcaggggtggctgcgcaggctattagaatgtgtccctacatccacagtggttattatgcactgctttccgaggagccgccagacttccccataatctggcaactaaagggttggcacttggcacgggaagtggggact

SEQ ID NO: 314783 - DNA, 221 bp, Homo sapiens; identical to SEQ ID NO: 214433
  chr11:69357102-69357323
  hypo

SEQ ID NO: 314784 - DNA, 95 bp, Homo sapiens; identical to SEQ ID NO: 214434
  chr11:69367214-69367309
  hypo

SEQ ID NO: 314785 - DNA, 101 bp, Homo sapiens
  chr11:69431510-69431611
  hypo
gcatcctaagcgctcgaggtgttgatccactcgacaaactggcagagagccacttccgtgagcacctgcagggtgcacagctgagcccaaacccaggccct

SEQ ID NO: 314786 - DNA, 78 bp, Homo sapiens
  chr11:69431641-69431719
  hypo
atttacacaataaataccatacattacagagcatgctgggaaagcaatgcataccacagagcaaaagaaaatgggctg

SEQ ID NO: 314787 - DNA, 52 bp, Homo sapiens; identical to SEQ ID NO: 263930
  chr11:69458859-69458911
  hypo

SEQ ID NO: 314788 - DNA, 146 bp, Homo sapiens; identical to SEQ ID NO: 214435
  chr11:69468277-69468423
  hypo

SEQ ID NO: 314789 - DNA, 458 bp, Homo sapiens
  chr11:69468482-69468940
  hypo
atagtagtttttacagctgtgttattctttgcgtgtagctatggaagttgcataattattattattattattataacaagtgtgtcttacgtgccaccacggcgttgtacctgtaggactctcattcgggatgattggaatagcttctggaatttgttcaagttttgggtatgtttaatctgttatgtactagtgttctgtttgttattgttttgttaattacaccataatgctaatttaaagagactccaaatctcaatgaagccagctcacagtgctgtgtgccccggtcacctagcaagctgccgaaccaaaagaatttgcaccccgctgcgggcccacgtggttggggccctgccctggcagggtcatcctgtgctcggaggccatctcgggcacaggcccaccccgccccacccctccagaacacggctcacgcttacctcaaccatcctggc

SEQ ID NO: 314790 - DNA, 31 bp, Homo sapiens; identical to SEQ ID NO: 202643
  chr11:69477505-69477536
  hypo

SEQ ID NO: 314791 - DNA, 129 bp, Homo sapiens
  chr11:69481589-69481718
  hypo
tggcaggacctgtgcggcctgggagggagggcagggactcgcctgtgcattccggaggcggctgtgcctggtggcagtgaggcacagccttagggcggaagtcctagctctgctgctgggtgcccttag

SEQ ID NO: 314792 - DNA, 165 bp, Homo sapiens
  chr11:69481750-69481915
  hypo
ctctgtaaaatgagaataacacccatcttgtgggctcctgaagggattaaataacacacgggaggcacgtcccgcaccgcctggcacacaatcggcctcgacatgcggcacagcacccgtccaaacctcccatgagcctcattcggggccaaccatctctctcat

SEQ ID NO: 314793 - DNA, 89 bp, Homo sapiens; identical to SEQ ID NO: 263933
  chr11:69525488-69525577
  hypo

SEQ ID NO: 314794 - DNA, 91 bp, Homo sapiens; identical to SEQ ID NO: 263934
  chr11:69593280-69593371
  hypo

SEQ ID NO: 314795 - DNA, 308 bp, Homo sapiens; identical to SEQ ID NO: 214439
  chr11:69931075-69931383
  hypo

SEQ ID NO: 314796 - DNA, 61 bp, Homo sapiens; identical to SEQ ID NO: 214440
  chr11:69946372-69946433
  hypo

SEQ ID NO: 314797 - DNA, 506 bp, Homo sapiens; identical to SEQ ID NO: 214441
  chr11:69946945-69947451
  hypo

SEQ ID NO: 314798 - DNA, 33 bp, Homo sapiens; identical to SEQ ID NO: 263938
  chr11:69947852-69947885
  hypo

SEQ ID NO: 314799 - DNA, 188 bp, Homo sapiens; identical to SEQ ID NO: 263939
  chr11:69949119-69949307
  hypo

SEQ ID NO: 314800 - DNA, 183 bp, Homo sapiens; identical to SEQ ID NO: 263940
  chr11:69953589-69953772
  hypo

SEQ ID NO: 314801 - DNA, 454 bp, Homo sapiens; identical to SEQ ID NO: 263941
  chr11:69962346-69962800
  hypo

SEQ ID NO: 314802 - DNA, 77 bp, Homo sapiens; identical to SEQ ID NO: 263943
  chr11:69971958-69972035
  hypo

SEQ ID NO: 314803 - DNA, 121 bp, Homo sapiens; identical to SEQ ID NO: 263944
  chr11:69972731-69972852
  hypo

SEQ ID NO: 314804 - DNA, 49 bp, Homo sapiens; identical to SEQ ID NO: 263945
  chr11:69972882-69972931
  hypo

SEQ ID NO: 314805 - DNA, 127 bp, Homo sapiens; identical to SEQ ID NO: 263946
  chr11:69973147-69973274
  hypo

SEQ ID NO: 314806 - DNA, 193 bp, Homo sapiens; identical to SEQ ID NO: 263947
  chr11:69976910-69977103
  hypo

SEQ ID NO: 314807 - DNA, 362 bp, Homo sapiens; identical to SEQ ID NO: 263948
  chr11:69977943-69978305
  hypo

SEQ ID NO: 314808 - DNA, 544 bp, Homo sapiens; identical to SEQ ID NO: 263949
  chr11:69982805-69983349
  hypo

SEQ ID NO: 314809 - DNA, 163 bp, Homo sapiens; identical to SEQ ID NO: 263950
  chr11:69985998-69986161
  hypo

SEQ ID NO: 314810 - DNA, 130 bp, Homo sapiens; identical to SEQ ID NO: 263951
  chr11:70002186-70002316
  hypo

SEQ ID NO: 314811 - DNA, 224 bp, Homo sapiens; identical to SEQ ID NO: 263952
  chr11:70002957-70003181
  hypo

SEQ ID NO: 314812 - DNA, 106 bp, Homo sapiens; identical to SEQ ID NO: 263953
  chr11:70008172-70008278
  hypo

SEQ ID NO: 314813 - DNA, 219 bp, Homo sapiens; identical to SEQ ID NO: 214443
  chr11:70016944-70017163
  hypo

SEQ ID NO: 314814 - DNA, 101 bp, Homo sapiens; identical to SEQ ID NO: 214444
  chr11:70020524-70020625
  hypo

SEQ ID NO: 314815 - DNA, 484 bp, Homo sapiens; identical to SEQ ID NO: 263956
  chr11:70021160-70021644
  hypo

SEQ ID NO: 314816 - DNA, 152 bp, Homo sapiens; identical to SEQ ID NO: 214445
  chr11:70022807-70022959
  hypo

SEQ ID NO: 314817 - DNA, 267 bp, Homo sapiens; identical to SEQ ID NO: 214446
  chr11:70022989-70023256
  hypo

SEQ ID NO: 314818 - DNA, 142 bp, Homo sapiens; identical to SEQ ID NO: 214447
  chr11:70023286-70023428
  hypo

SEQ ID NO: 314819 - DNA, 37 bp, Homo sapiens; identical to SEQ ID NO: 263958
  chr11:70023977-70024014
  hypo

SEQ ID NO: 314820 - DNA, 219 bp, Homo sapiens; identical to SEQ ID NO: 263959
  chr11:70028534-70028753
  hypo

SEQ ID NO: 314821 - DNA, 338 bp, Homo sapiens; identical to SEQ ID NO: 263960
  chr11:70031509-70031847
  hypo

SEQ ID NO: 314822 - DNA, 273 bp, Homo sapiens; identical to SEQ ID NO: 263961
  chr11:70054496-70054769
  hypo

SEQ ID NO: 314823 - DNA, 182 bp, Homo sapiens; identical to SEQ ID NO: 263962
  chr11:70080115-70080297
  hypo

SEQ ID NO: 314824 - DNA, 74 bp, Homo sapiens; identical to SEQ ID NO: 263963
  chr11:70125200-70125274
  hypo

SEQ ID NO: 314825 - DNA, 31 bp, Homo sapiens; identical to SEQ ID NO: 263964
  chr11:70139604-70139635
  hypo

SEQ ID NO: 314826 - DNA, 182 bp, Homo sapiens; identical to SEQ ID NO: 263965
  chr11:70164144-70164326
  hypo

SEQ ID NO: 314827 - DNA, 95 bp, Homo sapiens; identical to SEQ ID NO: 263966
  chr11:70177350-70177445
  hypo

SEQ ID NO: 314828 - DNA, 143 bp, Homo sapiens; identical to SEQ ID NO: 263967
  chr11:70189849-70189992
  hypo

SEQ ID NO: 314829 - DNA, 95 bp, Homo sapiens; identical to SEQ ID NO: 263968
  chr11:70263136-70263231
  hypo

SEQ ID NO: 314830 - DNA, 141 bp, Homo sapiens; identical to SEQ ID NO: 214448
  chr11:70268911-70269052
  hypo

SEQ ID NO: 314831 - DNA, 77 bp, Homo sapiens; identical to SEQ ID NO: 214449
  chr11:70281167-70281244
  hypo

SEQ ID NO: 314832 - DNA, 68 bp, Homo sapiens; identical to SEQ ID NO: 214450
  chr11:70282721-70282789
  hypo

SEQ ID NO: 314833 - DNA, 194 bp, Homo sapiens
  chr11:71108172-71108366
  hypo
aacttgccggcctccgtcactgtgtgagccaggccctcatcctgaacccctctccgtgtctacgctcatcccactcttctgtgtctccagagaactttgctgcccccgccggggagtgagatgtcccctgtggagagggccgccccactccttctccagctccccaccgcctcacgggcactcgacagtctgaa

SEQ ID NO: 314834 - DNA, 153 bp, Homo sapiens
  chr11:71108396-71108549
  hypo
gcccagctgtggcctactcctgtgatccacctctccacaagccgaggaggactcaagggtccgctcagggctttttctcaaatgaggtggcagctcatgcctgcactgtgatggatagagctgccatttctgggccgccgtgtgtgcctctgc

SEQ ID NO: 314835 - DNA, 161 bp, Homo sapiens; identical to SEQ ID NO: 263973
  chr11:71135268-71135429
  hypo

SEQ ID NO: 314836 - DNA, 202 bp, Homo sapiens; identical to SEQ ID NO: 263974
  chr11:71146644-71146846
  hypo

SEQ ID NO: 314837 - DNA, 319 bp, Homo sapiens; identical to SEQ ID NO: 263975
  chr11:71169277-71169596
  hypo

SEQ ID NO: 314838 - DNA, 200 bp, Homo sapiens; identical to SEQ ID NO: 263976
  chr11:71178322-71178522
  hypo

SEQ ID NO: 314839 - DNA, 33 bp, Homo sapiens; identical to SEQ ID NO: 214451
  chr11:71184882-71184915
  hypo

SEQ ID NO: 314840 - DNA, 216 bp, Homo sapiens; identical to SEQ ID NO: 214452
  chr11:71185635-71185851
  hypo

SEQ ID NO: 314841 - DNA, 210 bp, Homo sapiens; identical to SEQ ID NO: 263979
  chr11:71188521-71188731
  hypo

SEQ ID NO: 314842 - DNA, 535 bp, Homo sapiens; identical to SEQ ID NO: 214453
  chr11:71192113-71192648
  hypo

SEQ ID NO: 314843 - DNA, 177 bp, Homo sapiens; identical to SEQ ID NO: 214454
  chr11:71192889-71193066
  hypo

SEQ ID NO: 314844 - DNA, 153 bp, Homo sapiens; identical to SEQ ID NO: 263981
  chr11:71193408-71193561
  hypo

SEQ ID NO: 314845 - DNA, 844 bp, Homo sapiens; identical to SEQ ID NO: 263982
  chr11:71229611-71230455
  hypo

SEQ ID NO: 314846 - DNA, 90 bp, Homo sapiens; identical to SEQ ID NO: 214456
  chr11:71282211-71282301
  hypo

SEQ ID NO: 314847 - DNA, 120 bp, Homo sapiens; identical to SEQ ID NO: 263984
  chr11:71296339-71296459
  hypo

SEQ ID NO: 314848 - DNA, 82 bp, Homo sapiens; identical to SEQ ID NO: 214457
  chr11:71321043-71321125
  hypo

SEQ ID NO: 314849 - DNA, 205 bp, Homo sapiens
  chr11:71507734-71507939
  hypo
ttgtcccatctcaccgacaaagacactaggacacacagaggacaagcaacccccgagctcccacagactgctgcccggccacctggctcttgtgcctccactctacacccaagccccccattgccaccagcctttgccccagctccccctgagcacagcccctcctggcagccatgtgcacagatgtacccgcagcagcctctgc

SEQ ID NO: 314850 - DNA, 36 bp, Homo sapiens; identical to SEQ ID NO: 214458
  chr11:71647445-71647481
  hypo

SEQ ID NO: 314851 - DNA, 35 bp, Homo sapiens; identical to SEQ ID NO: 263988
  chr11:71647721-71647756
  hypo

SEQ ID NO: 314852 - DNA, 31 bp, Homo sapiens; identical to SEQ ID NO: 214459
  chr11:71673295-71673326
  hypo

SEQ ID NO: 314853 - DNA, 770 bp, Homo sapiens; identical to SEQ ID NO: 214460
  chr11:71724323-71725093
  hypo

SEQ ID NO: 314854 - DNA, 752 bp, Homo sapiens; identical to SEQ ID NO: 263991
  chr11:71725580-71726332
  hypo

SEQ ID NO: 314855 - DNA, 84 bp, Homo sapiens; identical to SEQ ID NO: 263992
  chr11:71792521-71792605
  hypo

SEQ ID NO: 314856 - DNA, 44 bp, Homo sapiens; identical to SEQ ID NO: 263993
  chr11:71937179-71937223
  hypo

SEQ ID NO: 314857 - DNA, 37 bp, Homo sapiens; identical to SEQ ID NO: 263994
  chr11:71938062-71938099
  hypo

SEQ ID NO: 314858 - DNA, 54 bp, Homo sapiens; identical to SEQ ID NO: 214462
  chr11:71948504-71948558
  hypo

SEQ ID NO: 314859 - DNA, 49 bp, Homo sapiens; identical to SEQ ID NO: 214463
  chr11:72006579-72006628
  hypo

SEQ ID NO: 314860 - DNA, 41 bp, Homo sapiens; identical to SEQ ID NO: 263997
  chr11:72021664-72021705
  hypo

SEQ ID NO: 314861 - DNA, 241 bp, Homo sapiens; identical to SEQ ID NO: 288300
  chr11:72301342-72301583
  hypo

SEQ ID NO: 314862 - DNA, 581 bp, Homo sapiens; identical to SEQ ID NO: 263999
  chr11:72407946-72408527
  hypo

SEQ ID NO: 314863 - DNA, 330 bp, Homo sapiens
  chr11:72413650-72413980
  hypo
cagaaacacaaatccggggggctcagaggcgcacaaacaccagcacagctgccagccatcctgaggggcccacactgcaagtcagggaagtcatcaacagtcacagagacacagacacagaggaacatgcatacgtagtacaaatacacactgacatgcaaacccaagcacaccccagctcacacatgatttatcacaggcccttgaggagctgcgatcacggcctgagagcagcaggtaaatcaaaccccaccaggcactgcacagcctggtggacccccaccctctgccacgctcacctgtggtccggttgttccgaaggaattccat

SEQ ID NO: 314864 - DNA, 45 bp, Homo sapiens
  chr11:72414010-72414055
  hypo
agccaggggcgtgggggcctcagggtcccccgagaagcagttgat

SEQ ID NO: 314865 - DNA, 107 bp, Homo sapiens; identical to SEQ ID NO: 214465
  chr11:72437783-72437890
  hypo

SEQ ID NO: 314866 - DNA, 141 bp, Homo sapiens; identical to SEQ ID NO: 214466
  chr11:72466088-72466229
  hypo

SEQ ID NO: 314867 - DNA, 158 bp, Homo sapiens; identical to SEQ ID NO: 214467
  chr11:72475519-72475677
  hypo

SEQ ID NO: 314868 - DNA, 319 bp, Homo sapiens
  chr11:72475723-72476042
  hypo
attctaagaggcttggggagggacaggtggcggggtagggctgagtctctggagagcaccaggtgggcgggccggtaccaggaacccccagctattaggccctggctgagtgagtgtccacaccagatgttgccgtcaggtgttgcctggtaggccatcttggctgcccccggagaaactccccctggaaacaggaacccaaggggtgttgctccaccaaggagccatgctgggcttgagtacgtttaaagcctggtgacagcagggaccccgacatgcagtggtattacatttgagaaaacaggccagccaggtgcgg

SEQ ID NO: 314869 - DNA, 235 bp, Homo sapiens
  chr11:72532378-72532613
  hypo
tggtgctgggagcggagcgctggcttcccactcttcaggcgaggcagtggagcgggttgctcttgccagagaggttcctagtagggtcgcagagaaacgaagcggcacggcgaggattgggacccagggctgactccagagcccgagggccttccactgctccacaaacagcagcgcgtccctgtgcaaggtcccaaacctgtgtggggctcagcttgcttttcaggaagggggc

SEQ ID NO: 314870 - DNA, 80 bp, Homo sapiens; identical to SEQ ID NO: 264005
  chr11:72907831-72907911
  hypo

SEQ ID NO: 314871 - DNA, 38 bp, Homo sapiens; identical to SEQ ID NO: 264006
  chr11:73057918-73057956
  hypo

SEQ ID NO: 314872 - DNA, 222 bp, Homo sapiens; identical to SEQ ID NO: 264007
  chr11:73063840-73064062
  hypo

SEQ ID NO: 314873 - DNA, 60 bp, Homo sapiens
  chr11:73073669-73073729
  hypo
cccagagctggtgccctttgacagtgactctgacgatgagtcttcgcccagcccctcggg

SEQ ID NO: 314874 - DNA, 217 bp, Homo sapiens; identical to SEQ ID NO: 202656
  chr11:73087925-73088142
  hypo

SEQ ID NO: 314875 - DNA, 92 bp, Homo sapiens; identical to SEQ ID NO: 214470
  chr11:73093212-73093304
  hypo

SEQ ID NO: 314876 - DNA, 42 bp, Homo sapiens; identical to SEQ ID NO: 214471
  chr11:73464045-73464087
  hypo

SEQ ID NO: 314877 - DNA, 157 bp, Homo sapiens; identical to SEQ ID NO: 264013
  chr11:73476967-73477124
  hypo

SEQ ID NO: 314878 - DNA, 101 bp, Homo sapiens; identical to SEQ ID NO: 264014
  chr11:73491527-73491628
  hypo

SEQ ID NO: 314879 - DNA, 144 bp, Homo sapiens; identical to SEQ ID NO: 264015
  chr11:73492565-73492709
  hypo

SEQ ID NO: 314880 - DNA, 38 bp, Homo sapiens; identical to SEQ ID NO: 214472
  chr11:73643144-73643182
  hypo

SEQ ID NO: 314881 - DNA, 174 bp, Homo sapiens; identical to SEQ ID NO: 264017
  chr11:73662120-73662294
  hypo

SEQ ID NO: 314882 - DNA, 35 bp, Homo sapiens; identical to SEQ ID NO: 264018
  chr11:73662698-73662733
  hypo

SEQ ID NO: 314883 - DNA, 286 bp, Homo sapiens; identical to SEQ ID NO: 214473
  chr11:73685845-73686131
  hypo

SEQ ID NO: 314884 - DNA, 119 bp, Homo sapiens; identical to SEQ ID NO: 264021
  chr11:73687939-73688058
  hypo

SEQ ID NO: 314885 - DNA, 179 bp, Homo sapiens; identical to SEQ ID NO: 264022
  chr11:73688955-73689134
  hypo

SEQ ID NO: 314886 - DNA, 145 bp, Homo sapiens
  chr11:73883535-73883680
  hypo
ctttgaattagtgaagcattgggagttcgagaaatagtttgctggaaaggaaggagagccatgtagaagagataggttttggaattttagatcgttaaatggcttgtgccaggttaggggatacttgggccgaggagaaagaatg

SEQ ID NO: 314887 - DNA, 189 bp, Homo sapiens; identical to SEQ ID NO: 264024
  chr11:73965091-73965280
  hypo

SEQ ID NO: 314888 - DNA, 219 bp, Homo sapiens; identical to SEQ ID NO: 288318
  chr11:74022460-74022679
  hypo

SEQ ID NO: 314889 - DNA, 141 bp, Homo sapiens; identical to SEQ ID NO: 288319
  chr11:74022716-74022857
  hypo

SEQ ID NO: 314890 - DNA, 96 bp, Homo sapiens; identical to SEQ ID NO: 264025
  chr11:74100758-74100854
  hypo

SEQ ID NO: 314891 - DNA, 120 bp, Homo sapiens; identical to SEQ ID NO: 264026
  chr11:74107339-74107459
  hypo

SEQ ID NO: 314892 - DNA, 44 bp, Homo sapiens; identical to SEQ ID NO: 214476
  chr11:74168144-74168188
  hypo

SEQ ID NO: 314893 - DNA, 93 bp, Homo sapiens; identical to SEQ ID NO: 214477
  chr11:74168435-74168528
  hypo

SEQ ID NO: 314894 - DNA, 31 bp, Homo sapiens; identical to SEQ ID NO: 264029
  chr11:74246354-74246385
  hypo

SEQ ID NO: 314895 - DNA, 64 bp, Homo sapiens; identical to SEQ ID NO: 264031
  chr11:74264050-74264114
  hypo

SEQ ID NO: 314896 - DNA, 197 bp, Homo sapiens; identical to SEQ ID NO: 264032
  chr11:74424486-74424683
  hypo

SEQ ID NO: 314897 - DNA, 39 bp, Homo sapiens; identical to SEQ ID NO: 288325
  chr11:74441796-74441835
  hypo

SEQ ID NO: 314898 - DNA, 247 bp, Homo sapiens; identical to SEQ ID NO: 214478
  chr11:74994376-74994623
  hypo

SEQ ID NO: 314899 - DNA, 74 bp, Homo sapiens; identical to SEQ ID NO: 264034
  chr11:74998668-74998742
  hypo

SEQ ID NO: 314900 - DNA, 67 bp, Homo sapiens; identical to SEQ ID NO: 264035
  chr11:75001250-75001317
  hypo

SEQ ID NO: 314901 - DNA, 95 bp, Homo sapiens; identical to SEQ ID NO: 214479
  chr11:75026127-75026222
  hypo

SEQ ID NO: 314902 - DNA, 452 bp, Homo sapiens; identical to SEQ ID NO: 264037
  chr11:75035341-75035793
  hypo

SEQ ID NO: 314903 - DNA, 44 bp, Homo sapiens; identical to SEQ ID NO: 264038
  chr11:75053731-75053775
  hypo

SEQ ID NO: 314904 - DNA, 714 bp, Homo sapiens; identical to SEQ ID NO: 202664
  chr11:75062273-75062987
  hypo

SEQ ID NO: 314905 - DNA, 203 bp, Homo sapiens; identical to SEQ ID NO: 264039
  chr11:75088468-75088671
  hypo

SEQ ID NO: 314906 - DNA, 87 bp, Homo sapiens; identical to SEQ ID NO: 264040
  chr11:75101269-75101356
  hypo

SEQ ID NO: 314907 - DNA, 294 bp, Homo sapiens; identical to SEQ ID NO: 264041
  chr11:75136560-75136854
  hypo

SEQ ID NO: 314908 - DNA, 220 bp, Homo sapiens; identical to SEQ ID NO: 202665
  chr11:75140982-75141202
  hypo

SEQ ID NO: 314909 - DNA, 201 bp, Homo sapiens
  chr11:75146457-75146658
  hypo
tcccagagcactccgagttcagacacacttccaccagctctcctaggctccccagcttctgtgtcaggtacaggtgggacagacatgtcttcagctaacgcccactccgctctatgagggtcttggtgtggctgccaccccctcgggggcccacaggggtggcggtgctgttggcatatgtgtcataactgttgtctgaac

SEQ ID NO: 314910 - DNA, 386 bp, Homo sapiens; identical to SEQ ID NO: 264043
  chr11:75150986-75151372
  hypo

SEQ ID NO: 314911 - DNA, 218 bp, Homo sapiens
  chr11:75152262-75152480
  hypo
acggatgggacccccgcacaccacagcagggagaagagccacggtgcgttgactgtgtagaggttcacactcaggttccaggacgcgtagtccctgtggggcaggggagaggcaggtcagcatgcggaccctggcagctccaggcccagtgtcggggctggtaaagcacgtcctgttcacgacctcacagccatgcccggggcaaggaacattggctc

SEQ ID NO: 314912 - DNA, 368 bp, Homo sapiens
  chr11:75152536-75152904
  hypo
ctttgaaccatgtgtgcctgattcctctgtgtgcccatccctctgcccgaccgtgtgtgtgtgtgtgtgtgtgtgtgttggggggtggtggtggcaggactgggagagactcagtcccaccctctcctggaggagcccagggcagggcaggcacctgagctcctggcgggacacctgagtgtagcgcaggttcagccgctggatgtggcctctccgcaggctggcgactgcctccttggagcctgatgtctgttggaagccgggagccaccttccgcaccaggggcctctgcctgctaggcagccacatgacctgcaggcagaagagaggcagcctcagacttctcttctgcacgatgcgtaagagta

SEQ ID NO: 314913 - DNA, 544 bp, Homo sapiens; identical to SEQ ID NO: 264045
  chr11:75161622-75162166
  hypo

SEQ ID NO: 314914 - DNA, 223 bp, Homo sapiens; identical to SEQ ID NO: 264046
  chr11:75167768-75167991
  hypo

SEQ ID NO: 314915 - DNA, 127 bp, Homo sapiens; identical to SEQ ID NO: 214483
  chr11:75242019-75242146
  hypo

SEQ ID NO: 314916 - DNA, 202 bp, Homo sapiens; identical to SEQ ID NO: 264048
  chr11:75285550-75285752
  hypo

SEQ ID NO: 314917 - DNA, 120 bp, Homo sapiens; identical to SEQ ID NO: 214484
  chr11:75303123-75303243
  hypo

SEQ ID NO: 314918 - DNA, 43 bp, Homo sapiens; identical to SEQ ID NO: 214485
  chr11:75303273-75303316
  hypo

SEQ ID NO: 314919 - DNA, 141 bp, Homo sapiens; identical to SEQ ID NO: 264051
  chr11:75315461-75315602
  hypo

SEQ ID NO: 314920 - DNA, 107 bp, Homo sapiens; identical to SEQ ID NO: 202666
  chr11:75380110-75380217
  hypo

SEQ ID NO: 314921 - DNA, 92 bp, Homo sapiens; identical to SEQ ID NO: 264052
  chr11:75389093-75389185
  hypo

SEQ ID NO: 314922 - DNA, 45 bp, Homo sapiens; identical to SEQ ID NO: 264053
  chr11:75392223-75392268
  hypo

SEQ ID NO: 314923 - DNA, 40 bp, Homo sapiens; identical to SEQ ID NO: 214487
  chr11:75426561-75426601
  hypo

SEQ ID NO: 314924 - DNA, 134 bp, Homo sapiens; identical to SEQ ID NO: 224170
  chr11:75480048-75480182
  hypo

SEQ ID NO: 314925 - DNA, 180 bp, Homo sapiens; identical to SEQ ID NO: 214488
  chr11:75536035-75536215
  hypo

SEQ ID NO: 314926 - DNA, 31 bp, Homo sapiens; identical to SEQ ID NO: 264057
  chr11:75748469-75748500
  hypo

SEQ ID NO: 314927 - DNA, 36 bp, Homo sapiens; identical to SEQ ID NO: 264058
  chr11:75799383-75799419
  hypo

SEQ ID NO: 314928 - DNA, 50 bp, Homo sapiens; identical to SEQ ID NO: 214489
  chr11:75852055-75852105
  hypo

SEQ ID NO: 314929 - DNA, 139 bp, Homo sapiens; identical to SEQ ID NO: 214490
  chr11:75858240-75858379
  hypo

SEQ ID NO: 314930 - DNA, 167 bp, Homo sapiens; identical to SEQ ID NO: 214491
  chr11:75882508-75882675
  hypo

SEQ ID NO: 314931 - DNA, 228 bp, Homo sapiens; identical to SEQ ID NO: 264062
  chr11:75905704-75905932
  hypo

SEQ ID NO: 314932 - DNA, 253 bp, Homo sapiens; identical to SEQ ID NO: 224171
  chr11:75921931-75922184
  hypo

SEQ ID NO: 314933 - DNA, 86 bp, Homo sapiens; identical to SEQ ID NO: 264063
  chr11:75993075-75993161
  hypo

SEQ ID NO: 314934 - DNA, 35 bp, Homo sapiens; identical to SEQ ID NO: 214492
  chr11:76077428-76077463
  hypo

SEQ ID NO: 314935 - DNA, 55 bp, Homo sapiens; identical to SEQ ID NO: 214493
  chr11:76164362-76164417
  hypo

SEQ ID NO: 314936 - DNA, 180 bp, Homo sapiens; identical to SEQ ID NO: 264066
  chr11:76205112-76205292
  hypo

SEQ ID NO: 314937 - DNA, 191 bp, Homo sapiens; identical to SEQ ID NO: 264067
  chr11:76315100-76315291
  hypo

SEQ ID NO: 314938 - DNA, 183 bp, Homo sapiens; identical to SEQ ID NO: 214494
  chr11:76339359-76339542
  hypo

SEQ ID NO: 314939 - DNA, 149 bp, Homo sapiens
  chr11:76371478-76371627
  hypo
ccccagggctctggcgcccagttccagtgtctccagggcattgtggcttaagtcaaggagcatcaggcagggcagggagcctaagcgccgggcctcaaaggtccgcaagcagtttctgctgaggttcaggaagcacagggaggtcaggt

SEQ ID NO: 314940 - DNA, 73 bp, Homo sapiens; identical to SEQ ID NO: 214495
  chr11:76372236-76372309
  hypo

SEQ ID NO: 314941 - DNA, 513 bp, Homo sapiens; identical to SEQ ID NO: 202667
  chr11:76381508-76382021
  hypo

SEQ ID NO: 314942 - DNA, 51 bp, Homo sapiens; identical to SEQ ID NO: 202668
  chr11:76382264-76382315
  hypo

SEQ ID NO: 314943 - DNA, 436 bp, Homo sapiens; identical to SEQ ID NO: 264070
  chr11:76407635-76408071
  hypo

SEQ ID NO: 314944 - DNA, 192 bp, Homo sapiens; identical to SEQ ID NO: 214498
  chr11:76408273-76408465
  hypo

SEQ ID NO: 314945 - DNA, 39 bp, Homo sapiens; identical to SEQ ID NO: 264072
  chr11:76419081-76419120
  hypo

SEQ ID NO: 314946 - DNA, 159 bp, Homo sapiens; identical to SEQ ID NO: 264073
  chr11:76419240-76419399
  hypo

SEQ ID NO: 314947 - DNA, 89 bp, Homo sapiens; identical to SEQ ID NO: 264074
  chr11:76419671-76419760
  hypo

SEQ ID NO: 314948 - DNA, 72 bp, Homo sapiens; identical to SEQ ID NO: 264075
  chr11:76447828-76447900
  hypo

SEQ ID NO: 314949 - DNA, 55 bp, Homo sapiens; identical to SEQ ID NO: 214499
  chr11:76463185-76463240
  hypo

SEQ ID NO: 314950 - DNA, 143 bp, Homo sapiens; identical to SEQ ID NO: 264077
  chr11:76506255-76506398
  hypo

SEQ ID NO: 314951 - DNA, 104 bp, Homo sapiens; identical to SEQ ID NO: 214500
  chr11:76674834-76674938
  hypo

SEQ ID NO: 314952 - DNA, 120 bp, Homo sapiens; identical to SEQ ID NO: 214501
  chr11:76901057-76901177
  hypo

SEQ ID NO: 314953 - DNA, 166 bp, Homo sapiens; identical to SEQ ID NO: 264080
  chr11:76905510-76905676
  hypo

SEQ ID NO: 314954 - DNA, 107 bp, Homo sapiens; identical to SEQ ID NO: 264081
  chr11:76924554-76924661
  hypo

SEQ ID NO: 314955 - DNA, 35 bp, Homo sapiens; identical to SEQ ID NO: 264082
  chr11:76955354-76955389
  hypo

SEQ ID NO: 314956 - DNA, 1569 bp, Homo sapiens; identical to SEQ ID NO: 288342
  chr11:77184261-77185830
  hypo

SEQ ID NO: 314957 - DNA, 146 bp, Homo sapiens; identical to SEQ ID NO: 264083
  chr11:77383098-77383244
  hypo

SEQ ID NO: 314958 - DNA, 81 bp, Homo sapiens; identical to SEQ ID NO: 264084
  chr11:78021125-78021206
  hypo

SEQ ID NO: 314959 - DNA, 347 bp, Homo sapiens; identical to SEQ ID NO: 264085
  chr11:78380585-78380932
  hypo

SEQ ID NO: 314960 - DNA, 48 bp, Homo sapiens
  chr11:78387336-78387384
  hypo
agtggggctcagtctgcagcgccacctccatgccgttggccagcagca

SEQ ID NO: 314961 - DNA, 73 bp, Homo sapiens; identical to SEQ ID NO: 264087
  chr11:78497977-78498050
  hypo

SEQ ID NO: 314962 - DNA, 407 bp, Homo sapiens; identical to SEQ ID NO: 214505
  chr11:78534089-78534496
  hypo

SEQ ID NO: 314963 - DNA, 42 bp, Homo sapiens; identical to SEQ ID NO: 264089
  chr11:78982381-78982423
  hypo

SEQ ID NO: 314964 - DNA, 103 bp, Homo sapiens; identical to SEQ ID NO: 264090
  chr11:82843543-82843646
  hypo

SEQ ID NO: 314965 - DNA, 218 bp, Homo sapiens; identical to SEQ ID NO: 264091
  chr11:82931326-82931544
  hypo

SEQ ID NO: 314966 - DNA, 136 bp, Homo sapiens; identical to SEQ ID NO: 264092
  chr11:85247648-85247784
  hypo

SEQ ID NO: 314967 - DNA, 42 bp, Homo sapiens; identical to SEQ ID NO: 264093
  chr11:85319011-85319053
  hypo

SEQ ID NO: 314968 - DNA, 35 bp, Homo sapiens
  chr11:85564731-85564766
  hypo
gggccccaaagtgacgtcagccccatctcaaattc

SEQ ID NO: 314969 - DNA, 169 bp, Homo sapiens; identical to SEQ ID NO: 214506
  chr11:85692740-85692909
  hypo

SEQ ID NO: 314970 - DNA, 180 bp, Homo sapiens; identical to SEQ ID NO: 264096
  chr11:85749362-85749542
  hypo

SEQ ID NO: 314971 - DNA, 77 bp, Homo sapiens; identical to SEQ ID NO: 214507
  chr11:85906159-85906236
  hypo

SEQ ID NO: 314972 - DNA, 222 bp, Homo sapiens; identical to SEQ ID NO: 214508
  chr11:85906275-85906497
  hypo

SEQ ID NO: 314973 - DNA, 279 bp, Homo sapiens; identical to SEQ ID NO: 264098
  chr11:85989383-85989662
  hypo

SEQ ID NO: 314974 - DNA, 83 bp, Homo sapiens; identical to SEQ ID NO: 264099
  chr11:86267641-86267724
  hypo

SEQ ID NO: 314975 - DNA, 174 bp, Homo sapiens; identical to SEQ ID NO: 264100
  chr11:86408236-86408410
  hypo

SEQ ID NO: 314976 - DNA, 31 bp, Homo sapiens; identical to SEQ ID NO: 264101
  chr11:86464895-86464926
  hypo

SEQ ID NO: 314977 - DNA, 1141 bp, Homo sapiens; identical to SEQ ID NO: 288371
  chr11:86510900-86512041
  hypo

SEQ ID NO: 314978 - DNA, 283 bp, Homo sapiens; identical to SEQ ID NO: 224181
  chr11:86513414-86513697
  hypo

SEQ ID NO: 314979 - DNA, 649 bp, Homo sapiens; identical to SEQ ID NO: 288373
  chr11:86665886-86666535
  hypo

SEQ ID NO: 314980 - DNA, 31 bp, Homo sapiens; identical to SEQ ID NO: 214512
  chr11:87434384-87434415
  hypo

SEQ ID NO: 314981 - DNA, 91 bp, Homo sapiens; identical to SEQ ID NO: 214513
  chr11:87434775-87434866
  hypo

SEQ ID NO: 314982 - DNA, 185 bp, Homo sapiens; identical to SEQ ID NO: 214514
  chr11:91435729-91435914
  hypo

SEQ ID NO: 314983 - DNA, 481 bp, Homo sapiens; identical to SEQ ID NO: 264105
  chr11:92648642-92649123
  hypo

SEQ ID NO: 314984 - DNA, 675 bp, Homo sapiens; identical to SEQ ID NO: 288384
  chr11:92930674-92931349
  hypo

SEQ ID NO: 314985 - DNA, 101 bp, Homo sapiens; identical to SEQ ID NO: 264106
  chr11:93065699-93065800
  hypo

SEQ ID NO: 314986 - DNA, 129 bp, Homo sapiens; identical to SEQ ID NO: 264107
  chr11:93212118-93212247
  hypo

SEQ ID NO: 314987 - DNA, 106 bp, Homo sapiens; identical to SEQ ID NO: 264108
  chr11:93214579-93214685
  hypo

SEQ ID NO: 314988 - DNA, 76 bp, Homo sapiens; identical to SEQ ID NO: 214515
  chr11:93425626-93425702
  hypo

SEQ ID NO: 314989 - DNA, 173 bp, Homo sapiens; identical to SEQ ID NO: 214516
  chr11:93476508-93476681
  hypo

SEQ ID NO: 314990 - DNA, 193 bp, Homo sapiens; identical to SEQ ID NO: 214517
  chr11:93476769-93476962
  hypo

SEQ ID NO: 314991 - DNA, 103 bp, Homo sapiens
  chr11:93911548-93911651
  hypo
cctgctgctctttgcgatcctcctgtacctgcccccgctgttctggcgtttcgcagctgctcctcatatttgctcagacttgaagtttatcatggaagaactt

SEQ ID NO: 314992 - DNA, 95 bp, Homo sapiens
  chr11:93911800-93911895
  hypo
aaattctctgcccttctactgccagtctgggcccagagttctcattgctaggaggcggggcaggagtggaagcagggggacgtcatgcacctagt

SEQ ID NO: 314993 - DNA, 87 bp, Homo sapiens; identical to SEQ ID NO: 264112
  chr11:94163940-94164027
  hypo

SEQ ID NO: 314994 - DNA, 79 bp, Homo sapiens; identical to SEQ ID NO: 264114
  chr11:94390523-94390602
  hypo

SEQ ID NO: 314995 - DNA, 271 bp, Homo sapiens; identical to SEQ ID NO: 264115
  chr11:94532870-94533141
  hypo

SEQ ID NO: 314996 - DNA, 94 bp, Homo sapiens
  chr11:94895741-94895835
  hypo
aaaaaaaaataggcatcccccaactctgggccacagctggagacctaagtgctgctgcactctggccaggttggacagccgcacttctcttgaa

SEQ ID NO: 314997 - DNA, 93 bp, Homo sapiens; identical to SEQ ID NO: 264118
  chr11:94924623-94924716
  hypo

SEQ ID NO: 314998 - DNA, 34 bp, Homo sapiens; identical to SEQ ID NO: 214518
  chr11:94952098-94952132
  hypo

SEQ ID NO: 314999 - DNA, 203 bp, Homo sapiens; identical to SEQ ID NO: 264120
  chr11:95526175-95526378
  hypo

SEQ ID NO: 315000 - DNA, 113 bp, Homo sapiens; identical to SEQ ID NO: 214519
  chr11:95631021-95631134
  hypo

SEQ ID NO: 315001 - DNA, 124 bp, Homo sapiens
  chr11:95658584-95658708
  hypo
cagacagatcttcatcggaatcccggttctgtctctacacttgctctgtgctgtggttaagttgtttcacatctctaaaatgggaataaaatgggaataaaaatatctacgtaataggttgttt

SEQ ID NO: 315002 - DNA, 144 bp, Homo sapiens; identical to SEQ ID NO: 264123
  chr11:96117187-96117331
  hypo

SEQ ID NO: 315003 - DNA, 1330 bp, Homo sapiens; identical to SEQ ID NO: 202700
  chr11:96122355-96123685
  hypo

SEQ ID NO: 315004 - DNA, 51 bp, Homo sapiens; identical to SEQ ID NO: 264124
  chr11:97332188-97332239
  hypo

SEQ ID NO: 315005 - DNA, 180 bp, Homo sapiens; identical to SEQ ID NO: 214521
  chr11:97588956-97589136
  hypo

SEQ ID NO: 315006 - DNA, 37 bp, Homo sapiens; identical to SEQ ID NO: 264126
  chr11:97936947-97936984
  hypo

SEQ ID NO: 315007 - DNA, 43 bp, Homo sapiens; identical to SEQ ID NO: 214522
  chr11:102245881-102245924
  hypo

SEQ ID NO: 315008 - DNA, 77 bp, Homo sapiens; identical to SEQ ID NO: 264128
  chr11:102246147-102246224
  hypo

SEQ ID NO: 315009 - DNA, 49 bp, Homo sapiens; identical to SEQ ID NO: 264129
  chr11:103870883-103870932
  hypo

SEQ ID NO: 315010 - DNA, 705 bp, Homo sapiens; identical to SEQ ID NO: 214523
  chr11:103907385-103908090
  hypo

SEQ ID NO: 315011 - DNA, 201 bp, Homo sapiens; identical to SEQ ID NO: 214524
  chr11:105850438-105850639
  hypo

SEQ ID NO: 315012 - DNA, 226 bp, Homo sapiens; identical to SEQ ID NO: 288422
  chr11:106889091-106889317
  hypo

SEQ ID NO: 315013 - DNA, 42 bp, Homo sapiens; identical to SEQ ID NO: 264132
  chr11:107696428-107696470
  hypo

SEQ ID NO: 315014 - DNA, 87 bp, Homo sapiens; identical to SEQ ID NO: 214526
  chr11:107931201-107931288
  hypo

SEQ ID NO: 315015 - DNA, 34 bp, Homo sapiens; identical to SEQ ID NO: 214527
  chr11:108031057-108031091
  hypo

SEQ ID NO: 315016 - DNA, 199 bp, Homo sapiens; identical to SEQ ID NO: 264135
  chr11:108031526-108031725
  hypo

SEQ ID NO: 315017 - DNA, 644 bp, Homo sapiens; identical to SEQ ID NO: 288429
  chr11:108368605-108369249
  hypo

SEQ ID NO: 315018 - DNA, 61 bp, Homo sapiens
  chr11:108603172-108603233
  hypo
tttgggctactcattgtgtgcgcacacttggagtataaaatgaatgtttgcctttagactt

SEQ ID NO: 315019 - DNA, 86 bp, Homo sapiens
  chr11:108603263-108603349
  hypo
gccaggtgcaagcaaggccttctggaatgctgccttgtcacaatccttttctgtttgacgagatcgatgcagtgaaggacaacaag

SEQ ID NO: 315020 - DNA, 34 bp, Homo sapiens; identical to SEQ ID NO: 214528
  chr11:108674027-108674061
  hypo

SEQ ID NO: 315021 - DNA, 200 bp, Homo sapiens; identical to SEQ ID NO: 214529
  chr11:110144181-110144381
  hypo

SEQ ID NO: 315022 - DNA, 220 bp, Homo sapiens; identical to SEQ ID NO: 264140
  chr11:111500769-111500989
  hypo

SEQ ID NO: 315023 - DNA, 140 bp, Homo sapiens; identical to SEQ ID NO: 264141
  chr11:111558643-111558783
  hypo

SEQ ID NO: 315024 - DNA, 222 bp, Homo sapiens; identical to SEQ ID NO: 264142
  chr11:111574699-111574921
  hypo

SEQ ID NO: 315025 - DNA, 43 bp, Homo sapiens; identical to SEQ ID NO: 264143
  chr11:112066436-112066479
  hypo

SEQ ID NO: 315026 - DNA, 69 bp, Homo sapiens; identical to SEQ ID NO: 264144
  chr11:112108640-112108709
  hypo

SEQ ID NO: 315027 - DNA, 245 bp, Homo sapiens
  chr11:112370546-112370791
  hypo
cgtgcaggaagggtctcccaggtggccggagaacccacaggcgtgtacggacaaggtgccctgggtgccctggctgacccctggtcagcccggccaggggtagagaccttcccggaaggcgaagatcgcataggtaactgggaaagtgtgttttttgaggtgggggaaccccatgcagccaggtcagggctgcagggtaggccgcctgccccacaatcagagcactgcctcgttacccgctcagg

SEQ ID NO: 315028 - DNA, 116 bp, Homo sapiens; identical to SEQ ID NO: 264148
  chr11:113688515-113688631
  hypo

SEQ ID NO: 315029 - DNA, 34 bp, Homo sapiens; identical to SEQ ID NO: 214530
  chr11:113747597-113747631
  hypo

SEQ ID NO: 315030 - DNA, 99 bp, Homo sapiens
  chr11:113902194-113902293
  hypo
gctggcaattaggttcattaactatcacaataccttatttattactcatcgtgccatatggtttcccagctaaagaatggcgcccgttctcctacagac

SEQ ID NO: 315031 - DNA, 199 bp, Homo sapiens; identical to SEQ ID NO: 214531
  chr11:113921422-113921621
  hypo

SEQ ID NO: 315032 - DNA, 63 bp, Homo sapiens; identical to SEQ ID NO: 264152
  chr11:114013829-114013892
  hypo

SEQ ID NO: 315033 - DNA, 375 bp, Homo sapiens; identical to SEQ ID NO: 264153
  chr11:114069850-114070225
  hypo

SEQ ID NO: 315034 - DNA, 92 bp, Homo sapiens; identical to SEQ ID NO: 264154
  chr11:114082516-114082608
  hypo

SEQ ID NO: 315035 - DNA, 285 bp, Homo sapiens; identical to SEQ ID NO: 264155
  chr11:114103481-114103766
  hypo

SEQ ID NO: 315036 - DNA, 340 bp, Homo sapiens; identical to SEQ ID NO: 214533
  chr11:114112625-114112965
  hypo

SEQ ID NO: 315037 - DNA, 210 bp, Homo sapiens; identical to SEQ ID NO: 214534
  chr11:114113052-114113262
  hypo

SEQ ID NO: 315038 - DNA, 89 bp, Homo sapiens
  chr11:114115648-114115737
  hypo
tctcacgtggccttggctttatttatttatttataccttaatgaggatactgaatctttgattaaagtcgtaatcgttgccgattcagt

SEQ ID NO: 315039 - DNA, 65 bp, Homo sapiens; identical to SEQ ID NO: 214535
  chr11:114127910-114127975
  hypo

SEQ ID NO: 315040 - DNA, 180 bp, Homo sapiens; identical to SEQ ID NO: 264159
  chr11:114284756-114284936
  hypo

SEQ ID NO: 315041 - DNA, 79 bp, Homo sapiens; identical to SEQ ID NO: 264160
  chr11:114483428-114483507
  hypo

SEQ ID NO: 315042 - DNA, 279 bp, Homo sapiens; identical to SEQ ID NO: 288452
  chr11:115372960-115373239
  hypo

SEQ ID NO: 315043 - DNA, 238 bp, Homo sapiens; identical to SEQ ID NO: 202728
  chr11:115374753-115374991
  hypo

SEQ ID NO: 315044 - DNA, 398 bp, Homo sapiens; identical to SEQ ID NO: 202729
  chr11:115375434-115375832
  hypo

SEQ ID NO: 315045 - DNA, 87 bp, Homo sapiens; identical to SEQ ID NO: 264161
  chr11:115939372-115939459
  hypo

SEQ ID NO: 315046 - DNA, 124 bp, Homo sapiens; identical to SEQ ID NO: 264162
  chr11:116132012-116132136
  hypo

SEQ ID NO: 315047 - DNA, 31 bp, Homo sapiens; identical to SEQ ID NO: 264163
  chr11:116256383-116256414
  hypo

SEQ ID NO: 315048 - DNA, 37 bp, Homo sapiens; identical to SEQ ID NO: 264164
  chr11:116365360-116365397
  hypo

SEQ ID NO: 315049 - DNA, 288 bp, Homo sapiens; identical to SEQ ID NO: 288458
  chr11:116450735-116451023
  hypo

SEQ ID NO: 315050 - DNA, 123 bp, Homo sapiens; identical to SEQ ID NO: 288459
  chr11:116451190-116451313
  hypo

SEQ ID NO: 315051 - DNA, 170 bp, Homo sapiens; identical to SEQ ID NO: 214538
  chr11:116591713-116591883
  hypo

SEQ ID NO: 315052 - DNA, 33 bp, Homo sapiens; identical to SEQ ID NO: 264166
  chr11:116613907-116613940
  hypo

SEQ ID NO: 315053 - DNA, 36 bp, Homo sapiens; identical to SEQ ID NO: 264167
  chr11:116672910-116672946
  hypo

SEQ ID NO: 315054 - DNA, 338 bp, Homo sapiens; identical to SEQ ID NO: 264168
  chr11:116691761-116692099
  hypo

SEQ ID NO: 315055 - DNA, 155 bp, Homo sapiens; identical to SEQ ID NO: 264169
  chr11:116821480-116821635
  hypo

SEQ ID NO: 315056 - DNA, 33 bp, Homo sapiens; identical to SEQ ID NO: 214539
  chr11:116959822-116959855
  hypo

SEQ ID NO: 315057 - DNA, 35 bp, Homo sapiens; identical to SEQ ID NO: 264171
  chr11:116960726-116960761
  hypo

SEQ ID NO: 315058 - DNA, 36 bp, Homo sapiens; identical to SEQ ID NO: 214540
  chr11:117047303-117047339
  hypo

SEQ ID NO: 315059 - DNA, 255 bp, Homo sapiens; identical to SEQ ID NO: 264173
  chr11:117054572-117054827
  hypo

SEQ ID NO: 315060 - DNA, 104 bp, Homo sapiens; identical to SEQ ID NO: 214541
  chr11:117056079-117056183
  hypo

SEQ ID NO: 315061 - DNA, 492 bp, Homo sapiens; identical to SEQ ID NO: 264175
  chr11:117058317-117058809
  hypo

SEQ ID NO: 315062 - DNA, 238 bp, Homo sapiens; identical to SEQ ID NO: 264176
  chr11:117062556-117062794
  hypo

SEQ ID NO: 315063 - DNA, 100 bp, Homo sapiens
  chr11:117068432-117068532
  hypo
ctgcccacctggccccgcccaccagactgaggctcacttcacctctgacctgagcggcccccagctcaccaagccacaggcccaagcagtgctccctgat

SEQ ID NO: 315064 - DNA, 335 bp, Homo sapiens; identical to SEQ ID NO: 214542
  chr11:117073748-117074083
  hypo

SEQ ID NO: 315065 - DNA, 70 bp, Homo sapiens; identical to SEQ ID NO: 214543
  chr11:117074288-117074358
  hypo

SEQ ID NO: 315066 - DNA, 139 bp, Homo sapiens; identical to SEQ ID NO: 214544
  chr11:117075033-117075172
  hypo

SEQ ID NO: 315067 - DNA, 234 bp, Homo sapiens; identical to SEQ ID NO: 214545
  chr11:117076078-117076312
  hypo

SEQ ID NO: 315068 - DNA, 115 bp, Homo sapiens; identical to SEQ ID NO: 214546
  chr11:117097881-117097996
  hypo

SEQ ID NO: 315069 - DNA, 679 bp, Homo sapiens; identical to SEQ ID NO: 288466
  chr11:117186458-117187137
  hypo

SEQ ID NO: 315070 - DNA, 120 bp, Homo sapiens; identical to SEQ ID NO: 214548
  chr11:117188182-117188302
  hypo

SEQ ID NO: 315071 - DNA, 76 bp, Homo sapiens; identical to SEQ ID NO: 214549
  chr11:117188542-117188618
  hypo

SEQ ID NO: 315072 - DNA, 150 bp, Homo sapiens; identical to SEQ ID NO: 214550
  chr11:117267876-117268026
  hypo

SEQ ID NO: 315073 - DNA, 231 bp, Homo sapiens; identical to SEQ ID NO: 214551
  chr11:117335664-117335895
  hypo

SEQ ID NO: 315074 - DNA, 266 bp, Homo sapiens; identical to SEQ ID NO: 264187
  chr11:117347130-117347396
  hypo

SEQ ID NO: 315075 - DNA, 250 bp, Homo sapiens; identical to SEQ ID NO: 224203
  chr11:117352704-117352954
  hypo

SEQ ID NO: 315076 - DNA, 93 bp, Homo sapiens
  chr11:117376345-117376438
  hypo
tgatacggatgggcatgtcccccgaggacaccacacagggaatgtagagcagctggccgatggaggcgggtgggaattcgaagggctggatca

SEQ ID NO: 315077 - DNA, 198 bp, Homo sapiens; identical to SEQ ID NO: 214552
  chr11:117380436-117380634
  hypo

SEQ ID NO: 315078 - DNA, 381 bp, Homo sapiens; identical to SEQ ID NO: 214553
  chr11:117389166-117389547
  hypo

SEQ ID NO: 315079 - DNA, 180 bp, Homo sapiens; identical to SEQ ID NO: 264191
  chr11:117391899-117392079
  hypo

SEQ ID NO: 315080 - DNA, 114 bp, Homo sapiens; identical to SEQ ID NO: 264192
  chr11:117403090-117403204
  hypo

SEQ ID NO: 315081 - DNA, 206 bp, Homo sapiens; identical to SEQ ID NO: 264193
  chr11:117488134-117488340
  hypo

SEQ ID NO: 315082 - DNA, 82 bp, Homo sapiens; identical to SEQ ID NO: 264194
  chr11:117497923-117498005
  hypo

SEQ ID NO: 315083 - DNA, 243 bp, Homo sapiens; identical to SEQ ID NO: 264195
  chr11:117498035-117498278
  hypo

SEQ ID NO: 315084 - DNA, 264 bp, Homo sapiens; identical to SEQ ID NO: 288469
  chr11:117666746-117667010
  hypo

SEQ ID NO: 315085 - DNA, 276 bp, Homo sapiens; identical to SEQ ID NO: 224206
  chr11:117856650-117856926
  hypo

SEQ ID NO: 315086 - DNA, 100 bp, Homo sapiens; identical to SEQ ID NO: 264196
  chr11:117949567-117949667
  hypo

SEQ ID NO: 315087 - DNA, 125 bp, Homo sapiens; identical to SEQ ID NO: 214554
  chr11:117957555-117957680
  hypo

SEQ ID NO: 315088 - DNA, 32 bp, Homo sapiens; identical to SEQ ID NO: 214555
  chr11:117977482-117977514
  hypo

SEQ ID NO: 315089 - DNA, 39 bp, Homo sapiens; identical to SEQ ID NO: 214556
  chr11:117994509-117994548
  hypo

SEQ ID NO: 315090 - DNA, 87 bp, Homo sapiens; identical to SEQ ID NO: 264200
  chr11:118088742-118088829
  hypo

SEQ ID NO: 315091 - DNA, 200 bp, Homo sapiens; identical to SEQ ID NO: 264201
  chr11:118133141-118133341
  hypo

SEQ ID NO: 315092 - DNA, 162 bp, Homo sapiens; identical to SEQ ID NO: 288478
  chr11:118662851-118663013
  hypo

SEQ ID NO: 315093 - DNA, 44 bp, Homo sapiens; identical to SEQ ID NO: 264202
  chr11:118772066-118772110
  hypo

SEQ ID NO: 315094 - DNA, 511 bp, Homo sapiens; identical to SEQ ID NO: 264203
  chr11:118773643-118774154
  hypo

SEQ ID NO: 315095 - DNA, 85 bp, Homo sapiens; identical to SEQ ID NO: 264204
  chr11:118780943-118781028
  hypo

SEQ ID NO: 315096 - DNA, 156 bp, Homo sapiens; identical to SEQ ID NO: 288488
  chr11:119039957-119040113
  hypo

SEQ ID NO: 315097 - DNA, 31 bp, Homo sapiens; identical to SEQ ID NO: 264205
  chr11:119040421-119040452
  hypo

SEQ ID NO: 315098 - DNA, 261 bp, Homo sapiens; identical to SEQ ID NO: 214557
  chr11:119044183-119044444
  hypo

SEQ ID NO: 315099 - DNA, 54 bp, Homo sapiens; identical to SEQ ID NO: 264207
  chr11:119052936-119052990
  hypo

SEQ ID NO: 315100 - DNA, 236 bp, Homo sapiens; identical to SEQ ID NO: 202736
  chr11:119103176-119103412
  hypo

SEQ ID NO: 315101 - DNA, 83 bp, Homo sapiens; identical to SEQ ID NO: 202737
  chr11:119142431-119142514
  hypo

SEQ ID NO: 315102 - DNA, 106 bp, Homo sapiens; identical to SEQ ID NO: 202738
  chr11:119144575-119144681
  hypo

SEQ ID NO: 315103 - DNA, 130 bp, Homo sapiens; identical to SEQ ID NO: 202739
  chr11:119145547-119145677
  hypo

SEQ ID NO: 315104 - DNA, 142 bp, Homo sapiens; identical to SEQ ID NO: 202740
  chr11:119146702-119146844
  hypo

SEQ ID NO: 315105 - DNA, 102 bp, Homo sapiens; identical to SEQ ID NO: 202741
  chr11:119148462-119148564
  hypo

SEQ ID NO: 315106 - DNA, 291 bp, Homo sapiens; identical to SEQ ID NO: 202742
  chr11:119148945-119149236
  hypo

SEQ ID NO: 315107 - DNA, 158 bp, Homo sapiens; identical to SEQ ID NO: 202743
  chr11:119149265-119149423
  hypo

SEQ ID NO: 315108 - DNA, 492 bp, Homo sapiens; identical to SEQ ID NO: 202744
  chr11:119155748-119156240
  hypo

SEQ ID NO: 315109 - DNA, 126 bp, Homo sapiens; identical to SEQ ID NO: 202745
  chr11:119167631-119167757
  hypo

SEQ ID NO: 315110 - DNA, 86 bp, Homo sapiens; identical to SEQ ID NO: 202746
  chr11:119168098-119168184
  hypo

SEQ ID NO: 315111 - DNA, 175 bp, Homo sapiens; identical to SEQ ID NO: 202747
  chr11:119169061-119169236
  hypo

SEQ ID NO: 315112 - DNA, 100 bp, Homo sapiens; identical to SEQ ID NO: 202748
  chr11:119170361-119170461
  hypo

SEQ ID NO: 315113 - DNA, 308 bp, Homo sapiens; identical to SEQ ID NO: 264208
  chr11:119243048-119243356
  hypo

SEQ ID NO: 315114 - DNA, 190 bp, Homo sapiens; identical to SEQ ID NO: 264209
  chr11:119244100-119244290
  hypo

SEQ ID NO: 315115 - DNA, 298 bp, Homo sapiens; identical to SEQ ID NO: 214572
  chr11:119290804-119291102
  hypo

SEQ ID NO: 315116 - DNA, 55 bp, Homo sapiens; identical to SEQ ID NO: 264211
  chr11:119352936-119352991
  hypo

SEQ ID NO: 315117 - DNA, 90 bp, Homo sapiens; identical to SEQ ID NO: 214573
  chr11:119405812-119405902
  hypo

SEQ ID NO: 315118 - DNA, 85 bp, Homo sapiens; identical to SEQ ID NO: 214574
  chr11:119493220-119493305
  hypo

SEQ ID NO: 315119 - DNA, 67 bp, Homo sapiens; identical to SEQ ID NO: 214575
  chr11:119493693-119493760
  hypo

SEQ ID NO: 315120 - DNA, 225 bp, Homo sapiens; identical to SEQ ID NO: 214576
  chr11:119505167-119505392
  hypo

SEQ ID NO: 315121 - DNA, 277 bp, Homo sapiens; identical to SEQ ID NO: 264216
  chr11:119506102-119506379
  hypo

SEQ ID NO: 315122 - DNA, 68 bp, Homo sapiens; identical to SEQ ID NO: 264217
  chr11:119506662-119506730
  hypo

SEQ ID NO: 315123 - DNA, 155 bp, Homo sapiens; identical to SEQ ID NO: 264218
  chr11:119506967-119507122
  hypo

SEQ ID NO: 315124 - DNA, 217 bp, Homo sapiens
  chr11:119523963-119524180
  hypo
cttacacaggatcccggcaagtaaaaatgatcacggttgagacctatcctctcgcttcctatgtcaggtggctcccggggcatttctgtggattaaactgtagaaggcactggaagcctttgctccggggtgaatgtggcctcacattcctgcagctggcctcagtgtcccctgcaggagggtggcccggcgcggggatcccaacccagccctgccc

SEQ ID NO: 315125 - DNA, 39 bp, Homo sapiens; identical to SEQ ID NO: 214578
  chr11:119524226-119524265
  hypo

SEQ ID NO: 315126 - DNA, 149 bp, Homo sapiens; identical to SEQ ID NO: 264220
  chr11:119531882-119532031
  hypo

SEQ ID NO: 315127 - DNA, 122 bp, Homo sapiens; identical to SEQ ID NO: 214579
  chr11:119532474-119532596
  hypo

SEQ ID NO: 315128 - DNA, 784 bp, Homo sapiens; identical to SEQ ID NO: 214580
  chr11:119535381-119536165
  hypo

SEQ ID NO: 315129 - DNA, 186 bp, Homo sapiens; identical to SEQ ID NO: 264223
  chr11:119536817-119537003
  hypo

SEQ ID NO: 315130 - DNA, 159 bp, Homo sapiens; identical to SEQ ID NO: 264224
  chr11:119540985-119541144
  hypo

SEQ ID NO: 315131 - DNA, 99 bp, Homo sapiens; identical to SEQ ID NO: 214581
  chr11:119541630-119541729
  hypo

SEQ ID NO: 315132 - DNA, 637 bp, Homo sapiens; identical to SEQ ID NO: 264226
  chr11:119548209-119548846
  hypo

SEQ ID NO: 315133 - DNA, 383 bp, Homo sapiens; identical to SEQ ID NO: 214583
  chr11:119549111-119549494
  hypo

SEQ ID NO: 315134 - DNA, 161 bp, Homo sapiens; identical to SEQ ID NO: 264228
  chr11:119549862-119550023
  hypo

SEQ ID NO: 315135 - DNA, 314 bp, Homo sapiens; identical to SEQ ID NO: 264229
  chr11:119574541-119574855
  hypo

SEQ ID NO: 315136 - DNA, 73 bp, Homo sapiens; identical to SEQ ID NO: 214585
  chr11:119576250-119576323
  hypo

SEQ ID NO: 315137 - DNA, 500 bp, Homo sapiens; identical to SEQ ID NO: 214586
  chr11:119579305-119579805
  hypo

SEQ ID NO: 315138 - DNA, 312 bp, Homo sapiens; identical to SEQ ID NO: 202752
  chr11:119587838-119588150
  hypo

SEQ ID NO: 315139 - DNA, 158 bp, Homo sapiens; identical to SEQ ID NO: 214588
  chr11:119588398-119588556
  hypo

SEQ ID NO: 315140 - DNA, 135 bp, Homo sapiens; identical to SEQ ID NO: 264234
  chr11:119589825-119589960
  hypo

SEQ ID NO: 315141 - DNA, 147 bp, Homo sapiens; identical to SEQ ID NO: 214589
  chr11:119590581-119590728
  hypo

SEQ ID NO: 315142 - DNA, 269 bp, Homo sapiens; identical to SEQ ID NO: 202753
  chr11:119598243-119598512
  hypo

SEQ ID NO: 315143 - DNA, 314 bp, Homo sapiens; identical to SEQ ID NO: 8414
  chr11:119599011-119599325
  hypo

SEQ ID NO: 315144 - DNA, 57 bp, Homo sapiens; identical to SEQ ID NO: 202755
  chr11:119600032-119600089
  hypo

SEQ ID NO: 315145 - DNA, 40 bp, Homo sapiens; identical to SEQ ID NO: 264236
  chr11:119602212-119602252
  hypo

SEQ ID NO: 315146 - DNA, 102 bp, Homo sapiens; identical to SEQ ID NO: 214593
  chr11:119606539-119606641
  hypo

SEQ ID NO: 315147 - DNA, 32 bp, Homo sapiens; identical to SEQ ID NO: 264238
  chr11:119681395-119681427
  hypo

SEQ ID NO: 315148 - DNA, 130 bp, Homo sapiens; identical to SEQ ID NO: 264239
  chr11:119757773-119757903
  hypo

SEQ ID NO: 315149 - DNA, 326 bp, Homo sapiens; identical to SEQ ID NO: 214594
  chr11:119970226-119970552
  hypo

SEQ ID NO: 315150 - DNA, 120 bp, Homo sapiens; identical to SEQ ID NO: 264241
  chr11:119993681-119993801
  hypo

SEQ ID NO: 315151 - DNA, 331 bp, Homo sapiens; identical to SEQ ID NO: 214595
  chr11:119994862-119995193
  hypo

SEQ ID NO: 315152 - DNA, 67 bp, Homo sapiens; identical to SEQ ID NO: 214596
  chr11:120008004-120008071
  hypo

SEQ ID NO: 315153 - DNA, 77 bp, Homo sapiens; identical to SEQ ID NO: 264244
  chr11:120041663-120041740
  hypo

SEQ ID NO: 315154 - DNA, 153 bp, Homo sapiens; identical to SEQ ID NO: 264245
  chr11:120043749-120043902
  hypo

SEQ ID NO: 315155 - DNA, 225 bp, Homo sapiens; identical to SEQ ID NO: 288517
  chr11:120110624-120110849
  hypo

SEQ ID NO: 315156 - DNA, 169 bp, Homo sapiens; identical to SEQ ID NO: 288518
  chr11:120110967-120111136
  hypo

SEQ ID NO: 315157 - DNA, 629 bp, Homo sapiens; identical to SEQ ID NO: 288519
  chr11:120195891-120196520
  hypo

SEQ ID NO: 315158 - DNA, 142 bp, Homo sapiens; identical to SEQ ID NO: 202758
  chr11:120206447-120206589
  hypo

SEQ ID NO: 315159 - DNA, 274 bp, Homo sapiens; identical to SEQ ID NO: 202759
  chr11:120207766-120208040
  hypo

SEQ ID NO: 315160 - DNA, 40 bp, Homo sapiens; identical to SEQ ID NO: 264246
  chr11:120221759-120221799
  hypo

SEQ ID NO: 315161 - DNA, 180 bp, Homo sapiens; identical to SEQ ID NO: 264247
  chr11:120338503-120338683
  hypo

SEQ ID NO: 315162 - DNA, 67 bp, Homo sapiens; identical to SEQ ID NO: 214600
  chr11:120367536-120367603
  hypo

SEQ ID NO: 315163 - DNA, 65 bp, Homo sapiens; identical to SEQ ID NO: 214601
  chr11:120367696-120367761
  hypo

SEQ ID NO: 315164 - DNA, 271 bp, Homo sapiens; identical to SEQ ID NO: 288522
  chr11:120382097-120382368
  hypo

SEQ ID NO: 315165 - DNA, 206 bp, Homo sapiens; identical to SEQ ID NO: 288523
  chr11:120382448-120382654
  hypo

SEQ ID NO: 315166 - DNA, 72 bp, Homo sapiens; identical to SEQ ID NO: 264250
  chr11:120446084-120446156
  hypo

SEQ ID NO: 315167 - DNA, 112 bp, Homo sapiens; identical to SEQ ID NO: 264251
  chr11:120772901-120773013
  hypo

SEQ ID NO: 315168 - DNA, 32 bp, Homo sapiens; identical to SEQ ID NO: 264252
  chr11:120908934-120908966
  hypo

SEQ ID NO: 315169 - DNA, 35 bp, Homo sapiens; identical to SEQ ID NO: 214602
  chr11:120950504-120950539
  hypo

SEQ ID NO: 315170 - DNA, 161 bp, Homo sapiens; identical to SEQ ID NO: 214603
  chr11:120998441-120998602
  hypo

SEQ ID NO: 315171 - DNA, 224 bp, Homo sapiens; identical to SEQ ID NO: 214604
  chr11:120998833-120999057
  hypo

SEQ ID NO: 315172 - DNA, 348 bp, Homo sapiens
  chr11:121000556-121000904
  hypo
ttctgtctccccaacggcaagtgcacggacaacctggcagtgttcctggaaagctggacaactttcgaggagatctgcaatggagagtgtggggacctgctgaaggcctgcaacaatgactcggagctgctcaagttttatcgaagccgctccaggtgcggcatcatcaacgacccctccaacagctccttcctggagtgccatggggtggtgaacgtcactgcctattaccgcacctgccttttccgcctgtgccagagtgggggcaatgagtcagagctctgtgactctgtggcccggtatgcaagcgcctgcaagaatgcggacgtggaggtggggccctggcgg

SEQ ID NO: 315173 - DNA, 165 bp, Homo sapiens; identical to SEQ ID NO: 214606
  chr11:121023446-121023611
  hypo

SEQ ID NO: 315174 - DNA, 105 bp, Homo sapiens; identical to SEQ ID NO: 224232
  chr11:121323530-121323635
  hypo

SEQ ID NO: 315175 - DNA, 35 bp, Homo sapiens; identical to SEQ ID NO: 264257
  chr11:121323736-121323771
  hypo

SEQ ID NO: 315176 - DNA, 216 bp, Homo sapiens; identical to SEQ ID NO: 264258
  chr11:121348737-121348953
  hypo

SEQ ID NO: 315177 - DNA, 360 bp, Homo sapiens; identical to SEQ ID NO: 264259
  chr11:121349214-121349574
  hypo

SEQ ID NO: 315178 - DNA, 103 bp, Homo sapiens; identical to SEQ ID NO: 264260
  chr11:121516994-121517097
  hypo

SEQ ID NO: 315179 - DNA, 240 bp, Homo sapiens; identical to SEQ ID NO: 214607
  chr11:121665534-121665774
  hypo

SEQ ID NO: 315180 - DNA, 147 bp, Homo sapiens; identical to SEQ ID NO: 264262
  chr11:122621690-122621837
  hypo

SEQ ID NO: 315181 - DNA, 260 bp, Homo sapiens; identical to SEQ ID NO: 264263
  chr11:122628720-122628980
  hypo

SEQ ID NO: 315182 - DNA, 104 bp, Homo sapiens; identical to SEQ ID NO: 214609
  chr11:122632802-122632906
  hypo

SEQ ID NO: 315183 - DNA, 120 bp, Homo sapiens; identical to SEQ ID NO: 264265
  chr11:122945970-122946090
  hypo

SEQ ID NO: 315184 - DNA, 39 bp, Homo sapiens; identical to SEQ ID NO: 264266
  chr11:123027337-123027376
  hypo

SEQ ID NO: 315185 - DNA, 44 bp, Homo sapiens; identical to SEQ ID NO: 264267
  chr11:123614727-123614771
  hypo

SEQ ID NO: 315186 - DNA, 180 bp, Homo sapiens; identical to SEQ ID NO: 214610
  chr11:124071495-124071675
  hypo

SEQ ID NO: 315187 - DNA, 99 bp, Homo sapiens; identical to SEQ ID NO: 214611
  chr11:124387388-124387487
  hypo

SEQ ID NO: 315188 - DNA, 69 bp, Homo sapiens; identical to SEQ ID NO: 214612
  chr11:124638960-124639029
  hypo

SEQ ID NO: 315189 - DNA, 85 bp, Homo sapiens; identical to SEQ ID NO: 214613
  chr11:124639059-124639144
  hypo

SEQ ID NO: 315190 - DNA, 47 bp, Homo sapiens; identical to SEQ ID NO: 288552
  chr11:124709070-124709117
  hypo

SEQ ID NO: 315191 - DNA, 249 bp, Homo sapiens; identical to SEQ ID NO: 202775
  chr11:124709233-124709482
  hypo

SEQ ID NO: 315192 - DNA, 210 bp, Homo sapiens; identical to SEQ ID NO: 202776
  chr11:124709856-124710066
  hypo

SEQ ID NO: 315193 - DNA, 48 bp, Homo sapiens; identical to SEQ ID NO: 288555
  chr11:124736457-124736505
  hypo

SEQ ID NO: 315194 - DNA, 141 bp, Homo sapiens; identical to SEQ ID NO: 264271
  chr11:124792306-124792447
  hypo

SEQ ID NO: 315195 - DNA, 309 bp, Homo sapiens; identical to SEQ ID NO: 214617
  chr11:124794645-124794954
  hypo

SEQ ID NO: 315196 - DNA, 324 bp, Homo sapiens; identical to SEQ ID NO: 264273
  chr11:124948906-124949230
  hypo

SEQ ID NO: 315197 - DNA, 163 bp, Homo sapiens; identical to SEQ ID NO: 264274
  chr11:125211589-125211752
  hypo

SEQ ID NO: 315198 - DNA, 81 bp, Homo sapiens; identical to SEQ ID NO: 264275
  chr11:125758706-125758787
  hypo

SEQ ID NO: 315199 - DNA, 70 bp, Homo sapiens; identical to SEQ ID NO: 264276
  chr11:125791137-125791207
  hypo

SEQ ID NO: 315200 - DNA, 429 bp, Homo sapiens; identical to SEQ ID NO: 264277
  chr11:125817624-125818053
  hypo

SEQ ID NO: 315201 - DNA, 178 bp, Homo sapiens; identical to SEQ ID NO: 264278
  chr11:125824157-125824335
  hypo

SEQ ID NO: 315202 - DNA, 108 bp, Homo sapiens; identical to SEQ ID NO: 264279
  chr11:125827969-125828077
  hypo

SEQ ID NO: 315203 - DNA, 31 bp, Homo sapiens; identical to SEQ ID NO: 214619
  chr11:125836034-125836065
  hypo

SEQ ID NO: 315204 - DNA, 178 bp, Homo sapiens; identical to SEQ ID NO: 214620
  chr11:125902449-125902627
  hypo

SEQ ID NO: 315205 - DNA, 56 bp, Homo sapiens; identical to SEQ ID NO: 202779
  chr11:125932494-125932550
  hypo

SEQ ID NO: 315206 - DNA, 436 bp, Homo sapiens; identical to SEQ ID NO: 8456
  chr11:125932556-125932992
  hypo

SEQ ID NO: 315207 - DNA, 127 bp, Homo sapiens; identical to SEQ ID NO: 202781
  chr11:125933201-125933328
  hypo

SEQ ID NO: 315208 - DNA, 40 bp, Homo sapiens; identical to SEQ ID NO: 214624
  chr11:125945776-125945816
  hypo

SEQ ID NO: 315209 - DNA, 156 bp, Homo sapiens; identical to SEQ ID NO: 264283
  chr11:125954978-125955134
  hypo

SEQ ID NO: 315210 - DNA, 197 bp, Homo sapiens; identical to SEQ ID NO: 214625
  chr11:125971129-125971326
  hypo

SEQ ID NO: 315211 - DNA, 124 bp, Homo sapiens; identical to SEQ ID NO: 214626
  chr11:125988689-125988813
  hypo

SEQ ID NO: 315212 - DNA, 182 bp, Homo sapiens; identical to SEQ ID NO: 83335
  chr11:126030295-126030477
  hypo

SEQ ID NO: 315213 - DNA, 466 bp, Homo sapiens; identical to SEQ ID NO: 264287
  chr11:126055110-126055576
  hypo

SEQ ID NO: 315214 - DNA, 691 bp, Homo sapiens; identical to SEQ ID NO: 288570
  chr11:126225361-126226052
  hypo

SEQ ID NO: 315215 - DNA, 62 bp, Homo sapiens
  chr11:126272980-126273042
  hypo
gtagcagccagccccggaagccctggaatgcctggggccactgagcaatcctcaccctcagc

SEQ ID NO: 315216 - DNA, 126 bp, Homo sapiens
  chr11:126273273-126273399
  hypo
cctggaaggcagccctggaggatacctgtgtatctgtctttcacaaaaggtgaaatgagctctttgtagtgtttcccgcccaggctgcattttagaatcacagaggaggtacggcgctgatttgtt

SEQ ID NO: 315217 - DNA, 125 bp, Homo sapiens; identical to SEQ ID NO: 264291
  chr11:126278421-126278546
  hypo

SEQ ID NO: 315218 - DNA, 100 bp, Homo sapiens; identical to SEQ ID NO: 264292
  chr11:126578518-126578618
  hypo

SEQ ID NO: 315219 - DNA, 206 bp, Homo sapiens; identical to SEQ ID NO: 214629
  chr11:126619095-126619301
  hypo

SEQ ID NO: 315220 - DNA, 32 bp, Homo sapiens; identical to SEQ ID NO: 264294
  chr11:127323962-127323994
  hypo

SEQ ID NO: 315221 - DNA, 100 bp, Homo sapiens; identical to SEQ ID NO: 264295
  chr11:128290555-128290655
  hypo

SEQ ID NO: 315222 - DNA, 273 bp, Homo sapiens; identical to SEQ ID NO: 264296
  chr11:128350030-128350303
  hypo

SEQ ID NO: 315223 - DNA, 138 bp, Homo sapiens; identical to SEQ ID NO: 288572
  chr11:128391755-128391893
  hypo

SEQ ID NO: 315224 - DNA, 637 bp, Homo sapiens; identical to SEQ ID NO: 202784
  chr11:128392116-128392753
  hypo

SEQ ID NO: 315225 - DNA, 242 bp, Homo sapiens
  chr11:128634629-128634871
  hypo
ccgcacgcagggcttgcgctggctggaggaggcacggtgcttgggagctgcaagaatggagggaggactggcaggcgagcgggcgaggtatggctttccttctttctctccctgagcagtgggaggagggccagctgggcaagtgtggggaaccaggatggtgccagcccttctccctaaggacacccgcctgcaggtcctagtgcagaagcctgggaccgaggacagggccattttccaga

SEQ ID NO: 315226 - DNA, 81 bp, Homo sapiens
  chr11:128634905-128634986
  hypo
atcacctgtccagctggagagcaggtgtgtgcacagggccgggggagggagagaggaggagggaagcggaactgggagaac

SEQ ID NO: 315227 - DNA, 160 bp, Homo sapiens; identical to SEQ ID NO: 214632
  chr11:128737284-128737444
  hypo

SEQ ID NO: 315228 - DNA, 788 bp, Homo sapiens; identical to SEQ ID NO: 264300
  chr11:128812234-128813022
  hypo

SEQ ID NO: 315229 - DNA, 541 bp, Homo sapiens; identical to SEQ ID NO: 202786
  chr11:129148499-129149040
  hypo

SEQ ID NO: 315230 - DNA, 835 bp, Homo sapiens; identical to SEQ ID NO: 49138
  chr11:129149096-129149931
  hypo

SEQ ID NO: 315231 - DNA, 79 bp, Homo sapiens; identical to SEQ ID NO: 214635
  chr11:129207798-129207877
  hypo

SEQ ID NO: 315232 - DNA, 159 bp, Homo sapiens; identical to SEQ ID NO: 264302
  chr11:129315219-129315378
  hypo

SEQ ID NO: 315233 - DNA, 184 bp, Homo sapiens; identical to SEQ ID NO: 264303
  chr11:129575147-129575331
  hypo

SEQ ID NO: 315234 - DNA, 94 bp, Homo sapiens; identical to SEQ ID NO: 264304
  chr11:129686910-129687004
  hypo

SEQ ID NO: 315235 - DNA, 145 bp, Homo sapiens
  chr11:129732146-129732291
  hypo
ctctccccactgccaacctcatcccgtgccagtctacttgcccatcacaagctcaacctgggaggcccattcacctctgctctctgcaatgcaggcctcccacctcctaagactggatcgcccccaggctcgccaggatacatca

SEQ ID NO: 315236 - DNA, 299 bp, Homo sapiens; identical to SEQ ID NO: 264306
  chr11:129742115-129742414
  hypo

SEQ ID NO: 315237 - DNA, 216 bp, Homo sapiens; identical to SEQ ID NO: 202789
  chr11:129765560-129765776
  hypo

SEQ ID NO: 315238 - DNA, 288 bp, Homo sapiens; identical to SEQ ID NO: 214637
  chr11:129775501-129775789
  hypo

SEQ ID NO: 315239 - DNA, 125 bp, Homo sapiens; identical to SEQ ID NO: 214638
  chr11:129785494-129785619
  hypo

SEQ ID NO: 315240 - DNA, 73 bp, Homo sapiens; identical to SEQ ID NO: 214639
  chr11:129802032-129802105
  hypo

SEQ ID NO: 315241 - DNA, 147 bp, Homo sapiens; identical to SEQ ID NO: 214640
  chr11:129803839-129803986
  hypo

SEQ ID NO: 315242 - DNA, 270 bp, Homo sapiens; identical to SEQ ID NO: 264311
  chr11:129816769-129817039
  hypo

SEQ ID NO: 315243 - DNA, 98 bp, Homo sapiens; identical to SEQ ID NO: 214641
  chr11:129859713-129859811
  hypo

SEQ ID NO: 315244 - DNA, 41 bp, Homo sapiens; identical to SEQ ID NO: 264313
  chr11:129897979-129898020
  hypo

SEQ ID NO: 315245 - DNA, 190 bp, Homo sapiens; identical to SEQ ID NO: 214642
  chr11:129902831-129903021
  hypo

SEQ ID NO: 315246 - DNA, 238 bp, Homo sapiens; identical to SEQ ID NO: 224248
  chr11:129939594-129939832
  hypo

SEQ ID NO: 315247 - DNA, 36 bp, Homo sapiens; identical to SEQ ID NO: 264315
  chr11:129968002-129968038
  hypo

SEQ ID NO: 315248 - DNA, 36 bp, Homo sapiens; identical to SEQ ID NO: 264316
  chr11:129968278-129968314
  hypo

SEQ ID NO: 315249 - DNA, 201 bp, Homo sapiens
  chr11:129993351-129993552
  hypo
ctggcctgagctggagctttcggccaccgggcctccaggctccgtccagtctcaggcctcccccagcccatcccccagctcgccagcctgtagcattttgaagcatttgacgtcactgcctctgtcctgctgacactctgaccattttcacacagctgtctgctcccaggaggcgatgacggggccctgccgggccgtgat

SEQ ID NO: 315250 - DNA, 197 bp, Homo sapiens; identical to SEQ ID NO: 214644
  chr11:129993759-129993956
  hypo

SEQ ID NO: 315251 - DNA, 80 bp, Homo sapiens; identical to SEQ ID NO: 264318
  chr11:130013341-130013421
  hypo

SEQ ID NO: 315252 - DNA, 95 bp, Homo sapiens; identical to SEQ ID NO: 214645
  chr11:130059523-130059618
  hypo

SEQ ID NO: 315253 - DNA, 67 bp, Homo sapiens; identical to SEQ ID NO: 214646
  chr11:130059738-130059805
  hypo

SEQ ID NO: 315254 - DNA, 467 bp, Homo sapiens
  chr11:130060407-130060874
  hypo
ggcttccctgacagcccctaccccgctcatgcccgctgccagtgggccctgcggggggacgccgactcagtgctgagcctcaccttccgcagctttgaccttgcgtcctgcgacgagcgcggcagcgacctggtgacggtgtacaacaccctgagccccatggagccccacgccctggtgcagtgagtaccccggggggcgggtagggctgtgggagcttggcggctgccctgtagggggccagcttcttcaacgattgggatacagtttatgactcttggccgcaggccactgctaaacatccaggcagcaggaggcacgtgtggtgtgatcctcagctgcagctccaggggagtctgggaggtgatttttctcagccttggcaaagcagaggaaggctctatagtccccagataccaaatccagcctgtgcggcctgtgccctgaaccgccggagagaaggcact

SEQ ID NO: 315255 - DNA, 269 bp, Homo sapiens; identical to SEQ ID NO: 170301
  chr11:130067921-130068190
  hypo

SEQ ID NO: 315256 - DNA, 84 bp, Homo sapiens; identical to SEQ ID NO: 264323
  chr11:130074709-130074793
  hypo

SEQ ID NO: 315257 - DNA, 42 bp, Homo sapiens; identical to SEQ ID NO: 264324
  chr11:130075918-130075960
  hypo

SEQ ID NO: 315258 - DNA, 149 bp, Homo sapiens; identical to SEQ ID NO: 214649
  chr11:130079179-130079328
  hypo

SEQ ID NO: 315259 - DNA, 451 bp, Homo sapiens; identical to SEQ ID NO: 214650
  chr11:130079388-130079839
  hypo

SEQ ID NO: 315260 - DNA, 53 bp, Homo sapiens; identical to SEQ ID NO: 224249
  chr11:130083121-130083174
  hypo

SEQ ID NO: 315261 - DNA, 57 bp, Homo sapiens
  chr11:130089773-130089830
  hypo
atctagagggtactcactggcgtctgtttgccaggccttgttctaggaaccaggagt

SEQ ID NO: 315262 - DNA, 133 bp, Homo sapiens
  chr11:130089881-130090014
  hypo
ggaagggacgcgcatggcaagctcctgcctcgcatccccacgcaccgagagccctcctgcctgcacgtctaccacaggcggaaggagggaaccttccagaggcagagggtacgggctgagtggtttgtaaaca

SEQ ID NO: 315263 - DNA, 173 bp, Homo sapiens; identical to SEQ ID NO: 264327
  chr11:130250620-130250793
  hypo

SEQ ID NO: 315264 - DNA, 44 bp, Homo sapiens; identical to SEQ ID NO: 214651
  chr11:130264261-130264305
  hypo

SEQ ID NO: 315265 - DNA, 359 bp, Homo sapiens; identical to SEQ ID NO: 288593
  chr11:130319158-130319517
  hypo

SEQ ID NO: 315266 - DNA, 124 bp, Homo sapiens; identical to SEQ ID NO: 202793
  chr11:130319633-130319757
  hypo

SEQ ID NO: 315267 - DNA, 81 bp, Homo sapiens; identical to SEQ ID NO: 214654
  chr11:130356098-130356179
  hypo

SEQ ID NO: 315268 - DNA, 143 bp, Homo sapiens; identical to SEQ ID NO: 214655
  chr11:130781407-130781550
  hypo

SEQ ID NO: 315269 - DNA, 81 bp, Homo sapiens
  chr11:130785377-130785458
  hypo
catgactgtccatcacgctcatccttctccgaagctcctggaccaaccctttcatggctgcctccatttcttcctcaaagg

SEQ ID NO: 315270 - DNA, 200 bp, Homo sapiens; identical to SEQ ID NO: 214656
  chr11:131648918-131649118
  hypo

SEQ ID NO: 315271 - DNA, 130 bp, Homo sapiens; identical to SEQ ID NO: 264333
  chr11:131707599-131707729
  hypo

SEQ ID NO: 315272 - DNA, 157 bp, Homo sapiens; identical to SEQ ID NO: 288602
  chr11:132864209-132864366
  hypo

SEQ ID NO: 315273 - DNA, 212 bp, Homo sapiens; identical to SEQ ID NO: 264334
  chr11:133076714-133076926
  hypo

SEQ ID NO: 315274 - DNA, 68 bp, Homo sapiens; identical to SEQ ID NO: 264335
  chr11:133233052-133233120
  hypo

SEQ ID NO: 315275 - DNA, 191 bp, Homo sapiens; identical to SEQ ID NO: 214657
  chr11:133703493-133703684
  hypo

SEQ ID NO: 315276 - DNA, 153 bp, Homo sapiens
  chr11:133703714-133703867
  hypo
gacagagccccaccccacctcgcagtggacaccccaggacagtggcttggtcttcacaacactgggtgcggttcatggagcagcacctcgcattgctccctgcagtgacccacgcaggaggccgcctgccctggtggacgtgggcacaccctc

SEQ ID NO: 315277 - DNA, 33 bp, Homo sapiens; identical to SEQ ID NO: 264337
  chr11:133704391-133704424
  hypo

SEQ ID NO: 315278 - DNA, 922 bp, Homo sapiens; identical to SEQ ID NO: 264338
  chr11:133734501-133735423
  hypo

SEQ ID NO: 315279 - DNA, 79 bp, Homo sapiens; identical to SEQ ID NO: 264339
  chr11:133771363-133771442
  hypo

SEQ ID NO: 315280 - DNA, 34 bp, Homo sapiens; identical to SEQ ID NO: 264340
  chr11:133776833-133776867
  hypo

SEQ ID NO: 315281 - DNA, 113 bp, Homo sapiens; identical to SEQ ID NO: 214659
  chr11:133777670-133777783
  hypo

SEQ ID NO: 315282 - DNA, 294 bp, Homo sapiens; identical to SEQ ID NO: 214660
  chr11:133777845-133778139
  hypo

SEQ ID NO: 315283 - DNA, 35 bp, Homo sapiens; identical to SEQ ID NO: 214661
  chr11:133790244-133790279
  hypo

SEQ ID NO: 315284 - DNA, 919 bp, Homo sapiens; identical to SEQ ID NO: 214662
  chr11:133790369-133791288
  hypo

SEQ ID NO: 315285 - DNA, 54 bp, Homo sapiens; identical to SEQ ID NO: 264343
  chr11:133795668-133795722
  hypo

SEQ ID NO: 315286 - DNA, 183 bp, Homo sapiens; identical to SEQ ID NO: 214663
  chr11:133799603-133799786
  hypo

SEQ ID NO: 315287 - DNA, 259 bp, Homo sapiens; identical to SEQ ID NO: 264345
  chr11:133800161-133800420
  hypo

SEQ ID NO: 315288 - DNA, 100 bp, Homo sapiens; identical to SEQ ID NO: 214665
  chr11:133804995-133805095
  hypo

SEQ ID NO: 315289 - DNA, 379 bp, Homo sapiens; identical to SEQ ID NO: 264347
  chr11:133805532-133805911
  hypo

SEQ ID NO: 315290 - DNA, 246 bp, Homo sapiens; identical to SEQ ID NO: 264348
  chr11:133915023-133915269
  hypo

SEQ ID NO: 315291 - DNA, 36 bp, Homo sapiens; identical to SEQ ID NO: 202801
  chr11:133938736-133938772
  hypo

SEQ ID NO: 315292 - DNA, 175 bp, Homo sapiens; identical to SEQ ID NO: 202802
  chr11:133939437-133939612
  hypo

SEQ ID NO: 315293 - DNA, 166 bp, Homo sapiens; identical to SEQ ID NO: 264349
  chr11:134011307-134011473
  hypo

SEQ ID NO: 315294 - DNA, 187 bp, Homo sapiens; identical to SEQ ID NO: 214669
  chr11:134015727-134015914
  hypo

SEQ ID NO: 315295 - DNA, 138 bp, Homo sapiens; identical to SEQ ID NO: 214670
  chr11:134023320-134023458
  hypo

SEQ ID NO: 315296 - DNA, 52 bp, Homo sapiens; identical to SEQ ID NO: 264352
  chr11:134027875-134027927
  hypo

SEQ ID NO: 315297 - DNA, 35 bp, Homo sapiens; identical to SEQ ID NO: 214671
  chr11:134071993-134072028
  hypo

SEQ ID NO: 315298 - DNA, 94 bp, Homo sapiens; identical to SEQ ID NO: 264354
  chr11:134075571-134075665
  hypo

SEQ ID NO: 315299 - DNA, 97 bp, Homo sapiens; identical to SEQ ID NO: 214672
  chr11:134083475-134083572
  hypo

SEQ ID NO: 315300 - DNA, 178 bp, Homo sapiens; identical to SEQ ID NO: 214673
  chr11:134088871-134089049
  hypo

SEQ ID NO: 315301 - DNA, 37 bp, Homo sapiens; identical to SEQ ID NO: 264357
  chr11:134152957-134152994
  hypo

SEQ ID NO: 315302 - DNA, 36 bp, Homo sapiens; identical to SEQ ID NO: 264358
  chr11:134153234-134153270
  hypo

SEQ ID NO: 315303 - DNA, 62 bp, Homo sapiens; identical to SEQ ID NO: 264359
  chr11:134182296-134182358
  hypo

SEQ ID NO: 315304 - DNA, 386 bp, Homo sapiens; identical to SEQ ID NO: 214674
  chr11:134212673-134213059
  hypo

SEQ ID NO: 315305 - DNA, 32 bp, Homo sapiens; identical to SEQ ID NO: 264361
  chr11:134222550-134222582
  hypo

SEQ ID NO: 315306 - DNA, 32 bp, Homo sapiens; identical to SEQ ID NO: 264362
  chr11:134222822-134222854
  hypo

SEQ ID NO: 315307 - DNA, 168 bp, Homo sapiens; identical to SEQ ID NO: 264363
  chr11:134227491-134227659
  hypo

SEQ ID NO: 315308 - DNA, 386 bp, Homo sapiens; identical to SEQ ID NO: 214675
  chr11:134228005-134228391
  hypo

SEQ ID NO: 315309 - DNA, 233 bp, Homo sapiens; identical to SEQ ID NO: 264365
  chr11:134232150-134232383
  hypo

SEQ ID NO: 315310 - DNA, 420 bp, Homo sapiens; identical to SEQ ID NO: 214676
  chr11:134252615-134253035
  hypo

SEQ ID NO: 315311 - DNA, 70 bp, Homo sapiens; identical to SEQ ID NO: 288617
  chr11:134281810-134281880
  hypo

SEQ ID NO: 315312 - DNA, 514 bp, Homo sapiens; identical to SEQ ID NO: 288619
  chr11:134282336-134282850
  hypo

SEQ ID NO: 315313 - DNA, 216 bp, Homo sapiens; identical to SEQ ID NO: 264367
  chr11:134317568-134317784
  hypo

SEQ ID NO: 315314 - DNA, 57 bp, Homo sapiens; identical to SEQ ID NO: 264368
  chr11:134356383-134356440
  hypo

SEQ ID NO: 315315 - DNA, 196 bp, Homo sapiens; identical to SEQ ID NO: 264369
  chr11:134378732-134378928
  hypo

SEQ ID NO: 315316 - DNA, 329 bp, Homo sapiens; identical to SEQ ID NO: 264370
  chr11:134401569-134401898
  hypo

SEQ ID NO: 315317 - DNA, 257 bp, Homo sapiens
  chr11:134458220-134458477
  hypo
gagtgctgcatctgcgatgtgaacctgtgctggattccctgctgagagctgcacctgtgatgtgaacctgtgctggattccgtgccgagagctgcacctgcgatgtgaacctgtgctggattccctgctgagagctgcacctgcgatgtgaacctgtgctggattccctgccacgtgctgcacctgcgatgtgaacctctgctggattccctgccgagtgctgcacctgcgatgtgaacctgtgctggattccctgc

SEQ ID NO: 315318 - DNA, 344 bp, Homo sapiens; identical to SEQ ID NO: 264372
  chr11:134526969-134527313
  hypo

SEQ ID NO: 315319 - DNA, 33 bp, Homo sapiens; identical to SEQ ID NO: 264373
  chr11:134534372-134534405
  hypo

SEQ ID NO: 315320 - DNA, 234 bp, Homo sapiens; identical to SEQ ID NO: 264374
  chr11:134571549-134571783
  hypo

SEQ ID NO: 315321 - DNA, 197 bp, Homo sapiens; identical to SEQ ID NO: 214678
  chr11:134608740-134608937
  hypo

SEQ ID NO: 315322 - DNA, 32 bp, Homo sapiens; identical to SEQ ID NO: 264376
  chr11:134831337-134831369
  hypo

SEQ ID NO: 315323 - DNA, 185 bp, Homo sapiens; identical to SEQ ID NO: 264377
  chr11:134852669-134852854
  hypo

SEQ ID NO: 315324 - DNA, 185 bp, Homo sapiens; identical to SEQ ID NO: 214679
  chr12:287240-287425
  hypo

SEQ ID NO: 315325 - DNA, 40 bp, Homo sapiens; identical to SEQ ID NO: 264379
  chr12:287644-287684
  hypo

SEQ ID NO: 315326 - DNA, 95 bp, Homo sapiens; identical to SEQ ID NO: 264380
  chr12:318480-318575
  hypo

SEQ ID NO: 315327 - DNA, 169 bp, Homo sapiens; identical to SEQ ID NO: 264381
  chr12:334115-334284
  hypo

SEQ ID NO: 315328 - DNA, 137 bp, Homo sapiens; identical to SEQ ID NO: 264382
  chr12:363089-363226
  hypo

SEQ ID NO: 315329 - DNA, 271 bp, Homo sapiens; identical to SEQ ID NO: 214680
  chr12:417387-417658
  hypo

SEQ ID NO: 315330 - DNA, 148 bp, Homo sapiens; identical to SEQ ID NO: 264384
  chr12:563165-563313
  hypo

SEQ ID NO: 315331 - DNA, 305 bp, Homo sapiens; identical to SEQ ID NO: 288621
  chr12:569665-569970
  hypo

SEQ ID NO: 315332 - DNA, 187 bp, Homo sapiens; identical to SEQ ID NO: 214681
  chr12:646784-646971
  hypo

SEQ ID NO: 315333 - DNA, 108 bp, Homo sapiens; identical to SEQ ID NO: 214682
  chr12:658733-658841
  hypo

SEQ ID NO: 315334 - DNA, 95 bp, Homo sapiens
  chr12:665735-665830
  hypo
tgaacgtggaaaagcgtcaggaccagctacgtgggggtcgctacctcctggagcttgaactgttggaacaaggccagcgcgtggtgcggctctcg

SEQ ID NO: 315335 - DNA, 123 bp, Homo sapiens
  chr12:665901-666024
  hypo
gcaaggcctggtctgggacccacacaaccgtaggagacaggtcctgaatacccgggcccaagagcccaagctgtgctggcctcagggtttctcctggagtcaccgagccgtggtccacttcgt

SEQ ID NO: 315336 - DNA, 217 bp, Homo sapiens; identical to SEQ ID NO: 264388
  chr12:666656-666873
  hypo

SEQ ID NO: 315337 - DNA, 91 bp, Homo sapiens; identical to SEQ ID NO: 214683
  chr12:667201-667292
  hypo

SEQ ID NO: 315338 - DNA, 148 bp, Homo sapiens; identical to SEQ ID NO: 214684
  chr12:670522-670670
  hypo

SEQ ID NO: 315339 - DNA, 799 bp, Homo sapiens; identical to SEQ ID NO: 264391
  chr12:674438-675237
  hypo

SEQ ID NO: 315340 - DNA, 209 bp, Homo sapiens; identical to SEQ ID NO: 202807
  chr12:694940-695149
  hypo

SEQ ID NO: 315341 - DNA, 153 bp, Homo sapiens; identical to SEQ ID NO: 288623
  chr12:708874-709027
  hypo

SEQ ID NO: 315342 - DNA, 196 bp, Homo sapiens; identical to SEQ ID NO: 288624
  chr12:709062-709258
  hypo

SEQ ID NO: 315343 - DNA, 197 bp, Homo sapiens; identical to SEQ ID NO: 264393
  chr12:718161-718358
  hypo

SEQ ID NO: 315344 - DNA, 71 bp, Homo sapiens; identical to SEQ ID NO: 264394
  chr12:724161-724232
  hypo

SEQ ID NO: 315345 - DNA, 38 bp, Homo sapiens; identical to SEQ ID NO: 214686
  chr12:750707-750745
  hypo

SEQ ID NO: 315346 - DNA, 157 bp, Homo sapiens; identical to SEQ ID NO: 264396
  chr12:751045-751202
  hypo

SEQ ID NO: 315347 - DNA, 39 bp, Homo sapiens; identical to SEQ ID NO: 264397
  chr12:885896-885935
  hypo

SEQ ID NO: 315348 - DNA, 206 bp, Homo sapiens; identical to SEQ ID NO: 214688
  chr12:934133-934339
  hypo

SEQ ID NO: 315349 - DNA, 237 bp, Homo sapiens; identical to SEQ ID NO: 214689
  chr12:939093-939330
  hypo

SEQ ID NO: 315350 - DNA, 236 bp, Homo sapiens; identical to SEQ ID NO: 264400
  chr12:974283-974519
  hypo

SEQ ID NO: 315351 - DNA, 69 bp, Homo sapiens; identical to SEQ ID NO: 264401
  chr12:1005679-1005748
  hypo

SEQ ID NO: 315352 - DNA, 319 bp, Homo sapiens; identical to SEQ ID NO: 264402
  chr12:1026088-1026407
  hypo

SEQ ID NO: 315353 - DNA, 84 bp, Homo sapiens; identical to SEQ ID NO: 264405
  chr12:1353962-1354046
  hypo

SEQ ID NO: 315354 - DNA, 99 bp, Homo sapiens; identical to SEQ ID NO: 214691
  chr12:1411786-1411885
  hypo

SEQ ID NO: 315355 - DNA, 69 bp, Homo sapiens; identical to SEQ ID NO: 264407
  chr12:1476691-1476760
  hypo

SEQ ID NO: 315356 - DNA, 175 bp, Homo sapiens; identical to SEQ ID NO: 264408
  chr12:1553850-1554025
  hypo

SEQ ID NO: 315357 - DNA, 252 bp, Homo sapiens; identical to SEQ ID NO: 264409
  chr12:1605198-1605450
  hypo

SEQ ID NO: 315358 - DNA, 53 bp, Homo sapiens; identical to SEQ ID NO: 214692
  chr12:1607425-1607478
  hypo

SEQ ID NO: 315359 - DNA, 239 bp, Homo sapiens; identical to SEQ ID NO: 288627
  chr12:1639655-1639894
  hypo

SEQ ID NO: 315360 - DNA, 344 bp, Homo sapiens; identical to SEQ ID NO: 288628
  chr12:1639977-1640321
  hypo

SEQ ID NO: 315361 - DNA, 287 bp, Homo sapiens; identical to SEQ ID NO: 202812
  chr12:1640476-1640763
  hypo

SEQ ID NO: 315362 - DNA, 157 bp, Homo sapiens; identical to SEQ ID NO: 264412
  chr12:1656342-1656499
  hypo

SEQ ID NO: 315363 - DNA, 218 bp, Homo sapiens; identical to SEQ ID NO: 264413
  chr12:1711558-1711776
  hypo

SEQ ID NO: 315364 - DNA, 54 bp, Homo sapiens; identical to SEQ ID NO: 214696
  chr12:1738021-1738075
  hypo

SEQ ID NO: 315365 - DNA, 222 bp, Homo sapiens; identical to SEQ ID NO: 264416
  chr12:1766124-1766346
  hypo

SEQ ID NO: 315366 - DNA, 120 bp, Homo sapiens; identical to SEQ ID NO: 214697
  chr12:1840409-1840529
  hypo

SEQ ID NO: 315367 - DNA, 180 bp, Homo sapiens; identical to SEQ ID NO: 214698
  chr12:1840589-1840769
  hypo

SEQ ID NO: 315368 - DNA, 495 bp, Homo sapiens; identical to SEQ ID NO: 214699
  chr12:1943596-1944091
  hypo

SEQ ID NO: 315369 - DNA, 203 bp, Homo sapiens
  chr12:1948662-1948865
  hypo
tgaacctgggttccaacgagaggcggtctgcgttcaaatcccagcctcattcattattagctgtggggctttgggcaagtaagttttctgtgtctcagtcccctcagctgtaaagtagagccagaaccatcgccttcactgggtcaccccaaggaccacatgggaggcagtccacagtgcccggcacacgctgaacacacaca

SEQ ID NO: 315370 - DNA, 70 bp, Homo sapiens; identical to SEQ ID NO: 264421
  chr12:1973182-1973252
  hypo

SEQ ID NO: 315371 - DNA, 233 bp, Homo sapiens; identical to SEQ ID NO: 264422
  chr12:1980082-1980315
  hypo

SEQ ID NO: 315372 - DNA, 133 bp, Homo sapiens; identical to SEQ ID NO: 264423
  chr12:1987522-1987655
  hypo

SEQ ID NO: 315373 - DNA, 196 bp, Homo sapiens; identical to SEQ ID NO: 214700
  chr12:1992047-1992243
  hypo

SEQ ID NO: 315374 - DNA, 96 bp, Homo sapiens; identical to SEQ ID NO: 214701
  chr12:2017665-2017761
  hypo

SEQ ID NO: 315375 - DNA, 213 bp, Homo sapiens; identical to SEQ ID NO: 214702
  chr12:2017874-2018087
  hypo

SEQ ID NO: 315376 - DNA, 86 bp, Homo sapiens; identical to SEQ ID NO: 264426
  chr12:2023585-2023671
  hypo

SEQ ID NO: 315377 - DNA, 182 bp, Homo sapiens; identical to SEQ ID NO: 214703
  chr12:2023975-2024157
  hypo

SEQ ID NO: 315378 - DNA, 88 bp, Homo sapiens; identical to SEQ ID NO: 214704
  chr12:2046016-2046104
  hypo

SEQ ID NO: 315379 - DNA, 111 bp, Homo sapiens
  chr12:2046134-2046245
  hypo
aaggcaggctgatttcttggagaagggaggaggcggcacatgtctgaatagagcaggccctgttagaaaacagaaggcttcattgctaataggagcgagcgaccaatctgt

SEQ ID NO: 315380 - DNA, 212 bp, Homo sapiens; identical to SEQ ID NO: 264430
  chr12:2048775-2048987
  hypo

SEQ ID NO: 315381 - DNA, 246 bp, Homo sapiens; identical to SEQ ID NO: 202818
  chr12:2144046-2144292
  hypo

SEQ ID NO: 315382 - DNA, 64 bp, Homo sapiens; identical to SEQ ID NO: 202819
  chr12:2144442-2144506
  hypo

SEQ ID NO: 315383 - DNA, 103 bp, Homo sapiens; identical to SEQ ID NO: 288642
  chr12:2161357-2161460
  hypo

SEQ ID NO: 315384 - DNA, 73 bp, Homo sapiens; identical to SEQ ID NO: 202820
  chr12:2163510-2163583
  hypo

SEQ ID NO: 315385 - DNA, 209 bp, Homo sapiens; identical to SEQ ID NO: 264432
  chr12:2222748-2222957
  hypo

SEQ ID NO: 315386 - DNA, 155 bp, Homo sapiens; identical to SEQ ID NO: 264433
  chr12:2224504-2224659
  hypo

SEQ ID NO: 315387 - DNA, 108 bp, Homo sapiens; identical to SEQ ID NO: 264434
  chr12:2591271-2591379
  hypo

SEQ ID NO: 315388 - DNA, 90 bp, Homo sapiens; identical to SEQ ID NO: 214709
  chr12:2595422-2595512
  hypo

SEQ ID NO: 315389 - DNA, 57 bp, Homo sapiens; identical to SEQ ID NO: 264436
  chr12:2597995-2598052
  hypo

SEQ ID NO: 315390 - DNA, 250 bp, Homo sapiens; identical to SEQ ID NO: 214710
  chr12:2602368-2602618
  hypo

SEQ ID NO: 315391 - DNA, 157 bp, Homo sapiens; identical to SEQ ID NO: 214711
  chr12:2613883-2614040
  hypo

SEQ ID NO: 315392 - DNA, 36 bp, Homo sapiens; identical to SEQ ID NO: 264439
  chr12:2654536-2654572
  hypo

SEQ ID NO: 315393 - DNA, 426 bp, Homo sapiens; identical to SEQ ID NO: 264440
  chr12:2664072-2664498
  hypo

SEQ ID NO: 315394 - DNA, 33 bp, Homo sapiens; identical to SEQ ID NO: 264441
  chr12:2743147-2743180
  hypo

SEQ ID NO: 315395 - DNA, 114 bp, Homo sapiens; identical to SEQ ID NO: 264442
  chr12:2777032-2777146
  hypo

SEQ ID NO: 315396 - DNA, 83 bp, Homo sapiens; identical to SEQ ID NO: 214712
  chr12:2778072-2778155
  hypo

SEQ ID NO: 315397 - DNA, 268 bp, Homo sapiens; identical to SEQ ID NO: 214713
  chr12:2788594-2788862
  hypo

SEQ ID NO: 315398 - DNA, 48 bp, Homo sapiens; identical to SEQ ID NO: 214714
  chr12:2788914-2788962
  hypo

SEQ ID NO: 315399 - DNA, 83 bp, Homo sapiens; identical to SEQ ID NO: 264446
  chr12:2798044-2798127
  hypo

SEQ ID NO: 315400 - DNA, 82 bp, Homo sapiens; identical to SEQ ID NO: 264447
  chr12:2846932-2847014
  hypo

SEQ ID NO: 315401 - DNA, 206 bp, Homo sapiens; identical to SEQ ID NO: 264449
  chr12:2972288-2972494
  hypo

SEQ ID NO: 315402 - DNA, 89 bp, Homo sapiens; identical to SEQ ID NO: 214715
  chr12:2995016-2995105
  hypo

SEQ ID NO: 315403 - DNA, 148 bp, Homo sapiens; identical to SEQ ID NO: 214716
  chr12:3030587-3030735
  hypo

SEQ ID NO: 315404 - DNA, 523 bp, Homo sapiens; identical to SEQ ID NO: 214717
  chr12:3103769-3104292
  hypo

SEQ ID NO: 315405 - DNA, 196 bp, Homo sapiens; identical to SEQ ID NO: 214718
  chr12:3118651-3118847
  hypo

SEQ ID NO: 315406 - DNA, 224 bp, Homo sapiens; identical to SEQ ID NO: 288654
  chr12:3129381-3129605
  hypo

SEQ ID NO: 315407 - DNA, 36 bp, Homo sapiens; identical to SEQ ID NO: 214720
  chr12:3147030-3147066
  hypo

SEQ ID NO: 315408 - DNA, 1058 bp, Homo sapiens; identical to SEQ ID NO: 288655
  chr12:3186012-3187070
  hypo

SEQ ID NO: 315409 - DNA, 46 bp, Homo sapiens; identical to SEQ ID NO: 214722
  chr12:3215227-3215273
  hypo

SEQ ID NO: 315410 - DNA, 98 bp, Homo sapiens; identical to SEQ ID NO: 264457
  chr12:3266175-3266273
  hypo

SEQ ID NO: 315411 - DNA, 178 bp, Homo sapiens; identical to SEQ ID NO: 214723
  chr12:3302735-3302913
  hypo

SEQ ID NO: 315412 - DNA, 129 bp, Homo sapiens; identical to SEQ ID NO: 264459
  chr12:3316845-3316974
  hypo

SEQ ID NO: 315413 - DNA, 303 bp, Homo sapiens; identical to SEQ ID NO: 264460
  chr12:3324917-3325220
  hypo

SEQ ID NO: 315414 - DNA, 45 bp, Homo sapiens; identical to SEQ ID NO: 264461
  chr12:3333941-3333986
  hypo

SEQ ID NO: 315415 - DNA, 44 bp, Homo sapiens; identical to SEQ ID NO: 264462
  chr12:3369201-3369245
  hypo

SEQ ID NO: 315416 - DNA, 109 bp, Homo sapiens; identical to SEQ ID NO: 264463
  chr12:3370679-3370788
  hypo

SEQ ID NO: 315417 - DNA, 245 bp, Homo sapiens; identical to SEQ ID NO: 264464
  chr12:3389522-3389767
  hypo

SEQ ID NO: 315418 - DNA, 111 bp, Homo sapiens; identical to SEQ ID NO: 214725
  chr12:3390417-3390528
  hypo

SEQ ID NO: 315419 - DNA, 433 bp, Homo sapiens; identical to SEQ ID NO: 264466
  chr12:3392261-3392694
  hypo

SEQ ID NO: 315420 - DNA, 200 bp, Homo sapiens; identical to SEQ ID NO: 214727
  chr12:3414073-3414273
  hypo

SEQ ID NO: 315421 - DNA, 197 bp, Homo sapiens
  chr12:3414306-3414503
  hypo
gcgcgtgcccgtgtcatttacatccatggggtgctgctgggaggcctgacgctagccctggctctgcagccactgctttctgggggtcggtctcctgcctgagatgcaggttggggttctaactgttcccggcctgtgtgagggcctgcgttcgcgtgcactggtgccctgcaggtcttggtcggtgacaccgcctc

SEQ ID NO: 315422 - DNA, 152 bp, Homo sapiens; identical to SEQ ID NO: 264468
  chr12:3420373-3420525
  hypo

SEQ ID NO: 315423 - DNA, 205 bp, Homo sapiens
  chr12:3562709-3562914
  hypo
cagacgctgcattccgcatgccatcgtgaccttgaagtagggctgagaatgaggtgtctgggtcaggaactggtgagcgcggtcaggggacacccttaggagaggagcttgcccttcacagccagggcaaatgctggggcgcagccatgctggctgtctcctcgtctgttctgcccacacatctcctgcggcaccctgtggtctg

SEQ ID NO: 315424 - DNA, 234 bp, Homo sapiens; identical to SEQ ID NO: 202829
  chr12:3600534-3600768
  hypo

SEQ ID NO: 315425 - DNA, 44 bp, Homo sapiens; identical to SEQ ID NO: 288657
  chr12:3600982-3601026
  hypo

SEQ ID NO: 315426 - DNA, 86 bp, Homo sapiens; identical to SEQ ID NO: 202830
  chr12:3601256-3601342
  hypo

SEQ ID NO: 315427 - DNA, 101 bp, Homo sapiens; identical to SEQ ID NO: 202831
  chr12:3601377-3601478
  hypo

SEQ ID NO: 315428 - DNA, 396 bp, Homo sapiens; identical to SEQ ID NO: 288660
  chr12:3601625-3602021
  hypo

SEQ ID NO: 315429 - DNA, 115 bp, Homo sapiens; identical to SEQ ID NO: 214733
  chr12:3901112-3901227
  hypo

SEQ ID NO: 315430 - DNA, 36 bp, Homo sapiens; identical to SEQ ID NO: 264471
  chr12:3998558-3998594
  hypo

SEQ ID NO: 315431 - DNA, 92 bp, Homo sapiens; identical to SEQ ID NO: 264472
  chr12:4033270-4033362
  hypo

SEQ ID NO: 315432 - DNA, 222 bp, Homo sapiens; identical to SEQ ID NO: 264473
  chr12:4060807-4061029
  hypo

SEQ ID NO: 315433 - DNA, 137 bp, Homo sapiens; identical to SEQ ID NO: 264474
  chr12:4304033-4304170
  hypo

SEQ ID NO: 315434 - DNA, 70 bp, Homo sapiens
  chr12:4309610-4309680
  hypo
agggtactcctgtcatcccacgtgctcattcatgagtgagggcagatgcggggagccgcactggacagca

SEQ ID NO: 315435 - DNA, 67 bp, Homo sapiens
  chr12:4309714-4309781
  hypo
ccctcccgtaaattccacccgcgcactccaaggttccacggcacacgtaaaccatctgcccagccct

SEQ ID NO: 315436 - DNA, 65 bp, Homo sapiens; identical to SEQ ID NO: 264476
  chr12:4362284-4362349
  hypo

SEQ ID NO: 315437 - DNA, 105 bp, Homo sapiens; identical to SEQ ID NO: 202836
  chr12:4377789-4377894
  hypo

SEQ ID NO: 315438 - DNA, 244 bp, Homo sapiens; identical to SEQ ID NO: 202837
  chr12:4378558-4378802
  hypo

SEQ ID NO: 315439 - DNA, 284 bp, Homo sapiens; identical to SEQ ID NO: 202839
  chr12:4380196-4380480
  hypo

SEQ ID NO: 315440 - DNA, 153 bp, Homo sapiens; identical to SEQ ID NO: 214737
  chr12:4433845-4433998
  hypo

SEQ ID NO: 315441 - DNA, 38 bp, Homo sapiens; identical to SEQ ID NO: 264478
  chr12:4534348-4534386
  hypo

SEQ ID NO: 315442 - DNA, 460 bp, Homo sapiens; identical to SEQ ID NO: 214738
  chr12:4554341-4554801
  hypo

SEQ ID NO: 315443 - DNA, 103 bp, Homo sapiens
  chr12:4554937-4555040
  hypo
ctcggggacgctctctagctcgcccgcttgctccgtccctagttgatgatatttgatttgacctatctttatagttgcttcagcagcccggccctcccctcca

SEQ ID NO: 315444 - DNA, 223 bp, Homo sapiens; identical to SEQ ID NO: 214739
  chr12:4672161-4672384
  hypo

SEQ ID NO: 315445 - DNA, 134 bp, Homo sapiens
  chr12:4734902-4735036
  hypo
agaggagagagaagagaaggttgtagggatggtctttttaattcccgcacttcagtgtgaagcatctggggtaagtgtgcgtgttctccagactcaaaccctccctttggcgcgcagttctgatgcttactggg

SEQ ID NO: 315446 - DNA, 292 bp, Homo sapiens; identical to SEQ ID NO: 264482
  chr12:4737611-4737903
  hypo

SEQ ID NO: 315447 - DNA, 42 bp, Homo sapiens; identical to SEQ ID NO: 264483
  chr12:4810316-4810358
  hypo

SEQ ID NO: 315448 - DNA, 101 bp, Homo sapiens; identical to SEQ ID NO: 264484
  chr12:4872384-4872485
  hypo

SEQ ID NO: 315449 - DNA, 125 bp, Homo sapiens; identical to SEQ ID NO: 202847
  chr12:4918558-4918683
  hypo

SEQ ID NO: 315450 - DNA, 176 bp, Homo sapiens; identical to SEQ ID NO: 202848
  chr12:4918713-4918889
  hypo

SEQ ID NO: 315451 - DNA, 583 bp, Homo sapiens; identical to SEQ ID NO: 202849
  chr12:4920225-4920808
  hypo

SEQ ID NO: 315452 - DNA, 44 bp, Homo sapiens; identical to SEQ ID NO: 264486
  chr12:5087446-5087490
  hypo

SEQ ID NO: 315453 - DNA, 121 bp, Homo sapiens; identical to SEQ ID NO: 264487
  chr12:5208523-5208644
  hypo

SEQ ID NO: 315454 - DNA, 40 bp, Homo sapiens; identical to SEQ ID NO: 264488
  chr12:5231585-5231625
  hypo

SEQ ID NO: 315455 - DNA, 53 bp, Homo sapiens
  chr12:5252233-5252286
  hypo
agaaatccacatcatccgtaatccaatcacctccacatcatccgtaatccgat

SEQ ID NO: 315456 - DNA, 270 bp, Homo sapiens
  chr12:5252323-5252593
  hypo
catccgtaatccgatcacctccacatcatccgtaatccgatcacctccacatcatccgtaatccgatcacctccacatcatcggtaatccgatcacctccgcatcatccgtaatccgatcacctccacatcatccgtaatccgatcacctccacatcatccgtaatccgatcacctccacatcatccgtaatccgatcacctccacatcatccgtaatccgatcacctccacatcatccgtaatccgatcacctccacatcatccgtaat

SEQ ID NO: 315457 - DNA, 120 bp, Homo sapiens; identical to SEQ ID NO: 264490
  chr12:5252653-5252773
  hypo

SEQ ID NO: 315458 - DNA, 86 bp, Homo sapiens; identical to SEQ ID NO: 264491
  chr12:5319955-5320041
  hypo

SEQ ID NO: 315459 - DNA, 91 bp, Homo sapiens; identical to SEQ ID NO: 264494
  chr12:5344278-5344369
  hypo

SEQ ID NO: 315460 - DNA, 86 bp, Homo sapiens; identical to SEQ ID NO: 264496
  chr12:5435949-5436035
  hypo

SEQ ID NO: 315461 - DNA, 85 bp, Homo sapiens; identical to SEQ ID NO: 264497
  chr12:5437112-5437197
  hypo

SEQ ID NO: 315462 - DNA, 36 bp, Homo sapiens; identical to SEQ ID NO: 264498
  chr12:5532611-5532647
  hypo

SEQ ID NO: 315463 - DNA, 322 bp, Homo sapiens; identical to SEQ ID NO: 202852
  chr12:5541693-5542015
  hypo

SEQ ID NO: 315464 - DNA, 38 bp, Homo sapiens; identical to SEQ ID NO: 264499
  chr12:5579368-5579406
  hypo

SEQ ID NO: 315465 - DNA, 216 bp, Homo sapiens; identical to SEQ ID NO: 264500
  chr12:5589467-5589683
  hypo

SEQ ID NO: 315466 - DNA, 202 bp, Homo sapiens; identical to SEQ ID NO: 264501
  chr12:5603080-5603282
  hypo

SEQ ID NO: 315467 - DNA, 500 bp, Homo sapiens; identical to SEQ ID NO: 214744
  chr12:5603567-5604067
  hypo

SEQ ID NO: 315468 - DNA, 321 bp, Homo sapiens; identical to SEQ ID NO: 264503
  chr12:5632712-5633033
  hypo

SEQ ID NO: 315469 - DNA, 119 bp, Homo sapiens; identical to SEQ ID NO: 264504
  chr12:5672755-5672874
  hypo

SEQ ID NO: 315470 - DNA, 108 bp, Homo sapiens; identical to SEQ ID NO: 264505
  chr12:5674728-5674836
  hypo

SEQ ID NO: 315471 - DNA, 125 bp, Homo sapiens; identical to SEQ ID NO: 264506
  chr12:5687506-5687631
  hypo

SEQ ID NO: 315472 - DNA, 174 bp, Homo sapiens; identical to SEQ ID NO: 264507
  chr12:5697256-5697430
  hypo

SEQ ID NO: 315473 - DNA, 128 bp, Homo sapiens; identical to SEQ ID NO: 214745
  chr12:5726939-5727067
  hypo

SEQ ID NO: 315474 - DNA, 202 bp, Homo sapiens; identical to SEQ ID NO: 264510
  chr12:5951755-5951957
  hypo

SEQ ID NO: 315475 - DNA, 161 bp, Homo sapiens; identical to SEQ ID NO: 214746
  chr12:6030343-6030504
  hypo

SEQ ID NO: 315476 - DNA, 60 bp, Homo sapiens; identical to SEQ ID NO: 264512
  chr12:6030959-6031019
  hypo

SEQ ID NO: 315477 - DNA, 40 bp, Homo sapiens; identical to SEQ ID NO: 214747
  chr12:6159830-6159870
  hypo

SEQ ID NO: 315478 - DNA, 47 bp, Homo sapiens; identical to SEQ ID NO: 264514
  chr12:6172072-6172119
  hypo

SEQ ID NO: 315479 - DNA, 95 bp, Homo sapiens; identical to SEQ ID NO: 264515
  chr12:6199649-6199744
  hypo

SEQ ID NO: 315480 - DNA, 79 bp, Homo sapiens; identical to SEQ ID NO: 214748
  chr12:6220788-6220867
  hypo

SEQ ID NO: 315481 - DNA, 83 bp, Homo sapiens; identical to SEQ ID NO: 264517
  chr12:6284864-6284947
  hypo

SEQ ID NO: 315482 - DNA, 85 bp, Homo sapiens; identical to SEQ ID NO: 214749
  chr12:6294432-6294517
  hypo

SEQ ID NO: 315483 - DNA, 823 bp, Homo sapiens; identical to SEQ ID NO: 202854
  chr12:6309398-6310221
  hypo

SEQ ID NO: 315484 - DNA, 309 bp, Homo sapiens; identical to SEQ ID NO: 264519
  chr12:6334302-6334611
  hypo

SEQ ID NO: 315485 - DNA, 44 bp, Homo sapiens; identical to SEQ ID NO: 264520
  chr12:6336636-6336680
  hypo

SEQ ID NO: 315486 - DNA, 301 bp, Homo sapiens; identical to SEQ ID NO: 214751
  chr12:6344303-6344604
  hypo

SEQ ID NO: 315487 - DNA, 76 bp, Homo sapiens; identical to SEQ ID NO: 264522
  chr12:6363069-6363145
  hypo

SEQ ID NO: 315488 - DNA, 306 bp, Homo sapiens; identical to SEQ ID NO: 264523
  chr12:6373751-6374057
  hypo

SEQ ID NO: 315489 - DNA, 88 bp, Homo sapiens; identical to SEQ ID NO: 264524
  chr12:6375951-6376039
  hypo

SEQ ID NO: 315490 - DNA, 35 bp, Homo sapiens; identical to SEQ ID NO: 264525
  chr12:6381467-6381502
  hypo

SEQ ID NO: 315491 - DNA, 184 bp, Homo sapiens; identical to SEQ ID NO: 202855
  chr12:6387950-6388134
  hypo

SEQ ID NO: 315492 - DNA, 187 bp, Homo sapiens; identical to SEQ ID NO: 214753
  chr12:6388701-6388888
  hypo

SEQ ID NO: 315493 - DNA, 275 bp, Homo sapiens; identical to SEQ ID NO: 214754
  chr12:6391153-6391428
  hypo

SEQ ID NO: 315494 - DNA, 38 bp, Homo sapiens; identical to SEQ ID NO: 214755
  chr12:6396069-6396107
  hypo

SEQ ID NO: 315495 - DNA, 105 bp, Homo sapiens; identical to SEQ ID NO: 214756
  chr12:6421423-6421528
  hypo

SEQ ID NO: 315496 - DNA, 50 bp, Homo sapiens; identical to SEQ ID NO: 214757
  chr12:6422991-6423041
  hypo

SEQ ID NO: 315497 - DNA, 245 bp, Homo sapiens; identical to SEQ ID NO: 264531
  chr12:6425447-6425692
  hypo

SEQ ID NO: 315498 - DNA, 214 bp, Homo sapiens; identical to SEQ ID NO: 214759
  chr12:6438303-6438517
  hypo

SEQ ID NO: 315499 - DNA, 158 bp, Homo sapiens; identical to SEQ ID NO: 214760
  chr12:6464388-6464546
  hypo

SEQ ID NO: 315500 - DNA, 38 bp, Homo sapiens; identical to SEQ ID NO: 264534
  chr12:6481166-6481204
  hypo

SEQ ID NO: 315501 - DNA, 92 bp, Homo sapiens; identical to SEQ ID NO: 214761
  chr12:6483476-6483568
  hypo

SEQ ID NO: 315502 - DNA, 403 bp, Homo sapiens; identical to SEQ ID NO: 288695
  chr12:6492950-6493353
  hypo

SEQ ID NO: 315503 - DNA, 33 bp, Homo sapiens; identical to SEQ ID NO: 202862
  chr12:6493416-6493449
  hypo

SEQ ID NO: 315504 - DNA, 117 bp, Homo sapiens; identical to SEQ ID NO: 121849
  chr12:6493504-6493621
  hypo

SEQ ID NO: 315505 - DNA, 97 bp, Homo sapiens; identical to SEQ ID NO: 264536
  chr12:6514987-6515084
  hypo

SEQ ID NO: 315506 - DNA, 120 bp, Homo sapiens; identical to SEQ ID NO: 264537
  chr12:6531710-6531830
  hypo

SEQ ID NO: 315507 - DNA, 186 bp, Homo sapiens; identical to SEQ ID NO: 264538
  chr12:6587832-6588018
  hypo

SEQ ID NO: 315508 - DNA, 497 bp, Homo sapiens; identical to SEQ ID NO: 264539
  chr12:6636152-6636649
  hypo

SEQ ID NO: 315509 - DNA, 57 bp, Homo sapiens; identical to SEQ ID NO: 264540
  chr12:6637925-6637982
  hypo

SEQ ID NO: 315510 - DNA, 212 bp, Homo sapiens; identical to SEQ ID NO: 264541
  chr12:6638551-6638763
  hypo

SEQ ID NO: 315511 - DNA, 475 bp, Homo sapiens; identical to SEQ ID NO: 214764
  chr12:6678912-6679387
  hypo

SEQ ID NO: 315512 - DNA, 110 bp, Homo sapiens; identical to SEQ ID NO: 264543
  chr12:6686946-6687056
  hypo

SEQ ID NO: 315513 - DNA, 38 bp, Homo sapiens; identical to SEQ ID NO: 264544
  chr12:6749347-6749385
  hypo

SEQ ID NO: 315514 - DNA, 106 bp, Homo sapiens; identical to SEQ ID NO: 288703
  chr12:6809093-6809199
  hypo

SEQ ID NO: 315515 - DNA, 124 bp, Homo sapiens; identical to SEQ ID NO: 288704
  chr12:6809692-6809816
  hypo

SEQ ID NO: 315516 - DNA, 44 bp, Homo sapiens; identical to SEQ ID NO: 214765
  chr12:6831877-6831921
  hypo

SEQ ID NO: 315517 - DNA, 36 bp, Homo sapiens; identical to SEQ ID NO: 264546
  chr12:6848750-6848786
  hypo

SEQ ID NO: 315518 - DNA, 239 bp, Homo sapiens; identical to SEQ ID NO: 264547
  chr12:6857750-6857989
  hypo

SEQ ID NO: 315519 - DNA, 47 bp, Homo sapiens; identical to SEQ ID NO: 264548
  chr12:6868198-6868245
  hypo

SEQ ID NO: 315520 - DNA, 45 bp, Homo sapiens; identical to SEQ ID NO: 264549
  chr12:6871063-6871108
  hypo

SEQ ID NO: 315521 - DNA, 55 bp, Homo sapiens; identical to SEQ ID NO: 264550
  chr12:7249425-7249480
  hypo

SEQ ID NO: 315522 - DNA, 48 bp, Homo sapiens; identical to SEQ ID NO: 264551
  chr12:7351759-7351807
  hypo

SEQ ID NO: 315523 - DNA, 88 bp, Homo sapiens; identical to SEQ ID NO: 264552
  chr12:7368502-7368590
  hypo

SEQ ID NO: 315524 - DNA, 42 bp, Homo sapiens; identical to SEQ ID NO: 264553
  chr12:7826421-7826463
  hypo

SEQ ID NO: 315525 - DNA, 265 bp, Homo sapiens; identical to SEQ ID NO: 214767
  chr12:7858583-7858848
  hypo

SEQ ID NO: 315526 - DNA, 37 bp, Homo sapiens; identical to SEQ ID NO: 264555
  chr12:7910484-7910521
  hypo

SEQ ID NO: 315527 - DNA, 32 bp, Homo sapiens; identical to SEQ ID NO: 264557
  chr12:7968173-7968205
  hypo

SEQ ID NO: 315528 - DNA, 120 bp, Homo sapiens; identical to SEQ ID NO: 264558
  chr12:7969976-7970096
  hypo

SEQ ID NO: 315529 - DNA, 80 bp, Homo sapiens
  chr12:8001717-8001797
  hypo
tgggattactggtctgagacactgcgcccgctttcactgagttcttatttggacctctcaatcttcgggcaagataacat

SEQ ID NO: 315530 - DNA, 32 bp, Homo sapiens; identical to SEQ ID NO: 214768
  chr12:8009570-8009602
  hypo

SEQ ID NO: 315531 - DNA, 32 bp, Homo sapiens; identical to SEQ ID NO: 214769
  chr12:8017218-8017250
  hypo

SEQ ID NO: 315532 - DNA, 64 bp, Homo sapiens; identical to SEQ ID NO: 264562
  chr12:8022094-8022158
  hypo

SEQ ID NO: 315533 - DNA, 31 bp, Homo sapiens; identical to SEQ ID NO: 264563
  chr12:8071329-8071360
  hypo

SEQ ID NO: 315534 - DNA, 38 bp, Homo sapiens; identical to SEQ ID NO: 264564
  chr12:8072019-8072057
  hypo

SEQ ID NO: 315535 - DNA, 38 bp, Homo sapiens; identical to SEQ ID NO: 264565
  chr12:8072297-8072335
  hypo

SEQ ID NO: 315536 - DNA, 69 bp, Homo sapiens; identical to SEQ ID NO: 288711
  chr12:8123528-8123597
  hypo

SEQ ID NO: 315537 - DNA, 31 bp, Homo sapiens; identical to SEQ ID NO: 214770
  chr12:8146997-8147028
  hypo

SEQ ID NO: 315538 - DNA, 31 bp, Homo sapiens; identical to SEQ ID NO: 214771
  chr12:8147088-8147119
  hypo

SEQ ID NO: 315539 - DNA, 98 bp, Homo sapiens; identical to SEQ ID NO: 264568
  chr12:8178281-8178379
  hypo

SEQ ID NO: 315540 - DNA, 31 bp, Homo sapiens; identical to SEQ ID NO: 214772
  chr12:8180905-8180936
  hypo

SEQ ID NO: 315541 - DNA, 120 bp, Homo sapiens; identical to SEQ ID NO: 214773
  chr12:8181176-8181296
  hypo

SEQ ID NO: 315542 - DNA, 36 bp, Homo sapiens; identical to SEQ ID NO: 264571
  chr12:8252176-8252212
  hypo

SEQ ID NO: 315543 - DNA, 32 bp, Homo sapiens; identical to SEQ ID NO: 214774
  chr12:8398731-8398763
  hypo

SEQ ID NO: 315544 - DNA, 36 bp, Homo sapiens; identical to SEQ ID NO: 214775
  chr12:8423886-8423922
  hypo

SEQ ID NO: 315545 - DNA, 120 bp, Homo sapiens; identical to SEQ ID NO: 264574
  chr12:8597879-8597999
  hypo

SEQ ID NO: 315546 - DNA, 47 bp, Homo sapiens; identical to SEQ ID NO: 264575
  chr12:8601976-8602023
  hypo

SEQ ID NO: 315547 - DNA, 231 bp, Homo sapiens; identical to SEQ ID NO: 214776
  chr12:8757695-8757926
  hypo

SEQ ID NO: 315548 - DNA, 183 bp, Homo sapiens; identical to SEQ ID NO: 214777
  chr12:8757966-8758149
  hypo

SEQ ID NO: 315549 - DNA, 150 bp, Homo sapiens; identical to SEQ ID NO: 214778
  chr12:8808409-8808559
  hypo

SEQ ID NO: 315550 - DNA, 33 bp, Homo sapiens; identical to SEQ ID NO: 214779
  chr12:8808923-8808956
  hypo

SEQ ID NO: 315551 - DNA, 32 bp, Homo sapiens; identical to SEQ ID NO: 214780
  chr12:8890590-8890622
  hypo

SEQ ID NO: 315552 - DNA, 180 bp, Homo sapiens; identical to SEQ ID NO: 214781
  chr12:8893949-8894129
  hypo

SEQ ID NO: 315553 - DNA, 89 bp, Homo sapiens; identical to SEQ ID NO: 264582
  chr12:8906530-8906619
  hypo

SEQ ID NO: 315554 - DNA, 42 bp, Homo sapiens; identical to SEQ ID NO: 264583
  chr12:8936109-8936151
  hypo

SEQ ID NO: 315555 - DNA, 120 bp, Homo sapiens; identical to SEQ ID NO: 264584
  chr12:8936631-8936751
  hypo

SEQ ID NO: 315556 - DNA, 70 bp, Homo sapiens
  chr12:8995605-8995675
  hypo
cacatgccattctcaggcagtgaagatttgagagaaagagctctatttgaaaaccgtaacaagtccgtgg

SEQ ID NO: 315557 - DNA, 300 bp, Homo sapiens; identical to SEQ ID NO: 214782
  chr12:9108768-9109068
  hypo

SEQ ID NO: 315558 - DNA, 99 bp, Homo sapiens; identical to SEQ ID NO: 264588
  chr12:9109308-9109407
  hypo

SEQ ID NO: 315559 - DNA, 292 bp, Homo sapiens; identical to SEQ ID NO: 224290
  chr12:9216953-9217245
  hypo

SEQ ID NO: 315560 - DNA, 199 bp, Homo sapiens; identical to SEQ ID NO: 214783
  chr12:9585208-9585407
  hypo

SEQ ID NO: 315561 - DNA, 36 bp, Homo sapiens; identical to SEQ ID NO: 264591
  chr12:9824089-9824125
  hypo

SEQ ID NO: 315562 - DNA, 206 bp, Homo sapiens; identical to SEQ ID NO: 264592
  chr12:10025415-10025621
  hypo

SEQ ID NO: 315563 - DNA, 214 bp, Homo sapiens; identical to SEQ ID NO: 264593
  chr12:10073226-10073440
  hypo

SEQ ID NO: 315564 - DNA, 47 bp, Homo sapiens; identical to SEQ ID NO: 214784
  chr12:10264178-10264225
  hypo

SEQ ID NO: 315565 - DNA, 112 bp, Homo sapiens; identical to SEQ ID NO: 214785
  chr12:10267999-10268111
  hypo

SEQ ID NO: 315566 - DNA, 122 bp, Homo sapiens; identical to SEQ ID NO: 264596
  chr12:10523866-10523988
  hypo

SEQ ID NO: 315567 - DNA, 32 bp, Homo sapiens; identical to SEQ ID NO: 214786
  chr12:10767896-10767928
  hypo

SEQ ID NO: 315568 - DNA, 36 bp, Homo sapiens
  chr12:10823868-10823904
  hypo
caggcgtgagccaccacgcctggccatgttgatttt

SEQ ID NO: 315569 - DNA, 44 bp, Homo sapiens; identical to SEQ ID NO: 202870
  chr12:11801643-11801687
  hypo

SEQ ID NO: 315570 - DNA, 427 bp, Homo sapiens; identical to SEQ ID NO: 202871
  chr12:11802787-11803214
  hypo

SEQ ID NO: 315571 - DNA, 198 bp, Homo sapiens; identical to SEQ ID NO: 202872
  chr12:11905383-11905581
  hypo

SEQ ID NO: 315572 - DNA, 165 bp, Homo sapiens; identical to SEQ ID NO: 202873
  chr12:11992073-11992238
  hypo

SEQ ID NO: 315573 - DNA, 65 bp, Homo sapiens; identical to SEQ ID NO: 264599
  chr12:12001023-12001088
  hypo

SEQ ID NO: 315574 - DNA, 382 bp, Homo sapiens; identical to SEQ ID NO: 202874
  chr12:12006113-12006495
  hypo

SEQ ID NO: 315575 - DNA, 546 bp, Homo sapiens; identical to SEQ ID NO: 202875
  chr12:12022357-12022903
  hypo

SEQ ID NO: 315576 - DNA, 147 bp, Homo sapiens; identical to SEQ ID NO: 202876
  chr12:12037378-12037525
  hypo

SEQ ID NO: 315577 - DNA, 101 bp, Homo sapiens; identical to SEQ ID NO: 202877
  chr12:12038859-12038960
  hypo

SEQ ID NO: 315578 - DNA, 2801 bp, Homo sapiens; identical to SEQ ID NO: 202878
  chr12:12043874-12046675
  hypo

SEQ ID NO: 315579 - DNA, 1481 bp, Homo sapiens; identical to SEQ ID NO: 202879
  chr12:12046855-12048336
  hypo

SEQ ID NO: 315580 - DNA, 188 bp, Homo sapiens; identical to SEQ ID NO: 214797
  chr12:12184633-12184821
  hypo

SEQ ID NO: 315581 - DNA, 302 bp, Homo sapiens; identical to SEQ ID NO: 264602
  chr12:12476519-12476821
  hypo

SEQ ID NO: 315582 - DNA, 586 bp, Homo sapiens; identical to SEQ ID NO: 288736
  chr12:12502885-12503471
  hypo

SEQ ID NO: 315583 - DNA, 40 bp, Homo sapiens; identical to SEQ ID NO: 214798
  chr12:12604522-12604562
  hypo

SEQ ID NO: 315584 - DNA, 179 bp, Homo sapiens; identical to SEQ ID NO: 264606
  chr12:12605362-12605541
  hypo

SEQ ID NO: 315585 - DNA, 445 bp, Homo sapiens; identical to SEQ ID NO: 264607
  chr12:12618403-12618848
  hypo

SEQ ID NO: 315586 - DNA, 90 bp, Homo sapiens; identical to SEQ ID NO: 264608
  chr12:12656416-12656506
  hypo

SEQ ID NO: 315587 - DNA, 59 bp, Homo sapiens; identical to SEQ ID NO: 288740
  chr12:12869129-12869188
  hypo

SEQ ID NO: 315588 - DNA, 189 bp, Homo sapiens; identical to SEQ ID NO: 288741
  chr12:12869412-12869601
  hypo

SEQ ID NO: 315589 - DNA, 286 bp, Homo sapiens; identical to SEQ ID NO: 288744
  chr12:12877458-12877744
  hypo

SEQ ID NO: 315590 - DNA, 82 bp, Homo sapiens; identical to SEQ ID NO: 264612
  chr12:12902967-12903049
  hypo

SEQ ID NO: 315591 - DNA, 31 bp, Homo sapiens; identical to SEQ ID NO: 264613
  chr12:12923066-12923097
  hypo

SEQ ID NO: 315592 - DNA, 176 bp, Homo sapiens; identical to SEQ ID NO: 214801
  chr12:12989449-12989625
  hypo

SEQ ID NO: 315593 - DNA, 147 bp, Homo sapiens; identical to SEQ ID NO: 264615
  chr12:12990441-12990588
  hypo

SEQ ID NO: 315594 - DNA, 89 bp, Homo sapiens; identical to SEQ ID NO: 264616
  chr12:12990618-12990707
  hypo

SEQ ID NO: 315595 - DNA, 37 bp, Homo sapiens; identical to SEQ ID NO: 264617
  chr12:13003128-13003165
  hypo

SEQ ID NO: 315596 - DNA, 114 bp, Homo sapiens; identical to SEQ ID NO: 214802
  chr12:13035881-13035995
  hypo

SEQ ID NO: 315597 - DNA, 37 bp, Homo sapiens; identical to SEQ ID NO: 264619
  chr12:13050517-13050554
  hypo

SEQ ID NO: 315598 - DNA, 36 bp, Homo sapiens; identical to SEQ ID NO: 264620
  chr12:13050854-13050890
  hypo

SEQ ID NO: 315599 - DNA, 86 bp, Homo sapiens; identical to SEQ ID NO: 264621
  chr12:13056218-13056304
  hypo

SEQ ID NO: 315600 - DNA, 71 bp, Homo sapiens; identical to SEQ ID NO: 288747
  chr12:13069193-13069264
  hypo

SEQ ID NO: 315601 - DNA, 108 bp, Homo sapiens; identical to SEQ ID NO: 121940
  chr12:13069316-13069424
  hypo

SEQ ID NO: 315602 - DNA, 447 bp, Homo sapiens; identical to SEQ ID NO: 202885
  chr12:13152998-13153445
  hypo

SEQ ID NO: 315603 - DNA, 93 bp, Homo sapiens; identical to SEQ ID NO: 224308
  chr12:13154241-13154334
  hypo

SEQ ID NO: 315604 - DNA, 233 bp, Homo sapiens; identical to SEQ ID NO: 264623
  chr12:13173189-13173422
  hypo

SEQ ID NO: 315605 - DNA, 100 bp, Homo sapiens; identical to SEQ ID NO: 214804
  chr12:13215310-13215410
  hypo

SEQ ID NO: 315606 - DNA, 174 bp, Homo sapiens; identical to SEQ ID NO: 214805
  chr12:13222376-13222550
  hypo

SEQ ID NO: 315607 - DNA, 191 bp, Homo sapiens; identical to SEQ ID NO: 264626
  chr12:13237737-13237928
  hypo

SEQ ID NO: 315608 - DNA, 51 bp, Homo sapiens; identical to SEQ ID NO: 264627
  chr12:13281247-13281298
  hypo

SEQ ID NO: 315609 - DNA, 145 bp, Homo sapiens
  chr12:13519064-13519209
  hypo
cggttccagttgttgtggaccttgcaaattctctggccgagatccaggcagtaggcgtcctcctccgcgggctcccgctgaggccccatcacatgttcctggtgcagttcttctccactgtgctgtgaagcgtgtgggatgtgcc

SEQ ID NO: 315610 - DNA, 603 bp, Homo sapiens; identical to SEQ ID NO: 214806
  chr12:13716472-13717075
  hypo

SEQ ID NO: 315611 - DNA, 36 bp, Homo sapiens; identical to SEQ ID NO: 264630
  chr12:14469618-14469654
  hypo

SEQ ID NO: 315612 - DNA, 36 bp, Homo sapiens; identical to SEQ ID NO: 214807
  chr12:14721513-14721549
  hypo

SEQ ID NO: 315613 - DNA, 36 bp, Homo sapiens; identical to SEQ ID NO: 214808
  chr12:14721789-14721825
  hypo

SEQ ID NO: 315614 - DNA, 197 bp, Homo sapiens; identical to SEQ ID NO: 264633
  chr12:14743808-14744005
  hypo

SEQ ID NO: 315615 - DNA, 87 bp, Homo sapiens; identical to SEQ ID NO: 214809
  chr12:14818119-14818206
  hypo

SEQ ID NO: 315616 - DNA, 75 bp, Homo sapiens; identical to SEQ ID NO: 214810
  chr12:14818749-14818824
  hypo

SEQ ID NO: 315617 - DNA, 165 bp, Homo sapiens; identical to SEQ ID NO: 214811
  chr12:14818867-14819032
  hypo

SEQ ID NO: 315618 - DNA, 240 bp, Homo sapiens; identical to SEQ ID NO: 214812
  chr12:14819092-14819332
  hypo

SEQ ID NO: 315619 - DNA, 72 bp, Homo sapiens; identical to SEQ ID NO: 264637
  chr12:15057301-15057373
  hypo

SEQ ID NO: 315620 - DNA, 120 bp, Homo sapiens; identical to SEQ ID NO: 264638
  chr12:15095459-15095579
  hypo

SEQ ID NO: 315621 - DNA, 1112 bp, Homo sapiens; identical to SEQ ID NO: 202894
  chr12:15941609-15942721
  hypo

SEQ ID NO: 315622 - DNA, 58 bp, Homo sapiens; identical to SEQ ID NO: 264639
  chr12:16109905-16109963
  hypo

SEQ ID NO: 315623 - DNA, 196 bp, Homo sapiens; identical to SEQ ID NO: 214814
  chr12:16150422-16150618
  hypo

SEQ ID NO: 315624 - DNA, 112 bp, Homo sapiens; identical to SEQ ID NO: 264641
  chr12:19260900-19261012
  hypo

SEQ ID NO: 315625 - DNA, 86 bp, Homo sapiens; identical to SEQ ID NO: 202899
  chr12:19282247-19282333
  hypo

SEQ ID NO: 315626 - DNA, 840 bp, Homo sapiens; identical to SEQ ID NO: 202900
  chr12:19282363-19283203
  hypo

SEQ ID NO: 315627 - DNA, 249 bp, Homo sapiens; identical to SEQ ID NO: 202901
  chr12:19283425-19283674
  hypo

SEQ ID NO: 315628 - DNA, 311 bp, Homo sapiens; identical to SEQ ID NO: 264642
  chr12:19459336-19459647
  hypo

SEQ ID NO: 315629 - DNA, 151 bp, Homo sapiens; identical to SEQ ID NO: 264643
  chr12:19512469-19512620
  hypo

SEQ ID NO: 315630 - DNA, 36 bp, Homo sapiens; identical to SEQ ID NO: 214819
  chr12:19539887-19539923
  hypo

SEQ ID NO: 315631 - DNA, 84 bp, Homo sapiens; identical to SEQ ID NO: 264645
  chr12:19549593-19549677
  hypo

SEQ ID NO: 315632 - DNA, 35 bp, Homo sapiens; identical to SEQ ID NO: 264646
  chr12:19636459-19636494
  hypo

SEQ ID NO: 315633 - DNA, 43 bp, Homo sapiens; identical to SEQ ID NO: 264647
  chr12:19928383-19928426
  hypo

SEQ ID NO: 315634 - DNA, 41 bp, Homo sapiens; identical to SEQ ID NO: 264648
  chr12:20015441-20015482
  hypo

SEQ ID NO: 315635 - DNA, 180 bp, Homo sapiens; identical to SEQ ID NO: 214820
  chr12:20704639-20704819
  hypo

SEQ ID NO: 315636 - DNA, 131 bp, Homo sapiens; identical to SEQ ID NO: 202908
  chr12:21681020-21681151
  hypo

SEQ ID NO: 315637 - DNA, 109 bp, Homo sapiens; identical to SEQ ID NO: 214822
  chr12:21847672-21847781
  hypo

SEQ ID NO: 315638 - DNA, 156 bp, Homo sapiens; identical to SEQ ID NO: 264651
  chr12:22161232-22161388
  hypo

SEQ ID NO: 315639 - DNA, 139 bp, Homo sapiens; identical to SEQ ID NO: 202911
  chr12:22488705-22488844
  hypo

SEQ ID NO: 315640 - DNA, 137 bp, Homo sapiens; identical to SEQ ID NO: 226549
  chr12:22529506-22529643
  hypo

SEQ ID NO: 315641 - DNA, 87 bp, Homo sapiens
  chr12:22698196-22698283
  hypo
atatttagtgaaatattttattcagtcataggcacttgtgttgtgcactgggtcacagatattactgtgggcggggtgggggaggtc

SEQ ID NO: 315642 - DNA, 115 bp, Homo sapiens; identical to SEQ ID NO: 264654
  chr12:24323135-24323250
  hypo

SEQ ID NO: 315643 - DNA, 37 bp, Homo sapiens; identical to SEQ ID NO: 264655
  chr12:24617258-24617295
  hypo

SEQ ID NO: 315644 - DNA, 54 bp, Homo sapiens; identical to SEQ ID NO: 264656
  chr12:24679251-24679305
  hypo

SEQ ID NO: 315645 - DNA, 252 bp, Homo sapiens; identical to SEQ ID NO: 202912
  chr12:24715505-24715757
  hypo

SEQ ID NO: 315646 - DNA, 120 bp, Homo sapiens; identical to SEQ ID NO: 264657
  chr12:25203074-25203194
  hypo

SEQ ID NO: 315647 - DNA, 42 bp, Homo sapiens; identical to SEQ ID NO: 214825
  chr12:25344062-25344104
  hypo

SEQ ID NO: 315648 - DNA, 259 bp, Homo sapiens; identical to SEQ ID NO: 202917
  chr12:25404339-25404598
  hypo

SEQ ID NO: 315649 - DNA, 206 bp, Homo sapiens; identical to SEQ ID NO: 214827
  chr12:25537194-25537400
  hypo

SEQ ID NO: 315650 - DNA, 142 bp, Homo sapiens; identical to SEQ ID NO: 224326
  chr12:25538253-25538395
  hypo

SEQ ID NO: 315651 - DNA, 179 bp, Homo sapiens; identical to SEQ ID NO: 214828
  chr12:26398930-26399109
  hypo

SEQ ID NO: 315652 - DNA, 165 bp, Homo sapiens; identical to SEQ ID NO: 214829
  chr12:26492034-26492199
  hypo

SEQ ID NO: 315653 - DNA, 63 bp, Homo sapiens; identical to SEQ ID NO: 264662
  chr12:26893421-26893484
  hypo

SEQ ID NO: 315654 - DNA, 34 bp, Homo sapiens; identical to SEQ ID NO: 264663
  chr12:26949667-26949701
  hypo

SEQ ID NO: 315655 - DNA, 199 bp, Homo sapiens; identical to SEQ ID NO: 214830
  chr12:26966974-26967173
  hypo

SEQ ID NO: 315656 - DNA, 106 bp, Homo sapiens; identical to SEQ ID NO: 288808
  chr12:27486689-27486795
  hypo

SEQ ID NO: 315657 - DNA, 87 bp, Homo sapiens; identical to SEQ ID NO: 264666
  chr12:27600853-27600940
  hypo

SEQ ID NO: 315658 - DNA, 153 bp, Homo sapiens; identical to SEQ ID NO: 264667
  chr12:27671115-27671268
  hypo

SEQ ID NO: 315659 - DNA, 79 bp, Homo sapiens; identical to SEQ ID NO: 214831
  chr12:27742242-27742321
  hypo

SEQ ID NO: 315660 - DNA, 78 bp, Homo sapiens; identical to SEQ ID NO: 214832
  chr12:27742381-27742459
  hypo

SEQ ID NO: 315661 - DNA, 138 bp, Homo sapiens; identical to SEQ ID NO: 264670
  chr12:27842659-27842797
  hypo

SEQ ID NO: 315662 - DNA, 114 bp, Homo sapiens; identical to SEQ ID NO: 214833
  chr12:27950701-27950815
  hypo

SEQ ID NO: 315663 - DNA, 343 bp, Homo sapiens; identical to SEQ ID NO: 288811
  chr12:28123205-28123548
  hypo

SEQ ID NO: 315664 - DNA, 210 bp, Homo sapiens; identical to SEQ ID NO: 288812
  chr12:28123786-28123996
  hypo

SEQ ID NO: 315665 - DNA, 203 bp, Homo sapiens; identical to SEQ ID NO: 288814
  chr12:29301531-29301734
  hypo

SEQ ID NO: 315666 - DNA, 670 bp, Homo sapiens; identical to SEQ ID NO: 288815
  chr12:29301986-29302656
  hypo

SEQ ID NO: 315667 - DNA, 85 bp, Homo sapiens; identical to SEQ ID NO: 288816
  chr12:29302688-29302773
  hypo

SEQ ID NO: 315668 - DNA, 103 bp, Homo sapiens; identical to SEQ ID NO: 214835
  chr12:29373862-29373965
  hypo

SEQ ID NO: 315669 - DNA, 45 bp, Homo sapiens; identical to SEQ ID NO: 264673
  chr12:29889831-29889876
  hypo

SEQ ID NO: 315670 - DNA, 34 bp, Homo sapiens; identical to SEQ ID NO: 264674
  chr12:29890152-29890186
  hypo

SEQ ID NO: 315671 - DNA, 159 bp, Homo sapiens; identical to SEQ ID NO: 264675
  chr12:29945371-29945530
  hypo

SEQ ID NO: 315672 - DNA, 178 bp, Homo sapiens; identical to SEQ ID NO: 264676
  chr12:30274285-30274463
  hypo

SEQ ID NO: 315673 - DNA, 42 bp, Homo sapiens; identical to SEQ ID NO: 264677
  chr12:30473847-30473889
  hypo

SEQ ID NO: 315674 - DNA, 190 bp, Homo sapiens; identical to SEQ ID NO: 264678
  chr12:30861038-30861228
  hypo

SEQ ID NO: 315675 - DNA, 35 bp, Homo sapiens; identical to SEQ ID NO: 264679
  chr12:30950607-30950642
  hypo

SEQ ID NO: 315676 - DNA, 277 bp, Homo sapiens; identical to SEQ ID NO: 264681
  chr12:31255691-31255968
  hypo

SEQ ID NO: 315677 - DNA, 108 bp, Homo sapiens; identical to SEQ ID NO: 264682
  chr12:31399695-31399803
  hypo

SEQ ID NO: 315678 - DNA, 35 bp, Homo sapiens; identical to SEQ ID NO: 264683
  chr12:31663419-31663454
  hypo

SEQ ID NO: 315679 - DNA, 36 bp, Homo sapiens; identical to SEQ ID NO: 264684
  chr12:31881031-31881067
  hypo

SEQ ID NO: 315680 - DNA, 110 bp, Homo sapiens; identical to SEQ ID NO: 264685
  chr12:31973813-31973923
  hypo

SEQ ID NO: 315681 - DNA, 36 bp, Homo sapiens; identical to SEQ ID NO: 214837
  chr12:31986810-31986846
  hypo

SEQ ID NO: 315682 - DNA, 39 bp, Homo sapiens; identical to SEQ ID NO: 214838
  chr12:32140933-32140972
  hypo

SEQ ID NO: 315683 - DNA, 223 bp, Homo sapiens; identical to SEQ ID NO: 264688
  chr12:32142773-32142996
  hypo

SEQ ID NO: 315684 - DNA, 142 bp, Homo sapiens; identical to SEQ ID NO: 214840
  chr12:32155239-32155381
  hypo

SEQ ID NO: 315685 - DNA, 36 bp, Homo sapiens
  chr12:32597609-32597645
  hypo
attataggtgtgagccactgcgcatggcctaagcaa

SEQ ID NO: 315686 - DNA, 34 bp, Homo sapiens; identical to SEQ ID NO: 214841
  chr12:32831180-32831214
  hypo

SEQ ID NO: 315687 - DNA, 34 bp, Homo sapiens; identical to SEQ ID NO: 214842
  chr12:32831540-32831574
  hypo

SEQ ID NO: 315688 - DNA, 193 bp, Homo sapiens; identical to SEQ ID NO: 214843
  chr12:32864283-32864476
  hypo

SEQ ID NO: 315689 - DNA, 43 bp, Homo sapiens; identical to SEQ ID NO: 264694
  chr12:32995444-32995487
  hypo

SEQ ID NO: 315690 - DNA, 87 bp, Homo sapiens; identical to SEQ ID NO: 264695
  chr12:33034690-33034777
  hypo

SEQ ID NO: 315691 - DNA, 349 bp, Homo sapiens; identical to SEQ ID NO: 202934
  chr12:33049652-33050001
  hypo

SEQ ID NO: 315692 - DNA, 136 bp, Homo sapiens; identical to SEQ ID NO: 202937
  chr12:33592092-33592228
  hypo

SEQ ID NO: 315693 - DNA, 59 bp, Homo sapiens; identical to SEQ ID NO: 202938
  chr12:33592320-33592379
  hypo

SEQ ID NO: 315694 - DNA, 115 bp, Homo sapiens; identical to SEQ ID NO: 202939
  chr12:33592401-33592516
  hypo

SEQ ID NO: 315695 - DNA, 682 bp, Homo sapiens; identical to SEQ ID NO: 214848
  chr12:34319319-34320001
  hypo

SEQ ID NO: 315696 - DNA, 122 bp, Homo sapiens; identical to SEQ ID NO: 264697
  chr12:34357282-34357404
  hypo

SEQ ID NO: 315697 - DNA, 205 bp, Homo sapiens; identical to SEQ ID NO: 214849
  chr12:34358287-34358492
  hypo

SEQ ID NO: 315698 - DNA, 158 bp, Homo sapiens; identical to SEQ ID NO: 214850
  chr12:34358522-34358680
  hypo

SEQ ID NO: 315699 - DNA, 45 bp, Homo sapiens
  chr12:34364381-34364426
  hypo
ccatggaaggaccccagcctcgctgcttttatccggtgctgctca

SEQ ID NO: 315700 - DNA, 204 bp, Homo sapiens
  chr12:34364531-34364735
  hypo
ctggcgtcatgtttccttcccccggaggccttcttgacgctttggggtgccccccgtgggcgtgacacgcaccctgggaggaagccagggactgcacgacactcccaggcccagcgcaggcgctgccgggaaggcactgtcgtccgtgggaggactccggccggccgcgttttgccccatgccgcctcaaggtcttctttcaaa

SEQ ID NO: 315701 - DNA, 72 bp, Homo sapiens; identical to SEQ ID NO: 264700
  chr12:37971169-37971241
  hypo

SEQ ID NO: 315702 - DNA, 42 bp, Homo sapiens; identical to SEQ ID NO: 264701
  chr12:38543128-38543170
  hypo

SEQ ID NO: 315703 - DNA, 572 bp, Homo sapiens; identical to SEQ ID NO: 214851
  chr12:38548366-38548938
  hypo

SEQ ID NO: 315704 - DNA, 123 bp, Homo sapiens; identical to SEQ ID NO: 214852
  chr12:38548968-38549091
  hypo

SEQ ID NO: 315705 - DNA, 196 bp, Homo sapiens
  chr12:38550957-38551153
  hypo
aaggggacattgaggcagcacggggaataaggctgtgggttgaagtccttctaacaatgacgctgccttcctggcagcctctacgccctgcccaatagggttgtggagtcgcttgcttgcacccagggtgcgtgtcgcaccccagggggcaccccaaagcgccaagaaggcctccgggggaagggagtagaacgcc

SEQ ID NO: 315706 - DNA, 60 bp, Homo sapiens; identical to SEQ ID NO: 214854
  chr12:38551305-38551365
  hypo

SEQ ID NO: 315707 - DNA, 34 bp, Homo sapiens
  chr12:38551794-38551828
  hypo
ggtcgtcccatggacgacagtgccttcccagcag

SEQ ID NO: 315708 - DNA, 83 bp, Homo sapiens; identical to SEQ ID NO: 264705
  chr12:38552283-38552366
  hypo

SEQ ID NO: 315709 - DNA, 587 bp, Homo sapiens
  chr12:38553243-38553830
  hypo
cctggtttacacccagggtgcgtgcctcgcccacgggtggcaccccaaagcagcaagaaagccccggggggggaagaacaggatgccagacttgaaaggggacgttgaggcagcccaggaaaaaaaggggcgaggctggggtcctttcacggatgacagtgccttccctacagcccctatgccagtcccgggagggtcgcggagtccctgtcttgcacacaatgtgcgtgtctcgcccacggggggcaccccaaagtggcaagaagtcccccgcgggaaggcaacaggacgccaggcttgaatggggacgtttaggtagcctggagaaaaaagcagcgaggctggggtgatcccacgaatgacagtgccttaccggcagcccctttgccgggcatgcgggggttgttgattccctggcttgcacccagggtgagtgtcttgcccacggcgggcaccacaaagcagcaagaaggttcccgggggaaagggacagcacgtcagtcttgaagggggaagttgaggcagccccggggaaaaaaagcggggatgctggggtcctctcacggacgacactgccttcccagcag

SEQ ID NO: 315710 - DNA, 338 bp, Homo sapiens; identical to SEQ ID NO: 214856
  chr12:38553866-38554204
  hypo

SEQ ID NO: 315711 - DNA, 371 bp, Homo sapiens
  chr12:38554258-38554629
  hypo
tctggcttgcacccagaatcgtgcggcgcccacgacgggcaccccaaagcggcaagatatcccccgctggaagggaacaggatgccaggcttgaaaggagaagttgagccagtccggggaaaaaaatcccatggagaacagtgtcttcccggcagtctctttgccgggttcggtcgtggagtccctggcttgcacccagagtgcgtgtctttaaagcggggcatcctgttaccattctccgggggaattcttgccgccatggggtgccccctgagggcgagacacgcaccctgtgtgcaagacagggactccacgacccccccaaccacgagtctgccgcaggggctgccgggaaggcactgtcctccctg

SEQ ID NO: 315712 - DNA, 135 bp, Homo sapiens; identical to SEQ ID NO: 264707
  chr12:38555926-38556061
  hypo

SEQ ID NO: 315713 - DNA, 90 bp, Homo sapiens; identical to SEQ ID NO: 214858
  chr12:38595391-38595481
  hypo

SEQ ID NO: 315714 - DNA, 34 bp, Homo sapiens; identical to SEQ ID NO: 214859
  chr12:38595561-38595595
  hypo

SEQ ID NO: 315715 - DNA, 91 bp, Homo sapiens; identical to SEQ ID NO: 202945
  chr12:40618249-40618340
  hypo

SEQ ID NO: 315716 - DNA, 43 bp, Homo sapiens; identical to SEQ ID NO: 202946
  chr12:40619048-40619091
  hypo

SEQ ID NO: 315717 - DNA, 60 bp, Homo sapiens; identical to SEQ ID NO: 202950
  chr12:41582147-41582207
  hypo

SEQ ID NO: 315718 - DNA, 47 bp, Homo sapiens
  chr12:41925115-41925162
  hypo
actccacgtcattccgccagtggatggcctgccggagttccagtgcc

SEQ ID NO: 315719 - DNA, 120 bp, Homo sapiens; identical to SEQ ID NO: 264710
  chr12:41967350-41967470
  hypo

SEQ ID NO: 315720 - DNA, 120 bp, Homo sapiens; identical to SEQ ID NO: 264711
  chr12:42066119-42066239
  hypo

SEQ ID NO: 315721 - DNA, 98 bp, Homo sapiens; identical to SEQ ID NO: 264712
  chr12:42503371-42503469
  hypo

SEQ ID NO: 315722 - DNA, 32 bp, Homo sapiens; identical to SEQ ID NO: 264713
  chr12:42504945-42504977
  hypo

SEQ ID NO: 315723 - DNA, 40 bp, Homo sapiens; identical to SEQ ID NO: 264714
  chr12:42758694-42758734
  hypo

SEQ ID NO: 315724 - DNA, 183 bp, Homo sapiens; identical to SEQ ID NO: 264715
  chr12:42836274-42836457
  hypo

SEQ ID NO: 315725 - DNA, 150 bp, Homo sapiens; identical to SEQ ID NO: 264716
  chr12:42847594-42847744
  hypo

SEQ ID NO: 315726 - DNA, 41 bp, Homo sapiens; identical to SEQ ID NO: 264717
  chr12:42848888-42848929
  hypo

SEQ ID NO: 315727 - DNA, 78 bp, Homo sapiens; identical to SEQ ID NO: 264718
  chr12:42854066-42854144
  hypo

SEQ ID NO: 315728 - DNA, 89 bp, Homo sapiens; identical to SEQ ID NO: 214863
  chr12:42857519-42857608
  hypo

SEQ ID NO: 315729 - DNA, 38 bp, Homo sapiens; identical to SEQ ID NO: 264720
  chr12:43159470-43159508
  hypo

SEQ ID NO: 315730 - DNA, 33 bp, Homo sapiens; identical to SEQ ID NO: 264721
  chr12:44214605-44214638
  hypo

SEQ ID NO: 315731 - DNA, 205 bp, Homo sapiens; identical to SEQ ID NO: 264722
  chr12:44278770-44278975
  hypo

SEQ ID NO: 315732 - DNA, 43 bp, Homo sapiens; identical to SEQ ID NO: 264723
  chr12:45344717-45344760
  hypo

SEQ ID NO: 315733 - DNA, 85 bp, Homo sapiens; identical to SEQ ID NO: 264724
  chr12:45826930-45827015
  hypo

SEQ ID NO: 315734 - DNA, 133 bp, Homo sapiens; identical to SEQ ID NO: 264725
  chr12:45862284-45862417
  hypo

SEQ ID NO: 315735 - DNA, 36 bp, Homo sapiens; identical to SEQ ID NO: 214864
  chr12:46610346-46610382
  hypo

SEQ ID NO: 315736 - DNA, 36 bp, Homo sapiens; identical to SEQ ID NO: 214865
  chr12:46610622-46610658
  hypo

SEQ ID NO: 315737 - DNA, 42 bp, Homo sapiens; identical to SEQ ID NO: 264728
  chr12:46634310-46634352
  hypo

SEQ ID NO: 315738 - DNA, 131 bp, Homo sapiens; identical to SEQ ID NO: 264729
  chr12:46757484-46757615
  hypo

SEQ ID NO: 315739 - DNA, 214 bp, Homo sapiens; identical to SEQ ID NO: 264730
  chr12:47497158-47497372
  hypo

SEQ ID NO: 315740 - DNA, 39 bp, Homo sapiens; identical to SEQ ID NO: 264731
  chr12:47603245-47603284
  hypo

SEQ ID NO: 315741 - DNA, 237 bp, Homo sapiens; identical to SEQ ID NO: 214866
  chr12:47628809-47629046
  hypo

SEQ ID NO: 315742 - DNA, 141 bp, Homo sapiens; identical to SEQ ID NO: 214867
  chr12:47629208-47629349
  hypo

SEQ ID NO: 315743 - DNA, 111 bp, Homo sapiens; identical to SEQ ID NO: 214868
  chr12:47629379-47629490
  hypo

SEQ ID NO: 315744 - DNA, 264 bp, Homo sapiens; identical to SEQ ID NO: 214869
  chr12:47629544-47629808
  hypo

SEQ ID NO: 315745 - DNA, 149 bp, Homo sapiens; identical to SEQ ID NO: 264733
  chr12:47699297-47699446
  hypo

SEQ ID NO: 315746 - DNA, 120 bp, Homo sapiens; identical to SEQ ID NO: 264734
  chr12:47799205-47799325
  hypo

SEQ ID NO: 315747 - DNA, 191 bp, Homo sapiens; identical to SEQ ID NO: 264735
  chr12:48191883-48192074
  hypo

SEQ ID NO: 315748 - DNA, 48 bp, Homo sapiens; identical to SEQ ID NO: 264736
  chr12:48218921-48218969
  hypo

SEQ ID NO: 315749 - DNA, 39 bp, Homo sapiens; identical to SEQ ID NO: 264737
  chr12:48226920-48226959
  hypo

SEQ ID NO: 315750 - DNA, 90 bp, Homo sapiens; identical to SEQ ID NO: 264738
  chr12:48238689-48238779
  hypo

SEQ ID NO: 315751 - DNA, 97 bp, Homo sapiens; identical to SEQ ID NO: 264739
  chr12:48240443-48240540
  hypo

SEQ ID NO: 315752 - DNA, 192 bp, Homo sapiens; identical to SEQ ID NO: 288869
  chr12:48299194-48299386
  hypo

SEQ ID NO: 315753 - DNA, 32 bp, Homo sapiens; identical to SEQ ID NO: 288870
  chr12:48299387-48299419
  hypo

SEQ ID NO: 315754 - DNA, 49 bp, Homo sapiens; identical to SEQ ID NO: 288871
  chr12:48299465-48299514
  hypo

SEQ ID NO: 315755 - DNA, 119 bp, Homo sapiens
  chr12:48347939-48348058
  hypo
acttctcataactgcgacggtgagacacgcctgggaagccaagcccaggtgagaagtgatggctgtctcctcaggaatgtgctgcccaattaacactgcctcccagatggctcctgcgg

SEQ ID NO: 315756 - DNA, 493 bp, Homo sapiens; identical to SEQ ID NO: 202958
  chr12:48576976-48577469
  hypo

SEQ ID NO: 315757 - DNA, 32 bp, Homo sapiens; identical to SEQ ID NO: 264742
  chr12:48727661-48727693
  hypo

SEQ ID NO: 315758 - DNA, 59 bp, Homo sapiens; identical to SEQ ID NO: 214871
  chr12:48745168-48745227
  hypo

SEQ ID NO: 315759 - DNA, 76 bp, Homo sapiens; identical to SEQ ID NO: 264744
  chr12:48838930-48839006
  hypo

SEQ ID NO: 315760 - DNA, 138 bp, Homo sapiens; identical to SEQ ID NO: 214872
  chr12:49065584-49065722
  hypo

SEQ ID NO: 315761 - DNA, 335 bp, Homo sapiens; identical to SEQ ID NO: 202960
  chr12:49182447-49182782
  hypo

SEQ ID NO: 315762 - DNA, 326 bp, Homo sapiens; identical to SEQ ID NO: 288881
  chr12:49183004-49183330
  hypo

SEQ ID NO: 315763 - DNA, 38 bp, Homo sapiens; identical to SEQ ID NO: 214875
  chr12:49191468-49191506
  hypo

SEQ ID NO: 315764 - DNA, 481 bp, Homo sapiens; identical to SEQ ID NO: 202963
  chr12:49351242-49351723
  hypo

SEQ ID NO: 315765 - DNA, 60 bp, Homo sapiens; identical to SEQ ID NO: 202964
  chr12:49364178-49364238
  hypo

SEQ ID NO: 315766 - DNA, 527 bp, Homo sapiens; identical to SEQ ID NO: 288887
  chr12:49371614-49372141
  hypo

SEQ ID NO: 315767 - DNA, 76 bp, Homo sapiens; identical to SEQ ID NO: 288888
  chr12:49372236-49372312
  hypo

SEQ ID NO: 315768 - DNA, 41 bp, Homo sapiens; identical to SEQ ID NO: 202966
  chr12:49375529-49375570
  hypo

SEQ ID NO: 315769 - DNA, 176 bp, Homo sapiens; identical to SEQ ID NO: 214880
  chr12:49416383-49416559
  hypo

SEQ ID NO: 315770 - DNA, 250 bp, Homo sapiens; identical to SEQ ID NO: 214881
  chr12:49422761-49423011
  hypo

SEQ ID NO: 315771 - DNA, 48 bp, Homo sapiens; identical to SEQ ID NO: 214882
  chr12:49436025-49436073
  hypo

SEQ ID NO: 315772 - DNA, 231 bp, Homo sapiens; identical to SEQ ID NO: 264750
  chr12:49443423-49443654
  hypo

SEQ ID NO: 315773 - DNA, 91 bp, Homo sapiens; identical to SEQ ID NO: 288896
  chr12:49487980-49488071
  hypo

SEQ ID NO: 315774 - DNA, 78 bp, Homo sapiens; identical to SEQ ID NO: 122207
  chr12:49488131-49488209
  hypo

SEQ ID NO: 315775 - DNA, 44 bp, Homo sapiens; identical to SEQ ID NO: 264751
  chr12:49520524-49520568
  hypo

SEQ ID NO: 315776 - DNA, 154 bp, Homo sapiens; identical to SEQ ID NO: 214883
  chr12:49620906-49621060
  hypo

SEQ ID NO: 315777 - DNA, 85 bp, Homo sapiens; identical to SEQ ID NO: 264753
  chr12:49647106-49647191
  hypo

SEQ ID NO: 315778 - DNA, 301 bp, Homo sapiens; identical to SEQ ID NO: 202975
  chr12:49761541-49761842
  hypo

SEQ ID NO: 315779 - DNA, 383 bp, Homo sapiens; identical to SEQ ID NO: 264755
  chr12:49927213-49927596
  hypo

SEQ ID NO: 315780 - DNA, 460 bp, Homo sapiens; identical to SEQ ID NO: 288915
  chr12:49931603-49932063
  hypo

SEQ ID NO: 315781 - DNA, 92 bp, Homo sapiens; identical to SEQ ID NO: 224355
  chr12:49932286-49932378
  hypo

SEQ ID NO: 315782 - DNA, 233 bp, Homo sapiens; identical to SEQ ID NO: 288917
  chr12:49933026-49933259
  hypo

SEQ ID NO: 315783 - DNA, 141 bp, Homo sapiens; identical to SEQ ID NO: 288918
  chr12:49933289-49933430
  hypo

SEQ ID NO: 315784 - DNA, 247 bp, Homo sapiens; identical to SEQ ID NO: 214885
  chr12:49935483-49935730
  hypo

SEQ ID NO: 315785 - DNA, 57 bp, Homo sapiens; identical to SEQ ID NO: 214886
  chr12:49989816-49989873
  hypo

SEQ ID NO: 315786 - DNA, 363 bp, Homo sapiens
  chr12:50036036-50036399
  hypo
cacgggagagggagcgggagaaggaggaggcacgcaggatgcggcgcagggaagctgcctttcgaagcatgctgaggcaggctgtgcctgctctggagctaggcactgcctgggaagaggtcaggagcgtagcctggccccaagcacccctcaagcctgagggcagcggtgcttcaccactgagggcccaccccagtcacgtcacagccctgggccagctccagttcccttcctttctctgccccagccctgccctgtgctcatggcggtgtccaggccaggctgagtggggcctagtctgatcagcagtgctctcctcgttcaaggtccgtgagcgttttgtgtgtgactcagcctttgagc

SEQ ID NO: 315787 - DNA, 223 bp, Homo sapiens; identical to SEQ ID NO: 264759
  chr12:50037798-50038021
  hypo

SEQ ID NO: 315788 - DNA, 182 bp, Homo sapiens; identical to SEQ ID NO: 214887
  chr12:50185746-50185928
  hypo

SEQ ID NO: 315789 - DNA, 151 bp, Homo sapiens; identical to SEQ ID NO: 264761
  chr12:50237319-50237470
  hypo

SEQ ID NO: 315790 - DNA, 38 bp, Homo sapiens; identical to SEQ ID NO: 264762
  chr12:50262263-50262301
  hypo

SEQ ID NO: 315791 - DNA, 193 bp, Homo sapiens; identical to SEQ ID NO: 264763
  chr12:50269011-50269204
  hypo

SEQ ID NO: 315792 - DNA, 46 bp, Homo sapiens; identical to SEQ ID NO: 264764
  chr12:50282793-50282839
  hypo

SEQ ID NO: 315793 - DNA, 184 bp, Homo sapiens; identical to SEQ ID NO: 264765
  chr12:50296427-50296611
  hypo

SEQ ID NO: 315794 - DNA, 97 bp, Homo sapiens; identical to SEQ ID NO: 214888
  chr12:50322851-50322948
  hypo

SEQ ID NO: 315795 - DNA, 307 bp, Homo sapiens; identical to SEQ ID NO: 214889
  chr12:50366185-50366492
  hypo

SEQ ID NO: 315796 - DNA, 233 bp, Homo sapiens; identical to SEQ ID NO: 214890
  chr12:50400184-50400417
  hypo

SEQ ID NO: 315797 - DNA, 184 bp, Homo sapiens; identical to SEQ ID NO: 264769
  chr12:50467724-50467908
  hypo

SEQ ID NO: 315798 - DNA, 132 bp, Homo sapiens; identical to SEQ ID NO: 214891
  chr12:50484303-50484435
  hypo

SEQ ID NO: 315799 - DNA, 180 bp, Homo sapiens; identical to SEQ ID NO: 264771
  chr12:50602878-50603058
  hypo

SEQ ID NO: 315800 - DNA, 505 bp, Homo sapiens; identical to SEQ ID NO: 288927
  chr12:50677034-50677539
  hypo

SEQ ID NO: 315801 - DNA, 80 bp, Homo sapiens; identical to SEQ ID NO: 264772
  chr12:50785992-50786072
  hypo

SEQ ID NO: 315802 - DNA, 136 bp, Homo sapiens; identical to SEQ ID NO: 214892
  chr12:51116977-51117113
  hypo

SEQ ID NO: 315803 - DNA, 40 bp, Homo sapiens; identical to SEQ ID NO: 214893
  chr12:51148430-51148470
  hypo

SEQ ID NO: 315804 - DNA, 112 bp, Homo sapiens; identical to SEQ ID NO: 214894
  chr12:51346409-51346521
  hypo

SEQ ID NO: 315805 - DNA, 181 bp, Homo sapiens; identical to SEQ ID NO: 214895
  chr12:51346933-51347114
  hypo

SEQ ID NO: 315806 - DNA, 120 bp, Homo sapiens; identical to SEQ ID NO: 264778
  chr12:51407288-51407408
  hypo

SEQ ID NO: 315807 - DNA, 120 bp, Homo sapiens; identical to SEQ ID NO: 264779
  chr12:51407528-51407648
  hypo

SEQ ID NO: 315808 - DNA, 34 bp, Homo sapiens; identical to SEQ ID NO: 214896
  chr12:51421646-51421680
  hypo

SEQ ID NO: 315809 - DNA, 113 bp, Homo sapiens; identical to SEQ ID NO: 264781
  chr12:51461520-51461633
  hypo

SEQ ID NO: 315810 - DNA, 120 bp, Homo sapiens; identical to SEQ ID NO: 264782
  chr12:51478095-51478215
  hypo

SEQ ID NO: 315811 - DNA, 151 bp, Homo sapiens; identical to SEQ ID NO: 214897
  chr12:51479055-51479206
  hypo

SEQ ID NO: 315812 - DNA, 111 bp, Homo sapiens; identical to SEQ ID NO: 264785
  chr12:51592045-51592156
  hypo

SEQ ID NO: 315813 - DNA, 32 bp, Homo sapiens; identical to SEQ ID NO: 224358
  chr12:51610959-51610991
  hypo

SEQ ID NO: 315814 - DNA, 120 bp, Homo sapiens; identical to SEQ ID NO: 264786
  chr12:51615467-51615587
  hypo

SEQ ID NO: 315815 - DNA, 240 bp, Homo sapiens; identical to SEQ ID NO: 264787
  chr12:51794744-51794984
  hypo

SEQ ID NO: 315816 - DNA, 81 bp, Homo sapiens; identical to SEQ ID NO: 264788
  chr12:51795224-51795305
  hypo

SEQ ID NO: 315817 - DNA, 689 bp, Homo sapiens; identical to SEQ ID NO: 288937
  chr12:51818412-51819101
  hypo

SEQ ID NO: 315818 - DNA, 83 bp, Homo sapiens; identical to SEQ ID NO: 264789
  chr12:51844686-51844769
  hypo

SEQ ID NO: 315819 - DNA, 94 bp, Homo sapiens; identical to SEQ ID NO: 264790
  chr12:51873686-51873780
  hypo

SEQ ID NO: 315820 - DNA, 328 bp, Homo sapiens; identical to SEQ ID NO: 264791
  chr12:51919431-51919759
  hypo

SEQ ID NO: 315821 - DNA, 230 bp, Homo sapiens; identical to SEQ ID NO: 202983
  chr12:52294168-52294398
  hypo

SEQ ID NO: 315822 - DNA, 147 bp, Homo sapiens; identical to SEQ ID NO: 288941
  chr12:52345764-52345911
  hypo

SEQ ID NO: 315823 - DNA, 50 bp, Homo sapiens
  chr12:52387804-52387854
  hypo
tggtatgccaacggcgcagcccgcctgacggccctgcgcatcaagaagac

SEQ ID NO: 315824 - DNA, 149 bp, Homo sapiens; identical to SEQ ID NO: 288943
  chr12:52416804-52416953
  hypo

SEQ ID NO: 315825 - DNA, 179 bp, Homo sapiens; identical to SEQ ID NO: 288944
  chr12:52416985-52417164
  hypo

SEQ ID NO: 315826 - DNA, 191 bp, Homo sapiens; identical to SEQ ID NO: 288945
  chr12:52427134-52427325
  hypo

SEQ ID NO: 315827 - DNA, 39 bp, Homo sapiens; identical to SEQ ID NO: 264795
  chr12:52462471-52462510
  hypo

SEQ ID NO: 315828 - DNA, 204 bp, Homo sapiens
  chr12:52467434-52467638
  hypo
atgaactgtcgctcggaggtgctggaggtgtcggtggaggggcggcaggtggaggaggccatgctggctgtgctgcacacggtgcttctgcaccgcagcacaggcaagttccactacaagaaggagggcacctactccattggcaccgtgggcacccaggatgttgactgtgacttcatcgacttcacttatgtgcgtgtctct

SEQ ID NO: 315829 - DNA, 82 bp, Homo sapiens
  chr12:52490992-52491074
  hypo
ccagggggtgtatagtatcccgacctgtgataggctccgccacgatgcggggagtactatcacccccctctctttccctgga

SEQ ID NO: 315830 - DNA, 44 bp, Homo sapiens
  chr12:52491127-52491171
  hypo
tatcacccccccccggatattacgagccacattgcaggggggtg

SEQ ID NO: 315831 - DNA, 122 bp, Homo sapiens; identical to SEQ ID NO: 214900
  chr12:52539734-52539856
  hypo

SEQ ID NO: 315832 - DNA, 308 bp, Homo sapiens; identical to SEQ ID NO: 264799
  chr12:52567344-52567652
  hypo

SEQ ID NO: 315833 - DNA, 98 bp, Homo sapiens; identical to SEQ ID NO: 264800
  chr12:52647005-52647103
  hypo

SEQ ID NO: 315834 - DNA, 153 bp, Homo sapiens; identical to SEQ ID NO: 264801
  chr12:52647390-52647543
  hypo

SEQ ID NO: 315835 - DNA, 42 bp, Homo sapiens; identical to SEQ ID NO: 264802
  chr12:52648051-52648093
  hypo

SEQ ID NO: 315836 - DNA, 59 bp, Homo sapiens; identical to SEQ ID NO: 264803
  chr12:52750116-52750175
  hypo

SEQ ID NO: 315837 - DNA, 114 bp, Homo sapiens; identical to SEQ ID NO: 264804
  chr12:52779175-52779289
  hypo

SEQ ID NO: 315838 - DNA, 348 bp, Homo sapiens; identical to SEQ ID NO: 264805
  chr12:52793641-52793989
  hypo

SEQ ID NO: 315839 - DNA, 95 bp, Homo sapiens; identical to SEQ ID NO: 264806
  chr12:52906094-52906189
  hypo

SEQ ID NO: 315840 - DNA, 172 bp, Homo sapiens; identical to SEQ ID NO: 264807
  chr12:52910443-52910615
  hypo

SEQ ID NO: 315841 - DNA, 72 bp, Homo sapiens; identical to SEQ ID NO: 264808
  chr12:52911390-52911462
  hypo

SEQ ID NO: 315842 - DNA, 228 bp, Homo sapiens
  chr12:52913580-52913808
  hypo
tcggtcctcaccctctggatgctggggtcgatttgcaggttgaggggagtcaggagactctggttgacagtgacctcttggatacctccaggagggcagacaggaaagccagggccaccgaagccacctccaaagccagctccgccaccgagcccaaagccaccaccagctccaccgccgaaaccaaatccactaccggcaccacctccaaagccatagccgcctcca

SEQ ID NO: 315843 - DNA, 219 bp, Homo sapiens; identical to SEQ ID NO: 214902
  chr12:52913838-52914057
  hypo

SEQ ID NO: 315844 - DNA, 115 bp, Homo sapiens; identical to SEQ ID NO: 214903
  chr12:52914087-52914202
  hypo

SEQ ID NO: 315845 - DNA, 185 bp, Homo sapiens; identical to SEQ ID NO: 214904
  chr12:53007442-53007627
  hypo

SEQ ID NO: 315846 - DNA, 105 bp, Homo sapiens; identical to SEQ ID NO: 214905
  chr12:53040689-53040794
  hypo

SEQ ID NO: 315847 - DNA, 56 bp, Homo sapiens; identical to SEQ ID NO: 264812
  chr12:53041516-53041572
  hypo

SEQ ID NO: 315848 - DNA, 56 bp, Homo sapiens; identical to SEQ ID NO: 264813
  chr12:53041986-53042042
  hypo

SEQ ID NO: 315849 - DNA, 268 bp, Homo sapiens; identical to SEQ ID NO: 214906
  chr12:53045572-53045840
  hypo

SEQ ID NO: 315850 - DNA, 293 bp, Homo sapiens
  chr12:53068868-53069161
  hypo
tagctcttttctccggtaaggctgggacaaatcgacctcggtcttgccaagcatatttgttagtgatgctgggggagaactagagctaatgaaacagagggcatctctttatctggttactccggaataagtggtagaaacaaacttcacgctggaactgccaccagaggacttgacacccccagagctggatccccggcctcctatggagcctccagagctcccgccgccagagccccggccgccagagctgccgccgccgccgcctccagagccacctctgtagcccccac

SEQ ID NO: 315851 - DNA, 421 bp, Homo sapiens; identical to SEQ ID NO: 264816
  chr12:53183249-53183670
  hypo

SEQ ID NO: 315852 - DNA, 203 bp, Homo sapiens; identical to SEQ ID NO: 264818
  chr12:53214328-53214531
  hypo

SEQ ID NO: 315853 - DNA, 64 bp, Homo sapiens; identical to SEQ ID NO: 214908
  chr12:53241431-53241495
  hypo

SEQ ID NO: 315854 - DNA, 185 bp, Homo sapiens; identical to SEQ ID NO: 224367
  chr12:53272443-53272628
  hypo

SEQ ID NO: 315855 - DNA, 33 bp, Homo sapiens; identical to SEQ ID NO: 264820
  chr12:53345414-53345447
  hypo

SEQ ID NO: 315856 - DNA, 160 bp, Homo sapiens; identical to SEQ ID NO: 264821
  chr12:53452999-53453159
  hypo

SEQ ID NO: 315857 - DNA, 75 bp, Homo sapiens; identical to SEQ ID NO: 264822
  chr12:53454239-53454314
  hypo

SEQ ID NO: 315858 - DNA, 81 bp, Homo sapiens; identical to SEQ ID NO: 264823
  chr12:53463204-53463285
  hypo

SEQ ID NO: 315859 - DNA, 86 bp, Homo sapiens; identical to SEQ ID NO: 214909
  chr12:53467253-53467339
  hypo

SEQ ID NO: 315860 - DNA, 195 bp, Homo sapiens; identical to SEQ ID NO: 264825
  chr12:53474292-53474487
  hypo

SEQ ID NO: 315861 - DNA, 75 bp, Homo sapiens; identical to SEQ ID NO: 264826
  chr12:53509321-53509396
  hypo

SEQ ID NO: 315862 - DNA, 40 bp, Homo sapiens; identical to SEQ ID NO: 214910
  chr12:53517536-53517576
  hypo

SEQ ID NO: 315863 - DNA, 58 bp, Homo sapiens; identical to SEQ ID NO: 264828
  chr12:53547966-53548024
  hypo

SEQ ID NO: 315864 - DNA, 125 bp, Homo sapiens; identical to SEQ ID NO: 264831
  chr12:53677870-53677995
  hypo

SEQ ID NO: 315865 - DNA, 307 bp, Homo sapiens; identical to SEQ ID NO: 214911
  chr12:53685893-53686200
  hypo

SEQ ID NO: 315866 - DNA, 59 bp, Homo sapiens; identical to SEQ ID NO: 214912
  chr12:53686627-53686686
  hypo

SEQ ID NO: 315867 - DNA, 191 bp, Homo sapiens; identical to SEQ ID NO: 288970
  chr12:53719362-53719553
  hypo

SEQ ID NO: 315868 - DNA, 138 bp, Homo sapiens; identical to SEQ ID NO: 202995
  chr12:53765064-53765202
  hypo

SEQ ID NO: 315869 - DNA, 240 bp, Homo sapiens; identical to SEQ ID NO: 264834
  chr12:53778351-53778591
  hypo

SEQ ID NO: 315870 - DNA, 57 bp, Homo sapiens
  chr12:53785410-53785467
  hypo
tttaagtaatttcaacttttattttgtttgttatatgatcttgagatttgggataca

SEQ ID NO: 315871 - DNA, 92 bp, Homo sapiens; identical to SEQ ID NO: 264836
  chr12:53796833-53796925
  hypo

SEQ ID NO: 315872 - DNA, 43 bp, Homo sapiens; identical to SEQ ID NO: 264838
  chr12:53823277-53823320
  hypo

SEQ ID NO: 315873 - DNA, 35 bp, Homo sapiens; identical to SEQ ID NO: 264839
  chr12:53830285-53830320
  hypo

SEQ ID NO: 315874 - DNA, 53 bp, Homo sapiens
  chr12:53832417-53832470
  hypo
aggggggggcaaaggacattaacagacatttctcaaaagaagatatgcagccg

SEQ ID NO: 315875 - DNA, 41 bp, Homo sapiens; identical to SEQ ID NO: 264841
  chr12:53836912-53836953
  hypo

SEQ ID NO: 315876 - DNA, 157 bp, Homo sapiens; identical to SEQ ID NO: 264842
  chr12:53898408-53898565
  hypo

SEQ ID NO: 315877 - DNA, 204 bp, Homo sapiens; identical to SEQ ID NO: 214915
  chr12:53899813-53900017
  hypo

SEQ ID NO: 315878 - DNA, 404 bp, Homo sapiens; identical to SEQ ID NO: 264844
  chr12:53994392-53994796
  hypo

SEQ ID NO: 315879 - DNA, 36 bp, Homo sapiens; identical to SEQ ID NO: 264845
  chr12:54023346-54023382
  hypo

SEQ ID NO: 315880 - DNA, 44 bp, Homo sapiens; identical to SEQ ID NO: 264846
  chr12:54031206-54031250
  hypo

SEQ ID NO: 315881 - DNA, 87 bp, Homo sapiens; identical to SEQ ID NO: 264847
  chr12:54051791-54051878
  hypo

SEQ ID NO: 315882 - DNA, 155 bp, Homo sapiens; identical to SEQ ID NO: 264848
  chr12:54122158-54122313
  hypo

SEQ ID NO: 315883 - DNA, 71 bp, Homo sapiens; identical to SEQ ID NO: 288983
  chr12:54144768-54144839
  hypo

SEQ ID NO: 315884 - DNA, 305 bp, Homo sapiens; identical to SEQ ID NO: 288989
  chr12:54332435-54332740
  hypo

SEQ ID NO: 315885 - DNA, 116 bp, Homo sapiens; identical to SEQ ID NO: 203014
  chr12:54393243-54393359
  hypo

SEQ ID NO: 315886 - DNA, 434 bp, Homo sapiens; identical to SEQ ID NO: 289022
  chr12:54400007-54400441
  hypo

SEQ ID NO: 315887 - DNA, 584 bp, Homo sapiens; identical to SEQ ID NO: 203021
  chr12:54426523-54427107
  hypo

SEQ ID NO: 315888 - DNA, 329 bp, Homo sapiens; identical to SEQ ID NO: 203022
  chr12:54427307-54427636
  hypo

SEQ ID NO: 315889 - DNA, 44 bp, Homo sapiens; identical to SEQ ID NO: 264849
  chr12:54629097-54629141
  hypo

SEQ ID NO: 315890 - DNA, 148 bp, Homo sapiens; identical to SEQ ID NO: 264850
  chr12:54651109-54651257
  hypo

SEQ ID NO: 315891 - DNA, 178 bp, Homo sapiens; identical to SEQ ID NO: 214921
  chr12:54651287-54651465
  hypo

SEQ ID NO: 315892 - DNA, 41 bp, Homo sapiens; identical to SEQ ID NO: 203030
  chr12:54686414-54686455
  hypo

SEQ ID NO: 315893 - DNA, 38 bp, Homo sapiens; identical to SEQ ID NO: 264852
  chr12:54718115-54718153
  hypo

SEQ ID NO: 315894 - DNA, 56 bp, Homo sapiens
  chr12:54767804-54767860
  hypo
gagctgggtctccaggttctcggacgccaggctccctgcctctggtcttggcagcc

SEQ ID NO: 315895 - DNA, 277 bp, Homo sapiens; identical to SEQ ID NO: 289049
  chr12:54812879-54813156
  hypo

SEQ ID NO: 315896 - DNA, 31 bp, Homo sapiens; identical to SEQ ID NO: 264855
  chr12:54890476-54890507
  hypo

SEQ ID NO: 315897 - DNA, 91 bp, Homo sapiens; identical to SEQ ID NO: 264856
  chr12:55310066-55310157
  hypo

SEQ ID NO: 315898 - DNA, 39 bp, Homo sapiens; identical to SEQ ID NO: 214924
  chr12:55481152-55481191
  hypo

SEQ ID NO: 315899 - DNA, 36 bp, Homo sapiens; identical to SEQ ID NO: 264858
  chr12:55511044-55511080
  hypo

SEQ ID NO: 315900 - DNA, 278 bp, Homo sapiens; identical to SEQ ID NO: 264859
  chr12:56078877-56079155
  hypo

SEQ ID NO: 315901 - DNA, 33 bp, Homo sapiens; identical to SEQ ID NO: 264860
  chr12:56108936-56108969
  hypo

SEQ ID NO: 315902 - DNA, 180 bp, Homo sapiens; identical to SEQ ID NO: 264861
  chr12:56116619-56116799
  hypo

SEQ ID NO: 315903 - DNA, 269 bp, Homo sapiens; identical to SEQ ID NO: 214926
  chr12:56142456-56142725
  hypo

SEQ ID NO: 315904 - DNA, 88 bp, Homo sapiens; identical to SEQ ID NO: 214927
  chr12:56182547-56182635
  hypo

SEQ ID NO: 315905 - DNA, 151 bp, Homo sapiens; identical to SEQ ID NO: 214928
  chr12:56183314-56183465
  hypo

SEQ ID NO: 315906 - DNA, 31 bp, Homo sapiens; identical to SEQ ID NO: 214929
  chr12:56183705-56183736
  hypo

SEQ ID NO: 315907 - DNA, 140 bp, Homo sapiens; identical to SEQ ID NO: 264866
  chr12:56230959-56231099
  hypo

SEQ ID NO: 315908 - DNA, 42 bp, Homo sapiens; identical to SEQ ID NO: 224382
  chr12:56326151-56326193
  hypo

SEQ ID NO: 315909 - DNA, 137 bp, Homo sapiens; identical to SEQ ID NO: 264867
  chr12:56329173-56329310
  hypo

SEQ ID NO: 315910 - DNA, 196 bp, Homo sapiens; identical to SEQ ID NO: 264868
  chr12:56329557-56329753
  hypo

SEQ ID NO: 315911 - DNA, 120 bp, Homo sapiens; identical to SEQ ID NO: 264869
  chr12:56354598-56354718
  hypo

SEQ ID NO: 315912 - DNA, 151 bp, Homo sapiens; identical to SEQ ID NO: 203036
  chr12:56390556-56390707
  hypo

SEQ ID NO: 315913 - DNA, 304 bp, Homo sapiens; identical to SEQ ID NO: 289065
  chr12:56472732-56473036
  hypo

SEQ ID NO: 315914 - DNA, 348 bp, Homo sapiens; identical to SEQ ID NO: 122505
  chr12:56473998-56474346
  hypo

SEQ ID NO: 315915 - DNA, 174 bp, Homo sapiens; identical to SEQ ID NO: 264871
  chr12:56480248-56480422
  hypo

SEQ ID NO: 315916 - DNA, 56 bp, Homo sapiens; identical to SEQ ID NO: 264872
  chr12:56504406-56504462
  hypo

SEQ ID NO: 315917 - DNA, 374 bp, Homo sapiens; identical to SEQ ID NO: 214932
  chr12:56558007-56558381
  hypo

SEQ ID NO: 315918 - DNA, 148 bp, Homo sapiens; identical to SEQ ID NO: 214933
  chr12:56601395-56601543
  hypo

SEQ ID NO: 315919 - DNA, 207 bp, Homo sapiens; identical to SEQ ID NO: 214934
  chr12:56604087-56604294
  hypo

SEQ ID NO: 315920 - DNA, 90 bp, Homo sapiens; identical to SEQ ID NO: 214935
  chr12:56610573-56610663
  hypo

SEQ ID NO: 315921 - DNA, 200 bp, Homo sapiens; identical to SEQ ID NO: 214936
  chr12:56993681-56993881
  hypo

SEQ ID NO: 315922 - DNA, 62 bp, Homo sapiens
  chr12:57054418-57054480
  hypo
tttactagcaggaatagacattcaacatttaattgtggtcaatgtttaaatgaaacccacag

SEQ ID NO: 315923 - DNA, 35 bp, Homo sapiens; identical to SEQ ID NO: 264879
  chr12:57211451-57211486
  hypo

SEQ ID NO: 315924 - DNA, 108 bp, Homo sapiens; identical to SEQ ID NO: 264880
  chr12:57431637-57431745
  hypo

SEQ ID NO: 315925 - DNA, 32 bp, Homo sapiens; identical to SEQ ID NO: 214937
  chr12:57446184-57446216
  hypo

SEQ ID NO: 315926 - DNA, 172 bp, Homo sapiens; identical to SEQ ID NO: 214938
  chr12:57489924-57490096
  hypo

SEQ ID NO: 315927 - DNA, 74 bp, Homo sapiens; identical to SEQ ID NO: 264883
  chr12:57499242-57499316
  hypo

SEQ ID NO: 315928 - DNA, 91 bp, Homo sapiens; identical to SEQ ID NO: 264884
  chr12:57559573-57559664
  hypo

SEQ ID NO: 315929 - DNA, 114 bp, Homo sapiens; identical to SEQ ID NO: 214939
  chr12:57559925-57560039
  hypo

SEQ ID NO: 315930 - DNA, 356 bp, Homo sapiens; identical to SEQ ID NO: 264886
  chr12:57570816-57571172
  hypo

SEQ ID NO: 315931 - DNA, 35 bp, Homo sapiens; identical to SEQ ID NO: 264887
  chr12:57572148-57572183
  hypo

SEQ ID NO: 315932 - DNA, 38 bp, Homo sapiens; identical to SEQ ID NO: 264888
  chr12:57577265-57577303
  hypo

SEQ ID NO: 315933 - DNA, 182 bp, Homo sapiens; identical to SEQ ID NO: 264889
  chr12:57583524-57583706
  hypo

SEQ ID NO: 315934 - DNA, 71 bp, Homo sapiens; identical to SEQ ID NO: 214941
  chr12:57584915-57584986
  hypo

SEQ ID NO: 315935 - DNA, 197 bp, Homo sapiens; identical to SEQ ID NO: 264891
  chr12:57593155-57593352
  hypo

SEQ ID NO: 315936 - DNA, 67 bp, Homo sapiens; identical to SEQ ID NO: 214942
  chr12:57595540-57595607
  hypo

SEQ ID NO: 315937 - DNA, 149 bp, Homo sapiens; identical to SEQ ID NO: 264893
  chr12:57596873-57597022
  hypo

SEQ ID NO: 315938 - DNA, 78 bp, Homo sapiens; identical to SEQ ID NO: 264894
  chr12:57601872-57601950
  hypo

SEQ ID NO: 315939 - DNA, 200 bp, Homo sapiens; identical to SEQ ID NO: 264895
  chr12:57625974-57626174
  hypo

SEQ ID NO: 315940 - DNA, 80 bp, Homo sapiens; identical to SEQ ID NO: 264896
  chr12:57642438-57642518
  hypo

SEQ ID NO: 315941 - DNA, 150 bp, Homo sapiens; identical to SEQ ID NO: 264897
  chr12:57858461-57858611
  hypo

SEQ ID NO: 315942 - DNA, 56 bp, Homo sapiens; identical to SEQ ID NO: 264898
  chr12:57868221-57868277
  hypo

SEQ ID NO: 315943 - DNA, 82 bp, Homo sapiens; identical to SEQ ID NO: 214943
  chr12:57885677-57885759
  hypo

SEQ ID NO: 315944 - DNA, 103 bp, Homo sapiens; identical to SEQ ID NO: 264901
  chr12:57963865-57963968
  hypo

SEQ ID NO: 315945 - DNA, 105 bp, Homo sapiens; identical to SEQ ID NO: 214944
  chr12:57982779-57982884
  hypo

SEQ ID NO: 315946 - DNA, 42 bp, Homo sapiens; identical to SEQ ID NO: 264903
  chr12:57986074-57986116
  hypo

SEQ ID NO: 315947 - DNA, 86 bp, Homo sapiens; identical to SEQ ID NO: 264904
  chr12:58068674-58068760
  hypo

SEQ ID NO: 315948 - DNA, 44 bp, Homo sapiens; identical to SEQ ID NO: 264905
  chr12:58122681-58122725
  hypo

SEQ ID NO: 315949 - DNA, 36 bp, Homo sapiens; identical to SEQ ID NO: 264906
  chr12:58124644-58124680
  hypo

SEQ ID NO: 315950 - DNA, 166 bp, Homo sapiens; identical to SEQ ID NO: 214945
  chr12:58152861-58153027
  hypo

SEQ ID NO: 315951 - DNA, 251 bp, Homo sapiens; identical to SEQ ID NO: 203054
  chr12:58159038-58159289
  hypo

SEQ ID NO: 315952 - DNA, 147 bp, Homo sapiens; identical to SEQ ID NO: 203055
  chr12:58159346-58159493
  hypo

SEQ ID NO: 315953 - DNA, 102 bp, Homo sapiens; identical to SEQ ID NO: 214948
  chr12:58241599-58241701
  hypo

SEQ ID NO: 315954 - DNA, 374 bp, Homo sapiens; identical to SEQ ID NO: 224387
  chr12:58259123-58259497
  hypo

SEQ ID NO: 315955 - DNA, 157 bp, Homo sapiens; identical to SEQ ID NO: 264909
  chr12:58262604-58262761
  hypo

SEQ ID NO: 315956 - DNA, 212 bp, Homo sapiens; identical to SEQ ID NO: 264910
  chr12:58263123-58263335
  hypo

SEQ ID NO: 315957 - DNA, 41 bp, Homo sapiens; identical to SEQ ID NO: 264911
  chr12:58274994-58275035
  hypo

SEQ ID NO: 315958 - DNA, 226 bp, Homo sapiens; identical to SEQ ID NO: 214950
  chr12:58284085-58284311
  hypo

SEQ ID NO: 315959 - DNA, 280 bp, Homo sapiens; identical to SEQ ID NO: 224388
  chr12:58290227-58290507
  hypo

SEQ ID NO: 315960 - DNA, 188 bp, Homo sapiens; identical to SEQ ID NO: 203059
  chr12:59313474-59313662
  hypo

SEQ ID NO: 315961 - DNA, 216 bp, Homo sapiens; identical to SEQ ID NO: 289119
  chr12:59313943-59314159
  hypo

SEQ ID NO: 315962 - DNA, 356 bp, Homo sapiens; identical to SEQ ID NO: 289120
  chr12:59314189-59314545
  hypo

SEQ ID NO: 315963 - DNA, 451 bp, Homo sapiens; identical to SEQ ID NO: 289122
  chr12:59989602-59990053
  hypo

SEQ ID NO: 315964 - DNA, 123 bp, Homo sapiens; identical to SEQ ID NO: 214955
  chr12:60507737-60507860
  hypo

SEQ ID NO: 315965 - DNA, 44 bp, Homo sapiens; identical to SEQ ID NO: 214956
  chr12:60507890-60507934
  hypo

SEQ ID NO: 315966 - DNA, 189 bp, Homo sapiens; identical to SEQ ID NO: 264915
  chr12:61582596-61582785
  hypo

SEQ ID NO: 315967 - DNA, 121 bp, Homo sapiens; identical to SEQ ID NO: 264916
  chr12:62266114-62266235
  hypo

SEQ ID NO: 315968 - DNA, 157 bp, Homo sapiens; identical to SEQ ID NO: 264917
  chr12:63014933-63015090
  hypo

SEQ ID NO: 315969 - DNA, 42 bp, Homo sapiens; identical to SEQ ID NO: 264919
  chr12:63126532-63126574
  hypo

SEQ ID NO: 315970 - DNA, 136 bp, Homo sapiens
  chr12:63195599-63195735
  hypo
tccttgaatgcactttcaagcgctccgatgaccaggcactcatggggaatcttcttctcggtaaagaagcgtgtggggggcgtgctgggggagcccggggcccccacccctccgcgcagggaggctgcccgggtca

SEQ ID NO: 315971 - DNA, 181 bp, Homo sapiens
  chr12:63195813-63195994
  hypo
tgtccacgatgtcctgcagctgctccgtgatgtggtgctgcagcaggcgtgacgccaccaccgcggccccggaccccgcgtgcccgtcaaacagcgaccaatagtggcaggaaacaccctcggattcctgtgggagaggacgacagggaggagtgagaacggctgtggactttgcctcagg

SEQ ID NO: 315972 - DNA, 192 bp, Homo sapiens; identical to SEQ ID NO: 214959
  chr12:63271246-63271438
  hypo

SEQ ID NO: 315973 - DNA, 266 bp, Homo sapiens; identical to SEQ ID NO: 264922
  chr12:63397171-63397437
  hypo

SEQ ID NO: 315974 - DNA, 33 bp, Homo sapiens; identical to SEQ ID NO: 264923
  chr12:63397758-63397791
  hypo

SEQ ID NO: 315975 - DNA, 329 bp, Homo sapiens; identical to SEQ ID NO: 203072
  chr12:64237615-64237944
  hypo

SEQ ID NO: 315976 - DNA, 110 bp, Homo sapiens; identical to SEQ ID NO: 203073
  chr12:64238195-64238305
  hypo

SEQ ID NO: 315977 - DNA, 98 bp, Homo sapiens; identical to SEQ ID NO: 264925
  chr12:64373753-64373851
  hypo

SEQ ID NO: 315978 - DNA, 275 bp, Homo sapiens; identical to SEQ ID NO: 214962
  chr12:64521629-64521904
  hypo

SEQ ID NO: 315979 - DNA, 269 bp, Homo sapiens
  chr12:64782916-64783185
  hypo
acacctgtccccaacggaaaaaccaagaacacacctggagagcagctcagacaaagggagccaggcggggaaaacagtaattggagaggagaccgtgcttccagtctgttgctggtttacaaggtaaatctattcctggacgaaaggggtacaggaacagcacccgaaaaccggcgacaggctgtggcaggcccgacgtctttcaagcccagctcctagcgtcgacgcccctccttccaagacgtttcccagcaggccctgcgcccagt

SEQ ID NO: 315980 - DNA, 192 bp, Homo sapiens
  chr12:64797258-64797450
  hypo
aactagtgaggaggcggagtggcagtcaagtcgaggcagcctaagcctacactgcctctatgttgcattaataaattaataaatctgtgaccaaataaatgaagtgacatttagtagcatcgaaagatcccgtgagtaggacttcctaagaatgctctccttcttttcatggacaaaattttagtctgttta

SEQ ID NO: 315981 - DNA, 48 bp, Homo sapiens
  chr12:64799659-64799707
  hypo
tgctgggattacaggcgtgagccaccgcgcccggccttccactgcata

SEQ ID NO: 315982 - DNA, 396 bp, Homo sapiens; identical to SEQ ID NO: 203076
  chr12:64845175-64845571
  hypo

SEQ ID NO: 315983 - DNA, 144 bp, Homo sapiens; identical to SEQ ID NO: 264930
  chr12:64993418-64993562
  hypo

SEQ ID NO: 315984 - DNA, 32 bp, Homo sapiens; identical to SEQ ID NO: 264931
  chr12:65030351-65030383
  hypo

SEQ ID NO: 315985 - DNA, 32 bp, Homo sapiens; identical to SEQ ID NO: 214965
  chr12:65557257-65557289
  hypo

SEQ ID NO: 315986 - DNA, 32 bp, Homo sapiens; identical to SEQ ID NO: 214966
  chr12:65557469-65557501
  hypo

SEQ ID NO: 315987 - DNA, 272 bp, Homo sapiens; identical to SEQ ID NO: 289145
  chr12:65564381-65564653
  hypo

SEQ ID NO: 315988 - DNA, 50 bp, Homo sapiens; identical to SEQ ID NO: 49821
  chr12:65564722-65564772
  hypo

SEQ ID NO: 315989 - DNA, 41 bp, Homo sapiens; identical to SEQ ID NO: 214967
  chr12:66213996-66214037
  hypo

SEQ ID NO: 315990 - DNA, 31 bp, Homo sapiens; identical to SEQ ID NO: 264936
  chr12:66248227-66248258
  hypo

SEQ ID NO: 315991 - DNA, 33 bp, Homo sapiens; identical to SEQ ID NO: 264937
  chr12:66269546-66269579
  hypo

SEQ ID NO: 315992 - DNA, 89 bp, Homo sapiens; identical to SEQ ID NO: 264938
  chr12:66343866-66343955
  hypo

SEQ ID NO: 315993 - DNA, 92 bp, Homo sapiens; identical to SEQ ID NO: 264940
  chr12:66843698-66843790
  hypo

SEQ ID NO: 315994 - DNA, 94 bp, Homo sapiens; identical to SEQ ID NO: 264941
  chr12:66889676-66889770
  hypo

SEQ ID NO: 315995 - DNA, 35 bp, Homo sapiens; identical to SEQ ID NO: 264942
  chr12:68433185-68433220
  hypo

SEQ ID NO: 315996 - DNA, 35 bp, Homo sapiens; identical to SEQ ID NO: 264943
  chr12:68433460-68433495
  hypo

SEQ ID NO: 315997 - DNA, 33 bp, Homo sapiens; identical to SEQ ID NO: 264945
  chr12:69002754-69002787
  hypo

SEQ ID NO: 315998 - DNA, 64 bp, Homo sapiens; identical to SEQ ID NO: 224404
  chr12:69080591-69080655
  hypo

SEQ ID NO: 315999 - DNA, 47 bp, Homo sapiens; identical to SEQ ID NO: 224405
  chr12:69080866-69080913
  hypo

SEQ ID NO: 316000 - DNA, 43 bp, Homo sapiens; identical to SEQ ID NO: 214968
  chr12:69133795-69133838
  hypo

SEQ ID NO: 316001 - DNA, 209 bp, Homo sapiens; identical to SEQ ID NO: 214969
  chr12:69190343-69190552
  hypo

SEQ ID NO: 316002 - DNA, 43 bp, Homo sapiens; identical to SEQ ID NO: 264948
  chr12:69193920-69193963
  hypo

SEQ ID NO: 316003 - DNA, 72 bp, Homo sapiens
  chr12:69203731-69203803
  hypo
ttgagtattacagatagtgccgctttgtacatgcatcccgtgtgactatttctgtaagaaagattttataga

SEQ ID NO: 316004 - DNA, 104 bp, Homo sapiens; identical to SEQ ID NO: 264950
  chr12:69218066-69218170
  hypo

SEQ ID NO: 316005 - DNA, 137 bp, Homo sapiens; identical to SEQ ID NO: 264951
  chr12:69219402-69219539
  hypo

SEQ ID NO: 316006 - DNA, 34 bp, Homo sapiens; identical to SEQ ID NO: 264952
  chr12:69220640-69220674
  hypo

SEQ ID NO: 316007 - DNA, 39 bp, Homo sapiens; identical to SEQ ID NO: 203092
  chr12:69241507-69241546
  hypo

SEQ ID NO: 316008 - DNA, 198 bp, Homo sapiens; identical to SEQ ID NO: 264955
  chr12:69277880-69278078
  hypo

SEQ ID NO: 316009 - DNA, 114 bp, Homo sapiens; identical to SEQ ID NO: 264956
  chr12:69461743-69461857
  hypo

SEQ ID NO: 316010 - DNA, 64 bp, Homo sapiens; identical to SEQ ID NO: 264957
  chr12:69639025-69639089
  hypo

SEQ ID NO: 316011 - DNA, 102 bp, Homo sapiens; identical to SEQ ID NO: 214971
  chr12:69644224-69644326
  hypo

SEQ ID NO: 316012 - DNA, 98 bp, Homo sapiens; identical to SEQ ID NO: 264959
  chr12:69799148-69799246
  hypo

SEQ ID NO: 316013 - DNA, 33 bp, Homo sapiens; identical to SEQ ID NO: 264960
  chr12:69820434-69820467
  hypo

SEQ ID NO: 316014 - DNA, 131 bp, Homo sapiens; identical to SEQ ID NO: 214972
  chr12:69999219-69999350
  hypo

SEQ ID NO: 316015 - DNA, 178 bp, Homo sapiens; identical to SEQ ID NO: 214973
  chr12:70004624-70004802
  hypo

SEQ ID NO: 316016 - DNA, 136 bp, Homo sapiens
  chr12:70087357-70087493
  hypo
tgagtgaataaacaaacataaagaattttcaaaggaattctggaggtcctgtctcagctgagaagagcccatggaaggaaaagccattcatagtacctgcttcaaccacgtggtccattgtgggaaatcttttgta

SEQ ID NO: 316017 - DNA, 72 bp, Homo sapiens; identical to SEQ ID NO: 264965
  chr12:70135096-70135168
  hypo

SEQ ID NO: 316018 - DNA, 36 bp, Homo sapiens
  chr12:70173198-70173234
  hypo
tcggccatcttggctcctcctcccatttgtctttct

SEQ ID NO: 316019 - DNA, 132 bp, Homo sapiens
  chr12:70173275-70173407
  hypo
ttgatgctatcccatagatcttgtaagctttcttcattcctctttagtctttttttttttcttctctacctgtatatttttcacttatcctgcctttgagctcactcatcgtttcttcgcttggttaattct

SEQ ID NO: 316020 - DNA, 33 bp, Homo sapiens; identical to SEQ ID NO: 264967
  chr12:70435915-70435948
  hypo

SEQ ID NO: 316021 - DNA, 171 bp, Homo sapiens; identical to SEQ ID NO: 214974
  chr12:70648187-70648358
  hypo

SEQ ID NO: 316022 - DNA, 76 bp, Homo sapiens
  chr12:70651452-70651528
  hypo
acccttttcttaagtagactcttcttccctagcatctattgtaattagctattacgctaaaaaaattttgtctttc

SEQ ID NO: 316023 - DNA, 205 bp, Homo sapiens; identical to SEQ ID NO: 264970
  chr12:70765937-70766142
  hypo

SEQ ID NO: 316024 - DNA, 194 bp, Homo sapiens; identical to SEQ ID NO: 264971
  chr12:70954498-70954692
  hypo

SEQ ID NO: 316025 - DNA, 42 bp, Homo sapiens; identical to SEQ ID NO: 214975
  chr12:72098321-72098363
  hypo

SEQ ID NO: 316026 - DNA, 120 bp, Homo sapiens; identical to SEQ ID NO: 214976
  chr12:72127145-72127265
  hypo

SEQ ID NO: 316027 - DNA, 67 bp, Homo sapiens; identical to SEQ ID NO: 214977
  chr12:72165436-72165503
  hypo

SEQ ID NO: 316028 - DNA, 98 bp, Homo sapiens; identical to SEQ ID NO: 264975
  chr12:72272242-72272340
  hypo

SEQ ID NO: 316029 - DNA, 40 bp, Homo sapiens; identical to SEQ ID NO: 214978
  chr12:72642202-72642242
  hypo

SEQ ID NO: 316030 - DNA, 102 bp, Homo sapiens; identical to SEQ ID NO: 264977
  chr12:73130929-73131031
  hypo

SEQ ID NO: 316031 - DNA, 166 bp, Homo sapiens; identical to SEQ ID NO: 264978
  chr12:74564711-74564877
  hypo

SEQ ID NO: 316032 - DNA, 237 bp, Homo sapiens; identical to SEQ ID NO: 264979
  chr12:75699403-75699640
  hypo

SEQ ID NO: 316033 - DNA, 44 bp, Homo sapiens; identical to SEQ ID NO: 264980
  chr12:75702602-75702646
  hypo

SEQ ID NO: 316034 - DNA, 31 bp, Homo sapiens; identical to SEQ ID NO: 264981
  chr12:76706641-76706672
  hypo

SEQ ID NO: 316035 - DNA, 120 bp, Homo sapiens; identical to SEQ ID NO: 214979
  chr12:76878984-76879104
  hypo

SEQ ID NO: 316036 - DNA, 38 bp, Homo sapiens; identical to SEQ ID NO: 214980
  chr12:76879284-76879322
  hypo

SEQ ID NO: 316037 - DNA, 70 bp, Homo sapiens; identical to SEQ ID NO: 264984
  chr12:77002013-77002083
  hypo

SEQ ID NO: 316038 - DNA, 321 bp, Homo sapiens; identical to SEQ ID NO: 264986
  chr12:77216007-77216328
  hypo

SEQ ID NO: 316039 - DNA, 114 bp, Homo sapiens; identical to SEQ ID NO: 203107
  chr12:77272744-77272858
  hypo

SEQ ID NO: 316040 - DNA, 54 bp, Homo sapiens; identical to SEQ ID NO: 264987
  chr12:77424235-77424289
  hypo

SEQ ID NO: 316041 - DNA, 32 bp, Homo sapiens; identical to SEQ ID NO: 214983
  chr12:77453497-77453529
  hypo

SEQ ID NO: 316042 - DNA, 276 bp, Homo sapiens
  chr12:79842637-79842913
  hypo
tatagtcgggccttatctctagagctagatgattcatattcatttcatggcttctttcagaaagtgcaggtggtggtaactgttttggactatgacaagattggcaagaacgatgccatcggcaaagtctttgtgggctacaacagcaccggcgcggagctgcgacactggtcagacatgctggccaaccccaggcgacctattgcccagtggcacaccctgcaggtagaggaggaagttgatgccatgctggccgtcaagaagtaaaggaaagaa

SEQ ID NO: 316043 - DNA, 164 bp, Homo sapiens; identical to SEQ ID NO: 214984
  chr12:79926688-79926852
  hypo

SEQ ID NO: 316044 - DNA, 855 bp, Homo sapiens; identical to SEQ ID NO: 224407
  chr12:80084234-80085089
  hypo

SEQ ID NO: 316045 - DNA, 41 bp, Homo sapiens; identical to SEQ ID NO: 264991
  chr12:80871262-80871303
  hypo

SEQ ID NO: 316046 - DNA, 385 bp, Homo sapiens; identical to SEQ ID NO: 203112
  chr12:81330352-81330737
  hypo

SEQ ID NO: 316047 - DNA, 414 bp, Homo sapiens; identical to SEQ ID NO: 122764
  chr12:83080990-83081404
  hypo

SEQ ID NO: 316048 - DNA, 43 bp, Homo sapiens; identical to SEQ ID NO: 264992
  chr12:84323713-84323756
  hypo

SEQ ID NO: 316049 - DNA, 38 bp, Homo sapiens; identical to SEQ ID NO: 264993
  chr12:86216675-86216713
  hypo

SEQ ID NO: 316050 - DNA, 40 bp, Homo sapiens; identical to SEQ ID NO: 214988
  chr12:89020039-89020079
  hypo

SEQ ID NO: 316051 - DNA, 449 bp, Homo sapiens; identical to SEQ ID NO: 203128
  chr12:89747142-89747591
  hypo

SEQ ID NO: 316052 - DNA, 158 bp, Homo sapiens; identical to SEQ ID NO: 264995
  chr12:89772134-89772292
  hypo

SEQ ID NO: 316053 - DNA, 94 bp, Homo sapiens; identical to SEQ ID NO: 214990
  chr12:89800520-89800614
  hypo

SEQ ID NO: 316054 - DNA, 33 bp, Homo sapiens; identical to SEQ ID NO: 214991
  chr12:89915163-89915196
  hypo

SEQ ID NO: 316055 - DNA, 157 bp, Homo sapiens; identical to SEQ ID NO: 264998
  chr12:89916944-89917101
  hypo

SEQ ID NO: 316056 - DNA, 33 bp, Homo sapiens; identical to SEQ ID NO: 264999
  chr12:89973340-89973373
  hypo

SEQ ID NO: 316057 - DNA, 136 bp, Homo sapiens; identical to SEQ ID NO: 265000
  chr12:90025699-90025835
  hypo

SEQ ID NO: 316058 - DNA, 126 bp, Homo sapiens; identical to SEQ ID NO: 214992
  chr12:90049546-90049672
  hypo

SEQ ID NO: 316059 - DNA, 54 bp, Homo sapiens; identical to SEQ ID NO: 214993
  chr12:90313458-90313512
  hypo

SEQ ID NO: 316060 - DNA, 75 bp, Homo sapiens; identical to SEQ ID NO: 265003
  chr12:93475466-93475541
  hypo

SEQ ID NO: 316061 - DNA, 39 bp, Homo sapiens; identical to SEQ ID NO: 265004
  chr12:93476370-93476409
  hypo

SEQ ID NO: 316062 - DNA, 327 bp, Homo sapiens; identical to SEQ ID NO: 265005
  chr12:93709062-93709389
  hypo

SEQ ID NO: 316063 - DNA, 137 bp, Homo sapiens
  chr12:93710944-93711081
  hypo
catgtcttctaacatcgacccaggactcccgcttctctttacaccatatactgttctttatgtgccgctgtttttctctttatagtttttctaggacaaaaaccaagctccatcagaaggttaaacctgtgtcaggt

SEQ ID NO: 316064 - DNA, 96 bp, Homo sapiens; identical to SEQ ID NO: 265007
  chr12:93738883-93738979
  hypo

SEQ ID NO: 316065 - DNA, 271 bp, Homo sapiens; identical to SEQ ID NO: 203130
  chr12:93966030-93966301
  hypo

SEQ ID NO: 316066 - DNA, 64 bp, Homo sapiens; identical to SEQ ID NO: 203132
  chr12:93985620-93985684
  hypo

SEQ ID NO: 316067 - DNA, 141 bp, Homo sapiens; identical to SEQ ID NO: 265008
  chr12:94093737-94093878
  hypo

SEQ ID NO: 316068 - DNA, 42 bp, Homo sapiens; identical to SEQ ID NO: 214996
  chr12:94145345-94145387
  hypo

SEQ ID NO: 316069 - DNA, 281 bp, Homo sapiens; identical to SEQ ID NO: 265010
  chr12:94145627-94145908
  hypo

SEQ ID NO: 316070 - DNA, 40 bp, Homo sapiens; identical to SEQ ID NO: 265011
  chr12:94203995-94204035
  hypo

SEQ ID NO: 316071 - DNA, 56 bp, Homo sapiens; identical to SEQ ID NO: 265012
  chr12:94233300-94233356
  hypo

SEQ ID NO: 316072 - DNA, 104 bp, Homo sapiens; identical to SEQ ID NO: 265013
  chr12:94235585-94235689
  hypo

SEQ ID NO: 316073 - DNA, 113 bp, Homo sapiens; identical to SEQ ID NO: 289235
  chr12:94541784-94541897
  hypo

SEQ ID NO: 316074 - DNA, 1131 bp, Homo sapiens; identical to SEQ ID NO: 289236
  chr12:94541957-94543088
  hypo

SEQ ID NO: 316075 - DNA, 100 bp, Homo sapiens; identical to SEQ ID NO: 203134
  chr12:94544052-94544152
  hypo

SEQ ID NO: 316076 - DNA, 34 bp, Homo sapiens; identical to SEQ ID NO: 203135
  chr12:94544417-94544451
  hypo

SEQ ID NO: 316077 - DNA, 251 bp, Homo sapiens; identical to SEQ ID NO: 265014
  chr12:94658439-94658690
  hypo

SEQ ID NO: 316078 - DNA, 77 bp, Homo sapiens; identical to SEQ ID NO: 265015
  chr12:95397956-95398033
  hypo

SEQ ID NO: 316079 - DNA, 89 bp, Homo sapiens; identical to SEQ ID NO: 265017
  chr12:95492921-95493010
  hypo

SEQ ID NO: 316080 - DNA, 41 bp, Homo sapiens; identical to SEQ ID NO: 265018
  chr12:95562127-95562168
  hypo

SEQ ID NO: 316081 - DNA, 152 bp, Homo sapiens; identical to SEQ ID NO: 215001
  chr12:95602736-95602888
  hypo

SEQ ID NO: 316082 - DNA, 209 bp, Homo sapiens; identical to SEQ ID NO: 265020
  chr12:95676257-95676466
  hypo

SEQ ID NO: 316083 - DNA, 37 bp, Homo sapiens; identical to SEQ ID NO: 265021
  chr12:95900348-95900385
  hypo

SEQ ID NO: 316084 - DNA, 153 bp, Homo sapiens; identical to SEQ ID NO: 265022
  chr12:96115682-96115835
  hypo

SEQ ID NO: 316085 - DNA, 94 bp, Homo sapiens; identical to SEQ ID NO: 265023
  chr12:96131819-96131913
  hypo

SEQ ID NO: 316086 - DNA, 109 bp, Homo sapiens; identical to SEQ ID NO: 203138
  chr12:96183926-96184035
  hypo

SEQ ID NO: 316087 - DNA, 72 bp, Homo sapiens; identical to SEQ ID NO: 203139
  chr12:96184965-96185037
  hypo

SEQ ID NO: 316088 - DNA, 219 bp, Homo sapiens; identical to SEQ ID NO: 203140
  chr12:96185121-96185340
  hypo

SEQ ID NO: 316089 - DNA, 39 bp, Homo sapiens; identical to SEQ ID NO: 265024
  chr12:96431742-96431781
  hypo

SEQ ID NO: 316090 - DNA, 32 bp, Homo sapiens; identical to SEQ ID NO: 265025
  chr12:96437261-96437293
  hypo

SEQ ID NO: 316091 - DNA, 92 bp, Homo sapiens; identical to SEQ ID NO: 265026
  chr12:96437413-96437505
  hypo

SEQ ID NO: 316092 - DNA, 174 bp, Homo sapiens; identical to SEQ ID NO: 265027
  chr12:96566283-96566457
  hypo

SEQ ID NO: 316093 - DNA, 206 bp, Homo sapiens; identical to SEQ ID NO: 224419
  chr12:96587648-96587854
  hypo

SEQ ID NO: 316094 - DNA, 59 bp, Homo sapiens; identical to SEQ ID NO: 265028
  chr12:96613304-96613363
  hypo

SEQ ID NO: 316095 - DNA, 33 bp, Homo sapiens; identical to SEQ ID NO: 224420
  chr12:96618052-96618085
  hypo

SEQ ID NO: 316096 - DNA, 77 bp, Homo sapiens; identical to SEQ ID NO: 265029
  chr12:96633652-96633729
  hypo

SEQ ID NO: 316097 - DNA, 83 bp, Homo sapiens; identical to SEQ ID NO: 265030
  chr12:96641021-96641104
  hypo

SEQ ID NO: 316098 - DNA, 62 bp, Homo sapiens; identical to SEQ ID NO: 215005
  chr12:97339536-97339598
  hypo

SEQ ID NO: 316099 - DNA, 200 bp, Homo sapiens; identical to SEQ ID NO: 215006
  chr12:98947901-98948101
  hypo

SEQ ID NO: 316100 - DNA, 35 bp, Homo sapiens; identical to SEQ ID NO: 215007
  chr12:98948341-98948376
  hypo

SEQ ID NO: 316101 - DNA, 85 bp, Homo sapiens; identical to SEQ ID NO: 215008
  chr12:98983724-98983809
  hypo

SEQ ID NO: 316102 - DNA, 120 bp, Homo sapiens; identical to SEQ ID NO: 265036
  chr12:100624655-100624775
  hypo

SEQ ID NO: 316103 - DNA, 169 bp, Homo sapiens; identical to SEQ ID NO: 215009
  chr12:101711200-101711369
  hypo

SEQ ID NO: 316104 - DNA, 94 bp, Homo sapiens; identical to SEQ ID NO: 215010
  chr12:101718176-101718270
  hypo

SEQ ID NO: 316105 - DNA, 196 bp, Homo sapiens; identical to SEQ ID NO: 265040
  chr12:101720929-101721125
  hypo

SEQ ID NO: 316106 - DNA, 36 bp, Homo sapiens; identical to SEQ ID NO: 265041
  chr12:101962172-101962208
  hypo

SEQ ID NO: 316107 - DNA, 192 bp, Homo sapiens; identical to SEQ ID NO: 265042
  chr12:102108364-102108556
  hypo

SEQ ID NO: 316108 - DNA, 197 bp, Homo sapiens; identical to SEQ ID NO: 215011
  chr12:102132858-102133055
  hypo

SEQ ID NO: 316109 - DNA, 56 bp, Homo sapiens; identical to SEQ ID NO: 215012
  chr12:102133325-102133381
  hypo

SEQ ID NO: 316110 - DNA, 36 bp, Homo sapiens; identical to SEQ ID NO: 265045
  chr12:102134948-102134984
  hypo

SEQ ID NO: 316111 - DNA, 33 bp, Homo sapiens; identical to SEQ ID NO: 265046
  chr12:102276171-102276204
  hypo

SEQ ID NO: 316112 - DNA, 358 bp, Homo sapiens; identical to SEQ ID NO: 215013
  chr12:102301886-102302244
  hypo

SEQ ID NO: 316113 - DNA, 31 bp, Homo sapiens; identical to SEQ ID NO: 265048
  chr12:102457128-102457159
  hypo

SEQ ID NO: 316114 - DNA, 150 bp, Homo sapiens; identical to SEQ ID NO: 265049
  chr12:102457339-102457489
  hypo

SEQ ID NO: 316115 - DNA, 202 bp, Homo sapiens; identical to SEQ ID NO: 122896
  chr12:103696193-103696395
  hypo

SEQ ID NO: 316116 - DNA, 92 bp, Homo sapiens; identical to SEQ ID NO: 265050
  chr12:103926638-103926730
  hypo

SEQ ID NO: 316117 - DNA, 98 bp, Homo sapiens; identical to SEQ ID NO: 265051
  chr12:103970054-103970152
  hypo

SEQ ID NO: 316118 - DNA, 126 bp, Homo sapiens; identical to SEQ ID NO: 265052
  chr12:104169295-104169421
  hypo

SEQ ID NO: 316119 - DNA, 39 bp, Homo sapiens; identical to SEQ ID NO: 215014
  chr12:104220732-104220771
  hypo

SEQ ID NO: 316120 - DNA, 247 bp, Homo sapiens; identical to SEQ ID NO: 289283
  chr12:104323141-104323388
  hypo

SEQ ID NO: 316121 - DNA, 98 bp, Homo sapiens; identical to SEQ ID NO: 203156
  chr12:104459023-104459121
  hypo

SEQ ID NO: 316122 - DNA, 37 bp, Homo sapiens; identical to SEQ ID NO: 215016
  chr12:104506941-104506978
  hypo

SEQ ID NO: 316123 - DNA, 42 bp, Homo sapiens; identical to SEQ ID NO: 215017
  chr12:104685528-104685570
  hypo

SEQ ID NO: 316124 - DNA, 92 bp, Homo sapiens; identical to SEQ ID NO: 215018
  chr12:104686067-104686159
  hypo

SEQ ID NO: 316125 - DNA, 35 bp, Homo sapiens; identical to SEQ ID NO: 215019
  chr12:104691424-104691459
  hypo

SEQ ID NO: 316126 - DNA, 83 bp, Homo sapiens
  chr12:104698303-104698386
  hypo
aatggcaacatgcctacaaagttgcagaagttggacctgagtagttatccagaagcgacagaaaaaaacgtagaaaggatttt

SEQ ID NO: 316127 - DNA, 36 bp, Homo sapiens; identical to SEQ ID NO: 215020
  chr12:104702054-104702090
  hypo

SEQ ID NO: 316128 - DNA, 35 bp, Homo sapiens; identical to SEQ ID NO: 215021
  chr12:104703967-104704002
  hypo

SEQ ID NO: 316129 - DNA, 143 bp, Homo sapiens; identical to SEQ ID NO: 265063
  chr12:104799424-104799567
  hypo

SEQ ID NO: 316130 - DNA, 348 bp, Homo sapiens; identical to SEQ ID NO: 203159
  chr12:104851545-104851893
  hypo

SEQ ID NO: 316131 - DNA, 175 bp, Homo sapiens; identical to SEQ ID NO: 215023
  chr12:105096586-105096761
  hypo

SEQ ID NO: 316132 - DNA, 131 bp, Homo sapiens; identical to SEQ ID NO: 265065
  chr12:105097266-105097397
  hypo

SEQ ID NO: 316133 - DNA, 49 bp, Homo sapiens; identical to SEQ ID NO: 215024
  chr12:105132876-105132925
  hypo

SEQ ID NO: 316134 - DNA, 228 bp, Homo sapiens
  chr12:105392583-105392811
  hypo
gtgtgccctctgtgcgtgtgcttacatgggtagcagtggccactcagggtaagggggcgggctgctggtctccatgcatagtttcacaccactggcagtgttgacacaggggcagggtactggtggctgcgggactggtgccaaatgtgcgcacgtttatgctggctgcagtggctgcacagggcgcagggcaggtccactggtcactgtgcctagttttgcagctgg

SEQ ID NO: 316135 - DNA, 71 bp, Homo sapiens
  chr12:105392841-105392912
  hypo
gtggtctccgtacctgcagatactccagtggcagtggcagcatggtggtcgggtgcagtgtgctcaagcca

SEQ ID NO: 316136 - DNA, 239 bp, Homo sapiens; identical to SEQ ID NO: 265068
  chr12:105472670-105472909
  hypo

SEQ ID NO: 316137 - DNA, 146 bp, Homo sapiens; identical to SEQ ID NO: 265069
  chr12:105607980-105608126
  hypo

SEQ ID NO: 316138 - DNA, 40 bp, Homo sapiens; identical to SEQ ID NO: 265070
  chr12:105773503-105773543
  hypo

SEQ ID NO: 316139 - DNA, 204 bp, Homo sapiens; identical to SEQ ID NO: 265071
  chr12:105955873-105956077
  hypo

SEQ ID NO: 316140 - DNA, 158 bp, Homo sapiens; identical to SEQ ID NO: 265072
  chr12:105956297-105956455
  hypo

SEQ ID NO: 316141 - DNA, 117 bp, Homo sapiens; identical to SEQ ID NO: 215025
  chr12:106460688-106460805
  hypo

SEQ ID NO: 316142 - DNA, 588 bp, Homo sapiens; identical to SEQ ID NO: 289297
  chr12:106532406-106532994
  hypo

SEQ ID NO: 316143 - DNA, 264 bp, Homo sapiens; identical to SEQ ID NO: 203162
  chr12:106640992-106641256
  hypo

SEQ ID NO: 316144 - DNA, 54 bp, Homo sapiens; identical to SEQ ID NO: 203163
  chr12:106641515-106641569
  hypo

SEQ ID NO: 316145 - DNA, 142 bp, Homo sapiens; identical to SEQ ID NO: 265074
  chr12:106643971-106644113
  hypo

SEQ ID NO: 316146 - DNA, 59 bp, Homo sapiens; identical to SEQ ID NO: 265075
  chr12:106669249-106669308
  hypo

SEQ ID NO: 316147 - DNA, 42 bp, Homo sapiens; identical to SEQ ID NO: 265076
  chr12:106829974-106830016
  hypo

SEQ ID NO: 316148 - DNA, 189 bp, Homo sapiens; identical to SEQ ID NO: 215028
  chr12:106881472-106881661
  hypo

SEQ ID NO: 316149 - DNA, 42 bp, Homo sapiens; identical to SEQ ID NO: 265078
  chr12:107103207-107103249
  hypo

SEQ ID NO: 316150 - DNA, 39 bp, Homo sapiens; identical to SEQ ID NO: 265079
  chr12:107114442-107114481
  hypo

SEQ ID NO: 316151 - DNA, 985 bp, Homo sapiens; identical to SEQ ID NO: 289305
  chr12:107167936-107168921
  hypo

SEQ ID NO: 316152 - DNA, 87 bp, Homo sapiens; identical to SEQ ID NO: 265080
  chr12:107436703-107436790
  hypo

SEQ ID NO: 316153 - DNA, 113 bp, Homo sapiens; identical to SEQ ID NO: 265081
  chr12:107436820-107436933
  hypo

SEQ ID NO: 316154 - DNA, 41 bp, Homo sapiens; identical to SEQ ID NO: 226552
  chr12:108298348-108298389
  hypo

SEQ ID NO: 316155 - DNA, 99 bp, Homo sapiens; identical to SEQ ID NO: 215030
  chr12:108926049-108926148
  hypo

SEQ ID NO: 316156 - DNA, 390 bp, Homo sapiens; identical to SEQ ID NO: 215031
  chr12:108926178-108926568
  hypo

SEQ ID NO: 316157 - DNA, 32 bp, Homo sapiens; identical to SEQ ID NO: 215032
  chr12:108963690-108963722
  hypo

SEQ ID NO: 316158 - DNA, 92 bp, Homo sapiens; identical to SEQ ID NO: 265085
  chr12:108985671-108985763
  hypo

SEQ ID NO: 316159 - DNA, 43 bp, Homo sapiens; identical to SEQ ID NO: 265086
  chr12:109014134-109014177
  hypo

SEQ ID NO: 316160 - DNA, 212 bp, Homo sapiens; identical to SEQ ID NO: 265087
  chr12:109050947-109051159
  hypo

SEQ ID NO: 316161 - DNA, 169 bp, Homo sapiens; identical to SEQ ID NO: 265088
  chr12:109181383-109181552
  hypo

SEQ ID NO: 316162 - DNA, 80 bp, Homo sapiens; identical to SEQ ID NO: 265089
  chr12:109195703-109195783
  hypo

SEQ ID NO: 316163 - DNA, 180 bp, Homo sapiens; identical to SEQ ID NO: 265090
  chr12:109204591-109204771
  hypo

SEQ ID NO: 316164 - DNA, 52 bp, Homo sapiens; identical to SEQ ID NO: 215033
  chr12:109208564-109208616
  hypo

SEQ ID NO: 316165 - DNA, 151 bp, Homo sapiens; identical to SEQ ID NO: 215034
  chr12:109208674-109208825
  hypo

SEQ ID NO: 316166 - DNA, 134 bp, Homo sapiens; identical to SEQ ID NO: 265092
  chr12:109209742-109209876
  hypo

SEQ ID NO: 316167 - DNA, 126 bp, Homo sapiens; identical to SEQ ID NO: 215035
  chr12:109213025-109213151
  hypo

SEQ ID NO: 316168 - DNA, 163 bp, Homo sapiens; identical to SEQ ID NO: 215036
  chr12:109488356-109488519
  hypo

SEQ ID NO: 316169 - DNA, 245 bp, Homo sapiens; identical to SEQ ID NO: 265095
  chr12:109507775-109508020
  hypo

SEQ ID NO: 316170 - DNA, 41 bp, Homo sapiens; identical to SEQ ID NO: 265096
  chr12:109540086-109540127
  hypo

SEQ ID NO: 316171 - DNA, 156 bp, Homo sapiens; identical to SEQ ID NO: 265097
  chr12:109637356-109637512
  hypo

SEQ ID NO: 316172 - DNA, 210 bp, Homo sapiens; identical to SEQ ID NO: 265098
  chr12:109717149-109717359
  hypo

SEQ ID NO: 316173 - DNA, 589 bp, Homo sapiens; identical to SEQ ID NO: 289331
  chr12:109746919-109747508
  hypo

SEQ ID NO: 316174 - DNA, 98 bp, Homo sapiens
  chr12:109796964-109797062
  hypo
cccaggcatttgagcgcctcatagctcgtggggaacctgacaggcaattgtattatgaaagctgacatgctgaatggacccttcttgacgatattctt

SEQ ID NO: 316175 - DNA, 381 bp, Homo sapiens
  chr12:109873123-109873504
  hypo
tataaacattgttccgccgtttcagttctcgtttggatcagattctgttgttcactactagggtgtaaaaccgtgagagaccagccccttgaaattaaagtttacaaaacttcacttgtctgcgtgtctgatgttggaaagtttagcttcaaagcctgcagcctgggtgtttgctgggaatggtcaatgagaaaagttagatggggaaatgcaaaaagtaaaaaatcaaaactgcggggggagggagcgtctcttttgaaatgtaaccggtctgtcaagaactacgcttgagtcatttgagggcctgctgtgcgccaggtgaacactaagtcctttaaaccatggtctcattctgttctgagaacagacctgtaagggagg

SEQ ID NO: 316176 - DNA, 39 bp, Homo sapiens; identical to SEQ ID NO: 265101
  chr12:109878129-109878168
  hypo

SEQ ID NO: 316177 - DNA, 195 bp, Homo sapiens; identical to SEQ ID NO: 265102
  chr12:109881228-109881423
  hypo

SEQ ID NO: 316178 - DNA, 214 bp, Homo sapiens; identical to SEQ ID NO: 265103
  chr12:109886526-109886740
  hypo

SEQ ID NO: 316179 - DNA, 175 bp, Homo sapiens; identical to SEQ ID NO: 215038
  chr12:109887568-109887743
  hypo

SEQ ID NO: 316180 - DNA, 199 bp, Homo sapiens; identical to SEQ ID NO: 265105
  chr12:109887946-109888145
  hypo

SEQ ID NO: 316181 - DNA, 178 bp, Homo sapiens; identical to SEQ ID NO: 265106
  chr12:109898435-109898613
  hypo

SEQ ID NO: 316182 - DNA, 33 bp, Homo sapiens; identical to SEQ ID NO: 265107
  chr12:109916584-109916617
  hypo

SEQ ID NO: 316183 - DNA, 46 bp, Homo sapiens; identical to SEQ ID NO: 265108
  chr12:109935639-109935685
  hypo

SEQ ID NO: 316184 - DNA, 303 bp, Homo sapiens; identical to SEQ ID NO: 265109
  chr12:109935997-109936300
  hypo

SEQ ID NO: 316185 - DNA, 159 bp, Homo sapiens; identical to SEQ ID NO: 265110
  chr12:109936815-109936974
  hypo

SEQ ID NO: 316186 - DNA, 172 bp, Homo sapiens; identical to SEQ ID NO: 265111
  chr12:109970800-109970972
  hypo

SEQ ID NO: 316187 - DNA, 76 bp, Homo sapiens; identical to SEQ ID NO: 265112
  chr12:109973151-109973227
  hypo

SEQ ID NO: 316188 - DNA, 179 bp, Homo sapiens; identical to SEQ ID NO: 215039
  chr12:110019852-110020031
  hypo

SEQ ID NO: 316189 - DNA, 141 bp, Homo sapiens; identical to SEQ ID NO: 265114
  chr12:110164950-110165091
  hypo

SEQ ID NO: 316190 - DNA, 43 bp, Homo sapiens; identical to SEQ ID NO: 265115
  chr12:110170347-110170390
  hypo

SEQ ID NO: 316191 - DNA, 338 bp, Homo sapiens; identical to SEQ ID NO: 265116
  chr12:110224374-110224712
  hypo

SEQ ID NO: 316192 - DNA, 34 bp, Homo sapiens; identical to SEQ ID NO: 265117
  chr12:110250928-110250962
  hypo

SEQ ID NO: 316193 - DNA, 119 bp, Homo sapiens
  chr12:110258862-110258981
  hypo
tcatggaaaccctggcaaacatttgtcaaatcccatcctcctgattacgtgaccaaggaaagctgcttaaatctgggggcaagtttgggcatgcaaacctgctccgccccagcggggag

SEQ ID NO: 316194 - DNA, 634 bp, Homo sapiens
  chr12:110352780-110353414
  hypo
cgaggtacacgccacgcatatgtatagcctctccagctttccatgaggtacacgccacgcatacagcctctccagctttctacgaggtacatgccatgcatacagcctctccagctttctaccaggtacacacaatgcatacagcctctccagctttccacgaggtacacgccacgcatacagcctctccagctttccacgaggtaagcgccacgcatacagcctctccagctttctatgaggtacacaccatgcatacagcctttcaagtcccgcatgctcccttccgttccttggcacgtgcattgctgttgctcagctggattctccagtctgggtagggccgcaggcttaccttcctcatcagaggcagggctctgccctgtgggccttgtcttggggtggtgactttgctcttggcactcaggttgcagagcgccggctgcaggcatgggaagcagaccagcaggaggaggaggaagaggaggaggcccggcgggtcgagcagctctcagatgccctgctgcagcaggaggcggagactatggctgagcagggctaccggcctaaggtaggaagtctgccaggatataggccaacaccggcaagacagactctgcccggcccctgctcc

SEQ ID NO: 316195 - DNA, 71 bp, Homo sapiens; identical to SEQ ID NO: 265120
  chr12:110357433-110357504
  hypo

SEQ ID NO: 316196 - DNA, 192 bp, Homo sapiens; identical to SEQ ID NO: 215041
  chr12:110378869-110379061
  hypo

SEQ ID NO: 316197 - DNA, 36 bp, Homo sapiens; identical to SEQ ID NO: 215042
  chr12:110388924-110388960
  hypo

SEQ ID NO: 316198 - DNA, 100 bp, Homo sapiens; identical to SEQ ID NO: 265123
  chr12:110389830-110389930
  hypo

SEQ ID NO: 316199 - DNA, 162 bp, Homo sapiens; identical to SEQ ID NO: 265124
  chr12:110489068-110489230
  hypo

SEQ ID NO: 316200 - DNA, 87 bp, Homo sapiens; identical to SEQ ID NO: 265125
  chr12:110518055-110518142
  hypo

SEQ ID NO: 316201 - DNA, 37 bp, Homo sapiens; identical to SEQ ID NO: 265127
  chr12:110563479-110563516
  hypo

SEQ ID NO: 316202 - DNA, 63 bp, Homo sapiens
  chr12:110563722-110563785
  hypo
aatggaattggacacagatacggaatttacagtttagcagggaagagaagatgcgtacctaaa

SEQ ID NO: 316203 - DNA, 31 bp, Homo sapiens; identical to SEQ ID NO: 265130
  chr12:110767512-110767543
  hypo

SEQ ID NO: 316204 - DNA, 444 bp, Homo sapiens; identical to SEQ ID NO: 215043
  chr12:110778337-110778781
  hypo

SEQ ID NO: 316205 - DNA, 155 bp, Homo sapiens
  chr12:110782524-110782679
  hypo
gctctggctaccaggcgtgagcaggtggtggtagcaccacaggccccggttaccatcactgtcccatgtctttgatcttcgtccttgtggggactggcctgcatggcctcggtggcagcgagccctgcagaggcaagtgcatcagcatcactgtg

SEQ ID NO: 316206 - DNA, 101 bp, Homo sapiens; identical to SEQ ID NO: 265133
  chr12:110783743-110783844
  hypo

SEQ ID NO: 316207 - DNA, 167 bp, Homo sapiens; identical to SEQ ID NO: 215045
  chr12:110783925-110784092
  hypo

SEQ ID NO: 316208 - DNA, 142 bp, Homo sapiens; identical to SEQ ID NO: 265135
  chr12:110784843-110784985
  hypo

SEQ ID NO: 316209 - DNA, 303 bp, Homo sapiens; identical to SEQ ID NO: 265136
  chr12:110785458-110785761
  hypo

SEQ ID NO: 316210 - DNA, 148 bp, Homo sapiens; identical to SEQ ID NO: 215046
  chr12:110806697-110806845
  hypo

SEQ ID NO: 316211 - DNA, 164 bp, Homo sapiens; identical to SEQ ID NO: 265138
  chr12:110807995-110808159
  hypo

SEQ ID NO: 316212 - DNA, 201 bp, Homo sapiens; identical to SEQ ID NO: 215047
  chr12:110808573-110808774
  hypo

SEQ ID NO: 316213 - DNA, 120 bp, Homo sapiens; identical to SEQ ID NO: 215048
  chr12:110915437-110915557
  hypo

SEQ ID NO: 316214 - DNA, 97 bp, Homo sapiens; identical to SEQ ID NO: 215049
  chr12:110916597-110916694
  hypo

SEQ ID NO: 316215 - DNA, 37 bp, Homo sapiens; identical to SEQ ID NO: 215050
  chr12:110916994-110917031
  hypo

SEQ ID NO: 316216 - DNA, 80 bp, Homo sapiens
  chr12:110983626-110983706
  hypo
aggggactatgaatgagccacgtcctgctcacacttaatggctgagaggggagattacctgtcgctcaagacgactccct

SEQ ID NO: 316217 - DNA, 157 bp, Homo sapiens
  chr12:110983736-110983893
  hypo
atggagtgttgaagtaatgctgctgctcatctgatcggtgcacgacttcaccacccctgacaaccaggaagcctgaatcgcccaggtttgctgtgtgtaagcggtggctggttctgtccagcaccacaatgcaggcggtgctgctacctagaaacaa

SEQ ID NO: 316218 - DNA, 316 bp, Homo sapiens; identical to SEQ ID NO: 215051
  chr12:111083708-111084024
  hypo

SEQ ID NO: 316219 - DNA, 153 bp, Homo sapiens; identical to SEQ ID NO: 215052
  chr12:111087519-111087672
  hypo

SEQ ID NO: 316220 - DNA, 120 bp, Homo sapiens; identical to SEQ ID NO: 215053
  chr12:111195775-111195895
  hypo

SEQ ID NO: 316221 - DNA, 99 bp, Homo sapiens; identical to SEQ ID NO: 289345
  chr12:111284505-111284604
  hypo

SEQ ID NO: 316222 - DNA, 41 bp, Homo sapiens; identical to SEQ ID NO: 289346
  chr12:111285034-111285075
  hypo

SEQ ID NO: 316223 - DNA, 398 bp, Homo sapiens; identical to SEQ ID NO: 265148
  chr12:111402645-111403043
  hypo

SEQ ID NO: 316224 - DNA, 33 bp, Homo sapiens; identical to SEQ ID NO: 203182
  chr12:111471132-111471165
  hypo

SEQ ID NO: 316225 - DNA, 371 bp, Homo sapiens; identical to SEQ ID NO: 289348
  chr12:111473017-111473388
  hypo

SEQ ID NO: 316226 - DNA, 242 bp, Homo sapiens; identical to SEQ ID NO: 265149
  chr12:111501288-111501530
  hypo

SEQ ID NO: 316227 - DNA, 65 bp, Homo sapiens; identical to SEQ ID NO: 215056
  chr12:111725445-111725510
  hypo

SEQ ID NO: 316228 - DNA, 63 bp, Homo sapiens; identical to SEQ ID NO: 215057
  chr12:111725564-111725627
  hypo

SEQ ID NO: 316229 - DNA, 388 bp, Homo sapiens; identical to SEQ ID NO: 265152
  chr12:111800614-111801002
  hypo

SEQ ID NO: 316230 - DNA, 180 bp, Homo sapiens; identical to SEQ ID NO: 265153
  chr12:111829848-111830028
  hypo

SEQ ID NO: 316231 - DNA, 335 bp, Homo sapiens; identical to SEQ ID NO: 203184
  chr12:111844275-111844610
  hypo

SEQ ID NO: 316232 - DNA, 61 bp, Homo sapiens; identical to SEQ ID NO: 265154
  chr12:111855883-111855944
  hypo

SEQ ID NO: 316233 - DNA, 113 bp, Homo sapiens; identical to SEQ ID NO: 215059
  chr12:111885452-111885565
  hypo

SEQ ID NO: 316234 - DNA, 42 bp, Homo sapiens; identical to SEQ ID NO: 265156
  chr12:112015341-112015383
  hypo

SEQ ID NO: 316235 - DNA, 220 bp, Homo sapiens; identical to SEQ ID NO: 265157
  chr12:112082001-112082221
  hypo

SEQ ID NO: 316236 - DNA, 81 bp, Homo sapiens; identical to SEQ ID NO: 215060
  chr12:112082472-112082553
  hypo

SEQ ID NO: 316237 - DNA, 86 bp, Homo sapiens; identical to SEQ ID NO: 265159
  chr12:112110965-112111051
  hypo

SEQ ID NO: 316238 - DNA, 120 bp, Homo sapiens; identical to SEQ ID NO: 265160
  chr12:112126606-112126726
  hypo

SEQ ID NO: 316239 - DNA, 168 bp, Homo sapiens; identical to SEQ ID NO: 265161
  chr12:112171648-112171816
  hypo

SEQ ID NO: 316240 - DNA, 54 bp, Homo sapiens; identical to SEQ ID NO: 215061
  chr12:112194070-112194124
  hypo

SEQ ID NO: 316241 - DNA, 159 bp, Homo sapiens; identical to SEQ ID NO: 265163
  chr12:112196487-112196646
  hypo

SEQ ID NO: 316242 - DNA, 91 bp, Homo sapiens; identical to SEQ ID NO: 265164
  chr12:112218335-112218426
  hypo

SEQ ID NO: 316243 - DNA, 82 bp, Homo sapiens; identical to SEQ ID NO: 215062
  chr12:112288155-112288237
  hypo

SEQ ID NO: 316244 - DNA, 37 bp, Homo sapiens; identical to SEQ ID NO: 265166
  chr12:112535637-112535674
  hypo

SEQ ID NO: 316245 - DNA, 34 bp, Homo sapiens; identical to SEQ ID NO: 265167
  chr12:112560194-112560228
  hypo

SEQ ID NO: 316246 - DNA, 90 bp, Homo sapiens; identical to SEQ ID NO: 215063
  chr12:112574643-112574733
  hypo

SEQ ID NO: 316247 - DNA, 35 bp, Homo sapiens; identical to SEQ ID NO: 215064
  chr12:112575271-112575306
  hypo

SEQ ID NO: 316248 - DNA, 31 bp, Homo sapiens; identical to SEQ ID NO: 215065
  chr12:112591128-112591159
  hypo

SEQ ID NO: 316249 - DNA, 100 bp, Homo sapiens; identical to SEQ ID NO: 215066
  chr12:112591890-112591990
  hypo

SEQ ID NO: 316250 - DNA, 333 bp, Homo sapiens; identical to SEQ ID NO: 215067
  chr12:112610022-112610355
  hypo

SEQ ID NO: 316251 - DNA, 220 bp, Homo sapiens; identical to SEQ ID NO: 215068
  chr12:112610446-112610666
  hypo

SEQ ID NO: 316252 - DNA, 93 bp, Homo sapiens; identical to SEQ ID NO: 215069
  chr12:112612659-112612752
  hypo

SEQ ID NO: 316253 - DNA, 70 bp, Homo sapiens; identical to SEQ ID NO: 215070
  chr12:112616770-112616840
  hypo

SEQ ID NO: 316254 - DNA, 230 bp, Homo sapiens; identical to SEQ ID NO: 265176
  chr12:112620317-112620547
  hypo

SEQ ID NO: 316255 - DNA, 251 bp, Homo sapiens; identical to SEQ ID NO: 265177
  chr12:112622465-112622716
  hypo

SEQ ID NO: 316256 - DNA, 382 bp, Homo sapiens; identical to SEQ ID NO: 215071
  chr12:112657024-112657406
  hypo

SEQ ID NO: 316257 - DNA, 177 bp, Homo sapiens; identical to SEQ ID NO: 265180
  chr12:112681203-112681380
  hypo

SEQ ID NO: 316258 - DNA, 114 bp, Homo sapiens; identical to SEQ ID NO: 215072
  chr12:112684718-112684832
  hypo

SEQ ID NO: 316259 - DNA, 42 bp, Homo sapiens; identical to SEQ ID NO: 224443
  chr12:112689847-112689889
  hypo

SEQ ID NO: 316260 - DNA, 243 bp, Homo sapiens; identical to SEQ ID NO: 215073
  chr12:112743070-112743313
  hypo

SEQ ID NO: 316261 - DNA, 53 bp, Homo sapiens; identical to SEQ ID NO: 265183
  chr12:112753046-112753099
  hypo

SEQ ID NO: 316262 - DNA, 35 bp, Homo sapiens; identical to SEQ ID NO: 203186
  chr12:112884177-112884212
  hypo

SEQ ID NO: 316263 - DNA, 481 bp, Homo sapiens; identical to SEQ ID NO: 265184
  chr12:112893631-112894112
  hypo

SEQ ID NO: 316264 - DNA, 58 bp, Homo sapiens; identical to SEQ ID NO: 203187
  chr12:112915451-112915509
  hypo

SEQ ID NO: 316265 - DNA, 116 bp, Homo sapiens; identical to SEQ ID NO: 203188
  chr12:112924321-112924437
  hypo

SEQ ID NO: 316266 - DNA, 49 bp, Homo sapiens; identical to SEQ ID NO: 203189
  chr12:112926827-112926876
  hypo

SEQ ID NO: 316267 - DNA, 65 bp, Homo sapiens; identical to SEQ ID NO: 203190
  chr12:112926914-112926979
  hypo

SEQ ID NO: 316268 - DNA, 97 bp, Homo sapiens; identical to SEQ ID NO: 203193
  chr12:113495127-113495224
  hypo

SEQ ID NO: 316269 - DNA, 248 bp, Homo sapiens; identical to SEQ ID NO: 215080
  chr12:113598986-113599234
  hypo

SEQ ID NO: 316270 - DNA, 156 bp, Homo sapiens; identical to SEQ ID NO: 215081
  chr12:113629777-113629933
  hypo

SEQ ID NO: 316271 - DNA, 308 bp, Homo sapiens; identical to SEQ ID NO: 215082
  chr12:113669642-113669950
  hypo

SEQ ID NO: 316272 - DNA, 822 bp, Homo sapiens; identical to SEQ ID NO: 265189
  chr12:113685186-113686008
  hypo

SEQ ID NO: 316273 - DNA, 201 bp, Homo sapiens
  chr12:113690093-113690294
  hypo
tgcaccgtgggacgcgtcgggccacctggtcccagggatgctgcggtataagtggtaagggataggggagcttttgaggaggaccagacgttgtctccccaccaggaacgggctgagagagcctcctgagcacaaggaggaagctcctgtcaattcgaggagacccctgtgtgagaagaagggcaggaaggctccaaaggg

SEQ ID NO: 316274 - DNA, 196 bp, Homo sapiens
  chr12:113690324-113690520
  hypo
tcgtgtctagtgtcaagtgggagggtggcactaatggctgctgccatctgtgccagctagcagctgcctgctccgctccatcattgttatttatgttacctaggactcttctgtgttgccggtgccagcccctgctggggcatgtggaggtcgtggaggacagggcatgggctcacgaggacgcagctccatccag

SEQ ID NO: 316275 - DNA, 86 bp, Homo sapiens; identical to SEQ ID NO: 215083
  chr12:113704020-113704106
  hypo

SEQ ID NO: 316276 - DNA, 305 bp, Homo sapiens
  chr12:113725552-113725857
  hypo
tgctcctgagtgtccgcctccgtcccgccccctgccacccttcttcactggtgagctccattgcccccgctccccggggcacatgggcttctccccgctctttcccaggagcaaggccttgctcctgtctgagcctgcagctctactgcaaggagatgtggcctggccctgctcctcttcgtggaaggaccccgcccagccggtgtcctggggctgccaccatcccttccctcatgcatgaatcacctgagcccagctcagggttggtggcgcccaagggagtggacgcaggtggaggagaggcc

SEQ ID NO: 316277 - DNA, 176 bp, Homo sapiens; identical to SEQ ID NO: 265193
  chr12:113734198-113734374
  hypo

SEQ ID NO: 316278 - DNA, 637 bp, Homo sapiens; identical to SEQ ID NO: 289370
  chr12:113796257-113796894
  hypo

SEQ ID NO: 316279 - DNA, 107 bp, Homo sapiens; identical to SEQ ID NO: 265194
  chr12:114163037-114163144
  hypo

SEQ ID NO: 316280 - DNA, 61 bp, Homo sapiens; identical to SEQ ID NO: 215085
  chr12:114254876-114254937
  hypo

SEQ ID NO: 316281 - DNA, 568 bp, Homo sapiens
  chr12:114273198-114273766
  hypo
atcttaattgcacacgtgagcacctgacggcaggctgtggtactcgaggaggaccaggggaggggcatgacaagggaatcacgaaaaggagaggtgtgggggaaaagctgcatctttgacactctggctgggaggcagtgggggccggggtcagtgggggctgccgggaccagggctctagcaagcaggctccttccctgctcctcgcgaggctgggagggtgactgtttgctggaggccggcgacccatggggacagccacccgtctgtgccggaagagcacttctccgggcactctgctcatagatctcccgccccagcccaacctggcttgggcaggcgggggaaggccccactgccagccactcgccatgctggtcatgtctgcgctcccagctctggaggtgaaaggtagagacgctaaccacagcccatcagtcctccccagctggaataagacaacatgggaagcagagccacgctcccagccaaataaaagcctgtttgcccagcctccctggctgtgagtgctgtaaaacacagggttctgcgcacggatttcttccat

SEQ ID NO: 316282 - DNA, 148 bp, Homo sapiens; identical to SEQ ID NO: 215087
  chr12:114273850-114273998
  hypo

SEQ ID NO: 316283 - DNA, 109 bp, Homo sapiens; identical to SEQ ID NO: 215088
  chr12:114282487-114282596
  hypo

SEQ ID NO: 316284 - DNA, 197 bp, Homo sapiens; identical to SEQ ID NO: 215089
  chr12:114282867-114283064
  hypo

SEQ ID NO: 316285 - DNA, 92 bp, Homo sapiens; identical to SEQ ID NO: 215090
  chr12:114290576-114290668
  hypo

SEQ ID NO: 316286 - DNA, 199 bp, Homo sapiens
  chr12:114295304-114295503
  hypo
aacacagggcaccacgtgcctgccccgctgtgagggtgagggccgtgacctgctgcatgcaaggtgtgtcccctgctgtctctgatgagaggcgagggaaaggctgccagccaggaggagagaggagcagatgtccagacaaatatggccatgtgtcaacaaaacaggcacttgagctcaagactcggagacaaaggtg

SEQ ID NO: 316287 - DNA, 139 bp, Homo sapiens; identical to SEQ ID NO: 215091
  chr12:114318248-114318387
  hypo

SEQ ID NO: 316288 - DNA, 109 bp, Homo sapiens; identical to SEQ ID NO: 265202
  chr12:114318957-114319066
  hypo

SEQ ID NO: 316289 - DNA, 187 bp, Homo sapiens; identical to SEQ ID NO: 265203
  chr12:114334064-114334251
  hypo

SEQ ID NO: 316290 - DNA, 304 bp, Homo sapiens; identical to SEQ ID NO: 215092
  chr12:114337459-114337763
  hypo

SEQ ID NO: 316291 - DNA, 146 bp, Homo sapiens; identical to SEQ ID NO: 215093
  chr12:114337793-114337939
  hypo

SEQ ID NO: 316292 - DNA, 151 bp, Homo sapiens; identical to SEQ ID NO: 265205
  chr12:114349904-114350055
  hypo

SEQ ID NO: 316293 - DNA, 283 bp, Homo sapiens; identical to SEQ ID NO: 265206
  chr12:114399937-114400220
  hypo

SEQ ID NO: 316294 - DNA, 147 bp, Homo sapiens; identical to SEQ ID NO: 203201
  chr12:114841493-114841640
  hypo

SEQ ID NO: 316295 - DNA, 117 bp, Homo sapiens; identical to SEQ ID NO: 265207
  chr12:114982647-114982764
  hypo

SEQ ID NO: 316296 - DNA, 79 bp, Homo sapiens; identical to SEQ ID NO: 215095
  chr12:114983017-114983096
  hypo

SEQ ID NO: 316297 - DNA, 235 bp, Homo sapiens; identical to SEQ ID NO: 265209
  chr12:115188683-115188918
  hypo

SEQ ID NO: 316298 - DNA, 88 bp, Homo sapiens; identical to SEQ ID NO: 265210
  chr12:115192172-115192260
  hypo

SEQ ID NO: 316299 - DNA, 140 bp, Homo sapiens; identical to SEQ ID NO: 265211
  chr12:115204970-115205110
  hypo

SEQ ID NO: 316300 - DNA, 149 bp, Homo sapiens; identical to SEQ ID NO: 265213
  chr12:115544514-115544663
  hypo

SEQ ID NO: 316301 - DNA, 43 bp, Homo sapiens; identical to SEQ ID NO: 265214
  chr12:116040841-116040884
  hypo

SEQ ID NO: 316302 - DNA, 203 bp, Homo sapiens; identical to SEQ ID NO: 215096
  chr12:116394793-116394996
  hypo

SEQ ID NO: 316303 - DNA, 138 bp, Homo sapiens; identical to SEQ ID NO: 265216
  chr12:116401202-116401340
  hypo

SEQ ID NO: 316304 - DNA, 259 bp, Homo sapiens; identical to SEQ ID NO: 215097
  chr12:116443623-116443882
  hypo

SEQ ID NO: 316305 - DNA, 315 bp, Homo sapiens; identical to SEQ ID NO: 265218
  chr12:116475434-116475749
  hypo

SEQ ID NO: 316306 - DNA, 35 bp, Homo sapiens; identical to SEQ ID NO: 265219
  chr12:116678339-116678374
  hypo

SEQ ID NO: 316307 - DNA, 34 bp, Homo sapiens; identical to SEQ ID NO: 265220
  chr12:116678614-116678648
  hypo

SEQ ID NO: 316308 - DNA, 42 bp, Homo sapiens; identical to SEQ ID NO: 265221
  chr12:116724732-116724774
  hypo

SEQ ID NO: 316309 - DNA, 168 bp, Homo sapiens; identical to SEQ ID NO: 215098
  chr12:116756230-116756398
  hypo

SEQ ID NO: 316310 - DNA, 66 bp, Homo sapiens
  chr12:116756739-116756805
  hypo
atctgtttaatgtgcgttctgtgccattcacggattttggcaaggtctggcgaggtggcatggcac

SEQ ID NO: 316311 - DNA, 69 bp, Homo sapiens; identical to SEQ ID NO: 265225
  chr12:116757111-116757180
  hypo

SEQ ID NO: 316312 - DNA, 43 bp, Homo sapiens; identical to SEQ ID NO: 265226
  chr12:116770791-116770834
  hypo

SEQ ID NO: 316313 - DNA, 92 bp, Homo sapiens; identical to SEQ ID NO: 265227
  chr12:116804026-116804118
  hypo

SEQ ID NO: 316314 - DNA, 34 bp, Homo sapiens; identical to SEQ ID NO: 265229
  chr12:116936895-116936929
  hypo

SEQ ID NO: 316315 - DNA, 54 bp, Homo sapiens; identical to SEQ ID NO: 215099
  chr12:116941370-116941424
  hypo

SEQ ID NO: 316316 - DNA, 199 bp, Homo sapiens; identical to SEQ ID NO: 289418
  chr12:116972230-116972429
  hypo

SEQ ID NO: 316317 - DNA, 40 bp, Homo sapiens; identical to SEQ ID NO: 265232
  chr12:116981481-116981521
  hypo

SEQ ID NO: 316318 - DNA, 192 bp, Homo sapiens; identical to SEQ ID NO: 215100
  chr12:116999941-117000133
  hypo

SEQ ID NO: 316319 - DNA, 210 bp, Homo sapiens; identical to SEQ ID NO: 265234
  chr12:117135886-117136096
  hypo

SEQ ID NO: 316320 - DNA, 324 bp, Homo sapiens; identical to SEQ ID NO: 215101
  chr12:117150057-117150381
  hypo

SEQ ID NO: 316321 - DNA, 100 bp, Homo sapiens; identical to SEQ ID NO: 215102
  chr12:117150587-117150687
  hypo

SEQ ID NO: 316322 - DNA, 243 bp, Homo sapiens; identical to SEQ ID NO: 215103
  chr12:117155345-117155588
  hypo

SEQ ID NO: 316323 - DNA, 208 bp, Homo sapiens; identical to SEQ ID NO: 215104
  chr12:117155627-117155835
  hypo

SEQ ID NO: 316324 - DNA, 194 bp, Homo sapiens; identical to SEQ ID NO: 265238
  chr12:117157435-117157629
  hypo

SEQ ID NO: 316325 - DNA, 84 bp, Homo sapiens; identical to SEQ ID NO: 265239
  chr12:117160857-117160941
  hypo

SEQ ID NO: 316326 - DNA, 61 bp, Homo sapiens; identical to SEQ ID NO: 265240
  chr12:117161612-117161673
  hypo

SEQ ID NO: 316327 - DNA, 41 bp, Homo sapiens; identical to SEQ ID NO: 265241
  chr12:117162195-117162236
  hypo

SEQ ID NO: 316328 - DNA, 72 bp, Homo sapiens; identical to SEQ ID NO: 224462
  chr12:117316909-117316981
  hypo

SEQ ID NO: 316329 - DNA, 31 bp, Homo sapiens; identical to SEQ ID NO: 289422
  chr12:117317225-117317256
  hypo

SEQ ID NO: 316330 - DNA, 497 bp, Homo sapiens; identical to SEQ ID NO: 289423
  chr12:117317288-117317785
  hypo

SEQ ID NO: 316331 - DNA, 148 bp, Homo sapiens; identical to SEQ ID NO: 265242
  chr12:117392976-117393124
  hypo

SEQ ID NO: 316332 - DNA, 286 bp, Homo sapiens; identical to SEQ ID NO: 215105
  chr12:117407820-117408106
  hypo

SEQ ID NO: 316333 - DNA, 62 bp, Homo sapiens; identical to SEQ ID NO: 215106
  chr12:117408136-117408198
  hypo

SEQ ID NO: 316334 - DNA, 155 bp, Homo sapiens; identical to SEQ ID NO: 215107
  chr12:117408228-117408383
  hypo

SEQ ID NO: 316335 - DNA, 116 bp, Homo sapiens; identical to SEQ ID NO: 265245
  chr12:117461716-117461832
  hypo

SEQ ID NO: 316336 - DNA, 205 bp, Homo sapiens; identical to SEQ ID NO: 265246
  chr12:117464845-117465050
  hypo

SEQ ID NO: 316337 - DNA, 239 bp, Homo sapiens; identical to SEQ ID NO: 215108
  chr12:117466159-117466398
  hypo

SEQ ID NO: 316338 - DNA, 134 bp, Homo sapiens; identical to SEQ ID NO: 215109
  chr12:117476986-117477120
  hypo

SEQ ID NO: 316339 - DNA, 49 bp, Homo sapiens; identical to SEQ ID NO: 215110
  chr12:117484292-117484341
  hypo

SEQ ID NO: 316340 - DNA, 202 bp, Homo sapiens; identical to SEQ ID NO: 215111
  chr12:117484371-117484573
  hypo

SEQ ID NO: 316341 - DNA, 287 bp, Homo sapiens; identical to SEQ ID NO: 265252
  chr12:117484911-117485198
  hypo

SEQ ID NO: 316342 - DNA, 115 bp, Homo sapiens; identical to SEQ ID NO: 265253
  chr12:117487070-117487185
  hypo

SEQ ID NO: 316343 - DNA, 40 bp, Homo sapiens; identical to SEQ ID NO: 215112
  chr12:117529341-117529381
  hypo

SEQ ID NO: 316344 - DNA, 118 bp, Homo sapiens
  chr12:117531122-117531240
  hypo
gaaaccagcgccacccccaccagccacgcttggctacgccagtcctccctgccatctctagctccttctccaaatgagattagaccaggaatggaatccgactctctttttttctttg

SEQ ID NO: 316345 - DNA, 296 bp, Homo sapiens; identical to SEQ ID NO: 265257
  chr12:117579415-117579711
  hypo

SEQ ID NO: 316346 - DNA, 81 bp, Homo sapiens; identical to SEQ ID NO: 265258
  chr12:117583676-117583757
  hypo

SEQ ID NO: 316347 - DNA, 180 bp, Homo sapiens; identical to SEQ ID NO: 265259
  chr12:117586330-117586510
  hypo

SEQ ID NO: 316348 - DNA, 61 bp, Homo sapiens; identical to SEQ ID NO: 265260
  chr12:117588319-117588380
  hypo

SEQ ID NO: 316349 - DNA, 43 bp, Homo sapiens; identical to SEQ ID NO: 215113
  chr12:117588696-117588739
  hypo

SEQ ID NO: 316350 - DNA, 103 bp, Homo sapiens; identical to SEQ ID NO: 215114
  chr12:117588799-117588902
  hypo

SEQ ID NO: 316351 - DNA, 289 bp, Homo sapiens; identical to SEQ ID NO: 215115
  chr12:117593454-117593743
  hypo

SEQ ID NO: 316352 - DNA, 86 bp, Homo sapiens; identical to SEQ ID NO: 265264
  chr12:117597670-117597756
  hypo

SEQ ID NO: 316353 - DNA, 329 bp, Homo sapiens; identical to SEQ ID NO: 265265
  chr12:117599139-117599468
  hypo

SEQ ID NO: 316354 - DNA, 357 bp, Homo sapiens; identical to SEQ ID NO: 265266
  chr12:117600037-117600394
  hypo

SEQ ID NO: 316355 - DNA, 165 bp, Homo sapiens; identical to SEQ ID NO: 265267
  chr12:117600622-117600787
  hypo

SEQ ID NO: 316356 - DNA, 87 bp, Homo sapiens; identical to SEQ ID NO: 215118
  chr12:117788578-117788665
  hypo

SEQ ID NO: 316357 - DNA, 434 bp, Homo sapiens; identical to SEQ ID NO: 215119
  chr12:118198873-118199307
  hypo

SEQ ID NO: 316358 - DNA, 196 bp, Homo sapiens; identical to SEQ ID NO: 265270
  chr12:118293044-118293240
  hypo

SEQ ID NO: 316359 - DNA, 225 bp, Homo sapiens; identical to SEQ ID NO: 265271
  chr12:118293460-118293685
  hypo

SEQ ID NO: 316360 - DNA, 59 bp, Homo sapiens; identical to SEQ ID NO: 265272
  chr12:118313383-118313442
  hypo

SEQ ID NO: 316361 - DNA, 57 bp, Homo sapiens; identical to SEQ ID NO: 265273
  chr12:118318419-118318476
  hypo

SEQ ID NO: 316362 - DNA, 44 bp, Homo sapiens
  chr12:118331669-118331713
  hypo
agtcaaaattcatagccagaaaaatccacaaagaacaaaattct

SEQ ID NO: 316363 - DNA, 33 bp, Homo sapiens; identical to SEQ ID NO: 265275
  chr12:118361694-118361727
  hypo

SEQ ID NO: 316364 - DNA, 32 bp, Homo sapiens; identical to SEQ ID NO: 265276
  chr12:118361967-118361999
  hypo

SEQ ID NO: 316365 - DNA, 107 bp, Homo sapiens; identical to SEQ ID NO: 265277
  chr12:118461363-118461470
  hypo

SEQ ID NO: 316366 - DNA, 107 bp, Homo sapiens; identical to SEQ ID NO: 215121
  chr12:118474193-118474300
  hypo

SEQ ID NO: 316367 - DNA, 120 bp, Homo sapiens; identical to SEQ ID NO: 215122
  chr12:118481549-118481669
  hypo

SEQ ID NO: 316368 - DNA, 48 bp, Homo sapiens; identical to SEQ ID NO: 265280
  chr12:118533281-118533329
  hypo

SEQ ID NO: 316369 - DNA, 325 bp, Homo sapiens; identical to SEQ ID NO: 215123
  chr12:118583595-118583920
  hypo

SEQ ID NO: 316370 - DNA, 213 bp, Homo sapiens; identical to SEQ ID NO: 215124
  chr12:118590038-118590251
  hypo

SEQ ID NO: 316371 - DNA, 45 bp, Homo sapiens; identical to SEQ ID NO: 215125
  chr12:118860436-118860481
  hypo

SEQ ID NO: 316372 - DNA, 31 bp, Homo sapiens; identical to SEQ ID NO: 265284
  chr12:118870267-118870298
  hypo

SEQ ID NO: 316373 - DNA, 31 bp, Homo sapiens; identical to SEQ ID NO: 265285
  chr12:118870538-118870569
  hypo

SEQ ID NO: 316374 - DNA, 99 bp, Homo sapiens; identical to SEQ ID NO: 215126
  chr12:119626324-119626423
  hypo

SEQ ID NO: 316375 - DNA, 51 bp, Homo sapiens; identical to SEQ ID NO: 215127
  chr12:120117233-120117284
  hypo

SEQ ID NO: 316376 - DNA, 378 bp, Homo sapiens; identical to SEQ ID NO: 215128
  chr12:120117590-120117968
  hypo

SEQ ID NO: 316377 - DNA, 153 bp, Homo sapiens; identical to SEQ ID NO: 265289
  chr12:120127978-120128131
  hypo

SEQ ID NO: 316378 - DNA, 196 bp, Homo sapiens; identical to SEQ ID NO: 215129
  chr12:120134818-120135014
  hypo

SEQ ID NO: 316379 - DNA, 394 bp, Homo sapiens; identical to SEQ ID NO: 265291
  chr12:120137279-120137673
  hypo

SEQ ID NO: 316380 - DNA, 401 bp, Homo sapiens; identical to SEQ ID NO: 215131
  chr12:120147741-120148142
  hypo

SEQ ID NO: 316381 - DNA, 335 bp, Homo sapiens; identical to SEQ ID NO: 215132
  chr12:120148396-120148731
  hypo

SEQ ID NO: 316382 - DNA, 102 bp, Homo sapiens; identical to SEQ ID NO: 265293
  chr12:120150400-120150502
  hypo

SEQ ID NO: 316383 - DNA, 175 bp, Homo sapiens
  chr12:120151876-120152051
  hypo
gaagtaagaagctcgaaaatgaatgcactatatgatgagttagaaaaaaatcacctccacctgatagactttttaagctggagatgcacaggtgcccagcacagatgcacaactactgatcttaccgagacatttggatgcctggcgtccaaagtgcacggtatccagacacaca

SEQ ID NO: 316384 - DNA, 37 bp, Homo sapiens
  chr12:120152105-120152142
  hypo
tggtgcatgcgttccttaagacgccgactaaattctg

SEQ ID NO: 316385 - DNA, 434 bp, Homo sapiens; identical to SEQ ID NO: 215133
  chr12:120155994-120156428
  hypo

SEQ ID NO: 316386 - DNA, 85 bp, Homo sapiens; identical to SEQ ID NO: 265296
  chr12:120165250-120165335
  hypo

SEQ ID NO: 316387 - DNA, 84 bp, Homo sapiens; identical to SEQ ID NO: 215134
  chr12:120172972-120173056
  hypo

SEQ ID NO: 316388 - DNA, 145 bp, Homo sapiens; identical to SEQ ID NO: 215135
  chr12:120173137-120173282
  hypo

SEQ ID NO: 316389 - DNA, 304 bp, Homo sapiens; identical to SEQ ID NO: 265298
  chr12:120186343-120186647
  hypo

SEQ ID NO: 316390 - DNA, 93 bp, Homo sapiens; identical to SEQ ID NO: 265299
  chr12:120189897-120189990
  hypo

SEQ ID NO: 316391 - DNA, 97 bp, Homo sapiens; identical to SEQ ID NO: 265300
  chr12:120214487-120214584
  hypo

SEQ ID NO: 316392 - DNA, 304 bp, Homo sapiens; identical to SEQ ID NO: 265301
  chr12:120222343-120222647
  hypo

SEQ ID NO: 316393 - DNA, 363 bp, Homo sapiens; identical to SEQ ID NO: 265302
  chr12:120241060-120241423
  hypo

SEQ ID NO: 316394 - DNA, 35 bp, Homo sapiens; identical to SEQ ID NO: 265303
  chr12:120241909-120241944
  hypo

SEQ ID NO: 316395 - DNA, 36 bp, Homo sapiens; identical to SEQ ID NO: 265304
  chr12:120265239-120265275
  hypo

SEQ ID NO: 316396 - DNA, 97 bp, Homo sapiens; identical to SEQ ID NO: 265305
  chr12:120339153-120339250
  hypo

SEQ ID NO: 316397 - DNA, 32 bp, Homo sapiens; identical to SEQ ID NO: 265306
  chr12:120431043-120431075
  hypo

SEQ ID NO: 316398 - DNA, 149 bp, Homo sapiens; identical to SEQ ID NO: 265307
  chr12:120540010-120540159
  hypo

SEQ ID NO: 316399 - DNA, 130 bp, Homo sapiens; identical to SEQ ID NO: 265308
  chr12:120543004-120543134
  hypo

SEQ ID NO: 316400 - DNA, 35 bp, Homo sapiens; identical to SEQ ID NO: 215137
  chr12:120545353-120545388
  hypo

SEQ ID NO: 316401 - DNA, 297 bp, Homo sapiens; identical to SEQ ID NO: 215138
  chr12:120565538-120565835
  hypo

SEQ ID NO: 316402 - DNA, 50 bp, Homo sapiens
  chr12:120574393-120574443
  hypo
gtgatgctgaccacggagggcctcagggcgtcagccgaggtcaggcggat

SEQ ID NO: 316403 - DNA, 156 bp, Homo sapiens; identical to SEQ ID NO: 215139
  chr12:120580290-120580446
  hypo

SEQ ID NO: 316404 - DNA, 36 bp, Homo sapiens; identical to SEQ ID NO: 215140
  chr12:120580509-120580545
  hypo

SEQ ID NO: 316405 - DNA, 115 bp, Homo sapiens; identical to SEQ ID NO: 265313
  chr12:120597713-120597828
  hypo

SEQ ID NO: 316406 - DNA, 171 bp, Homo sapiens; identical to SEQ ID NO: 215141
  chr12:120613496-120613667
  hypo

SEQ ID NO: 316407 - DNA, 164 bp, Homo sapiens
  chr12:120620161-120620325
  hypo
catgtttgtccccagaggtgcgctggataagctcccagggatgcagccctctatctaaccagcaggctgcttcatggagcggtacttgtgtttcctaaggccggtcatcactggcacctacctgcctgggactctccagtttccacagtcatctcaaccctcaa

SEQ ID NO: 316408 - DNA, 282 bp, Homo sapiens; identical to SEQ ID NO: 265316
  chr12:120647681-120647963
  hypo

SEQ ID NO: 316409 - DNA, 75 bp, Homo sapiens; identical to SEQ ID NO: 265317
  chr12:120662007-120662082
  hypo

SEQ ID NO: 316410 - DNA, 89 bp, Homo sapiens; identical to SEQ ID NO: 265318
  chr12:120725460-120725549
  hypo

SEQ ID NO: 316411 - DNA, 120 bp, Homo sapiens; identical to SEQ ID NO: 265319
  chr12:120736009-120736129
  hypo

SEQ ID NO: 316412 - DNA, 83 bp, Homo sapiens; identical to SEQ ID NO: 215143
  chr12:120758714-120758797
  hypo

SEQ ID NO: 316413 - DNA, 240 bp, Homo sapiens; identical to SEQ ID NO: 215144
  chr12:120908355-120908595
  hypo

SEQ ID NO: 316414 - DNA, 43 bp, Homo sapiens; identical to SEQ ID NO: 265322
  chr12:120909713-120909756
  hypo

SEQ ID NO: 316415 - DNA, 36 bp, Homo sapiens; identical to SEQ ID NO: 265323
  chr12:120927818-120927854
  hypo

SEQ ID NO: 316416 - DNA, 36 bp, Homo sapiens; identical to SEQ ID NO: 215145
  chr12:120956375-120956411
  hypo

SEQ ID NO: 316417 - DNA, 40 bp, Homo sapiens; identical to SEQ ID NO: 265325
  chr12:120983607-120983647
  hypo

SEQ ID NO: 316418 - DNA, 31 bp, Homo sapiens; identical to SEQ ID NO: 215146
  chr12:120991484-120991515
  hypo

SEQ ID NO: 316419 - DNA, 253 bp, Homo sapiens; identical to SEQ ID NO: 224466
  chr12:121077958-121078211
  hypo

SEQ ID NO: 316420 - DNA, 38 bp, Homo sapiens; identical to SEQ ID NO: 265327
  chr12:121135003-121135041
  hypo

SEQ ID NO: 316421 - DNA, 94 bp, Homo sapiens; identical to SEQ ID NO: 215147
  chr12:121166589-121166683
  hypo

SEQ ID NO: 316422 - DNA, 40 bp, Homo sapiens; identical to SEQ ID NO: 265329
  chr12:121197975-121198015
  hypo

SEQ ID NO: 316423 - DNA, 179 bp, Homo sapiens; identical to SEQ ID NO: 265330
  chr12:121198381-121198560
  hypo

SEQ ID NO: 316424 - DNA, 135 bp, Homo sapiens; identical to SEQ ID NO: 265331
  chr12:121199362-121199497
  hypo

SEQ ID NO: 316425 - DNA, 39 bp, Homo sapiens; identical to SEQ ID NO: 265332
  chr12:121199754-121199793
  hypo

SEQ ID NO: 316426 - DNA, 138 bp, Homo sapiens; identical to SEQ ID NO: 265333
  chr12:121200046-121200184
  hypo

SEQ ID NO: 316427 - DNA, 221 bp, Homo sapiens; identical to SEQ ID NO: 265334
  chr12:121203946-121204167
  hypo

SEQ ID NO: 316428 - DNA, 241 bp, Homo sapiens; identical to SEQ ID NO: 215149
  chr12:121205142-121205383
  hypo

SEQ ID NO: 316429 - DNA, 149 bp, Homo sapiens; identical to SEQ ID NO: 265336
  chr12:121212805-121212954
  hypo

SEQ ID NO: 316430 - DNA, 31 bp, Homo sapiens; identical to SEQ ID NO: 265337
  chr12:121289697-121289728
  hypo

SEQ ID NO: 316431 - DNA, 110 bp, Homo sapiens; identical to SEQ ID NO: 265338
  chr12:121328591-121328701
  hypo

SEQ ID NO: 316432 - DNA, 37 bp, Homo sapiens; identical to SEQ ID NO: 215150
  chr12:121352799-121352836
  hypo

SEQ ID NO: 316433 - DNA, 279 bp, Homo sapiens; identical to SEQ ID NO: 265340
  chr12:121363905-121364184
  hypo

SEQ ID NO: 316434 - DNA, 35 bp, Homo sapiens; identical to SEQ ID NO: 215151
  chr12:121531380-121531415
  hypo

SEQ ID NO: 316435 - DNA, 49 bp, Homo sapiens
  chr12:121622576-121622625
  hypo
agtacagtggcttcaagagtccttactgaagccaggcaccgtggctcac

SEQ ID NO: 316436 - DNA, 31 bp, Homo sapiens
  chr12:121653376-121653407
  hypo
gccgggatttttattggacagcacagctctg

SEQ ID NO: 316437 - DNA, 53 bp, Homo sapiens
  chr12:121667904-121667957
  hypo
ttaaaaaggaagcgctccaggccgggcgcagtgactcacacctgtaatcctag

SEQ ID NO: 316438 - DNA, 170 bp, Homo sapiens; identical to SEQ ID NO: 265345
  chr12:121675681-121675851
  hypo

SEQ ID NO: 316439 - DNA, 709 bp, Homo sapiens
  chr12:121687592-121688301
  hypo
gatttccggcaccacgatcctcgactcggggttcttgtccagcatacgggtgatcaggtccttcaagtcctcagctatgtcgggcctggggatggagaggcgtcagggtggcagacacgggaccgccaagaactcggacaggagagatgcgggacggcgggagatactcactggtctggaaattccagggcctgactcttgatcttactgtgtaaacacatgatccgctcgtccatgaatgggcactgcaaagaggccagggacagagtggcagtcaatggcggccacatctgcccttcgagggccacctgtgctgtgccactccacataggatacagcagagaaatcaacaattgcggcccaggctagggggcaagcagttcccattctccccgagaatggccaagacacaggggtgtggggcctggccgacgcagggcagagccaggaatggccctctcgaagggctagagcctttcccaagcacactgcaggctccctctgtagctgggcctcagtttacctacttacaccaaagcaaacactgctcgtcacctacttgccaggtgaacaacaggaacaacaagaataacacaaaagactttgtgttatttgtggcagcagcagtgattttcaagggcttagcctggatcgcgccacgccctgccctgaggttttcattcactgttccccgtccctggaatgttct

SEQ ID NO: 316440 - DNA, 260 bp, Homo sapiens; identical to SEQ ID NO: 215154
  chr12:121688331-121688591
  hypo

SEQ ID NO: 316441 - DNA, 135 bp, Homo sapiens; identical to SEQ ID NO: 265347
  chr12:121693277-121693412
  hypo

SEQ ID NO: 316442 - DNA, 149 bp, Homo sapiens; identical to SEQ ID NO: 265348
  chr12:121706435-121706584
  hypo

SEQ ID NO: 316443 - DNA, 178 bp, Homo sapiens; identical to SEQ ID NO: 215155
  chr12:121711833-121712011
  hypo

SEQ ID NO: 316444 - DNA, 77 bp, Homo sapiens; identical to SEQ ID NO: 215156
  chr12:121754200-121754277
  hypo

SEQ ID NO: 316445 - DNA, 152 bp, Homo sapiens; identical to SEQ ID NO: 215157
  chr12:121756057-121756209
  hypo

SEQ ID NO: 316446 - DNA, 120 bp, Homo sapiens; identical to SEQ ID NO: 265352
  chr12:122136316-122136436
  hypo

SEQ ID NO: 316447 - DNA, 101 bp, Homo sapiens; identical to SEQ ID NO: 265353
  chr12:122158112-122158213
  hypo

SEQ ID NO: 316448 - DNA, 212 bp, Homo sapiens; identical to SEQ ID NO: 265354
  chr12:122179049-122179261
  hypo

SEQ ID NO: 316449 - DNA, 280 bp, Homo sapiens; identical to SEQ ID NO: 215159
  chr12:122182117-122182397
  hypo

SEQ ID NO: 316450 - DNA, 43 bp, Homo sapiens; identical to SEQ ID NO: 215160
  chr12:122192680-122192723
  hypo

SEQ ID NO: 316451 - DNA, 116 bp, Homo sapiens; identical to SEQ ID NO: 215161
  chr12:122192843-122192959
  hypo

SEQ ID NO: 316452 - DNA, 66 bp, Homo sapiens; identical to SEQ ID NO: 215162
  chr12:122192989-122193055
  hypo

SEQ ID NO: 316453 - DNA, 135 bp, Homo sapiens; identical to SEQ ID NO: 265357
  chr12:122206327-122206462
  hypo

SEQ ID NO: 316454 - DNA, 41 bp, Homo sapiens
  chr12:122208736-122208777
  hypo
aggtggggcctcagcgagacacatgcctgcgttgctctccc

SEQ ID NO: 316455 - DNA, 510 bp, Homo sapiens
  chr12:122208807-122209317
  hypo
ccgagaattaaaggctggtgggtgtctcaccactacgtctccacattcctgtccggagtgatgctgacctggtgagtagcccctcgctgggcccctccagcctcccagggagtagagcctggggcccgggaatggggagggggctgatccagacagcggtggggggtgtgctccagggccaacttgggaaagaaagtatgagcctgcagctgcgccgggctgcgcgggccccacccagcccgtgaggggttctccagggaatggtttcgggtgtccctggccagggcagaggtagcggggctgcaaggctggagggagcgagtgaggctgggcactgaaggagactgcggaggacagaggggtcacagggagttagcgcttctgcacggccatgtggacccctgtgcttctagaaaggaagatgggatgacctcgcccagccccagggatagaagggcggaagtctggacctcagtttgactttatacaccttttcgcctcttctggttg

SEQ ID NO: 316456 - DNA, 332 bp, Homo sapiens; identical to SEQ ID NO: 265359
  chr12:122212934-122213266
  hypo

SEQ ID NO: 316457 - DNA, 95 bp, Homo sapiens; identical to SEQ ID NO: 215163
  chr12:122213469-122213564
  hypo

SEQ ID NO: 316458 - DNA, 111 bp, Homo sapiens; identical to SEQ ID NO: 215164
  chr12:122213693-122213804
  hypo

SEQ ID NO: 316459 - DNA, 213 bp, Homo sapiens; identical to SEQ ID NO: 289457
  chr12:122214097-122214310
  hypo

SEQ ID NO: 316460 - DNA, 169 bp, Homo sapiens; identical to SEQ ID NO: 215166
  chr12:122218793-122218962
  hypo

SEQ ID NO: 316461 - DNA, 773 bp, Homo sapiens; identical to SEQ ID NO: 289459
  chr12:122231523-122232296
  hypo

SEQ ID NO: 316462 - DNA, 102 bp, Homo sapiens; identical to SEQ ID NO: 265363
  chr12:122246168-122246270
  hypo

SEQ ID NO: 316463 - DNA, 204 bp, Homo sapiens; identical to SEQ ID NO: 215169
  chr12:122252457-122252661
  hypo

SEQ ID NO: 316464 - DNA, 79 bp, Homo sapiens; identical to SEQ ID NO: 265365
  chr12:122255282-122255361
  hypo

SEQ ID NO: 316465 - DNA, 165 bp, Homo sapiens; identical to SEQ ID NO: 215170
  chr12:122261814-122261979
  hypo

SEQ ID NO: 316466 - DNA, 121 bp, Homo sapiens; identical to SEQ ID NO: 265367
  chr12:122265477-122265598
  hypo

SEQ ID NO: 316467 - DNA, 110 bp, Homo sapiens; identical to SEQ ID NO: 265368
  chr12:122268640-122268750
  hypo

SEQ ID NO: 316468 - DNA, 211 bp, Homo sapiens; identical to SEQ ID NO: 215171
  chr12:122276669-122276880
  hypo

SEQ ID NO: 316469 - DNA, 41 bp, Homo sapiens; identical to SEQ ID NO: 215172
  chr12:122282339-122282380
  hypo

SEQ ID NO: 316470 - DNA, 74 bp, Homo sapiens
  chr12:122285108-122285182
  hypo
tttttcaggtacctgtagggtgggcggtggaacacatatgctctgagcgcctccagggacggcctccatcaccc

SEQ ID NO: 316471 - DNA, 78 bp, Homo sapiens; identical to SEQ ID NO: 265372
  chr12:122353722-122353800
  hypo

SEQ ID NO: 316472 - DNA, 117 bp, Homo sapiens; identical to SEQ ID NO: 265373
  chr12:122396582-122396699
  hypo

SEQ ID NO: 316473 - DNA, 34 bp, Homo sapiens; identical to SEQ ID NO: 215173
  chr12:122425316-122425350
  hypo

SEQ ID NO: 316474 - DNA, 58 bp, Homo sapiens; identical to SEQ ID NO: 265375
  chr12:122438023-122438081
  hypo

SEQ ID NO: 316475 - DNA, 332 bp, Homo sapiens
  chr12:122439511-122439843
  hypo
agctggctttgtctgggcatgtagctgtggctcactgatttgttgtagacttcagtacatttatttctcctgatcggtgcaagccactctccctaagactgcacataacaaagcatgtctgttgggaatcccacatgaataagttatgaaaagaacagtgagtggtggcttttgttcccgcgctctgtccgtccttttgtttcttctgggcttattttccctttgttccactgacctgtcatcttgccggcttgggtgggtgaatattggccacccgtagaggatccagtttgacagctgtttcaggagaataggtatgtaaagagagactt

SEQ ID NO: 316476 - DNA, 160 bp, Homo sapiens; identical to SEQ ID NO: 215174
  chr12:122444435-122444595
  hypo

SEQ ID NO: 316477 - DNA, 85 bp, Homo sapiens; identical to SEQ ID NO: 215175
  chr12:122455990-122456075
  hypo

SEQ ID NO: 316478 - DNA, 39 bp, Homo sapiens; identical to SEQ ID NO: 265379
  chr12:122458548-122458587
  hypo

SEQ ID NO: 316479 - DNA, 238 bp, Homo sapiens; identical to SEQ ID NO: 224470
  chr12:122459882-122460120
  hypo

SEQ ID NO: 316480 - DNA, 602 bp, Homo sapiens; identical to SEQ ID NO: 224471
  chr12:122460949-122461551
  hypo

SEQ ID NO: 316481 - DNA, 76 bp, Homo sapiens; identical to SEQ ID NO: 215177
  chr12:122463063-122463139
  hypo

SEQ ID NO: 316482 - DNA, 384 bp, Homo sapiens; identical to SEQ ID NO: 265381
  chr12:122471978-122472362
  hypo

SEQ ID NO: 316483 - DNA, 84 bp, Homo sapiens; identical to SEQ ID NO: 265382
  chr12:122472662-122472746
  hypo

SEQ ID NO: 316484 - DNA, 141 bp, Homo sapiens
  chr12:122473251-122473392
  hypo
aaaaaaggcaaggacgagaagtgtggctcagaggtgaccactccggagaacagttcctccccagggatgatggacatgcatggtgagtgcccatggcctgccagcctctcctgcccagcccggggccttggccaagcactc

SEQ ID NO: 316485 - DNA, 59 bp, Homo sapiens
  chr12:122473522-122473581
  hypo
taccaagccaagagacataaactaagccagagacatagaaattagaccctctcctcacc

SEQ ID NO: 316486 - DNA, 120 bp, Homo sapiens; identical to SEQ ID NO: 265384
  chr12:122474042-122474162
  hypo

SEQ ID NO: 316487 - DNA, 143 bp, Homo sapiens; identical to SEQ ID NO: 265385
  chr12:122474514-122474657
  hypo

SEQ ID NO: 316488 - DNA, 83 bp, Homo sapiens; identical to SEQ ID NO: 265386
  chr12:122474897-122474980
  hypo

SEQ ID NO: 316489 - DNA, 213 bp, Homo sapiens; identical to SEQ ID NO: 215178
  chr12:122479007-122479220
  hypo

SEQ ID NO: 316490 - DNA, 449 bp, Homo sapiens; identical to SEQ ID NO: 215179
  chr12:122480940-122481389
  hypo

SEQ ID NO: 316491 - DNA, 389 bp, Homo sapiens; identical to SEQ ID NO: 215180
  chr12:122481629-122482018
  hypo

SEQ ID NO: 316492 - DNA, 145 bp, Homo sapiens; identical to SEQ ID NO: 215181
  chr12:122483263-122483408
  hypo

SEQ ID NO: 316493 - DNA, 318 bp, Homo sapiens; identical to SEQ ID NO: 265391
  chr12:122491189-122491507
  hypo

SEQ ID NO: 316494 - DNA, 195 bp, Homo sapiens; identical to SEQ ID NO: 265392
  chr12:122493939-122494134
  hypo

SEQ ID NO: 316495 - DNA, 93 bp, Homo sapiens; identical to SEQ ID NO: 265393
  chr12:122511273-122511366
  hypo

SEQ ID NO: 316496 - DNA, 39 bp, Homo sapiens
  chr12:122591533-122591572
  hypo
caggactccaactgggcccacgcctctcctctgagagca

SEQ ID NO: 316497 - DNA, 85 bp, Homo sapiens; identical to SEQ ID NO: 215183
  chr12:122602777-122602862
  hypo

SEQ ID NO: 316498 - DNA, 492 bp, Homo sapiens; identical to SEQ ID NO: 265396
  chr12:122614571-122615063
  hypo

SEQ ID NO: 316499 - DNA, 209 bp, Homo sapiens; identical to SEQ ID NO: 215185
  chr12:122622385-122622594
  hypo

SEQ ID NO: 316500 - DNA, 275 bp, Homo sapiens; identical to SEQ ID NO: 215186
  chr12:122622642-122622917
  hypo

SEQ ID NO: 316501 - DNA, 171 bp, Homo sapiens; identical to SEQ ID NO: 265398
  chr12:122623390-122623561
  hypo

SEQ ID NO: 316502 - DNA, 170 bp, Homo sapiens
  chr12:122623820-122623990
  hypo
gccagctcggtcctcgaagccacagggagggtgagtgccacccctgctgtgacaggcggaaaccaggactccctccactgagtggtagagcccaatttgaagcctaatggagcatgtccacctctaggggctctcgtgccaaggccaccttgcactcagccttccaggtg

SEQ ID NO: 316503 - DNA, 84 bp, Homo sapiens; identical to SEQ ID NO: 289467
  chr12:122688564-122688648
  hypo

SEQ ID NO: 316504 - DNA, 449 bp, Homo sapiens; identical to SEQ ID NO: 265401
  chr12:122712004-122712453
  hypo

SEQ ID NO: 316505 - DNA, 176 bp, Homo sapiens; identical to SEQ ID NO: 265402
  chr12:122734927-122735103
  hypo

SEQ ID NO: 316506 - DNA, 31 bp, Homo sapiens; identical to SEQ ID NO: 265403
  chr12:122752535-122752566
  hypo

SEQ ID NO: 316507 - DNA, 59 bp, Homo sapiens; identical to SEQ ID NO: 265404
  chr12:122877152-122877211
  hypo

SEQ ID NO: 316508 - DNA, 36 bp, Homo sapiens; identical to SEQ ID NO: 265405
  chr12:122878701-122878737
  hypo

SEQ ID NO: 316509 - DNA, 202 bp, Homo sapiens; identical to SEQ ID NO: 203241
  chr12:122907627-122907829
  hypo

SEQ ID NO: 316510 - DNA, 139 bp, Homo sapiens; identical to SEQ ID NO: 289470
  chr12:122907838-122907977
  hypo

SEQ ID NO: 316511 - DNA, 44 bp, Homo sapiens; identical to SEQ ID NO: 265407
  chr12:122908028-122908072
  hypo

SEQ ID NO: 316512 - DNA, 43 bp, Homo sapiens; identical to SEQ ID NO: 265408
  chr12:122908102-122908145
  hypo

SEQ ID NO: 316513 - DNA, 34 bp, Homo sapiens; identical to SEQ ID NO: 265409
  chr12:122908260-122908294
  hypo

SEQ ID NO: 316514 - DNA, 32 bp, Homo sapiens; identical to SEQ ID NO: 265410
  chr12:122950311-122950343
  hypo

SEQ ID NO: 316515 - DNA, 103 bp, Homo sapiens; identical to SEQ ID NO: 215189
  chr12:122952405-122952508
  hypo

SEQ ID NO: 316516 - DNA, 133 bp, Homo sapiens; identical to SEQ ID NO: 215190
  chr12:122958416-122958549
  hypo

SEQ ID NO: 316517 - DNA, 124 bp, Homo sapiens
  chr12:122958579-122958703
  hypo
ctgcccagatccgcctctgctgttcttcaagttcttctagagtcagtgcgtcctcatccacagctccagatgctgttctggtctggggtgagtcactgggagtcagcggcggggtgccctttgg

SEQ ID NO: 316518 - DNA, 143 bp, Homo sapiens; identical to SEQ ID NO: 215192
  chr12:122970385-122970528
  hypo

SEQ ID NO: 316519 - DNA, 120 bp, Homo sapiens; identical to SEQ ID NO: 265414
  chr12:123031662-123031782
  hypo

SEQ ID NO: 316520 - DNA, 76 bp, Homo sapiens; identical to SEQ ID NO: 265415
  chr12:123031902-123031978
  hypo

SEQ ID NO: 316521 - DNA, 164 bp, Homo sapiens; identical to SEQ ID NO: 215193
  chr12:123044412-123044576
  hypo

SEQ ID NO: 316522 - DNA, 36 bp, Homo sapiens; identical to SEQ ID NO: 265417
  chr12:123097245-123097281
  hypo

SEQ ID NO: 316523 - DNA, 37 bp, Homo sapiens; identical to SEQ ID NO: 215194
  chr12:123120645-123120682
  hypo

SEQ ID NO: 316524 - DNA, 36 bp, Homo sapiens; identical to SEQ ID NO: 215195
  chr12:123120922-123120958
  hypo

SEQ ID NO: 316525 - DNA, 931 bp, Homo sapiens; identical to SEQ ID NO: 265421
  chr12:123213913-123214844
  hypo

SEQ ID NO: 316526 - DNA, 570 bp, Homo sapiens; identical to SEQ ID NO: 289472
  chr12:123258812-123259382
  hypo

SEQ ID NO: 316527 - DNA, 205 bp, Homo sapiens; identical to SEQ ID NO: 265423
  chr12:123324497-123324702
  hypo

SEQ ID NO: 316528 - DNA, 324 bp, Homo sapiens; identical to SEQ ID NO: 265424
  chr12:123325625-123325949
  hypo

SEQ ID NO: 316529 - DNA, 143 bp, Homo sapiens
  chr12:123333079-123333222
  hypo
gctgcccagcagctccattctcagctggaagttctgccacgtcctccacaaggtccttcgagacgggcaccccaatgtgagtagcagctgctgcctctgctccccggagctggggcactgtcccgcggacatgcgggctctgg

SEQ ID NO: 316530 - DNA, 207 bp, Homo sapiens
  chr12:123333393-123333600
  hypo
ctgtgggtaggtccagccattctaggtcctgcctggcattcggggctttcctgagcgtgtggggctgagcgaagggtggctccctgtgggcagttccctgcgggtggctgggttttcccaggggcgacagtgggaggggcagcacggggagatgctgcctgcctttgagggcctggcccagggcgctccacacgcataaccagtggg

SEQ ID NO: 316531 - DNA, 336 bp, Homo sapiens; identical to SEQ ID NO: 265426
  chr12:123340660-123340996
  hypo

SEQ ID NO: 316532 - DNA, 77 bp, Homo sapiens; identical to SEQ ID NO: 265427
  chr12:123359583-123359660
  hypo

SEQ ID NO: 316533 - DNA, 501 bp, Homo sapiens; identical to SEQ ID NO: 289475
  chr12:123380319-123380820
  hypo

SEQ ID NO: 316534 - DNA, 87 bp, Homo sapiens; identical to SEQ ID NO: 215200
  chr12:123409957-123410044
  hypo

SEQ ID NO: 316535 - DNA, 325 bp, Homo sapiens; identical to SEQ ID NO: 265429
  chr12:123416625-123416950
  hypo

SEQ ID NO: 316536 - DNA, 105 bp, Homo sapiens; identical to SEQ ID NO: 265430
  chr12:123428943-123429048
  hypo

SEQ ID NO: 316537 - DNA, 296 bp, Homo sapiens; identical to SEQ ID NO: 265431
  chr12:123434319-123434615
  hypo

SEQ ID NO: 316538 - DNA, 244 bp, Homo sapiens; identical to SEQ ID NO: 265432
  chr12:123434937-123435181
  hypo

SEQ ID NO: 316539 - DNA, 57 bp, Homo sapiens; identical to SEQ ID NO: 265433
  chr12:123446773-123446830
  hypo

SEQ ID NO: 316540 - DNA, 167 bp, Homo sapiens; identical to SEQ ID NO: 265434
  chr12:123470902-123471069
  hypo

SEQ ID NO: 316541 - DNA, 191 bp, Homo sapiens; identical to SEQ ID NO: 265435
  chr12:123481877-123482068
  hypo

SEQ ID NO: 316542 - DNA, 157 bp, Homo sapiens; identical to SEQ ID NO: 215201
  chr12:123542055-123542212
  hypo

SEQ ID NO: 316543 - DNA, 42 bp, Homo sapiens; identical to SEQ ID NO: 265437
  chr12:123563306-123563348
  hypo

SEQ ID NO: 316544 - DNA, 259 bp, Homo sapiens; identical to SEQ ID NO: 265438
  chr12:123579931-123580190
  hypo

SEQ ID NO: 316545 - DNA, 31 bp, Homo sapiens; identical to SEQ ID NO: 265439
  chr12:123584528-123584559
  hypo

SEQ ID NO: 316546 - DNA, 103 bp, Homo sapiens; identical to SEQ ID NO: 265440
  chr12:123618508-123618611
  hypo

SEQ ID NO: 316547 - DNA, 163 bp, Homo sapiens; identical to SEQ ID NO: 265441
  chr12:123618851-123619014
  hypo

SEQ ID NO: 316548 - DNA, 38 bp, Homo sapiens; identical to SEQ ID NO: 215202
  chr12:123636568-123636606
  hypo

SEQ ID NO: 316549 - DNA, 313 bp, Homo sapiens
  chr12:123636636-123636949
  hypo
aggcgtaccaccatcacctagaacgcttcagctccttccctccaccaagaggtgccctaggatccatccagaaagatctgcggagcccacagagtcccaacgggaactgtgctcctggatggacgccccttaacccataactcaaggacttctctatgcctgggacttaaaatcaccaacaacccgctcctgcagccagctagcagaaataaacacacaaaggccacacgccagttcacagccacaagtatttattgagtgcctgtagtgcaagaaagagagatggtccctgctcccgcggagcttacagctt

SEQ ID NO: 316550 - DNA, 41 bp, Homo sapiens; identical to SEQ ID NO: 265443
  chr12:123736871-123736912
  hypo

SEQ ID NO: 316551 - DNA, 180 bp, Homo sapiens; identical to SEQ ID NO: 265444
  chr12:123737476-123737656
  hypo

SEQ ID NO: 316552 - DNA, 328 bp, Homo sapiens; identical to SEQ ID NO: 289480
  chr12:123754875-123755203
  hypo

SEQ ID NO: 316553 - DNA, 152 bp, Homo sapiens; identical to SEQ ID NO: 265445
  chr12:123757399-123757551
  hypo

SEQ ID NO: 316554 - DNA, 537 bp, Homo sapiens; identical to SEQ ID NO: 265446
  chr12:123773444-123773981
  hypo

SEQ ID NO: 316555 - DNA, 66 bp, Homo sapiens
  chr12:123881627-123881693
  hypo
tctgctctttcccacgctgctgccatactaggagcctgcagaccagtgagcagcaccggctggaag

SEQ ID NO: 316556 - DNA, 42 bp, Homo sapiens; identical to SEQ ID NO: 265448
  chr12:123881965-123882007
  hypo

SEQ ID NO: 316557 - DNA, 154 bp, Homo sapiens; identical to SEQ ID NO: 265449
  chr12:123882805-123882959
  hypo

SEQ ID NO: 316558 - DNA, 43 bp, Homo sapiens; identical to SEQ ID NO: 265450
  chr12:123894663-123894706
  hypo

SEQ ID NO: 316559 - DNA, 411 bp, Homo sapiens; identical to SEQ ID NO: 289484
  chr12:123920727-123921138
  hypo

SEQ ID NO: 316560 - DNA, 364 bp, Homo sapiens; identical to SEQ ID NO: 265451
  chr12:123959873-123960237
  hypo

SEQ ID NO: 316561 - DNA, 128 bp, Homo sapiens; identical to SEQ ID NO: 265452
  chr12:123986831-123986959
  hypo

SEQ ID NO: 316562 - DNA, 216 bp, Homo sapiens; identical to SEQ ID NO: 215206
  chr12:123997853-123998069
  hypo

SEQ ID NO: 316563 - DNA, 319 bp, Homo sapiens; identical to SEQ ID NO: 289485
  chr12:124017664-124017983
  hypo

SEQ ID NO: 316564 - DNA, 43 bp, Homo sapiens; identical to SEQ ID NO: 265455
  chr12:124085762-124085805
  hypo

SEQ ID NO: 316565 - DNA, 125 bp, Homo sapiens; identical to SEQ ID NO: 215207
  chr12:124111672-124111797
  hypo

SEQ ID NO: 316566 - DNA, 38 bp, Homo sapiens; identical to SEQ ID NO: 265457
  chr12:124128645-124128683
  hypo

SEQ ID NO: 316567 - DNA, 276 bp, Homo sapiens; identical to SEQ ID NO: 215208
  chr12:124141811-124142087
  hypo

SEQ ID NO: 316568 - DNA, 142 bp, Homo sapiens; identical to SEQ ID NO: 265459
  chr12:124152494-124152636
  hypo

SEQ ID NO: 316569 - DNA, 186 bp, Homo sapiens; identical to SEQ ID NO: 265460
  chr12:124171333-124171519
  hypo

SEQ ID NO: 316570 - DNA, 48 bp, Homo sapiens; identical to SEQ ID NO: 265461
  chr12:124175161-124175209
  hypo

SEQ ID NO: 316571 - DNA, 167 bp, Homo sapiens; identical to SEQ ID NO: 215209
  chr12:124272114-124272281
  hypo

SEQ ID NO: 316572 - DNA, 212 bp, Homo sapiens; identical to SEQ ID NO: 215210
  chr12:124335328-124335540
  hypo

SEQ ID NO: 316573 - DNA, 42 bp, Homo sapiens; identical to SEQ ID NO: 215211
  chr12:124338357-124338399
  hypo

SEQ ID NO: 316574 - DNA, 41 bp, Homo sapiens; identical to SEQ ID NO: 215212
  chr12:124338459-124338500
  hypo

SEQ ID NO: 316575 - DNA, 53 bp, Homo sapiens
  chr12:124393604-124393657
  hypo
ctgagagggggacccggccctgcccttagggacgctcccgcccaggagtgcgg

SEQ ID NO: 316576 - DNA, 125 bp, Homo sapiens; identical to SEQ ID NO: 265467
  chr12:124398892-124399017
  hypo

SEQ ID NO: 316577 - DNA, 81 bp, Homo sapiens; identical to SEQ ID NO: 215213
  chr12:124404099-124404180
  hypo

SEQ ID NO: 316578 - DNA, 68 bp, Homo sapiens; identical to SEQ ID NO: 215214
  chr12:124404272-124404340
  hypo

SEQ ID NO: 316579 - DNA, 102 bp, Homo sapiens; identical to SEQ ID NO: 265469
  chr12:124423712-124423814
  hypo

SEQ ID NO: 316580 - DNA, 39 bp, Homo sapiens; identical to SEQ ID NO: 265471
  chr12:124444122-124444161
  hypo

SEQ ID NO: 316581 - DNA, 36 bp, Homo sapiens; identical to SEQ ID NO: 215215
  chr12:124514725-124514761
  hypo

SEQ ID NO: 316582 - DNA, 114 bp, Homo sapiens; identical to SEQ ID NO: 265473
  chr12:124562301-124562415
  hypo

SEQ ID NO: 316583 - DNA, 50 bp, Homo sapiens; identical to SEQ ID NO: 265474
  chr12:124582793-124582843
  hypo

SEQ ID NO: 316584 - DNA, 82 bp, Homo sapiens
  chr12:124651851-124651933
  hypo
tgtgaccgttcgatagttccctgagtcactcaataagccagttgggccccatctccctgccctcttgcgagtgtcgggcaga

SEQ ID NO: 316585 - DNA, 145 bp, Homo sapiens; identical to SEQ ID NO: 265476
  chr12:124668398-124668543
  hypo

SEQ ID NO: 316586 - DNA, 323 bp, Homo sapiens; identical to SEQ ID NO: 265477
  chr12:124669010-124669333
  hypo

SEQ ID NO: 316587 - DNA, 103 bp, Homo sapiens; identical to SEQ ID NO: 265478
  chr12:124693754-124693857
  hypo

SEQ ID NO: 316588 - DNA, 252 bp, Homo sapiens; identical to SEQ ID NO: 265479
  chr12:124716386-124716638
  hypo

SEQ ID NO: 316589 - DNA, 162 bp, Homo sapiens; identical to SEQ ID NO: 215216
  chr12:124788613-124788775
  hypo

SEQ ID NO: 316590 - DNA, 352 bp, Homo sapiens; identical to SEQ ID NO: 265481
  chr12:124791415-124791767
  hypo

SEQ ID NO: 316591 - DNA, 225 bp, Homo sapiens; identical to SEQ ID NO: 265482
  chr12:124798801-124799026
  hypo

SEQ ID NO: 316592 - DNA, 245 bp, Homo sapiens; identical to SEQ ID NO: 265483
  chr12:124819439-124819684
  hypo

SEQ ID NO: 316593 - DNA, 375 bp, Homo sapiens; identical to SEQ ID NO: 265484
  chr12:124821027-124821402
  hypo

SEQ ID NO: 316594 - DNA, 123 bp, Homo sapiens; identical to SEQ ID NO: 265485
  chr12:124827621-124827744
  hypo

SEQ ID NO: 316595 - DNA, 184 bp, Homo sapiens; identical to SEQ ID NO: 265486
  chr12:124829274-124829458
  hypo

SEQ ID NO: 316596 - DNA, 100 bp, Homo sapiens; identical to SEQ ID NO: 265487
  chr12:124831187-124831287
  hypo

SEQ ID NO: 316597 - DNA, 110 bp, Homo sapiens; identical to SEQ ID NO: 215219
  chr12:124831992-124832102
  hypo

SEQ ID NO: 316598 - DNA, 642 bp, Homo sapiens
  chr12:124832318-124832960
  hypo
cgtgactgtacacccgttgggggcaacgagggagcagggaacagggcagtaccttgtgtgatggacccgcggatgtggtgctgctctttgaggtggtgggggctgtgtcgctccggcgggatggcacggcccatgagacctgggtaggagagggtgaggccatcattccgtggctccctgagccgacactgggcagtgacaggggtcagtgtttacagccgccagtggtcatccccacgatgatggtggagtaggacccagcacgggaaggtccctgcgctacctccagatggagcctcagaaagcccagcctcggtttccccatctgtaaaacggggtcagccatccccccaccgcccaccagggggcaccgagagatgaagtctcctccctgctatcaccttcgatgctggctgaggagatggctctgcccacgcggccctccatcatgtcataggtgcgcttgggggcggccgtctcatgggggggtcctgagctgcttctgccgtcctccttggagcactgggtcacagacatgccacctggaaaccacacaaagcactcggtgaggagctgggcacgggcccaggaccacggtgggcaggcaggacaggcagagccggtaggcaggagccagcagtg

SEQ ID NO: 316599 - DNA, 259 bp, Homo sapiens
  chr12:124832990-124833249
  hypo
cagccgaggcctccagagggagctggcagcctgcaggccctgggggcctgccagcaggacccaggagcttttccagggggttgcacggtgggagatgcagggcacgctgcctgcaccctgtaccctagccctccagggtgctctgtctgcaagcaagggtgtgcctgtgaccacatgagcacgtgagtctgtgtccacacccacgggtgccgacatggggcgtgaacaagtgcacacacatgcacgtgagcaaggacgc

SEQ ID NO: 316600 - DNA, 314 bp, Homo sapiens; identical to SEQ ID NO: 265490
  chr12:124843495-124843809
  hypo

SEQ ID NO: 316601 - DNA, 735 bp, Homo sapiens; identical to SEQ ID NO: 265491
  chr12:124850143-124850878
  hypo

SEQ ID NO: 316602 - DNA, 263 bp, Homo sapiens; identical to SEQ ID NO: 215224
  chr12:124856543-124856806
  hypo

SEQ ID NO: 316603 - DNA, 178 bp, Homo sapiens; identical to SEQ ID NO: 215225
  chr12:124869698-124869876
  hypo

SEQ ID NO: 316604 - DNA, 340 bp, Homo sapiens; identical to SEQ ID NO: 215226
  chr12:124870152-124870492
  hypo

SEQ ID NO: 316605 - DNA, 270 bp, Homo sapiens; identical to SEQ ID NO: 215227
  chr12:124879851-124880121
  hypo

SEQ ID NO: 316606 - DNA, 190 bp, Homo sapiens; identical to SEQ ID NO: 265495
  chr12:124881245-124881435
  hypo

SEQ ID NO: 316607 - DNA, 213 bp, Homo sapiens; identical to SEQ ID NO: 265496
  chr12:124881710-124881923
  hypo

SEQ ID NO: 316608 - DNA, 248 bp, Homo sapiens; identical to SEQ ID NO: 265497
  chr12:124886238-124886486
  hypo

SEQ ID NO: 316609 - DNA, 81 bp, Homo sapiens; identical to SEQ ID NO: 215228
  chr12:124893321-124893402
  hypo

SEQ ID NO: 316610 - DNA, 209 bp, Homo sapiens; identical to SEQ ID NO: 215229
  chr12:124893570-124893779
  hypo

SEQ ID NO: 316611 - DNA, 33 bp, Homo sapiens; identical to SEQ ID NO: 215230
  chr12:124894790-124894823
  hypo

SEQ ID NO: 316612 - DNA, 722 bp, Homo sapiens; identical to SEQ ID NO: 265500
  chr12:124895907-124896629
  hypo

SEQ ID NO: 316613 - DNA, 172 bp, Homo sapiens; identical to SEQ ID NO: 265501
  chr12:124901267-124901439
  hypo

SEQ ID NO: 316614 - DNA, 293 bp, Homo sapiens; identical to SEQ ID NO: 215232
  chr12:124911265-124911558
  hypo

SEQ ID NO: 316615 - DNA, 71 bp, Homo sapiens; identical to SEQ ID NO: 265503
  chr12:124915171-124915242
  hypo

SEQ ID NO: 316616 - DNA, 592 bp, Homo sapiens; identical to SEQ ID NO: 265504
  chr12:124929576-124930168
  hypo

SEQ ID NO: 316617 - DNA, 33 bp, Homo sapiens; identical to SEQ ID NO: 172812
  chr12:124948049-124948082
  hypo

SEQ ID NO: 316618 - DNA, 249 bp, Homo sapiens; identical to SEQ ID NO: 265507
  chr12:124959724-124959973
  hypo

SEQ ID NO: 316619 - DNA, 268 bp, Homo sapiens; identical to SEQ ID NO: 265508
  chr12:124964413-124964681
  hypo

SEQ ID NO: 316620 - DNA, 230 bp, Homo sapiens; identical to SEQ ID NO: 265509
  chr12:124966043-124966273
  hypo

SEQ ID NO: 316621 - DNA, 172 bp, Homo sapiens; identical to SEQ ID NO: 215234
  chr12:124967300-124967472
  hypo

SEQ ID NO: 316622 - DNA, 191 bp, Homo sapiens; identical to SEQ ID NO: 265511
  chr12:124970972-124971163
  hypo

SEQ ID NO: 316623 - DNA, 165 bp, Homo sapiens; identical to SEQ ID NO: 215235
  chr12:124971726-124971891
  hypo

SEQ ID NO: 316624 - DNA, 724 bp, Homo sapiens; identical to SEQ ID NO: 215236
  chr12:124979279-124980003
  hypo

SEQ ID NO: 316625 - DNA, 134 bp, Homo sapiens; identical to SEQ ID NO: 215237
  chr12:124980537-124980671
  hypo

SEQ ID NO: 316626 - DNA, 52 bp, Homo sapiens; identical to SEQ ID NO: 215238
  chr12:124989193-124989245
  hypo

SEQ ID NO: 316627 - DNA, 883 bp, Homo sapiens
  chr12:125000464-125001347
  hypo
cacccaggactcttctccaccgggtaggaaaatcgagtccctgaggactttggcaaaggtcaggggcagccacgacacagctctgtggccaacccaagtggacaccaaggccctgggggtgacaaggggacatggatgagaacccccccgccttcggaggccattctcgaggtcccaggagaggccccatgacaatgagacagcgggcagctggtgcggggggcctggacgcccggggaactccccactggctcctgctggcccaagagcggaggccctgagccagtcactggcccagcatccggtgtcacttacaaacacaggacggctgccaccttctgcaggagaactggccctcccgcgccagtccccaggccacaccaggcactgtggggggtgcctggcccagggctggcacggaggggctcaggctgagtgggagacggggcagaacaggcaggcatggggggagacctggggatcccaaacaaaggcagagcctgggaagcacccactcgacctacctcccattatctggacccaggtttctacaaaacatgagagctctctgcaaagaagaaaagaaaaatggacggaactcgaacttaaatccaaccttgtggttacaattacggaggcccacccaggccagcactgtgcgggccccttcaggcttctctcaggctctcccgagacacaccggcaggctgcagtgctaccactgtggtaaaggacaaggaaactgaggctctgtgggattccgggacttgcccaaggtcacaccatccttgaggggtcgagccaggactggaacctcagtccggccactacaacttcataaataccatcgccctgagatgctgaaatcccaggggccccccac

SEQ ID NO: 316628 - DNA, 273 bp, Homo sapiens; identical to SEQ ID NO: 265517
  chr12:125008003-125008276
  hypo

SEQ ID NO: 316629 - DNA, 224 bp, Homo sapiens; identical to SEQ ID NO: 215239
  chr12:125009052-125009276
  hypo

SEQ ID NO: 316630 - DNA, 40 bp, Homo sapiens; identical to SEQ ID NO: 215240
  chr12:125009306-125009346
  hypo

SEQ ID NO: 316631 - DNA, 430 bp, Homo sapiens; identical to SEQ ID NO: 265519
  chr12:125042262-125042692
  hypo

SEQ ID NO: 316632 - DNA, 53 bp, Homo sapiens; identical to SEQ ID NO: 215242
  chr12:125062418-125062471
  hypo

SEQ ID NO: 316633 - DNA, 131 bp, Homo sapiens; identical to SEQ ID NO: 215243
  chr12:125062705-125062836
  hypo

SEQ ID NO: 316634 - DNA, 93 bp, Homo sapiens; identical to SEQ ID NO: 215244
  chr12:125062887-125062980
  hypo

SEQ ID NO: 316635 - DNA, 129 bp, Homo sapiens; identical to SEQ ID NO: 215245
  chr12:125092496-125092625
  hypo

SEQ ID NO: 316636 - DNA, 153 bp, Homo sapiens
  chr12:125102589-125102742
  hypo
gtctgtgcctatgcagttctgactgcgtttgtgccccttcgattcacgcccattgcacaaatggggacactgaggcaatgagaggcgaggagacttgcccaagacctgcaggctccgtcaggggcagggtcaccggtgcggcttcagaggcag

SEQ ID NO: 316637 - DNA, 86 bp, Homo sapiens; identical to SEQ ID NO: 265524
  chr12:125103114-125103200
  hypo

SEQ ID NO: 316638 - DNA, 105 bp, Homo sapiens; identical to SEQ ID NO: 265525
  chr12:125105685-125105790
  hypo

SEQ ID NO: 316639 - DNA, 153 bp, Homo sapiens
  chr12:125119170-125119323
  hypo
cctcagaactcatgcagccacttccaccacacccagtggttgaggtcatcacaaaagtccatccgggttcaagcggaggggaccaagacccaccttttgagtgcttcaacctcaccaggaatccaggatccttccacctttctgctctgcgga

SEQ ID NO: 316640 - DNA, 84 bp, Homo sapiens; identical to SEQ ID NO: 265527
  chr12:125128937-125129021
  hypo

SEQ ID NO: 316641 - DNA, 230 bp, Homo sapiens; identical to SEQ ID NO: 265528
  chr12:125145440-125145670
  hypo

SEQ ID NO: 316642 - DNA, 137 bp, Homo sapiens; identical to SEQ ID NO: 215246
  chr12:125151971-125152108
  hypo

SEQ ID NO: 316643 - DNA, 111 bp, Homo sapiens; identical to SEQ ID NO: 215247
  chr12:125152254-125152365
  hypo

SEQ ID NO: 316644 - DNA, 45 bp, Homo sapiens; identical to SEQ ID NO: 265530
  chr12:125177731-125177776
  hypo

SEQ ID NO: 316645 - DNA, 353 bp, Homo sapiens
  chr12:125184198-125184551
  hypo
acattggagtgtgtggacaacgcttacaaacggagatgttccatctcagttcttgaatatgaagaactgtgtcctgcaaggttgctgcaaggattgctgcacgtagagggtctcctgtgtgccaggcatggctagggggccagggacacaaaggactagacagggggtcgaaggctcaaaatcatattcaagatgaggaaactgaggctcagagacgctaagcacacttccaaggtcatacagccaatgagcgggagagccaggatttggaccgctgaccacctggtttccaaacctggtctcccttcacccctcctccccgctccacgcctgcagtctccaggacggagaaa

SEQ ID NO: 316646 - DNA, 137 bp, Homo sapiens; identical to SEQ ID NO: 215249
  chr12:125184581-125184718
  hypo

SEQ ID NO: 316647 - DNA, 151 bp, Homo sapiens; identical to SEQ ID NO: 265532
  chr12:125221107-125221258
  hypo

SEQ ID NO: 316648 - DNA, 51 bp, Homo sapiens; identical to SEQ ID NO: 265533
  chr12:125223362-125223413
  hypo

SEQ ID NO: 316649 - DNA, 156 bp, Homo sapiens; identical to SEQ ID NO: 215250
  chr12:125223879-125224035
  hypo

SEQ ID NO: 316650 - DNA, 35 bp, Homo sapiens; identical to SEQ ID NO: 265535
  chr12:125224155-125224190
  hypo

SEQ ID NO: 316651 - DNA, 140 bp, Homo sapiens; identical to SEQ ID NO: 215251
  chr12:125236641-125236781
  hypo

SEQ ID NO: 316652 - DNA, 83 bp, Homo sapiens; identical to SEQ ID NO: 265537
  chr12:125257116-125257199
  hypo

SEQ ID NO: 316653 - DNA, 518 bp, Homo sapiens; identical to SEQ ID NO: 265538
  chr12:125277444-125277962
  hypo

SEQ ID NO: 316654 - DNA, 226 bp, Homo sapiens; identical to SEQ ID NO: 265539
  chr12:125299402-125299628
  hypo

SEQ ID NO: 316655 - DNA, 70 bp, Homo sapiens; identical to SEQ ID NO: 265540
  chr12:125301969-125302039
  hypo

SEQ ID NO: 316656 - DNA, 84 bp, Homo sapiens; identical to SEQ ID NO: 215252
  chr12:125333253-125333337
  hypo

SEQ ID NO: 316657 - DNA, 153 bp, Homo sapiens; identical to SEQ ID NO: 215253
  chr12:125447387-125447540
  hypo

SEQ ID NO: 316658 - DNA, 107 bp, Homo sapiens; identical to SEQ ID NO: 265544
  chr12:125448950-125449057
  hypo

SEQ ID NO: 316659 - DNA, 189 bp, Homo sapiens; identical to SEQ ID NO: 265545
  chr12:125498606-125498795
  hypo

SEQ ID NO: 316660 - DNA, 161 bp, Homo sapiens; identical to SEQ ID NO: 215254
  chr12:125500619-125500780
  hypo

SEQ ID NO: 316661 - DNA, 38 bp, Homo sapiens; identical to SEQ ID NO: 215255
  chr12:125565910-125565948
  hypo

SEQ ID NO: 316662 - DNA, 274 bp, Homo sapiens
  chr12:125566139-125566413
  hypo
ccctgcttaaaaaaatacatacatgtgcacaattgccttcatgctccagcgagtagagcaaacaacatgcattagcacatccgtgttgagattgttagaacagctgcctgcgcagcacattttgcttttgaagagtagctatcagcttaccgagtattttcacatgatggaaagttttctgggctgggaatgtgggagaggtaataaaaaggctaccccagggcagcaaggagaggatgaagggcagacgcgtacaactctaggcaaataggaa

SEQ ID NO: 316663 - DNA, 216 bp, Homo sapiens; identical to SEQ ID NO: 215257
  chr12:125578190-125578406
  hypo

SEQ ID NO: 316664 - DNA, 43 bp, Homo sapiens; identical to SEQ ID NO: 215258
  chr12:125578565-125578608
  hypo

SEQ ID NO: 316665 - DNA, 327 bp, Homo sapiens; identical to SEQ ID NO: 265549
  chr12:125605535-125605862
  hypo

SEQ ID NO: 316666 - DNA, 111 bp, Homo sapiens
  chr12:125609559-125609670
  hypo
ctccatctcaggtatggccccggtggggacagtccttccagccatccccgccggccccataagtatgcacacctctgcccagtgcttggattcatcccaaggacacagtcc

SEQ ID NO: 316667 - DNA, 76 bp, Homo sapiens; identical to SEQ ID NO: 215259
  chr12:125636433-125636509
  hypo

SEQ ID NO: 316668 - DNA, 142 bp, Homo sapiens; identical to SEQ ID NO: 289500
  chr12:126018009-126018151
  hypo

SEQ ID NO: 316669 - DNA, 37 bp, Homo sapiens; identical to SEQ ID NO: 289501
  chr12:126018265-126018302
  hypo

SEQ ID NO: 316670 - DNA, 163 bp, Homo sapiens; identical to SEQ ID NO: 265552
  chr12:128247734-128247897
  hypo

SEQ ID NO: 316671 - DNA, 93 bp, Homo sapiens; identical to SEQ ID NO: 265553
  chr12:128310534-128310627
  hypo

SEQ ID NO: 316672 - DNA, 108 bp, Homo sapiens; identical to SEQ ID NO: 265554
  chr12:128313387-128313495
  hypo

SEQ ID NO: 316673 - DNA, 69 bp, Homo sapiens; identical to SEQ ID NO: 265555
  chr12:128386219-128386288
  hypo

SEQ ID NO: 316674 - DNA, 37 bp, Homo sapiens; identical to SEQ ID NO: 265556
  chr12:128439870-128439907
  hypo

SEQ ID NO: 316675 - DNA, 65 bp, Homo sapiens; identical to SEQ ID NO: 265557
  chr12:128489343-128489408
  hypo

SEQ ID NO: 316676 - DNA, 419 bp, Homo sapiens; identical to SEQ ID NO: 289505
  chr12:128750699-128751118
  hypo

SEQ ID NO: 316677 - DNA, 263 bp, Homo sapiens; identical to SEQ ID NO: 215261
  chr12:128773737-128774000
  hypo

SEQ ID NO: 316678 - DNA, 36 bp, Homo sapiens
  chr12:128899665-128899701
  hypo
gatgaccacggcgccggggagaagctgccatgcctg

SEQ ID NO: 316679 - DNA, 151 bp, Homo sapiens
  chr12:128899867-128900018
  hypo
tggagctctactacaccgtgcacccaggaaacgagcgaggggactgtgccgggggtgacttcaggaagggcaacgccatccgtccaggaaaggatgggctggaggaaaccacgtcccacctgcagaggatcggcaccgtcggcctttaccg

SEQ ID NO: 316680 - DNA, 137 bp, Homo sapiens; identical to SEQ ID NO: 265560
  chr12:129148503-129148640
  hypo

SEQ ID NO: 316681 - DNA, 56 bp, Homo sapiens; identical to SEQ ID NO: 215263
  chr12:129148670-129148726
  hypo

SEQ ID NO: 316682 - DNA, 45 bp, Homo sapiens; identical to SEQ ID NO: 265562
  chr12:129151360-129151405
  hypo

SEQ ID NO: 316683 - DNA, 197 bp, Homo sapiens; identical to SEQ ID NO: 265563
  chr12:129180361-129180558
  hypo

SEQ ID NO: 316684 - DNA, 249 bp, Homo sapiens; identical to SEQ ID NO: 215264
  chr12:129189630-129189879
  hypo

SEQ ID NO: 316685 - DNA, 205 bp, Homo sapiens; identical to SEQ ID NO: 215265
  chr12:129189909-129190114
  hypo

SEQ ID NO: 316686 - DNA, 77 bp, Homo sapiens; identical to SEQ ID NO: 215266
  chr12:129190144-129190221
  hypo

SEQ ID NO: 316687 - DNA, 206 bp, Homo sapiens; identical to SEQ ID NO: 265565
  chr12:129298024-129298230
  hypo

SEQ ID NO: 316688 - DNA, 68 bp, Homo sapiens; identical to SEQ ID NO: 265566
  chr12:129305165-129305233
  hypo

SEQ ID NO: 316689 - DNA, 31 bp, Homo sapiens; identical to SEQ ID NO: 265567
  chr12:129806103-129806134
  hypo

SEQ ID NO: 316690 - DNA, 172 bp, Homo sapiens; identical to SEQ ID NO: 215267
  chr12:130037481-130037653
  hypo

SEQ ID NO: 316691 - DNA, 39 bp, Homo sapiens; identical to SEQ ID NO: 265569
  chr12:130060596-130060635
  hypo

SEQ ID NO: 316692 - DNA, 486 bp, Homo sapiens
  chr12:130184244-130184730
  hypo
ggccggctctacttcggtgagcgataacacagcttttctggtcaaacagcttctggaaaacaccacctgatcgacgggcgggtacagacagacattgggaaacgacttacctcaacgtgaagcgatcttcagtggaatttctggagatggaaacaggaaaagtcagcacgtctcctttcctcacggtctttggtatatagtggatggccacgctgttgtccagacgcagttctctcagggagggtttcctgtgtgtctgataaaggaagatgctcccgatcctctgcaaggggggcccggactcatcgatgtcactgtggcctgtccggatcccattgcttctcctcgcgtcttccctgacgcagtcccctctctcaccccctgggtgcacggtgtagtagagctccacgggggtcccctccggctggtccacggacttcctcctcccggcaaccaccgtgggggggctgaaccagctggacagga

SEQ ID NO: 316693 - DNA, 112 bp, Homo sapiens; identical to SEQ ID NO: 215269
  chr12:130184760-130184872
  hypo

SEQ ID NO: 316694 - DNA, 35 bp, Homo sapiens; identical to SEQ ID NO: 265571
  chr12:130326761-130326796
  hypo

SEQ ID NO: 316695 - DNA, 185 bp, Homo sapiens; identical to SEQ ID NO: 265572
  chr12:130493341-130493526
  hypo

SEQ ID NO: 316696 - DNA, 138 bp, Homo sapiens; identical to SEQ ID NO: 265573
  chr12:130628827-130628965
  hypo

SEQ ID NO: 316697 - DNA, 278 bp, Homo sapiens; identical to SEQ ID NO: 203257
  chr12:130645806-130646084
  hypo

SEQ ID NO: 316698 - DNA, 211 bp, Homo sapiens; identical to SEQ ID NO: 203258
  chr12:130646344-130646555
  hypo

SEQ ID NO: 316699 - DNA, 85 bp, Homo sapiens; identical to SEQ ID NO: 265574
  chr12:130663584-130663669
  hypo

SEQ ID NO: 316700 - DNA, 55 bp, Homo sapiens; identical to SEQ ID NO: 265575
  chr12:130744952-130745007
  hypo

SEQ ID NO: 316701 - DNA, 38 bp, Homo sapiens; identical to SEQ ID NO: 265577
  chr12:130828450-130828488
  hypo

SEQ ID NO: 316702 - DNA, 143 bp, Homo sapiens; identical to SEQ ID NO: 215272
  chr12:130852207-130852350
  hypo

SEQ ID NO: 316703 - DNA, 42 bp, Homo sapiens; identical to SEQ ID NO: 265579
  chr12:130883021-130883063
  hypo

SEQ ID NO: 316704 - DNA, 201 bp, Homo sapiens; identical to SEQ ID NO: 265581
  chr12:130892170-130892371
  hypo

SEQ ID NO: 316705 - DNA, 33 bp, Homo sapiens; identical to SEQ ID NO: 215273
  chr12:130894171-130894204
  hypo

SEQ ID NO: 316706 - DNA, 224 bp, Homo sapiens; identical to SEQ ID NO: 215274
  chr12:130906937-130907161
  hypo

SEQ ID NO: 316707 - DNA, 36 bp, Homo sapiens; identical to SEQ ID NO: 265584
  chr12:130907881-130907917
  hypo

SEQ ID NO: 316708 - DNA, 93 bp, Homo sapiens; identical to SEQ ID NO: 215275
  chr12:130909491-130909584
  hypo

SEQ ID NO: 316709 - DNA, 496 bp, Homo sapiens
  chr12:130909737-130910233
  hypo
agatggtgggtgtggccacggtgccaggggagactgcccgggggctacatcctcagaaaccctgagggcagctgccactggaggccgtgtgtgactggagacagttcaccagacacggagcctgacccgtccctgtccatccactgggccaacttcccttccagcgctcggcaccctctgcaggactttctagttaggctgacgtgtcacccttctccctaagatacaagctgcgtgaaaccacgccatccccggccccaccaacagcgcccgcacaccatcgtgcagagtctgtgtcagcaaaggactggggtccgcctgtctcctctgcatcctgcatcaagtccctgagagccacacttgagccatcacagtctccagtgggtggcacagagctggccacaccgggagctgcttaaccagaccagtgtccatgacttttatactgcccgtctgcacgccatcactctctgccggggacagccctcaactcacc

SEQ ID NO: 316710 - DNA, 381 bp, Homo sapiens; identical to SEQ ID NO: 265586
  chr12:130913639-130914020
  hypo

SEQ ID NO: 316711 - DNA, 258 bp, Homo sapiens; identical to SEQ ID NO: 265587
  chr12:130915750-130916008
  hypo

SEQ ID NO: 316712 - DNA, 577 bp, Homo sapiens; identical to SEQ ID NO: 265588
  chr12:130918920-130919497
  hypo

SEQ ID NO: 316713 - DNA, 79 bp, Homo sapiens
  chr12:130920513-130920592
  hypo
aggaggacagtgtagggtcccggtgagaccccacaggctgacccagcagggccgagggtcctgaccagggctgtgctgc

SEQ ID NO: 316714 - DNA, 580 bp, Homo sapiens
  chr12:130921383-130921963
  hypo
taccctgctgctctcggccaccctctgcgcggcctcccgggccatggccttggcgacggtggtggacaccggggtgccctgtggctgtggcaggatgcggctgggtgagggcgaccgccttccggggcccacgggcggctccagcatgtgcccatgcacagggccaggtgcacggctctgctcccaggcctcatccatcctggcgtggggacccaggtgctcgtctttggtttcggggactccagaacttgctaatggctttgattggggtgcaggtctcgggtggggggtaggaggcaccaggagctcggggggaacggcagcaactgcagagtccacggactcgccctgggcggagagggtccgcacggtcacgcccttggcctccaggctccgcagccgcacaagctccacggccgtgctgtctgccgtggggaagatgacttcagccacctgtggacaagcagagctggctcgcgggctgcccgaggtgagccccgcggtcctgcaatggggagccgaccagtcctctgcccagaggccaggtgcaaaggatcatgcccagcgacctccgactcca

SEQ ID NO: 316715 - DNA, 39 bp, Homo sapiens; identical to SEQ ID NO: 265591
  chr12:130922987-130923026
  hypo

SEQ ID NO: 316716 - DNA, 141 bp, Homo sapiens; identical to SEQ ID NO: 215279
  chr12:130925068-130925209
  hypo

SEQ ID NO: 316717 - DNA, 436 bp, Homo sapiens; identical to SEQ ID NO: 265593
  chr12:130926606-130927042
  hypo

SEQ ID NO: 316718 - DNA, 102 bp, Homo sapiens; identical to SEQ ID NO: 265594
  chr12:130929720-130929822
  hypo

SEQ ID NO: 316719 - DNA, 292 bp, Homo sapiens; identical to SEQ ID NO: 265595
  chr12:130931808-130932100
  hypo

SEQ ID NO: 316720 - DNA, 586 bp, Homo sapiens; identical to SEQ ID NO: 215281
  chr12:130933878-130934464
  hypo

SEQ ID NO: 316721 - DNA, 332 bp, Homo sapiens; identical to SEQ ID NO: 265597
  chr12:130934697-130935029
  hypo

SEQ ID NO: 316722 - DNA, 415 bp, Homo sapiens; identical to SEQ ID NO: 265598
  chr12:130939634-130940049
  hypo

SEQ ID NO: 316723 - DNA, 89 bp, Homo sapiens; identical to SEQ ID NO: 215282
  chr12:130941113-130941202
  hypo

SEQ ID NO: 316724 - DNA, 190 bp, Homo sapiens; identical to SEQ ID NO: 265600
  chr12:130954679-130954869
  hypo

SEQ ID NO: 316725 - DNA, 175 bp, Homo sapiens; identical to SEQ ID NO: 265601
  chr12:130958396-130958571
  hypo

SEQ ID NO: 316726 - DNA, 143 bp, Homo sapiens; identical to SEQ ID NO: 265602
  chr12:130963328-130963471
  hypo

SEQ ID NO: 316727 - DNA, 251 bp, Homo sapiens
  chr12:130968370-130968621
  hypo
ccccgaccctcacctacacacggtgcccggagcccccaccctcacctacacacagtgcccggagcccccgtccccacctagacacggtgcccggagcccctgtccccgcctagatgtgtccctgagccatgccactaacaggggctgcgagggcttccgcggctcctggaaaggccccagaagttcccccaggcactggcttgctggcatggacaatgtcccatgggaaggatagactggaggcgaaacat

SEQ ID NO: 316728 - DNA, 125 bp, Homo sapiens; identical to SEQ ID NO: 215284
  chr12:130968690-130968815
  hypo

SEQ ID NO: 316729 - DNA, 281 bp, Homo sapiens; identical to SEQ ID NO: 215285
  chr12:130985315-130985596
  hypo

SEQ ID NO: 316730 - DNA, 60 bp, Homo sapiens; identical to SEQ ID NO: 215286
  chr12:131077263-131077323
  hypo

SEQ ID NO: 316731 - DNA, 116 bp, Homo sapiens; identical to SEQ ID NO: 215287
  chr12:131077362-131077478
  hypo

SEQ ID NO: 316732 - DNA, 454 bp, Homo sapiens; identical to SEQ ID NO: 265606
  chr12:131095739-131096193
  hypo

SEQ ID NO: 316733 - DNA, 209 bp, Homo sapiens; identical to SEQ ID NO: 265607
  chr12:131097715-131097924
  hypo

SEQ ID NO: 316734 - DNA, 151 bp, Homo sapiens; identical to SEQ ID NO: 265608
  chr12:131102208-131102359
  hypo

SEQ ID NO: 316735 - DNA, 338 bp, Homo sapiens; identical to SEQ ID NO: 265609
  chr12:131110922-131111260
  hypo

SEQ ID NO: 316736 - DNA, 157 bp, Homo sapiens; identical to SEQ ID NO: 265610
  chr12:131111290-131111447
  hypo

SEQ ID NO: 316737 - DNA, 141 bp, Homo sapiens; identical to SEQ ID NO: 265611
  chr12:131111477-131111618
  hypo

SEQ ID NO: 316738 - DNA, 180 bp, Homo sapiens; identical to SEQ ID NO: 265612
  chr12:131125871-131126051
  hypo

SEQ ID NO: 316739 - DNA, 50 bp, Homo sapiens; identical to SEQ ID NO: 265613
  chr12:131129060-131129110
  hypo

SEQ ID NO: 316740 - DNA, 459 bp, Homo sapiens; identical to SEQ ID NO: 265614
  chr12:131133585-131134044
  hypo

SEQ ID NO: 316741 - DNA, 77 bp, Homo sapiens; identical to SEQ ID NO: 265615
  chr12:131149029-131149106
  hypo

SEQ ID NO: 316742 - DNA, 57 bp, Homo sapiens; identical to SEQ ID NO: 265616
  chr12:131157701-131157758
  hypo

SEQ ID NO: 316743 - DNA, 60 bp, Homo sapiens; identical to SEQ ID NO: 265617
  chr12:131157788-131157848
  hypo

SEQ ID NO: 316744 - DNA, 79 bp, Homo sapiens; identical to SEQ ID NO: 215288
  chr12:131159259-131159338
  hypo

SEQ ID NO: 316745 - DNA, 77 bp, Homo sapiens; identical to SEQ ID NO: 215289
  chr12:131159368-131159445
  hypo

SEQ ID NO: 316746 - DNA, 260 bp, Homo sapiens; identical to SEQ ID NO: 215290
  chr12:131159530-131159790
  hypo

SEQ ID NO: 316747 - DNA, 287 bp, Homo sapiens; identical to SEQ ID NO: 215291
  chr12:131164354-131164641
  hypo

SEQ ID NO: 316748 - DNA, 31 bp, Homo sapiens; identical to SEQ ID NO: 265621
  chr12:131173699-131173730
  hypo

SEQ ID NO: 316749 - DNA, 132 bp, Homo sapiens; identical to SEQ ID NO: 265622
  chr12:131174313-131174445
  hypo

SEQ ID NO: 316750 - DNA, 188 bp, Homo sapiens; identical to SEQ ID NO: 265623
  chr12:131182719-131182907
  hypo

SEQ ID NO: 316751 - DNA, 42 bp, Homo sapiens; identical to SEQ ID NO: 265624
  chr12:131186211-131186253
  hypo

SEQ ID NO: 316752 - DNA, 222 bp, Homo sapiens; identical to SEQ ID NO: 265625
  chr12:131189179-131189401
  hypo

SEQ ID NO: 316753 - DNA, 215 bp, Homo sapiens; identical to SEQ ID NO: 265626
  chr12:131193261-131193476
  hypo

SEQ ID NO: 316754 - DNA, 154 bp, Homo sapiens; identical to SEQ ID NO: 265627
  chr12:131249877-131250031
  hypo

SEQ ID NO: 316755 - DNA, 80 bp, Homo sapiens; identical to SEQ ID NO: 265628
  chr12:131264841-131264921
  hypo

SEQ ID NO: 316756 - DNA, 273 bp, Homo sapiens; identical to SEQ ID NO: 265629
  chr12:131264951-131265224
  hypo

SEQ ID NO: 316757 - DNA, 402 bp, Homo sapiens; identical to SEQ ID NO: 265630
  chr12:131265526-131265928
  hypo

SEQ ID NO: 316758 - DNA, 212 bp, Homo sapiens
  chr12:131268482-131268694
  hypo
tttcacaggttgagcctgggcaagttaccaacgaagaaaggaattaaaaatgaacaatcaaaaacgcagcaacaacaatcatcttcgcggatccaattccaaaattactacattactaaaaacatccagctttaaacaaatgatacatgcaaagaaacatgaaagtggaactcatccatgaaagcataaaaaagcagcgaatagaaactctc

SEQ ID NO: 316759 - DNA, 240 bp, Homo sapiens
  chr12:131271736-131271976
  hypo
gggccggccacccgcgcccagggcagggatctacacttgagtgtttccgcgtctgggtcctaattcctagtgggagcacggaaggacacagggaatgttgggagctgcatgggccatgtcttggtcccatgggacctggccctacttgacccgaggccacaccagcttgtagacatgagcttttgggggggctttgagtcctaagagacccagctgcccacgccacacagggggaaagga

SEQ ID NO: 316760 - DNA, 298 bp, Homo sapiens
  chr12:131272032-131272330
  hypo
gccgtcacagagctccagtctcccgccacttcagtgcaaccctcgctgtctgcccactcctccggacatgacgcttaggaccttaccttgctctccagctcagagcccggcccccatggccgggccagacctgccccggcctctcccctccgcctgagccacgccccggcttcctgctcaccaggcctgcgttagcatctgcagctgtgcttcttcaggccgccgcaacaccagccttcccgcactgctccaagacactgagcctggtgcatgctcaggaaattcaacaatttcaaaa

SEQ ID NO: 316761 - DNA, 1081 bp, Homo sapiens
  chr12:131272367-131273448
  hypo
tctactcacagggcaacctgctttagcaaactcaacgacacattaaaaagtacaatttgcaaaggagagctaccacctggctgggtgttctgcgcctagagactgggccccgggagagcgctccacagtgaacttgcgaaggatggaatttacataaagaaggcaccgtctttagtcctggaaaggcaccctgggattctctacctccgtccgtctttttcacaggcagggaactgaggtcccaggaggcccaggtcaccccacccaaggaggcagggcctcccctgcactctctggaacctctccctgccaagaagccagaggccctgttttctcaggcttaggaatctgcactctcttgttcaaagactgtgagtcagaagaggagggccaagtgccgccttgaatttctcttactgctcaaatggaaaacaatgaaacagggctgtccacatcacagcctgccacctgccagtcatttagagcctggcgcgcatttccatagctcctctgacgccaggacaatcagacccgtctccggagggctcctgcctctggatgtctaaatgttcttgccttaaacccggtgtgacgctccacccctcccacaccgcacacatacgaattttaacaaaatcttcaaagcagaacttaacaaaaggttgcgtggtaccaggtccatttggttccatgtgaaaccaactaggaagatccgcattaggctcttcctcagctgcgccgagggcctggtttctattcatttgagaagctgtgtgcgcccctgtatggtctgttctttcctttagggctcgcttttaacagtgagtgttgttgtggcaactaaaataaggagccggccagtgctcctagggaggaaaacctcggcaactccgcaggtgcaggcaccggccacagacccacgcctggggcactcgcgtttgcattagcagagcgcaggagtcagggagcgcgggcaggggcgggaggaggggtctgcgcactggccacggtgtgggggacccagccctaccccttcccggggctgagtgggactcgccacgaggccagcagtttttccagg

SEQ ID NO: 316762 - DNA, 341 bp, Homo sapiens; identical to SEQ ID NO: 265633
  chr12:131288903-131289244
  hypo

SEQ ID NO: 316763 - DNA, 40 bp, Homo sapiens; identical to SEQ ID NO: 215294
  chr12:131294422-131294462
  hypo

SEQ ID NO: 316764 - DNA, 262 bp, Homo sapiens; identical to SEQ ID NO: 265635
  chr12:131314794-131315056
  hypo

SEQ ID NO: 316765 - DNA, 225 bp, Homo sapiens; identical to SEQ ID NO: 265636
  chr12:131402641-131402866
  hypo

SEQ ID NO: 316766 - DNA, 194 bp, Homo sapiens
  chr12:131418194-131418388
  hypo
caggcccctcggggcgtccccacgtcagatccctggggtcaagcctgtccccaggatgactccccaggttttgacctgatcgctgcacccatgaggctcccggtgtccgggcgctcctcaggtccccgacacggaggcaggcttgggatgactgcaacctgctctcatgagtcacagcaggtgcctgtcgagac

SEQ ID NO: 316767 - DNA, 59 bp, Homo sapiens
  chr12:131418430-131418489
  hypo
tgtggggtcaggacctccttcctccaggttctgccgtctgaggccgcagcctgctcctc

SEQ ID NO: 316768 - DNA, 385 bp, Homo sapiens; identical to SEQ ID NO: 265638
  chr12:131443181-131443566
  hypo

SEQ ID NO: 316769 - DNA, 222 bp, Homo sapiens; identical to SEQ ID NO: 265639
  chr12:131478126-131478348
  hypo

SEQ ID NO: 316770 - DNA, 522 bp, Homo sapiens; identical to SEQ ID NO: 265640
  chr12:131478661-131479183
  hypo

SEQ ID NO: 316771 - DNA, 108 bp, Homo sapiens; identical to SEQ ID NO: 265641
  chr12:131499288-131499396
  hypo

SEQ ID NO: 316772 - DNA, 83 bp, Homo sapiens; identical to SEQ ID NO: 265642
  chr12:131501103-131501186
  hypo

SEQ ID NO: 316773 - DNA, 146 bp, Homo sapiens; identical to SEQ ID NO: 265643
  chr12:131512465-131512611
  hypo

SEQ ID NO: 316774 - DNA, 73 bp, Homo sapiens; identical to SEQ ID NO: 265644
  chr12:131513785-131513858
  hypo

SEQ ID NO: 316775 - DNA, 216 bp, Homo sapiens; identical to SEQ ID NO: 265645
  chr12:131515098-131515314
  hypo

SEQ ID NO: 316776 - DNA, 237 bp, Homo sapiens
  chr12:131518464-131518701
  hypo
caccctctgccagtcctccccgggggatgccggctccacctgcagctcacgtccgatttccaccggtacccatcgtcaccatcaccagccttgcccctggtttcactgtctaccccggaggccagcgccagcctcccagccgcccccagctgcacacagcagccagagtaatattcgacgtggccgtcaggtggtgtcaccctgtgctcgaaccctctcggggcttcctctgcattt

SEQ ID NO: 316777 - DNA, 140 bp, Homo sapiens
  chr12:131518757-131518897
  hypo
tccccgcccattccactccgctcccgccatgcgtctgccttgctctgcgccacatcaagtgcattcccaccccagggcctttgcacgcctgtccttttgaatggaatgctcttcccccgggtccccgcatggttgacacc

SEQ ID NO: 316778 - DNA, 47 bp, Homo sapiens
  chr12:131556228-131556275
  hypo
caggaggcccgaggaaggagagagtggagacccggatgccgggttca

SEQ ID NO: 316779 - DNA, 724 bp, Homo sapiens; identical to SEQ ID NO: 215295
  chr12:131572481-131573205
  hypo

SEQ ID NO: 316780 - DNA, 183 bp, Homo sapiens; identical to SEQ ID NO: 215296
  chr12:131573235-131573418
  hypo

SEQ ID NO: 316781 - DNA, 330 bp, Homo sapiens; identical to SEQ ID NO: 265650
  chr12:131581012-131581342
  hypo

SEQ ID NO: 316782 - DNA, 103 bp, Homo sapiens; identical to SEQ ID NO: 215297
  chr12:131623221-131623324
  hypo

SEQ ID NO: 316783 - DNA, 166 bp, Homo sapiens
  chr12:131623397-131623563
  hypo
gcgtggacagatgcatgggggtgaaagcgtgggtgccgggcagatgggtgagcagaggagggagtgagcgctcagcacagcacgcctgcagtgcccttaaggggagtcagcgtggagaaccgtgcggctggagacgccacagtgcgcacatcctcatctcccccag

SEQ ID NO: 316784 - DNA, 127 bp, Homo sapiens; identical to SEQ ID NO: 265653
  chr12:131687733-131687860
  hypo

SEQ ID NO: 316785 - DNA, 140 bp, Homo sapiens; identical to SEQ ID NO: 265654
  chr12:131747238-131747378
  hypo

SEQ ID NO: 316786 - DNA, 177 bp, Homo sapiens; identical to SEQ ID NO: 265655
  chr12:131758656-131758833
  hypo

SEQ ID NO: 316787 - DNA, 155 bp, Homo sapiens
  chr12:131766862-131767017
  hypo
gcgttcctgggtggcgttcctgggtggcgttcctgggtggcgttcctgggtggcgttcctggggtactcgggagggagacggagagccaggcttgcttgcacccaggtggctgggtctgctaagatccctgctggccacgcagtgagctcagtgt

SEQ ID NO: 316788 - DNA, 377 bp, Homo sapiens
  chr12:131767050-131767427
  hypo
gagggtgctgcccgacatcccagcctcccgctgcggaagagagaggtttggtaaagaaggaacaggtctcagagtcccagcctgtgggctctggggaggggattagaaatggcgcttccagagtgcctggaaggagcgaagcagctgccagtgtcattgtcattatctatgttgaggatgacacaacaatgccctcgatgacgttgaaaggctgtttccagactcaggggctccccgcctcgctcagttgaggacctgccctggccgcagcccaccctcagccctcagcagagctggggcctgggcagctctgccgtcttcttccagaggggcgctggaagaagctcccgaggatgaagtctcggccgtcttcatcc

SEQ ID NO: 316789 - DNA, 134 bp, Homo sapiens
  chr12:131834063-131834197
  hypo
gtggccaccagcgtcgcagcagcaaggtgagcctgagcaggagcacactgtccctacctgtctctgtttcttcctgccccttggggtgtgggcaccttgccagctgggaagctgtagtctgtaacagtgatcat

SEQ ID NO: 316790 - DNA, 350 bp, Homo sapiens; identical to SEQ ID NO: 215299
  chr12:131836988-131837338
  hypo

SEQ ID NO: 316791 - DNA, 151 bp, Homo sapiens; identical to SEQ ID NO: 265659
  chr12:131872313-131872464
  hypo

SEQ ID NO: 316792 - DNA, 197 bp, Homo sapiens
  chr12:131943499-131943696
  hypo
tgacaattaggcttcaatggcgttcacgttgacgggtgctggatcgcccggcttggggcgtctcacgtggcttcagccctgccctccctgcggatctggctctggtacccaccgcgctgaaggagggagcgtgggaacacgtgagcctctctgcacagggaggtcccaggactgacaccgacacggaatctcctcac

SEQ ID NO: 316793 - DNA, 78 bp, Homo sapiens
  chr12:131943823-131943901
  hypo
ttcatctttttccgcgccaatgacatctttatgggggaggcattcagttatgcgcccgaggctcagcacctcatgtgc

SEQ ID NO: 316794 - DNA, 60 bp, Homo sapiens
  chr12:131978695-131978755
  hypo
gagccgggaaagcgcgggcatcaggagcacgaggggcctcaggacagcgcgggtgaccct

SEQ ID NO: 316795 - DNA, 46 bp, Homo sapiens; identical to SEQ ID NO: 265662
  chr12:131999408-131999454
  hypo

SEQ ID NO: 316796 - DNA, 109 bp, Homo sapiens; identical to SEQ ID NO: 265663
  chr12:132014576-132014685
  hypo

SEQ ID NO: 316797 - DNA, 271 bp, Homo sapiens
  chr12:132060404-132060675
  hypo
caaagaggaattctaacacacggcttccccgtgccacctgccacctgccctgggctcagcgcacacaggcccccctgttgctgtgaagacgctgatctaagaggacaggggaagaccaaggactccacgctgctgggtcattttaacccctccacacaggcctggtgaccgtccccgtgtctcaacagtcggagcaaaatgcacagaggaaaggggtcaaatccccaaaagatgcagtgagtaagacccactgcagtgagtgagagccagt

SEQ ID NO: 316798 - DNA, 45 bp, Homo sapiens; identical to SEQ ID NO: 265665
  chr12:132069344-132069389
  hypo

SEQ ID NO: 316799 - DNA, 206 bp, Homo sapiens; identical to SEQ ID NO: 265666
  chr12:132069627-132069833
  hypo

SEQ ID NO: 316800 - DNA, 167 bp, Homo sapiens; identical to SEQ ID NO: 215300
  chr12:132076259-132076426
  hypo

SEQ ID NO: 316801 - DNA, 57 bp, Homo sapiens; identical to SEQ ID NO: 265668
  chr12:132097243-132097300
  hypo

SEQ ID NO: 316802 - DNA, 151 bp, Homo sapiens; identical to SEQ ID NO: 265669
  chr12:132101821-132101972
  hypo

SEQ ID NO: 316803 - DNA, 76 bp, Homo sapiens; identical to SEQ ID NO: 265670
  chr12:132158658-132158734
  hypo

SEQ ID NO: 316804 - DNA, 125 bp, Homo sapiens; identical to SEQ ID NO: 215301
  chr12:132169365-132169490
  hypo

SEQ ID NO: 316805 - DNA, 241 bp, Homo sapiens; identical to SEQ ID NO: 265672
  chr12:132177128-132177369
  hypo

SEQ ID NO: 316806 - DNA, 32 bp, Homo sapiens
  chr12:132197245-132197277
  hypo
tctggatctgatggctccgtgctgtgctcaag

SEQ ID NO: 316807 - DNA, 64 bp, Homo sapiens; identical to SEQ ID NO: 215302
  chr12:132205019-132205083
  hypo

SEQ ID NO: 316808 - DNA, 622 bp, Homo sapiens; identical to SEQ ID NO: 215303
  chr12:132218721-132219343
  hypo

SEQ ID NO: 316809 - DNA, 118 bp, Homo sapiens; identical to SEQ ID NO: 215304
  chr12:132221105-132221223
  hypo

SEQ ID NO: 316810 - DNA, 150 bp, Homo sapiens; identical to SEQ ID NO: 215305
  chr12:132222124-132222274
  hypo

SEQ ID NO: 316811 - DNA, 230 bp, Homo sapiens; identical to SEQ ID NO: 265679
  chr12:132241086-132241316
  hypo

SEQ ID NO: 316812 - DNA, 295 bp, Homo sapiens; identical to SEQ ID NO: 215306
  chr12:132241764-132242059
  hypo

SEQ ID NO: 316813 - DNA, 81 bp, Homo sapiens; identical to SEQ ID NO: 265681
  chr12:132242312-132242393
  hypo

SEQ ID NO: 316814 - DNA, 75 bp, Homo sapiens; identical to SEQ ID NO: 215307
  chr12:132243979-132244054
  hypo

SEQ ID NO: 316815 - DNA, 329 bp, Homo sapiens; identical to SEQ ID NO: 265683
  chr12:132247420-132247749
  hypo

SEQ ID NO: 316816 - DNA, 287 bp, Homo sapiens; identical to SEQ ID NO: 265684
  chr12:132249402-132249689
  hypo

SEQ ID NO: 316817 - DNA, 241 bp, Homo sapiens; identical to SEQ ID NO: 265685
  chr12:132250662-132250903
  hypo

SEQ ID NO: 316818 - DNA, 325 bp, Homo sapiens; identical to SEQ ID NO: 215308
  chr12:132259528-132259853
  hypo

SEQ ID NO: 316819 - DNA, 226 bp, Homo sapiens; identical to SEQ ID NO: 215309
  chr12:132259883-132260109
  hypo

SEQ ID NO: 316820 - DNA, 111 bp, Homo sapiens; identical to SEQ ID NO: 215310
  chr12:132263619-132263730
  hypo

SEQ ID NO: 316821 - DNA, 339 bp, Homo sapiens; identical to SEQ ID NO: 265688
  chr12:132270179-132270518
  hypo

SEQ ID NO: 316822 - DNA, 320 bp, Homo sapiens; identical to SEQ ID NO: 265689
  chr12:132270820-132271140
  hypo

SEQ ID NO: 316823 - DNA, 61 bp, Homo sapiens; identical to SEQ ID NO: 215312
  chr12:132284638-132284699
  hypo

SEQ ID NO: 316824 - DNA, 208 bp, Homo sapiens; identical to SEQ ID NO: 215313
  chr12:132285800-132286008
  hypo

SEQ ID NO: 316825 - DNA, 49 bp, Homo sapiens
  chr12:132286229-132286278
  hypo
ccgtggcccgtgtttgccgtggctgttcgtgcttgccatggcttctggg

SEQ ID NO: 316826 - DNA, 112 bp, Homo sapiens; identical to SEQ ID NO: 289522
  chr12:132312446-132312558
  hypo

SEQ ID NO: 316827 - DNA, 165 bp, Homo sapiens
  chr12:132324904-132325069
  hypo
ggctctcatttccctccctccgtcatctatcccagtgaactactggaaccgccgtgagtgcatcggatgactcctggcgtggggaggaaggcggaagatgggggagaccctcataggggcacccccgggctgaggaggggcgttcagggaacctcggcctggggc

SEQ ID NO: 316828 - DNA, 75 bp, Homo sapiens
  chr12:132325390-132325465
  hypo
ccgctcctcgggtgcgtctggggcagccctcagggcagagtcaggagccccagcggcctgtgaggctgaggagca

SEQ ID NO: 316829 - DNA, 111 bp, Homo sapiens; identical to SEQ ID NO: 265693
  chr12:132326247-132326358
  hypo

SEQ ID NO: 316830 - DNA, 247 bp, Homo sapiens; identical to SEQ ID NO: 265694
  chr12:132328364-132328611
  hypo

SEQ ID NO: 316831 - DNA, 93 bp, Homo sapiens; identical to SEQ ID NO: 215314
  chr12:132329467-132329560
  hypo

SEQ ID NO: 316832 - DNA, 139 bp, Homo sapiens
  chr12:132378083-132378222
  hypo
cacattctccaacttttctccgccttgatttcctcatctgtaaaacagggacataacagcaagtgcctcgtggaatcattgaatggatgcactaatcgctggaaagtgcgctgcttggcctaagtgatgagttagctgt

SEQ ID NO: 316833 - DNA, 37 bp, Homo sapiens; identical to SEQ ID NO: 203262
  chr12:132380828-132380865
  hypo

SEQ ID NO: 316834 - DNA, 34 bp, Homo sapiens; identical to SEQ ID NO: 265701
  chr12:132397845-132397879
  hypo

SEQ ID NO: 316835 - DNA, 130 bp, Homo sapiens; identical to SEQ ID NO: 215316
  chr12:132400435-132400565
  hypo

SEQ ID NO: 316836 - DNA, 292 bp, Homo sapiens; identical to SEQ ID NO: 265703
  chr12:132406594-132406886
  hypo

SEQ ID NO: 316837 - DNA, 120 bp, Homo sapiens; identical to SEQ ID NO: 265704
  chr12:132411602-132411722
  hypo

SEQ ID NO: 316838 - DNA, 39 bp, Homo sapiens; identical to SEQ ID NO: 215318
  chr12:132423550-132423589
  hypo

SEQ ID NO: 316839 - DNA, 194 bp, Homo sapiens
  chr12:132423854-132424048
  hypo
ttgtagatggtcttgcagagacacgaggctatgcatgctcctgccttttccaactgtctctgatgcagaagcgtagtcagagttgctttgcagctggttctgaccttcagaaacgggagccactagacaggagtagaaagctgttcatttgcagtgcttgttgctacacgggcgccttgttttaagcaaacaca

SEQ ID NO: 316840 - DNA, 181 bp, Homo sapiens; identical to SEQ ID NO: 265706
  chr12:132474661-132474842
  hypo

SEQ ID NO: 316841 - DNA, 50 bp, Homo sapiens; identical to SEQ ID NO: 224491
  chr12:132480346-132480396
  hypo

SEQ ID NO: 316842 - DNA, 193 bp, Homo sapiens; identical to SEQ ID NO: 265707
  chr12:132504707-132504900
  hypo

SEQ ID NO: 316843 - DNA, 271 bp, Homo sapiens; identical to SEQ ID NO: 215320
  chr12:132514252-132514523
  hypo

SEQ ID NO: 316844 - DNA, 73 bp, Homo sapiens; identical to SEQ ID NO: 215321
  chr12:132529444-132529517
  hypo

SEQ ID NO: 316845 - DNA, 1163 bp, Homo sapiens; identical to SEQ ID NO: 265710
  chr12:132536800-132537963
  hypo

SEQ ID NO: 316846 - DNA, 175 bp, Homo sapiens; identical to SEQ ID NO: 215324
  chr12:132541957-132542132
  hypo

SEQ ID NO: 316847 - DNA, 206 bp, Homo sapiens; identical to SEQ ID NO: 215325
  chr12:132546645-132546851
  hypo

SEQ ID NO: 316848 - DNA, 63 bp, Homo sapiens; identical to SEQ ID NO: 265713
  chr12:132547231-132547294
  hypo

SEQ ID NO: 316849 - DNA, 193 bp, Homo sapiens; identical to SEQ ID NO: 265714
  chr12:132548919-132549112
  hypo

SEQ ID NO: 316850 - DNA, 483 bp, Homo sapiens; identical to SEQ ID NO: 265715
  chr12:132549416-132549899
  hypo

SEQ ID NO: 316851 - DNA, 236 bp, Homo sapiens; identical to SEQ ID NO: 215327
  chr12:132551505-132551741
  hypo

SEQ ID NO: 316852 - DNA, 100 bp, Homo sapiens; identical to SEQ ID NO: 265717
  chr12:132553984-132554084
  hypo

SEQ ID NO: 316853 - DNA, 371 bp, Homo sapiens; identical to SEQ ID NO: 215328
  chr12:132556450-132556821
  hypo

SEQ ID NO: 316854 - DNA, 225 bp, Homo sapiens; identical to SEQ ID NO: 265719
  chr12:132561923-132562148
  hypo

SEQ ID NO: 316855 - DNA, 141 bp, Homo sapiens; identical to SEQ ID NO: 265720
  chr12:132567363-132567504
  hypo

SEQ ID NO: 316856 - DNA, 38 bp, Homo sapiens; identical to SEQ ID NO: 265721
  chr12:132567750-132567788
  hypo

SEQ ID NO: 316857 - DNA, 38 bp, Homo sapiens; identical to SEQ ID NO: 215329
  chr12:132581294-132581332
  hypo

SEQ ID NO: 316858 - DNA, 98 bp, Homo sapiens; identical to SEQ ID NO: 215330
  chr12:132581392-132581490
  hypo

SEQ ID NO: 316859 - DNA, 259 bp, Homo sapiens
  chr12:132592865-132593124
  hypo
ccatggctacctgccggccacagatcgaggtttcaactggacttcaaacaaagcttcagtgcctagggccagatttgttctttccagccctgtgaggcctgaaattgcatcagcgagccaagtgtccccgtgcccctctgttagtggctgaggccgccagctgcatgggatgtgcaggcggtgatcaactttgcaaagcttaaacattattttcccttcttcctcccttccctttgaatattccctctcaggtaaaggt

SEQ ID NO: 316860 - DNA, 84 bp, Homo sapiens; identical to SEQ ID NO: 265725
  chr12:132601574-132601658
  hypo

SEQ ID NO: 316861 - DNA, 301 bp, Homo sapiens; identical to SEQ ID NO: 215331
  chr12:132603385-132603686
  hypo

SEQ ID NO: 316862 - DNA, 79 bp, Homo sapiens
  chr12:132617104-132617183
  hypo
ccttccatgagccccgcaacccccaggccttcctggagtgggcgcctggtgttgcctcccacccctgcccggcgcagcc

SEQ ID NO: 316863 - DNA, 165 bp, Homo sapiens; identical to SEQ ID NO: 265728
  chr12:132622473-132622638
  hypo

SEQ ID NO: 316864 - DNA, 100 bp, Homo sapiens; identical to SEQ ID NO: 215332
  chr12:132630793-132630893
  hypo

SEQ ID NO: 316865 - DNA, 164 bp, Homo sapiens
  chr12:132643291-132643455
  hypo
ctcctcggatctcacgggggctaacgtgtcccccggaaagagatgtccccgtcctggcccccagcatcggcgagtggaccttatttggaaatagggtctttgcagattaaggagccagctgagatcatcctgcattcagggtgggccatcagtccggtggccgg

SEQ ID NO: 316866 - DNA, 320 bp, Homo sapiens; identical to SEQ ID NO: 215334
  chr12:132643525-132643845
  hypo

SEQ ID NO: 316867 - DNA, 91 bp, Homo sapiens
  chr12:132644008-132644099
  hypo
gatactgcaggtggcaggtcccctgaaggcatagtcagaggctttgctctgggctggcatggaggtatgggcgtggcggggtgtggctggg

SEQ ID NO: 316868 - DNA, 43 bp, Homo sapiens; identical to SEQ ID NO: 215336
  chr12:132653184-132653227
  hypo

SEQ ID NO: 316869 - DNA, 252 bp, Homo sapiens; identical to SEQ ID NO: 265733
  chr12:132665276-132665528
  hypo

SEQ ID NO: 316870 - DNA, 438 bp, Homo sapiens
  chr12:132665939-132666377
  hypo
acacagcacacacacgcacagtacacacacccaacacaactcaaaccacacacacactcagtacacacacccaacacaactcacacagcacacacacacacactcggtacacacacccagcacgcacacatagtacacacacccagcacaactcacactcagtacacacacccagcacatgtacccacccagcacacgttcactcgcaccctgcacagcccagcgcgcacacacccagcagacagcacatgctctcacatgctggcatcagccgtcagcctcagctgctggagggtgtggtggaggcgggcggtgagcgctgggtgctggggtccacgtccttccaagcccctgcatagcggccgccttggctggcgatgactggagggggtgaggggtgaggccaccagcacaggtgtgtcccttcactgtttccac

SEQ ID NO: 316871 - DNA, 89 bp, Homo sapiens
  chr12:132666502-132666591
  hypo
tgcaccctccaggcctgggggccccggggctgaccttgaccttcccacccgcccaggtgtggccgggacagcaccgcagttgtggcgcc

SEQ ID NO: 316872 - DNA, 140 bp, Homo sapiens; identical to SEQ ID NO: 265735
  chr12:132675095-132675235
  hypo

SEQ ID NO: 316873 - DNA, 66 bp, Homo sapiens; identical to SEQ ID NO: 265737
  chr12:132682715-132682781
  hypo

SEQ ID NO: 316874 - DNA, 107 bp, Homo sapiens
  chr12:132694697-132694804
  hypo
tccctggggcccgtcgtctgcaggccccgggctggcacatcacagcgagaggagagacaggagaggggccctgctgcgcgtgggcgttgggtcaaaaactccccctg

SEQ ID NO: 316875 - DNA, 89 bp, Homo sapiens; identical to SEQ ID NO: 265740
  chr12:132695506-132695595
  hypo

SEQ ID NO: 316876 - DNA, 480 bp, Homo sapiens; identical to SEQ ID NO: 265741
  chr12:132698402-132698882
  hypo

SEQ ID NO: 316877 - DNA, 214 bp, Homo sapiens
  chr12:132983179-132983393
  hypo
ggggacgccgccctcgacatccccagcacagacgccgccgtcgacgttcccagtgcagacaccgccctcgacgttttcccagccaggacgccgccctcaacattcccagaggggacgccgccctcgacattcccagcaggcgcagctcaggagcaccttgccatctgcagctccctgggggacgagaagaaacagcagccacccctttctcggg

SEQ ID NO: 316878 - DNA, 225 bp, Homo sapiens
  chr12:132983766-132983991
  hypo
ccgtctcccacctccctcctcttacctccccccacctccccagggcacgcactccctggctcctgcgcgatgcccagcagggtccaaaatgcacctggatgcccgggagccgtcgtccgccccacaggcagccccaggagccatcgcccgccccaaaggcccccccgggagccgtcacctgccccacaggcccccccaggagccgtcgtgcgctcagtcgggtcg

SEQ ID NO: 316879 - DNA, 194 bp, Homo sapiens
  chr12:132985471-132985665
  hypo
agtctagcgagtaacggctgaggggcttggagcctgtgtgcctcagtttcctcacctgtgacgtgggccatgatagcacgcccctcacaagtgtcctgggggccaagtgagttcagaacactgctcagagctcacctgctgctgatgacaagtcgtgtcacgggacctgttgttttatgacacactcaacccca

SEQ ID NO: 316880 - DNA, 142 bp, Homo sapiens
  chr12:132985713-132985855
  hypo
caccagccctgggggtggccgggccaggcaggagccccacagaggcccctcagtgagctcagcgcaggcccaagcaccgccggtttctctgccgtccacaccgtccccagacgggccgcacccctgacgcagggagggcttc

SEQ ID NO: 316881 - DNA, 181 bp, Homo sapiens
  chr12:132986270-132986451
  hypo
agaacgcagagagccgcggtgccatctccaccctggctttccaggccctggagggcaaaggtcagtcagatggagggagcccggggtccctggcaggagtgtggccaagtcccagcagcgctgccccgagagaggaggacggcgcagctccattgctccacctgcccggctcagggatgga

SEQ ID NO: 316882 - DNA, 282 bp, Homo sapiens
  chr12:132986701-132986983
  hypo
cgcccacaccccacctccgtggtgacccctgaacccccggagctcaccatccacaccagggtgagaggagaggatgggcaaggaaccgtcaaccagaggggatgctcagctgcgtgcacgtggcgggtggtacatgggggctcggggaggcacccagagaggatgcgtgtgtagtgcagaaaatgaggctttggggcccgcacaccgagcccaggacagcacggaggcgggagacactgccaagcccccctcaccctccttgatggacgccccagagtctca

SEQ ID NO: 316883 - DNA, 193 bp, Homo sapiens; identical to SEQ ID NO: 215341
  chr12:133009778-133009971
  hypo

SEQ ID NO: 316884 - DNA, 398 bp, Homo sapiens; identical to SEQ ID NO: 265747
  chr12:133018848-133019246
  hypo

SEQ ID NO: 316885 - DNA, 41 bp, Homo sapiens; identical to SEQ ID NO: 215342
  chr12:133019660-133019701
  hypo

SEQ ID NO: 316886 - DNA, 504 bp, Homo sapiens; identical to SEQ ID NO: 265749
  chr12:133088531-133089035
  hypo

SEQ ID NO: 316887 - DNA, 144 bp, Homo sapiens; identical to SEQ ID NO: 265750
  chr12:133097814-133097958
  hypo

SEQ ID NO: 316888 - DNA, 221 bp, Homo sapiens; identical to SEQ ID NO: 265751
  chr12:133099878-133100099
  hypo

SEQ ID NO: 316889 - DNA, 477 bp, Homo sapiens; identical to SEQ ID NO: 215344
  chr12:133101020-133101497
  hypo

SEQ ID NO: 316890 - DNA, 554 bp, Homo sapiens
  chr12:133101527-133102081
  hypo
aaaatagtttctactcggggccaccgtgtgagcaaatgtgtgagtgtgtgcaaagcgcccgggccaggccctggcacgcatcggcgcccatgttggctggtgtcaggggtggtggcggtgggcgtggggcgtgggggtggggtgaagggagtatgggtgctcccttcagcaggtgatgaaactgaggcacggggaggccgagcagtggcccaagggcccatggccagggtcaggcaggtcccaccaccacctcgctgcttgctctggcatggagccgaccgaaggaggtgctgtgggcacagccaggggacagtgggtggcactgaggctcgacctggaggtcatagccctgtacagccagatggggtggtgcgaaccagccagggtgtgggtggaggccctgcctgtggtccctagcacccccaggatgccttcaaagtcagcggcttgtggaaggggcggctccaagcacgtggcggttctcgtgtcactgagccggtgggtcctgggtaggtcctccccgtcctggtagagtgtgttatcagtgtgtgcgc

SEQ ID NO: 316891 - DNA, 231 bp, Homo sapiens; identical to SEQ ID NO: 85438
  chr12:133102581-133102812
  hypo

SEQ ID NO: 316892 - DNA, 430 bp, Homo sapiens; identical to SEQ ID NO: 215347
  chr12:133111679-133112109
  hypo

SEQ ID NO: 316893 - DNA, 512 bp, Homo sapiens; identical to SEQ ID NO: 215348
  chr12:133121646-133122158
  hypo

SEQ ID NO: 316894 - DNA, 44 bp, Homo sapiens; identical to SEQ ID NO: 215349
  chr12:133122901-133122945
  hypo

SEQ ID NO: 316895 - DNA, 608 bp, Homo sapiens; identical to SEQ ID NO: 265756
  chr12:133123360-133123968
  hypo

SEQ ID NO: 316896 - DNA, 147 bp, Homo sapiens; identical to SEQ ID NO: 265757
  chr12:133129458-133129605
  hypo

SEQ ID NO: 316897 - DNA, 148 bp, Homo sapiens; identical to SEQ ID NO: 265758
  chr12:133129829-133129977
  hypo

SEQ ID NO: 316898 - DNA, 214 bp, Homo sapiens; identical to SEQ ID NO: 215351
  chr12:133131957-133132171
  hypo

SEQ ID NO: 316899 - DNA, 44 bp, Homo sapiens; identical to SEQ ID NO: 265760
  chr12:133146996-133147040
  hypo

SEQ ID NO: 316900 - DNA, 934 bp, Homo sapiens; identical to SEQ ID NO: 265761
  chr12:133147759-133148693
  hypo

SEQ ID NO: 316901 - DNA, 94 bp, Homo sapiens; identical to SEQ ID NO: 265762
  chr12:133148941-133149035
  hypo

SEQ ID NO: 316902 - DNA, 60 bp, Homo sapiens; identical to SEQ ID NO: 265763
  chr12:133149549-133149609
  hypo

SEQ ID NO: 316903 - DNA, 148 bp, Homo sapiens; identical to SEQ ID NO: 215354
  chr12:133156531-133156679
  hypo

SEQ ID NO: 316904 - DNA, 266 bp, Homo sapiens
  chr12:133167932-133168198
  hypo
ggagagcccgccccgcctctcagggactctcacaaccttggtgcgcagaaggttctggaccgcaattcggggacgccctcactggctttctccggagcgtgggcattggagtggaaatacgtagaattgctggggatcctcgaagccgccggcagcgcccgatgccagcttgtcccatcaggcgttggtcccgacctgcactcagccacctgcccccggttttgtaattgagcattgaggggaagatgcctgaacccatatgaaac

SEQ ID NO: 316905 - DNA, 136 bp, Homo sapiens; identical to SEQ ID NO: 215356
  chr12:133168293-133168429
  hypo

SEQ ID NO: 316906 - DNA, 150 bp, Homo sapiens
  chr12:133168795-133168945
  hypo
aaaaaaagaaaaaaaagaaaaccctggaattccagtccgaccgcacagggctcatcccgtgctcctggcatccactggcttccccacggcggggagcccgcctgctccccttgcagatgcccctactcctcacctgagcccagcacccac

SEQ ID NO: 316907 - DNA, 180 bp, Homo sapiens
  chr12:133172481-133172661
  hypo
gggccactgtggcccgggtgactggacgttttctgtttgtatcttgctccctggctatggcagatgctccacttgccaggtatactcagctccccacaccgcgagcacacgcaggactgtgcgtccagccctcatggctgttctggttacaggcccgttggggagcgtgcgctgccttgg

SEQ ID NO: 316908 - DNA, 216 bp, Homo sapiens
  chr12:133172691-133172907
  hypo
ctccagagcctctcgtgttctctgacacagcagccaggaatgtttccaagggtgacattacaaggatatctccagcagcctggctctcggtgaggaagatagagcagggcgcccgaggggcacacgttggacggcaagggcgtgtggctgtcccaaccctgggagcagggctgctcctcaaggcagcatggcctcacctgcccttgctgacaggcc

SEQ ID NO: 316909 - DNA, 202 bp, Homo sapiens
  chr12:133199799-133200001
  hypo
ccttgactgtggcctcccagcctcgggcatcggcctcaggtcaccccacggcctgcacatgctgtgtggctcacaaatatccagctcatttttggagaaactggctcttctggttgagccgctgcttgggaaccagggccagagcttcccgtttctgacccctccaccactactcaaatgcccgcagctagcctcacagtga

SEQ ID NO: 316910 - DNA, 230 bp, Homo sapiens
  chr12:133200090-133200320
  hypo
cccatcactcctcattcctgagggttctccagattcgcttccaggaatgaagcctagtcagccagcctccctcctcccctgcttgccctaatttgatttgatctccactctggaggcctcagcactcctccatctgagcaggcatcaggtttctccaggcaggcggccccagcagcatccaggggccaaacacgtgcccagtggtacccagtccccgatctgaggcgctc

SEQ ID NO: 316911 - DNA, 209 bp, Homo sapiens; identical to SEQ ID NO: 215359
  chr12:133209151-133209360
  hypo

SEQ ID NO: 316912 - DNA, 151 bp, Homo sapiens; identical to SEQ ID NO: 215360
  chr12:133210035-133210186
  hypo

SEQ ID NO: 316913 - DNA, 59 bp, Homo sapiens; identical to SEQ ID NO: 215361
  chr12:133220203-133220262
  hypo

SEQ ID NO: 316914 - DNA, 153 bp, Homo sapiens; identical to SEQ ID NO: 215362
  chr12:133222188-133222341
  hypo

SEQ ID NO: 316915 - DNA, 44 bp, Homo sapiens; identical to SEQ ID NO: 215363
  chr12:133225533-133225577
  hypo

SEQ ID NO: 316916 - DNA, 566 bp, Homo sapiens; identical to SEQ ID NO: 265774
  chr12:133225891-133226457
  hypo

SEQ ID NO: 316917 - DNA, 63 bp, Homo sapiens; identical to SEQ ID NO: 265775
  chr12:133250822-133250885
  hypo

SEQ ID NO: 316918 - DNA, 64 bp, Homo sapiens
  chr12:133262782-133262846
  hypo
gcaggccagtcctccggtcatgtttaccgtttgctctggccaccaagcagccgcgtcttatcct

SEQ ID NO: 316919 - DNA, 120 bp, Homo sapiens; identical to SEQ ID NO: 265777
  chr12:133262906-133263026
  hypo

SEQ ID NO: 316920 - DNA, 61 bp, Homo sapiens; identical to SEQ ID NO: 215365
  chr12:133277669-133277730
  hypo

SEQ ID NO: 316921 - DNA, 150 bp, Homo sapiens; identical to SEQ ID NO: 215366
  chr12:133280428-133280578
  hypo

SEQ ID NO: 316922 - DNA, 494 bp, Homo sapiens; identical to SEQ ID NO: 289531
  chr12:133286719-133287213
  hypo

SEQ ID NO: 316923 - DNA, 86 bp, Homo sapiens; identical to SEQ ID NO: 215367
  chr12:133308293-133308379
  hypo

SEQ ID NO: 316924 - DNA, 305 bp, Homo sapiens; identical to SEQ ID NO: 215368
  chr12:133312071-133312376
  hypo

SEQ ID NO: 316925 - DNA, 31 bp, Homo sapiens; identical to SEQ ID NO: 215369
  chr12:133348835-133348866
  hypo

SEQ ID NO: 316926 - DNA, 392 bp, Homo sapiens; identical to SEQ ID NO: 215370
  chr12:133351310-133351702
  hypo

SEQ ID NO: 316927 - DNA, 1100 bp, Homo sapiens; identical to SEQ ID NO: 265784
  chr12:133353481-133354581
  hypo

SEQ ID NO: 316928 - DNA, 513 bp, Homo sapiens; identical to SEQ ID NO: 215372
  chr12:133356750-133357263
  hypo

SEQ ID NO: 316929 - DNA, 229 bp, Homo sapiens; identical to SEQ ID NO: 265786
  chr12:133365635-133365864
  hypo

SEQ ID NO: 316930 - DNA, 376 bp, Homo sapiens; identical to SEQ ID NO: 265787
  chr12:133380424-133380800
  hypo

SEQ ID NO: 316931 - DNA, 127 bp, Homo sapiens; identical to SEQ ID NO: 265788
  chr12:133381358-133381485
  hypo

SEQ ID NO: 316932 - DNA, 179 bp, Homo sapiens; identical to SEQ ID NO: 265789
  chr12:133383641-133383820
  hypo

SEQ ID NO: 316933 - DNA, 200 bp, Homo sapiens; identical to SEQ ID NO: 215374
  chr12:133384551-133384751
  hypo

SEQ ID NO: 316934 - DNA, 257 bp, Homo sapiens; identical to SEQ ID NO: 265791
  chr12:133393400-133393657
  hypo

SEQ ID NO: 316935 - DNA, 581 bp, Homo sapiens; identical to SEQ ID NO: 265792
  chr12:133403534-133404115
  hypo

SEQ ID NO: 316936 - DNA, 136 bp, Homo sapiens; identical to SEQ ID NO: 215375
  chr12:133412307-133412443
  hypo

SEQ ID NO: 316937 - DNA, 69 bp, Homo sapiens; identical to SEQ ID NO: 215376
  chr12:133414280-133414349
  hypo

SEQ ID NO: 316938 - DNA, 108 bp, Homo sapiens; identical to SEQ ID NO: 265795
  chr12:133417245-133417353
  hypo

SEQ ID NO: 316939 - DNA, 41 bp, Homo sapiens; identical to SEQ ID NO: 265796
  chr12:133421487-133421528
  hypo

SEQ ID NO: 316940 - DNA, 222 bp, Homo sapiens; identical to SEQ ID NO: 265797
  chr12:133424359-133424581
  hypo

SEQ ID NO: 316941 - DNA, 387 bp, Homo sapiens; identical to SEQ ID NO: 215378
  chr12:133435576-133435963
  hypo

SEQ ID NO: 316942 - DNA, 98 bp, Homo sapiens; identical to SEQ ID NO: 265800
  chr12:133441852-133441950
  hypo

SEQ ID NO: 316943 - DNA, 442 bp, Homo sapiens; identical to SEQ ID NO: 226553
  chr12:133443618-133444060
  hypo

SEQ ID NO: 316944 - DNA, 74 bp, Homo sapiens; identical to SEQ ID NO: 215380
  chr12:133448788-133448862
  hypo

SEQ ID NO: 316945 - DNA, 125 bp, Homo sapiens; identical to SEQ ID NO: 215381
  chr12:133449100-133449225
  hypo

SEQ ID NO: 316946 - DNA, 172 bp, Homo sapiens; identical to SEQ ID NO: 265804
  chr12:133450372-133450544
  hypo

SEQ ID NO: 316947 - DNA, 237 bp, Homo sapiens; identical to SEQ ID NO: 203265
  chr12:133464166-133464403
  hypo

SEQ ID NO: 316948 - DNA, 218 bp, Homo sapiens; identical to SEQ ID NO: 203266
  chr12:133464555-133464773
  hypo

SEQ ID NO: 316949 - DNA, 241 bp, Homo sapiens; identical to SEQ ID NO: 203267
  chr12:133706775-133707016
  hypo

SEQ ID NO: 316950 - DNA, 136 bp, Homo sapiens; identical to SEQ ID NO: 265805
  chr12:133716926-133717062
  hypo

SEQ ID NO: 316951 - DNA, 35 bp, Homo sapiens; identical to SEQ ID NO: 265806
  chr12:133721475-133721510
  hypo

SEQ ID NO: 316952 - DNA, 102 bp, Homo sapiens; identical to SEQ ID NO: 265807
  chr13:19239973-19240075
  hypo

SEQ ID NO: 316953 - DNA, 179 bp, Homo sapiens; identical to SEQ ID NO: 265808
  chr13:19664765-19664944
  hypo

SEQ ID NO: 316954 - DNA, 200 bp, Homo sapiens; identical to SEQ ID NO: 265809
  chr13:19692226-19692426
  hypo

SEQ ID NO: 316955 - DNA, 77 bp, Homo sapiens; identical to SEQ ID NO: 265810
  chr13:20235856-20235933
  hypo

SEQ ID NO: 316956 - DNA, 120 bp, Homo sapiens; identical to SEQ ID NO: 265811
  chr13:20265680-20265800
  hypo

SEQ ID NO: 316957 - DNA, 38 bp, Homo sapiens; identical to SEQ ID NO: 215385
  chr13:20392320-20392358
  hypo

SEQ ID NO: 316958 - DNA, 282 bp, Homo sapiens; identical to SEQ ID NO: 215386
  chr13:20392445-20392727
  hypo

SEQ ID NO: 316959 - DNA, 38 bp, Homo sapiens; identical to SEQ ID NO: 265813
  chr13:20496685-20496723
  hypo

SEQ ID NO: 316960 - DNA, 85 bp, Homo sapiens; identical to SEQ ID NO: 215387
  chr13:20521929-20522014
  hypo

SEQ ID NO: 316961 - DNA, 165 bp, Homo sapiens; identical to SEQ ID NO: 289545
  chr13:20735267-20735432
  hypo

SEQ ID NO: 316962 - DNA, 87 bp, Homo sapiens; identical to SEQ ID NO: 265815
  chr13:20748824-20748911
  hypo

SEQ ID NO: 316963 - DNA, 1420 bp, Homo sapiens; identical to SEQ ID NO: 289546
  chr13:20766341-20767761
  hypo

SEQ ID NO: 316964 - DNA, 104 bp, Homo sapiens; identical to SEQ ID NO: 265816
  chr13:20969540-20969644
  hypo

SEQ ID NO: 316965 - DNA, 321 bp, Homo sapiens; identical to SEQ ID NO: 265817
  chr13:20975930-20976251
  hypo

SEQ ID NO: 316966 - DNA, 534 bp, Homo sapiens; identical to SEQ ID NO: 265818
  chr13:20979785-20980319
  hypo

SEQ ID NO: 316967 - DNA, 72 bp, Homo sapiens; identical to SEQ ID NO: 265819
  chr13:21005162-21005234
  hypo

SEQ ID NO: 316968 - DNA, 313 bp, Homo sapiens; identical to SEQ ID NO: 265820
  chr13:21047373-21047686
  hypo

SEQ ID NO: 316969 - DNA, 65 bp, Homo sapiens; identical to SEQ ID NO: 215391
  chr13:21057583-21057648
  hypo

SEQ ID NO: 316970 - DNA, 721 bp, Homo sapiens; identical to SEQ ID NO: 289549
  chr13:21099487-21100208
  hypo

SEQ ID NO: 316971 - DNA, 111 bp, Homo sapiens; identical to SEQ ID NO: 289551
  chr13:21141668-21141779
  hypo

SEQ ID NO: 316972 - DNA, 116 bp, Homo sapiens; identical to SEQ ID NO: 265823
  chr13:21304077-21304193
  hypo

SEQ ID NO: 316973 - DNA, 172 bp, Homo sapiens; identical to SEQ ID NO: 265824
  chr13:21407278-21407450
  hypo

SEQ ID NO: 316974 - DNA, 222 bp, Homo sapiens; identical to SEQ ID NO: 265825
  chr13:21562961-21563183
  hypo

SEQ ID NO: 316975 - DNA, 318 bp, Homo sapiens; identical to SEQ ID NO: 215393
  chr13:21572946-21573264
  hypo

SEQ ID NO: 316976 - DNA, 250 bp, Homo sapiens; identical to SEQ ID NO: 265827
  chr13:21597248-21597498
  hypo

SEQ ID NO: 316977 - DNA, 120 bp, Homo sapiens; identical to SEQ ID NO: 265828
  chr13:21633733-21633853
  hypo

SEQ ID NO: 316978 - DNA, 791 bp, Homo sapiens; identical to SEQ ID NO: 289554
  chr13:21634965-21635756
  hypo

SEQ ID NO: 316979 - DNA, 228 bp, Homo sapiens; identical to SEQ ID NO: 9203
  chr13:21635777-21636005
  hypo

SEQ ID NO: 316980 - DNA, 49 bp, Homo sapiens; identical to SEQ ID NO: 265829
  chr13:21677730-21677779
  hypo

SEQ ID NO: 316981 - DNA, 112 bp, Homo sapiens; identical to SEQ ID NO: 265830
  chr13:21678550-21678662
  hypo

SEQ ID NO: 316982 - DNA, 67 bp, Homo sapiens
  chr13:21713746-21713813
  hypo
atttttgccaatctagtgagtgtggtttaaaaaccaatcaattgaaactaatcgtggttttaatgca

SEQ ID NO: 316983 - DNA, 46 bp, Homo sapiens; identical to SEQ ID NO: 215397
  chr13:21809435-21809481
  hypo

SEQ ID NO: 316984 - DNA, 31 bp, Homo sapiens; identical to SEQ ID NO: 265833
  chr13:21863996-21864027
  hypo

SEQ ID NO: 316985 - DNA, 69 bp, Homo sapiens; identical to SEQ ID NO: 265834
  chr13:21894157-21894226
  hypo

SEQ ID NO: 316986 - DNA, 147 bp, Homo sapiens; identical to SEQ ID NO: 265835
  chr13:22021309-22021456
  hypo

SEQ ID NO: 316987 - DNA, 135 bp, Homo sapiens; identical to SEQ ID NO: 265838
  chr13:22058108-22058243
  hypo

SEQ ID NO: 316988 - DNA, 36 bp, Homo sapiens; identical to SEQ ID NO: 215398
  chr13:22091944-22091980
  hypo

SEQ ID NO: 316989 - DNA, 160 bp, Homo sapiens; identical to SEQ ID NO: 215399
  chr13:22214672-22214832
  hypo

SEQ ID NO: 316990 - DNA, 34 bp, Homo sapiens; identical to SEQ ID NO: 265841
  chr13:22239916-22239950
  hypo

SEQ ID NO: 316991 - DNA, 150 bp, Homo sapiens; identical to SEQ ID NO: 203280
  chr13:22243864-22244014
  hypo

SEQ ID NO: 316992 - DNA, 556 bp, Homo sapiens; identical to SEQ ID NO: 203281
  chr13:22244074-22244630
  hypo

SEQ ID NO: 316993 - DNA, 400 bp, Homo sapiens; identical to SEQ ID NO: 289563
  chr13:22244999-22245399
  hypo

SEQ ID NO: 316994 - DNA, 96 bp, Homo sapiens; identical to SEQ ID NO: 203283
  chr13:22247845-22247941
  hypo

SEQ ID NO: 316995 - DNA, 34 bp, Homo sapiens; identical to SEQ ID NO: 265842
  chr13:22338337-22338371
  hypo

SEQ ID NO: 316996 - DNA, 45 bp, Homo sapiens; identical to SEQ ID NO: 215404
  chr13:22350434-22350479
  hypo

SEQ ID NO: 316997 - DNA, 31 bp, Homo sapiens; identical to SEQ ID NO: 215405
  chr13:22392838-22392869
  hypo

SEQ ID NO: 316998 - DNA, 31 bp, Homo sapiens; identical to SEQ ID NO: 215406
  chr13:22392989-22393020
  hypo

SEQ ID NO: 316999 - DNA, 187 bp, Homo sapiens; identical to SEQ ID NO: 265846
  chr13:22417569-22417756
  hypo

SEQ ID NO: 317000 - DNA, 44 bp, Homo sapiens; identical to SEQ ID NO: 265847
  chr13:22467018-22467062
  hypo

SEQ ID NO: 317001 - DNA, 45 bp, Homo sapiens; identical to SEQ ID NO: 265848
  chr13:22496749-22496794
  hypo

SEQ ID NO: 317002 - DNA, 157 bp, Homo sapiens; identical to SEQ ID NO: 265849
  chr13:22511719-22511876
  hypo

SEQ ID NO: 317003 - DNA, 180 bp, Homo sapiens; identical to SEQ ID NO: 215407
  chr13:22539244-22539424
  hypo

SEQ ID NO: 317004 - DNA, 199 bp, Homo sapiens; identical to SEQ ID NO: 265851
  chr13:22785989-22786188
  hypo

SEQ ID NO: 317005 - DNA, 91 bp, Homo sapiens; identical to SEQ ID NO: 265852
  chr13:22786757-22786848
  hypo

SEQ ID NO: 317006 - DNA, 369 bp, Homo sapiens; identical to SEQ ID NO: 265853
  chr13:23508831-23509200
  hypo

SEQ ID NO: 317007 - DNA, 140 bp, Homo sapiens; identical to SEQ ID NO: 265854
  chr13:23629553-23629693
  hypo

SEQ ID NO: 317008 - DNA, 32 bp, Homo sapiens; identical to SEQ ID NO: 265855
  chr13:23654298-23654330
  hypo

SEQ ID NO: 317009 - DNA, 201 bp, Homo sapiens; identical to SEQ ID NO: 215409
  chr13:23897356-23897557
  hypo

SEQ ID NO: 317010 - DNA, 155 bp, Homo sapiens; identical to SEQ ID NO: 265858
  chr13:23910726-23910881
  hypo

SEQ ID NO: 317011 - DNA, 83 bp, Homo sapiens
  chr13:24289678-24289761
  hypo
gttacactgccagaggctacactgcccgagccaggaggcgggttatgtccgctattgtggactgctggcggcagggtgatggg

SEQ ID NO: 317012 - DNA, 252 bp, Homo sapiens; identical to SEQ ID NO: 265860
  chr13:24408049-24408301
  hypo

SEQ ID NO: 317013 - DNA, 35 bp, Homo sapiens; identical to SEQ ID NO: 265861
  chr13:24527676-24527711
  hypo

SEQ ID NO: 317014 - DNA, 184 bp, Homo sapiens
  chr13:24658298-24658482
  hypo
aacttagcaacaagcgagacgagagaagaaagcagctgaacaatttaaatgcgttggggagatgtgggtggaaagaggggaaaagggccccaggtgcagtcgaaggaggcattcgctggtggggaaaagggtctctgtgcttgcagttctgcttcttttgagaaaggaaggaggagctgagccc

SEQ ID NO: 317015 - DNA, 358 bp, Homo sapiens; identical to SEQ ID NO: 215411
  chr13:24718516-24718874
  hypo

SEQ ID NO: 317016 - DNA, 38 bp, Homo sapiens; identical to SEQ ID NO: 265864
  chr13:24720491-24720529
  hypo

SEQ ID NO: 317017 - DNA, 45 bp, Homo sapiens; identical to SEQ ID NO: 265865
  chr13:24720559-24720604
  hypo

SEQ ID NO: 317018 - DNA, 1102 bp, Homo sapiens; identical to SEQ ID NO: 289573
  chr13:24734667-24735769
  hypo

SEQ ID NO: 317019 - DNA, 43 bp, Homo sapiens; identical to SEQ ID NO: 265866
  chr13:24781502-24781545
  hypo

SEQ ID NO: 317020 - DNA, 89 bp, Homo sapiens; identical to SEQ ID NO: 215413
  chr13:24797623-24797712
  hypo

SEQ ID NO: 317021 - DNA, 48 bp, Homo sapiens; identical to SEQ ID NO: 265868
  chr13:24815548-24815596
  hypo

SEQ ID NO: 317022 - DNA, 51 bp, Homo sapiens; identical to SEQ ID NO: 265869
  chr13:24819243-24819294
  hypo

SEQ ID NO: 317023 - DNA, 109 bp, Homo sapiens; identical to SEQ ID NO: 265870
  chr13:24868948-24869057
  hypo

SEQ ID NO: 317024 - DNA, 70 bp, Homo sapiens; identical to SEQ ID NO: 215414
  chr13:25026104-25026174
  hypo

SEQ ID NO: 317025 - DNA, 231 bp, Homo sapiens; identical to SEQ ID NO: 215415
  chr13:25026475-25026706
  hypo

SEQ ID NO: 317026 - DNA, 37 bp, Homo sapiens; identical to SEQ ID NO: 265873
  chr13:25084393-25084430
  hypo

SEQ ID NO: 317027 - DNA, 33 bp, Homo sapiens; identical to SEQ ID NO: 265874
  chr13:25463715-25463748
  hypo

SEQ ID NO: 317028 - DNA, 48 bp, Homo sapiens; identical to SEQ ID NO: 265875
  chr13:25469373-25469421
  hypo

SEQ ID NO: 317029 - DNA, 41 bp, Homo sapiens; identical to SEQ ID NO: 215416
  chr13:25642761-25642802
  hypo

SEQ ID NO: 317030 - DNA, 81 bp, Homo sapiens; identical to SEQ ID NO: 203288
  chr13:25746000-25746081
  hypo

SEQ ID NO: 317031 - DNA, 164 bp, Homo sapiens; identical to SEQ ID NO: 215418
  chr13:25932257-25932421
  hypo

SEQ ID NO: 317032 - DNA, 292 bp, Homo sapiens; identical to SEQ ID NO: 265880
  chr13:25939930-25940222
  hypo

SEQ ID NO: 317033 - DNA, 93 bp, Homo sapiens; identical to SEQ ID NO: 203290
  chr13:25946858-25946951
  hypo

SEQ ID NO: 317034 - DNA, 59 bp, Homo sapiens
  chr13:26354975-26355034
  hypo
gcccgctagccctccgctcacctcctgctatgtggtcgggtttgcaacagccaccgacc

SEQ ID NO: 317035 - DNA, 58 bp, Homo sapiens; identical to SEQ ID NO: 265882
  chr13:26548842-26548900
  hypo

SEQ ID NO: 317036 - DNA, 239 bp, Homo sapiens; identical to SEQ ID NO: 203293
  chr13:27334980-27335219
  hypo

SEQ ID NO: 317037 - DNA, 37 bp, Homo sapiens; identical to SEQ ID NO: 215421
  chr13:27556411-27556448
  hypo

SEQ ID NO: 317038 - DNA, 178 bp, Homo sapiens
  chr13:27610258-27610436
  hypo
gacacaggaggctgtgtcagcgccatcccagctctgcaagtacatccaaattccaggttcccgcctcacctctctggtctacctaagagttcacagcgcagttgcagtgctctgggttcctgcctgcttcatggtaccagcccatgcccttctgtgatccacacgcgtccgggacctc

SEQ ID NO: 317039 - DNA, 178 bp, Homo sapiens; identical to SEQ ID NO: 215422
  chr13:27620503-27620681
  hypo

SEQ ID NO: 317040 - DNA, 399 bp, Homo sapiens; identical to SEQ ID NO: 215423
  chr13:27690601-27691000
  hypo

SEQ ID NO: 317041 - DNA, 98 bp, Homo sapiens; identical to SEQ ID NO: 215424
  chr13:27691060-27691158
  hypo

SEQ ID NO: 317042 - DNA, 275 bp, Homo sapiens; identical to SEQ ID NO: 203294
  chr13:27744759-27745034
  hypo

SEQ ID NO: 317043 - DNA, 111 bp, Homo sapiens; identical to SEQ ID NO: 265888
  chr13:27786256-27786367
  hypo

SEQ ID NO: 317044 - DNA, 39 bp, Homo sapiens; identical to SEQ ID NO: 265889
  chr13:27786397-27786436
  hypo

SEQ ID NO: 317045 - DNA, 31 bp, Homo sapiens; identical to SEQ ID NO: 215426
  chr13:27914840-27914871
  hypo

SEQ ID NO: 317046 - DNA, 91 bp, Homo sapiens; identical to SEQ ID NO: 215427
  chr13:27915171-27915262
  hypo

SEQ ID NO: 317047 - DNA, 85 bp, Homo sapiens; identical to SEQ ID NO: 265892
  chr13:27934850-27934935
  hypo

SEQ ID NO: 317048 - DNA, 49 bp, Homo sapiens; identical to SEQ ID NO: 265893
  chr13:28124055-28124104
  hypo

SEQ ID NO: 317049 - DNA, 57 bp, Homo sapiens; identical to SEQ ID NO: 215428
  chr13:28152523-28152580
  hypo

SEQ ID NO: 317050 - DNA, 226 bp, Homo sapiens; identical to SEQ ID NO: 203301
  chr13:28493981-28494207
  hypo

SEQ ID NO: 317051 - DNA, 243 bp, Homo sapiens; identical to SEQ ID NO: 215430
  chr13:28575159-28575402
  hypo

SEQ ID NO: 317052 - DNA, 34 bp, Homo sapiens; identical to SEQ ID NO: 203311
  chr13:28592658-28592692
  hypo

SEQ ID NO: 317053 - DNA, 210 bp, Homo sapiens; identical to SEQ ID NO: 203312
  chr13:28608023-28608233
  hypo

SEQ ID NO: 317054 - DNA, 167 bp, Homo sapiens; identical to SEQ ID NO: 203313
  chr13:28608355-28608522
  hypo

SEQ ID NO: 317055 - DNA, 106 bp, Homo sapiens; identical to SEQ ID NO: 203314
  chr13:28636040-28636146
  hypo

SEQ ID NO: 317056 - DNA, 38 bp, Homo sapiens; identical to SEQ ID NO: 265897
  chr13:28662983-28663021
  hypo

SEQ ID NO: 317057 - DNA, 138 bp, Homo sapiens; identical to SEQ ID NO: 215435
  chr13:28745530-28745668
  hypo

SEQ ID NO: 317058 - DNA, 377 bp, Homo sapiens; identical to SEQ ID NO: 265899
  chr13:28745728-28746105
  hypo

SEQ ID NO: 317059 - DNA, 56 bp, Homo sapiens; identical to SEQ ID NO: 265900
  chr13:28838072-28838128
  hypo

SEQ ID NO: 317060 - DNA, 220 bp, Homo sapiens; identical to SEQ ID NO: 203317
  chr13:29292471-29292691
  hypo

SEQ ID NO: 317061 - DNA, 256 bp, Homo sapiens; identical to SEQ ID NO: 203318
  chr13:29293342-29293598
  hypo

SEQ ID NO: 317062 - DNA, 86 bp, Homo sapiens; identical to SEQ ID NO: 265901
  chr13:29298157-29298243
  hypo

SEQ ID NO: 317063 - DNA, 167 bp, Homo sapiens; identical to SEQ ID NO: 215439
  chr13:29913841-29914008
  hypo

SEQ ID NO: 317064 - DNA, 204 bp, Homo sapiens; identical to SEQ ID NO: 215440
  chr13:29920653-29920857
  hypo

SEQ ID NO: 317065 - DNA, 95 bp, Homo sapiens; identical to SEQ ID NO: 265905
  chr13:30079033-30079128
  hypo

SEQ ID NO: 317066 - DNA, 226 bp, Homo sapiens; identical to SEQ ID NO: 265906
  chr13:30079644-30079870
  hypo

SEQ ID NO: 317067 - DNA, 242 bp, Homo sapiens; identical to SEQ ID NO: 265907
  chr13:30082638-30082880
  hypo

SEQ ID NO: 317068 - DNA, 149 bp, Homo sapiens; identical to SEQ ID NO: 215442
  chr13:30087251-30087400
  hypo

SEQ ID NO: 317069 - DNA, 54 bp, Homo sapiens; identical to SEQ ID NO: 265909
  chr13:30088601-30088655
  hypo

SEQ ID NO: 317070 - DNA, 45 bp, Homo sapiens; identical to SEQ ID NO: 215443
  chr13:30101132-30101177
  hypo

SEQ ID NO: 317071 - DNA, 32 bp, Homo sapiens; identical to SEQ ID NO: 215444
  chr13:30106967-30106999
  hypo

SEQ ID NO: 317072 - DNA, 303 bp, Homo sapiens; identical to SEQ ID NO: 215445
  chr13:30107122-30107425
  hypo

SEQ ID NO: 317073 - DNA, 114 bp, Homo sapiens; identical to SEQ ID NO: 215446
  chr13:30123381-30123495
  hypo

SEQ ID NO: 317074 - DNA, 38 bp, Homo sapiens; identical to SEQ ID NO: 215447
  chr13:30128333-30128371
  hypo

SEQ ID NO: 317075 - DNA, 118 bp, Homo sapiens
  chr13:30141718-30141836
  hypo
gccaaggcacacctgacaggtaagctcctgccacactcctgggtgtttacaagctgctgggtacaactccctgcaggcgggcatccctcccacggatgcaacccggacagtgcggcag

SEQ ID NO: 317076 - DNA, 350 bp, Homo sapiens; identical to SEQ ID NO: 265915
  chr13:30146275-30146625
  hypo

SEQ ID NO: 317077 - DNA, 200 bp, Homo sapiens; identical to SEQ ID NO: 265917
  chr13:30163603-30163803
  hypo

SEQ ID NO: 317078 - DNA, 36 bp, Homo sapiens; identical to SEQ ID NO: 265918
  chr13:30314401-30314437
  hypo

SEQ ID NO: 317079 - DNA, 31 bp, Homo sapiens; identical to SEQ ID NO: 265919
  chr13:30355023-30355054
  hypo

SEQ ID NO: 317080 - DNA, 313 bp, Homo sapiens
  chr13:30707770-30708083
  hypo
gcgtgtttctttgagagccctcccctggaagctccctttcactccaccctgttgataaggcccaggacaaaaagcaagcaaccgctggaaacacacctgctggaaacacgcctccagtgccagcccaggaggtggtggccctgtcctgacgccccgtctagccaccgggccagagctgggagccccatagtggagtctgtgtccggcaggtgtctctggacagctgaggttcttgtaaccaaagaggttcgtttacctccttagatcacccagggacaagtgatgtgttttgtggcctcggatcgttccgtgc

SEQ ID NO: 317081 - DNA, 81 bp, Homo sapiens; identical to SEQ ID NO: 215448
  chr13:30910053-30910134
  hypo

SEQ ID NO: 317082 - DNA, 390 bp, Homo sapiens; identical to SEQ ID NO: 203319
  chr13:30982478-30982868
  hypo

SEQ ID NO: 317083 - DNA, 142 bp, Homo sapiens; identical to SEQ ID NO: 265923
  chr13:30992817-30992959
  hypo

SEQ ID NO: 317084 - DNA, 262 bp, Homo sapiens; identical to SEQ ID NO: 265924
  chr13:31002076-31002338
  hypo

SEQ ID NO: 317085 - DNA, 33 bp, Homo sapiens; identical to SEQ ID NO: 265925
  chr13:31002685-31002718
  hypo

SEQ ID NO: 317086 - DNA, 49 bp, Homo sapiens; identical to SEQ ID NO: 265926
  chr13:31061045-31061094
  hypo

SEQ ID NO: 317087 - DNA, 43 bp, Homo sapiens; identical to SEQ ID NO: 215450
  chr13:31185329-31185372
  hypo

SEQ ID NO: 317088 - DNA, 206 bp, Homo sapiens; identical to SEQ ID NO: 215451
  chr13:31208407-31208613
  hypo

SEQ ID NO: 317089 - DNA, 35 bp, Homo sapiens; identical to SEQ ID NO: 265929
  chr13:31259579-31259614
  hypo

SEQ ID NO: 317090 - DNA, 52 bp, Homo sapiens; identical to SEQ ID NO: 265930
  chr13:31259644-31259696
  hypo

SEQ ID NO: 317091 - DNA, 341 bp, Homo sapiens; identical to SEQ ID NO: 265931
  chr13:31305985-31306326
  hypo

SEQ ID NO: 317092 - DNA, 55 bp, Homo sapiens; identical to SEQ ID NO: 215453
  chr13:31579360-31579415
  hypo

SEQ ID NO: 317093 - DNA, 172 bp, Homo sapiens; identical to SEQ ID NO: 265935
  chr13:32526648-32526820
  hypo

SEQ ID NO: 317094 - DNA, 259 bp, Homo sapiens; identical to SEQ ID NO: 265936
  chr13:32885416-32885675
  hypo

SEQ ID NO: 317095 - DNA, 303 bp, Homo sapiens; identical to SEQ ID NO: 289629
  chr13:32889501-32889804
  hypo

SEQ ID NO: 317096 - DNA, 106 bp, Homo sapiens; identical to SEQ ID NO: 224534
  chr13:32890558-32890664
  hypo

SEQ ID NO: 317097 - DNA, 249 bp, Homo sapiens; identical to SEQ ID NO: 224535
  chr13:32893213-32893462
  hypo

SEQ ID NO: 317098 - DNA, 109 bp, Homo sapiens; identical to SEQ ID NO: 224536
  chr13:32899212-32899321
  hypo

SEQ ID NO: 317099 - DNA, 182 bp, Homo sapiens; identical to SEQ ID NO: 224537
  chr13:32900237-32900419
  hypo

SEQ ID NO: 317100 - DNA, 115 bp, Homo sapiens; identical to SEQ ID NO: 224538
  chr13:32900635-32900750
  hypo

SEQ ID NO: 317101 - DNA, 50 bp, Homo sapiens; identical to SEQ ID NO: 224539
  chr13:32903579-32903629
  hypo

SEQ ID NO: 317102 - DNA, 159 bp, Homo sapiens; identical to SEQ ID NO: 289636
  chr13:32905055-32905214
  hypo

SEQ ID NO: 317103 - DNA, 1116 bp, Homo sapiens; identical to SEQ ID NO: 224541
  chr13:32906408-32907524
  hypo

SEQ ID NO: 317104 - DNA, 4932 bp, Homo sapiens; identical to SEQ ID NO: 224542
  chr13:32910401-32915333
  hypo

SEQ ID NO: 317105 - DNA, 96 bp, Homo sapiens; identical to SEQ ID NO: 224543
  chr13:32918694-32918790
  hypo

SEQ ID NO: 317106 - DNA, 70 bp, Homo sapiens; identical to SEQ ID NO: 224544
  chr13:32920963-32921033
  hypo

SEQ ID NO: 317107 - DNA, 428 bp, Homo sapiens; identical to SEQ ID NO: 224545
  chr13:32928997-32929425
  hypo

SEQ ID NO: 317108 - DNA, 182 bp, Homo sapiens; identical to SEQ ID NO: 224546
  chr13:32930564-32930746
  hypo

SEQ ID NO: 317109 - DNA, 188 bp, Homo sapiens; identical to SEQ ID NO: 224547
  chr13:32931878-32932066
  hypo

SEQ ID NO: 317110 - DNA, 171 bp, Homo sapiens; identical to SEQ ID NO: 224548
  chr13:32936659-32936830
  hypo

SEQ ID NO: 317111 - DNA, 355 bp, Homo sapiens; identical to SEQ ID NO: 224549
  chr13:32937315-32937670
  hypo

SEQ ID NO: 317112 - DNA, 156 bp, Homo sapiens; identical to SEQ ID NO: 224550
  chr13:32944538-32944694
  hypo

SEQ ID NO: 317113 - DNA, 145 bp, Homo sapiens; identical to SEQ ID NO: 224551
  chr13:32945092-32945237
  hypo

SEQ ID NO: 317114 - DNA, 122 bp, Homo sapiens; identical to SEQ ID NO: 224552
  chr13:32950806-32950928
  hypo

SEQ ID NO: 317115 - DNA, 199 bp, Homo sapiens; identical to SEQ ID NO: 224553
  chr13:32953453-32953652
  hypo

SEQ ID NO: 317116 - DNA, 396 bp, Homo sapiens; identical to SEQ ID NO: 224554
  chr13:32953886-32954282
  hypo

SEQ ID NO: 317117 - DNA, 245 bp, Homo sapiens; identical to SEQ ID NO: 224555
  chr13:32968825-32969070
  hypo

SEQ ID NO: 317118 - DNA, 147 bp, Homo sapiens; identical to SEQ ID NO: 224556
  chr13:32971034-32971181
  hypo

SEQ ID NO: 317119 - DNA, 876 bp, Homo sapiens; identical to SEQ ID NO: 224557
  chr13:32972298-32973174
  hypo

SEQ ID NO: 317120 - DNA, 515 bp, Homo sapiens; identical to SEQ ID NO: 224558
  chr13:32973294-32973809
  hypo

SEQ ID NO: 317121 - DNA, 157 bp, Homo sapiens; identical to SEQ ID NO: 215455
  chr13:32983222-32983379
  hypo

SEQ ID NO: 317122 - DNA, 191 bp, Homo sapiens; identical to SEQ ID NO: 289655
  chr13:33000877-33001068
  hypo

SEQ ID NO: 317123 - DNA, 201 bp, Homo sapiens; identical to SEQ ID NO: 289656
  chr13:33001228-33001429
  hypo

SEQ ID NO: 317124 - DNA, 35 bp, Homo sapiens; identical to SEQ ID NO: 215456
  chr13:33103876-33103911
  hypo

SEQ ID NO: 317125 - DNA, 122 bp, Homo sapiens; identical to SEQ ID NO: 265939
  chr13:33266483-33266605
  hypo

SEQ ID NO: 317126 - DNA, 56 bp, Homo sapiens; identical to SEQ ID NO: 265940
  chr13:33510409-33510465
  hypo

SEQ ID NO: 317127 - DNA, 135 bp, Homo sapiens; identical to SEQ ID NO: 289658
  chr13:33589987-33590122
  hypo

SEQ ID NO: 317128 - DNA, 259 bp, Homo sapiens; identical to SEQ ID NO: 289659
  chr13:33590208-33590467
  hypo

SEQ ID NO: 317129 - DNA, 87 bp, Homo sapiens; identical to SEQ ID NO: 265941
  chr13:33640654-33640741
  hypo

SEQ ID NO: 317130 - DNA, 52 bp, Homo sapiens; identical to SEQ ID NO: 265942
  chr13:33687132-33687184
  hypo

SEQ ID NO: 317131 - DNA, 36 bp, Homo sapiens; identical to SEQ ID NO: 265943
  chr13:36673374-36673410
  hypo

SEQ ID NO: 317132 - DNA, 268 bp, Homo sapiens
  chr13:36788448-36788716
  hypo
gagagtggactcgcgtcctggaaggggcccttcctgctattcgctccccacagttccccgacaatgagagctccccaggccgggctttgagggccgaggggaccaccgacctagggcccgcccgcgaggttataaacgcagctgcctccccttccacagcctcttacctggcccgagatctggcagtgctcctggcagataattgaggaagccatggccgctgcgcacgtgctgggtcctggggcagcctcccagcaggaggagctcc

SEQ ID NO: 317133 - DNA, 294 bp, Homo sapiens
  chr13:36788746-36789040
  hypo
cactaatggctcctggccgcagctgagggcgagcacgccccaggcgcccttaaagtggccctgtcgccagttctggcgcgtgggggagcagcaggccgctctgaggggtcaacgcggaacccgggtcgggggcctgcccgcgggggctactcaagctgtcctgggggcccttaggagaccgcgtcactagctgactgcgcactccaagtccccttcccagggcagctctcacgacactaagccccgcgtactcactcccactgcgccgcctggggaggcgggaggcaaggcgtc

SEQ ID NO: 317134 - DNA, 77 bp, Homo sapiens; identical to SEQ ID NO: 265945
  chr13:36789490-36789567
  hypo

SEQ ID NO: 317135 - DNA, 171 bp, Homo sapiens
  chr13:36909035-36909206
  hypo
aaaaacaaagtagaatttgtcgttatctttttgcacttatactggacacataaacattaacaaataaaaatgatgtagtctacacgtatttcaaattatgctttcatttttctttcgcttacctgaagaaacccgggaggacggtttagaaccgtatcgagagaattatcc

SEQ ID NO: 317136 - DNA, 42 bp, Homo sapiens; identical to SEQ ID NO: 203330
  chr13:37005431-37005473
  hypo

SEQ ID NO: 317137 - DNA, 304 bp, Homo sapiens; identical to SEQ ID NO: 203332
  chr13:37393232-37393536
  hypo

SEQ ID NO: 317138 - DNA, 162 bp, Homo sapiens; identical to SEQ ID NO: 265947
  chr13:37453825-37453987
  hypo

SEQ ID NO: 317139 - DNA, 99 bp, Homo sapiens; identical to SEQ ID NO: 215461
  chr13:37643590-37643689
  hypo

SEQ ID NO: 317140 - DNA, 388 bp, Homo sapiens; identical to SEQ ID NO: 265949
  chr13:37679436-37679824
  hypo

SEQ ID NO: 317141 - DNA, 60 bp, Homo sapiens; identical to SEQ ID NO: 265950
  chr13:37838971-37839031
  hypo

SEQ ID NO: 317142 - DNA, 77 bp, Homo sapiens; identical to SEQ ID NO: 265951
  chr13:39358216-39358293
  hypo

SEQ ID NO: 317143 - DNA, 33 bp, Homo sapiens; identical to SEQ ID NO: 203337
  chr13:39612009-39612042
  hypo

SEQ ID NO: 317144 - DNA, 200 bp, Homo sapiens; identical to SEQ ID NO: 265952
  chr13:39694434-39694634
  hypo

SEQ ID NO: 317145 - DNA, 224 bp, Homo sapiens; identical to SEQ ID NO: 265953
  chr13:40762416-40762640
  hypo

SEQ ID NO: 317146 - DNA, 163 bp, Homo sapiens; identical to SEQ ID NO: 289692
  chr13:41345169-41345332
  hypo

SEQ ID NO: 317147 - DNA, 223 bp, Homo sapiens; identical to SEQ ID NO: 289693
  chr13:41345361-41345584
  hypo

SEQ ID NO: 317148 - DNA, 206 bp, Homo sapiens; identical to SEQ ID NO: 203340
  chr13:41364043-41364249
  hypo

SEQ ID NO: 317149 - DNA, 85 bp, Homo sapiens; identical to SEQ ID NO: 265954
  chr13:41450220-41450305
  hypo

SEQ ID NO: 317150 - DNA, 107 bp, Homo sapiens; identical to SEQ ID NO: 265955
  chr13:41453084-41453191
  hypo

SEQ ID NO: 317151 - DNA, 120 bp, Homo sapiens; identical to SEQ ID NO: 265956
  chr13:41561358-41561478
  hypo

SEQ ID NO: 317152 - DNA, 146 bp, Homo sapiens; identical to SEQ ID NO: 265957
  chr13:41567499-41567645
  hypo

SEQ ID NO: 317153 - DNA, 326 bp, Homo sapiens; identical to SEQ ID NO: 289697
  chr13:41767766-41768092
  hypo

SEQ ID NO: 317154 - DNA, 81 bp, Homo sapiens; identical to SEQ ID NO: 265960
  chr13:42026224-42026305
  hypo

SEQ ID NO: 317155 - DNA, 480 bp, Homo sapiens; identical to SEQ ID NO: 289700
  chr13:42032016-42032496
  hypo

SEQ ID NO: 317156 - DNA, 111 bp, Homo sapiens; identical to SEQ ID NO: 289701
  chr13:42032649-42032760
  hypo

SEQ ID NO: 317157 - DNA, 33 bp, Homo sapiens; identical to SEQ ID NO: 265961
  chr13:42600814-42600847
  hypo

SEQ ID NO: 317158 - DNA, 162 bp, Homo sapiens; identical to SEQ ID NO: 224571
  chr13:42615145-42615307
  hypo

SEQ ID NO: 317159 - DNA, 202 bp, Homo sapiens; identical to SEQ ID NO: 289703
  chr13:42615560-42615762
  hypo

SEQ ID NO: 317160 - DNA, 182 bp, Homo sapiens; identical to SEQ ID NO: 289704
  chr13:42615836-42616018
  hypo

SEQ ID NO: 317161 - DNA, 42 bp, Homo sapiens; identical to SEQ ID NO: 215467
  chr13:43217491-43217533
  hypo

SEQ ID NO: 317162 - DNA, 126 bp, Homo sapiens; identical to SEQ ID NO: 215468
  chr13:43543227-43543353
  hypo

SEQ ID NO: 317163 - DNA, 84 bp, Homo sapiens; identical to SEQ ID NO: 215469
  chr13:43596563-43596647
  hypo

SEQ ID NO: 317164 - DNA, 41 bp, Homo sapiens; identical to SEQ ID NO: 265965
  chr13:43598748-43598789
  hypo

SEQ ID NO: 317165 - DNA, 120 bp, Homo sapiens; identical to SEQ ID NO: 215470
  chr13:43620969-43621089
  hypo

SEQ ID NO: 317166 - DNA, 79 bp, Homo sapiens
  chr13:43728071-43728150
  hypo
aattcaaccacatttggaattttcttacgtaggatatgggcttgagtttttaatttaaagtcttcgggtaaggtcagct

SEQ ID NO: 317167 - DNA, 177 bp, Homo sapiens; identical to SEQ ID NO: 265968
  chr13:44543798-44543975
  hypo

SEQ ID NO: 317168 - DNA, 312 bp, Homo sapiens; identical to SEQ ID NO: 224575
  chr13:44544247-44544559
  hypo

SEQ ID NO: 317169 - DNA, 337 bp, Homo sapiens; identical to SEQ ID NO: 215471
  chr13:44544879-44545216
  hypo

SEQ ID NO: 317170 - DNA, 103 bp, Homo sapiens; identical to SEQ ID NO: 265970
  chr13:44947061-44947164
  hypo

SEQ ID NO: 317171 - DNA, 87 bp, Homo sapiens; identical to SEQ ID NO: 265971
  chr13:44981953-44982040
  hypo

SEQ ID NO: 317172 - DNA, 205 bp, Homo sapiens; identical to SEQ ID NO: 224576
  chr13:44991619-44991824
  hypo

SEQ ID NO: 317173 - DNA, 252 bp, Homo sapiens; identical to SEQ ID NO: 265972
  chr13:45003134-45003386
  hypo

SEQ ID NO: 317174 - DNA, 104 bp, Homo sapiens; identical to SEQ ID NO: 9329
  chr13:45150766-45150870
  hypo

SEQ ID NO: 317175 - DNA, 87 bp, Homo sapiens; identical to SEQ ID NO: 215473
  chr13:45154328-45154415
  hypo

SEQ ID NO: 317176 - DNA, 319 bp, Homo sapiens; identical to SEQ ID NO: 265974
  chr13:45383495-45383814
  hypo

SEQ ID NO: 317177 - DNA, 101 bp, Homo sapiens; identical to SEQ ID NO: 265976
  chr13:45493229-45493330
  hypo

SEQ ID NO: 317178 - DNA, 192 bp, Homo sapiens; identical to SEQ ID NO: 265977
  chr13:45500374-45500566
  hypo

SEQ ID NO: 317179 - DNA, 78 bp, Homo sapiens
  chr13:45564803-45564881
  hypo
gaagagtaaagctgaaagagtaaccctgccatttctgaatctaatttttcttcctggtctacccggaggctatgtttc

SEQ ID NO: 317180 - DNA, 137 bp, Homo sapiens; identical to SEQ ID NO: 265979
  chr13:45741238-45741375
  hypo

SEQ ID NO: 317181 - DNA, 275 bp, Homo sapiens; identical to SEQ ID NO: 215474
  chr13:45926346-45926621
  hypo

SEQ ID NO: 317182 - DNA, 104 bp, Homo sapiens; identical to SEQ ID NO: 215475
  chr13:45936013-45936117
  hypo

SEQ ID NO: 317183 - DNA, 41 bp, Homo sapiens; identical to SEQ ID NO: 215476
  chr13:45938917-45938958
  hypo

SEQ ID NO: 317184 - DNA, 64 bp, Homo sapiens; identical to SEQ ID NO: 265984
  chr13:45939385-45939449
  hypo

SEQ ID NO: 317185 - DNA, 41 bp, Homo sapiens; identical to SEQ ID NO: 265985
  chr13:45939905-45939946
  hypo

SEQ ID NO: 317186 - DNA, 98 bp, Homo sapiens; identical to SEQ ID NO: 265986
  chr13:45953004-45953102
  hypo

SEQ ID NO: 317187 - DNA, 162 bp, Homo sapiens; identical to SEQ ID NO: 265987
  chr13:45965401-45965563
  hypo

SEQ ID NO: 317188 - DNA, 136 bp, Homo sapiens; identical to SEQ ID NO: 215477
  chr13:46037882-46038018
  hypo

SEQ ID NO: 317189 - DNA, 87 bp, Homo sapiens; identical to SEQ ID NO: 215478
  chr13:46287705-46287792
  hypo

SEQ ID NO: 317190 - DNA, 77 bp, Homo sapiens; identical to SEQ ID NO: 215479
  chr13:46288451-46288528
  hypo

SEQ ID NO: 317191 - DNA, 87 bp, Homo sapiens; identical to SEQ ID NO: 265991
  chr13:46318163-46318250
  hypo

SEQ ID NO: 317192 - DNA, 107 bp, Homo sapiens; identical to SEQ ID NO: 215480
  chr13:46543045-46543152
  hypo

SEQ ID NO: 317193 - DNA, 145 bp, Homo sapiens; identical to SEQ ID NO: 265993
  chr13:46660689-46660834
  hypo

SEQ ID NO: 317194 - DNA, 37 bp, Homo sapiens
  chr13:46661423-46661460
  hypo
gcagcagccgctctagatgggccgccactgccattaa

SEQ ID NO: 317195 - DNA, 260 bp, Homo sapiens; identical to SEQ ID NO: 265995
  chr13:46946183-46946443
  hypo

SEQ ID NO: 317196 - DNA, 120 bp, Homo sapiens; identical to SEQ ID NO: 215482
  chr13:46948515-46948635
  hypo

SEQ ID NO: 317197 - DNA, 36 bp, Homo sapiens; identical to SEQ ID NO: 265997
  chr13:47349768-47349804
  hypo

SEQ ID NO: 317198 - DNA, 76 bp, Homo sapiens; identical to SEQ ID NO: 265998
  chr13:48318851-48318927
  hypo

SEQ ID NO: 317199 - DNA, 40 bp, Homo sapiens; identical to SEQ ID NO: 215483
  chr13:48731919-48731959
  hypo

SEQ ID NO: 317200 - DNA, 159 bp, Homo sapiens; identical to SEQ ID NO: 266000
  chr13:49076869-49077028
  hypo

SEQ ID NO: 317201 - DNA, 43 bp, Homo sapiens; identical to SEQ ID NO: 266001
  chr13:49397811-49397854
  hypo

SEQ ID NO: 317202 - DNA, 36 bp, Homo sapiens; identical to SEQ ID NO: 215484
  chr13:49848524-49848560
  hypo

SEQ ID NO: 317203 - DNA, 303 bp, Homo sapiens; identical to SEQ ID NO: 266003
  chr13:49879455-49879758
  hypo

SEQ ID NO: 317204 - DNA, 67 bp, Homo sapiens; identical to SEQ ID NO: 266004
  chr13:49883683-49883750
  hypo

SEQ ID NO: 317205 - DNA, 278 bp, Homo sapiens; identical to SEQ ID NO: 266005
  chr13:49884960-49885238
  hypo

SEQ ID NO: 317206 - DNA, 121 bp, Homo sapiens; identical to SEQ ID NO: 266006
  chr13:49914522-49914643
  hypo

SEQ ID NO: 317207 - DNA, 191 bp, Homo sapiens; identical to SEQ ID NO: 215485
  chr13:49922251-49922442
  hypo

SEQ ID NO: 317208 - DNA, 137 bp, Homo sapiens; identical to SEQ ID NO: 266008
  chr13:50027700-50027837
  hypo

SEQ ID NO: 317209 - DNA, 125 bp, Homo sapiens; identical to SEQ ID NO: 266009
  chr13:50050853-50050978
  hypo

SEQ ID NO: 317210 - DNA, 182 bp, Homo sapiens; identical to SEQ ID NO: 266010
  chr13:50411347-50411529
  hypo

SEQ ID NO: 317211 - DNA, 32 bp, Homo sapiens; identical to SEQ ID NO: 266011
  chr13:51568863-51568895
  hypo

SEQ ID NO: 317212 - DNA, 32 bp, Homo sapiens; identical to SEQ ID NO: 266012
  chr13:52242304-52242336
  hypo

SEQ ID NO: 317213 - DNA, 92 bp, Homo sapiens; identical to SEQ ID NO: 215486
  chr13:52334720-52334812
  hypo

SEQ ID NO: 317214 - DNA, 182 bp, Homo sapiens; identical to SEQ ID NO: 215487
  chr13:52335914-52336096
  hypo

SEQ ID NO: 317215 - DNA, 100 bp, Homo sapiens; identical to SEQ ID NO: 266015
  chr13:52343293-52343393
  hypo

SEQ ID NO: 317216 - DNA, 161 bp, Homo sapiens; identical to SEQ ID NO: 215488
  chr13:52390091-52390252
  hypo

SEQ ID NO: 317217 - DNA, 110 bp, Homo sapiens; identical to SEQ ID NO: 266017
  chr13:52493824-52493934
  hypo

SEQ ID NO: 317218 - DNA, 134 bp, Homo sapiens
  chr13:52532670-52532804
  hypo
caccgaggagctgaaagacaaggacagtgaaggctgccagcaagtagggaggagagttcaatgagcgacacagggccaagggccctggggatggcaaagcctctagctttgtgcacagtcgtgacagtacttct

SEQ ID NO: 317219 - DNA, 37 bp, Homo sapiens; identical to SEQ ID NO: 215489
  chr13:52564916-52564953
  hypo

SEQ ID NO: 317220 - DNA, 37 bp, Homo sapiens; identical to SEQ ID NO: 215490
  chr13:52565193-52565230
  hypo

SEQ ID NO: 317221 - DNA, 291 bp, Homo sapiens; identical to SEQ ID NO: 224578
  chr13:52585269-52585560
  hypo

SEQ ID NO: 317222 - DNA, 85 bp, Homo sapiens; identical to SEQ ID NO: 224579
  chr13:52702430-52702515
  hypo

SEQ ID NO: 317223 - DNA, 545 bp, Homo sapiens; identical to SEQ ID NO: 289760
  chr13:52702767-52703312
  hypo

SEQ ID NO: 317224 - DNA, 32 bp, Homo sapiens; identical to SEQ ID NO: 215492
  chr13:52770512-52770544
  hypo

SEQ ID NO: 317225 - DNA, 36 bp, Homo sapiens; identical to SEQ ID NO: 266022
  chr13:53175586-53175622
  hypo

SEQ ID NO: 317226 - DNA, 45 bp, Homo sapiens; identical to SEQ ID NO: 289773
  chr13:53426008-53426053
  hypo

SEQ ID NO: 317227 - DNA, 124 bp, Homo sapiens; identical to SEQ ID NO: 266023
  chr13:60232278-60232402
  hypo

SEQ ID NO: 317228 - DNA, 89 bp, Homo sapiens; identical to SEQ ID NO: 266024
  chr13:60267289-60267378
  hypo

SEQ ID NO: 317229 - DNA, 160 bp, Homo sapiens; identical to SEQ ID NO: 215493
  chr13:60492535-60492695
  hypo

SEQ ID NO: 317230 - DNA, 213 bp, Homo sapiens; identical to SEQ ID NO: 224583
  chr13:60972272-60972485
  hypo

SEQ ID NO: 317231 - DNA, 243 bp, Homo sapiens; identical to SEQ ID NO: 224584
  chr13:67799457-67799700
  hypo

SEQ ID NO: 317232 - DNA, 32 bp, Homo sapiens; identical to SEQ ID NO: 224585
  chr13:67801107-67801139
  hypo

SEQ ID NO: 317233 - DNA, 254 bp, Homo sapiens; identical to SEQ ID NO: 224586
  chr13:67801447-67801701
  hypo

SEQ ID NO: 317234 - DNA, 306 bp, Homo sapiens
  chr13:68343645-68343951
  hypo
gttctcacgctgaccgaccagggttgctctcctcgctcggccctgcaggctgcactcgactcgtgccaccaacccagatcctgtgcctgctgtggctctgcactcagcccacgggctggaccaggcgtgccgccagcggcttccaccttgggcacccgcatctagatgagcggaagttggtggtgcctgaaaacagggatgccagcaaccgtgaagcctggggagtcctgagagctgagcccctaagaaatgttatggctgctgtagttcagcgagcagcagggaatggcgcccagtggctttttc

SEQ ID NO: 317235 - DNA, 42 bp, Homo sapiens
  chr13:68344002-68344044
  hypo
gggcgcgtgttacagctttcctgctcccgctgccccacagct

SEQ ID NO: 317236 - DNA, 95 bp, Homo sapiens; identical to SEQ ID NO: 266027
  chr13:72305716-72305811
  hypo

SEQ ID NO: 317237 - DNA, 83 bp, Homo sapiens; identical to SEQ ID NO: 215494
  chr13:73324107-73324190
  hypo

SEQ ID NO: 317238 - DNA, 74 bp, Homo sapiens
  chr13:73619519-73619593
  hypo
ataggagtccagtacgtatctgttggttgttttaaaaatactttatcataggaaaatcttcaatgactcctttc

SEQ ID NO: 317239 - DNA, 37 bp, Homo sapiens
  chr13:73619623-73619660
  hypo
gcatcggcatctcttcaatcatcctttgtgtgtgctc

SEQ ID NO: 317240 - DNA, 34 bp, Homo sapiens; identical to SEQ ID NO: 215495
  chr13:73619752-73619786
  hypo

SEQ ID NO: 317241 - DNA, 157 bp, Homo sapiens; identical to SEQ ID NO: 266030
  chr13:73636133-73636290
  hypo

SEQ ID NO: 317242 - DNA, 51 bp, Homo sapiens; identical to SEQ ID NO: 215496
  chr13:73636846-73636897
  hypo

SEQ ID NO: 317243 - DNA, 50 bp, Homo sapiens; identical to SEQ ID NO: 266032
  chr13:73640031-73640081
  hypo

SEQ ID NO: 317244 - DNA, 38 bp, Homo sapiens; identical to SEQ ID NO: 266033
  chr13:73642917-73642955
  hypo

SEQ ID NO: 317245 - DNA, 62 bp, Homo sapiens; identical to SEQ ID NO: 266034
  chr13:73809565-73809627
  hypo

SEQ ID NO: 317246 - DNA, 203 bp, Homo sapiens; identical to SEQ ID NO: 266035
  chr13:73824308-73824511
  hypo

SEQ ID NO: 317247 - DNA, 101 bp, Homo sapiens; identical to SEQ ID NO: 266036
  chr13:73972455-73972556
  hypo

SEQ ID NO: 317248 - DNA, 143 bp, Homo sapiens; identical to SEQ ID NO: 266037
  chr13:74248145-74248288
  hypo

SEQ ID NO: 317249 - DNA, 234 bp, Homo sapiens; identical to SEQ ID NO: 266038
  chr13:74269500-74269734
  hypo

SEQ ID NO: 317250 - DNA, 75 bp, Homo sapiens; identical to SEQ ID NO: 266039
  chr13:74352828-74352903
  hypo

SEQ ID NO: 317251 - DNA, 144 bp, Homo sapiens; identical to SEQ ID NO: 266040
  chr13:74445354-74445498
  hypo

SEQ ID NO: 317252 - DNA, 926 bp, Homo sapiens; identical to SEQ ID NO: 203387
  chr13:74707668-74708594
  hypo

SEQ ID NO: 317253 - DNA, 200 bp, Homo sapiens; identical to SEQ ID NO: 203388
  chr13:74709334-74709534
  hypo

SEQ ID NO: 317254 - DNA, 35 bp, Homo sapiens; identical to SEQ ID NO: 203389
  chr13:75794021-75794056
  hypo

SEQ ID NO: 317255 - DNA, 186 bp, Homo sapiens; identical to SEQ ID NO: 266041
  chr13:75936267-75936453
  hypo

SEQ ID NO: 317256 - DNA, 1065 bp, Homo sapiens; identical to SEQ ID NO: 203391
  chr13:76055056-76056121
  hypo

SEQ ID NO: 317257 - DNA, 32 bp, Homo sapiens; identical to SEQ ID NO: 266042
  chr13:76291201-76291233
  hypo

SEQ ID NO: 317258 - DNA, 151 bp, Homo sapiens; identical to SEQ ID NO: 215501
  chr13:76352659-76352810
  hypo

SEQ ID NO: 317259 - DNA, 32 bp, Homo sapiens; identical to SEQ ID NO: 266044
  chr13:77356969-77357001
  hypo

SEQ ID NO: 317260 - DNA, 131 bp, Homo sapiens; identical to SEQ ID NO: 289812
  chr13:77459236-77459367
  hypo

SEQ ID NO: 317261 - DNA, 717 bp, Homo sapiens; identical to SEQ ID NO: 289813
  chr13:77459628-77460345
  hypo

SEQ ID NO: 317262 - DNA, 37 bp, Homo sapiens; identical to SEQ ID NO: 215502
  chr13:77553746-77553783
  hypo

SEQ ID NO: 317263 - DNA, 422 bp, Homo sapiens; identical to SEQ ID NO: 289818
  chr13:78272232-78272654
  hypo

SEQ ID NO: 317264 - DNA, 103 bp, Homo sapiens; identical to SEQ ID NO: 266046
  chr13:78633633-78633736
  hypo

SEQ ID NO: 317265 - DNA, 36 bp, Homo sapiens; identical to SEQ ID NO: 215504
  chr13:79992932-79992968
  hypo

SEQ ID NO: 317266 - DNA, 35 bp, Homo sapiens; identical to SEQ ID NO: 215505
  chr13:79993208-79993243
  hypo

SEQ ID NO: 317267 - DNA, 499 bp, Homo sapiens; identical to SEQ ID NO: 203402
  chr13:80916947-80917446
  hypo

SEQ ID NO: 317268 - DNA, 40 bp, Homo sapiens; identical to SEQ ID NO: 266049
  chr13:83206248-83206288
  hypo

SEQ ID NO: 317269 - DNA, 40 bp, Homo sapiens; identical to SEQ ID NO: 266050
  chr13:83206528-83206568
  hypo

SEQ ID NO: 317270 - DNA, 108 bp, Homo sapiens; identical to SEQ ID NO: 266051
  chr13:84107123-84107231
  hypo

SEQ ID NO: 317271 - DNA, 43 bp, Homo sapiens; identical to SEQ ID NO: 266052
  chr13:84267883-84267926
  hypo

SEQ ID NO: 317272 - DNA, 60 bp, Homo sapiens; identical to SEQ ID NO: 266053
  chr13:84481754-84481814
  hypo

SEQ ID NO: 317273 - DNA, 115 bp, Homo sapiens; identical to SEQ ID NO: 266054
  chr13:86083230-86083345
  hypo

SEQ ID NO: 317274 - DNA, 201 bp, Homo sapiens; identical to SEQ ID NO: 266055
  chr13:86086568-86086769
  hypo

SEQ ID NO: 317275 - DNA, 51 bp, Homo sapiens; identical to SEQ ID NO: 266056
  chr13:87732415-87732466
  hypo

SEQ ID NO: 317276 - DNA, 40 bp, Homo sapiens; identical to SEQ ID NO: 266058
  chr13:92746466-92746506
  hypo

SEQ ID NO: 317277 - DNA, 103 bp, Homo sapiens; identical to SEQ ID NO: 266059
  chr13:92858652-92858755
  hypo

SEQ ID NO: 317278 - DNA, 150 bp, Homo sapiens; identical to SEQ ID NO: 266060
  chr13:95061643-95061793
  hypo

SEQ ID NO: 317279 - DNA, 287 bp, Homo sapiens; identical to SEQ ID NO: 203409
  chr13:95201339-95201626
  hypo

SEQ ID NO: 317280 - DNA, 229 bp, Homo sapiens; identical to SEQ ID NO: 203410
  chr13:95201662-95201891
  hypo

SEQ ID NO: 317281 - DNA, 149 bp, Homo sapiens; identical to SEQ ID NO: 215509
  chr13:95238872-95239021
  hypo

SEQ ID NO: 317282 - DNA, 460 bp, Homo sapiens; identical to SEQ ID NO: 289846
  chr13:95354380-95354840
  hypo

SEQ ID NO: 317283 - DNA, 175 bp, Homo sapiens; identical to SEQ ID NO: 50787
  chr13:95355116-95355291
  hypo

SEQ ID NO: 317284 - DNA, 389 bp, Homo sapiens; identical to SEQ ID NO: 289851
  chr13:95360413-95360802
  hypo

SEQ ID NO: 317285 - DNA, 197 bp, Homo sapiens; identical to SEQ ID NO: 266062
  chr13:95411483-95411680
  hypo

SEQ ID NO: 317286 - DNA, 159 bp, Homo sapiens; identical to SEQ ID NO: 266063
  chr13:95683564-95683723
  hypo

SEQ ID NO: 317287 - DNA, 120 bp, Homo sapiens; identical to SEQ ID NO: 266064
  chr13:95693147-95693267
  hypo

SEQ ID NO: 317288 - DNA, 108 bp, Homo sapiens; identical to SEQ ID NO: 215510
  chr13:95751946-95752054
  hypo

SEQ ID NO: 317289 - DNA, 162 bp, Homo sapiens; identical to SEQ ID NO: 266066
  chr13:95767877-95768039
  hypo

SEQ ID NO: 317290 - DNA, 153 bp, Homo sapiens; identical to SEQ ID NO: 266068
  chr13:95788979-95789132
  hypo

SEQ ID NO: 317291 - DNA, 42 bp, Homo sapiens; identical to SEQ ID NO: 266069
  chr13:95839496-95839538
  hypo

SEQ ID NO: 317292 - DNA, 137 bp, Homo sapiens; identical to SEQ ID NO: 215511
  chr13:95852551-95852688
  hypo

SEQ ID NO: 317293 - DNA, 46 bp, Homo sapiens; identical to SEQ ID NO: 266071
  chr13:95869960-95870006
  hypo

SEQ ID NO: 317294 - DNA, 209 bp, Homo sapiens; identical to SEQ ID NO: 215512
  chr13:96061946-96062155
  hypo

SEQ ID NO: 317295 - DNA, 461 bp, Homo sapiens; identical to SEQ ID NO: 215513
  chr13:96085829-96086290
  hypo

SEQ ID NO: 317296 - DNA, 92 bp, Homo sapiens; identical to SEQ ID NO: 215514
  chr13:96126087-96126179
  hypo

SEQ ID NO: 317297 - DNA, 184 bp, Homo sapiens; identical to SEQ ID NO: 215515
  chr13:96353304-96353488
  hypo

SEQ ID NO: 317298 - DNA, 87 bp, Homo sapiens; identical to SEQ ID NO: 215516
  chr13:96409644-96409731
  hypo

SEQ ID NO: 317299 - DNA, 625 bp, Homo sapiens; identical to SEQ ID NO: 289854
  chr13:96705319-96705944
  hypo

SEQ ID NO: 317300 - DNA, 99 bp, Homo sapiens
  chr13:97599745-97599844
  hypo
tccagcaccggggttccagacattctcgtgcctcaaccccgcgaatacctgggatgacaggcgcgctactgaaccggtacatttttgtattgtagagcc

SEQ ID NO: 317301 - DNA, 103 bp, Homo sapiens; identical to SEQ ID NO: 266079
  chr13:97599964-97600067
  hypo

SEQ ID NO: 317302 - DNA, 292 bp, Homo sapiens; identical to SEQ ID NO: 266080
  chr13:97980686-97980978
  hypo

SEQ ID NO: 317303 - DNA, 228 bp, Homo sapiens; identical to SEQ ID NO: 266082
  chr13:97999151-97999379
  hypo

SEQ ID NO: 317304 - DNA, 111 bp, Homo sapiens; identical to SEQ ID NO: 266083
  chr13:98528398-98528509
  hypo

SEQ ID NO: 317305 - DNA, 80 bp, Homo sapiens; identical to SEQ ID NO: 215519
  chr13:98679646-98679726
  hypo

SEQ ID NO: 317306 - DNA, 90 bp, Homo sapiens; identical to SEQ ID NO: 266085
  chr13:98688094-98688184
  hypo

SEQ ID NO: 317307 - DNA, 39 bp, Homo sapiens; identical to SEQ ID NO: 266086
  chr13:98695035-98695074
  hypo

SEQ ID NO: 317308 - DNA, 92 bp, Homo sapiens; identical to SEQ ID NO: 266087
  chr13:98761016-98761108
  hypo

SEQ ID NO: 317309 - DNA, 146 bp, Homo sapiens; identical to SEQ ID NO: 266088
  chr13:98768945-98769091
  hypo

SEQ ID NO: 317310 - DNA, 702 bp, Homo sapiens; identical to SEQ ID NO: 289857
  chr13:98795069-98795771
  hypo

SEQ ID NO: 317311 - DNA, 153 bp, Homo sapiens; identical to SEQ ID NO: 266089
  chr13:98829228-98829381
  hypo

SEQ ID NO: 317312 - DNA, 44 bp, Homo sapiens; identical to SEQ ID NO: 266090
  chr13:98851326-98851370
  hypo

SEQ ID NO: 317313 - DNA, 349 bp, Homo sapiens
  chr13:98869701-98870050
  hypo
tctacgaccgtcgtcgcaggaaatgatccttgtaactttctcgtgttgctgtcttgtcactgctgtactcgagcttttgtagctcctgagacttaagtagcattcatcctttgcctgaggatcaagtgtgggcttcgtagctcggggagcctgggagagagcaatgagcctccatggaggggccctgtacaccgggaggtgcctgggcaactcccatggctcatctcaaccacagtcctcggcggtttgttttctgcattagcttctcatgccagaacaccctcttatttgtttacctgcttagtgttggcctcttgcaggtagagtggccactccttggagggcaagg

SEQ ID NO: 317314 - DNA, 241 bp, Homo sapiens; identical to SEQ ID NO: 215522
  chr13:98870098-98870339
  hypo

SEQ ID NO: 317315 - DNA, 93 bp, Homo sapiens; identical to SEQ ID NO: 266092
  chr13:98873757-98873850
  hypo

SEQ ID NO: 317316 - DNA, 43 bp, Homo sapiens; identical to SEQ ID NO: 215523
  chr13:98917861-98917904
  hypo

SEQ ID NO: 317317 - DNA, 212 bp, Homo sapiens; identical to SEQ ID NO: 266094
  chr13:98965960-98966172
  hypo

SEQ ID NO: 317318 - DNA, 187 bp, Homo sapiens; identical to SEQ ID NO: 266095
  chr13:98981025-98981212
  hypo

SEQ ID NO: 317319 - DNA, 245 bp, Homo sapiens; identical to SEQ ID NO: 266096
  chr13:99034906-99035151
  hypo

SEQ ID NO: 317320 - DNA, 367 bp, Homo sapiens; identical to SEQ ID NO: 266097
  chr13:99047503-99047870
  hypo

SEQ ID NO: 317321 - DNA, 218 bp, Homo sapiens; identical to SEQ ID NO: 266098
  chr13:99059218-99059436
  hypo

SEQ ID NO: 317322 - DNA, 376 bp, Homo sapiens; identical to SEQ ID NO: 266099
  chr13:99068034-99068410
  hypo

SEQ ID NO: 317323 - DNA, 42 bp, Homo sapiens; identical to SEQ ID NO: 266100
  chr13:99072616-99072658
  hypo

SEQ ID NO: 317324 - DNA, 108 bp, Homo sapiens; identical to SEQ ID NO: 266101
  chr13:99095616-99095724
  hypo

SEQ ID NO: 317325 - DNA, 444 bp, Homo sapiens; identical to SEQ ID NO: 266102
  chr13:99101263-99101707
  hypo

SEQ ID NO: 317326 - DNA, 363 bp, Homo sapiens; identical to SEQ ID NO: 174069
  chr13:99104223-99104586
  hypo

SEQ ID NO: 317327 - DNA, 101 bp, Homo sapiens; identical to SEQ ID NO: 215526
  chr13:99115922-99116023
  hypo

SEQ ID NO: 317328 - DNA, 194 bp, Homo sapiens; identical to SEQ ID NO: 289858
  chr13:99128923-99129117
  hypo

SEQ ID NO: 317329 - DNA, 95 bp, Homo sapiens; identical to SEQ ID NO: 266105
  chr13:99141397-99141492
  hypo

SEQ ID NO: 317330 - DNA, 113 bp, Homo sapiens; identical to SEQ ID NO: 266106
  chr13:99157093-99157206
  hypo

SEQ ID NO: 317331 - DNA, 168 bp, Homo sapiens; identical to SEQ ID NO: 266108
  chr13:99192183-99192351
  hypo

SEQ ID NO: 317332 - DNA, 166 bp, Homo sapiens; identical to SEQ ID NO: 215527
  chr13:99204543-99204709
  hypo

SEQ ID NO: 317333 - DNA, 154 bp, Homo sapiens; identical to SEQ ID NO: 266110
  chr13:99219592-99219746
  hypo

SEQ ID NO: 317334 - DNA, 329 bp, Homo sapiens; identical to SEQ ID NO: 203419
  chr13:99229764-99230093
  hypo

SEQ ID NO: 317335 - DNA, 33 bp, Homo sapiens; identical to SEQ ID NO: 266111
  chr13:99235379-99235412
  hypo

SEQ ID NO: 317336 - DNA, 41 bp, Homo sapiens; identical to SEQ ID NO: 215529
  chr13:99293494-99293535
  hypo

SEQ ID NO: 317337 - DNA, 255 bp, Homo sapiens; identical to SEQ ID NO: 266113
  chr13:99328243-99328498
  hypo

SEQ ID NO: 317338 - DNA, 144 bp, Homo sapiens; identical to SEQ ID NO: 266114
  chr13:99328718-99328862
  hypo

SEQ ID NO: 317339 - DNA, 70 bp, Homo sapiens; identical to SEQ ID NO: 266115
  chr13:99376081-99376151
  hypo

SEQ ID NO: 317340 - DNA, 106 bp, Homo sapiens; identical to SEQ ID NO: 266116
  chr13:99376181-99376287
  hypo

SEQ ID NO: 317341 - DNA, 42 bp, Homo sapiens; identical to SEQ ID NO: 266117
  chr13:99427801-99427843
  hypo

SEQ ID NO: 317342 - DNA, 236 bp, Homo sapiens
  chr13:99428268-99428504
  hypo
ttctaagggaccctggagtgcggcctgactgagagagtggatggggaggggatgccgggtctctggctcaggtgttgcgtgttgggagcccactaggtagaacaagtgtcctccacccagctcagctccggagccttcctcgaaaggcaagaggtcaattcatcttctgcctcagcagaatcgtcccttcctttacaaggggactttgctccatgatctgacagacctgggaagtg

SEQ ID NO: 317343 - DNA, 58 bp, Homo sapiens; identical to SEQ ID NO: 266119
  chr13:99444808-99444866
  hypo

SEQ ID NO: 317344 - DNA, 354 bp, Homo sapiens; identical to SEQ ID NO: 203421
  chr13:99739098-99739452
  hypo

SEQ ID NO: 317345 - DNA, 101 bp, Homo sapiens; identical to SEQ ID NO: 215531
  chr13:99851316-99851417
  hypo

SEQ ID NO: 317346 - DNA, 111 bp, Homo sapiens; identical to SEQ ID NO: 215532
  chr13:99851706-99851817
  hypo

SEQ ID NO: 317347 - DNA, 40 bp, Homo sapiens; identical to SEQ ID NO: 215533
  chr13:99863141-99863181
  hypo

SEQ ID NO: 317348 - DNA, 124 bp, Homo sapiens; identical to SEQ ID NO: 266123
  chr13:100005097-100005221
  hypo

SEQ ID NO: 317349 - DNA, 99 bp, Homo sapiens; identical to SEQ ID NO: 266124
  chr13:100020047-100020146
  hypo

SEQ ID NO: 317350 - DNA, 32 bp, Homo sapiens; identical to SEQ ID NO: 266125
  chr13:100020351-100020383
  hypo

SEQ ID NO: 317351 - DNA, 108 bp, Homo sapiens; identical to SEQ ID NO: 266126
  chr13:100033196-100033304
  hypo

SEQ ID NO: 317352 - DNA, 160 bp, Homo sapiens; identical to SEQ ID NO: 215534
  chr13:100035864-100036024
  hypo

SEQ ID NO: 317353 - DNA, 129 bp, Homo sapiens; identical to SEQ ID NO: 266128
  chr13:100036956-100037085
  hypo

SEQ ID NO: 317354 - DNA, 319 bp, Homo sapiens; identical to SEQ ID NO: 266129
  chr13:100067888-100068207
  hypo

SEQ ID NO: 317355 - DNA, 134 bp, Homo sapiens; identical to SEQ ID NO: 215535
  chr13:100068639-100068773
  hypo

SEQ ID NO: 317356 - DNA, 192 bp, Homo sapiens; identical to SEQ ID NO: 215536
  chr13:100068977-100069169
  hypo

SEQ ID NO: 317357 - DNA, 97 bp, Homo sapiens; identical to SEQ ID NO: 215537
  chr13:100307598-100307695
  hypo

SEQ ID NO: 317358 - DNA, 185 bp, Homo sapiens; identical to SEQ ID NO: 266133
  chr13:100482066-100482251
  hypo

SEQ ID NO: 317359 - DNA, 52 bp, Homo sapiens; identical to SEQ ID NO: 289868
  chr13:100620292-100620344
  hypo

SEQ ID NO: 317360 - DNA, 111 bp, Homo sapiens; identical to SEQ ID NO: 289869
  chr13:100620374-100620485
  hypo

SEQ ID NO: 317361 - DNA, 105 bp, Homo sapiens; identical to SEQ ID NO: 203424
  chr13:100620515-100620620
  hypo

SEQ ID NO: 317362 - DNA, 67 bp, Homo sapiens; identical to SEQ ID NO: 203427
  chr13:100622155-100622222
  hypo

SEQ ID NO: 317363 - DNA, 575 bp, Homo sapiens; identical to SEQ ID NO: 289878
  chr13:100632514-100633089
  hypo

SEQ ID NO: 317364 - DNA, 36 bp, Homo sapiens; identical to SEQ ID NO: 289879
  chr13:100633184-100633220
  hypo

SEQ ID NO: 317365 - DNA, 422 bp, Homo sapiens; identical to SEQ ID NO: 203432
  chr13:100633420-100633842
  hypo

SEQ ID NO: 317366 - DNA, 145 bp, Homo sapiens; identical to SEQ ID NO: 289881
  chr13:100634132-100634277
  hypo

SEQ ID NO: 317367 - DNA, 95 bp, Homo sapiens; identical to SEQ ID NO: 266136
  chr13:100678151-100678246
  hypo

SEQ ID NO: 317368 - DNA, 91 bp, Homo sapiens; identical to SEQ ID NO: 266137
  chr13:101091896-101091987
  hypo

SEQ ID NO: 317369 - DNA, 101 bp, Homo sapiens; identical to SEQ ID NO: 266138
  chr13:101129318-101129419
  hypo

SEQ ID NO: 317370 - DNA, 105 bp, Homo sapiens; identical to SEQ ID NO: 266139
  chr13:101160649-101160754
  hypo

SEQ ID NO: 317371 - DNA, 112 bp, Homo sapiens; identical to SEQ ID NO: 215544
  chr13:101184480-101184592
  hypo

SEQ ID NO: 317372 - DNA, 260 bp, Homo sapiens; identical to SEQ ID NO: 266141
  chr13:101194463-101194723
  hypo

SEQ ID NO: 317373 - DNA, 36 bp, Homo sapiens; identical to SEQ ID NO: 266142
  chr13:101297339-101297375
  hypo

SEQ ID NO: 317374 - DNA, 167 bp, Homo sapiens; identical to SEQ ID NO: 215545
  chr13:101297851-101298018
  hypo

SEQ ID NO: 317375 - DNA, 58 bp, Homo sapiens; identical to SEQ ID NO: 27185
  chr13:101302821-101302879
  hypo

SEQ ID NO: 317376 - DNA, 209 bp, Homo sapiens; identical to SEQ ID NO: 215547
  chr13:101317803-101318012
  hypo

SEQ ID NO: 317377 - DNA, 140 bp, Homo sapiens; identical to SEQ ID NO: 203437
  chr13:103046525-103046665
  hypo

SEQ ID NO: 317378 - DNA, 32 bp, Homo sapiens; identical to SEQ ID NO: 215549
  chr13:103262164-103262196
  hypo

SEQ ID NO: 317379 - DNA, 146 bp, Homo sapiens; identical to SEQ ID NO: 203438
  chr13:103450867-103451013
  hypo

SEQ ID NO: 317380 - DNA, 1602 bp, Homo sapiens; identical to SEQ ID NO: 289892
  chr13:103451043-103452645
  hypo

SEQ ID NO: 317381 - DNA, 38 bp, Homo sapiens; identical to SEQ ID NO: 266147
  chr13:103456537-103456575
  hypo

SEQ ID NO: 317382 - DNA, 70 bp, Homo sapiens; identical to SEQ ID NO: 266148
  chr13:103523455-103523525
  hypo

SEQ ID NO: 317383 - DNA, 44 bp, Homo sapiens; identical to SEQ ID NO: 215552
  chr13:103568843-103568887
  hypo

SEQ ID NO: 317384 - DNA, 38 bp, Homo sapiens
  chr13:103569193-103569231
  hypo
agccacacagccttttcgtatttctatttatttattta

SEQ ID NO: 317385 - DNA, 92 bp, Homo sapiens; identical to SEQ ID NO: 266151
  chr13:105300810-105300902
  hypo

SEQ ID NO: 317386 - DNA, 33 bp, Homo sapiens; identical to SEQ ID NO: 266153
  chr13:106718244-106718277
  hypo

SEQ ID NO: 317387 - DNA, 63 bp, Homo sapiens; identical to SEQ ID NO: 266154
  chr13:106739741-106739804
  hypo

SEQ ID NO: 317388 - DNA, 168 bp, Homo sapiens; identical to SEQ ID NO: 266155
  chr13:106788564-106788732
  hypo

SEQ ID NO: 317389 - DNA, 658 bp, Homo sapiens; identical to SEQ ID NO: 215553
  chr13:106912353-106913011
  hypo

SEQ ID NO: 317390 - DNA, 268 bp, Homo sapiens; identical to SEQ ID NO: 266157
  chr13:107078199-107078467
  hypo

SEQ ID NO: 317391 - DNA, 131 bp, Homo sapiens; identical to SEQ ID NO: 266158
  chr13:107125447-107125578
  hypo

SEQ ID NO: 317392 - DNA, 42 bp, Homo sapiens; identical to SEQ ID NO: 266159
  chr13:107128750-107128792
  hypo

SEQ ID NO: 317393 - DNA, 240 bp, Homo sapiens; identical to SEQ ID NO: 203444
  chr13:107187426-107187666
  hypo

SEQ ID NO: 317394 - DNA, 546 bp, Homo sapiens; identical to SEQ ID NO: 203445
  chr13:107187695-107188241
  hypo

SEQ ID NO: 317395 - DNA, 308 bp, Homo sapiens; identical to SEQ ID NO: 203446
  chr13:107188430-107188738
  hypo

SEQ ID NO: 317396 - DNA, 279 bp, Homo sapiens; identical to SEQ ID NO: 203447
  chr13:107188808-107189087
  hypo

SEQ ID NO: 317397 - DNA, 52 bp, Homo sapiens; identical to SEQ ID NO: 266160
  chr13:107229932-107229984
  hypo

SEQ ID NO: 317398 - DNA, 168 bp, Homo sapiens; identical to SEQ ID NO: 266161
  chr13:107248708-107248876
  hypo

SEQ ID NO: 317399 - DNA, 58 bp, Homo sapiens; identical to SEQ ID NO: 203450
  chr13:108519564-108519622
  hypo

SEQ ID NO: 317400 - DNA, 165 bp, Homo sapiens; identical to SEQ ID NO: 203451
  chr13:108519932-108520097
  hypo

SEQ ID NO: 317401 - DNA, 67 bp, Homo sapiens; identical to SEQ ID NO: 203452
  chr13:108520309-108520376
  hypo

SEQ ID NO: 317402 - DNA, 33 bp, Homo sapiens; identical to SEQ ID NO: 203453
  chr13:108520946-108520979
  hypo

SEQ ID NO: 317403 - DNA, 40 bp, Homo sapiens; identical to SEQ ID NO: 266162
  chr13:108816275-108816315
  hypo

SEQ ID NO: 317404 - DNA, 37 bp, Homo sapiens; identical to SEQ ID NO: 264655
  chr13:108841825-108841862
  hypo

SEQ ID NO: 317405 - DNA, 147 bp, Homo sapiens
  chr13:109779669-109779816
  hypo
tccatgtcagtctgcgcggccgtggatggcctgggccagtgcctcgttggcccgtccatctggtctccttcgctgcactcggtgttcagcatggatgacagcagcagcctcccgtctccacggaaacagcccccgcccaagccaaag

SEQ ID NO: 317406 - DNA, 108 bp, Homo sapiens; identical to SEQ ID NO: 215563
  chr13:109779846-109779954
  hypo

SEQ ID NO: 317407 - DNA, 44 bp, Homo sapiens; identical to SEQ ID NO: 215564
  chr13:109934405-109934449
  hypo

SEQ ID NO: 317408 - DNA, 116 bp, Homo sapiens; identical to SEQ ID NO: 215565
  chr13:109985085-109985201
  hypo

SEQ ID NO: 317409 - DNA, 209 bp, Homo sapiens; identical to SEQ ID NO: 266167
  chr13:110008368-110008577
  hypo

SEQ ID NO: 317410 - DNA, 177 bp, Homo sapiens; identical to SEQ ID NO: 266168
  chr13:110407325-110407502
  hypo

SEQ ID NO: 317411 - DNA, 204 bp, Homo sapiens; identical to SEQ ID NO: 215566
  chr13:110408018-110408222
  hypo

SEQ ID NO: 317412 - DNA, 44 bp, Homo sapiens; identical to SEQ ID NO: 215567
  chr13:110424383-110424427
  hypo

SEQ ID NO: 317413 - DNA, 350 bp, Homo sapiens
  chr13:110424587-110424937
  hypo
cggagcggtgcaggtaggtgcacgctcttcccaggtcctctgcagaaggcaaaagttcccagaggcacccaaaccttgctggggaaaaggcttctggccgattcatgaagacccccagaccacacgtctgcatcagttttcctgactaaattggtgggtgctcaacaaacccatcactgcaacacagggcgctccgaacgtggctttcttcttaacctggaagaaggtccgtaactccattcgcccggatagcaaaactgctttcctgctttgctcatccagccaggtctccaatctcacctgctgtttggtgggtcacggcgctcaccgttgggggtgctggccaggaa

SEQ ID NO: 317414 - DNA, 863 bp, Homo sapiens; identical to SEQ ID NO: 289911
  chr13:110438956-110439819
  hypo

SEQ ID NO: 317415 - DNA, 114 bp, Homo sapiens; identical to SEQ ID NO: 266174
  chr13:110486578-110486692
  hypo

SEQ ID NO: 317416 - DNA, 283 bp, Homo sapiens; identical to SEQ ID NO: 266176
  chr13:110804670-110804953
  hypo

SEQ ID NO: 317417 - DNA, 221 bp, Homo sapiens; identical to SEQ ID NO: 266177
  chr13:110831442-110831663
  hypo

SEQ ID NO: 317418 - DNA, 240 bp, Homo sapiens; identical to SEQ ID NO: 266180
  chr13:111006028-111006268
  hypo

SEQ ID NO: 317419 - DNA, 42 bp, Homo sapiens; identical to SEQ ID NO: 266181
  chr13:111087191-111087233
  hypo

SEQ ID NO: 317420 - DNA, 34 bp, Homo sapiens; identical to SEQ ID NO: 266182
  chr13:111109170-111109204
  hypo

SEQ ID NO: 317421 - DNA, 103 bp, Homo sapiens; identical to SEQ ID NO: 215569
  chr13:111122538-111122641
  hypo

SEQ ID NO: 317422 - DNA, 589 bp, Homo sapiens; identical to SEQ ID NO: 266184
  chr13:111127026-111127615
  hypo

SEQ ID NO: 317423 - DNA, 170 bp, Homo sapiens; identical to SEQ ID NO: 215570
  chr13:111135308-111135478
  hypo

SEQ ID NO: 317424 - DNA, 46 bp, Homo sapiens; identical to SEQ ID NO: 215571
  chr13:111144433-111144479
  hypo

SEQ ID NO: 317425 - DNA, 195 bp, Homo sapiens; identical to SEQ ID NO: 266187
  chr13:111145418-111145613
  hypo

SEQ ID NO: 317426 - DNA, 191 bp, Homo sapiens; identical to SEQ ID NO: 266188
  chr13:111168953-111169144
  hypo

SEQ ID NO: 317427 - DNA, 828 bp, Homo sapiens; identical to SEQ ID NO: 203455
  chr13:111213552-111214380
  hypo

SEQ ID NO: 317428 - DNA, 343 bp, Homo sapiens; identical to SEQ ID NO: 289917
  chr13:111267965-111268308
  hypo

SEQ ID NO: 317429 - DNA, 130 bp, Homo sapiens
  chr13:111277664-111277794
  hypo
cctcctgcatcatttggggttttggcactgacaccgaaagcgtcctgatggattttccatcctcagagtttctcagcaggtgctgtagaggaagtagggaaatgaaggagcccgttcttctggggtcaga

SEQ ID NO: 317430 - DNA, 431 bp, Homo sapiens
  chr13:111277824-111278255
  hypo
ggtgggggagcttgggcctgttggaaatggccggggcccagctccagaggcagggaggccctgtgggctgtgtgtgacaggtttgcagaaggtggaaacgaagggcctctgagcaataacaagacccttcctgcactcggcacatatgtctggtgccaggccctagcctgtgttccatgggtcagcgtggaactgggcaggcaaaaacctgcccccgtggggctcccccagaccgcctatgctatagagcttgctgtgtggaggtgttctctctgccgtccaggattgtggccactgagggcttgaaatgtggctgggaggtgcgggagcagagcgtttgctcttgtttacttttcattgtgtgtgtttgcaccgactggattgggctgtgctgctctggagacaagggagaggaggatgtcaggtggtga

SEQ ID NO: 317431 - DNA, 292 bp, Homo sapiens
  chr13:111278426-111278718
  hypo
tgcagggctgggccccacagggtgtggggctgctgtcagggctgtggctctggccctgagtaagcagggcagggccagtgtgggtcataaaggctcctacgcggctgtggggctgggccggaggctgtggtaaggacctgtgggagggaagggtgcagtcagatggtgagaggggccggattctgggtatgtttggaaagtttgggggtggaatttgccgacagattggattggaaaaggcaaggggcacagactccaccaagggttttggtctgagcgagtggtcactcca

SEQ ID NO: 317432 - DNA, 186 bp, Homo sapiens; identical to SEQ ID NO: 266191
  chr13:111279860-111280046
  hypo

SEQ ID NO: 317433 - DNA, 189 bp, Homo sapiens; identical to SEQ ID NO: 266192
  chr13:111280869-111281058
  hypo

SEQ ID NO: 317434 - DNA, 174 bp, Homo sapiens; identical to SEQ ID NO: 215576
  chr13:111288424-111288598
  hypo

SEQ ID NO: 317435 - DNA, 141 bp, Homo sapiens; identical to SEQ ID NO: 215577
  chr13:111289026-111289167
  hypo

SEQ ID NO: 317436 - DNA, 282 bp, Homo sapiens; identical to SEQ ID NO: 215578
  chr13:111290653-111290935
  hypo

SEQ ID NO: 317437 - DNA, 226 bp, Homo sapiens; identical to SEQ ID NO: 215579
  chr13:111294870-111295096
  hypo

SEQ ID NO: 317438 - DNA, 194 bp, Homo sapiens; identical to SEQ ID NO: 266197
  chr13:111295806-111296000
  hypo

SEQ ID NO: 317439 - DNA, 199 bp, Homo sapiens; identical to SEQ ID NO: 215580
  chr13:111301303-111301502
  hypo

SEQ ID NO: 317440 - DNA, 289 bp, Homo sapiens; identical to SEQ ID NO: 215581
  chr13:111305194-111305483
  hypo

SEQ ID NO: 317441 - DNA, 587 bp, Homo sapiens; identical to SEQ ID NO: 215582
  chr13:111305920-111306507
  hypo

SEQ ID NO: 317442 - DNA, 289 bp, Homo sapiens; identical to SEQ ID NO: 215583
  chr13:111330263-111330552
  hypo

SEQ ID NO: 317443 - DNA, 195 bp, Homo sapiens; identical to SEQ ID NO: 266202
  chr13:111334624-111334819
  hypo

SEQ ID NO: 317444 - DNA, 112 bp, Homo sapiens
  chr13:111337780-111337892
  hypo
ctccaagtaggacccaggaaggacaggaacgtccagggcagtgcttcatgctttctgactcattgcaacaaacattcaatacctacgtatcttcagccgtcggctggatact

SEQ ID NO: 317445 - DNA, 37 bp, Homo sapiens; identical to SEQ ID NO: 266204
  chr13:111363566-111363603
  hypo

SEQ ID NO: 317446 - DNA, 37 bp, Homo sapiens; identical to SEQ ID NO: 215584
  chr13:111363843-111363880
  hypo

SEQ ID NO: 317447 - DNA, 117 bp, Homo sapiens; identical to SEQ ID NO: 215585
  chr13:111363972-111364089
  hypo

SEQ ID NO: 317448 - DNA, 79 bp, Homo sapiens; identical to SEQ ID NO: 266206
  chr13:111589026-111589105
  hypo

SEQ ID NO: 317449 - DNA, 355 bp, Homo sapiens; identical to SEQ ID NO: 215586
  chr13:111682505-111682860
  hypo

SEQ ID NO: 317450 - DNA, 47 bp, Homo sapiens; identical to SEQ ID NO: 266208
  chr13:111738321-111738368
  hypo

SEQ ID NO: 317451 - DNA, 102 bp, Homo sapiens; identical to SEQ ID NO: 266209
  chr13:111747877-111747979
  hypo

SEQ ID NO: 317452 - DNA, 167 bp, Homo sapiens; identical to SEQ ID NO: 266210
  chr13:111773929-111774096
  hypo

SEQ ID NO: 317453 - DNA, 1049 bp, Homo sapiens; identical to SEQ ID NO: 266211
  chr13:111880805-111881854
  hypo

SEQ ID NO: 317454 - DNA, 137 bp, Homo sapiens; identical to SEQ ID NO: 266212
  chr13:111884809-111884946
  hypo

SEQ ID NO: 317455 - DNA, 102 bp, Homo sapiens; identical to SEQ ID NO: 266214
  chr13:111911430-111911532
  hypo

SEQ ID NO: 317456 - DNA, 101 bp, Homo sapiens
  chr13:111932740-111932841
  hypo
aggcagcttgtccccgcgtgcagattcttgcttgcgtatttcagaaggtggtgtttaagcgctgagtggaattctggggggtgtgcacgcacgtgcttttt

SEQ ID NO: 317457 - DNA, 109 bp, Homo sapiens
  chr13:111932871-111932980
  hypo
ttctctcctatagggagcatgattgagcggatattagtgtcgtgcaacaaccagcaggatctgcaggaatgggtggagcacctacagaagcaaacgaaggtcacgtctg

SEQ ID NO: 317458 - DNA, 253 bp, Homo sapiens; identical to SEQ ID NO: 215589
  chr13:111935987-111936240
  hypo

SEQ ID NO: 317459 - DNA, 150 bp, Homo sapiens; identical to SEQ ID NO: 266218
  chr13:111937757-111937907
  hypo

SEQ ID NO: 317460 - DNA, 105 bp, Homo sapiens; identical to SEQ ID NO: 215590
  chr13:111940174-111940279
  hypo

SEQ ID NO: 317461 - DNA, 42 bp, Homo sapiens; identical to SEQ ID NO: 266220
  chr13:111943424-111943466
  hypo

SEQ ID NO: 317462 - DNA, 101 bp, Homo sapiens; identical to SEQ ID NO: 215591
  chr13:111967886-111967987
  hypo

SEQ ID NO: 317463 - DNA, 98 bp, Homo sapiens; identical to SEQ ID NO: 266222
  chr13:111978024-111978122
  hypo

SEQ ID NO: 317464 - DNA, 32 bp, Homo sapiens; identical to SEQ ID NO: 266223
  chr13:111980235-111980267
  hypo

SEQ ID NO: 317465 - DNA, 186 bp, Homo sapiens; identical to SEQ ID NO: 215592
  chr13:111980478-111980664
  hypo

SEQ ID NO: 317466 - DNA, 200 bp, Homo sapiens; identical to SEQ ID NO: 266226
  chr13:112022971-112023171
  hypo

SEQ ID NO: 317467 - DNA, 56 bp, Homo sapiens; identical to SEQ ID NO: 215593
  chr13:112051223-112051279
  hypo

SEQ ID NO: 317468 - DNA, 111 bp, Homo sapiens
  chr13:112062637-112062748
  hypo
ccagggccctccgccgcaccgcgcaggtgcggggcaggcacatccgcctccgggcccctgggctattgtttgctggtacagactttttttccactttaaaattgtgaagat

SEQ ID NO: 317469 - DNA, 68 bp, Homo sapiens
  chr13:112062778-112062846
  hypo
ctccacagagcccgagtcaagtccaacgacgaccaccctgacagctcttggcgcgcagcgtggggtgt

SEQ ID NO: 317470 - DNA, 81 bp, Homo sapiens; identical to SEQ ID NO: 266229
  chr13:112170646-112170727
  hypo

SEQ ID NO: 317471 - DNA, 651 bp, Homo sapiens; identical to SEQ ID NO: 215594
  chr13:112199983-112200634
  hypo

SEQ ID NO: 317472 - DNA, 85 bp, Homo sapiens; identical to SEQ ID NO: 215595
  chr13:112200906-112200991
  hypo

SEQ ID NO: 317473 - DNA, 198 bp, Homo sapiens; identical to SEQ ID NO: 266232
  chr13:112274814-112275012
  hypo

SEQ ID NO: 317474 - DNA, 282 bp, Homo sapiens; identical to SEQ ID NO: 266233
  chr13:112275480-112275762
  hypo

SEQ ID NO: 317475 - DNA, 122 bp, Homo sapiens; identical to SEQ ID NO: 266234
  chr13:112297655-112297777
  hypo

SEQ ID NO: 317476 - DNA, 106 bp, Homo sapiens
  chr13:112320937-112321043
  hypo
ttgaccgagcatccgctgaggggtaaagcgcctgcggacgctatttcccatcagattttgtgcttcctgtgagcgggtgcctcagctctcaccgtgcaggcgcgga

SEQ ID NO: 317477 - DNA, 247 bp, Homo sapiens
  chr13:112321075-112321322
  hypo
cacaggccacacccgcgggctccagcccaggcccgcccctgcacaccgaatgcggtgaccttgtggctatttgggcgaatttgaggggactgacagcctctttcatgcaaaggggccattggctcagggagattgtgaacgggacccccggctccaactatagaggggcgagggaggcgtctaatacgagccagcggaagtccccacagtgaagacgctcatccccggagaactgggaagggaccct

SEQ ID NO: 317478 - DNA, 304 bp, Homo sapiens; identical to SEQ ID NO: 266236
  chr13:112321606-112321910
  hypo

SEQ ID NO: 317479 - DNA, 179 bp, Homo sapiens; identical to SEQ ID NO: 266238
  chr13:112334238-112334417
  hypo

SEQ ID NO: 317480 - DNA, 87 bp, Homo sapiens; identical to SEQ ID NO: 266239
  chr13:112336761-112336848
  hypo

SEQ ID NO: 317481 - DNA, 231 bp, Homo sapiens
  chr13:112559742-112559973
  hypo
ctgcgtccccgcccccttccgcgtccccgcccccttccgcgtccccgcccccttccgcgtccccgcccccttctgcgtccccgcccccttccgcgtccccgccccctccaccctcagtgactgtcactttctctctcaagctgccctctcacgcctgtgtgccagtgaaggcagggtcagagctctgctcacagctctgacacttcagtggcttcacgtgacacaagtttt

SEQ ID NO: 317482 - DNA, 50 bp, Homo sapiens; identical to SEQ ID NO: 215597
  chr13:112573544-112573594
  hypo

SEQ ID NO: 317483 - DNA, 433 bp, Homo sapiens; identical to SEQ ID NO: 266242
  chr13:112610839-112611272
  hypo

SEQ ID NO: 317484 - DNA, 197 bp, Homo sapiens; identical to SEQ ID NO: 266243
  chr13:112611302-112611499
  hypo

SEQ ID NO: 317485 - DNA, 45 bp, Homo sapiens; identical to SEQ ID NO: 215598
  chr13:112618854-112618899
  hypo

SEQ ID NO: 317486 - DNA, 149 bp, Homo sapiens; identical to SEQ ID NO: 215599
  chr13:112618980-112619129
  hypo

SEQ ID NO: 317487 - DNA, 121 bp, Homo sapiens; identical to SEQ ID NO: 266245
  chr13:112620245-112620366
  hypo

SEQ ID NO: 317488 - DNA, 82 bp, Homo sapiens; identical to SEQ ID NO: 266246
  chr13:112625061-112625143
  hypo

SEQ ID NO: 317489 - DNA, 174 bp, Homo sapiens; identical to SEQ ID NO: 266247
  chr13:112668109-112668283
  hypo

SEQ ID NO: 317490 - DNA, 91 bp, Homo sapiens
  chr13:112679894-112679985
  hypo
tccatgttcttggatgacaccggcaaaagtgctggggcaaggggccctgattccatggtttgctctcagacgggttagcaagcagtggatc

SEQ ID NO: 317491 - DNA, 90 bp, Homo sapiens; identical to SEQ ID NO: 266249
  chr13:112682967-112683057
  hypo

SEQ ID NO: 317492 - DNA, 85 bp, Homo sapiens; identical to SEQ ID NO: 215600
  chr13:112690651-112690736
  hypo

SEQ ID NO: 317493 - DNA, 225 bp, Homo sapiens; identical to SEQ ID NO: 215601
  chr13:112691506-112691731
  hypo

SEQ ID NO: 317494 - DNA, 247 bp, Homo sapiens; identical to SEQ ID NO: 289927
  chr13:112722597-112722844
  hypo

SEQ ID NO: 317495 - DNA, 100 bp, Homo sapiens; identical to SEQ ID NO: 289928
  chr13:112728350-112728450
  hypo

SEQ ID NO: 317496 - DNA, 182 bp, Homo sapiens; identical to SEQ ID NO: 266252
  chr13:112786386-112786568
  hypo

SEQ ID NO: 317497 - DNA, 53 bp, Homo sapiens; identical to SEQ ID NO: 266253
  chr13:112804754-112804807
  hypo

SEQ ID NO: 317498 - DNA, 114 bp, Homo sapiens; identical to SEQ ID NO: 266254
  chr13:112804837-112804951
  hypo

SEQ ID NO: 317499 - DNA, 62 bp, Homo sapiens
  chr13:112805011-112805073
  hypo
agcacacacacgcgcacagcaagcacacacacgcgcacacacccccacggcaagcacacaca

SEQ ID NO: 317500 - DNA, 45 bp, Homo sapiens
  chr13:112805103-112805148
  hypo
ccacggcaagcacacacaccccccggcaagcacacacacacaccc

SEQ ID NO: 317501 - DNA, 63 bp, Homo sapiens; identical to SEQ ID NO: 266256
  chr13:112841713-112841776
  hypo

SEQ ID NO: 317502 - DNA, 216 bp, Homo sapiens; identical to SEQ ID NO: 266257
  chr13:112882621-112882837
  hypo

SEQ ID NO: 317503 - DNA, 478 bp, Homo sapiens; identical to SEQ ID NO: 266258
  chr13:112885758-112886236
  hypo

SEQ ID NO: 317504 - DNA, 150 bp, Homo sapiens; identical to SEQ ID NO: 266259
  chr13:112887634-112887784
  hypo

SEQ ID NO: 317505 - DNA, 52 bp, Homo sapiens; identical to SEQ ID NO: 266260
  chr13:112887814-112887866
  hypo

SEQ ID NO: 317506 - DNA, 147 bp, Homo sapiens; identical to SEQ ID NO: 266261
  chr13:112901218-112901365
  hypo

SEQ ID NO: 317507 - DNA, 152 bp, Homo sapiens; identical to SEQ ID NO: 266262
  chr13:112904339-112904491
  hypo

SEQ ID NO: 317508 - DNA, 249 bp, Homo sapiens; identical to SEQ ID NO: 266263
  chr13:112906488-112906737
  hypo

SEQ ID NO: 317509 - DNA, 52 bp, Homo sapiens; identical to SEQ ID NO: 215602
  chr13:112998006-112998058
  hypo

SEQ ID NO: 317510 - DNA, 33 bp, Homo sapiens; identical to SEQ ID NO: 215603
  chr13:112998135-112998168
  hypo

SEQ ID NO: 317511 - DNA, 45 bp, Homo sapiens; identical to SEQ ID NO: 266266
  chr13:113008186-113008231
  hypo

SEQ ID NO: 317512 - DNA, 52 bp, Homo sapiens; identical to SEQ ID NO: 266267
  chr13:113086508-113086560
  hypo

SEQ ID NO: 317513 - DNA, 461 bp, Homo sapiens; identical to SEQ ID NO: 215604
  chr13:113098820-113099281
  hypo

SEQ ID NO: 317514 - DNA, 124 bp, Homo sapiens; identical to SEQ ID NO: 215605
  chr13:113099323-113099447
  hypo

SEQ ID NO: 317515 - DNA, 146 bp, Homo sapiens; identical to SEQ ID NO: 266270
  chr13:113108782-113108928
  hypo

SEQ ID NO: 317516 - DNA, 42 bp, Homo sapiens; identical to SEQ ID NO: 266271
  chr13:113111904-113111946
  hypo

SEQ ID NO: 317517 - DNA, 106 bp, Homo sapiens; identical to SEQ ID NO: 266272
  chr13:113120931-113121037
  hypo

SEQ ID NO: 317518 - DNA, 55 bp, Homo sapiens; identical to SEQ ID NO: 266273
  chr13:113121067-113121122
  hypo

SEQ ID NO: 317519 - DNA, 122 bp, Homo sapiens; identical to SEQ ID NO: 266274
  chr13:113163202-113163324
  hypo

SEQ ID NO: 317520 - DNA, 40 bp, Homo sapiens; identical to SEQ ID NO: 266275
  chr13:113174159-113174199
  hypo

SEQ ID NO: 317521 - DNA, 211 bp, Homo sapiens; identical to SEQ ID NO: 266276
  chr13:113233673-113233884
  hypo

SEQ ID NO: 317522 - DNA, 146 bp, Homo sapiens; identical to SEQ ID NO: 215606
  chr13:113244576-113244722
  hypo

SEQ ID NO: 317523 - DNA, 232 bp, Homo sapiens; identical to SEQ ID NO: 266278
  chr13:113255706-113255938
  hypo

SEQ ID NO: 317524 - DNA, 35 bp, Homo sapiens; identical to SEQ ID NO: 224653
  chr13:113261127-113261162
  hypo

SEQ ID NO: 317525 - DNA, 206 bp, Homo sapiens; identical to SEQ ID NO: 266279
  chr13:113274714-113274920
  hypo

SEQ ID NO: 317526 - DNA, 310 bp, Homo sapiens; identical to SEQ ID NO: 215607
  chr13:113291492-113291802
  hypo

SEQ ID NO: 317527 - DNA, 67 bp, Homo sapiens; identical to SEQ ID NO: 266281
  chr13:113301705-113301772
  hypo

SEQ ID NO: 317528 - DNA, 241 bp, Homo sapiens; identical to SEQ ID NO: 266282
  chr13:113312401-113312642
  hypo

SEQ ID NO: 317529 - DNA, 98 bp, Homo sapiens; identical to SEQ ID NO: 266283
  chr13:113342679-113342777
  hypo

SEQ ID NO: 317530 - DNA, 176 bp, Homo sapiens; identical to SEQ ID NO: 215608
  chr13:113346804-113346980
  hypo

SEQ ID NO: 317531 - DNA, 506 bp, Homo sapiens; identical to SEQ ID NO: 266285
  chr13:113347507-113348013
  hypo

SEQ ID NO: 317532 - DNA, 43 bp, Homo sapiens; identical to SEQ ID NO: 215610
  chr13:113350355-113350398
  hypo

SEQ ID NO: 317533 - DNA, 1097 bp, Homo sapiens
  chr13:113350643-113351740
  hypo
gtggagagtgggtgaccttgccctgctctcccggggagagcggtggtcactggtgggaacgcccctgccacgcccagcagcctttctgcctctgcgcttgcctcctccggttggagcgagtgacccgttctgccgaagtccagtcccgtgtgtgctgcggccccgtctctctccctctctgagtgacactgtctgccctgctgcttgccgtcccgctgttggcaccgctttagaccccatatttcccagcggtcaccgtgctcatttttggcttccagctaccgtttttcttaggttaccccgcgtagctggcccgtccttccttctcctgtctcttctgtgcctaccgcggggggttcccttaccaaggtctccatcacccccaggcccacctccctcgggcccctctctgcccttgccctccacctcagcgactccgtggggcttttgtgatcccagctgcagttagcgagcgcccctgtgtgctcagagacacgccagtgagccgggaaggacagagacccaagtcccatccctctggggcccccttggaatgggggaggcgaacaggaaaccaccacagtgagtgttggggtgccccgcaggcgacggtgctgagaaaaagagagtggggttgggggcagtgcgtgcgcaggctggcgggtgggcgaggcgggtggaggatgcgtggggcgcagtgcttgcgcgcagtgggtggcggggtggacgaggtgagggcctggccaggtgggtgcctgcgtgtccagcctgaggggcggcccacgcagcagcctctgggagccctggggccttccgtgggctgcttcctgtggcgtcctgcgggctggccgcccctcggtgggctccggtgctggcctctgccttccccagggccacggtgggctcctagtggcctttcttccctctccatcaacatccttgtcccaggaagaggcgtccactgcctgctacacgccacccagccgtgttcatttccgtgttccagtgtcacccgtgtgcctagaacgttcctggcacagaaaagccacgcagaaaacagctgctgggccaacaccgagaccccaggtcattagtgt

SEQ ID NO: 317534 - DNA, 523 bp, Homo sapiens; identical to SEQ ID NO: 266287
  chr13:113356666-113357189
  hypo

SEQ ID NO: 317535 - DNA, 337 bp, Homo sapiens; identical to SEQ ID NO: 266288
  chr13:113358329-113358666
  hypo

SEQ ID NO: 317536 - DNA, 387 bp, Homo sapiens; identical to SEQ ID NO: 266289
  chr13:113364153-113364540
  hypo

SEQ ID NO: 317537 - DNA, 266 bp, Homo sapiens; identical to SEQ ID NO: 266290
  chr13:113366788-113367054
  hypo

SEQ ID NO: 317538 - DNA, 241 bp, Homo sapiens; identical to SEQ ID NO: 266291
  chr13:113368823-113369064
  hypo

SEQ ID NO: 317539 - DNA, 178 bp, Homo sapiens; identical to SEQ ID NO: 215613
  chr13:113369394-113369572
  hypo

SEQ ID NO: 317540 - DNA, 370 bp, Homo sapiens; identical to SEQ ID NO: 266293
  chr13:113371106-113371476
  hypo

SEQ ID NO: 317541 - DNA, 125 bp, Homo sapiens; identical to SEQ ID NO: 266294
  chr13:113375330-113375455
  hypo

SEQ ID NO: 317542 - DNA, 292 bp, Homo sapiens; identical to SEQ ID NO: 215614
  chr13:113379234-113379526
  hypo

SEQ ID NO: 317543 - DNA, 90 bp, Homo sapiens; identical to SEQ ID NO: 266296
  chr13:113382140-113382230
  hypo

SEQ ID NO: 317544 - DNA, 249 bp, Homo sapiens; identical to SEQ ID NO: 266297
  chr13:113382654-113382903
  hypo

SEQ ID NO: 317545 - DNA, 317 bp, Homo sapiens; identical to SEQ ID NO: 266298
  chr13:113383514-113383831
  hypo

SEQ ID NO: 317546 - DNA, 205 bp, Homo sapiens; identical to SEQ ID NO: 266299
  chr13:113391636-113391841
  hypo

SEQ ID NO: 317547 - DNA, 110 bp, Homo sapiens; identical to SEQ ID NO: 215616
  chr13:113396992-113397102
  hypo

SEQ ID NO: 317548 - DNA, 391 bp, Homo sapiens; identical to SEQ ID NO: 215617
  chr13:113398309-113398700
  hypo

SEQ ID NO: 317549 - DNA, 253 bp, Homo sapiens; identical to SEQ ID NO: 215618
  chr13:113400147-113400400
  hypo

SEQ ID NO: 317550 - DNA, 150 bp, Homo sapiens; identical to SEQ ID NO: 215619
  chr13:113400733-113400883
  hypo

SEQ ID NO: 317551 - DNA, 113 bp, Homo sapiens
  chr13:113401317-113401430
  hypo
aacttcctaagtggtactgacgtgtggccggggtgaaaacctctggcctaggtatggaacaggtagagggtgttaccgagatgatgagtaggagtgttcagaaggtggtaggg

SEQ ID NO: 317552 - DNA, 121 bp, Homo sapiens; identical to SEQ ID NO: 215621
  chr13:113401469-113401590
  hypo

SEQ ID NO: 317553 - DNA, 67 bp, Homo sapiens; identical to SEQ ID NO: 266304
  chr13:113411148-113411215
  hypo

SEQ ID NO: 317554 - DNA, 117 bp, Homo sapiens; identical to SEQ ID NO: 266305
  chr13:113413671-113413788
  hypo

SEQ ID NO: 317555 - DNA, 111 bp, Homo sapiens; identical to SEQ ID NO: 215622
  chr13:113417108-113417219
  hypo

SEQ ID NO: 317556 - DNA, 982 bp, Homo sapiens; identical to SEQ ID NO: 266307
  chr13:113419198-113420180
  hypo

SEQ ID NO: 317557 - DNA, 153 bp, Homo sapiens; identical to SEQ ID NO: 215624
  chr13:113424730-113424883
  hypo

SEQ ID NO: 317558 - DNA, 89 bp, Homo sapiens; identical to SEQ ID NO: 215625
  chr13:113424935-113425024
  hypo

SEQ ID NO: 317559 - DNA, 539 bp, Homo sapiens; identical to SEQ ID NO: 215626
  chr13:113425234-113425773
  hypo

SEQ ID NO: 317560 - DNA, 76 bp, Homo sapiens; identical to SEQ ID NO: 174452
  chr13:113426593-113426669
  hypo

SEQ ID NO: 317561 - DNA, 92 bp, Homo sapiens; identical to SEQ ID NO: 266311
  chr13:113426947-113427039
  hypo

SEQ ID NO: 317562 - DNA, 132 bp, Homo sapiens; identical to SEQ ID NO: 266312
  chr13:113428311-113428443
  hypo

SEQ ID NO: 317563 - DNA, 105 bp, Homo sapiens; identical to SEQ ID NO: 266313
  chr13:113435265-113435370
  hypo

SEQ ID NO: 317564 - DNA, 243 bp, Homo sapiens; identical to SEQ ID NO: 266314
  chr13:113445467-113445710
  hypo

SEQ ID NO: 317565 - DNA, 190 bp, Homo sapiens; identical to SEQ ID NO: 215628
  chr13:113446210-113446400
  hypo

SEQ ID NO: 317566 - DNA, 200 bp, Homo sapiens; identical to SEQ ID NO: 215629
  chr13:113461153-113461353
  hypo

SEQ ID NO: 317567 - DNA, 439 bp, Homo sapiens; identical to SEQ ID NO: 215630
  chr13:113461413-113461852
  hypo

SEQ ID NO: 317568 - DNA, 244 bp, Homo sapiens; identical to SEQ ID NO: 266318
  chr13:113466631-113466875
  hypo

SEQ ID NO: 317569 - DNA, 111 bp, Homo sapiens; identical to SEQ ID NO: 215631
  chr13:113472458-113472569
  hypo

SEQ ID NO: 317570 - DNA, 248 bp, Homo sapiens; identical to SEQ ID NO: 266320
  chr13:113474180-113474428
  hypo

SEQ ID NO: 317571 - DNA, 334 bp, Homo sapiens; identical to SEQ ID NO: 215633
  chr13:113477607-113477941
  hypo

SEQ ID NO: 317572 - DNA, 37 bp, Homo sapiens; identical to SEQ ID NO: 215634
  chr13:113482707-113482744
  hypo

SEQ ID NO: 317573 - DNA, 304 bp, Homo sapiens; identical to SEQ ID NO: 215635
  chr13:113488276-113488580
  hypo

SEQ ID NO: 317574 - DNA, 153 bp, Homo sapiens; identical to SEQ ID NO: 266324
  chr13:113489720-113489873
  hypo

SEQ ID NO: 317575 - DNA, 35 bp, Homo sapiens; identical to SEQ ID NO: 266325
  chr13:113493552-113493587
  hypo

SEQ ID NO: 317576 - DNA, 576 bp, Homo sapiens; identical to SEQ ID NO: 215636
  chr13:113497161-113497737
  hypo

SEQ ID NO: 317577 - DNA, 95 bp, Homo sapiens; identical to SEQ ID NO: 27306
  chr13:113498378-113498473
  hypo

SEQ ID NO: 317578 - DNA, 54 bp, Homo sapiens; identical to SEQ ID NO: 266328
  chr13:113499309-113499363
  hypo

SEQ ID NO: 317579 - DNA, 45 bp, Homo sapiens; identical to SEQ ID NO: 266329
  chr13:113500588-113500633
  hypo

SEQ ID NO: 317580 - DNA, 178 bp, Homo sapiens; identical to SEQ ID NO: 215638
  chr13:113507108-113507286
  hypo

SEQ ID NO: 317581 - DNA, 159 bp, Homo sapiens; identical to SEQ ID NO: 266331
  chr13:113508785-113508944
  hypo

SEQ ID NO: 317582 - DNA, 605 bp, Homo sapiens; identical to SEQ ID NO: 266332
  chr13:113513506-113514111
  hypo

SEQ ID NO: 317583 - DNA, 75 bp, Homo sapiens; identical to SEQ ID NO: 215639
  chr13:113516326-113516401
  hypo

SEQ ID NO: 317584 - DNA, 439 bp, Homo sapiens; identical to SEQ ID NO: 266334
  chr13:113534533-113534972
  hypo

SEQ ID NO: 317585 - DNA, 141 bp, Homo sapiens; identical to SEQ ID NO: 215640
  chr13:113536448-113536589
  hypo

SEQ ID NO: 317586 - DNA, 180 bp, Homo sapiens; identical to SEQ ID NO: 215641
  chr13:113537191-113537371
  hypo

SEQ ID NO: 317587 - DNA, 99 bp, Homo sapiens; identical to SEQ ID NO: 266337
  chr13:113537723-113537822
  hypo

SEQ ID NO: 317588 - DNA, 208 bp, Homo sapiens; identical to SEQ ID NO: 215642
  chr13:113539438-113539646
  hypo

SEQ ID NO: 317589 - DNA, 84 bp, Homo sapiens; identical to SEQ ID NO: 266339
  chr13:113543111-113543195
  hypo

SEQ ID NO: 317590 - DNA, 689 bp, Homo sapiens; identical to SEQ ID NO: 266340
  chr13:113544111-113544800
  hypo

SEQ ID NO: 317591 - DNA, 200 bp, Homo sapiens; identical to SEQ ID NO: 266341
  chr13:113545811-113546011
  hypo

SEQ ID NO: 317592 - DNA, 366 bp, Homo sapiens; identical to SEQ ID NO: 266342
  chr13:113553328-113553694
  hypo

SEQ ID NO: 317593 - DNA, 277 bp, Homo sapiens; identical to SEQ ID NO: 266343
  chr13:113554074-113554351
  hypo

SEQ ID NO: 317594 - DNA, 45 bp, Homo sapiens; identical to SEQ ID NO: 215644
  chr13:113555445-113555490
  hypo

SEQ ID NO: 317595 - DNA, 45 bp, Homo sapiens; identical to SEQ ID NO: 215645
  chr13:113555730-113555775
  hypo

SEQ ID NO: 317596 - DNA, 242 bp, Homo sapiens; identical to SEQ ID NO: 266346
  chr13:113565660-113565902
  hypo

SEQ ID NO: 317597 - DNA, 182 bp, Homo sapiens; identical to SEQ ID NO: 266347
  chr13:113570827-113571009
  hypo

SEQ ID NO: 317598 - DNA, 132 bp, Homo sapiens; identical to SEQ ID NO: 266348
  chr13:113571418-113571550
  hypo

SEQ ID NO: 317599 - DNA, 710 bp, Homo sapiens; identical to SEQ ID NO: 224654
  chr13:113597560-113598270
  hypo

SEQ ID NO: 317600 - DNA, 41 bp, Homo sapiens
  chr13:113598851-113598892
  hypo
aatctgtcagtcctgtcccgctaaacctgaacttttttttt

SEQ ID NO: 317601 - DNA, 31 bp, Homo sapiens; identical to SEQ ID NO: 266350
  chr13:113599072-113599103
  hypo

SEQ ID NO: 317602 - DNA, 184 bp, Homo sapiens; identical to SEQ ID NO: 266351
  chr13:113622064-113622248
  hypo

SEQ ID NO: 317603 - DNA, 341 bp, Homo sapiens; identical to SEQ ID NO: 215648
  chr13:113627845-113628186
  hypo

SEQ ID NO: 317604 - DNA, 118 bp, Homo sapiens; identical to SEQ ID NO: 266353
  chr13:113631096-113631214
  hypo

SEQ ID NO: 317605 - DNA, 92 bp, Homo sapiens; identical to SEQ ID NO: 215649
  chr13:113644356-113644448
  hypo

SEQ ID NO: 317606 - DNA, 61 bp, Homo sapiens; identical to SEQ ID NO: 266356
  chr13:113649447-113649508
  hypo

SEQ ID NO: 317607 - DNA, 287 bp, Homo sapiens; identical to SEQ ID NO: 266357
  chr13:113649731-113650018
  hypo

SEQ ID NO: 317608 - DNA, 100 bp, Homo sapiens; identical to SEQ ID NO: 266358
  chr13:113650921-113651021
  hypo

SEQ ID NO: 317609 - DNA, 38 bp, Homo sapiens; identical to SEQ ID NO: 266359
  chr13:113654369-113654407
  hypo

SEQ ID NO: 317610 - DNA, 119 bp, Homo sapiens; identical to SEQ ID NO: 266360
  chr13:113661971-113662090
  hypo

SEQ ID NO: 317611 - DNA, 196 bp, Homo sapiens; identical to SEQ ID NO: 215650
  chr13:113663192-113663388
  hypo

SEQ ID NO: 317612 - DNA, 36 bp, Homo sapiens; identical to SEQ ID NO: 266362
  chr13:113666831-113666867
  hypo

SEQ ID NO: 317613 - DNA, 301 bp, Homo sapiens; identical to SEQ ID NO: 266363
  chr13:113667315-113667616
  hypo

SEQ ID NO: 317614 - DNA, 187 bp, Homo sapiens; identical to SEQ ID NO: 266364
  chr13:113672313-113672500
  hypo

SEQ ID NO: 317615 - DNA, 36 bp, Homo sapiens; identical to SEQ ID NO: 266365
  chr13:113684751-113684787
  hypo

SEQ ID NO: 317616 - DNA, 67 bp, Homo sapiens; identical to SEQ ID NO: 266366
  chr13:113696468-113696535
  hypo

SEQ ID NO: 317617 - DNA, 140 bp, Homo sapiens; identical to SEQ ID NO: 266367
  chr13:113696849-113696989
  hypo

SEQ ID NO: 317618 - DNA, 309 bp, Homo sapiens; identical to SEQ ID NO: 266368
  chr13:113700864-113701173
  hypo

SEQ ID NO: 317619 - DNA, 182 bp, Homo sapiens; identical to SEQ ID NO: 266369
  chr13:113703693-113703875
  hypo

SEQ ID NO: 317620 - DNA, 62 bp, Homo sapiens; identical to SEQ ID NO: 215651
  chr13:113718439-113718501
  hypo

SEQ ID NO: 317621 - DNA, 115 bp, Homo sapiens
  chr13:113718649-113718764
  hypo
cggttacatcgataagtcgcagctgaccgaggacctgggtgggaccctggactactgccactcccggtggctgtgccagcgcacggtgagccgcgtcggggccagcggggctggc

SEQ ID NO: 317622 - DNA, 62 bp, Homo sapiens; identical to SEQ ID NO: 215652
  chr13:113719023-113719085
  hypo

SEQ ID NO: 317623 - DNA, 786 bp, Homo sapiens
  chr13:113719189-113719975
  hypo
gggcagcaggaggtgggtgcagtgcacaaggcatgcaattgtgttttctctgtccccaaggccatcgaaagtttcgccctcatggtgaagcagacggctcagatgctgcagtccttcgggaccgagctggctgaaacagagctgcccaatgacgtccagtcgacaagctcagtgctgtgtgcgcacacagagaagaaggacaaggcgaaggtacatggggggtgctccggctggaagctgtggggggctccggtcagtcagaagctgcgcggggctccggtcggaagctgcggggggtctttcgtcccagcgggagtttgtgtcagcagcacgtaagaccaagaagtcagcaggcttgagatgccttttgatggcaattagctcggcaacctctccgacgagaacggaataaaaggagtgtaaatgaaccctgtagattgctggctgcgcctgccattctggcgttgggtcaaccattggccctgggtggccgtggcttcaggagtgggaccaggggtggctcctctcaggagcacttttggctgtctgtgcggggagctcccgaatagacatctcttgcttctgagtgtgaccgagacaggatgtctgtgccggtttctcatgccgagcaggcgatgaagtggcggttggaattcctgtttgcagaacactcccagtgctcacgtgtccacagcgcttgctggaacaaacgtattctgaggagcacgtgctccctgctctgtgctgcccctggcccaccggcacgctgctggctttgcagcaatg

SEQ ID NO: 317624 - DNA, 143 bp, Homo sapiens; identical to SEQ ID NO: 266372
  chr13:113724281-113724424
  hypo

SEQ ID NO: 317625 - DNA, 110 bp, Homo sapiens; identical to SEQ ID NO: 215654
  chr13:113731262-113731372
  hypo

SEQ ID NO: 317626 - DNA, 96 bp, Homo sapiens; identical to SEQ ID NO: 266374
  chr13:113739496-113739592
  hypo

SEQ ID NO: 317627 - DNA, 220 bp, Homo sapiens
  chr13:113776046-113776266
  hypo
tggcgttggcatccagcatcatcagtttgtgcagtcgggtggggctcagtgagtgcctcctgtgtgccaggcacaatgacgcacaatgtgtgcacaccaggctcatgtgcaggtggctgcgagacagggcgacccatcaaggcagatgcaccatgaggcagtggccagtgctgtgggtgttaggggcattgctccccggccactacggcatagcaggcag

SEQ ID NO: 317628 - DNA, 263 bp, Homo sapiens; identical to SEQ ID NO: 215655
  chr13:113796035-113796298
  hypo

SEQ ID NO: 317629 - DNA, 197 bp, Homo sapiens; identical to SEQ ID NO: 215656
  chr13:113797733-113797930
  hypo

SEQ ID NO: 317630 - DNA, 133 bp, Homo sapiens; identical to SEQ ID NO: 215657
  chr13:113797960-113798093
  hypo

SEQ ID NO: 317631 - DNA, 134 bp, Homo sapiens
  chr13:113825828-113825962
  hypo
ctccctgagaagctcgtttgagcattatgtccccttgaaaatcagactgtaaagaactgacgattgttcatgatttcagattttaacagaacgagccaagacccgctgatgatcaagataacgcacgtccatgt

SEQ ID NO: 317632 - DNA, 187 bp, Homo sapiens; identical to SEQ ID NO: 215659
  chr13:113825992-113826179
  hypo

SEQ ID NO: 317633 - DNA, 103 bp, Homo sapiens; identical to SEQ ID NO: 266379
  chr13:113866200-113866303
  hypo

SEQ ID NO: 317634 - DNA, 243 bp, Homo sapiens; identical to SEQ ID NO: 266380
  chr13:113884095-113884338
  hypo

SEQ ID NO: 317635 - DNA, 115 bp, Homo sapiens; identical to SEQ ID NO: 215661
  chr13:113887569-113887684
  hypo

SEQ ID NO: 317636 - DNA, 115 bp, Homo sapiens; identical to SEQ ID NO: 215662
  chr13:113887885-113888000
  hypo

SEQ ID NO: 317637 - DNA, 87 bp, Homo sapiens; identical to SEQ ID NO: 203465
  chr13:113951225-113951312
  hypo

SEQ ID NO: 317638 - DNA, 31 bp, Homo sapiens; identical to SEQ ID NO: 215664
  chr13:113953158-113953189
  hypo

SEQ ID NO: 317639 - DNA, 290 bp, Homo sapiens; identical to SEQ ID NO: 266384
  chr13:113980176-113980466
  hypo

SEQ ID NO: 317640 - DNA, 258 bp, Homo sapiens; identical to SEQ ID NO: 266385
  chr13:113983361-113983619
  hypo

SEQ ID NO: 317641 - DNA, 59 bp, Homo sapiens
  chr13:113984300-113984359
  hypo
tgggagcccgggtgcgtgcatgggagcccaggtgcgtacatggaaacccaggtgcctgc

SEQ ID NO: 317642 - DNA, 100 bp, Homo sapiens
  chr13:113984409-113984509
  hypo
gggtgtgtgcatggaaacccgggtgtgtgcatggaaacccaggagtgtgcatggaaactcaggtgcgtgcatgggagcccaggtgcgtggatggaaaccc

SEQ ID NO: 317643 - DNA, 46 bp, Homo sapiens; identical to SEQ ID NO: 215665
  chr13:113985423-113985469
  hypo

SEQ ID NO: 317644 - DNA, 37 bp, Homo sapiens; identical to SEQ ID NO: 266389
  chr13:113990086-113990123
  hypo

SEQ ID NO: 317645 - DNA, 83 bp, Homo sapiens; identical to SEQ ID NO: 266390
  chr13:114002279-114002362
  hypo

SEQ ID NO: 317646 - DNA, 97 bp, Homo sapiens; identical to SEQ ID NO: 266391
  chr13:114003076-114003173
  hypo

SEQ ID NO: 317647 - DNA, 346 bp, Homo sapiens; identical to SEQ ID NO: 266392
  chr13:114004199-114004545
  hypo

SEQ ID NO: 317648 - DNA, 362 bp, Homo sapiens; identical to SEQ ID NO: 266393
  chr13:114004970-114005332
  hypo

SEQ ID NO: 317649 - DNA, 297 bp, Homo sapiens; identical to SEQ ID NO: 266394
  chr13:114009498-114009795
  hypo

SEQ ID NO: 317650 - DNA, 228 bp, Homo sapiens; identical to SEQ ID NO: 203467
  chr13:114017991-114018219
  hypo

SEQ ID NO: 317651 - DNA, 84 bp, Homo sapiens; identical to SEQ ID NO: 266395
  chr13:114032122-114032206
  hypo

SEQ ID NO: 317652 - DNA, 299 bp, Homo sapiens; identical to SEQ ID NO: 215670
  chr13:114055641-114055940
  hypo

SEQ ID NO: 317653 - DNA, 357 bp, Homo sapiens
  chr13:114056151-114056508
  hypo
gccactggcgtctgccgggatggaccttccctggaaggagagacctcagccccgcgtgggtaggacgcgcctgctgaacgccctctcagggccgacactggaaaacaccttcctctaaaggaacatccgagtcagaaaacaggtgctcgcagcaggcaccaaagcgcctttgcgaacgcttagggctgtttcaggaaaccgctcagtagcaaaggcagaagatgccaagacaccttcaaaaagcaggaattaactttccacagggagggcaccaccaaaaacaagggtgcggggctgtagggcgacaggctgcatcggttcacgctgaaaatccagctgctccggggccactcaggc

SEQ ID NO: 317654 - DNA, 53 bp, Homo sapiens
  chr13:114056544-114056597
  hypo
accgagtggcctgggacgatggatcgcgacacggaggtgcatggctccatcat

SEQ ID NO: 317655 - DNA, 220 bp, Homo sapiens; identical to SEQ ID NO: 266399
  chr13:114063699-114063919
  hypo

SEQ ID NO: 317656 - DNA, 171 bp, Homo sapiens
  chr13:114064570-114064741
  hypo
tcgcccccaaaccccggtgggcatcagtggatcaagaggccttgctgagacccggattttggggccgcaccaccaacgcctctgatccacggtctggggaggggcctgggaatctgcattttaacgagtccctggtgattccgaggccgctggtccggggaccccactcgg

SEQ ID NO: 317657 - DNA, 150 bp, Homo sapiens; identical to SEQ ID NO: 266401
  chr13:114065026-114065176
  hypo

SEQ ID NO: 317658 - DNA, 168 bp, Homo sapiens; identical to SEQ ID NO: 266403
  chr13:114077019-114077187
  hypo

SEQ ID NO: 317659 - DNA, 60 bp, Homo sapiens
  chr13:114080529-114080589
  hypo
atcgccttccccgccgtggagccaggaggtgtgcagctgcccagacccgggcccactgcc

SEQ ID NO: 317660 - DNA, 109 bp, Homo sapiens
  chr13:114080619-114080728
  hypo
cccgccacaccccacctcctgctccctggcaccgcgggagccacagagggtgggagccgtgcaggccgctggtggctgtcaggcccaagggacacgtgtgccgatcaca

SEQ ID NO: 317661 - DNA, 227 bp, Homo sapiens
  chr13:114082757-114082984
  hypo
tagacggcaccttccgtggggtggaagaatcttccggaaccgtcacggatttcctagtcccatacctgctgtccctgcctctggccagcctcatggggctcctgagggaagggcccagccctgagctcgcccaaaccggcagaagcagagtttttccagggggcaccacaggtcccactcacatcccagtggctgccagtcgcttggtgccgcgggctggggtggac

SEQ ID NO: 317662 - DNA, 175 bp, Homo sapiens; identical to SEQ ID NO: 215672
  chr13:114085572-114085747
  hypo

SEQ ID NO: 317663 - DNA, 144 bp, Homo sapiens
  chr13:114107396-114107540
  hypo
gccacttttagcagcggtatcaggtaacaccatccgctgaaggaccgcactgccttcaaagctctcggaggcttactgggagaactcgagcagccagtgttccctccagcccgcacaccggagcgcggtgggcccagcctacct

SEQ ID NO: 317664 - DNA, 69 bp, Homo sapiens; identical to SEQ ID NO: 215673
  chr13:114108040-114108109
  hypo

SEQ ID NO: 317665 - DNA, 154 bp, Homo sapiens; identical to SEQ ID NO: 215674
  chr13:114115142-114115296
  hypo

SEQ ID NO: 317666 - DNA, 177 bp, Homo sapiens
  chr13:114123291-114123468
  hypo
ctgtggctgagggcagaggccaccaacagggaagtgcctgggagcagaacaggctgggcgggaaagggacaatggagatggaaaagagagaaaagctgaggaggggggaggagcagtgccagacaatctcagacagcaaagccgacatttctgtctactacacgcctgcacacacac

SEQ ID NO: 317667 - DNA, 206 bp, Homo sapiens; identical to SEQ ID NO: 266410
  chr13:114148519-114148725
  hypo

SEQ ID NO: 317668 - DNA, 109 bp, Homo sapiens; identical to SEQ ID NO: 266411
  chr13:114183220-114183329
  hypo

SEQ ID NO: 317669 - DNA, 60 bp, Homo sapiens; identical to SEQ ID NO: 215676
  chr13:114185957-114186017
  hypo

SEQ ID NO: 317670 - DNA, 52 bp, Homo sapiens; identical to SEQ ID NO: 215677
  chr13:114188351-114188403
  hypo

SEQ ID NO: 317671 - DNA, 85 bp, Homo sapiens; identical to SEQ ID NO: 215678
  chr13:114188957-114189042
  hypo

SEQ ID NO: 317672 - DNA, 66 bp, Homo sapiens; identical to SEQ ID NO: 215679
  chr13:114189671-114189737
  hypo

SEQ ID NO: 317673 - DNA, 303 bp, Homo sapiens; identical to SEQ ID NO: 215680
  chr13:114189809-114190112
  hypo

SEQ ID NO: 317674 - DNA, 281 bp, Homo sapiens; identical to SEQ ID NO: 215681
  chr13:114190142-114190423
  hypo

SEQ ID NO: 317675 - DNA, 139 bp, Homo sapiens; identical to SEQ ID NO: 215682
  chr13:114192725-114192864
  hypo

SEQ ID NO: 317676 - DNA, 191 bp, Homo sapiens; identical to SEQ ID NO: 266418
  chr13:114193076-114193267
  hypo

SEQ ID NO: 317677 - DNA, 149 bp, Homo sapiens; identical to SEQ ID NO: 215683
  chr13:114202335-114202484
  hypo

SEQ ID NO: 317678 - DNA, 300 bp, Homo sapiens; identical to SEQ ID NO: 215684
  chr13:114202514-114202814
  hypo

SEQ ID NO: 317679 - DNA, 104 bp, Homo sapiens; identical to SEQ ID NO: 215685
  chr13:114202853-114202957
  hypo

SEQ ID NO: 317680 - DNA, 76 bp, Homo sapiens; identical to SEQ ID NO: 215686
  chr13:114203747-114203823
  hypo

SEQ ID NO: 317681 - DNA, 94 bp, Homo sapiens
  chr13:114204000-114204094
  hypo
tttacagaatattcttgtcctattttagaattttccggagtagtttatttgcagtctgttgattatgtgcagtagacccgggacactgcgtttt

SEQ ID NO: 317682 - DNA, 296 bp, Homo sapiens; identical to SEQ ID NO: 266421
  chr13:114204953-114205249
  hypo

SEQ ID NO: 317683 - DNA, 31 bp, Homo sapiens; identical to SEQ ID NO: 266423
  chr13:114221386-114221417
  hypo

SEQ ID NO: 317684 - DNA, 50 bp, Homo sapiens; identical to SEQ ID NO: 215688
  chr13:114237564-114237614
  hypo

SEQ ID NO: 317685 - DNA, 164 bp, Homo sapiens; identical to SEQ ID NO: 266425
  chr13:114240860-114241024
  hypo

SEQ ID NO: 317686 - DNA, 42 bp, Homo sapiens; identical to SEQ ID NO: 215689
  chr13:114244325-114244367
  hypo

SEQ ID NO: 317687 - DNA, 145 bp, Homo sapiens; identical to SEQ ID NO: 215690
  chr13:114246191-114246336
  hypo

SEQ ID NO: 317688 - DNA, 850 bp, Homo sapiens; identical to SEQ ID NO: 215691
  chr13:114251689-114252539
  hypo

SEQ ID NO: 317689 - DNA, 85 bp, Homo sapiens; identical to SEQ ID NO: 266429
  chr13:114258210-114258295
  hypo

SEQ ID NO: 317690 - DNA, 159 bp, Homo sapiens; identical to SEQ ID NO: 215692
  chr13:114271765-114271924
  hypo

SEQ ID NO: 317691 - DNA, 101 bp, Homo sapiens; identical to SEQ ID NO: 266431
  chr13:114281663-114281764
  hypo

SEQ ID NO: 317692 - DNA, 114 bp, Homo sapiens; identical to SEQ ID NO: 266432
  chr13:114283432-114283546
  hypo

SEQ ID NO: 317693 - DNA, 944 bp, Homo sapiens; identical to SEQ ID NO: 215693
  chr13:114283925-114284869
  hypo

SEQ ID NO: 317694 - DNA, 725 bp, Homo sapiens; identical to SEQ ID NO: 203469
  chr13:114285627-114286352
  hypo

SEQ ID NO: 317695 - DNA, 41 bp, Homo sapiens; identical to SEQ ID NO: 266436
  chr13:114288213-114288254
  hypo

SEQ ID NO: 317696 - DNA, 100 bp, Homo sapiens; identical to SEQ ID NO: 266437
  chr13:114290175-114290275
  hypo

SEQ ID NO: 317697 - DNA, 157 bp, Homo sapiens; identical to SEQ ID NO: 266438
  chr13:114290658-114290815
  hypo

SEQ ID NO: 317698 - DNA, 174 bp, Homo sapiens; identical to SEQ ID NO: 266439
  chr13:114292581-114292755
  hypo

SEQ ID NO: 317699 - DNA, 692 bp, Homo sapiens; identical to SEQ ID NO: 266440
  chr13:114293925-114294617
  hypo

SEQ ID NO: 317700 - DNA, 56 bp, Homo sapiens; identical to SEQ ID NO: 266441
  chr13:114294962-114295018
  hypo

SEQ ID NO: 317701 - DNA, 150 bp, Homo sapiens; identical to SEQ ID NO: 215696
  chr13:114295752-114295902
  hypo

SEQ ID NO: 317702 - DNA, 42 bp, Homo sapiens; identical to SEQ ID NO: 266443
  chr13:114296440-114296482
  hypo

SEQ ID NO: 317703 - DNA, 250 bp, Homo sapiens; identical to SEQ ID NO: 266444
  chr13:114300500-114300750
  hypo

SEQ ID NO: 317704 - DNA, 253 bp, Homo sapiens; identical to SEQ ID NO: 215697
  chr13:114302352-114302605
  hypo

SEQ ID NO: 317705 - DNA, 161 bp, Homo sapiens; identical to SEQ ID NO: 215698
  chr13:114302635-114302796
  hypo

SEQ ID NO: 317706 - DNA, 297 bp, Homo sapiens; identical to SEQ ID NO: 266447
  chr13:114303498-114303795
  hypo

SEQ ID NO: 317707 - DNA, 43 bp, Homo sapiens; identical to SEQ ID NO: 215700
  chr13:114305093-114305136
  hypo

SEQ ID NO: 317708 - DNA, 184 bp, Homo sapiens
  chr13:114305760-114305944
  hypo
tctggaagccaaacaataagaaaaagccccattgtttcccttgctgggttttacccgccatggtggagctcgctgtggtgatggttcggtgtttacgtctggtttactgggccgacggctgacattcctggagagaaccaggtgggccgtgcccagcatgaaccagcacgaccctgacaagctc

SEQ ID NO: 317709 - DNA, 263 bp, Homo sapiens
  chr13:114318243-114318506
  hypo
tttaccccagagaaatagaaacttctattcacacaaaggcctacacagatgtttatagcagctttatagctaaacactggaaacgatccagccgtccttcaaccggtgaacggcgaaacggactgtggcactctcctctgtggagcacaccacagagacgaggagggaatggctgacacctgggaacagtgctgagtgagaaatgcaggtcctgaaaggctacatagtgtctgactccattcatgtgacgtgcttagagaagt

SEQ ID NO: 317710 - DNA, 118 bp, Homo sapiens; identical to SEQ ID NO: 266452
  chr13:114459436-114459554
  hypo

SEQ ID NO: 317711 - DNA, 357 bp, Homo sapiens; identical to SEQ ID NO: 266453
  chr13:114460623-114460980
  hypo

SEQ ID NO: 317712 - DNA, 57 bp, Homo sapiens
  chr13:114492851-114492908
  hypo
ggactgaccatgtacgtggatgtcctagtgctgaactgaacaggcacgtggacatcc

SEQ ID NO: 317713 - DNA, 142 bp, Homo sapiens
  chr13:114497267-114497409
  hypo
gcgcaggacaggtccgaacagactcaggcttcccctgtccctgtgtagcaccatgtgcccgagccacaggccctccctctgctgttaccgatgggttctgcttgtcactgggacctctttcccgagccgacaactcatccat

SEQ ID NO: 317714 - DNA, 31 bp, Homo sapiens
  chr13:114497439-114497470
  hypo
gggccacagttttcagcggccattcaggagg

SEQ ID NO: 317715 - DNA, 37 bp, Homo sapiens; identical to SEQ ID NO: 215701
  chr13:114497776-114497813
  hypo

SEQ ID NO: 317716 - DNA, 100 bp, Homo sapiens
  chr13:114499969-114500069
  hypo
ctcagcgggtggctgggtgacttgctattctatggcttccagacggtggtttccactgtgctccaggcgcccgtggccgtggccccgccgaggagcaggg

SEQ ID NO: 317717 - DNA, 81 bp, Homo sapiens; identical to SEQ ID NO: 215702
  chr13:114502706-114502787
  hypo

SEQ ID NO: 317718 - DNA, 176 bp, Homo sapiens; identical to SEQ ID NO: 266459
  chr13:114504647-114504823
  hypo

SEQ ID NO: 317719 - DNA, 135 bp, Homo sapiens; identical to SEQ ID NO: 266460
  chr13:114508569-114508704
  hypo

SEQ ID NO: 317720 - DNA, 69 bp, Homo sapiens
  chr13:114517613-114517682
  hypo
ctgtctcatgtggacggatcctgtctggggccaccaagctctgccagcctgagtcacggtctgatgaac

SEQ ID NO: 317721 - DNA, 51 bp, Homo sapiens
  chr13:114517712-114517763
  hypo
atcccagcctcctctgcagggatgggctcccaatcccgccctcacttggtt

SEQ ID NO: 317722 - DNA, 230 bp, Homo sapiens; identical to SEQ ID NO: 215703
  chr13:114537013-114537243
  hypo

SEQ ID NO: 317723 - DNA, 176 bp, Homo sapiens; identical to SEQ ID NO: 266464
  chr13:114551825-114552001
  hypo

SEQ ID NO: 317724 - DNA, 151 bp, Homo sapiens; identical to SEQ ID NO: 266465
  chr13:114565257-114565408
  hypo

SEQ ID NO: 317725 - DNA, 301 bp, Homo sapiens; identical to SEQ ID NO: 203470
  chr13:114565970-114566271
  hypo

SEQ ID NO: 317726 - DNA, 113 bp, Homo sapiens; identical to SEQ ID NO: 124172
  chr13:114566409-114566522
  hypo

SEQ ID NO: 317727 - DNA, 169 bp, Homo sapiens; identical to SEQ ID NO: 266466
  chr13:114616942-114617111
  hypo

SEQ ID NO: 317728 - DNA, 189 bp, Homo sapiens; identical to SEQ ID NO: 215706
  chr13:114617343-114617532
  hypo

SEQ ID NO: 317729 - DNA, 229 bp, Homo sapiens; identical to SEQ ID NO: 266468
  chr13:114741916-114742145
  hypo

SEQ ID NO: 317730 - DNA, 89 bp, Homo sapiens; identical to SEQ ID NO: 266469
  chr13:114747444-114747533
  hypo

SEQ ID NO: 317731 - DNA, 146 bp, Homo sapiens; identical to SEQ ID NO: 215707
  chr13:114748178-114748324
  hypo

SEQ ID NO: 317732 - DNA, 307 bp, Homo sapiens
  chr13:114751053-114751360
  hypo
ccgtccagggcaggcacgggagtggcactcactggcttccatatttcgtcttcttgaacttgtccctcttatactgggcgtgctcctgctccaaagccccaaccccagcgatgacttgctttagcgtcttgtaggtctcctgggggtcgtcaatgacgaacgtcgaatactcctcctgctccgggccgtcatacacagatttgctcccacaggcctctgtggagggcggaggggtcagcgcagggcaggagcccaggccaccggccccgtctccacacagctgcgtcgctgcaggccccacccacag

SEQ ID NO: 317733 - DNA, 56 bp, Homo sapiens
  chr13:114760878-114760934
  hypo
tgggaggattaaacggtggcccagcatggagcacagctcatcccctgcagggccct

SEQ ID NO: 317734 - DNA, 168 bp, Homo sapiens; identical to SEQ ID NO: 215709
  chr13:114764876-114765044
  hypo

SEQ ID NO: 317735 - DNA, 109 bp, Homo sapiens
  chr13:114766161-114766270
  hypo
gctctgggtcaccgcggccccgggctctgcccgcagcactgaatccttcctcccctcagctctccccctgaaaaagcagactcagtcccagggcccagcacgctccagc

SEQ ID NO: 317736 - DNA, 90 bp, Homo sapiens
  chr13:114766300-114766390
  hypo
cctttgcttttgtggtaggtaaattcatggttggtcaagcgaaaccatctcttcttaaaattcttcatcccaaagcgcttccgtccttgg

SEQ ID NO: 317737 - DNA, 228 bp, Homo sapiens; identical to SEQ ID NO: 266475
  chr13:114767009-114767237
  hypo

SEQ ID NO: 317738 - DNA, 77 bp, Homo sapiens; identical to SEQ ID NO: 266477
  chr13:114768255-114768332
  hypo

SEQ ID NO: 317739 - DNA, 106 bp, Homo sapiens
  chr13:114769880-114769986
  hypo
ccaaaggacagggggatagacgtttttcagaagacaaatggccaacaagcatacgatataaagcccagcgtggctcatcacctgaggaatgagagccagagctgcc

SEQ ID NO: 317740 - DNA, 172 bp, Homo sapiens; identical to SEQ ID NO: 215710
  chr13:114771065-114771237
  hypo

SEQ ID NO: 317741 - DNA, 74 bp, Homo sapiens; identical to SEQ ID NO: 266480
  chr13:114773207-114773281
  hypo

SEQ ID NO: 317742 - DNA, 108 bp, Homo sapiens
  chr13:114774839-114774947
  hypo
tcggagggtgagtcgatacttacgttcttcaccgcatcagcatatttctgctcattgaagaattcataaaatgtagccatgtaggactccttaaaactcgcctaaaat

SEQ ID NO: 317743 - DNA, 42 bp, Homo sapiens; identical to SEQ ID NO: 215711
  chr13:114776260-114776302
  hypo

SEQ ID NO: 317744 - DNA, 52 bp, Homo sapiens; identical to SEQ ID NO: 203472
  chr13:114776448-114776500
  hypo

SEQ ID NO: 317745 - DNA, 228 bp, Homo sapiens; identical to SEQ ID NO: 203473
  chr13:114776782-114777010
  hypo

SEQ ID NO: 317746 - DNA, 146 bp, Homo sapiens; identical to SEQ ID NO: 266484
  chr13:114777572-114777718
  hypo

SEQ ID NO: 317747 - DNA, 91 bp, Homo sapiens; identical to SEQ ID NO: 215714
  chr13:114778731-114778822
  hypo

SEQ ID NO: 317748 - DNA, 55 bp, Homo sapiens; identical to SEQ ID NO: 266488
  chr13:114781425-114781480
  hypo

SEQ ID NO: 317749 - DNA, 42 bp, Homo sapiens; identical to SEQ ID NO: 266489
  chr13:114786709-114786751
  hypo

SEQ ID NO: 317750 - DNA, 243 bp, Homo sapiens; identical to SEQ ID NO: 266490
  chr13:114789849-114790092
  hypo

SEQ ID NO: 317751 - DNA, 144 bp, Homo sapiens; identical to SEQ ID NO: 215715
  chr13:114791748-114791892
  hypo

SEQ ID NO: 317752 - DNA, 153 bp, Homo sapiens; identical to SEQ ID NO: 215716
  chr13:114799638-114799791
  hypo

SEQ ID NO: 317753 - DNA, 48 bp, Homo sapiens; identical to SEQ ID NO: 266494
  chr13:114804554-114804602
  hypo

SEQ ID NO: 317754 - DNA, 65 bp, Homo sapiens; identical to SEQ ID NO: 266495
  chr13:114804861-114804926
  hypo

SEQ ID NO: 317755 - DNA, 204 bp, Homo sapiens; identical to SEQ ID NO: 266496
  chr13:114805211-114805415
  hypo

SEQ ID NO: 317756 - DNA, 43 bp, Homo sapiens; identical to SEQ ID NO: 215717
  chr13:114807147-114807190
  hypo

SEQ ID NO: 317757 - DNA, 106 bp, Homo sapiens; identical to SEQ ID NO: 215718
  chr13:114807847-114807953
  hypo

SEQ ID NO: 317758 - DNA, 34 bp, Homo sapiens; identical to SEQ ID NO: 266499
  chr13:114812023-114812057
  hypo

SEQ ID NO: 317759 - DNA, 252 bp, Homo sapiens
  chr13:114812198-114812450
  hypo
gagtccagtcccgcctcctacctcagatggaagagaatacagaggccacaaacagacccacacaatgcagccaactaagctgtaaatgtgccaaagtcatcaacggaggaagggtcgtctttcagccaagggtgccggaacaaagggatgtctacatggaaaaaacagaatcccgacccttttctttgtgctataagtgaaaattagcttgaaacagatcatggaactaaatgtgaacgctgaaagcacatg

SEQ ID NO: 317760 - DNA, 228 bp, Homo sapiens; identical to SEQ ID NO: 266501
  chr13:114841890-114842118
  hypo

SEQ ID NO: 317761 - DNA, 90 bp, Homo sapiens; identical to SEQ ID NO: 266502
  chr13:114846580-114846670
  hypo

SEQ ID NO: 317762 - DNA, 187 bp, Homo sapiens; identical to SEQ ID NO: 215719
  chr13:114847025-114847212
  hypo

SEQ ID NO: 317763 - DNA, 43 bp, Homo sapiens; identical to SEQ ID NO: 215720
  chr13:114855701-114855744
  hypo

SEQ ID NO: 317764 - DNA, 69 bp, Homo sapiens; identical to SEQ ID NO: 266505
  chr13:114861675-114861744
  hypo

SEQ ID NO: 317765 - DNA, 861 bp, Homo sapiens; identical to SEQ ID NO: 266506
  chr13:114867637-114868498
  hypo

SEQ ID NO: 317766 - DNA, 171 bp, Homo sapiens; identical to SEQ ID NO: 266507
  chr13:114868528-114868699
  hypo

SEQ ID NO: 317767 - DNA, 84 bp, Homo sapiens; identical to SEQ ID NO: 215722
  chr13:114869700-114869784
  hypo

SEQ ID NO: 317768 - DNA, 70 bp, Homo sapiens; identical to SEQ ID NO: 215723
  chr13:114881847-114881917
  hypo

SEQ ID NO: 317769 - DNA, 159 bp, Homo sapiens; identical to SEQ ID NO: 266510
  chr13:114887173-114887332
  hypo

SEQ ID NO: 317770 - DNA, 82 bp, Homo sapiens; identical to SEQ ID NO: 215724
  chr13:114917488-114917570
  hypo

SEQ ID NO: 317771 - DNA, 117 bp, Homo sapiens; identical to SEQ ID NO: 215725
  chr13:114917600-114917717
  hypo

SEQ ID NO: 317772 - DNA, 89 bp, Homo sapiens; identical to SEQ ID NO: 266515
  chr13:115025097-115025186
  hypo

SEQ ID NO: 317773 - DNA, 247 bp, Homo sapiens; identical to SEQ ID NO: 215726
  chr13:115052295-115052542
  hypo

SEQ ID NO: 317774 - DNA, 119 bp, Homo sapiens; identical to SEQ ID NO: 289965
  chr14:21121460-21121579
  hypo

SEQ ID NO: 317775 - DNA, 420 bp, Homo sapiens; identical to SEQ ID NO: 289967
  chr14:21150255-21150675
  hypo

SEQ ID NO: 317776 - DNA, 816 bp, Homo sapiens; identical to SEQ ID NO: 289969
  chr14:21152235-21153051
  hypo

SEQ ID NO: 317777 - DNA, 33 bp, Homo sapiens; identical to SEQ ID NO: 266518
  chr14:21253764-21253797
  hypo

SEQ ID NO: 317778 - DNA, 42 bp, Homo sapiens; identical to SEQ ID NO: 266519
  chr14:21304102-21304144
  hypo

SEQ ID NO: 317779 - DNA, 240 bp, Homo sapiens; identical to SEQ ID NO: 215728
  chr14:21304264-21304504
  hypo

SEQ ID NO: 317780 - DNA, 274 bp, Homo sapiens; identical to SEQ ID NO: 266521
  chr14:21464749-21465023
  hypo

SEQ ID NO: 317781 - DNA, 249 bp, Homo sapiens; identical to SEQ ID NO: 289975
  chr14:21493821-21494070
  hypo

SEQ ID NO: 317782 - DNA, 105 bp, Homo sapiens; identical to SEQ ID NO: 124214
  chr14:21494160-21494265
  hypo

SEQ ID NO: 317783 - DNA, 32 bp, Homo sapiens; identical to SEQ ID NO: 266522
  chr14:21549738-21549770
  hypo

SEQ ID NO: 317784 - DNA, 555 bp, Homo sapiens; identical to SEQ ID NO: 215729
  chr14:21560014-21560569
  hypo

SEQ ID NO: 317785 - DNA, 41 bp, Homo sapiens; identical to SEQ ID NO: 215730
  chr14:21688656-21688697
  hypo

SEQ ID NO: 317786 - DNA, 120 bp, Homo sapiens; identical to SEQ ID NO: 215731
  chr14:21689077-21689197
  hypo

SEQ ID NO: 317787 - DNA, 82 bp, Homo sapiens; identical to SEQ ID NO: 266527
  chr14:21752061-21752143
  hypo

SEQ ID NO: 317788 - DNA, 38 bp, Homo sapiens; identical to SEQ ID NO: 266528
  chr14:21789024-21789062
  hypo

SEQ ID NO: 317789 - DNA, 82 bp, Homo sapiens
  chr14:21943040-21943122
  hypo
cagtttgatttgttttccatcaatgttgaccatacgagctccaaactccacacctgtcggtaaagaccgagagaaagaatgt

SEQ ID NO: 317790 - DNA, 104 bp, Homo sapiens; identical to SEQ ID NO: 266530
  chr14:21969879-21969983
  hypo

SEQ ID NO: 317791 - DNA, 72 bp, Homo sapiens; identical to SEQ ID NO: 266531
  chr14:21971445-21971517
  hypo

SEQ ID NO: 317792 - DNA, 161 bp, Homo sapiens
  chr14:21980069-21980230
  hypo
cacccggccatagtacagatttttaagatgaaggatcactagttccttttgacagtttggtactaacataccttttccactgaaggtggtgttggtttgtttccatgcgttcatttacaaaaaaataaaaaaataaaaaacacaacggtggtccccaatct

SEQ ID NO: 317793 - DNA, 120 bp, Homo sapiens; identical to SEQ ID NO: 266534
  chr14:23183246-23183366
  hypo

SEQ ID NO: 317794 - DNA, 59 bp, Homo sapiens; identical to SEQ ID NO: 266535
  chr14:23311696-23311755
  hypo

SEQ ID NO: 317795 - DNA, 250 bp, Homo sapiens; identical to SEQ ID NO: 266536
  chr14:23315014-23315264
  hypo

SEQ ID NO: 317796 - DNA, 90 bp, Homo sapiens; identical to SEQ ID NO: 266537
  chr14:23323996-23324086
  hypo

SEQ ID NO: 317797 - DNA, 39 bp, Homo sapiens; identical to SEQ ID NO: 289992
  chr14:23355351-23355390
  hypo

SEQ ID NO: 317798 - DNA, 63 bp, Homo sapiens; identical to SEQ ID NO: 289993
  chr14:23355484-23355547
  hypo

SEQ ID NO: 317799 - DNA, 63 bp, Homo sapiens; identical to SEQ ID NO: 266538
  chr14:23400229-23400292
  hypo

SEQ ID NO: 317800 - DNA, 147 bp, Homo sapiens
  chr14:23427093-23427240
  hypo
ctcactaaggcctggctctgaggcgctgccgcccagcccagcccagcccagcccagcccatgccgggcaccatacagtgcttcctcagggtcaccttcctctcgaattcccaccacagactccctattagcgcgcattcctcattcg

SEQ ID NO: 317801 - DNA, 120 bp, Homo sapiens; identical to SEQ ID NO: 215732
  chr14:23470948-23471068
  hypo

SEQ ID NO: 317802 - DNA, 448 bp, Homo sapiens; identical to SEQ ID NO: 266541
  chr14:23511622-23512070
  hypo

SEQ ID NO: 317803 - DNA, 33 bp, Homo sapiens; identical to SEQ ID NO: 266542
  chr14:23517722-23517755
  hypo

SEQ ID NO: 317804 - DNA, 104 bp, Homo sapiens; identical to SEQ ID NO: 215733
  chr14:23518259-23518363
  hypo

SEQ ID NO: 317805 - DNA, 98 bp, Homo sapiens; identical to SEQ ID NO: 266544
  chr14:23528347-23528445
  hypo

SEQ ID NO: 317806 - DNA, 88 bp, Homo sapiens; identical to SEQ ID NO: 266545
  chr14:23530469-23530557
  hypo

SEQ ID NO: 317807 - DNA, 41 bp, Homo sapiens; identical to SEQ ID NO: 266546
  chr14:23537841-23537882
  hypo

SEQ ID NO: 317808 - DNA, 86 bp, Homo sapiens; identical to SEQ ID NO: 266547
  chr14:23559266-23559352
  hypo

SEQ ID NO: 317809 - DNA, 45 bp, Homo sapiens; identical to SEQ ID NO: 215734
  chr14:23719831-23719876
  hypo

SEQ ID NO: 317810 - DNA, 154 bp, Homo sapiens; identical to SEQ ID NO: 215735
  chr14:23757712-23757866
  hypo

SEQ ID NO: 317811 - DNA, 188 bp, Homo sapiens; identical to SEQ ID NO: 203499
  chr14:23776071-23776259
  hypo

SEQ ID NO: 317812 - DNA, 41 bp, Homo sapiens; identical to SEQ ID NO: 215737
  chr14:23777239-23777280
  hypo

SEQ ID NO: 317813 - DNA, 94 bp, Homo sapiens; identical to SEQ ID NO: 215738
  chr14:23793466-23793560
  hypo

SEQ ID NO: 317814 - DNA, 148 bp, Homo sapiens; identical to SEQ ID NO: 215739
  chr14:23815819-23815967
  hypo

SEQ ID NO: 317815 - DNA, 85 bp, Homo sapiens; identical to SEQ ID NO: 51020
  chr14:23835314-23835399
  hypo

SEQ ID NO: 317816 - DNA, 145 bp, Homo sapiens; identical to SEQ ID NO: 266556
  chr14:23853628-23853773
  hypo

SEQ ID NO: 317817 - DNA, 117 bp, Homo sapiens
  chr14:23884171-23884288
  hypo
agggctctgcctggagtcaccgcccgtcgcacctggtaggtgagctccttgatgcgccgctcgctcttcctcatgcccttcaccgactctgcgttgcgcttctgctcggcctccagc

SEQ ID NO: 317818 - DNA, 146 bp, Homo sapiens; identical to SEQ ID NO: 266558
  chr14:23938090-23938236
  hypo

SEQ ID NO: 317819 - DNA, 174 bp, Homo sapiens; identical to SEQ ID NO: 174906
  chr14:23982724-23982898
  hypo

SEQ ID NO: 317820 - DNA, 63 bp, Homo sapiens; identical to SEQ ID NO: 266560
  chr14:24081962-24082025
  hypo

SEQ ID NO: 317821 - DNA, 46 bp, Homo sapiens; identical to SEQ ID NO: 266561
  chr14:24108494-24108540
  hypo

SEQ ID NO: 317822 - DNA, 116 bp, Homo sapiens; identical to SEQ ID NO: 266562
  chr14:24427534-24427650
  hypo

SEQ ID NO: 317823 - DNA, 38 bp, Homo sapiens; identical to SEQ ID NO: 266563
  chr14:24542844-24542882
  hypo

SEQ ID NO: 317824 - DNA, 106 bp, Homo sapiens; identical to SEQ ID NO: 290021
  chr14:24550912-24551018
  hypo

SEQ ID NO: 317825 - DNA, 97 bp, Homo sapiens; identical to SEQ ID NO: 215741
  chr14:24629478-24629575
  hypo

SEQ ID NO: 317826 - DNA, 94 bp, Homo sapiens; identical to SEQ ID NO: 266565
  chr14:24722549-24722643
  hypo

SEQ ID NO: 317827 - DNA, 502 bp, Homo sapiens; identical to SEQ ID NO: 266566
  chr14:24731055-24731557
  hypo

SEQ ID NO: 317828 - DNA, 53 bp, Homo sapiens; identical to SEQ ID NO: 215744
  chr14:24733719-24733772
  hypo

SEQ ID NO: 317829 - DNA, 62 bp, Homo sapiens; identical to SEQ ID NO: 266568
  chr14:24839212-24839274
  hypo

SEQ ID NO: 317830 - DNA, 31 bp, Homo sapiens; identical to SEQ ID NO: 266569
  chr14:24859466-24859497
  hypo

SEQ ID NO: 317831 - DNA, 109 bp, Homo sapiens; identical to SEQ ID NO: 266570
  chr14:25113297-25113406
  hypo

SEQ ID NO: 317832 - DNA, 70 bp, Homo sapiens; identical to SEQ ID NO: 266571
  chr14:26802501-26802571
  hypo

SEQ ID NO: 317833 - DNA, 60 bp, Homo sapiens; identical to SEQ ID NO: 290053
  chr14:29236614-29236674
  hypo

SEQ ID NO: 317834 - DNA, 42 bp, Homo sapiens; identical to SEQ ID NO: 290058
  chr14:30397398-30397440
  hypo

SEQ ID NO: 317835 - DNA, 37 bp, Homo sapiens; identical to SEQ ID NO: 266572
  chr14:30790494-30790531
  hypo

SEQ ID NO: 317836 - DNA, 41 bp, Homo sapiens; identical to SEQ ID NO: 215745
  chr14:31027393-31027434
  hypo

SEQ ID NO: 317837 - DNA, 84 bp, Homo sapiens; identical to SEQ ID NO: 266574
  chr14:31035127-31035211
  hypo

SEQ ID NO: 317838 - DNA, 32 bp, Homo sapiens; identical to SEQ ID NO: 266575
  chr14:31079528-31079560
  hypo

SEQ ID NO: 317839 - DNA, 48 bp, Homo sapiens; identical to SEQ ID NO: 215746
  chr14:31456398-31456446
  hypo

SEQ ID NO: 317840 - DNA, 100 bp, Homo sapiens; identical to SEQ ID NO: 215747
  chr14:31456881-31456981
  hypo

SEQ ID NO: 317841 - DNA, 61 bp, Homo sapiens; identical to SEQ ID NO: 215748
  chr14:31478679-31478740
  hypo

SEQ ID NO: 317842 - DNA, 205 bp, Homo sapiens; identical to SEQ ID NO: 215749
  chr14:31484306-31484511
  hypo

SEQ ID NO: 317843 - DNA, 36 bp, Homo sapiens; identical to SEQ ID NO: 266580
  chr14:31527415-31527451
  hypo

SEQ ID NO: 317844 - DNA, 120 bp, Homo sapiens; identical to SEQ ID NO: 266581
  chr14:31542683-31542803
  hypo

SEQ ID NO: 317845 - DNA, 41 bp, Homo sapiens; identical to SEQ ID NO: 215750
  chr14:31629124-31629165
  hypo

SEQ ID NO: 317846 - DNA, 91 bp, Homo sapiens; identical to SEQ ID NO: 266583
  chr14:31632735-31632826
  hypo

SEQ ID NO: 317847 - DNA, 33 bp, Homo sapiens; identical to SEQ ID NO: 215751
  chr14:31648025-31648058
  hypo

SEQ ID NO: 317848 - DNA, 87 bp, Homo sapiens; identical to SEQ ID NO: 266585
  chr14:31671012-31671099
  hypo

SEQ ID NO: 317849 - DNA, 41 bp, Homo sapiens; identical to SEQ ID NO: 266586
  chr14:31847700-31847741
  hypo

SEQ ID NO: 317850 - DNA, 79 bp, Homo sapiens; identical to SEQ ID NO: 215752
  chr14:31925274-31925353
  hypo

SEQ ID NO: 317851 - DNA, 31 bp, Homo sapiens; identical to SEQ ID NO: 266589
  chr14:32287762-32287793
  hypo

SEQ ID NO: 317852 - DNA, 31 bp, Homo sapiens; identical to SEQ ID NO: 266590
  chr14:32288033-32288064
  hypo

SEQ ID NO: 317853 - DNA, 84 bp, Homo sapiens; identical to SEQ ID NO: 266591
  chr14:32413188-32413272
  hypo

SEQ ID NO: 317854 - DNA, 39 bp, Homo sapiens; identical to SEQ ID NO: 266592
  chr14:32543359-32543398
  hypo

SEQ ID NO: 317855 - DNA, 44 bp, Homo sapiens; identical to SEQ ID NO: 215753
  chr14:32597576-32597620
  hypo

SEQ ID NO: 317856 - DNA, 55 bp, Homo sapiens; identical to SEQ ID NO: 215754
  chr14:32597657-32597712
  hypo

SEQ ID NO: 317857 - DNA, 113 bp, Homo sapiens; identical to SEQ ID NO: 266594
  chr14:32902046-32902159
  hypo

SEQ ID NO: 317858 - DNA, 73 bp, Homo sapiens; identical to SEQ ID NO: 266595
  chr14:34165621-34165694
  hypo

SEQ ID NO: 317859 - DNA, 99 bp, Homo sapiens; identical to SEQ ID NO: 266596
  chr14:34308655-34308754
  hypo

SEQ ID NO: 317860 - DNA, 36 bp, Homo sapiens; identical to SEQ ID NO: 266597
  chr14:34334928-34334964
  hypo

SEQ ID NO: 317861 - DNA, 37 bp, Homo sapiens; identical to SEQ ID NO: 215755
  chr14:34415281-34415318
  hypo

SEQ ID NO: 317862 - DNA, 33 bp, Homo sapiens; identical to SEQ ID NO: 215756
  chr14:34918992-34919025
  hypo

SEQ ID NO: 317863 - DNA, 41 bp, Homo sapiens; identical to SEQ ID NO: 266600
  chr14:34949999-34950040
  hypo

SEQ ID NO: 317864 - DNA, 42 bp, Homo sapiens; identical to SEQ ID NO: 266601
  chr14:35009569-35009611
  hypo

SEQ ID NO: 317865 - DNA, 161 bp, Homo sapiens; identical to SEQ ID NO: 266602
  chr14:35022415-35022576
  hypo

SEQ ID NO: 317866 - DNA, 54 bp, Homo sapiens
  chr14:35032073-35032127
  hypo
ctttggacttctgagtatgacgagtgcacgatgatggaccactgtcatggggaa

SEQ ID NO: 317867 - DNA, 37 bp, Homo sapiens
  chr14:35032157-35032194
  hypo
catcgcctgggcgtgcgctgctccatgtttctcagaa

SEQ ID NO: 317868 - DNA, 36 bp, Homo sapiens; identical to SEQ ID NO: 215757
  chr14:35117759-35117795
  hypo

SEQ ID NO: 317869 - DNA, 32 bp, Homo sapiens; identical to SEQ ID NO: 266606
  chr14:35136957-35136989
  hypo

SEQ ID NO: 317870 - DNA, 48 bp, Homo sapiens; identical to SEQ ID NO: 266607
  chr14:35147557-35147605
  hypo

SEQ ID NO: 317871 - DNA, 37 bp, Homo sapiens; identical to SEQ ID NO: 266608
  chr14:35266883-35266920
  hypo

SEQ ID NO: 317872 - DNA, 120 bp, Homo sapiens; identical to SEQ ID NO: 266609
  chr14:35266980-35267100
  hypo

SEQ ID NO: 317873 - DNA, 48 bp, Homo sapiens; identical to SEQ ID NO: 266610
  chr14:35331322-35331370
  hypo

SEQ ID NO: 317874 - DNA, 32 bp, Homo sapiens; identical to SEQ ID NO: 266611
  chr14:35389182-35389214
  hypo

SEQ ID NO: 317875 - DNA, 31 bp, Homo sapiens; identical to SEQ ID NO: 266612
  chr14:35389454-35389485
  hypo

SEQ ID NO: 317876 - DNA, 97 bp, Homo sapiens; identical to SEQ ID NO: 215758
  chr14:35578168-35578265
  hypo

SEQ ID NO: 317877 - DNA, 279 bp, Homo sapiens; identical to SEQ ID NO: 266615
  chr14:35808161-35808440
  hypo

SEQ ID NO: 317878 - DNA, 438 bp, Homo sapiens; identical to SEQ ID NO: 290092
  chr14:36003004-36003442
  hypo

SEQ ID NO: 317879 - DNA, 393 bp, Homo sapiens; identical to SEQ ID NO: 215760
  chr14:36288873-36289266
  hypo

SEQ ID NO: 317880 - DNA, 38 bp, Homo sapiens; identical to SEQ ID NO: 266618
  chr14:36301411-36301449
  hypo

SEQ ID NO: 317881 - DNA, 38 bp, Homo sapiens; identical to SEQ ID NO: 266619
  chr14:36301689-36301727
  hypo

SEQ ID NO: 317882 - DNA, 54 bp, Homo sapiens; identical to SEQ ID NO: 266620
  chr14:36738436-36738490
  hypo

SEQ ID NO: 317883 - DNA, 34 bp, Homo sapiens; identical to SEQ ID NO: 215761
  chr14:37174263-37174297
  hypo

SEQ ID NO: 317884 - DNA, 43 bp, Homo sapiens; identical to SEQ ID NO: 266622
  chr14:37665913-37665956
  hypo

SEQ ID NO: 317885 - DNA, 42 bp, Homo sapiens; identical to SEQ ID NO: 266623
  chr14:37666136-37666178
  hypo

SEQ ID NO: 317886 - DNA, 382 bp, Homo sapiens; identical to SEQ ID NO: 203556
  chr14:38677790-38678172
  hypo

SEQ ID NO: 317887 - DNA, 316 bp, Homo sapiens; identical to SEQ ID NO: 203557
  chr14:38678202-38678518
  hypo

SEQ ID NO: 317888 - DNA, 328 bp, Homo sapiens; identical to SEQ ID NO: 266624
  chr14:39648102-39648430
  hypo

SEQ ID NO: 317889 - DNA, 97 bp, Homo sapiens; identical to SEQ ID NO: 266625
  chr14:39648716-39648813
  hypo

SEQ ID NO: 317890 - DNA, 243 bp, Homo sapiens; identical to SEQ ID NO: 203560
  chr14:39735535-39735778
  hypo

SEQ ID NO: 317891 - DNA, 291 bp, Homo sapiens; identical to SEQ ID NO: 215765
  chr14:39911460-39911751
  hypo

SEQ ID NO: 317892 - DNA, 37 bp, Homo sapiens; identical to SEQ ID NO: 215766
  chr14:39914481-39914518
  hypo

SEQ ID NO: 317893 - DNA, 37 bp, Homo sapiens; identical to SEQ ID NO: 215767
  chr14:40470106-40470143
  hypo

SEQ ID NO: 317894 - DNA, 104 bp, Homo sapiens; identical to SEQ ID NO: 215768
  chr14:43839406-43839510
  hypo

SEQ ID NO: 317895 - DNA, 88 bp, Homo sapiens
  chr14:44004251-44004339
  hypo
cgctgcacgtatttcgtgacttaaaagagtttaaaaggcaatcatataatctaactctggctaccttttcgggaccccttccacactg

SEQ ID NO: 317896 - DNA, 71 bp, Homo sapiens
  chr14:44004432-44004503
  hypo
ccaccgcatcaattctttggcatggctaggcaagaaccttaggcgttacatcttggcgagccagccaggag

SEQ ID NO: 317897 - DNA, 215 bp, Homo sapiens; identical to SEQ ID NO: 203563
  chr14:45431367-45431582
  hypo

SEQ ID NO: 317898 - DNA, 32 bp, Homo sapiens; identical to SEQ ID NO: 266631
  chr14:45437464-45437496
  hypo

SEQ ID NO: 317899 - DNA, 31 bp, Homo sapiens; identical to SEQ ID NO: 266632
  chr14:45437736-45437767
  hypo

SEQ ID NO: 317900 - DNA, 51 bp, Homo sapiens; identical to SEQ ID NO: 215770
  chr14:45579811-45579862
  hypo

SEQ ID NO: 317901 - DNA, 34 bp, Homo sapiens
  chr14:50287092-50287126
  hypo
ctcaaacctgtcagcacttacgcgttgtcctctg

SEQ ID NO: 317902 - DNA, 51 bp, Homo sapiens
  chr14:50287178-50287229
  hypo
aagtattgtatcaagagctaataatcggctgggcgcggtggctcatgccta

SEQ ID NO: 317903 - DNA, 44 bp, Homo sapiens; identical to SEQ ID NO: 215771
  chr14:50327506-50327550
  hypo

SEQ ID NO: 317904 - DNA, 156 bp, Homo sapiens
  chr14:50333499-50333655
  hypo
gccctataatcttttgatttggtgcatcataatttatgactatttaaattgaaccactatcagtcacactaatcactttactattctatatatttcacctttattgttttatgaattagtgatcggcatagtatccagtgctaagtcagttatgca

SEQ ID NO: 317905 - DNA, 37 bp, Homo sapiens; identical to SEQ ID NO: 266640
  chr14:50373518-50373555
  hypo

SEQ ID NO: 317906 - DNA, 32 bp, Homo sapiens; identical to SEQ ID NO: 266642
  chr14:50540507-50540539
  hypo

SEQ ID NO: 317907 - DNA, 75 bp, Homo sapiens; identical to SEQ ID NO: 266643
  chr14:50574254-50574329
  hypo

SEQ ID NO: 317908 - DNA, 40 bp, Homo sapiens; identical to SEQ ID NO: 266644
  chr14:50589170-50589210
  hypo

SEQ ID NO: 317909 - DNA, 39 bp, Homo sapiens; identical to SEQ ID NO: 266646
  chr14:50777877-50777916
  hypo

SEQ ID NO: 317910 - DNA, 120 bp, Homo sapiens; identical to SEQ ID NO: 266647
  chr14:50828854-50828974
  hypo

SEQ ID NO: 317911 - DNA, 266 bp, Homo sapiens; identical to SEQ ID NO: 266648
  chr14:50903479-50903745
  hypo

SEQ ID NO: 317912 - DNA, 276 bp, Homo sapiens; identical to SEQ ID NO: 290160
  chr14:50999522-50999798
  hypo

SEQ ID NO: 317913 - DNA, 711 bp, Homo sapiens; identical to SEQ ID NO: 290161
  chr14:51027134-51027845
  hypo

SEQ ID NO: 317914 - DNA, 125 bp, Homo sapiens; identical to SEQ ID NO: 203568
  chr14:51027881-51028006
  hypo

SEQ ID NO: 317915 - DNA, 34 bp, Homo sapiens; identical to SEQ ID NO: 266649
  chr14:51092388-51092422
  hypo

SEQ ID NO: 317916 - DNA, 35 bp, Homo sapiens; identical to SEQ ID NO: 266650
  chr14:51123746-51123781
  hypo

SEQ ID NO: 317917 - DNA, 42 bp, Homo sapiens; identical to SEQ ID NO: 266651
  chr14:51148375-51148417
  hypo

SEQ ID NO: 317918 - DNA, 480 bp, Homo sapiens; identical to SEQ ID NO: 215774
  chr14:51171647-51172127
  hypo

SEQ ID NO: 317919 - DNA, 224 bp, Homo sapiens; identical to SEQ ID NO: 203569
  chr14:51410345-51410569
  hypo

SEQ ID NO: 317920 - DNA, 293 bp, Homo sapiens; identical to SEQ ID NO: 203570
  chr14:51410740-51411033
  hypo

SEQ ID NO: 317921 - DNA, 223 bp, Homo sapiens; identical to SEQ ID NO: 203572
  chr14:51562012-51562235
  hypo

SEQ ID NO: 317922 - DNA, 41 bp, Homo sapiens; identical to SEQ ID NO: 215778
  chr14:51836280-51836321
  hypo

SEQ ID NO: 317923 - DNA, 1663 bp, Homo sapiens; identical to SEQ ID NO: 290168
  chr14:52117843-52119506
  hypo

SEQ ID NO: 317924 - DNA, 394 bp, Homo sapiens; identical to SEQ ID NO: 215780
  chr14:52210541-52210935
  hypo

SEQ ID NO: 317925 - DNA, 90 bp, Homo sapiens; identical to SEQ ID NO: 266655
  chr14:52211309-52211399
  hypo

SEQ ID NO: 317926 - DNA, 85 bp, Homo sapiens; identical to SEQ ID NO: 266656
  chr14:52211429-52211514
  hypo

SEQ ID NO: 317927 - DNA, 84 bp, Homo sapiens; identical to SEQ ID NO: 266657
  chr14:52216037-52216121
  hypo

SEQ ID NO: 317928 - DNA, 48 bp, Homo sapiens; identical to SEQ ID NO: 215781
  chr14:52373771-52373819
  hypo

SEQ ID NO: 317929 - DNA, 84 bp, Homo sapiens; identical to SEQ ID NO: 266660
  chr14:53196020-53196104
  hypo

SEQ ID NO: 317930 - DNA, 105 bp, Homo sapiens; identical to SEQ ID NO: 215782
  chr14:53259036-53259141
  hypo

SEQ ID NO: 317931 - DNA, 136 bp, Homo sapiens; identical to SEQ ID NO: 266662
  chr14:53564364-53564500
  hypo

SEQ ID NO: 317932 - DNA, 44 bp, Homo sapiens; identical to SEQ ID NO: 290201
  chr14:55032358-55032402
  hypo

SEQ ID NO: 317933 - DNA, 33 bp, Homo sapiens; identical to SEQ ID NO: 266663
  chr14:55035098-55035131
  hypo

SEQ ID NO: 317934 - DNA, 31 bp, Homo sapiens; identical to SEQ ID NO: 266664
  chr14:55035161-55035192
  hypo

SEQ ID NO: 317935 - DNA, 120 bp, Homo sapiens; identical to SEQ ID NO: 215783
  chr14:55517470-55517590
  hypo

SEQ ID NO: 317936 - DNA, 142 bp, Homo sapiens; identical to SEQ ID NO: 215784
  chr14:55522631-55522773
  hypo

SEQ ID NO: 317937 - DNA, 201 bp, Homo sapiens; identical to SEQ ID NO: 215785
  chr14:55590026-55590227
  hypo

SEQ ID NO: 317938 - DNA, 214 bp, Homo sapiens; identical to SEQ ID NO: 266668
  chr14:55731632-55731846
  hypo

SEQ ID NO: 317939 - DNA, 86 bp, Homo sapiens; identical to SEQ ID NO: 215786
  chr14:55740426-55740512
  hypo

SEQ ID NO: 317940 - DNA, 296 bp, Homo sapiens; identical to SEQ ID NO: 215787
  chr14:55765714-55766010
  hypo

SEQ ID NO: 317941 - DNA, 76 bp, Homo sapiens; identical to SEQ ID NO: 215788
  chr14:55766084-55766160
  hypo

SEQ ID NO: 317942 - DNA, 221 bp, Homo sapiens; identical to SEQ ID NO: 215789
  chr14:55817970-55818191
  hypo

SEQ ID NO: 317943 - DNA, 164 bp, Homo sapiens; identical to SEQ ID NO: 215790
  chr14:55819829-55819993
  hypo

SEQ ID NO: 317944 - DNA, 31 bp, Homo sapiens; identical to SEQ ID NO: 215791
  chr14:55894600-55894631
  hypo

SEQ ID NO: 317945 - DNA, 180 bp, Homo sapiens; identical to SEQ ID NO: 215792
  chr14:55894691-55894871
  hypo

SEQ ID NO: 317946 - DNA, 194 bp, Homo sapiens; identical to SEQ ID NO: 266675
  chr14:55981996-55982190
  hypo

SEQ ID NO: 317947 - DNA, 179 bp, Homo sapiens; identical to SEQ ID NO: 290208
  chr14:56047800-56047979
  hypo

SEQ ID NO: 317948 - DNA, 55 bp, Homo sapiens; identical to SEQ ID NO: 215793
  chr14:56088961-56089016
  hypo

SEQ ID NO: 317949 - DNA, 567 bp, Homo sapiens; identical to SEQ ID NO: 224694
  chr14:56585472-56586039
  hypo

SEQ ID NO: 317950 - DNA, 96 bp, Homo sapiens; identical to SEQ ID NO: 266677
  chr14:56608021-56608117
  hypo

SEQ ID NO: 317951 - DNA, 221 bp, Homo sapiens; identical to SEQ ID NO: 266678
  chr14:56757000-56757221
  hypo

SEQ ID NO: 317952 - DNA, 52 bp, Homo sapiens; identical to SEQ ID NO: 266680
  chr14:57052072-57052124
  hypo

SEQ ID NO: 317953 - DNA, 77 bp, Homo sapiens; identical to SEQ ID NO: 215794
  chr14:57073649-57073726
  hypo

SEQ ID NO: 317954 - DNA, 158 bp, Homo sapiens; identical to SEQ ID NO: 124629
  chr14:57265912-57266070
  hypo

SEQ ID NO: 317955 - DNA, 125 bp, Homo sapiens; identical to SEQ ID NO: 215796
  chr14:58599612-58599737
  hypo

SEQ ID NO: 317956 - DNA, 214 bp, Homo sapiens; identical to SEQ ID NO: 266683
  chr14:58708563-58708777
  hypo

SEQ ID NO: 317957 - DNA, 258 bp, Homo sapiens; identical to SEQ ID NO: 266684
  chr14:58761578-58761836
  hypo

SEQ ID NO: 317958 - DNA, 240 bp, Homo sapiens; identical to SEQ ID NO: 224696
  chr14:58862950-58863190
  hypo

SEQ ID NO: 317959 - DNA, 97 bp, Homo sapiens; identical to SEQ ID NO: 266685
  chr14:58863447-58863544
  hypo

SEQ ID NO: 317960 - DNA, 143 bp, Homo sapiens
  chr14:58922736-58922879
  hypo
taaacaattgccaccgttttttgaaaaatgccctggggatactttctcgctgagctagcagtgagtcagttcaaataaagacaaacactatgaatgagacttttaggagagcttgaaaccattctactgtctttagtggttgt

SEQ ID NO: 317961 - DNA, 32 bp, Homo sapiens
  chr14:59014415-59014447
  hypo
acctcatattatttcgcaaagcataaagcacg

SEQ ID NO: 317962 - DNA, 99 bp, Homo sapiens
  chr14:59014477-59014576
  hypo
atgagcttctcctttgtgcaggtgggaaagcagtgccactctccgcttcacagatgccccctgccaagatgtcagtgatgctgccgtcagtgaacctcg

SEQ ID NO: 317963 - DNA, 243 bp, Homo sapiens; identical to SEQ ID NO: 215798
  chr14:59112403-59112646
  hypo

SEQ ID NO: 317964 - DNA, 471 bp, Homo sapiens; identical to SEQ ID NO: 266690
  chr14:59113228-59113699
  hypo

SEQ ID NO: 317965 - DNA, 34 bp, Homo sapiens; identical to SEQ ID NO: 266691
  chr14:59715783-59715817
  hypo

SEQ ID NO: 317966 - DNA, 34 bp, Homo sapiens; identical to SEQ ID NO: 266692
  chr14:59734888-59734922
  hypo

SEQ ID NO: 317967 - DNA, 306 bp, Homo sapiens; identical to SEQ ID NO: 266693
  chr14:59809360-59809666
  hypo

SEQ ID NO: 317968 - DNA, 145 bp, Homo sapiens; identical to SEQ ID NO: 215799
  chr14:59810623-59810768
  hypo

SEQ ID NO: 317969 - DNA, 164 bp, Homo sapiens; identical to SEQ ID NO: 215800
  chr14:59821078-59821242
  hypo

SEQ ID NO: 317970 - DNA, 169 bp, Homo sapiens; identical to SEQ ID NO: 215801
  chr14:59935188-59935357
  hypo

SEQ ID NO: 317971 - DNA, 77 bp, Homo sapiens; identical to SEQ ID NO: 215802
  chr14:59961997-59962074
  hypo

SEQ ID NO: 317972 - DNA, 83 bp, Homo sapiens; identical to SEQ ID NO: 203605
  chr14:60097110-60097193
  hypo

SEQ ID NO: 317973 - DNA, 719 bp, Homo sapiens; identical to SEQ ID NO: 215804
  chr14:60193647-60194366
  hypo

SEQ ID NO: 317974 - DNA, 58 bp, Homo sapiens; identical to SEQ ID NO: 203606
  chr14:60385921-60385979
  hypo

SEQ ID NO: 317975 - DNA, 156 bp, Homo sapiens; identical to SEQ ID NO: 266699
  chr14:60557424-60557580
  hypo

SEQ ID NO: 317976 - DNA, 276 bp, Homo sapiens; identical to SEQ ID NO: 290237
  chr14:60974092-60974368
  hypo

SEQ ID NO: 317977 - DNA, 368 bp, Homo sapiens; identical to SEQ ID NO: 290252
  chr14:61123172-61123540
  hypo

SEQ ID NO: 317978 - DNA, 623 bp, Homo sapiens; identical to SEQ ID NO: 290253
  chr14:61123681-61124304
  hypo

SEQ ID NO: 317979 - DNA, 184 bp, Homo sapiens; identical to SEQ ID NO: 266700
  chr14:61246679-61246863
  hypo

SEQ ID NO: 317980 - DNA, 92 bp, Homo sapiens; identical to SEQ ID NO: 266701
  chr14:61929139-61929231
  hypo

SEQ ID NO: 317981 - DNA, 79 bp, Homo sapiens; identical to SEQ ID NO: 266702
  chr14:61992777-61992856
  hypo

SEQ ID NO: 317982 - DNA, 66 bp, Homo sapiens; identical to SEQ ID NO: 266703
  chr14:61995224-61995290
  hypo

SEQ ID NO: 317983 - DNA, 148 bp, Homo sapiens; identical to SEQ ID NO: 215809
  chr14:62015169-62015317
  hypo

SEQ ID NO: 317984 - DNA, 49 bp, Homo sapiens; identical to SEQ ID NO: 266705
  chr14:62021521-62021570
  hypo

SEQ ID NO: 317985 - DNA, 54 bp, Homo sapiens; identical to SEQ ID NO: 266706
  chr14:62027306-62027360
  hypo

SEQ ID NO: 317986 - DNA, 259 bp, Homo sapiens; identical to SEQ ID NO: 290262
  chr14:62105861-62106120
  hypo

SEQ ID NO: 317987 - DNA, 88 bp, Homo sapiens; identical to SEQ ID NO: 224706
  chr14:62161813-62161901
  hypo

SEQ ID NO: 317988 - DNA, 920 bp, Homo sapiens; identical to SEQ ID NO: 290264
  chr14:62162324-62163244
  hypo

SEQ ID NO: 317989 - DNA, 35 bp, Homo sapiens; identical to SEQ ID NO: 266708
  chr14:62227900-62227935
  hypo

SEQ ID NO: 317990 - DNA, 196 bp, Homo sapiens; identical to SEQ ID NO: 215812
  chr14:62523573-62523769
  hypo

SEQ ID NO: 317991 - DNA, 121 bp, Homo sapiens; identical to SEQ ID NO: 266710
  chr14:63856997-63857118
  hypo

SEQ ID NO: 317992 - DNA, 233 bp, Homo sapiens; identical to SEQ ID NO: 266711
  chr14:64061786-64062019
  hypo

SEQ ID NO: 317993 - DNA, 35 bp, Homo sapiens; identical to SEQ ID NO: 224711
  chr14:64182960-64182995
  hypo

SEQ ID NO: 317994 - DNA, 42 bp, Homo sapiens; identical to SEQ ID NO: 215813
  chr14:64190117-64190159
  hypo

SEQ ID NO: 317995 - DNA, 44 bp, Homo sapiens; identical to SEQ ID NO: 215814
  chr14:64191361-64191405
  hypo

SEQ ID NO: 317996 - DNA, 35 bp, Homo sapiens; identical to SEQ ID NO: 266715
  chr14:64227545-64227580
  hypo

SEQ ID NO: 317997 - DNA, 147 bp, Homo sapiens; identical to SEQ ID NO: 266716
  chr14:64385260-64385407
  hypo

SEQ ID NO: 317998 - DNA, 221 bp, Homo sapiens; identical to SEQ ID NO: 290271
  chr14:64760852-64761073
  hypo

SEQ ID NO: 317999 - DNA, 504 bp, Homo sapiens; identical to SEQ ID NO: 290272
  chr14:64761254-64761758
  hypo

SEQ ID NO: 318000 - DNA, 154 bp, Homo sapiens; identical to SEQ ID NO: 215816
  chr14:64884526-64884680
  hypo

SEQ ID NO: 318001 - DNA, 80 bp, Homo sapiens; identical to SEQ ID NO: 215817
  chr14:64888236-64888316
  hypo

SEQ ID NO: 318002 - DNA, 32 bp, Homo sapiens; identical to SEQ ID NO: 215818
  chr14:64904876-64904908
  hypo

SEQ ID NO: 318003 - DNA, 81 bp, Homo sapiens; identical to SEQ ID NO: 266720
  chr14:64905829-64905910
  hypo

SEQ ID NO: 318004 - DNA, 43 bp, Homo sapiens; identical to SEQ ID NO: 266721
  chr14:64992809-64992852
  hypo

SEQ ID NO: 318005 - DNA, 43 bp, Homo sapiens; identical to SEQ ID NO: 203633
  chr14:65005557-65005600
  hypo

SEQ ID NO: 318006 - DNA, 97 bp, Homo sapiens; identical to SEQ ID NO: 290276
  chr14:65006319-65006416
  hypo

SEQ ID NO: 318007 - DNA, 38 bp, Homo sapiens; identical to SEQ ID NO: 266724
  chr14:65122507-65122545
  hypo

SEQ ID NO: 318008 - DNA, 190 bp, Homo sapiens; identical to SEQ ID NO: 215820
  chr14:65150031-65150221
  hypo

SEQ ID NO: 318009 - DNA, 291 bp, Homo sapiens; identical to SEQ ID NO: 266726
  chr14:65194543-65194834
  hypo

SEQ ID NO: 318010 - DNA, 239 bp, Homo sapiens; identical to SEQ ID NO: 215822
  chr14:65207951-65208190
  hypo

SEQ ID NO: 318011 - DNA, 140 bp, Homo sapiens; identical to SEQ ID NO: 215823
  chr14:65209828-65209968
  hypo

SEQ ID NO: 318012 - DNA, 146 bp, Homo sapiens; identical to SEQ ID NO: 266729
  chr14:65215874-65216020
  hypo

SEQ ID NO: 318013 - DNA, 142 bp, Homo sapiens; identical to SEQ ID NO: 215824
  chr14:65220230-65220372
  hypo

SEQ ID NO: 318014 - DNA, 289 bp, Homo sapiens
  chr14:65233479-65233768
  hypo
tggagcctcccctgctgtctcgccttcctcctcttgaggcctaaggaagacacagtctctctttagaaacaagcacccctctgaggccagtgcctcctgcgaggcctggcttttcacctgcgcccacagggaggagcaccaaatagctccccctccagtcagccggcagcctggatggtgcttggcaaggagccgcccagcgacttcttcggaaaagccaaggcagattcttcagaagggagccaggttccaggcagaacggcctgtggggccccgtgttcaggtggct

SEQ ID NO: 318015 - DNA, 155 bp, Homo sapiens; identical to SEQ ID NO: 266732
  chr14:65236141-65236296
  hypo

SEQ ID NO: 318016 - DNA, 84 bp, Homo sapiens; identical to SEQ ID NO: 215826
  chr14:65237647-65237731
  hypo

SEQ ID NO: 318017 - DNA, 64 bp, Homo sapiens; identical to SEQ ID NO: 215827
  chr14:65239794-65239858
  hypo

SEQ ID NO: 318018 - DNA, 54 bp, Homo sapiens; identical to SEQ ID NO: 215828
  chr14:65248987-65249041
  hypo

SEQ ID NO: 318019 - DNA, 397 bp, Homo sapiens; identical to SEQ ID NO: 266736
  chr14:65259855-65260252
  hypo

SEQ ID NO: 318020 - DNA, 89 bp, Homo sapiens; identical to SEQ ID NO: 266737
  chr14:65266471-65266560
  hypo

SEQ ID NO: 318021 - DNA, 221 bp, Homo sapiens; identical to SEQ ID NO: 215829
  chr14:65271602-65271823
  hypo

SEQ ID NO: 318022 - DNA, 43 bp, Homo sapiens; identical to SEQ ID NO: 266740
  chr14:65320614-65320657
  hypo

SEQ ID NO: 318023 - DNA, 128 bp, Homo sapiens; identical to SEQ ID NO: 266742
  chr14:65422098-65422226
  hypo

SEQ ID NO: 318024 - DNA, 34 bp, Homo sapiens; identical to SEQ ID NO: 215830
  chr14:65492492-65492526
  hypo

SEQ ID NO: 318025 - DNA, 119 bp, Homo sapiens; identical to SEQ ID NO: 215831
  chr14:65493164-65493283
  hypo

SEQ ID NO: 318026 - DNA, 35 bp, Homo sapiens; identical to SEQ ID NO: 266745
  chr14:65532138-65532173
  hypo

SEQ ID NO: 318027 - DNA, 394 bp, Homo sapiens; identical to SEQ ID NO: 266746
  chr14:65532353-65532747
  hypo

SEQ ID NO: 318028 - DNA, 34 bp, Homo sapiens; identical to SEQ ID NO: 266747
  chr14:65631813-65631847
  hypo

SEQ ID NO: 318029 - DNA, 176 bp, Homo sapiens; identical to SEQ ID NO: 266748
  chr14:65746810-65746986
  hypo

SEQ ID NO: 318030 - DNA, 218 bp, Homo sapiens; identical to SEQ ID NO: 266749
  chr14:66479541-66479759
  hypo

SEQ ID NO: 318031 - DNA, 61 bp, Homo sapiens; identical to SEQ ID NO: 266751
  chr14:66560926-66560987
  hypo

SEQ ID NO: 318032 - DNA, 42 bp, Homo sapiens; identical to SEQ ID NO: 215832
  chr14:66814104-66814146
  hypo

SEQ ID NO: 318033 - DNA, 32 bp, Homo sapiens; identical to SEQ ID NO: 266753
  chr14:66976290-66976322
  hypo

SEQ ID NO: 318034 - DNA, 48 bp, Homo sapiens; identical to SEQ ID NO: 266754
  chr14:66976357-66976405
  hypo

SEQ ID NO: 318035 - DNA, 37 bp, Homo sapiens; identical to SEQ ID NO: 266755
  chr14:66976456-66976493
  hypo

SEQ ID NO: 318036 - DNA, 169 bp, Homo sapiens; identical to SEQ ID NO: 215833
  chr14:67864421-67864590
  hypo

SEQ ID NO: 318037 - DNA, 84 bp, Homo sapiens; identical to SEQ ID NO: 215834
  chr14:67876365-67876449
  hypo

SEQ ID NO: 318038 - DNA, 179 bp, Homo sapiens; identical to SEQ ID NO: 266760
  chr14:67888349-67888528
  hypo

SEQ ID NO: 318039 - DNA, 142 bp, Homo sapiens; identical to SEQ ID NO: 266761
  chr14:67893184-67893326
  hypo

SEQ ID NO: 318040 - DNA, 82 bp, Homo sapiens; identical to SEQ ID NO: 215835
  chr14:68130375-68130457
  hypo

SEQ ID NO: 318041 - DNA, 54 bp, Homo sapiens; identical to SEQ ID NO: 266764
  chr14:68163051-68163105
  hypo

SEQ ID NO: 318042 - DNA, 329 bp, Homo sapiens; identical to SEQ ID NO: 266765
  chr14:68265539-68265868
  hypo

SEQ ID NO: 318043 - DNA, 98 bp, Homo sapiens; identical to SEQ ID NO: 215836
  chr14:68829198-68829296
  hypo

SEQ ID NO: 318044 - DNA, 42 bp, Homo sapiens; identical to SEQ ID NO: 266767
  chr14:68968539-68968581
  hypo

SEQ ID NO: 318045 - DNA, 98 bp, Homo sapiens; identical to SEQ ID NO: 266768
  chr14:68993117-68993215
  hypo

SEQ ID NO: 318046 - DNA, 132 bp, Homo sapiens; identical to SEQ ID NO: 266769
  chr14:69014215-69014347
  hypo

SEQ ID NO: 318047 - DNA, 99 bp, Homo sapiens; identical to SEQ ID NO: 266770
  chr14:69050653-69050752
  hypo

SEQ ID NO: 318048 - DNA, 252 bp, Homo sapiens; identical to SEQ ID NO: 266771
  chr14:69052663-69052915
  hypo

SEQ ID NO: 318049 - DNA, 93 bp, Homo sapiens; identical to SEQ ID NO: 266772
  chr14:69070516-69070609
  hypo

SEQ ID NO: 318050 - DNA, 88 bp, Homo sapiens
  chr14:69143561-69143649
  hypo
gactgtgtctccacatgcaggcagggccagcgtgaggtcaggattaaccagagaagctgtgctcttcttgcagcgccacactaggctg

SEQ ID NO: 318051 - DNA, 34 bp, Homo sapiens; identical to SEQ ID NO: 266774
  chr14:69144067-69144101
  hypo

SEQ ID NO: 318052 - DNA, 177 bp, Homo sapiens; identical to SEQ ID NO: 266775
  chr14:69144733-69144910
  hypo

SEQ ID NO: 318053 - DNA, 43 bp, Homo sapiens; identical to SEQ ID NO: 266776
  chr14:69153995-69154038
  hypo

SEQ ID NO: 318054 - DNA, 34 bp, Homo sapiens; identical to SEQ ID NO: 266777
  chr14:69154693-69154727
  hypo

SEQ ID NO: 318055 - DNA, 93 bp, Homo sapiens; identical to SEQ ID NO: 266778
  chr14:69218775-69218868
  hypo

SEQ ID NO: 318056 - DNA, 91 bp, Homo sapiens; identical to SEQ ID NO: 215837
  chr14:69245843-69245934
  hypo

SEQ ID NO: 318057 - DNA, 227 bp, Homo sapiens; identical to SEQ ID NO: 203648
  chr14:69259278-69259505
  hypo

SEQ ID NO: 318058 - DNA, 229 bp, Homo sapiens; identical to SEQ ID NO: 215839
  chr14:69278051-69278280
  hypo

SEQ ID NO: 318059 - DNA, 40 bp, Homo sapiens; identical to SEQ ID NO: 266781
  chr14:69337465-69337505
  hypo

SEQ ID NO: 318060 - DNA, 160 bp, Homo sapiens; identical to SEQ ID NO: 215840
  chr14:69345631-69345791
  hypo

SEQ ID NO: 318061 - DNA, 174 bp, Homo sapiens; identical to SEQ ID NO: 266783
  chr14:69347540-69347714
  hypo

SEQ ID NO: 318062 - DNA, 53 bp, Homo sapiens; identical to SEQ ID NO: 266784
  chr14:69352139-69352192
  hypo

SEQ ID NO: 318063 - DNA, 147 bp, Homo sapiens; identical to SEQ ID NO: 215841
  chr14:69352454-69352601
  hypo

SEQ ID NO: 318064 - DNA, 252 bp, Homo sapiens; identical to SEQ ID NO: 215842
  chr14:69354666-69354918
  hypo

SEQ ID NO: 318065 - DNA, 38 bp, Homo sapiens; identical to SEQ ID NO: 266787
  chr14:69385004-69385042
  hypo

SEQ ID NO: 318066 - DNA, 565 bp, Homo sapiens; identical to SEQ ID NO: 203650
  chr14:69444743-69445308
  hypo

SEQ ID NO: 318067 - DNA, 299 bp, Homo sapiens; identical to SEQ ID NO: 203651
  chr14:69445727-69446026
  hypo

SEQ ID NO: 318068 - DNA, 192 bp, Homo sapiens; identical to SEQ ID NO: 266788
  chr14:69470454-69470646
  hypo

SEQ ID NO: 318069 - DNA, 163 bp, Homo sapiens; identical to SEQ ID NO: 215845
  chr14:69550073-69550236
  hypo

SEQ ID NO: 318070 - DNA, 104 bp, Homo sapiens; identical to SEQ ID NO: 203653
  chr14:69618203-69618307
  hypo

SEQ ID NO: 318071 - DNA, 95 bp, Homo sapiens; identical to SEQ ID NO: 203654
  chr14:69658738-69658833
  hypo

SEQ ID NO: 318072 - DNA, 259 bp, Homo sapiens; identical to SEQ ID NO: 215848
  chr14:69666620-69666879
  hypo

SEQ ID NO: 318073 - DNA, 66 bp, Homo sapiens; identical to SEQ ID NO: 266791
  chr14:69824243-69824309
  hypo

SEQ ID NO: 318074 - DNA, 140 bp, Homo sapiens
  chr14:69867591-69867731
  hypo
tgggtgcggtggggcgcgcctgtagtcctagctactcaagaggataaggtaggaggattgcttgaacccaggagttggcctgggcaacattgagactctttctcttaaaaaaaaaaaaaaagaaaataaaaatcagtgac

SEQ ID NO: 318075 - DNA, 83 bp, Homo sapiens
  chr14:69867761-69867844
  hypo
ttcatgaagtttgttagaatcagaagagaggtattttttcagtctagcttttctgactcagactagttcgtagccactaagca

SEQ ID NO: 318076 - DNA, 353 bp, Homo sapiens; identical to SEQ ID NO: 224719
  chr14:70041211-70041564
  hypo

SEQ ID NO: 318077 - DNA, 46 bp, Homo sapiens; identical to SEQ ID NO: 215849
  chr14:70236218-70236264
  hypo

SEQ ID NO: 318078 - DNA, 440 bp, Homo sapiens; identical to SEQ ID NO: 215850
  chr14:70236294-70236734
  hypo

SEQ ID NO: 318079 - DNA, 87 bp, Homo sapiens; identical to SEQ ID NO: 266794
  chr14:70387802-70387889
  hypo

SEQ ID NO: 318080 - DNA, 526 bp, Homo sapiens; identical to SEQ ID NO: 290328
  chr14:70826032-70826558
  hypo

SEQ ID NO: 318081 - DNA, 60 bp, Homo sapiens; identical to SEQ ID NO: 224724
  chr14:71108798-71108858
  hypo

SEQ ID NO: 318082 - DNA, 40 bp, Homo sapiens; identical to SEQ ID NO: 266795
  chr14:71443359-71443399
  hypo

SEQ ID NO: 318083 - DNA, 43 bp, Homo sapiens; identical to SEQ ID NO: 266796
  chr14:71811496-71811539
  hypo

SEQ ID NO: 318084 - DNA, 67 bp, Homo sapiens; identical to SEQ ID NO: 266797
  chr14:72204250-72204317
  hypo

SEQ ID NO: 318085 - DNA, 42 bp, Homo sapiens; identical to SEQ ID NO: 266798
  chr14:72431251-72431293
  hypo

SEQ ID NO: 318086 - DNA, 36 bp, Homo sapiens; identical to SEQ ID NO: 215851
  chr14:72939848-72939884
  hypo

SEQ ID NO: 318087 - DNA, 35 bp, Homo sapiens; identical to SEQ ID NO: 215852
  chr14:72940124-72940159
  hypo

SEQ ID NO: 318088 - DNA, 149 bp, Homo sapiens
  chr14:73146625-73146774
  hypo
agggtggaccccgacgtgccttccctgcagaatcaggagcaagcctcagctggaggccactgccacagcctgctacctcggcctagcctttaatgagggctgcgggaggagggagaggcgggctggggagacaaggcgcctgcgaggag

SEQ ID NO: 318089 - DNA, 112 bp, Homo sapiens
  chr14:73147137-73147249
  hypo
cctggaagcctggcggggaagcagacagtagggcccgctccccacaggaccctccaatcgtcagagccctcgacggcagagaactcgctctccccacaggccatcttgccac

SEQ ID NO: 318090 - DNA, 62 bp, Homo sapiens
  chr14:73167899-73167961
  hypo
cacctctgaagccaccacccctgggaccagtcagccctgcctgtgcacgacctaaggtcctt

SEQ ID NO: 318091 - DNA, 38 bp, Homo sapiens; identical to SEQ ID NO: 266807
  chr14:73213601-73213639
  hypo

SEQ ID NO: 318092 - DNA, 161 bp, Homo sapiens; identical to SEQ ID NO: 266808
  chr14:73238398-73238559
  hypo

SEQ ID NO: 318093 - DNA, 172 bp, Homo sapiens
  chr14:73302728-73302900
  hypo
accacacgggtgcctcggggagatgctggagacacaagtggctttgaaattagcacaacttacatggcctccaggtctgctgtggaaatccaggtccaaagaagaagccagtgaggaacaggaggctgatcattgtgttctcagaaggggttggagcctctggggagggggc

SEQ ID NO: 318094 - DNA, 215 bp, Homo sapiens; identical to SEQ ID NO: 266810
  chr14:73302930-73303145
  hypo

SEQ ID NO: 318095 - DNA, 75 bp, Homo sapiens; identical to SEQ ID NO: 290335
  chr14:73358889-73358964
  hypo

SEQ ID NO: 318096 - DNA, 254 bp, Homo sapiens; identical to SEQ ID NO: 290336
  chr14:73359040-73359294
  hypo

SEQ ID NO: 318097 - DNA, 200 bp, Homo sapiens; identical to SEQ ID NO: 290337
  chr14:73359490-73359690
  hypo

SEQ ID NO: 318098 - DNA, 500 bp, Homo sapiens; identical to SEQ ID NO: 290338
  chr14:73359750-73360250
  hypo

SEQ ID NO: 318099 - DNA, 88 bp, Homo sapiens; identical to SEQ ID NO: 215855
  chr14:73390960-73391048
  hypo

SEQ ID NO: 318100 - DNA, 442 bp, Homo sapiens; identical to SEQ ID NO: 266813
  chr14:73391899-73392341
  hypo

SEQ ID NO: 318101 - DNA, 474 bp, Homo sapiens; identical to SEQ ID NO: 290341
  chr14:73393144-73393618
  hypo

SEQ ID NO: 318102 - DNA, 73 bp, Homo sapiens; identical to SEQ ID NO: 215858
  chr14:73428614-73428687
  hypo

SEQ ID NO: 318103 - DNA, 335 bp, Homo sapiens; identical to SEQ ID NO: 215859
  chr14:73459712-73460047
  hypo

SEQ ID NO: 318104 - DNA, 251 bp, Homo sapiens; identical to SEQ ID NO: 266816
  chr14:73464663-73464914
  hypo

SEQ ID NO: 318105 - DNA, 180 bp, Homo sapiens; identical to SEQ ID NO: 266817
  chr14:73482390-73482570
  hypo

SEQ ID NO: 318106 - DNA, 89 bp, Homo sapiens; identical to SEQ ID NO: 266818
  chr14:73482875-73482964
  hypo

SEQ ID NO: 318107 - DNA, 31 bp, Homo sapiens; identical to SEQ ID NO: 266819
  chr14:73687399-73687430
  hypo

SEQ ID NO: 318108 - DNA, 364 bp, Homo sapiens; identical to SEQ ID NO: 266820
  chr14:73708407-73708771
  hypo

SEQ ID NO: 318109 - DNA, 35 bp, Homo sapiens; identical to SEQ ID NO: 215860
  chr14:73855377-73855412
  hypo

SEQ ID NO: 318110 - DNA, 37 bp, Homo sapiens; identical to SEQ ID NO: 266822
  chr14:73926314-73926351
  hypo

SEQ ID NO: 318111 - DNA, 138 bp, Homo sapiens; identical to SEQ ID NO: 266823
  chr14:73967285-73967423
  hypo

SEQ ID NO: 318112 - DNA, 417 bp, Homo sapiens; identical to SEQ ID NO: 224728
  chr14:74100395-74100812
  hypo

SEQ ID NO: 318113 - DNA, 154 bp, Homo sapiens; identical to SEQ ID NO: 203662
  chr14:74111425-74111579
  hypo

SEQ ID NO: 318114 - DNA, 93 bp, Homo sapiens; identical to SEQ ID NO: 215862
  chr14:74113149-74113242
  hypo

SEQ ID NO: 318115 - DNA, 32 bp, Homo sapiens; identical to SEQ ID NO: 266825
  chr14:74142425-74142457
  hypo

SEQ ID NO: 318116 - DNA, 521 bp, Homo sapiens; identical to SEQ ID NO: 290348
  chr14:74180377-74180898
  hypo

SEQ ID NO: 318117 - DNA, 1185 bp, Homo sapiens; identical to SEQ ID NO: 266826
  chr14:74184829-74186014
  hypo

SEQ ID NO: 318118 - DNA, 244 bp, Homo sapiens; identical to SEQ ID NO: 266827
  chr14:74196426-74196670
  hypo

SEQ ID NO: 318119 - DNA, 262 bp, Homo sapiens; identical to SEQ ID NO: 266828
  chr14:74206017-74206279
  hypo

SEQ ID NO: 318120 - DNA, 39 bp, Homo sapiens; identical to SEQ ID NO: 215866
  chr14:74244737-74244776
  hypo

SEQ ID NO: 318121 - DNA, 136 bp, Homo sapiens; identical to SEQ ID NO: 9841
  chr14:74253328-74253464
  hypo

SEQ ID NO: 318122 - DNA, 69 bp, Homo sapiens
  chr14:74273439-74273508
  hypo
ttagagatgctgggaggagcttgtgccaaagtctgcacaaaattgagtttagaaaaaattactgccggg

SEQ ID NO: 318123 - DNA, 35 bp, Homo sapiens; identical to SEQ ID NO: 215868
  chr14:74369046-74369081
  hypo

SEQ ID NO: 318124 - DNA, 91 bp, Homo sapiens; identical to SEQ ID NO: 215869
  chr14:74418713-74418804
  hypo

SEQ ID NO: 318125 - DNA, 88 bp, Homo sapiens; identical to SEQ ID NO: 215870
  chr14:74626548-74626636
  hypo

SEQ ID NO: 318126 - DNA, 161 bp, Homo sapiens; identical to SEQ ID NO: 215871
  chr14:74628386-74628547
  hypo

SEQ ID NO: 318127 - DNA, 85 bp, Homo sapiens; identical to SEQ ID NO: 266835
  chr14:74954263-74954348
  hypo

SEQ ID NO: 318128 - DNA, 94 bp, Homo sapiens; identical to SEQ ID NO: 215872
  chr14:74957659-74957753
  hypo

SEQ ID NO: 318129 - DNA, 34 bp, Homo sapiens; identical to SEQ ID NO: 266837
  chr14:74958053-74958087
  hypo

SEQ ID NO: 318130 - DNA, 81 bp, Homo sapiens; identical to SEQ ID NO: 266839
  chr14:75062987-75063068
  hypo

SEQ ID NO: 318131 - DNA, 39 bp, Homo sapiens; identical to SEQ ID NO: 266840
  chr14:75416062-75416101
  hypo

SEQ ID NO: 318132 - DNA, 71 bp, Homo sapiens; identical to SEQ ID NO: 215873
  chr14:75423075-75423146
  hypo

SEQ ID NO: 318133 - DNA, 285 bp, Homo sapiens; identical to SEQ ID NO: 266842
  chr14:75567772-75568057
  hypo

SEQ ID NO: 318134 - DNA, 41 bp, Homo sapiens; identical to SEQ ID NO: 266843
  chr14:75616514-75616555
  hypo

SEQ ID NO: 318135 - DNA, 39 bp, Homo sapiens; identical to SEQ ID NO: 266844
  chr14:75641440-75641479
  hypo

SEQ ID NO: 318136 - DNA, 196 bp, Homo sapiens; identical to SEQ ID NO: 203675
  chr14:75743668-75743864
  hypo

SEQ ID NO: 318137 - DNA, 165 bp, Homo sapiens; identical to SEQ ID NO: 203676
  chr14:75743897-75744062
  hypo

SEQ ID NO: 318138 - DNA, 71 bp, Homo sapiens; identical to SEQ ID NO: 215876
  chr14:75747281-75747352
  hypo

SEQ ID NO: 318139 - DNA, 326 bp, Homo sapiens; identical to SEQ ID NO: 266846
  chr14:75747940-75748266
  hypo

SEQ ID NO: 318140 - DNA, 165 bp, Homo sapiens; identical to SEQ ID NO: 215877
  chr14:75749314-75749479
  hypo

SEQ ID NO: 318141 - DNA, 404 bp, Homo sapiens; identical to SEQ ID NO: 266849
  chr14:76012913-76013317
  hypo

SEQ ID NO: 318142 - DNA, 35 bp, Homo sapiens; identical to SEQ ID NO: 215879
  chr14:76128639-76128674
  hypo

SEQ ID NO: 318143 - DNA, 175 bp, Homo sapiens; identical to SEQ ID NO: 266851
  chr14:76431242-76431417
  hypo

SEQ ID NO: 318144 - DNA, 136 bp, Homo sapiens; identical to SEQ ID NO: 215880
  chr14:76446058-76446194
  hypo

SEQ ID NO: 318145 - DNA, 86 bp, Homo sapiens; identical to SEQ ID NO: 215881
  chr14:76446468-76446554
  hypo

SEQ ID NO: 318146 - DNA, 321 bp, Homo sapiens; identical to SEQ ID NO: 87130
  chr14:76446750-76447071
  hypo

SEQ ID NO: 318147 - DNA, 160 bp, Homo sapiens; identical to SEQ ID NO: 215883
  chr14:76447285-76447445
  hypo

SEQ ID NO: 318148 - DNA, 104 bp, Homo sapiens
  chr14:76461806-76461910
  hypo
cagaactgaaagttagccagattccctcgcaggaatctgagaaatgctgctgggctcatgttcccaaattaggccaatttcctcatcccccagcagcctcactc

SEQ ID NO: 318149 - DNA, 114 bp, Homo sapiens; identical to SEQ ID NO: 266856
  chr14:76600679-76600793
  hypo

SEQ ID NO: 318150 - DNA, 89 bp, Homo sapiens; identical to SEQ ID NO: 266857
  chr14:76628408-76628497
  hypo

SEQ ID NO: 318151 - DNA, 32 bp, Homo sapiens; identical to SEQ ID NO: 266858
  chr14:76738013-76738045
  hypo

SEQ ID NO: 318152 - DNA, 577 bp, Homo sapiens; identical to SEQ ID NO: 266859
  chr14:76905595-76906172
  hypo

SEQ ID NO: 318153 - DNA, 36 bp, Homo sapiens; identical to SEQ ID NO: 215884
  chr14:76998229-76998265
  hypo

SEQ ID NO: 318154 - DNA, 136 bp, Homo sapiens
  chr14:77242297-77242433
  hypo
agggaactacttccgccacatcgtgctgggggtgaacttcgcgggccgctacggtgcgctgggcatgagtcggcgcgaggacctgatgtacaagccgcccgccttccgcacgctcagcgagctcgtgctggacttc

SEQ ID NO: 318155 - DNA, 91 bp, Homo sapiens; identical to SEQ ID NO: 266862
  chr14:77370516-77370607
  hypo

SEQ ID NO: 318156 - DNA, 33 bp, Homo sapiens; identical to SEQ ID NO: 266863
  chr14:77426436-77426469
  hypo

SEQ ID NO: 318157 - DNA, 103 bp, Homo sapiens; identical to SEQ ID NO: 266864
  chr14:77433610-77433713
  hypo

SEQ ID NO: 318158 - DNA, 60 bp, Homo sapiens; identical to SEQ ID NO: 266865
  chr14:77434976-77435036
  hypo

SEQ ID NO: 318159 - DNA, 38 bp, Homo sapiens; identical to SEQ ID NO: 266866
  chr14:77437670-77437708
  hypo

SEQ ID NO: 318160 - DNA, 295 bp, Homo sapiens; identical to SEQ ID NO: 203682
  chr14:77493464-77493759
  hypo

SEQ ID NO: 318161 - DNA, 180 bp, Homo sapiens; identical to SEQ ID NO: 266867
  chr14:77580196-77580376
  hypo

SEQ ID NO: 318162 - DNA, 132 bp, Homo sapiens; identical to SEQ ID NO: 203685
  chr14:77591041-77591173
  hypo

SEQ ID NO: 318163 - DNA, 116 bp, Homo sapiens; identical to SEQ ID NO: 203686
  chr14:77591751-77591867
  hypo

SEQ ID NO: 318164 - DNA, 568 bp, Homo sapiens; identical to SEQ ID NO: 290397
  chr14:77605688-77606256
  hypo

SEQ ID NO: 318165 - DNA, 138 bp, Homo sapiens; identical to SEQ ID NO: 290400
  chr14:77736729-77736867
  hypo

SEQ ID NO: 318166 - DNA, 97 bp, Homo sapiens; identical to SEQ ID NO: 290401
  chr14:77736883-77736980
  hypo

SEQ ID NO: 318167 - DNA, 163 bp, Homo sapiens; identical to SEQ ID NO: 266868
  chr14:77769161-77769324
  hypo

SEQ ID NO: 318168 - DNA, 31 bp, Homo sapiens; identical to SEQ ID NO: 215888
  chr14:77935683-77935714
  hypo

SEQ ID NO: 318169 - DNA, 102 bp, Homo sapiens; identical to SEQ ID NO: 266870
  chr14:77937151-77937253
  hypo

SEQ ID NO: 318170 - DNA, 101 bp, Homo sapiens; identical to SEQ ID NO: 266871
  chr14:77939354-77939455
  hypo

SEQ ID NO: 318171 - DNA, 69 bp, Homo sapiens; identical to SEQ ID NO: 266872
  chr14:77942016-77942085
  hypo

SEQ ID NO: 318172 - DNA, 82 bp, Homo sapiens; identical to SEQ ID NO: 290405
  chr14:77965137-77965219
  hypo

SEQ ID NO: 318173 - DNA, 180 bp, Homo sapiens; identical to SEQ ID NO: 290406
  chr14:77965244-77965424
  hypo

SEQ ID NO: 318174 - DNA, 37 bp, Homo sapiens; identical to SEQ ID NO: 266873
  chr14:78152933-78152970
  hypo

SEQ ID NO: 318175 - DNA, 31 bp, Homo sapiens; identical to SEQ ID NO: 215889
  chr14:78166103-78166134
  hypo

SEQ ID NO: 318176 - DNA, 144 bp, Homo sapiens; identical to SEQ ID NO: 215890
  chr14:78189475-78189619
  hypo

SEQ ID NO: 318177 - DNA, 36 bp, Homo sapiens; identical to SEQ ID NO: 266877
  chr14:78228357-78228393
  hypo

SEQ ID NO: 318178 - DNA, 31 bp, Homo sapiens; identical to SEQ ID NO: 266879
  chr14:78268994-78269025
  hypo

SEQ ID NO: 318179 - DNA, 95 bp, Homo sapiens; identical to SEQ ID NO: 215891
  chr14:78335482-78335577
  hypo

SEQ ID NO: 318180 - DNA, 34 bp, Homo sapiens; identical to SEQ ID NO: 215892
  chr14:78335637-78335671
  hypo

SEQ ID NO: 318181 - DNA, 37 bp, Homo sapiens; identical to SEQ ID NO: 215893
  chr14:78388714-78388751
  hypo

SEQ ID NO: 318182 - DNA, 207 bp, Homo sapiens; identical to SEQ ID NO: 215894
  chr14:81231425-81231632
  hypo

SEQ ID NO: 318183 - DNA, 75 bp, Homo sapiens; identical to SEQ ID NO: 266884
  chr14:81439765-81439840
  hypo

SEQ ID NO: 318184 - DNA, 40 bp, Homo sapiens
  chr14:81489205-81489245
  hypo
tgggtcatgaaggtggagcgctcattaatgagcttattaa

SEQ ID NO: 318185 - DNA, 114 bp, Homo sapiens; identical to SEQ ID NO: 266886
  chr14:81609903-81610017
  hypo

SEQ ID NO: 318186 - DNA, 300 bp, Homo sapiens; identical to SEQ ID NO: 266887
  chr14:81879110-81879410
  hypo

SEQ ID NO: 318187 - DNA, 37 bp, Homo sapiens; identical to SEQ ID NO: 266888
  chr14:81904519-81904556
  hypo

SEQ ID NO: 318188 - DNA, 102 bp, Homo sapiens; identical to SEQ ID NO: 266889
  chr14:82295806-82295908
  hypo

SEQ ID NO: 318189 - DNA, 34 bp, Homo sapiens; identical to SEQ ID NO: 266890
  chr14:86054380-86054414
  hypo

SEQ ID NO: 318190 - DNA, 75 bp, Homo sapiens; identical to SEQ ID NO: 266891
  chr14:87963380-87963455
  hypo

SEQ ID NO: 318191 - DNA, 78 bp, Homo sapiens; identical to SEQ ID NO: 215895
  chr14:88457502-88457580
  hypo

SEQ ID NO: 318192 - DNA, 77 bp, Homo sapiens; identical to SEQ ID NO: 215896
  chr14:88457820-88457897
  hypo

SEQ ID NO: 318193 - DNA, 163 bp, Homo sapiens; identical to SEQ ID NO: 290421
  chr14:88458964-88459127
  hypo

SEQ ID NO: 318194 - DNA, 239 bp, Homo sapiens; identical to SEQ ID NO: 290422
  chr14:88459170-88459409
  hypo

SEQ ID NO: 318195 - DNA, 78 bp, Homo sapiens; identical to SEQ ID NO: 203698
  chr14:88459631-88459709
  hypo

SEQ ID NO: 318196 - DNA, 33 bp, Homo sapiens; identical to SEQ ID NO: 215898
  chr14:88527464-88527497
  hypo

SEQ ID NO: 318197 - DNA, 33 bp, Homo sapiens; identical to SEQ ID NO: 215899
  chr14:88527737-88527770
  hypo

SEQ ID NO: 318198 - DNA, 147 bp, Homo sapiens; identical to SEQ ID NO: 266896
  chr14:88587438-88587585
  hypo

SEQ ID NO: 318199 - DNA, 168 bp, Homo sapiens; identical to SEQ ID NO: 215900
  chr14:88625251-88625419
  hypo

SEQ ID NO: 318200 - DNA, 36 bp, Homo sapiens; identical to SEQ ID NO: 215901
  chr14:88686789-88686825
  hypo

SEQ ID NO: 318201 - DNA, 306 bp, Homo sapiens; identical to SEQ ID NO: 290424
  chr14:88789656-88789962
  hypo

SEQ ID NO: 318202 - DNA, 102 bp, Homo sapiens; identical to SEQ ID NO: 266899
  chr14:88954653-88954755
  hypo

SEQ ID NO: 318203 - DNA, 782 bp, Homo sapiens; identical to SEQ ID NO: 203701
  chr14:89020631-89021413
  hypo

SEQ ID NO: 318204 - DNA, 725 bp, Homo sapiens; identical to SEQ ID NO: 290430
  chr14:89290490-89291215
  hypo

SEQ ID NO: 318205 - DNA, 104 bp, Homo sapiens; identical to SEQ ID NO: 266900
  chr14:89291876-89291980
  hypo

SEQ ID NO: 318206 - DNA, 180 bp, Homo sapiens; identical to SEQ ID NO: 215906
  chr14:89292610-89292790
  hypo

SEQ ID NO: 318207 - DNA, 238 bp, Homo sapiens; identical to SEQ ID NO: 203703
  chr14:89506861-89507099
  hypo

SEQ ID NO: 318208 - DNA, 87 bp, Homo sapiens
  chr14:89579158-89579245
  hypo
gagaccaagaacccaccaattccagacacagtggggcgcactgggcatggtacaggagccctttcacctgcgcctgccgacggttgc

SEQ ID NO: 318209 - DNA, 435 bp, Homo sapiens; identical to SEQ ID NO: 266903
  chr14:89627946-89628381
  hypo

SEQ ID NO: 318210 - DNA, 181 bp, Homo sapiens; identical to SEQ ID NO: 266904
  chr14:89646424-89646605
  hypo

SEQ ID NO: 318211 - DNA, 81 bp, Homo sapiens; identical to SEQ ID NO: 215909
  chr14:89657793-89657874
  hypo

SEQ ID NO: 318212 - DNA, 166 bp, Homo sapiens; identical to SEQ ID NO: 215910
  chr14:89711495-89711661
  hypo

SEQ ID NO: 318213 - DNA, 207 bp, Homo sapiens; identical to SEQ ID NO: 266907
  chr14:89720605-89720812
  hypo

SEQ ID NO: 318214 - DNA, 216 bp, Homo sapiens; identical to SEQ ID NO: 266908
  chr14:89775981-89776197
  hypo

SEQ ID NO: 318215 - DNA, 155 bp, Homo sapiens; identical to SEQ ID NO: 266909
  chr14:89786299-89786454
  hypo

SEQ ID NO: 318216 - DNA, 152 bp, Homo sapiens; identical to SEQ ID NO: 266910
  chr14:89803723-89803875
  hypo

SEQ ID NO: 318217 - DNA, 247 bp, Homo sapiens; identical to SEQ ID NO: 215911
  chr14:89811174-89811421
  hypo

SEQ ID NO: 318218 - DNA, 40 bp, Homo sapiens; identical to SEQ ID NO: 266912
  chr14:89819261-89819301
  hypo

SEQ ID NO: 318219 - DNA, 118 bp, Homo sapiens; identical to SEQ ID NO: 266913
  chr14:89875710-89875828
  hypo

SEQ ID NO: 318220 - DNA, 170 bp, Homo sapiens
  chr14:89895064-89895234
  hypo
ttgctcgcagcagacgtcagagagacctcagcgcaggggtccaagcacctggccaaggcaccctgcgcaggcctccacgccccacgagtgcctgcagaggctacctgaggaccaaggtgggcatgccacggtgtcctggacttctggatggaggccagtcccagggagtg

SEQ ID NO: 318221 - DNA, 235 bp, Homo sapiens; identical to SEQ ID NO: 266916
  chr14:89956432-89956667
  hypo

SEQ ID NO: 318222 - DNA, 481 bp, Homo sapiens; identical to SEQ ID NO: 290436
  chr14:90085316-90085797
  hypo

SEQ ID NO: 318223 - DNA, 88 bp, Homo sapiens; identical to SEQ ID NO: 266917
  chr14:90097939-90098027
  hypo

SEQ ID NO: 318224 - DNA, 182 bp, Homo sapiens; identical to SEQ ID NO: 224749
  chr14:90167708-90167890
  hypo

SEQ ID NO: 318225 - DNA, 39 bp, Homo sapiens; identical to SEQ ID NO: 266918
  chr14:90323676-90323715
  hypo

SEQ ID NO: 318226 - DNA, 235 bp, Homo sapiens; identical to SEQ ID NO: 266919
  chr14:90358154-90358389
  hypo

SEQ ID NO: 318227 - DNA, 360 bp, Homo sapiens; identical to SEQ ID NO: 290438
  chr14:90420659-90421019
  hypo

SEQ ID NO: 318228 - DNA, 200 bp, Homo sapiens; identical to SEQ ID NO: 9902
  chr14:90421129-90421329
  hypo

SEQ ID NO: 318229 - DNA, 727 bp, Homo sapiens; identical to SEQ ID NO: 203709
  chr14:90422068-90422795
  hypo

SEQ ID NO: 318230 - DNA, 167 bp, Homo sapiens; identical to SEQ ID NO: 266920
  chr14:90429698-90429865
  hypo

SEQ ID NO: 318231 - DNA, 163 bp, Homo sapiens; identical to SEQ ID NO: 215917
  chr14:90505789-90505952
  hypo

SEQ ID NO: 318232 - DNA, 332 bp, Homo sapiens; identical to SEQ ID NO: 203710
  chr14:90527180-90527512
  hypo

SEQ ID NO: 318233 - DNA, 226 bp, Homo sapiens; identical to SEQ ID NO: 203711
  chr14:90527931-90528157
  hypo

SEQ ID NO: 318234 - DNA, 91 bp, Homo sapiens; identical to SEQ ID NO: 266922
  chr14:90747429-90747520
  hypo

SEQ ID NO: 318235 - DNA, 165 bp, Homo sapiens; identical to SEQ ID NO: 215920
  chr14:90754241-90754406
  hypo

SEQ ID NO: 318236 - DNA, 382 bp, Homo sapiens; identical to SEQ ID NO: 203714
  chr14:90849476-90849858
  hypo

SEQ ID NO: 318237 - DNA, 53 bp, Homo sapiens; identical to SEQ ID NO: 203715
  chr14:90849897-90849950
  hypo

SEQ ID NO: 318238 - DNA, 177 bp, Homo sapiens; identical to SEQ ID NO: 266924
  chr14:90871525-90871702
  hypo

SEQ ID NO: 318239 - DNA, 214 bp, Homo sapiens; identical to SEQ ID NO: 266925
  chr14:90980461-90980675
  hypo

SEQ ID NO: 318240 - DNA, 109 bp, Homo sapiens
  chr14:90983360-90983469
  hypo
tctcatgcgccagtctccagccgctcctcgctattccccaggctctgggacggtggagttagctgaccaggcagaagttggctccctggcagcacgctggtggtcccaa

SEQ ID NO: 318241 - DNA, 164 bp, Homo sapiens; identical to SEQ ID NO: 266927
  chr14:90988561-90988725
  hypo

SEQ ID NO: 318242 - DNA, 90 bp, Homo sapiens; identical to SEQ ID NO: 266928
  chr14:90989573-90989663
  hypo

SEQ ID NO: 318243 - DNA, 168 bp, Homo sapiens; identical to SEQ ID NO: 266929
  chr14:91007706-91007874
  hypo

SEQ ID NO: 318244 - DNA, 103 bp, Homo sapiens; identical to SEQ ID NO: 266930
  chr14:91077534-91077637
  hypo

SEQ ID NO: 318245 - DNA, 176 bp, Homo sapiens; identical to SEQ ID NO: 266931
  chr14:91091768-91091944
  hypo

SEQ ID NO: 318246 - DNA, 131 bp, Homo sapiens; identical to SEQ ID NO: 215923
  chr14:91127198-91127329
  hypo

SEQ ID NO: 318247 - DNA, 187 bp, Homo sapiens; identical to SEQ ID NO: 266933
  chr14:91589623-91589810
  hypo

SEQ ID NO: 318248 - DNA, 35 bp, Homo sapiens; identical to SEQ ID NO: 266934
  chr14:91590535-91590570
  hypo

SEQ ID NO: 318249 - DNA, 117 bp, Homo sapiens; identical to SEQ ID NO: 215924
  chr14:91691046-91691163
  hypo

SEQ ID NO: 318250 - DNA, 38 bp, Homo sapiens
  chr14:91691822-91691860
  hypo
cagcaggtgatcagatcgactgtcatggtattgcagtg

SEQ ID NO: 318251 - DNA, 157 bp, Homo sapiens; identical to SEQ ID NO: 266937
  chr14:91701162-91701319
  hypo

SEQ ID NO: 318252 - DNA, 161 bp, Homo sapiens; identical to SEQ ID NO: 266938
  chr14:91712444-91712605
  hypo

SEQ ID NO: 318253 - DNA, 53 bp, Homo sapiens; identical to SEQ ID NO: 266939
  chr14:91731775-91731828
  hypo

SEQ ID NO: 318254 - DNA, 62 bp, Homo sapiens; identical to SEQ ID NO: 215925
  chr14:91739006-91739068
  hypo

SEQ ID NO: 318255 - DNA, 408 bp, Homo sapiens; identical to SEQ ID NO: 266941
  chr14:91744077-91744485
  hypo

SEQ ID NO: 318256 - DNA, 172 bp, Homo sapiens; identical to SEQ ID NO: 215927
  chr14:91750811-91750983
  hypo

SEQ ID NO: 318257 - DNA, 288 bp, Homo sapiens; identical to SEQ ID NO: 224757
  chr14:91755343-91755631
  hypo

SEQ ID NO: 318258 - DNA, 287 bp, Homo sapiens; identical to SEQ ID NO: 266943
  chr14:91757479-91757766
  hypo

SEQ ID NO: 318259 - DNA, 67 bp, Homo sapiens
  chr14:91758193-91758260
  hypo
gcacctctgcttaccggggagaccttggccttcctcatacaaacagaaagcttctgtttgcacttag

SEQ ID NO: 318260 - DNA, 395 bp, Homo sapiens; identical to SEQ ID NO: 215929
  chr14:91770038-91770433
  hypo

SEQ ID NO: 318261 - DNA, 100 bp, Homo sapiens; identical to SEQ ID NO: 215930
  chr14:91775792-91775892
  hypo

SEQ ID NO: 318262 - DNA, 123 bp, Homo sapiens
  chr14:91780259-91780382
  hypo
ccagcttctctgcccgctcccccttctccttggcctgctccaagtccctgtgcagctgccgcttctcaaactccaactggctgagcttgccattggcctccgtcaccgtctggtggagggctt

SEQ ID NO: 318263 - DNA, 168 bp, Homo sapiens; identical to SEQ ID NO: 215931
  chr14:91781818-91781986
  hypo

SEQ ID NO: 318264 - DNA, 252 bp, Homo sapiens; identical to SEQ ID NO: 266951
  chr14:91801542-91801794
  hypo

SEQ ID NO: 318265 - DNA, 413 bp, Homo sapiens; identical to SEQ ID NO: 266952
  chr14:91804341-91804754
  hypo

SEQ ID NO: 318266 - DNA, 1310 bp, Homo sapiens; identical to SEQ ID NO: 266953
  chr14:91805118-91806428
  hypo

SEQ ID NO: 318267 - DNA, 199 bp, Homo sapiens; identical to SEQ ID NO: 266954
  chr14:91808060-91808259
  hypo

SEQ ID NO: 318268 - DNA, 104 bp, Homo sapiens; identical to SEQ ID NO: 215934
  chr14:91825112-91825216
  hypo

SEQ ID NO: 318269 - DNA, 53 bp, Homo sapiens; identical to SEQ ID NO: 215935
  chr14:91841581-91841634
  hypo

SEQ ID NO: 318270 - DNA, 224 bp, Homo sapiens; identical to SEQ ID NO: 266958
  chr14:91841940-91842164
  hypo

SEQ ID NO: 318271 - DNA, 236 bp, Homo sapiens; identical to SEQ ID NO: 215936
  chr14:91842554-91842790
  hypo

SEQ ID NO: 318272 - DNA, 189 bp, Homo sapiens; identical to SEQ ID NO: 215937
  chr14:91848934-91849123
  hypo

SEQ ID NO: 318273 - DNA, 207 bp, Homo sapiens; identical to SEQ ID NO: 215938
  chr14:91850943-91851150
  hypo

SEQ ID NO: 318274 - DNA, 213 bp, Homo sapiens; identical to SEQ ID NO: 266962
  chr14:91871519-91871732
  hypo

SEQ ID NO: 318275 - DNA, 118 bp, Homo sapiens; identical to SEQ ID NO: 290458
  chr14:91883379-91883497
  hypo

SEQ ID NO: 318276 - DNA, 420 bp, Homo sapiens; identical to SEQ ID NO: 125084
  chr14:91883530-91883950
  hypo

SEQ ID NO: 318277 - DNA, 479 bp, Homo sapiens; identical to SEQ ID NO: 290461
  chr14:91976436-91976915
  hypo

SEQ ID NO: 318278 - DNA, 199 bp, Homo sapiens; identical to SEQ ID NO: 215940
  chr14:92492743-92492942
  hypo

SEQ ID NO: 318279 - DNA, 43 bp, Homo sapiens; identical to SEQ ID NO: 266964
  chr14:92507492-92507535
  hypo

SEQ ID NO: 318280 - DNA, 39 bp, Homo sapiens; identical to SEQ ID NO: 266966
  chr14:92573383-92573422
  hypo

SEQ ID NO: 318281 - DNA, 43 bp, Homo sapiens; identical to SEQ ID NO: 266967
  chr14:92825888-92825931
  hypo

SEQ ID NO: 318282 - DNA, 187 bp, Homo sapiens; identical to SEQ ID NO: 203723
  chr14:92980770-92980957
  hypo

SEQ ID NO: 318283 - DNA, 44 bp, Homo sapiens; identical to SEQ ID NO: 266968
  chr14:92992506-92992550
  hypo

SEQ ID NO: 318284 - DNA, 338 bp, Homo sapiens; identical to SEQ ID NO: 266969
  chr14:92994813-92995151
  hypo

SEQ ID NO: 318285 - DNA, 44 bp, Homo sapiens; identical to SEQ ID NO: 266970
  chr14:93042658-93042702
  hypo

SEQ ID NO: 318286 - DNA, 225 bp, Homo sapiens; identical to SEQ ID NO: 266971
  chr14:93115303-93115528
  hypo

SEQ ID NO: 318287 - DNA, 129 bp, Homo sapiens; identical to SEQ ID NO: 266972
  chr14:93140294-93140423
  hypo

SEQ ID NO: 318288 - DNA, 100 bp, Homo sapiens; identical to SEQ ID NO: 266973
  chr14:93149543-93149643
  hypo

SEQ ID NO: 318289 - DNA, 159 bp, Homo sapiens
  chr14:93154728-93154887
  hypo
caggacagttgtgaaaataacatgacgctcgtccaaggccacttcctgagggcaagtcctaatagccctgagacaccgagacggcatgttcttcattagacggaaagggaaactgaggctcaggagagaggcgctccaggccgctgcagccaacaaacc

SEQ ID NO: 318290 - DNA, 103 bp, Homo sapiens; identical to SEQ ID NO: 266975
  chr14:93226911-93227014
  hypo

SEQ ID NO: 318291 - DNA, 112 bp, Homo sapiens; identical to SEQ ID NO: 266976
  chr14:93415129-93415241
  hypo

SEQ ID NO: 318292 - DNA, 713 bp, Homo sapiens; identical to SEQ ID NO: 266977
  chr14:93423289-93424002
  hypo

SEQ ID NO: 318293 - DNA, 342 bp, Homo sapiens
  chr14:93425270-93425612
  hypo
ttcacagatgaggacgatgaggcgctgagaggttcagtgactgctggacagtgagtgagcccgggatggaactgggtctgcacagcacccagccgcgcccctacacacggagccatgtgatactccgcaaacaacaggcctttgtgctcctggtccccgactcctctggggaaaaaggtccctgacaggaggatctggtaggggctggggtagggagtgcaggggggcagctgccaaaaccctctcagccccggccagcacgggctctgcacagggtctgctctaaggacagaggggtgggccctaggcctagccgatccagctgctggtgccagggtcatg

SEQ ID NO: 318294 - DNA, 211 bp, Homo sapiens; identical to SEQ ID NO: 266979
  chr14:93426323-93426534
  hypo

SEQ ID NO: 318295 - DNA, 240 bp, Homo sapiens; identical to SEQ ID NO: 266980
  chr14:93426785-93427025
  hypo

SEQ ID NO: 318296 - DNA, 557 bp, Homo sapiens; identical to SEQ ID NO: 266981
  chr14:93454159-93454716
  hypo

SEQ ID NO: 318297 - DNA, 189 bp, Homo sapiens; identical to SEQ ID NO: 215945
  chr14:93486022-93486211
  hypo

SEQ ID NO: 318298 - DNA, 181 bp, Homo sapiens; identical to SEQ ID NO: 266983
  chr14:93494484-93494665
  hypo

SEQ ID NO: 318299 - DNA, 136 bp, Homo sapiens; identical to SEQ ID NO: 266984
  chr14:93495039-93495175
  hypo

SEQ ID NO: 318300 - DNA, 180 bp, Homo sapiens; identical to SEQ ID NO: 266985
  chr14:93510736-93510916
  hypo

SEQ ID NO: 318301 - DNA, 350 bp, Homo sapiens
  chr14:93521883-93522233
  hypo
tactgggactctcccgagcctcggtgctgcctggcccagaacagatactcaagggacatacaaatgccacctgaacttctgcactcacctgcgcatgagctcgggactcctctcagctgtcccctcccatgcctccctcccacagcgcctttccaaagtccaaggacccatccttatccggtcctagccccaactgccagtcaggcctcaggtagaaactgaaggtgcccagcggtccctaccactccccgggcagagagtacaggctcttggaagaagtccagactcaagtctcagccttgtgaagccagctgactggagtggcaatgactccacagaccttcctgagc

SEQ ID NO: 318302 - DNA, 46 bp, Homo sapiens; identical to SEQ ID NO: 215946
  chr14:93525816-93525862
  hypo

SEQ ID NO: 318303 - DNA, 281 bp, Homo sapiens; identical to SEQ ID NO: 266988
  chr14:93533287-93533568
  hypo

SEQ ID NO: 318304 - DNA, 54 bp, Homo sapiens; identical to SEQ ID NO: 266989
  chr14:93557922-93557976
  hypo

SEQ ID NO: 318305 - DNA, 33 bp, Homo sapiens; identical to SEQ ID NO: 215948
  chr14:93570836-93570869
  hypo

SEQ ID NO: 318306 - DNA, 120 bp, Homo sapiens; identical to SEQ ID NO: 266991
  chr14:93630791-93630911
  hypo

SEQ ID NO: 318307 - DNA, 127 bp, Homo sapiens
  chr14:93697057-93697184
  hypo
cacaggtaccacgggggcgtggctgtcttcagtctcccaaagctgaagatggacacactgtttatgggttgagttgggcggggaggatgggtcgcagctgggcatggtgagacggctgccacctatg

SEQ ID NO: 318308 - DNA, 256 bp, Homo sapiens; identical to SEQ ID NO: 215949
  chr14:93706463-93706719
  hypo

SEQ ID NO: 318309 - DNA, 120 bp, Homo sapiens; identical to SEQ ID NO: 266994
  chr14:93756455-93756575
  hypo

SEQ ID NO: 318310 - DNA, 85 bp, Homo sapiens; identical to SEQ ID NO: 215950
  chr14:93763605-93763690
  hypo

SEQ ID NO: 318311 - DNA, 312 bp, Homo sapiens; identical to SEQ ID NO: 266996
  chr14:93813480-93813792
  hypo

SEQ ID NO: 318312 - DNA, 100 bp, Homo sapiens; identical to SEQ ID NO: 266997
  chr14:94048704-94048804
  hypo

SEQ ID NO: 318313 - DNA, 242 bp, Homo sapiens; identical to SEQ ID NO: 266998
  chr14:94187385-94187627
  hypo

SEQ ID NO: 318314 - DNA, 351 bp, Homo sapiens; identical to SEQ ID NO: 215952
  chr14:94209923-94210274
  hypo

SEQ ID NO: 318315 - DNA, 371 bp, Homo sapiens; identical to SEQ ID NO: 267000
  chr14:94392582-94392953
  hypo

SEQ ID NO: 318316 - DNA, 58 bp, Homo sapiens; identical to SEQ ID NO: 267001
  chr14:94393219-94393277
  hypo

SEQ ID NO: 318317 - DNA, 97 bp, Homo sapiens
  chr14:94404101-94404198
  hypo
cgagcagagctgcacgttgcccacgtagtccaggaggacatcgatgatgggccccgcccagcggctcacctctggggcagatacgaactcacagaac

SEQ ID NO: 318318 - DNA, 56 bp, Homo sapiens
  chr14:94404228-94404284
  hypo
agttcatcccacctgcaagagcctgcggccagggacggcagcggatgtgtccaagc

SEQ ID NO: 318319 - DNA, 224 bp, Homo sapiens; identical to SEQ ID NO: 215953
  chr14:94404860-94405084
  hypo

SEQ ID NO: 318320 - DNA, 196 bp, Homo sapiens; identical to SEQ ID NO: 290474
  chr14:94406037-94406233
  hypo

SEQ ID NO: 318321 - DNA, 91 bp, Homo sapiens
  chr14:94603670-94603761
  hypo
gtcatcgttaagtcgtgttacctgctgtccggccctggcacagtgaggctacactcccacaaataatgacgaaactccctcctcccagttc

SEQ ID NO: 318322 - DNA, 71 bp, Homo sapiens; identical to SEQ ID NO: 203730
  chr14:94640376-94640447
  hypo

SEQ ID NO: 318323 - DNA, 175 bp, Homo sapiens; identical to SEQ ID NO: 267005
  chr14:94829568-94829743
  hypo

SEQ ID NO: 318324 - DNA, 124 bp, Homo sapiens; identical to SEQ ID NO: 267006
  chr14:95538387-95538511
  hypo

SEQ ID NO: 318325 - DNA, 148 bp, Homo sapiens; identical to SEQ ID NO: 267007
  chr14:95693650-95693798
  hypo

SEQ ID NO: 318326 - DNA, 42 bp, Homo sapiens; identical to SEQ ID NO: 267008
  chr14:95701034-95701076
  hypo

SEQ ID NO: 318327 - DNA, 301 bp, Homo sapiens
  chr14:95740116-95740417
  hypo
ccactttgttgacacactttaggtcaacaataaaagccacacactcttaaggcctccctgcttcccaaagccaatcctatagataaaccgatcgtacatgaacctcatgaacctcattcagacctacgacacgctcctcccagccagtccagcctgcacttggaaactcacaacgctgggtcacgctcaactcagctgtctgattctgaacctggcatccccttcggttattaaacaaagaacgggtcctttaccgatgtagttctcagtgtcattacccgggttctggcttatcaatagg

SEQ ID NO: 318328 - DNA, 36 bp, Homo sapiens; identical to SEQ ID NO: 203734
  chr14:95864478-95864514
  hypo

SEQ ID NO: 318329 - DNA, 148 bp, Homo sapiens; identical to SEQ ID NO: 267010
  chr14:95880712-95880860
  hypo

SEQ ID NO: 318330 - DNA, 312 bp, Homo sapiens
  chr14:95905972-95906284
  hypo
ctcaaggcccgccacgactctgccagctccctgagctcctcctgcaccacggcagcaccctccggagaagacttctccatcaccagccagccctgcgcttccaccagggacagctgggcctccttctccgggaattctgccaccagcctctaaaggacacacggacacacagacacacacacggtgagggtggagggaggtttctgctccttggtgtgggaacgttggcctgtcaaggctgcttctttgggaagtgggtgagggaaccaccgccttacctcaaactcggcctcttgggactcggcatccccc

SEQ ID NO: 318331 - DNA, 129 bp, Homo sapiens
  chr14:95906356-95906485
  hypo
tggtggctgaaggtgcagtgctcctgcacactctgccgacacctgtccacaaggtcctgcagcacagcccggggagcccagggcatcctgagtgctggccgagggggagacccccgcaccacccccacc

SEQ ID NO: 318332 - DNA, 274 bp, Homo sapiens; identical to SEQ ID NO: 290496
  chr14:95932315-95932589
  hypo

SEQ ID NO: 318333 - DNA, 35 bp, Homo sapiens; identical to SEQ ID NO: 215957
  chr14:96015607-96015642
  hypo

SEQ ID NO: 318334 - DNA, 97 bp, Homo sapiens; identical to SEQ ID NO: 267014
  chr14:96054926-96055023
  hypo

SEQ ID NO: 318335 - DNA, 295 bp, Homo sapiens; identical to SEQ ID NO: 203736
  chr14:96152751-96153046
  hypo

SEQ ID NO: 318336 - DNA, 40 bp, Homo sapiens; identical to SEQ ID NO: 203737
  chr14:96342210-96342250
  hypo

SEQ ID NO: 318337 - DNA, 60 bp, Homo sapiens; identical to SEQ ID NO: 203738
  chr14:96342530-96342590
  hypo

SEQ ID NO: 318338 - DNA, 209 bp, Homo sapiens; identical to SEQ ID NO: 290501
  chr14:96505691-96505900
  hypo

SEQ ID NO: 318339 - DNA, 290 bp, Homo sapiens; identical to SEQ ID NO: 290502
  chr14:96506053-96506343
  hypo

SEQ ID NO: 318340 - DNA, 80 bp, Homo sapiens; identical to SEQ ID NO: 215962
  chr14:96547952-96548032
  hypo

SEQ ID NO: 318341 - DNA, 295 bp, Homo sapiens; identical to SEQ ID NO: 267017
  chr14:96552858-96553153
  hypo

SEQ ID NO: 318342 - DNA, 202 bp, Homo sapiens; identical to SEQ ID NO: 215963
  chr14:96653271-96653473
  hypo

SEQ ID NO: 318343 - DNA, 489 bp, Homo sapiens; identical to SEQ ID NO: 267019
  chr14:96730194-96730683
  hypo

SEQ ID NO: 318344 - DNA, 186 bp, Homo sapiens; identical to SEQ ID NO: 267020
  chr14:96745877-96746063
  hypo

SEQ ID NO: 318345 - DNA, 37 bp, Homo sapiens; identical to SEQ ID NO: 267021
  chr14:96822200-96822237
  hypo

SEQ ID NO: 318346 - DNA, 78 bp, Homo sapiens; identical to SEQ ID NO: 267022
  chr14:96831096-96831174
  hypo

SEQ ID NO: 318347 - DNA, 141 bp, Homo sapiens; identical to SEQ ID NO: 215964
  chr14:96911952-96912093
  hypo

SEQ ID NO: 318348 - DNA, 36 bp, Homo sapiens; identical to SEQ ID NO: 267024
  chr14:96912990-96913026
  hypo

SEQ ID NO: 318349 - DNA, 82 bp, Homo sapiens; identical to SEQ ID NO: 267025
  chr14:96970710-96970792
  hypo

SEQ ID NO: 318350 - DNA, 92 bp, Homo sapiens; identical to SEQ ID NO: 267027
  chr14:97128737-97128829
  hypo

SEQ ID NO: 318351 - DNA, 37 bp, Homo sapiens; identical to SEQ ID NO: 215965
  chr14:97338413-97338450
  hypo

SEQ ID NO: 318352 - DNA, 140 bp, Homo sapiens; identical to SEQ ID NO: 267030
  chr14:97361314-97361454
  hypo

SEQ ID NO: 318353 - DNA, 42 bp, Homo sapiens; identical to SEQ ID NO: 267031
  chr14:97389552-97389594
  hypo

SEQ ID NO: 318354 - DNA, 65 bp, Homo sapiens; identical to SEQ ID NO: 267032
  chr14:97404572-97404637
  hypo

SEQ ID NO: 318355 - DNA, 33 bp, Homo sapiens; identical to SEQ ID NO: 267034
  chr14:97589660-97589693
  hypo

SEQ ID NO: 318356 - DNA, 57 bp, Homo sapiens; identical to SEQ ID NO: 203741
  chr14:97685959-97686016
  hypo

SEQ ID NO: 318357 - DNA, 214 bp, Homo sapiens; identical to SEQ ID NO: 267035
  chr14:99509012-99509226
  hypo

SEQ ID NO: 318358 - DNA, 117 bp, Homo sapiens; identical to SEQ ID NO: 215967
  chr14:99651822-99651939
  hypo

SEQ ID NO: 318359 - DNA, 330 bp, Homo sapiens; identical to SEQ ID NO: 267037
  chr14:99655545-99655875
  hypo

SEQ ID NO: 318360 - DNA, 97 bp, Homo sapiens; identical to SEQ ID NO: 267038
  chr14:99681714-99681811
  hypo

SEQ ID NO: 318361 - DNA, 77 bp, Homo sapiens; identical to SEQ ID NO: 215968
  chr14:99707131-99707208
  hypo

SEQ ID NO: 318362 - DNA, 71 bp, Homo sapiens; identical to SEQ ID NO: 267040
  chr14:99725776-99725847
  hypo

SEQ ID NO: 318363 - DNA, 223 bp, Homo sapiens; identical to SEQ ID NO: 267041
  chr14:99810717-99810940
  hypo

SEQ ID NO: 318364 - DNA, 122 bp, Homo sapiens
  chr14:99849765-99849887
  hypo
gaaggcaggggaagggacgacgcatttggaggaagcaccatccgagccacaccccgcacagaaaaaggacccaggcccacggcaaggcgcttcttggtcctttcggaagggccgctcctaaa

SEQ ID NO: 318365 - DNA, 307 bp, Homo sapiens
  chr14:99850063-99850370
  hypo
gctctgtagccggccagctgggtccccgtcacacactcacacgtgcacacatgcatgcatgcacacatcctcacacacattcatacgtgtgctctcacgctcacatgcacacattcacacacacgttcacacacccatgcgctcacatgcccatgcacgcacacgtttgcacatgtacgcgcacacacactaaacccgttgggcctcagcttactcatctgtcaagcggagaccatggcagtggctccgacaggtgcttggcacatggtaaatgcccaatacatacgacagcacttggaaatttgtc

SEQ ID NO: 318366 - DNA, 209 bp, Homo sapiens; identical to SEQ ID NO: 267043
  chr14:99880379-99880588
  hypo

SEQ ID NO: 318367 - DNA, 178 bp, Homo sapiens; identical to SEQ ID NO: 267044
  chr14:99889214-99889392
  hypo

SEQ ID NO: 318368 - DNA, 205 bp, Homo sapiens; identical to SEQ ID NO: 215970
  chr14:99893210-99893415
  hypo

SEQ ID NO: 318369 - DNA, 150 bp, Homo sapiens; identical to SEQ ID NO: 267046
  chr14:99902511-99902661
  hypo

SEQ ID NO: 318370 - DNA, 225 bp, Homo sapiens; identical to SEQ ID NO: 267047
  chr14:99931509-99931734
  hypo

SEQ ID NO: 318371 - DNA, 241 bp, Homo sapiens; identical to SEQ ID NO: 267048
  chr14:99932772-99933013
  hypo

SEQ ID NO: 318372 - DNA, 567 bp, Homo sapiens; identical to SEQ ID NO: 267049
  chr14:99969303-99969870
  hypo

SEQ ID NO: 318373 - DNA, 100 bp, Homo sapiens; identical to SEQ ID NO: 215971
  chr14:99975812-99975912
  hypo

SEQ ID NO: 318374 - DNA, 61 bp, Homo sapiens; identical to SEQ ID NO: 215972
  chr14:99976343-99976404
  hypo

SEQ ID NO: 318375 - DNA, 81 bp, Homo sapiens; identical to SEQ ID NO: 267052
  chr14:99978205-99978286
  hypo

SEQ ID NO: 318376 - DNA, 1691 bp, Homo sapiens; identical to SEQ ID NO: 51671
  chr14:100069898-100071589
  hypo

SEQ ID NO: 318377 - DNA, 177 bp, Homo sapiens; identical to SEQ ID NO: 267053
  chr14:100118139-100118316
  hypo

SEQ ID NO: 318378 - DNA, 1115 bp, Homo sapiens; identical to SEQ ID NO: 290525
  chr14:100149732-100150847
  hypo

SEQ ID NO: 318379 - DNA, 270 bp, Homo sapiens; identical to SEQ ID NO: 267055
  chr14:100402447-100402717
  hypo

SEQ ID NO: 318380 - DNA, 162 bp, Homo sapiens; identical to SEQ ID NO: 290528
  chr14:100437167-100437329
  hypo

SEQ ID NO: 318381 - DNA, 183 bp, Homo sapiens; identical to SEQ ID NO: 267057
  chr14:100551051-100551234
  hypo

SEQ ID NO: 318382 - DNA, 62 bp, Homo sapiens; identical to SEQ ID NO: 215976
  chr14:100587318-100587380
  hypo

SEQ ID NO: 318383 - DNA, 245 bp, Homo sapiens; identical to SEQ ID NO: 267060
  chr14:100599148-100599393
  hypo

SEQ ID NO: 318384 - DNA, 66 bp, Homo sapiens; identical to SEQ ID NO: 203756
  chr14:100613202-100613268
  hypo

SEQ ID NO: 318385 - DNA, 397 bp, Homo sapiens; identical to SEQ ID NO: 267061
  chr14:100615563-100615960
  hypo

SEQ ID NO: 318386 - DNA, 248 bp, Homo sapiens; identical to SEQ ID NO: 290532
  chr14:100625926-100626174
  hypo

SEQ ID NO: 318387 - DNA, 64 bp, Homo sapiens; identical to SEQ ID NO: 125211
  chr14:100626295-100626359
  hypo

SEQ ID NO: 318388 - DNA, 87 bp, Homo sapiens; identical to SEQ ID NO: 215979
  chr14:100644135-100644222
  hypo

SEQ ID NO: 318389 - DNA, 147 bp, Homo sapiens; identical to SEQ ID NO: 215980
  chr14:100644252-100644399
  hypo

SEQ ID NO: 318390 - DNA, 228 bp, Homo sapiens; identical to SEQ ID NO: 267065
  chr14:100681486-100681714
  hypo

SEQ ID NO: 318391 - DNA, 206 bp, Homo sapiens; identical to SEQ ID NO: 267066
  chr14:100684860-100685066
  hypo

SEQ ID NO: 318392 - DNA, 263 bp, Homo sapiens; identical to SEQ ID NO: 267067
  chr14:100747007-100747270
  hypo

SEQ ID NO: 318393 - DNA, 97 bp, Homo sapiens; identical to SEQ ID NO: 267068
  chr14:100747814-100747911
  hypo

SEQ ID NO: 318394 - DNA, 249 bp, Homo sapiens; identical to SEQ ID NO: 267069
  chr14:100748315-100748564
  hypo

SEQ ID NO: 318395 - DNA, 205 bp, Homo sapiens; identical to SEQ ID NO: 215982
  chr14:100749240-100749445
  hypo

SEQ ID NO: 318396 - DNA, 151 bp, Homo sapiens; identical to SEQ ID NO: 215983
  chr14:100749475-100749626
  hypo

SEQ ID NO: 318397 - DNA, 206 bp, Homo sapiens; identical to SEQ ID NO: 224782
  chr14:100751381-100751587
  hypo

SEQ ID NO: 318398 - DNA, 34 bp, Homo sapiens; identical to SEQ ID NO: 215984
  chr14:100754246-100754280
  hypo

SEQ ID NO: 318399 - DNA, 103 bp, Homo sapiens; identical to SEQ ID NO: 267072
  chr14:100758850-100758953
  hypo

SEQ ID NO: 318400 - DNA, 402 bp, Homo sapiens; identical to SEQ ID NO: 290536
  chr14:100771908-100772310
  hypo

SEQ ID NO: 318401 - DNA, 370 bp, Homo sapiens; identical to SEQ ID NO: 203757
  chr14:100773262-100773632
  hypo

SEQ ID NO: 318402 - DNA, 244 bp, Homo sapiens; identical to SEQ ID NO: 267073
  chr14:100795242-100795486
  hypo

SEQ ID NO: 318403 - DNA, 145 bp, Homo sapiens; identical to SEQ ID NO: 267074
  chr14:100795807-100795952
  hypo

SEQ ID NO: 318404 - DNA, 41 bp, Homo sapiens; identical to SEQ ID NO: 267075
  chr14:100812221-100812262
  hypo

SEQ ID NO: 318405 - DNA, 198 bp, Homo sapiens; identical to SEQ ID NO: 215986
  chr14:100847790-100847988
  hypo

SEQ ID NO: 318406 - DNA, 126 bp, Homo sapiens; identical to SEQ ID NO: 267078
  chr14:100910095-100910221
  hypo

SEQ ID NO: 318407 - DNA, 161 bp, Homo sapiens; identical to SEQ ID NO: 267079
  chr14:100937837-100937998
  hypo

SEQ ID NO: 318408 - DNA, 67 bp, Homo sapiens; identical to SEQ ID NO: 267080
  chr14:100940878-100940945
  hypo

SEQ ID NO: 318409 - DNA, 42 bp, Homo sapiens; identical to SEQ ID NO: 267081
  chr14:100980664-100980706
  hypo

SEQ ID NO: 318410 - DNA, 193 bp, Homo sapiens; identical to SEQ ID NO: 267082
  chr14:100990019-100990212
  hypo

SEQ ID NO: 318411 - DNA, 1413 bp, Homo sapiens; identical to SEQ ID NO: 267083
  chr14:101003646-101005059
  hypo

SEQ ID NO: 318412 - DNA, 198 bp, Homo sapiens; identical to SEQ ID NO: 267084
  chr14:101005497-101005695
  hypo

SEQ ID NO: 318413 - DNA, 319 bp, Homo sapiens; identical to SEQ ID NO: 267085
  chr14:101060508-101060827
  hypo

SEQ ID NO: 318414 - DNA, 194 bp, Homo sapiens; identical to SEQ ID NO: 267086
  chr14:101096261-101096455
  hypo

SEQ ID NO: 318415 - DNA, 110 bp, Homo sapiens; identical to SEQ ID NO: 215988
  chr14:101133882-101133992
  hypo

SEQ ID NO: 318416 - DNA, 190 bp, Homo sapiens; identical to SEQ ID NO: 215989
  chr14:101134022-101134212
  hypo

SEQ ID NO: 318417 - DNA, 136 bp, Homo sapiens; identical to SEQ ID NO: 267089
  chr14:101155083-101155219
  hypo

SEQ ID NO: 318418 - DNA, 78 bp, Homo sapiens; identical to SEQ ID NO: 203758
  chr14:101192402-101192480
  hypo

SEQ ID NO: 318419 - DNA, 178 bp, Homo sapiens; identical to SEQ ID NO: 290542
  chr14:101192969-101193147
  hypo

SEQ ID NO: 318420 - DNA, 391 bp, Homo sapiens; identical to SEQ ID NO: 267090
  chr14:101198382-101198773
  hypo

SEQ ID NO: 318421 - DNA, 480 bp, Homo sapiens
  chr14:101200752-101201232
  hypo
gcagcacacccaggtgagctacgagtgtctgtgcaagcccgagttcacaggtctcacctgtgtcaagaagcgcgcgctgagcccccagcaggtcacccgtctgcccagcggctatgggctggcctaccgcctgacccctggggtgcacgagctgccggtgcagcagccggagcaccgcatcctgaaggtgtccatgaaagagctcaacaagaaaacccctctcctcaccgagggccaggccatctgcttcaccatcctgggcgtgctcaccagcctggtggtgctgggcactgtgggtatcgtcttcctcaacaagtgcgagacctgggtgtccaacctgcgctacaaccacatgctgcggaagaagaagaacctgctgcttcagtacaacagcggggaggacctggccgtcaacatcatcttccccgagaagatcgacatgaccaccttcagcaaggaggccggcgacgaggagatcta

SEQ ID NO: 318422 - DNA, 42 bp, Homo sapiens; identical to SEQ ID NO: 215991
  chr14:101250330-101250372
  hypo

SEQ ID NO: 318423 - DNA, 269 bp, Homo sapiens; identical to SEQ ID NO: 215992
  chr14:101348432-101348701
  hypo

SEQ ID NO: 318424 - DNA, 432 bp, Homo sapiens; identical to SEQ ID NO: 215993
  chr14:101349270-101349702
  hypo

SEQ ID NO: 318425 - DNA, 243 bp, Homo sapiens
  chr14:101349750-101349993
  hypo
ccggctgtgggtacggcttctcgtagagctcgacgtagtgctcttgggcgaacttctcatccatgaagttgccgtcagctcccgaatccaccagggcctggaccgcgacgctgtggtaggggttcactctcaccatgagcagcaggaagaggtgggcgcgattgatgtccggatggacttcgctgggcaaccagctgctgaccatccacctctctggagcaggtgagtcgatccaggtcaggt

SEQ ID NO: 318426 - DNA, 206 bp, Homo sapiens; identical to SEQ ID NO: 267095
  chr14:101377326-101377532
  hypo

SEQ ID NO: 318427 - DNA, 441 bp, Homo sapiens; identical to SEQ ID NO: 215995
  chr14:101489766-101490207
  hypo

SEQ ID NO: 318428 - DNA, 321 bp, Homo sapiens; identical to SEQ ID NO: 267097
  chr14:101491363-101491684
  hypo

SEQ ID NO: 318429 - DNA, 204 bp, Homo sapiens; identical to SEQ ID NO: 267098
  chr14:101492084-101492288
  hypo

SEQ ID NO: 318430 - DNA, 133 bp, Homo sapiens
  chr14:101506260-101506393
  hypo
cctctcgcaagctgcccgctcggccaagcggctgggctccgtcgtcattttctccatgaggccgaatgctctcctctgtgctatgttacttttgtgtttgatggattgtacttaggttcgtgctttccgggat

SEQ ID NO: 318431 - DNA, 194 bp, Homo sapiens; identical to SEQ ID NO: 267100
  chr14:101515982-101516176
  hypo

SEQ ID NO: 318432 - DNA, 471 bp, Homo sapiens
  chr14:101531769-101532240
  hypo
gcatcagcaccattctggggtacggggatggatggtcgaccagttggaaagtaattgtttctaatgtacttcacctggtccactagccgtccgtatccgctgcagcctgtggggcctgcgggccggggagccgatcgcgcttcagctcagcgcctttcctggtacttgaagggagatcgaccgtgttatattcgctttattgacttcgaataatacatggttgatcttttctcagtatcaaatctcaccttggaggacccgttggagatgaagcccttttgagggtaggagcaggacgggtgctttggagtcgctgcctcagtggggcctggtcaccgagagtgggccgggcaggggtctctttcctgtctctgtgtcttctcacctttgatgtcccatccgtcctcaggactgcttcccgggggcagcgctggcaccacgggacgcggcagccacgttcttgagccgatg

SEQ ID NO: 318433 - DNA, 381 bp, Homo sapiens; identical to SEQ ID NO: 267102
  chr14:101569746-101570127
  hypo

SEQ ID NO: 318434 - DNA, 274 bp, Homo sapiens; identical to SEQ ID NO: 215997
  chr14:101579008-101579282
  hypo

SEQ ID NO: 318435 - DNA, 311 bp, Homo sapiens; identical to SEQ ID NO: 267104
  chr14:101592184-101592495
  hypo

SEQ ID NO: 318436 - DNA, 50 bp, Homo sapiens; identical to SEQ ID NO: 215998
  chr14:101638848-101638898
  hypo

SEQ ID NO: 318437 - DNA, 203 bp, Homo sapiens; identical to SEQ ID NO: 267106
  chr14:101640848-101641051
  hypo

SEQ ID NO: 318438 - DNA, 519 bp, Homo sapiens; identical to SEQ ID NO: 267107
  chr14:101693619-101694138
  hypo

SEQ ID NO: 318439 - DNA, 87 bp, Homo sapiens
  chr14:101694470-101694557
  hypo
attgctgaccgcagcgtttctcaaaattcaagcactggaggaccccggagaacggagctgcagaaccgccgggtctgtgcgaaccgc

SEQ ID NO: 318440 - DNA, 35 bp, Homo sapiens; identical to SEQ ID NO: 267109
  chr14:101716824-101716859
  hypo

SEQ ID NO: 318441 - DNA, 34 bp, Homo sapiens; identical to SEQ ID NO: 267110
  chr14:101727903-101727937
  hypo

SEQ ID NO: 318442 - DNA, 115 bp, Homo sapiens; identical to SEQ ID NO: 267111
  chr14:101834398-101834513
  hypo

SEQ ID NO: 318443 - DNA, 272 bp, Homo sapiens; identical to SEQ ID NO: 267112
  chr14:101874589-101874861
  hypo

SEQ ID NO: 318444 - DNA, 232 bp, Homo sapiens; identical to SEQ ID NO: 267113
  chr14:101970405-101970637
  hypo

SEQ ID NO: 318445 - DNA, 118 bp, Homo sapiens; identical to SEQ ID NO: 267114
  chr14:101994455-101994573
  hypo

SEQ ID NO: 318446 - DNA, 155 bp, Homo sapiens; identical to SEQ ID NO: 267115
  chr14:102018353-102018508
  hypo

SEQ ID NO: 318447 - DNA, 305 bp, Homo sapiens; identical to SEQ ID NO: 267116
  chr14:102053854-102054159
  hypo

SEQ ID NO: 318448 - DNA, 494 bp, Homo sapiens; identical to SEQ ID NO: 267117
  chr14:102068308-102068802
  hypo

SEQ ID NO: 318449 - DNA, 89 bp, Homo sapiens; identical to SEQ ID NO: 215999
  chr14:102093963-102094052
  hypo

SEQ ID NO: 318450 - DNA, 113 bp, Homo sapiens; identical to SEQ ID NO: 216000
  chr14:102094128-102094241
  hypo

SEQ ID NO: 318451 - DNA, 281 bp, Homo sapiens; identical to SEQ ID NO: 267119
  chr14:102175310-102175591
  hypo

SEQ ID NO: 318452 - DNA, 127 bp, Homo sapiens; identical to SEQ ID NO: 267120
  chr14:102186689-102186816
  hypo

SEQ ID NO: 318453 - DNA, 384 bp, Homo sapiens; identical to SEQ ID NO: 267121
  chr14:102230011-102230395
  hypo

SEQ ID NO: 318454 - DNA, 152 bp, Homo sapiens; identical to SEQ ID NO: 267122
  chr14:102239453-102239605
  hypo

SEQ ID NO: 318455 - DNA, 35 bp, Homo sapiens; identical to SEQ ID NO: 267123
  chr14:102286260-102286295
  hypo

SEQ ID NO: 318456 - DNA, 166 bp, Homo sapiens; identical to SEQ ID NO: 216001
  chr14:102293900-102294066
  hypo

SEQ ID NO: 318457 - DNA, 94 bp, Homo sapiens; identical to SEQ ID NO: 267125
  chr14:102302011-102302105
  hypo

SEQ ID NO: 318458 - DNA, 33 bp, Homo sapiens; identical to SEQ ID NO: 267126
  chr14:102306201-102306234
  hypo

SEQ ID NO: 318459 - DNA, 245 bp, Homo sapiens; identical to SEQ ID NO: 267127
  chr14:102307821-102308066
  hypo

SEQ ID NO: 318460 - DNA, 299 bp, Homo sapiens; identical to SEQ ID NO: 267128
  chr14:102325127-102325426
  hypo

SEQ ID NO: 318461 - DNA, 324 bp, Homo sapiens; identical to SEQ ID NO: 267129
  chr14:102330613-102330937
  hypo

SEQ ID NO: 318462 - DNA, 96 bp, Homo sapiens; identical to SEQ ID NO: 267130
  chr14:102331833-102331929
  hypo

SEQ ID NO: 318463 - DNA, 70 bp, Homo sapiens
  chr14:102335778-102335848
  hypo
catagggatgcaatcgctaggtgaatggtaagtgtgtgttgagctttctaaggaactgccaaaccgtttt

SEQ ID NO: 318464 - DNA, 206 bp, Homo sapiens; identical to SEQ ID NO: 216003
  chr14:102343692-102343898
  hypo

SEQ ID NO: 318465 - DNA, 265 bp, Homo sapiens; identical to SEQ ID NO: 216004
  chr14:102355902-102356167
  hypo

SEQ ID NO: 318466 - DNA, 209 bp, Homo sapiens; identical to SEQ ID NO: 216005
  chr14:102356197-102356406
  hypo

SEQ ID NO: 318467 - DNA, 210 bp, Homo sapiens; identical to SEQ ID NO: 216006
  chr14:102360720-102360930
  hypo

SEQ ID NO: 318468 - DNA, 245 bp, Homo sapiens; identical to SEQ ID NO: 267135
  chr14:102361139-102361384
  hypo

SEQ ID NO: 318469 - DNA, 153 bp, Homo sapiens; identical to SEQ ID NO: 267136
  chr14:102375768-102375921
  hypo

SEQ ID NO: 318470 - DNA, 342 bp, Homo sapiens; identical to SEQ ID NO: 267137
  chr14:102391503-102391845
  hypo

SEQ ID NO: 318471 - DNA, 191 bp, Homo sapiens; identical to SEQ ID NO: 267138
  chr14:102392534-102392725
  hypo

SEQ ID NO: 318472 - DNA, 80 bp, Homo sapiens; identical to SEQ ID NO: 267139
  chr14:102396659-102396739
  hypo

SEQ ID NO: 318473 - DNA, 161 bp, Homo sapiens; identical to SEQ ID NO: 267140
  chr14:102398577-102398738
  hypo

SEQ ID NO: 318474 - DNA, 31 bp, Homo sapiens; identical to SEQ ID NO: 267141
  chr14:102416015-102416046
  hypo

SEQ ID NO: 318475 - DNA, 127 bp, Homo sapiens; identical to SEQ ID NO: 267143
  chr14:102429249-102429376
  hypo

SEQ ID NO: 318476 - DNA, 35 bp, Homo sapiens; identical to SEQ ID NO: 267144
  chr14:102450595-102450630
  hypo

SEQ ID NO: 318477 - DNA, 279 bp, Homo sapiens
  chr14:102467362-102467641
  hypo
tatgagtttgttcagaggcttctgaaaggttacatgaaggtaggtggccagtatcgcacggtgatgagtgtccattagaaacgcacctgcacagatcactttgtttactttctccacagataaatatgctggtgattgaactgaaatccgaagcacttaaagaccgccattggaaacagctcatgaaaaggcttcacgttaattgggttgtttctgagctaacccttggccaaatctgggatgttgacttgcagaaaaatgaagcgattgtcaaggatg

SEQ ID NO: 318478 - DNA, 136 bp, Homo sapiens; identical to SEQ ID NO: 216008
  chr14:102493477-102493613
  hypo

SEQ ID NO: 318479 - DNA, 362 bp, Homo sapiens; identical to SEQ ID NO: 216009
  chr14:102493651-102494013
  hypo

SEQ ID NO: 318480 - DNA, 121 bp, Homo sapiens; identical to SEQ ID NO: 267147
  chr14:102499706-102499827
  hypo

SEQ ID NO: 318481 - DNA, 512 bp, Homo sapiens
  chr14:102500550-102501062
  hypo
ggatgtgcgagcagtgtgaggcaagctggtgtttagtgcacagttagagtcttgagaacagtcccatctgtggctgtgaagaggaggaaaggtaacggccttgcctttcagttccgtacagatattgccaggacggaatacctttccaatgctgatgagcgtcttcgctggcaggccagctccttgcctgctgatgacctttgcacagaaaatgccatcatgctgaaacgattcaataggtatgagctcgggtgccaaggagaggcatgggaggaatgtgggtggtgatcttgaatttttttcaaaatacacccttgtttgaagagaggaatagaaaatggggcgtgggcatacagtgctggcagcttggtgctcctctgatggtggggcgtgtgctgttctcgttattgtcaagtgtctgagttattctgcagtgaatgcttcttgtaaccttctaaaatcgattggcaggggccaggcacagtggatcacgtgaggtcaggagtttgaga

SEQ ID NO: 318482 - DNA, 108 bp, Homo sapiens; identical to SEQ ID NO: 267149
  chr14:102510267-102510375
  hypo

SEQ ID NO: 318483 - DNA, 809 bp, Homo sapiens; identical to SEQ ID NO: 267150
  chr14:102516076-102516885
  hypo

SEQ ID NO: 318484 - DNA, 369 bp, Homo sapiens; identical to SEQ ID NO: 267152
  chr14:102523353-102523722
  hypo

SEQ ID NO: 318485 - DNA, 61 bp, Homo sapiens
  chr14:102530234-102530295
  hypo
agaaaatcttccaggcccccactccaggcatggtgggtgcgtcaggattcagaacagatga

SEQ ID NO: 318486 - DNA, 85 bp, Homo sapiens; identical to SEQ ID NO: 267154
  chr14:102592764-102592849
  hypo

SEQ ID NO: 318487 - DNA, 190 bp, Homo sapiens; identical to SEQ ID NO: 216013
  chr14:102635326-102635516
  hypo

SEQ ID NO: 318488 - DNA, 292 bp, Homo sapiens; identical to SEQ ID NO: 216014
  chr14:102650992-102651284
  hypo

SEQ ID NO: 318489 - DNA, 90 bp, Homo sapiens; identical to SEQ ID NO: 267157
  chr14:102668988-102669078
  hypo

SEQ ID NO: 318490 - DNA, 118 bp, Homo sapiens; identical to SEQ ID NO: 267158
  chr14:102680415-102680533
  hypo

SEQ ID NO: 318491 - DNA, 103 bp, Homo sapiens; identical to SEQ ID NO: 216015
  chr14:102681974-102682077
  hypo

SEQ ID NO: 318492 - DNA, 289 bp, Homo sapiens; identical to SEQ ID NO: 267160
  chr14:102685939-102686228
  hypo

SEQ ID NO: 318493 - DNA, 132 bp, Homo sapiens; identical to SEQ ID NO: 267161
  chr14:102691861-102691993
  hypo

SEQ ID NO: 318494 - DNA, 448 bp, Homo sapiens; identical to SEQ ID NO: 267162
  chr14:102695442-102695890
  hypo

SEQ ID NO: 318495 - DNA, 233 bp, Homo sapiens; identical to SEQ ID NO: 216018
  chr14:102793000-102793233
  hypo

SEQ ID NO: 318496 - DNA, 36 bp, Homo sapiens; identical to SEQ ID NO: 267164
  chr14:102900923-102900959
  hypo

SEQ ID NO: 318497 - DNA, 143 bp, Homo sapiens; identical to SEQ ID NO: 267165
  chr14:102901395-102901538
  hypo

SEQ ID NO: 318498 - DNA, 159 bp, Homo sapiens
  chr14:102909003-102909162
  hypo
tgctcaggagtgtgtcgtgtaagaagtcctgccggtgattcccacctagtttagtggaaggaaatatcacccaaggactgcaatactataggtgcgtctgtgattagtcacggagcatatttgagtactgagacctaattgcaggcctaaggtcaagga

SEQ ID NO: 318499 - DNA, 289 bp, Homo sapiens
  chr14:102909192-102909481
  hypo
ctgctcccctgggaatagcctttgagctcatttagacatactttattgacagaacacaaggaggcaaggggagagccctggacagggagccagggaccctgagctttggcctgccactgccttgcagtttgacagacctcagatttcatctgggaaattcggggtttcattttattagtggaacctcgcacccagtcagagcagagaggagccgccgtgctggagctctctgcaggaacgactgcaggcctcaggtccctgccaactccagcagcgctgcagccctctg

SEQ ID NO: 318500 - DNA, 80 bp, Homo sapiens; identical to SEQ ID NO: 216019
  chr14:102931213-102931293
  hypo

SEQ ID NO: 318501 - DNA, 108 bp, Homo sapiens; identical to SEQ ID NO: 267168
  chr14:102931755-102931863
  hypo

SEQ ID NO: 318502 - DNA, 638 bp, Homo sapiens; identical to SEQ ID NO: 216020
  chr14:102939182-102939820
  hypo

SEQ ID NO: 318503 - DNA, 75 bp, Homo sapiens; identical to SEQ ID NO: 267170
  chr14:102961171-102961246
  hypo

SEQ ID NO: 318504 - DNA, 352 bp, Homo sapiens; identical to SEQ ID NO: 267171
  chr14:102961892-102962244
  hypo

SEQ ID NO: 318505 - DNA, 168 bp, Homo sapiens; identical to SEQ ID NO: 216021
  chr14:102966288-102966456
  hypo

SEQ ID NO: 318506 - DNA, 251 bp, Homo sapiens; identical to SEQ ID NO: 267173
  chr14:102968260-102968511
  hypo

SEQ ID NO: 318507 - DNA, 464 bp, Homo sapiens
  chr14:102973268-102973732
  hypo
gggcctagcctttgccagtgaggtccaacggctgcaggaatgggggcagcggcagctcgtccagggcctcggggaagcggcctggagagatggcggtgaccagcacctgcatggcgcgcgcgaagagcgagggcggcgccaggcccgccagccactggaacttgtcctcacccagcagccgctgccagcgcggccggtcgcccagcagctcctggcgggccgagccggcggcacccacgggggtgtacagcgccaggaggtccagcagcagcaggcggcgctggcgcggctccccgggagctgaggcgggggctccggcggcggagggagtggccccggcgtcgcggcccagctggcgcagcagcagctcgagaggcgtgaggccgccgccgtcccgcagaccgggcgaggcgccgtggcccagcagcaggaagaggcactcggggcgcgccagctcacaggcc

SEQ ID NO: 318508 - DNA, 377 bp, Homo sapiens; identical to SEQ ID NO: 203764
  chr14:102975681-102976058
  hypo

SEQ ID NO: 318509 - DNA, 154 bp, Homo sapiens; identical to SEQ ID NO: 267176
  chr14:103019457-103019611
  hypo

SEQ ID NO: 318510 - DNA, 95 bp, Homo sapiens; identical to SEQ ID NO: 216024
  chr14:103046497-103046592
  hypo

SEQ ID NO: 318511 - DNA, 31 bp, Homo sapiens; identical to SEQ ID NO: 267178
  chr14:103055786-103055817
  hypo

SEQ ID NO: 318512 - DNA, 36 bp, Homo sapiens; identical to SEQ ID NO: 216025
  chr14:103109324-103109360
  hypo

SEQ ID NO: 318513 - DNA, 36 bp, Homo sapiens; identical to SEQ ID NO: 267180
  chr14:103109600-103109636
  hypo

SEQ ID NO: 318514 - DNA, 120 bp, Homo sapiens; identical to SEQ ID NO: 216026
  chr14:103144544-103144664
  hypo

SEQ ID NO: 318515 - DNA, 39 bp, Homo sapiens; identical to SEQ ID NO: 267182
  chr14:103193874-103193913
  hypo

SEQ ID NO: 318516 - DNA, 202 bp, Homo sapiens; identical to SEQ ID NO: 267183
  chr14:103215840-103216042
  hypo

SEQ ID NO: 318517 - DNA, 35 bp, Homo sapiens
  chr14:103216357-103216392
  hypo
tgtccctgtggcctcggtccccgcggcctcggtcc

SEQ ID NO: 318518 - DNA, 173 bp, Homo sapiens; identical to SEQ ID NO: 203767
  chr14:103242390-103242563
  hypo

SEQ ID NO: 318519 - DNA, 314 bp, Homo sapiens; identical to SEQ ID NO: 267186
  chr14:103242915-103243229
  hypo

SEQ ID NO: 318520 - DNA, 89 bp, Homo sapiens
  chr14:103277697-103277786
  hypo
tattcacaggtgctgtcgtactgccctggatgatagtacactgcagccatgaagtcctgggcttaagcagttttcgcctcagcctcctg

SEQ ID NO: 318521 - DNA, 423 bp, Homo sapiens; identical to SEQ ID NO: 267189
  chr14:103363893-103364316
  hypo

SEQ ID NO: 318522 - DNA, 55 bp, Homo sapiens; identical to SEQ ID NO: 267190
  chr14:103366993-103367048
  hypo

SEQ ID NO: 318523 - DNA, 384 bp, Homo sapiens; identical to SEQ ID NO: 216030
  chr14:103369447-103369831
  hypo

SEQ ID NO: 318524 - DNA, 144 bp, Homo sapiens; identical to SEQ ID NO: 267192
  chr14:103391460-103391604
  hypo

SEQ ID NO: 318525 - DNA, 61 bp, Homo sapiens; identical to SEQ ID NO: 203768
  chr14:103394622-103394683
  hypo

SEQ ID NO: 318526 - DNA, 92 bp, Homo sapiens; identical to SEQ ID NO: 267193
  chr14:103397491-103397583
  hypo

SEQ ID NO: 318527 - DNA, 240 bp, Homo sapiens
  chr14:103406319-103406559
  hypo
caccagggacacacgcccctccaacttcccttccctccactcccggtgcagaggaaggctcacccgagaacttgctcttgaagtagatcaagcgtggaggctcgcagttgaggaggttgagggtgccttcagagttcaggggccttatctggattggaaaccagggagggacagtaagcgcggccacgcacagactgcaccgggagaagcccgcccgcacaggagggcaccgaggccgcc

SEQ ID NO: 318528 - DNA, 136 bp, Homo sapiens; identical to SEQ ID NO: 216032
  chr14:103407161-103407297
  hypo

SEQ ID NO: 318529 - DNA, 506 bp, Homo sapiens; identical to SEQ ID NO: 267196
  chr14:103408301-103408807
  hypo

SEQ ID NO: 318530 - DNA, 377 bp, Homo sapiens; identical to SEQ ID NO: 267197
  chr14:103409904-103410281
  hypo

SEQ ID NO: 318531 - DNA, 44 bp, Homo sapiens
  chr14:103416814-103416858
  hypo
tttgtaggctgttccgatgcctcgctgcacgtccacgcccagag

SEQ ID NO: 318532 - DNA, 132 bp, Homo sapiens; identical to SEQ ID NO: 267199
  chr14:103417431-103417563
  hypo

SEQ ID NO: 318533 - DNA, 199 bp, Homo sapiens; identical to SEQ ID NO: 216035
  chr14:103421194-103421393
  hypo

SEQ ID NO: 318534 - DNA, 307 bp, Homo sapiens; identical to SEQ ID NO: 216036
  chr14:103423609-103423916
  hypo

SEQ ID NO: 318535 - DNA, 212 bp, Homo sapiens; identical to SEQ ID NO: 290567
  chr14:103430222-103430434
  hypo

SEQ ID NO: 318536 - DNA, 124 bp, Homo sapiens; identical to SEQ ID NO: 290568
  chr14:103430509-103430633
  hypo

SEQ ID NO: 318537 - DNA, 145 bp, Homo sapiens; identical to SEQ ID NO: 267202
  chr14:103432740-103432885
  hypo

SEQ ID NO: 318538 - DNA, 265 bp, Homo sapiens; identical to SEQ ID NO: 267203
  chr14:103433124-103433389
  hypo

SEQ ID NO: 318539 - DNA, 268 bp, Homo sapiens; identical to SEQ ID NO: 216039
  chr14:103433869-103434137
  hypo

SEQ ID NO: 318540 - DNA, 150 bp, Homo sapiens; identical to SEQ ID NO: 216040
  chr14:103442296-103442446
  hypo

SEQ ID NO: 318541 - DNA, 213 bp, Homo sapiens; identical to SEQ ID NO: 216041
  chr14:103444036-103444249
  hypo

SEQ ID NO: 318542 - DNA, 552 bp, Homo sapiens; identical to SEQ ID NO: 267207
  chr14:103453117-103453669
  hypo

SEQ ID NO: 318543 - DNA, 276 bp, Homo sapiens; identical to SEQ ID NO: 216043
  chr14:103460344-103460620
  hypo

SEQ ID NO: 318544 - DNA, 355 bp, Homo sapiens; identical to SEQ ID NO: 267210
  chr14:103467947-103468302
  hypo

SEQ ID NO: 318545 - DNA, 67 bp, Homo sapiens; identical to SEQ ID NO: 267211
  chr14:103470286-103470353
  hypo

SEQ ID NO: 318546 - DNA, 43 bp, Homo sapiens; identical to SEQ ID NO: 267213
  chr14:103487486-103487529
  hypo

SEQ ID NO: 318547 - DNA, 1541 bp, Homo sapiens; identical to SEQ ID NO: 203770
  chr14:103523058-103524599
  hypo

SEQ ID NO: 318548 - DNA, 34 bp, Homo sapiens; identical to SEQ ID NO: 267214
  chr14:103525032-103525066
  hypo

SEQ ID NO: 318549 - DNA, 93 bp, Homo sapiens; identical to SEQ ID NO: 267215
  chr14:103525306-103525399
  hypo

SEQ ID NO: 318550 - DNA, 215 bp, Homo sapiens; identical to SEQ ID NO: 267216
  chr14:103538914-103539129
  hypo

SEQ ID NO: 318551 - DNA, 307 bp, Homo sapiens; identical to SEQ ID NO: 267217
  chr14:103539677-103539984
  hypo

SEQ ID NO: 318552 - DNA, 77 bp, Homo sapiens; identical to SEQ ID NO: 203771
  chr14:103541957-103542034
  hypo

SEQ ID NO: 318553 - DNA, 169 bp, Homo sapiens; identical to SEQ ID NO: 267218
  chr14:103576354-103576523
  hypo

SEQ ID NO: 318554 - DNA, 33 bp, Homo sapiens; identical to SEQ ID NO: 267219
  chr14:103583158-103583191
  hypo

SEQ ID NO: 318555 - DNA, 219 bp, Homo sapiens; identical to SEQ ID NO: 290575
  chr14:103593755-103593974
  hypo

SEQ ID NO: 318556 - DNA, 289 bp, Homo sapiens; identical to SEQ ID NO: 290576
  chr14:103594004-103594293
  hypo

SEQ ID NO: 318557 - DNA, 142 bp, Homo sapiens; identical to SEQ ID NO: 267221
  chr14:103594643-103594785
  hypo

SEQ ID NO: 318558 - DNA, 407 bp, Homo sapiens; identical to SEQ ID NO: 267222
  chr14:103596229-103596636
  hypo

SEQ ID NO: 318559 - DNA, 72 bp, Homo sapiens; identical to SEQ ID NO: 267223
  chr14:103697779-103697851
  hypo

SEQ ID NO: 318560 - DNA, 57 bp, Homo sapiens; identical to SEQ ID NO: 267224
  chr14:103699248-103699305
  hypo

SEQ ID NO: 318561 - DNA, 35 bp, Homo sapiens; identical to SEQ ID NO: 267226
  chr14:103802598-103802633
  hypo

SEQ ID NO: 318562 - DNA, 167 bp, Homo sapiens; identical to SEQ ID NO: 267227
  chr14:103803090-103803257
  hypo

SEQ ID NO: 318563 - DNA, 158 bp, Homo sapiens; identical to SEQ ID NO: 267228
  chr14:103966175-103966333
  hypo

SEQ ID NO: 318564 - DNA, 356 bp, Homo sapiens; identical to SEQ ID NO: 267229
  chr14:103977203-103977559
  hypo

SEQ ID NO: 318565 - DNA, 34 bp, Homo sapiens; identical to SEQ ID NO: 216050
  chr14:103977771-103977805
  hypo

SEQ ID NO: 318566 - DNA, 87 bp, Homo sapiens; identical to SEQ ID NO: 216051
  chr14:103977835-103977922
  hypo

SEQ ID NO: 318567 - DNA, 439 bp, Homo sapiens; identical to SEQ ID NO: 267231
  chr14:103981303-103981742
  hypo

SEQ ID NO: 318568 - DNA, 158 bp, Homo sapiens; identical to SEQ ID NO: 267232
  chr14:103986355-103986513
  hypo

SEQ ID NO: 318569 - DNA, 270 bp, Homo sapiens; identical to SEQ ID NO: 290584
  chr14:103988425-103988695
  hypo

SEQ ID NO: 318570 - DNA, 418 bp, Homo sapiens; identical to SEQ ID NO: 290585
  chr14:103988736-103989154
  hypo

SEQ ID NO: 318571 - DNA, 122 bp, Homo sapiens; identical to SEQ ID NO: 203778
  chr14:103989597-103989719
  hypo

SEQ ID NO: 318572 - DNA, 157 bp, Homo sapiens; identical to SEQ ID NO: 267233
  chr14:104000005-104000162
  hypo

SEQ ID NO: 318573 - DNA, 747 bp, Homo sapiens; identical to SEQ ID NO: 267234
  chr14:104000389-104001136
  hypo

SEQ ID NO: 318574 - DNA, 284 bp, Homo sapiens; identical to SEQ ID NO: 267235
  chr14:104012458-104012742
  hypo

SEQ ID NO: 318575 - DNA, 454 bp, Homo sapiens; identical to SEQ ID NO: 267236
  chr14:104017444-104017898
  hypo

SEQ ID NO: 318576 - DNA, 37 bp, Homo sapiens; identical to SEQ ID NO: 216056
  chr14:104041400-104041437
  hypo

SEQ ID NO: 318577 - DNA, 155 bp, Homo sapiens; identical to SEQ ID NO: 216057
  chr14:104047674-104047829
  hypo

SEQ ID NO: 318578 - DNA, 1023 bp, Homo sapiens; identical to SEQ ID NO: 216058
  chr14:104047889-104048912
  hypo

SEQ ID NO: 318579 - DNA, 141 bp, Homo sapiens; identical to SEQ ID NO: 216059
  chr14:104048982-104049123
  hypo

SEQ ID NO: 318580 - DNA, 119 bp, Homo sapiens; identical to SEQ ID NO: 216060
  chr14:104061735-104061854
  hypo

SEQ ID NO: 318581 - DNA, 119 bp, Homo sapiens; identical to SEQ ID NO: 290588
  chr14:104094604-104094723
  hypo

SEQ ID NO: 318582 - DNA, 119 bp, Homo sapiens
  chr14:104121158-104121277
  hypo
acaggtacgagtgagaatgactcagacgttatcaggaacttttgatggtaaaatggagacttgtttgaaataagcagtttcactaaagaagaggaaagatgattatagaataacagatc

SEQ ID NO: 318583 - DNA, 114 bp, Homo sapiens; identical to SEQ ID NO: 216061
  chr14:104152224-104152338
  hypo

SEQ ID NO: 318584 - DNA, 119 bp, Homo sapiens; identical to SEQ ID NO: 267244
  chr14:104158785-104158904
  hypo

SEQ ID NO: 318585 - DNA, 140 bp, Homo sapiens; identical to SEQ ID NO: 216062
  chr14:104159177-104159317
  hypo

SEQ ID NO: 318586 - DNA, 120 bp, Homo sapiens
  chr14:104159437-104159557
  hypo
tggcagtccctgcccctgtgctggtgctgagagttcgcgacagtggccaggcactgccctcccagttgtccagatccactaatcctcacagacaggccagtgccccgacctgtcccccaa

SEQ ID NO: 318587 - DNA, 149 bp, Homo sapiens; identical to SEQ ID NO: 216063
  chr14:104159872-104160021
  hypo

SEQ ID NO: 318588 - DNA, 144 bp, Homo sapiens; identical to SEQ ID NO: 216064
  chr14:104160134-104160278
  hypo

SEQ ID NO: 318589 - DNA, 262 bp, Homo sapiens; identical to SEQ ID NO: 216065
  chr14:104164990-104165252
  hypo

SEQ ID NO: 318590 - DNA, 153 bp, Homo sapiens; identical to SEQ ID NO: 267248
  chr14:104169506-104169659
  hypo

SEQ ID NO: 318591 - DNA, 131 bp, Homo sapiens; identical to SEQ ID NO: 267249
  chr14:104188353-104188484
  hypo

SEQ ID NO: 318592 - DNA, 277 bp, Homo sapiens
  chr14:104194175-104194452
  hypo
cagtgcgcggagtgcgccctcgtgtccctcaaggaggcggagttctacgacaagcagctcaaagtgctcctgagcggtaaggacgggtgtcctgcacagtcccgcgcgctccgccagccggctcctcgtgtctgtggcgatgctgtgggctgtgcacggggcgttctgcttctctgacgttctctcgccctccctcccttccccgttttcttctggattcgtttagaagcggttatagagccttcccttcttttcagaggcggaatgtcgtctaaaa

SEQ ID NO: 318593 - DNA, 204 bp, Homo sapiens; identical to SEQ ID NO: 216067
  chr14:104194491-104194695
  hypo

SEQ ID NO: 318594 - DNA, 104 bp, Homo sapiens
  chr14:104194750-104194854
  hypo
actgccgtcccagcctcctgtcccctgcctgcccgccgtggggtctgggaccacctgccttcctgcccacagctccatcctgtgtgaaacgggcatggtccctg

SEQ ID NO: 318595 - DNA, 152 bp, Homo sapiens; identical to SEQ ID NO: 267252
  chr14:104200030-104200182
  hypo

SEQ ID NO: 318596 - DNA, 349 bp, Homo sapiens; identical to SEQ ID NO: 216069
  chr14:104202356-104202705
  hypo

SEQ ID NO: 318597 - DNA, 121 bp, Homo sapiens; identical to SEQ ID NO: 216070
  chr14:104204087-104204208
  hypo

SEQ ID NO: 318598 - DNA, 65 bp, Homo sapiens; identical to SEQ ID NO: 267255
  chr14:104222924-104222989
  hypo

SEQ ID NO: 318599 - DNA, 88 bp, Homo sapiens; identical to SEQ ID NO: 216071
  chr14:104231446-104231534
  hypo

SEQ ID NO: 318600 - DNA, 45 bp, Homo sapiens; identical to SEQ ID NO: 216072
  chr14:104335355-104335400
  hypo

SEQ ID NO: 318601 - DNA, 202 bp, Homo sapiens; identical to SEQ ID NO: 216073
  chr14:104335677-104335879
  hypo

SEQ ID NO: 318602 - DNA, 82 bp, Homo sapiens; identical to SEQ ID NO: 216074
  chr14:104349424-104349506
  hypo

SEQ ID NO: 318603 - DNA, 129 bp, Homo sapiens; identical to SEQ ID NO: 216075
  chr14:104353834-104353963
  hypo

SEQ ID NO: 318604 - DNA, 603 bp, Homo sapiens; identical to SEQ ID NO: 267261
  chr14:104393986-104394589
  hypo

SEQ ID NO: 318605 - DNA, 381 bp, Homo sapiens; identical to SEQ ID NO: 216077
  chr14:104395206-104395587
  hypo

SEQ ID NO: 318606 - DNA, 63 bp, Homo sapiens; identical to SEQ ID NO: 216078
  chr14:104548475-104548538
  hypo

SEQ ID NO: 318607 - DNA, 231 bp, Homo sapiens; identical to SEQ ID NO: 267264
  chr14:104570011-104570242
  hypo

SEQ ID NO: 318608 - DNA, 111 bp, Homo sapiens; identical to SEQ ID NO: 267265
  chr14:104571681-104571792
  hypo

SEQ ID NO: 318609 - DNA, 112 bp, Homo sapiens; identical to SEQ ID NO: 267266
  chr14:104600535-104600647
  hypo

SEQ ID NO: 318610 - DNA, 236 bp, Homo sapiens; identical to SEQ ID NO: 216079
  chr14:104618440-104618676
  hypo

SEQ ID NO: 318611 - DNA, 101 bp, Homo sapiens
  chr14:104623761-104623862
  hypo
gtttgatgggggagaggcggaaagtctggcttctggaccaccatctgcctccctctctgcctccaaggagtcctgctggggcagaccgcccacacaccccg

SEQ ID NO: 318612 - DNA, 35 bp, Homo sapiens; identical to SEQ ID NO: 267270
  chr14:104627959-104627994
  hypo

SEQ ID NO: 318613 - DNA, 260 bp, Homo sapiens; identical to SEQ ID NO: 267272
  chr14:104633624-104633884
  hypo

SEQ ID NO: 318614 - DNA, 138 bp, Homo sapiens
  chr14:104640045-104640183
  hypo
ccggaggccgcagccgcctgcacctcatcgacctgggcagctgtgaggcggcggctggcagggccggggaggctgctgggggtcccctgtgtctgtccctgtcggccctgggcagcgtcatcttggccctggtcaacg

SEQ ID NO: 318615 - DNA, 100 bp, Homo sapiens
  chr14:104640582-104640682
  hypo
cagagacactcagcaccgtgcagctcgccgcccgcatccaccgcctgcgcaggaagaaggccaaggtgctccccacctcctgcccgccccatctcggggc

SEQ ID NO: 318616 - DNA, 159 bp, Homo sapiens; identical to SEQ ID NO: 216081
  chr14:104641146-104641305
  hypo

SEQ ID NO: 318617 - DNA, 211 bp, Homo sapiens
  chr14:104642243-104642454
  hypo
tgtccctgggggcgcttgccggagctgggcggcccaccagcctggctagcttcgacagtgactgctccctgcgggccctggcctcggggtcccggccagtcagcatcatcagcagcatcaatgatgagtttgacgcctacacctctcaggcccctgagggggggcccctggagggggcagcctgggccggcagcagtcacggctcctccat

SEQ ID NO: 318618 - DNA, 140 bp, Homo sapiens
  chr14:104642742-104642882
  hypo
ccactccagcctcccccggaaaccgaggactgcctctgccaccacccgtgtgggctgtgctcgcctgggccagagcccacctggccgtggaggcctgtttgaggacccatggctgctccgggtaggggagtgtgataccc

SEQ ID NO: 318619 - DNA, 78 bp, Homo sapiens
  chr14:104645048-104645126
  hypo
gccttcagcggccccgccccaccccgagggaggcccccacccaggtagggcctttggtgggctggggtctatgacccc

SEQ ID NO: 318620 - DNA, 176 bp, Homo sapiens; identical to SEQ ID NO: 216082
  chr14:104645540-104645716
  hypo

SEQ ID NO: 318621 - DNA, 120 bp, Homo sapiens
  chr14:104647088-104647208
  hypo
gccagcgtttgcgacgtccccgcacgacaggctcatactttctgaggatcgtgcatagcataggacgtctgaacctttgtacaaatgtgtagatgacatcttgctacagcttttatttgt

SEQ ID NO: 318622 - DNA, 193 bp, Homo sapiens; identical to SEQ ID NO: 267281
  chr14:104655996-104656189
  hypo

SEQ ID NO: 318623 - DNA, 96 bp, Homo sapiens; identical to SEQ ID NO: 267282
  chr14:104678739-104678835
  hypo

SEQ ID NO: 318624 - DNA, 398 bp, Homo sapiens
  chr14:104679858-104680256
  hypo
attctgggctacgcagagaacccggccgtgcgggaagtccggcctgcaggtggggagctcatccatgccctggtttaagacgctaagtgtatggcttaagacgctaagtgtatgacagttgtcacacagcacaggaaatgaatacatgtccccgatgtgtttttctggaaaacacgccttgcatttggcgtcctgtggccgctgcaaccagtgatcgcaaacgatgagcagggggcatcctctcaacgccccagggtccagaggtctgaaatccgtgtccctgggccacagccaaggtgcctgcaggcattgccccctctgggtgctgctgccgggacccttccctgcctctcccggcccgtggtggccccaggcgtccttggcgtgtggccccatcc

SEQ ID NO: 318625 - DNA, 362 bp, Homo sapiens
  chr14:104695970-104696332
  hypo
gcggcctgcccgtccgcgaagtcacttagctgggatctaatcgggtttcacaggggcataaattacttggctagaggttgttcccgggtgtttccaccccgggcctgttatttacacaccgtgcggtaatgtagtcacggccttgggtgcgcagtatttatggtgtttgatcggcttccagcccaggccgcctgtccaggaacatttgttgagatgttgtgcagagccgctggggacctctgccacaggcgggcatcaatctacctggagctcctgcggcagccctgcagagcctcaaaagggcagggcgggcctgtggtgccaccctgagctggtcactgtctgcagatggcagctctagg

SEQ ID NO: 318626 - DNA, 133 bp, Homo sapiens; identical to SEQ ID NO: 267285
  chr14:104718711-104718844
  hypo

SEQ ID NO: 318627 - DNA, 90 bp, Homo sapiens; identical to SEQ ID NO: 216083
  chr14:104733749-104733839
  hypo

SEQ ID NO: 318628 - DNA, 604 bp, Homo sapiens; identical to SEQ ID NO: 267287
  chr14:104746283-104746887
  hypo

SEQ ID NO: 318629 - DNA, 70 bp, Homo sapiens; identical to SEQ ID NO: 267288
  chr14:104761170-104761240
  hypo

SEQ ID NO: 318630 - DNA, 205 bp, Homo sapiens
  chr14:104770380-104770585
  hypo
agccccaccccacctcggggatcctgcccaaggtctgctctgcccggaagtgaaggagaagcccgttctcttccccctcgggctggggaagagctcacagcccaggtcacgccacagaaatcccctcctcatctggccctctgactccacctttccacgctgtccgtgggaccaggggctgagccgtcagcggccgtggaccttg

SEQ ID NO: 318631 - DNA, 129 bp, Homo sapiens; identical to SEQ ID NO: 216084
  chr14:104800476-104800605
  hypo

SEQ ID NO: 318632 - DNA, 334 bp, Homo sapiens
  chr14:104800643-104800977
  hypo
ctccttagacagtgccctctcgggccagccggcggctgcccaggtcgggaacagatatgtcgccggcgacaccattatctcccgggcgaacggcgacgtctccgcagccaggcagagcccaggctgccgtgtaattggaccattcagaagtaaattatctgcagctggaaacaagacactgccttttaactcgggcattataaggtcaagactcgagacatcgctgggaaaagcagttattgaaaagcgatgggaaaatgaaatttaaaattcaaagccaccatgggcggcgagcgtggcgggaggcgtgcgtcaccggcggccccaggagccg

SEQ ID NO: 318633 - DNA, 108 bp, Homo sapiens; identical to SEQ ID NO: 267291
  chr14:104812558-104812666
  hypo

SEQ ID NO: 318634 - DNA, 96 bp, Homo sapiens; identical to SEQ ID NO: 267292
  chr14:104813189-104813285
  hypo

SEQ ID NO: 318635 - DNA, 36 bp, Homo sapiens; identical to SEQ ID NO: 267293
  chr14:104813345-104813381
  hypo

SEQ ID NO: 318636 - DNA, 207 bp, Homo sapiens; identical to SEQ ID NO: 267294
  chr14:104824380-104824587
  hypo

SEQ ID NO: 318637 - DNA, 255 bp, Homo sapiens; identical to SEQ ID NO: 267295
  chr14:104839337-104839592
  hypo

SEQ ID NO: 318638 - DNA, 46 bp, Homo sapiens; identical to SEQ ID NO: 216086
  chr14:104854591-104854637
  hypo

SEQ ID NO: 318639 - DNA, 185 bp, Homo sapiens; identical to SEQ ID NO: 216087
  chr14:104854673-104854858
  hypo

SEQ ID NO: 318640 - DNA, 69 bp, Homo sapiens; identical to SEQ ID NO: 267298
  chr14:104893581-104893650
  hypo

SEQ ID NO: 318641 - DNA, 271 bp, Homo sapiens; identical to SEQ ID NO: 216088
  chr14:104895986-104896257
  hypo

SEQ ID NO: 318642 - DNA, 85 bp, Homo sapiens; identical to SEQ ID NO: 216089
  chr14:105102963-105103048
  hypo

SEQ ID NO: 318643 - DNA, 241 bp, Homo sapiens
  chr14:105103508-105103749
  hypo
gcccgagacctgtgtcgccacccactgaggaacgggcaccacccgtcgcccgagacctgtgtcgccacccactgaggaacgggcaccacccgtcgcccgagacctgtgtcgccacccactgaggaacgggcaccacccgtcgtccgagacctgtgtcgccacccactgaggaacgggcaccacccgtcgtccgagacctgtgtcgccacccactgaggaacgggtacgacctgtcatccga

SEQ ID NO: 318644 - DNA, 67 bp, Homo sapiens; identical to SEQ ID NO: 267303
  chr14:105119951-105120018
  hypo

SEQ ID NO: 318645 - DNA, 304 bp, Homo sapiens; identical to SEQ ID NO: 267304
  chr14:105149126-105149430
  hypo

SEQ ID NO: 318646 - DNA, 114 bp, Homo sapiens; identical to SEQ ID NO: 216091
  chr14:105153068-105153182
  hypo

SEQ ID NO: 318647 - DNA, 122 bp, Homo sapiens
  chr14:105157363-105157485
  hypo
ctgtcatgggccctgcagcccggcaaaggggatgtcgctagtggggacggaccaagtggccaggtgcgactgtagcctccacagccagggctcctgagttaaccttcaggtgagcgcccact

SEQ ID NO: 318648 - DNA, 64 bp, Homo sapiens
  chr14:105174394-105174458
  hypo
gctggggagaggggcaggtggcacatggaacttgtgtgcgcgtcctgcccgtgcgtggccaggg

SEQ ID NO: 318649 - DNA, 56 bp, Homo sapiens; identical to SEQ ID NO: 216092
  chr14:105181888-105181944
  hypo

SEQ ID NO: 318650 - DNA, 161 bp, Homo sapiens; identical to SEQ ID NO: 267309
  chr14:105182343-105182504
  hypo

SEQ ID NO: 318651 - DNA, 213 bp, Homo sapiens; identical to SEQ ID NO: 125321
  chr14:105189960-105190173
  hypo

SEQ ID NO: 318652 - DNA, 337 bp, Homo sapiens; identical to SEQ ID NO: 290602
  chr14:105195466-105195803
  hypo

SEQ ID NO: 318653 - DNA, 148 bp, Homo sapiens; identical to SEQ ID NO: 203786
  chr14:105196124-105196272
  hypo

SEQ ID NO: 318654 - DNA, 198 bp, Homo sapiens; identical to SEQ ID NO: 267312
  chr14:105201187-105201385
  hypo

SEQ ID NO: 318655 - DNA, 157 bp, Homo sapiens; identical to SEQ ID NO: 216095
  chr14:105204798-105204955
  hypo

SEQ ID NO: 318656 - DNA, 41 bp, Homo sapiens; identical to SEQ ID NO: 267314
  chr14:105214103-105214144
  hypo

SEQ ID NO: 318657 - DNA, 44 bp, Homo sapiens; identical to SEQ ID NO: 216096
  chr14:105223769-105223813
  hypo

SEQ ID NO: 318658 - DNA, 108 bp, Homo sapiens; identical to SEQ ID NO: 267317
  chr14:105225798-105225906
  hypo

SEQ ID NO: 318659 - DNA, 166 bp, Homo sapiens; identical to SEQ ID NO: 267318
  chr14:105226172-105226338
  hypo

SEQ ID NO: 318660 - DNA, 94 bp, Homo sapiens; identical to SEQ ID NO: 216097
  chr14:105236575-105236669
  hypo

SEQ ID NO: 318661 - DNA, 166 bp, Homo sapiens
  chr14:105240771-105240937
  hypo
gagacccaccctcccgccttccaccacaggcgactgtgcttttaaagcaaaggccccatctgcaggagaatcgtccccaaacacagtgacctggaactaaccaagtggctggaccctggcccccttcacagtaaatacctcctgggccaagtccccagaacaggtt

SEQ ID NO: 318662 - DNA, 132 bp, Homo sapiens
  chr14:105241177-105241309
  hypo
tcacgtgcccaagaagacaggacatcgtcccctagagacagccccaggagtcgctacctggccccagcccttcagccccatctgggctcccactcactgtgaggaaggggtgcctggagttctgcaggacgc

SEQ ID NO: 318663 - DNA, 241 bp, Homo sapiens
  chr14:105241428-105241669
  hypo
tccttcttgaggatcttcatggcgtagtagcggcctgtggccttctccttcaccaggatcaccttgccgaaagtgcccttgcccagcagcttcaggtactcaaactcgttcatggtctatgggcaggcaccagggtcagcaagcggcgctgccaacagtgcccagctggtcggcatgcgtggggtggcatgaggggccccagagtcggaggcagagccaggagaggcgtccacttcacacc

SEQ ID NO: 318664 - DNA, 142 bp, Homo sapiens; identical to SEQ ID NO: 216098
  chr14:105244208-105244350
  hypo

SEQ ID NO: 318665 - DNA, 58 bp, Homo sapiens; identical to SEQ ID NO: 216099
  chr14:105245408-105245466
  hypo

SEQ ID NO: 318666 - DNA, 204 bp, Homo sapiens; identical to SEQ ID NO: 267323
  chr14:105247293-105247497
  hypo

SEQ ID NO: 318667 - DNA, 78 bp, Homo sapiens; identical to SEQ ID NO: 216100
  chr14:105268575-105268653
  hypo

SEQ ID NO: 318668 - DNA, 317 bp, Homo sapiens; identical to SEQ ID NO: 290604
  chr14:105269022-105269339
  hypo

SEQ ID NO: 318669 - DNA, 64 bp, Homo sapiens; identical to SEQ ID NO: 267327
  chr14:105270250-105270314
  hypo

SEQ ID NO: 318670 - DNA, 128 bp, Homo sapiens; identical to SEQ ID NO: 267328
  chr14:105273627-105273755
  hypo

SEQ ID NO: 318671 - DNA, 727 bp, Homo sapiens; identical to SEQ ID NO: 203788
  chr14:105330980-105331707
  hypo

SEQ ID NO: 318672 - DNA, 154 bp, Homo sapiens; identical to SEQ ID NO: 51765
  chr14:105331744-105331898
  hypo

SEQ ID NO: 318673 - DNA, 188 bp, Homo sapiens; identical to SEQ ID NO: 267329
  chr14:105335727-105335915
  hypo

SEQ ID NO: 318674 - DNA, 189 bp, Homo sapiens; identical to SEQ ID NO: 267330
  chr14:105347539-105347728
  hypo

SEQ ID NO: 318675 - DNA, 67 bp, Homo sapiens; identical to SEQ ID NO: 267331
  chr14:105349524-105349591
  hypo

SEQ ID NO: 318676 - DNA, 155 bp, Homo sapiens; identical to SEQ ID NO: 267332
  chr14:105349621-105349776
  hypo

SEQ ID NO: 318677 - DNA, 108 bp, Homo sapiens; identical to SEQ ID NO: 216103
  chr14:105350162-105350270
  hypo

SEQ ID NO: 318678 - DNA, 62 bp, Homo sapiens; identical to SEQ ID NO: 267334
  chr14:105351133-105351195
  hypo

SEQ ID NO: 318679 - DNA, 240 bp, Homo sapiens; identical to SEQ ID NO: 267335
  chr14:105352620-105352860
  hypo

SEQ ID NO: 318680 - DNA, 71 bp, Homo sapiens; identical to SEQ ID NO: 267336
  chr14:105355231-105355302
  hypo

SEQ ID NO: 318681 - DNA, 125 bp, Homo sapiens; identical to SEQ ID NO: 267337
  chr14:105362737-105362862
  hypo

SEQ ID NO: 318682 - DNA, 37 bp, Homo sapiens; identical to SEQ ID NO: 216104
  chr14:105457659-105457696
  hypo

SEQ ID NO: 318683 - DNA, 581 bp, Homo sapiens; identical to SEQ ID NO: 216105
  chr14:105457777-105458358
  hypo

SEQ ID NO: 318684 - DNA, 54 bp, Homo sapiens; identical to SEQ ID NO: 267339
  chr14:105464945-105464999
  hypo

SEQ ID NO: 318685 - DNA, 95 bp, Homo sapiens; identical to SEQ ID NO: 267340
  chr14:105468472-105468567
  hypo

SEQ ID NO: 318686 - DNA, 300 bp, Homo sapiens; identical to SEQ ID NO: 216106
  chr14:105469615-105469915
  hypo

SEQ ID NO: 318687 - DNA, 97 bp, Homo sapiens; identical to SEQ ID NO: 267342
  chr14:105472077-105472174
  hypo

SEQ ID NO: 318688 - DNA, 124 bp, Homo sapiens; identical to SEQ ID NO: 267343
  chr14:105478880-105479004
  hypo

SEQ ID NO: 318689 - DNA, 97 bp, Homo sapiens; identical to SEQ ID NO: 290613
  chr14:105511596-105511693
  hypo

SEQ ID NO: 318690 - DNA, 38 bp, Homo sapiens; identical to SEQ ID NO: 267344
  chr14:105516268-105516306
  hypo

SEQ ID NO: 318691 - DNA, 791 bp, Homo sapiens; identical to SEQ ID NO: 267345
  chr14:105517523-105518314
  hypo

SEQ ID NO: 318692 - DNA, 50 bp, Homo sapiens; identical to SEQ ID NO: 216108
  chr14:105533295-105533345
  hypo

SEQ ID NO: 318693 - DNA, 173 bp, Homo sapiens; identical to SEQ ID NO: 216109
  chr14:105538393-105538566
  hypo

SEQ ID NO: 318694 - DNA, 322 bp, Homo sapiens; identical to SEQ ID NO: 216110
  chr14:105546626-105546948
  hypo

SEQ ID NO: 318695 - DNA, 33 bp, Homo sapiens; identical to SEQ ID NO: 267349
  chr14:105547474-105547507
  hypo

SEQ ID NO: 318696 - DNA, 45 bp, Homo sapiens; identical to SEQ ID NO: 267350
  chr14:105610437-105610482
  hypo

SEQ ID NO: 318697 - DNA, 336 bp, Homo sapiens; identical to SEQ ID NO: 267351
  chr14:105611097-105611433
  hypo

SEQ ID NO: 318698 - DNA, 220 bp, Homo sapiens; identical to SEQ ID NO: 216111
  chr14:105612116-105612336
  hypo

SEQ ID NO: 318699 - DNA, 378 bp, Homo sapiens; identical to SEQ ID NO: 267353
  chr14:105612739-105613117
  hypo

SEQ ID NO: 318700 - DNA, 214 bp, Homo sapiens; identical to SEQ ID NO: 267354
  chr14:105616974-105617188
  hypo

SEQ ID NO: 318701 - DNA, 324 bp, Homo sapiens; identical to SEQ ID NO: 267355
  chr14:105621962-105622286
  hypo

SEQ ID NO: 318702 - DNA, 57 bp, Homo sapiens; identical to SEQ ID NO: 216113
  chr14:105639401-105639458
  hypo

SEQ ID NO: 318703 - DNA, 155 bp, Homo sapiens; identical to SEQ ID NO: 290617
  chr14:105647609-105647764
  hypo

SEQ ID NO: 318704 - DNA, 668 bp, Homo sapiens; identical to SEQ ID NO: 216114
  chr14:105687721-105688389
  hypo

SEQ ID NO: 318705 - DNA, 98 bp, Homo sapiens; identical to SEQ ID NO: 216115
  chr14:105688874-105688972
  hypo

SEQ ID NO: 318706 - DNA, 442 bp, Homo sapiens; identical to SEQ ID NO: 216116
  chr14:105689523-105689965
  hypo

SEQ ID NO: 318707 - DNA, 270 bp, Homo sapiens; identical to SEQ ID NO: 267360
  chr14:105690180-105690450
  hypo

SEQ ID NO: 318708 - DNA, 180 bp, Homo sapiens; identical to SEQ ID NO: 267362
  chr14:105717870-105718050
  hypo

SEQ ID NO: 318709 - DNA, 79 bp, Homo sapiens; identical to SEQ ID NO: 267363
  chr14:105720530-105720609
  hypo

SEQ ID NO: 318710 - DNA, 51 bp, Homo sapiens
  chr14:105723693-105723744
  hypo
gcaaagccccaccacgcaagaacctcgcaagcaatcagatggttaggacgc

SEQ ID NO: 318711 - DNA, 264 bp, Homo sapiens
  chr14:105723873-105724137
  hypo
cccccaggacggctgggacgtgagcggtgaggcccgtgaacaaaggtgcatctgaaggcaggcagtcccagagggccgagacaacgggcaggaccgactgcagcacagccaacagcctcacaagaggcactatgagaagaccggcggcaggggtggggccagtgacatcaaaggaaaccaaaggaaagcagtaagaactacctggggaaacgcccgtgacagccaacacacaccaacgggaaaagtgaacgaggccagaaggct

SEQ ID NO: 318712 - DNA, 424 bp, Homo sapiens; identical to SEQ ID NO: 267365
  chr14:105728096-105728520
  hypo

SEQ ID NO: 318713 - DNA, 182 bp, Homo sapiens; identical to SEQ ID NO: 216117
  chr14:105739047-105739229
  hypo

SEQ ID NO: 318714 - DNA, 180 bp, Homo sapiens; identical to SEQ ID NO: 203794
  chr14:105781805-105781985
  hypo

SEQ ID NO: 318715 - DNA, 94 bp, Homo sapiens; identical to SEQ ID NO: 216119
  chr14:105796585-105796679
  hypo

SEQ ID NO: 318716 - DNA, 202 bp, Homo sapiens; identical to SEQ ID NO: 224811
  chr15:20478123-20478325
  hypo

SEQ ID NO: 318717 - DNA, 148 bp, Homo sapiens; identical to SEQ ID NO: 267369
  chr15:22803359-22803507
  hypo

SEQ ID NO: 318718 - DNA, 203 bp, Homo sapiens
  chr15:22876756-22876959
  hypo
ccaattaaaccgcacgagcaccacagcctctggcatggctaaaataaaaagaccggcatgtcaaataattttcaaggatttagagcaactggaaattacaagatggtacaagcacttggggaaactatatggcattttcttacaaaggttaacatgtatctacccctgagaagcagcagttcacccttaggtatttatccaag

SEQ ID NO: 318719 - DNA, 144 bp, Homo sapiens
  chr15:22877052-22877196
  hypo
tggatcaacactgaagtatatgcacgcagtggaatgcagttcagctgtgaaaacacagctcatccacataacgacataagagaattccaggaactttatgtcgaaaaaaaagccagacttaaaaggatccgttattattccatt

SEQ ID NO: 318720 - DNA, 760 bp, Homo sapiens; identical to SEQ ID NO: 290622
  chr15:22892004-22892764
  hypo

SEQ ID NO: 318721 - DNA, 60 bp, Homo sapiens; identical to SEQ ID NO: 267371
  chr15:22920760-22920820
  hypo

SEQ ID NO: 318722 - DNA, 437 bp, Homo sapiens; identical to SEQ ID NO: 267372
  chr15:22927769-22928206
  hypo

SEQ ID NO: 318723 - DNA, 118 bp, Homo sapiens; identical to SEQ ID NO: 216121
  chr15:22929815-22929933
  hypo

SEQ ID NO: 318724 - DNA, 44 bp, Homo sapiens; identical to SEQ ID NO: 267374
  chr15:22930284-22930328
  hypo

SEQ ID NO: 318725 - DNA, 293 bp, Homo sapiens; identical to SEQ ID NO: 267375
  chr15:22933549-22933842
  hypo

SEQ ID NO: 318726 - DNA, 52 bp, Homo sapiens; identical to SEQ ID NO: 267376
  chr15:22940780-22940832
  hypo

SEQ ID NO: 318727 - DNA, 86 bp, Homo sapiens; identical to SEQ ID NO: 216122
  chr15:22945063-22945149
  hypo

SEQ ID NO: 318728 - DNA, 33 bp, Homo sapiens; identical to SEQ ID NO: 267378
  chr15:22954802-22954835
  hypo

SEQ ID NO: 318729 - DNA, 142 bp, Homo sapiens; identical to SEQ ID NO: 216123
  chr15:22966142-22966284
  hypo

SEQ ID NO: 318730 - DNA, 116 bp, Homo sapiens; identical to SEQ ID NO: 216124
  chr15:22968266-22968382
  hypo

SEQ ID NO: 318731 - DNA, 240 bp, Homo sapiens; identical to SEQ ID NO: 267381
  chr15:22968629-22968869
  hypo

SEQ ID NO: 318732 - DNA, 82 bp, Homo sapiens
  chr15:22977248-22977330
  hypo
tggtgttcagtttttattggggcttcgttgcatgggcacagttgactgaatcactggccacgtagctgagctcagcctccag

SEQ ID NO: 318733 - DNA, 103 bp, Homo sapiens; identical to SEQ ID NO: 216126
  chr15:22979738-22979841
  hypo

SEQ ID NO: 318734 - DNA, 114 bp, Homo sapiens; identical to SEQ ID NO: 267384
  chr15:22994699-22994813
  hypo

SEQ ID NO: 318735 - DNA, 35 bp, Homo sapiens; identical to SEQ ID NO: 216127
  chr15:23077086-23077121
  hypo

SEQ ID NO: 318736 - DNA, 353 bp, Homo sapiens
  chr15:23084862-23085215
  hypo
tactccggtttgtgtggtgttttcctcatgcttacgctagggccgtggattggggaggtgaggtgctttctcaggccatcctatttataaggtcacgcgcgttgaccatctcacccagtcctggggcctgtcacacggacagatgctccctgaagtgtggctgcggtgtgtgtgtatctgtgtgccttagagacagacacatctgcatccttggaaaatcatacttggttttatttaattctatttaaattgtatgggagaccactatgctttcactttaaagctaaattccttaaattatccatgattttatattttcattcgagactgtcgggccctttatctcttctctg

SEQ ID NO: 318737 - DNA, 229 bp, Homo sapiens; identical to SEQ ID NO: 267387
  chr15:25863450-25863679
  hypo

SEQ ID NO: 318738 - DNA, 152 bp, Homo sapiens; identical to SEQ ID NO: 267388
  chr15:25918277-25918429
  hypo

SEQ ID NO: 318739 - DNA, 51 bp, Homo sapiens; identical to SEQ ID NO: 267389
  chr15:25940021-25940072
  hypo

SEQ ID NO: 318740 - DNA, 301 bp, Homo sapiens; identical to SEQ ID NO: 216129
  chr15:25963361-25963662
  hypo

SEQ ID NO: 318741 - DNA, 158 bp, Homo sapiens; identical to SEQ ID NO: 267391
  chr15:25972184-25972342
  hypo

SEQ ID NO: 318742 - DNA, 244 bp, Homo sapiens; identical to SEQ ID NO: 216130
  chr15:26026131-26026375
  hypo

SEQ ID NO: 318743 - DNA, 153 bp, Homo sapiens; identical to SEQ ID NO: 267393
  chr15:26234706-26234859
  hypo

SEQ ID NO: 318744 - DNA, 404 bp, Homo sapiens; identical to SEQ ID NO: 216131
  chr15:27128173-27128577
  hypo

SEQ ID NO: 318745 - DNA, 104 bp, Homo sapiens; identical to SEQ ID NO: 267395
  chr15:27494275-27494379
  hypo

SEQ ID NO: 318746 - DNA, 274 bp, Homo sapiens; identical to SEQ ID NO: 267396
  chr15:27959332-27959606
  hypo

SEQ ID NO: 318747 - DNA, 94 bp, Homo sapiens; identical to SEQ ID NO: 267397
  chr15:27959726-27959820
  hypo

SEQ ID NO: 318748 - DNA, 125 bp, Homo sapiens; identical to SEQ ID NO: 216132
  chr15:28356786-28356911
  hypo

SEQ ID NO: 318749 - DNA, 149 bp, Homo sapiens; identical to SEQ ID NO: 267399
  chr15:28358254-28358403
  hypo

SEQ ID NO: 318750 - DNA, 190 bp, Homo sapiens; identical to SEQ ID NO: 267400
  chr15:28360050-28360240
  hypo

SEQ ID NO: 318751 - DNA, 92 bp, Homo sapiens; identical to SEQ ID NO: 267401
  chr15:28377832-28377924
  hypo

SEQ ID NO: 318752 - DNA, 50 bp, Homo sapiens
  chr15:28389777-28389827
  hypo
gccagtcatctaaccttgatcgccataagccccttccttaccagcagctg

SEQ ID NO: 318753 - DNA, 65 bp, Homo sapiens; identical to SEQ ID NO: 216133
  chr15:28390033-28390098
  hypo

SEQ ID NO: 318754 - DNA, 125 bp, Homo sapiens; identical to SEQ ID NO: 216134
  chr15:28516951-28517076
  hypo

SEQ ID NO: 318755 - DNA, 176 bp, Homo sapiens; identical to SEQ ID NO: 216135
  chr15:28517198-28517374
  hypo

SEQ ID NO: 318756 - DNA, 86 bp, Homo sapiens; identical to SEQ ID NO: 216136
  chr15:28900534-28900620
  hypo

SEQ ID NO: 318757 - DNA, 33 bp, Homo sapiens; identical to SEQ ID NO: 267405
  chr15:28938356-28938389
  hypo

SEQ ID NO: 318758 - DNA, 120 bp, Homo sapiens; identical to SEQ ID NO: 267406
  chr15:29029577-29029697
  hypo

SEQ ID NO: 318759 - DNA, 152 bp, Homo sapiens; identical to SEQ ID NO: 216137
  chr15:29101155-29101307
  hypo

SEQ ID NO: 318760 - DNA, 32 bp, Homo sapiens; identical to SEQ ID NO: 216138
  chr15:29101367-29101399
  hypo

SEQ ID NO: 318761 - DNA, 45 bp, Homo sapiens; identical to SEQ ID NO: 203802
  chr15:29107356-29107401
  hypo

SEQ ID NO: 318762 - DNA, 86 bp, Homo sapiens; identical to SEQ ID NO: 216140
  chr15:29111213-29111299
  hypo

SEQ ID NO: 318763 - DNA, 43 bp, Homo sapiens; identical to SEQ ID NO: 267410
  chr15:29114837-29114880
  hypo

SEQ ID NO: 318764 - DNA, 51 bp, Homo sapiens; identical to SEQ ID NO: 290641
  chr15:29130656-29130707
  hypo

SEQ ID NO: 318765 - DNA, 502 bp, Homo sapiens; identical to SEQ ID NO: 267412
  chr15:29140040-29140542
  hypo

SEQ ID NO: 318766 - DNA, 89 bp, Homo sapiens; identical to SEQ ID NO: 267413
  chr15:29144522-29144611
  hypo

SEQ ID NO: 318767 - DNA, 92 bp, Homo sapiens; identical to SEQ ID NO: 267415
  chr15:29146201-29146293
  hypo

SEQ ID NO: 318768 - DNA, 66 bp, Homo sapiens; identical to SEQ ID NO: 267416
  chr15:29223574-29223640
  hypo

SEQ ID NO: 318769 - DNA, 350 bp, Homo sapiens; identical to SEQ ID NO: 216141
  chr15:29236505-29236855
  hypo

SEQ ID NO: 318770 - DNA, 1187 bp, Homo sapiens; identical to SEQ ID NO: 267419
  chr15:29345750-29346937
  hypo

SEQ ID NO: 318771 - DNA, 157 bp, Homo sapiens; identical to SEQ ID NO: 267420
  chr15:29357222-29357379
  hypo

SEQ ID NO: 318772 - DNA, 83 bp, Homo sapiens
  chr15:29389587-29389670
  hypo
gtgcctcttacagactgcctcgagaactcacacttagctagatgatgcggccggtggcgtgcaggtagatttctgatggccag

SEQ ID NO: 318773 - DNA, 71 bp, Homo sapiens
  chr15:29389700-29389771
  hypo
attgttaaaattgccgagccttccttcgagttattactttttacattgacggataaaattgtatgtatttg

SEQ ID NO: 318774 - DNA, 39 bp, Homo sapiens; identical to SEQ ID NO: 290642
  chr15:29395819-29395858
  hypo

SEQ ID NO: 318775 - DNA, 65 bp, Homo sapiens; identical to SEQ ID NO: 290643
  chr15:29396084-29396149
  hypo

SEQ ID NO: 318776 - DNA, 156 bp, Homo sapiens; identical to SEQ ID NO: 216143
  chr15:29398812-29398968
  hypo

SEQ ID NO: 318777 - DNA, 42 bp, Homo sapiens; identical to SEQ ID NO: 267423
  chr15:29403248-29403290
  hypo

SEQ ID NO: 318778 - DNA, 427 bp, Homo sapiens; identical to SEQ ID NO: 216144
  chr15:29410106-29410533
  hypo

SEQ ID NO: 318779 - DNA, 172 bp, Homo sapiens; identical to SEQ ID NO: 216145
  chr15:29410566-29410738
  hypo

SEQ ID NO: 318780 - DNA, 187 bp, Homo sapiens; identical to SEQ ID NO: 267426
  chr15:29411084-29411271
  hypo

SEQ ID NO: 318781 - DNA, 61 bp, Homo sapiens; identical to SEQ ID NO: 216146
  chr15:29415482-29415543
  hypo

SEQ ID NO: 318782 - DNA, 294 bp, Homo sapiens; identical to SEQ ID NO: 216147
  chr15:29415573-29415867
  hypo

SEQ ID NO: 318783 - DNA, 279 bp, Homo sapiens; identical to SEQ ID NO: 267429
  chr15:29417874-29418153
  hypo

SEQ ID NO: 318784 - DNA, 128 bp, Homo sapiens; identical to SEQ ID NO: 216149
  chr15:29418534-29418662
  hypo

SEQ ID NO: 318785 - DNA, 60 bp, Homo sapiens; identical to SEQ ID NO: 216150
  chr15:29428200-29428260
  hypo

SEQ ID NO: 318786 - DNA, 109 bp, Homo sapiens; identical to SEQ ID NO: 267432
  chr15:29431470-29431579
  hypo

SEQ ID NO: 318787 - DNA, 64 bp, Homo sapiens; identical to SEQ ID NO: 216151
  chr15:29448969-29449033
  hypo

SEQ ID NO: 318788 - DNA, 65 bp, Homo sapiens; identical to SEQ ID NO: 267434
  chr15:29487547-29487612
  hypo

SEQ ID NO: 318789 - DNA, 78 bp, Homo sapiens; identical to SEQ ID NO: 267435
  chr15:29697962-29698040
  hypo

SEQ ID NO: 318790 - DNA, 72 bp, Homo sapiens; identical to SEQ ID NO: 267436
  chr15:30022825-30022897
  hypo

SEQ ID NO: 318791 - DNA, 37 bp, Homo sapiens; identical to SEQ ID NO: 267437
  chr15:30024947-30024984
  hypo

SEQ ID NO: 318792 - DNA, 343 bp, Homo sapiens; identical to SEQ ID NO: 290652
  chr15:30113523-30113866
  hypo

SEQ ID NO: 318793 - DNA, 319 bp, Homo sapiens; identical to SEQ ID NO: 203810
  chr15:30113984-30114303
  hypo

SEQ ID NO: 318794 - DNA, 431 bp, Homo sapiens; identical to SEQ ID NO: 203811
  chr15:30114349-30114780
  hypo

SEQ ID NO: 318795 - DNA, 375 bp, Homo sapiens; identical to SEQ ID NO: 290655
  chr15:30114810-30115185
  hypo

SEQ ID NO: 318796 - DNA, 42 bp, Homo sapiens; identical to SEQ ID NO: 267438
  chr15:30333821-30333863
  hypo

SEQ ID NO: 318797 - DNA, 120 bp, Homo sapiens; identical to SEQ ID NO: 216156
  chr15:31188901-31189021
  hypo

SEQ ID NO: 318798 - DNA, 55 bp, Homo sapiens; identical to SEQ ID NO: 216157
  chr15:31194968-31195023
  hypo

SEQ ID NO: 318799 - DNA, 299 bp, Homo sapiens
  chr15:31220891-31221190
  hypo
cttctgcacacatccgtggctcacgcccacctgggcaccgtgtgtccacagccagcagaaaccatctctgttacggtcctttgggtcatccacaggtcaagatgataacttattttaaaaatctgagtaatagaatttaagatgtaagtatgtgaagttttaaactttaatttagcctccaccttacatttagacctttcgtataaagtaccatcagcatcagccctcccgagcacctgccgtgtcgcaggcactgtgccaaggagctcacagacatgggcacatctgcctgttcagag

SEQ ID NO: 318800 - DNA, 108 bp, Homo sapiens
  chr15:31221220-31221328
  hypo
gcaaattattactctaaaaaacaagtttaataaattgcttttatatcaattaacttttacttatcttttgagagaaagaatgtatcggttggccggtttccaagtttt

SEQ ID NO: 318801 - DNA, 90 bp, Homo sapiens; identical to SEQ ID NO: 267442
  chr15:31239318-31239408
  hypo

SEQ ID NO: 318802 - DNA, 34 bp, Homo sapiens; identical to SEQ ID NO: 216158
  chr15:31290000-31290034
  hypo

SEQ ID NO: 318803 - DNA, 33 bp, Homo sapiens; identical to SEQ ID NO: 216159
  chr15:31290274-31290307
  hypo

SEQ ID NO: 318804 - DNA, 210 bp, Homo sapiens; identical to SEQ ID NO: 267445
  chr15:31332301-31332511
  hypo

SEQ ID NO: 318805 - DNA, 157 bp, Homo sapiens; identical to SEQ ID NO: 216160
  chr15:31395008-31395165
  hypo

SEQ ID NO: 318806 - DNA, 163 bp, Homo sapiens; identical to SEQ ID NO: 267447
  chr15:31453187-31453350
  hypo

SEQ ID NO: 318807 - DNA, 75 bp, Homo sapiens; identical to SEQ ID NO: 267449
  chr15:31490444-31490519
  hypo

SEQ ID NO: 318808 - DNA, 161 bp, Homo sapiens; identical to SEQ ID NO: 224818
  chr15:31508793-31508954
  hypo

SEQ ID NO: 318809 - DNA, 44 bp, Homo sapiens; identical to SEQ ID NO: 267450
  chr15:31512245-31512289
  hypo

SEQ ID NO: 318810 - DNA, 315 bp, Homo sapiens; identical to SEQ ID NO: 216161
  chr15:31533287-31533602
  hypo

SEQ ID NO: 318811 - DNA, 40 bp, Homo sapiens; identical to SEQ ID NO: 216162
  chr15:31533632-31533672
  hypo

SEQ ID NO: 318812 - DNA, 278 bp, Homo sapiens; identical to SEQ ID NO: 267453
  chr15:31561303-31561581
  hypo

SEQ ID NO: 318813 - DNA, 226 bp, Homo sapiens; identical to SEQ ID NO: 267454
  chr15:31564282-31564508
  hypo

SEQ ID NO: 318814 - DNA, 149 bp, Homo sapiens; identical to SEQ ID NO: 267455
  chr15:31571206-31571355
  hypo

SEQ ID NO: 318815 - DNA, 38 bp, Homo sapiens; identical to SEQ ID NO: 267456
  chr15:31611580-31611618
  hypo

SEQ ID NO: 318816 - DNA, 261 bp, Homo sapiens; identical to SEQ ID NO: 125434
  chr15:31620800-31621061
  hypo

SEQ ID NO: 318817 - DNA, 50 bp, Homo sapiens; identical to SEQ ID NO: 267457
  chr15:31632061-31632111
  hypo

SEQ ID NO: 318818 - DNA, 247 bp, Homo sapiens; identical to SEQ ID NO: 267458
  chr15:31668808-31669055
  hypo

SEQ ID NO: 318819 - DNA, 115 bp, Homo sapiens; identical to SEQ ID NO: 267459
  chr15:31731209-31731324
  hypo

SEQ ID NO: 318820 - DNA, 524 bp, Homo sapiens; identical to SEQ ID NO: 290662
  chr15:31774610-31775134
  hypo

SEQ ID NO: 318821 - DNA, 457 bp, Homo sapiens; identical to SEQ ID NO: 267462
  chr15:31776581-31777038
  hypo

SEQ ID NO: 318822 - DNA, 200 bp, Homo sapiens; identical to SEQ ID NO: 216164
  chr15:31851205-31851405
  hypo

SEQ ID NO: 318823 - DNA, 209 bp, Homo sapiens; identical to SEQ ID NO: 290663
  chr15:32162282-32162491
  hypo

SEQ ID NO: 318824 - DNA, 775 bp, Homo sapiens; identical to SEQ ID NO: 290664
  chr15:32162523-32163298
  hypo

SEQ ID NO: 318825 - DNA, 38 bp, Homo sapiens; identical to SEQ ID NO: 267464
  chr15:32942576-32942614
  hypo

SEQ ID NO: 318826 - DNA, 106 bp, Homo sapiens; identical to SEQ ID NO: 267465
  chr15:33358715-33358821
  hypo

SEQ ID NO: 318827 - DNA, 133 bp, Homo sapiens; identical to SEQ ID NO: 267466
  chr15:33359132-33359265
  hypo

SEQ ID NO: 318828 - DNA, 375 bp, Homo sapiens; identical to SEQ ID NO: 267467
  chr15:33445900-33446275
  hypo

SEQ ID NO: 318829 - DNA, 120 bp, Homo sapiens; identical to SEQ ID NO: 267468
  chr15:33541443-33541563
  hypo

SEQ ID NO: 318830 - DNA, 34 bp, Homo sapiens; identical to SEQ ID NO: 216166
  chr15:33550215-33550249
  hypo

SEQ ID NO: 318831 - DNA, 210 bp, Homo sapiens; identical to SEQ ID NO: 51852
  chr15:33603879-33604089
  hypo

SEQ ID NO: 318832 - DNA, 118 bp, Homo sapiens; identical to SEQ ID NO: 267470
  chr15:33746678-33746796
  hypo

SEQ ID NO: 318833 - DNA, 149 bp, Homo sapiens; identical to SEQ ID NO: 267472
  chr15:33969176-33969325
  hypo

SEQ ID NO: 318834 - DNA, 98 bp, Homo sapiens; identical to SEQ ID NO: 267473
  chr15:34142220-34142318
  hypo

SEQ ID NO: 318835 - DNA, 120 bp, Homo sapiens; identical to SEQ ID NO: 267474
  chr15:34322808-34322928
  hypo

SEQ ID NO: 318836 - DNA, 510 bp, Homo sapiens; identical to SEQ ID NO: 267475
  chr15:34358082-34358592
  hypo

SEQ ID NO: 318837 - DNA, 210 bp, Homo sapiens; identical to SEQ ID NO: 267476
  chr15:34395526-34395736
  hypo

SEQ ID NO: 318838 - DNA, 44 bp, Homo sapiens; identical to SEQ ID NO: 267478
  chr15:34524063-34524107
  hypo

SEQ ID NO: 318839 - DNA, 82 bp, Homo sapiens; identical to SEQ ID NO: 216169
  chr15:34546026-34546108
  hypo

SEQ ID NO: 318840 - DNA, 152 bp, Homo sapiens; identical to SEQ ID NO: 267480
  chr15:34630947-34631099
  hypo

SEQ ID NO: 318841 - DNA, 392 bp, Homo sapiens; identical to SEQ ID NO: 216171
  chr15:34635789-34636181
  hypo

SEQ ID NO: 318842 - DNA, 43 bp, Homo sapiens; identical to SEQ ID NO: 203820
  chr15:34729901-34729944
  hypo

SEQ ID NO: 318843 - DNA, 253 bp, Homo sapiens; identical to SEQ ID NO: 267483
  chr15:34873192-34873445
  hypo

SEQ ID NO: 318844 - DNA, 102 bp, Homo sapiens; identical to SEQ ID NO: 290676
  chr15:35046505-35046607
  hypo

SEQ ID NO: 318845 - DNA, 181 bp, Homo sapiens; identical to SEQ ID NO: 290677
  chr15:35046689-35046870
  hypo

SEQ ID NO: 318846 - DNA, 31 bp, Homo sapiens; identical to SEQ ID NO: 267485
  chr15:35384634-35384665
  hypo

SEQ ID NO: 318847 - DNA, 129 bp, Homo sapiens; identical to SEQ ID NO: 216174
  chr15:35385319-35385448
  hypo

SEQ ID NO: 318848 - DNA, 80 bp, Homo sapiens; identical to SEQ ID NO: 216175
  chr15:35414092-35414172
  hypo

SEQ ID NO: 318849 - DNA, 77 bp, Homo sapiens; identical to SEQ ID NO: 216176
  chr15:35529459-35529536
  hypo

SEQ ID NO: 318850 - DNA, 146 bp, Homo sapiens; identical to SEQ ID NO: 267489
  chr15:36870094-36870240
  hypo

SEQ ID NO: 318851 - DNA, 679 bp, Homo sapiens; identical to SEQ ID NO: 224830
  chr15:37393563-37394242
  hypo

SEQ ID NO: 318852 - DNA, 64 bp, Homo sapiens; identical to SEQ ID NO: 267490
  chr15:37783013-37783077
  hypo

SEQ ID NO: 318853 - DNA, 135 bp, Homo sapiens; identical to SEQ ID NO: 203833
  chr15:38365202-38365337
  hypo

SEQ ID NO: 318854 - DNA, 561 bp, Homo sapiens; identical to SEQ ID NO: 290693
  chr15:38543129-38543690
  hypo

SEQ ID NO: 318855 - DNA, 31 bp, Homo sapiens; identical to SEQ ID NO: 267491
  chr15:38652448-38652479
  hypo

SEQ ID NO: 318856 - DNA, 136 bp, Homo sapiens; identical to SEQ ID NO: 224833
  chr15:38857268-38857404
  hypo

SEQ ID NO: 318857 - DNA, 84 bp, Homo sapiens; identical to SEQ ID NO: 216180
  chr15:39415395-39415479
  hypo

SEQ ID NO: 318858 - DNA, 217 bp, Homo sapiens; identical to SEQ ID NO: 267493
  chr15:39703028-39703245
  hypo

SEQ ID NO: 318859 - DNA, 218 bp, Homo sapiens; identical to SEQ ID NO: 267494
  chr15:39742868-39743086
  hypo

SEQ ID NO: 318860 - DNA, 158 bp, Homo sapiens; identical to SEQ ID NO: 216182
  chr15:39881427-39881585
  hypo

SEQ ID NO: 318861 - DNA, 45 bp, Homo sapiens; identical to SEQ ID NO: 224834
  chr15:39958298-39958343
  hypo

SEQ ID NO: 318862 - DNA, 142 bp, Homo sapiens; identical to SEQ ID NO: 216183
  chr15:39971426-39971568
  hypo

SEQ ID NO: 318863 - DNA, 34 bp, Homo sapiens; identical to SEQ ID NO: 267497
  chr15:39986669-39986703
  hypo

SEQ ID NO: 318864 - DNA, 344 bp, Homo sapiens; identical to SEQ ID NO: 203835
  chr15:40074971-40075315
  hypo

SEQ ID NO: 318865 - DNA, 66 bp, Homo sapiens; identical to SEQ ID NO: 224836
  chr15:40094250-40094316
  hypo

SEQ ID NO: 318866 - DNA, 148 bp, Homo sapiens; identical to SEQ ID NO: 237856
  chr15:40225953-40226101
  hypo

SEQ ID NO: 318867 - DNA, 64 bp, Homo sapiens; identical to SEQ ID NO: 267498
  chr15:40280196-40280260
  hypo

SEQ ID NO: 318868 - DNA, 48 bp, Homo sapiens; identical to SEQ ID NO: 267499
  chr15:40336685-40336733
  hypo

SEQ ID NO: 318869 - DNA, 118 bp, Homo sapiens
  chr15:40368064-40368182
  hypo
aagaccaggagagtggtgaacggcctcacgctcacttgacttcactcatgcagaagggctgcgggagcaagatggaagtcctgactgacgatccacactctgggtcttcagggaagtg

SEQ ID NO: 318870 - DNA, 171 bp, Homo sapiens; identical to SEQ ID NO: 267501
  chr15:40377026-40377197
  hypo

SEQ ID NO: 318871 - DNA, 76 bp, Homo sapiens; identical to SEQ ID NO: 267502
  chr15:40405039-40405115
  hypo

SEQ ID NO: 318872 - DNA, 75 bp, Homo sapiens; identical to SEQ ID NO: 267503
  chr15:40405235-40405310
  hypo

SEQ ID NO: 318873 - DNA, 210 bp, Homo sapiens; identical to SEQ ID NO: 216185
  chr15:40423135-40423345
  hypo

SEQ ID NO: 318874 - DNA, 104 bp, Homo sapiens; identical to SEQ ID NO: 216186
  chr15:40532821-40532925
  hypo

SEQ ID NO: 318875 - DNA, 85 bp, Homo sapiens; identical to SEQ ID NO: 267507
  chr15:40558266-40558351
  hypo

SEQ ID NO: 318876 - DNA, 36 bp, Homo sapiens; identical to SEQ ID NO: 203836
  chr15:40559555-40559591
  hypo

SEQ ID NO: 318877 - DNA, 171 bp, Homo sapiens; identical to SEQ ID NO: 290706
  chr15:40575342-40575513
  hypo

SEQ ID NO: 318878 - DNA, 559 bp, Homo sapiens; identical to SEQ ID NO: 216188
  chr15:40631663-40632222
  hypo

SEQ ID NO: 318879 - DNA, 215 bp, Homo sapiens; identical to SEQ ID NO: 267509
  chr15:40645375-40645590
  hypo

SEQ ID NO: 318880 - DNA, 117 bp, Homo sapiens
  chr15:40676583-40676700
  hypo
aagattgagctctgaagtaaataggcttttctccaaaggcttaatgggttgtttgttgtcttgtgttgccgcagaacacctgaatggtaatcctggcaccagcggggactaggagtt

SEQ ID NO: 318881 - DNA, 103 bp, Homo sapiens; identical to SEQ ID NO: 267511
  chr15:40701402-40701505
  hypo

SEQ ID NO: 318882 - DNA, 43 bp, Homo sapiens; identical to SEQ ID NO: 267512
  chr15:40701565-40701608
  hypo

SEQ ID NO: 318883 - DNA, 189 bp, Homo sapiens; identical to SEQ ID NO: 267513
  chr15:40716012-40716201
  hypo

SEQ ID NO: 318884 - DNA, 33 bp, Homo sapiens; identical to SEQ ID NO: 267514
  chr15:40766007-40766040
  hypo

SEQ ID NO: 318885 - DNA, 33 bp, Homo sapiens; identical to SEQ ID NO: 216189
  chr15:40782124-40782157
  hypo

SEQ ID NO: 318886 - DNA, 31 bp, Homo sapiens; identical to SEQ ID NO: 267516
  chr15:40854469-40854500
  hypo

SEQ ID NO: 318887 - DNA, 32 bp, Homo sapiens; identical to SEQ ID NO: 267518
  chr15:40933191-40933223
  hypo

SEQ ID NO: 318888 - DNA, 69 bp, Homo sapiens; identical to SEQ ID NO: 216190
  chr15:41044231-41044300
  hypo

SEQ ID NO: 318889 - DNA, 56 bp, Homo sapiens; identical to SEQ ID NO: 203838
  chr15:41046993-41047049
  hypo

SEQ ID NO: 318890 - DNA, 171 bp, Homo sapiens; identical to SEQ ID NO: 216192
  chr15:41059265-41059436
  hypo

SEQ ID NO: 318891 - DNA, 404 bp, Homo sapiens
  chr15:41059466-41059870
  hypo
aagctggaacgcaggggcttccgtgtgctgagcatgacgggggtgggccagacgctggtgtggtgtctgcacaaggagtgaccttctcatgctgatttgcagacggggcacccctgtggaggggctgctgtgggccctgacctccaagctcctgcctcaccgtctgccttgctcctctcttcccaaatcatcaccgccatgggcccagccccaaagggcagtgaatggccttctctgaaaccctgcgtcaagcagtgggagagggcagtgcccggtgccctggtgctcccagctgccctcctgcttcgggcctgggccgagggccttgtgtaggccatgttcctcgggcagctgccccgggccggagctgggcactccagcggccctggcgcgtggctcctgca

SEQ ID NO: 318892 - DNA, 150 bp, Homo sapiens; identical to SEQ ID NO: 216194
  chr15:41082365-41082515
  hypo

SEQ ID NO: 318893 - DNA, 91 bp, Homo sapiens; identical to SEQ ID NO: 216195
  chr15:41091048-41091139
  hypo

SEQ ID NO: 318894 - DNA, 104 bp, Homo sapiens; identical to SEQ ID NO: 216196
  chr15:41120622-41120726
  hypo

SEQ ID NO: 318895 - DNA, 172 bp, Homo sapiens; identical to SEQ ID NO: 216197
  chr15:41121306-41121478
  hypo

SEQ ID NO: 318896 - DNA, 156 bp, Homo sapiens; identical to SEQ ID NO: 224840
  chr15:41136285-41136441
  hypo

SEQ ID NO: 318897 - DNA, 415 bp, Homo sapiens; identical to SEQ ID NO: 290715
  chr15:41136702-41137117
  hypo

SEQ ID NO: 318898 - DNA, 44 bp, Homo sapiens; identical to SEQ ID NO: 203840
  chr15:41137147-41137191
  hypo

SEQ ID NO: 318899 - DNA, 78 bp, Homo sapiens; identical to SEQ ID NO: 216200
  chr15:41165167-41165245
  hypo

SEQ ID NO: 318900 - DNA, 37 bp, Homo sapiens; identical to SEQ ID NO: 267526
  chr15:41235297-41235334
  hypo

SEQ ID NO: 318901 - DNA, 93 bp, Homo sapiens; identical to SEQ ID NO: 267527
  chr15:41253508-41253601
  hypo

SEQ ID NO: 318902 - DNA, 225 bp, Homo sapiens; identical to SEQ ID NO: 267528
  chr15:41276133-41276358
  hypo

SEQ ID NO: 318903 - DNA, 150 bp, Homo sapiens; identical to SEQ ID NO: 177044
  chr15:41316676-41316826
  hypo

SEQ ID NO: 318904 - DNA, 33 bp, Homo sapiens; identical to SEQ ID NO: 216201
  chr15:41622889-41622922
  hypo

SEQ ID NO: 318905 - DNA, 91 bp, Homo sapiens; identical to SEQ ID NO: 216202
  chr15:41732307-41732398
  hypo

SEQ ID NO: 318906 - DNA, 118 bp, Homo sapiens; identical to SEQ ID NO: 267532
  chr15:41769414-41769532
  hypo

SEQ ID NO: 318907 - DNA, 215 bp, Homo sapiens; identical to SEQ ID NO: 267533
  chr15:41769812-41770027
  hypo

SEQ ID NO: 318908 - DNA, 41 bp, Homo sapiens; identical to SEQ ID NO: 267534
  chr15:41840741-41840782
  hypo

SEQ ID NO: 318909 - DNA, 109 bp, Homo sapiens; identical to SEQ ID NO: 267535
  chr15:41842774-41842883
  hypo

SEQ ID NO: 318910 - DNA, 200 bp, Homo sapiens; identical to SEQ ID NO: 224842
  chr15:42112223-42112423
  hypo

SEQ ID NO: 318911 - DNA, 37 bp, Homo sapiens; identical to SEQ ID NO: 216203
  chr15:42117757-42117794
  hypo

SEQ ID NO: 318912 - DNA, 384 bp, Homo sapiens; identical to SEQ ID NO: 267537
  chr15:42122290-42122674
  hypo

SEQ ID NO: 318913 - DNA, 243 bp, Homo sapiens; identical to SEQ ID NO: 267538
  chr15:42147780-42148023
  hypo

SEQ ID NO: 318914 - DNA, 120 bp, Homo sapiens; identical to SEQ ID NO: 267539
  chr15:42151063-42151183
  hypo

SEQ ID NO: 318915 - DNA, 146 bp, Homo sapiens; identical to SEQ ID NO: 216204
  chr15:42153325-42153471
  hypo

SEQ ID NO: 318916 - DNA, 55 bp, Homo sapiens; identical to SEQ ID NO: 216205
  chr15:42160236-42160291
  hypo

SEQ ID NO: 318917 - DNA, 174 bp, Homo sapiens; identical to SEQ ID NO: 267542
  chr15:42162018-42162192
  hypo

SEQ ID NO: 318918 - DNA, 67 bp, Homo sapiens; identical to SEQ ID NO: 267543
  chr15:42162807-42162874
  hypo

SEQ ID NO: 318919 - DNA, 71 bp, Homo sapiens; identical to SEQ ID NO: 216206
  chr15:42167406-42167477
  hypo

SEQ ID NO: 318920 - DNA, 174 bp, Homo sapiens; identical to SEQ ID NO: 267545
  chr15:42171430-42171604
  hypo

SEQ ID NO: 318921 - DNA, 168 bp, Homo sapiens; identical to SEQ ID NO: 267546
  chr15:42185523-42185691
  hypo

SEQ ID NO: 318922 - DNA, 191 bp, Homo sapiens; identical to SEQ ID NO: 216207
  chr15:42192981-42193172
  hypo

SEQ ID NO: 318923 - DNA, 101 bp, Homo sapiens; identical to SEQ ID NO: 267548
  chr15:42211495-42211596
  hypo

SEQ ID NO: 318924 - DNA, 104 bp, Homo sapiens; identical to SEQ ID NO: 267549
  chr15:42232134-42232238
  hypo

SEQ ID NO: 318925 - DNA, 163 bp, Homo sapiens; identical to SEQ ID NO: 267550
  chr15:42232298-42232461
  hypo

SEQ ID NO: 318926 - DNA, 37 bp, Homo sapiens; identical to SEQ ID NO: 267551
  chr15:42280070-42280107
  hypo

SEQ ID NO: 318927 - DNA, 174 bp, Homo sapiens; identical to SEQ ID NO: 267552
  chr15:42284449-42284623
  hypo

SEQ ID NO: 318928 - DNA, 62 bp, Homo sapiens; identical to SEQ ID NO: 267553
  chr15:42302479-42302541
  hypo

SEQ ID NO: 318929 - DNA, 99 bp, Homo sapiens; identical to SEQ ID NO: 267554
  chr15:42350764-42350863
  hypo

SEQ ID NO: 318930 - DNA, 45 bp, Homo sapiens; identical to SEQ ID NO: 267555
  chr15:42362298-42362343
  hypo

SEQ ID NO: 318931 - DNA, 110 bp, Homo sapiens; identical to SEQ ID NO: 216208
  chr15:42362997-42363107
  hypo

SEQ ID NO: 318932 - DNA, 64 bp, Homo sapiens; identical to SEQ ID NO: 267557
  chr15:42363982-42364046
  hypo

SEQ ID NO: 318933 - DNA, 44 bp, Homo sapiens; identical to SEQ ID NO: 216209
  chr15:42388224-42388268
  hypo

SEQ ID NO: 318934 - DNA, 192 bp, Homo sapiens; identical to SEQ ID NO: 216210
  chr15:42434610-42434802
  hypo

SEQ ID NO: 318935 - DNA, 183 bp, Homo sapiens; identical to SEQ ID NO: 267560
  chr15:42438905-42439088
  hypo

SEQ ID NO: 318936 - DNA, 158 bp, Homo sapiens; identical to SEQ ID NO: 267561
  chr15:42446543-42446701
  hypo

SEQ ID NO: 318937 - DNA, 76 bp, Homo sapiens; identical to SEQ ID NO: 267562
  chr15:42446969-42447045
  hypo

SEQ ID NO: 318938 - DNA, 199 bp, Homo sapiens
  chr15:42447819-42448018
  hypo
ctagtgtgagcctggtccctcgccccattgttcccctcgtcccatcatggagcagcaacctggcatagggtcactgacgtctctgtgccggggagcagggagaccttggcgggtcccaggcattgggagttcagcaccttcgtgatgtgtctggaccctggaacccatccggtctgggttcaaatctaaatccagcacg

SEQ ID NO: 318939 - DNA, 193 bp, Homo sapiens; identical to SEQ ID NO: 216211
  chr15:42451757-42451950
  hypo

SEQ ID NO: 318940 - DNA, 119 bp, Homo sapiens; identical to SEQ ID NO: 216212
  chr15:42452409-42452528
  hypo

SEQ ID NO: 318941 - DNA, 57 bp, Homo sapiens; identical to SEQ ID NO: 267566
  chr15:42470689-42470746
  hypo

SEQ ID NO: 318942 - DNA, 34 bp, Homo sapiens; identical to SEQ ID NO: 216213
  chr15:42562652-42562686
  hypo

SEQ ID NO: 318943 - DNA, 193 bp, Homo sapiens; identical to SEQ ID NO: 267568
  chr15:42644703-42644896
  hypo

SEQ ID NO: 318944 - DNA, 251 bp, Homo sapiens; identical to SEQ ID NO: 267570
  chr15:42686336-42686587
  hypo

SEQ ID NO: 318945 - DNA, 68 bp, Homo sapiens; identical to SEQ ID NO: 267571
  chr15:42696332-42696400
  hypo

SEQ ID NO: 318946 - DNA, 180 bp, Homo sapiens; identical to SEQ ID NO: 267572
  chr15:42711709-42711889
  hypo

SEQ ID NO: 318947 - DNA, 69 bp, Homo sapiens; identical to SEQ ID NO: 267573
  chr15:42742089-42742158
  hypo

SEQ ID NO: 318948 - DNA, 72 bp, Homo sapiens
  chr15:42748435-42748507
  hypo
ttattttggcgatacgactatactatatactatacgatttatacaatgaagcttatattctaacacctttcc

SEQ ID NO: 318949 - DNA, 211 bp, Homo sapiens
  chr15:42784414-42784625
  hypo
atttattattaaacttagcccatacccattccctcagaaacctaattttagtgactaagactatcagataaatgaaatgacattcaggttgataattatgtggagtgtccctcctatattattgagattataacatctctgtttaacaagaccttcaacgtctcaaataaaagtaagcagcggtggggcacagtggctcacgcctgtaatc

SEQ ID NO: 318950 - DNA, 40 bp, Homo sapiens; identical to SEQ ID NO: 267576
  chr15:42806617-42806657
  hypo

SEQ ID NO: 318951 - DNA, 120 bp, Homo sapiens; identical to SEQ ID NO: 267577
  chr15:42819326-42819446
  hypo

SEQ ID NO: 318952 - DNA, 91 bp, Homo sapiens; identical to SEQ ID NO: 267578
  chr15:43019854-43019945
  hypo

SEQ ID NO: 318953 - DNA, 248 bp, Homo sapiens
  chr15:43020360-43020608
  hypo
aactgcctggcctgctagctgcaggcctccctcacacgtacggctgccggggtctcctctggaagcagcgcccgcacagccccagggctcttcctttgacagaacctaaaaggggacagatggggtcagtgatctctgggtatttcagcctggctgcagaagtaaatgccccgagtgcaccaagcccctgacctgggaggctgtaccttggaaggaggcaccgtttgccctcccgccccaccccaggt

SEQ ID NO: 318954 - DNA, 33 bp, Homo sapiens; identical to SEQ ID NO: 267580
  chr15:43124802-43124835
  hypo

SEQ ID NO: 318955 - DNA, 92 bp, Homo sapiens; identical to SEQ ID NO: 267581
  chr15:43124895-43124987
  hypo

SEQ ID NO: 318956 - DNA, 192 bp, Homo sapiens; identical to SEQ ID NO: 267582
  chr15:43300433-43300625
  hypo

SEQ ID NO: 318957 - DNA, 41 bp, Homo sapiens; identical to SEQ ID NO: 216216
  chr15:43406098-43406139
  hypo

SEQ ID NO: 318958 - DNA, 176 bp, Homo sapiens
  chr15:43527646-43527822
  hypo
caaactgtgcacatgcgtaccttctttaggagagagtgtgatgaacgctgtgtcctgccagaatggggacagggggctgccatcgtgcagcagagactgggcactcaggttcactttgaggtccttgaactgggaggacatgttgagggccagcaggacaaagcatatatcctggc

SEQ ID NO: 318959 - DNA, 50 bp, Homo sapiens; identical to SEQ ID NO: 267586
  chr15:43574742-43574792
  hypo

SEQ ID NO: 318960 - DNA, 128 bp, Homo sapiens; identical to SEQ ID NO: 267587
  chr15:43574822-43574950
  hypo

SEQ ID NO: 318961 - DNA, 96 bp, Homo sapiens; identical to SEQ ID NO: 267588
  chr15:43610151-43610247
  hypo

SEQ ID NO: 318962 - DNA, 70 bp, Homo sapiens
  chr15:43661821-43661891
  hypo
tctaaatcttccacgagagtcactgcctcctctccattttctggacattgttcctgtacccaattctgga

SEQ ID NO: 318963 - DNA, 195 bp, Homo sapiens; identical to SEQ ID NO: 267590
  chr15:43820127-43820322
  hypo

SEQ ID NO: 318964 - DNA, 67 bp, Homo sapiens; identical to SEQ ID NO: 267591
  chr15:43941020-43941087
  hypo

SEQ ID NO: 318965 - DNA, 111 bp, Homo sapiens; identical to SEQ ID NO: 216217
  chr15:44037226-44037337
  hypo

SEQ ID NO: 318966 - DNA, 32 bp, Homo sapiens; identical to SEQ ID NO: 216218
  chr15:44037901-44037933
  hypo

SEQ ID NO: 318967 - DNA, 157 bp, Homo sapiens; identical to SEQ ID NO: 224843
  chr15:44038552-44038709
  hypo

SEQ ID NO: 318968 - DNA, 242 bp, Homo sapiens
  chr15:44091896-44092138
  hypo
gagatatctgacctttctctcgacctaaacacctggggctggaaacatggcgggagagatttacagattatacctggggcaacgaaccagaacgacattagaggagaaaagaggcctgtcgtttttattggcttctgcacgtcttcctccccagcttcggccactctccccttcgcaccctctcacctgacagaagggacttttcactaggacactgctgcctccgctgtgctgctgtgcca

SEQ ID NO: 318969 - DNA, 250 bp, Homo sapiens; identical to SEQ ID NO: 267596
  chr15:44105318-44105568
  hypo

SEQ ID NO: 318970 - DNA, 42 bp, Homo sapiens; identical to SEQ ID NO: 267597
  chr15:44117884-44117926
  hypo

SEQ ID NO: 318971 - DNA, 41 bp, Homo sapiens; identical to SEQ ID NO: 267598
  chr15:44435788-44435829
  hypo

SEQ ID NO: 318972 - DNA, 794 bp, Homo sapiens; identical to SEQ ID NO: 203855
  chr15:44486896-44487690
  hypo

SEQ ID NO: 318973 - DNA, 33 bp, Homo sapiens; identical to SEQ ID NO: 267599
  chr15:44523585-44523618
  hypo

SEQ ID NO: 318974 - DNA, 37 bp, Homo sapiens; identical to SEQ ID NO: 267600
  chr15:44823850-44823887
  hypo

SEQ ID NO: 318975 - DNA, 36 bp, Homo sapiens; identical to SEQ ID NO: 267601
  chr15:45274984-45275020
  hypo

SEQ ID NO: 318976 - DNA, 37 bp, Homo sapiens; identical to SEQ ID NO: 267602
  chr15:45391480-45391517
  hypo

SEQ ID NO: 318977 - DNA, 203 bp, Homo sapiens; identical to SEQ ID NO: 267603
  chr15:45397863-45398066
  hypo

SEQ ID NO: 318978 - DNA, 144 bp, Homo sapiens; identical to SEQ ID NO: 267604
  chr15:45436256-45436400
  hypo

SEQ ID NO: 318979 - DNA, 196 bp, Homo sapiens; identical to SEQ ID NO: 216220
  chr15:45439952-45440148
  hypo

SEQ ID NO: 318980 - DNA, 130 bp, Homo sapiens; identical to SEQ ID NO: 267606
  chr15:45440519-45440649
  hypo

SEQ ID NO: 318981 - DNA, 578 bp, Homo sapiens; identical to SEQ ID NO: 216221
  chr15:45444141-45444719
  hypo

SEQ ID NO: 318982 - DNA, 31 bp, Homo sapiens; identical to SEQ ID NO: 267608
  chr15:45450627-45450658
  hypo

SEQ ID NO: 318983 - DNA, 40 bp, Homo sapiens; identical to SEQ ID NO: 267609
  chr15:45465162-45465202
  hypo

SEQ ID NO: 318984 - DNA, 204 bp, Homo sapiens; identical to SEQ ID NO: 203857
  chr15:45479833-45480037
  hypo

SEQ ID NO: 318985 - DNA, 274 bp, Homo sapiens; identical to SEQ ID NO: 203861
  chr15:45670188-45670462
  hypo

SEQ ID NO: 318986 - DNA, 34 bp, Homo sapiens; identical to SEQ ID NO: 203862
  chr15:45671015-45671049
  hypo

SEQ ID NO: 318987 - DNA, 360 bp, Homo sapiens; identical to SEQ ID NO: 203864
  chr15:45722599-45722959
  hypo

SEQ ID NO: 318988 - DNA, 56 bp, Homo sapiens; identical to SEQ ID NO: 267611
  chr15:45742670-45742726
  hypo

SEQ ID NO: 318989 - DNA, 61 bp, Homo sapiens; identical to SEQ ID NO: 267612
  chr15:45742970-45743031
  hypo

SEQ ID NO: 318990 - DNA, 120 bp, Homo sapiens; identical to SEQ ID NO: 267613
  chr15:45809769-45809889
  hypo

SEQ ID NO: 318991 - DNA, 139 bp, Homo sapiens; identical to SEQ ID NO: 267614
  chr15:45960772-45960911
  hypo

SEQ ID NO: 318992 - DNA, 157 bp, Homo sapiens
  chr15:48666258-48666415
  hypo
gctatctggacttgcgccatgcttgcttttcccccactacctccctcctcctccccatttctccccagacagattgtgaagtctctttgcttggtccactccctgcctgtctccaatcctctgattgcttcaccttcccccggctgccattatctgt

SEQ ID NO: 318993 - DNA, 194 bp, Homo sapiens; identical to SEQ ID NO: 267617
  chr15:48707764-48707958
  hypo

SEQ ID NO: 318994 - DNA, 87 bp, Homo sapiens; identical to SEQ ID NO: 290792
  chr15:48936639-48936726
  hypo

SEQ ID NO: 318995 - DNA, 275 bp, Homo sapiens; identical to SEQ ID NO: 216227
  chr15:49268642-49268917
  hypo

SEQ ID NO: 318996 - DNA, 137 bp, Homo sapiens; identical to SEQ ID NO: 267619
  chr15:49411763-49411900
  hypo

SEQ ID NO: 318997 - DNA, 139 bp, Homo sapiens; identical to SEQ ID NO: 216228
  chr15:49658851-49658990
  hypo

SEQ ID NO: 318998 - DNA, 318 bp, Homo sapiens; identical to SEQ ID NO: 216229
  chr15:49698668-49698986
  hypo

SEQ ID NO: 318999 - DNA, 217 bp, Homo sapiens; identical to SEQ ID NO: 216230
  chr15:49997486-49997703
  hypo

SEQ ID NO: 319000 - DNA, 93 bp, Homo sapiens; identical to SEQ ID NO: 267623
  chr15:50158729-50158822
  hypo

SEQ ID NO: 319001 - DNA, 366 bp, Homo sapiens; identical to SEQ ID NO: 224849
  chr15:50474766-50475132
  hypo

SEQ ID NO: 319002 - DNA, 37 bp, Homo sapiens; identical to SEQ ID NO: 216231
  chr15:51016480-51016517
  hypo

SEQ ID NO: 319003 - DNA, 31 bp, Homo sapiens; identical to SEQ ID NO: 267625
  chr15:51059307-51059338
  hypo

SEQ ID NO: 319004 - DNA, 58 bp, Homo sapiens; identical to SEQ ID NO: 216232
  chr15:51176888-51176946
  hypo

SEQ ID NO: 319005 - DNA, 120 bp, Homo sapiens; identical to SEQ ID NO: 267627
  chr15:51182345-51182465
  hypo

SEQ ID NO: 319006 - DNA, 185 bp, Homo sapiens; identical to SEQ ID NO: 216233
  chr15:51476314-51476499
  hypo

SEQ ID NO: 319007 - DNA, 115 bp, Homo sapiens; identical to SEQ ID NO: 290807
  chr15:51633851-51633966
  hypo

SEQ ID NO: 319008 - DNA, 153 bp, Homo sapiens; identical to SEQ ID NO: 290808
  chr15:51634175-51634328
  hypo

SEQ ID NO: 319009 - DNA, 197 bp, Homo sapiens; identical to SEQ ID NO: 267630
  chr15:51659607-51659804
  hypo

SEQ ID NO: 319010 - DNA, 59 bp, Homo sapiens; identical to SEQ ID NO: 216234
  chr15:52000705-52000764
  hypo

SEQ ID NO: 319011 - DNA, 41 bp, Homo sapiens; identical to SEQ ID NO: 267632
  chr15:52089410-52089451
  hypo

SEQ ID NO: 319012 - DNA, 89 bp, Homo sapiens; identical to SEQ ID NO: 267633
  chr15:52276808-52276897
  hypo

SEQ ID NO: 319013 - DNA, 95 bp, Homo sapiens; identical to SEQ ID NO: 267634
  chr15:52310149-52310244
  hypo

SEQ ID NO: 319014 - DNA, 72 bp, Homo sapiens; identical to SEQ ID NO: 267635
  chr15:52387470-52387542
  hypo

SEQ ID NO: 319015 - DNA, 181 bp, Homo sapiens; identical to SEQ ID NO: 203877
  chr15:52404392-52404573
  hypo

SEQ ID NO: 319016 - DNA, 36 bp, Homo sapiens; identical to SEQ ID NO: 267636
  chr15:52579878-52579914
  hypo

SEQ ID NO: 319017 - DNA, 35 bp, Homo sapiens; identical to SEQ ID NO: 267637
  chr15:52580154-52580189
  hypo

SEQ ID NO: 319018 - DNA, 828 bp, Homo sapiens; identical to SEQ ID NO: 290817
  chr15:52587421-52588249
  hypo

SEQ ID NO: 319019 - DNA, 223 bp, Homo sapiens; identical to SEQ ID NO: 267638
  chr15:52611441-52611664
  hypo

SEQ ID NO: 319020 - DNA, 605 bp, Homo sapiens; identical to SEQ ID NO: 290818
  chr15:52820415-52821020
  hypo

SEQ ID NO: 319021 - DNA, 31 bp, Homo sapiens; identical to SEQ ID NO: 216237
  chr15:52968138-52968169
  hypo

SEQ ID NO: 319022 - DNA, 96 bp, Homo sapiens; identical to SEQ ID NO: 267641
  chr15:54191740-54191836
  hypo

SEQ ID NO: 319023 - DNA, 44 bp, Homo sapiens; identical to SEQ ID NO: 267642
  chr15:55074345-55074389
  hypo

SEQ ID NO: 319024 - DNA, 33 bp, Homo sapiens; identical to SEQ ID NO: 267643
  chr15:55313741-55313774
  hypo

SEQ ID NO: 319025 - DNA, 89 bp, Homo sapiens; identical to SEQ ID NO: 203885
  chr15:55699900-55699989
  hypo

SEQ ID NO: 319026 - DNA, 34 bp, Homo sapiens; identical to SEQ ID NO: 267645
  chr15:55777915-55777949
  hypo

SEQ ID NO: 319027 - DNA, 41 bp, Homo sapiens; identical to SEQ ID NO: 216239
  chr15:55806859-55806900
  hypo

SEQ ID NO: 319028 - DNA, 37 bp, Homo sapiens; identical to SEQ ID NO: 216240
  chr15:55881585-55881622
  hypo

SEQ ID NO: 319029 - DNA, 35 bp, Homo sapiens; identical to SEQ ID NO: 267648
  chr15:55893171-55893206
  hypo

SEQ ID NO: 319030 - DNA, 114 bp, Homo sapiens; identical to SEQ ID NO: 267649
  chr15:55965687-55965801
  hypo

SEQ ID NO: 319031 - DNA, 79 bp, Homo sapiens; identical to SEQ ID NO: 290832
  chr15:56035510-56035589
  hypo

SEQ ID NO: 319032 - DNA, 82 bp, Homo sapiens; identical to SEQ ID NO: 125767
  chr15:56035677-56035759
  hypo

SEQ ID NO: 319033 - DNA, 42 bp, Homo sapiens; identical to SEQ ID NO: 267650
  chr15:56105143-56105185
  hypo

SEQ ID NO: 319034 - DNA, 184 bp, Homo sapiens; identical to SEQ ID NO: 267651
  chr15:56140361-56140545
  hypo

SEQ ID NO: 319035 - DNA, 87 bp, Homo sapiens; identical to SEQ ID NO: 216241
  chr15:56170930-56171017
  hypo

SEQ ID NO: 319036 - DNA, 504 bp, Homo sapiens; identical to SEQ ID NO: 203886
  chr15:56285864-56286368
  hypo

SEQ ID NO: 319037 - DNA, 103 bp, Homo sapiens; identical to SEQ ID NO: 267653
  chr15:56363529-56363632
  hypo

SEQ ID NO: 319038 - DNA, 35 bp, Homo sapiens; identical to SEQ ID NO: 267654
  chr15:57204848-57204883
  hypo

SEQ ID NO: 319039 - DNA, 36 bp, Homo sapiens; identical to SEQ ID NO: 267655
  chr15:57209353-57209389
  hypo

SEQ ID NO: 319040 - DNA, 340 bp, Homo sapiens; identical to SEQ ID NO: 224859
  chr15:57210212-57210552
  hypo

SEQ ID NO: 319041 - DNA, 74 bp, Homo sapiens; identical to SEQ ID NO: 267656
  chr15:57565298-57565372
  hypo

SEQ ID NO: 319042 - DNA, 391 bp, Homo sapiens; identical to SEQ ID NO: 290838
  chr15:57598789-57599180
  hypo

SEQ ID NO: 319043 - DNA, 294 bp, Homo sapiens; identical to SEQ ID NO: 267657
  chr15:57611511-57611805
  hypo

SEQ ID NO: 319044 - DNA, 145 bp, Homo sapiens; identical to SEQ ID NO: 267658
  chr15:57614726-57614871
  hypo

SEQ ID NO: 319045 - DNA, 148 bp, Homo sapiens; identical to SEQ ID NO: 216244
  chr15:57618572-57618720
  hypo

SEQ ID NO: 319046 - DNA, 257 bp, Homo sapiens; identical to SEQ ID NO: 267660
  chr15:57620372-57620629
  hypo

SEQ ID NO: 319047 - DNA, 184 bp, Homo sapiens; identical to SEQ ID NO: 267661
  chr15:57731150-57731334
  hypo

SEQ ID NO: 319048 - DNA, 129 bp, Homo sapiens; identical to SEQ ID NO: 216246
  chr15:57792923-57793052
  hypo

SEQ ID NO: 319049 - DNA, 156 bp, Homo sapiens; identical to SEQ ID NO: 267663
  chr15:57923147-57923303
  hypo

SEQ ID NO: 319050 - DNA, 392 bp, Homo sapiens; identical to SEQ ID NO: 267664
  chr15:57993255-57993647
  hypo

SEQ ID NO: 319051 - DNA, 226 bp, Homo sapiens; identical to SEQ ID NO: 267665
  chr15:58001325-58001551
  hypo

SEQ ID NO: 319052 - DNA, 110 bp, Homo sapiens; identical to SEQ ID NO: 267666
  chr15:58028018-58028128
  hypo

SEQ ID NO: 319053 - DNA, 166 bp, Homo sapiens; identical to SEQ ID NO: 267667
  chr15:58761931-58762097
  hypo

SEQ ID NO: 319054 - DNA, 154 bp, Homo sapiens; identical to SEQ ID NO: 216248
  chr15:58839522-58839676
  hypo

SEQ ID NO: 319055 - DNA, 31 bp, Homo sapiens; identical to SEQ ID NO: 216249
  chr15:58896583-58896614
  hypo

SEQ ID NO: 319056 - DNA, 37 bp, Homo sapiens; identical to SEQ ID NO: 216250
  chr15:59158760-59158797
  hypo

SEQ ID NO: 319057 - DNA, 213 bp, Homo sapiens; identical to SEQ ID NO: 267672
  chr15:59243451-59243664
  hypo

SEQ ID NO: 319058 - DNA, 40 bp, Homo sapiens; identical to SEQ ID NO: 267673
  chr15:59291804-59291844
  hypo

SEQ ID NO: 319059 - DNA, 61 bp, Homo sapiens; identical to SEQ ID NO: 267674
  chr15:59450930-59450991
  hypo

SEQ ID NO: 319060 - DNA, 84 bp, Homo sapiens; identical to SEQ ID NO: 216251
  chr15:59454860-59454944
  hypo

SEQ ID NO: 319061 - DNA, 116 bp, Homo sapiens; identical to SEQ ID NO: 267676
  chr15:59474906-59475022
  hypo

SEQ ID NO: 319062 - DNA, 74 bp, Homo sapiens; identical to SEQ ID NO: 267677
  chr15:59499025-59499099
  hypo

SEQ ID NO: 319063 - DNA, 34 bp, Homo sapiens; identical to SEQ ID NO: 267678
  chr15:59525452-59525486
  hypo

SEQ ID NO: 319064 - DNA, 102 bp, Homo sapiens; identical to SEQ ID NO: 267679
  chr15:59561665-59561767
  hypo

SEQ ID NO: 319065 - DNA, 86 bp, Homo sapiens; identical to SEQ ID NO: 216252
  chr15:59580024-59580110
  hypo

SEQ ID NO: 319066 - DNA, 76 bp, Homo sapiens; identical to SEQ ID NO: 267681
  chr15:59639391-59639467
  hypo

SEQ ID NO: 319067 - DNA, 111 bp, Homo sapiens; identical to SEQ ID NO: 267682
  chr15:59648543-59648654
  hypo

SEQ ID NO: 319068 - DNA, 132 bp, Homo sapiens; identical to SEQ ID NO: 203894
  chr15:59663973-59664105
  hypo

SEQ ID NO: 319069 - DNA, 512 bp, Homo sapiens; identical to SEQ ID NO: 290847
  chr15:59664435-59664947
  hypo

SEQ ID NO: 319070 - DNA, 164 bp, Homo sapiens; identical to SEQ ID NO: 216255
  chr15:59685907-59686071
  hypo

SEQ ID NO: 319071 - DNA, 86 bp, Homo sapiens; identical to SEQ ID NO: 267684
  chr15:59906439-59906525
  hypo

SEQ ID NO: 319072 - DNA, 45 bp, Homo sapiens; identical to SEQ ID NO: 267685
  chr15:59989017-59989062
  hypo

SEQ ID NO: 319073 - DNA, 32 bp, Homo sapiens; identical to SEQ ID NO: 290854
  chr15:60288754-60288786
  hypo

SEQ ID NO: 319074 - DNA, 85 bp, Homo sapiens; identical to SEQ ID NO: 203897
  chr15:60289225-60289310
  hypo

SEQ ID NO: 319075 - DNA, 154 bp, Homo sapiens; identical to SEQ ID NO: 267686
  chr15:60672390-60672544
  hypo

SEQ ID NO: 319076 - DNA, 92 bp, Homo sapiens; identical to SEQ ID NO: 267687
  chr15:60680001-60680093
  hypo

SEQ ID NO: 319077 - DNA, 78 bp, Homo sapiens; identical to SEQ ID NO: 203901
  chr15:60690265-60690343
  hypo

SEQ ID NO: 319078 - DNA, 35 bp, Homo sapiens; identical to SEQ ID NO: 267688
  chr15:60694278-60694313
  hypo

SEQ ID NO: 319079 - DNA, 196 bp, Homo sapiens; identical to SEQ ID NO: 267689
  chr15:60865562-60865758
  hypo

SEQ ID NO: 319080 - DNA, 1568 bp, Homo sapiens; identical to SEQ ID NO: 290862
  chr15:60883785-60885353
  hypo

SEQ ID NO: 319081 - DNA, 52 bp, Homo sapiens; identical to SEQ ID NO: 267690
  chr15:61012492-61012544
  hypo

SEQ ID NO: 319082 - DNA, 226 bp, Homo sapiens; identical to SEQ ID NO: 267691
  chr15:61231724-61231950
  hypo

SEQ ID NO: 319083 - DNA, 147 bp, Homo sapiens; identical to SEQ ID NO: 267692
  chr15:61931837-61931984
  hypo

SEQ ID NO: 319084 - DNA, 95 bp, Homo sapiens; identical to SEQ ID NO: 216260
  chr15:61932014-61932109
  hypo

SEQ ID NO: 319085 - DNA, 93 bp, Homo sapiens; identical to SEQ ID NO: 267694
  chr15:61948808-61948901
  hypo

SEQ ID NO: 319086 - DNA, 195 bp, Homo sapiens
  chr15:62367508-62367703
  hypo
agaaactgtacgttcgaatttcgatgtaatgtaatcatcattatcttggtataagatattcagaaaatatgcgggtccattaaagaaacctggaacatcaagatttttaaatattcagcgatgattccacagctttagtgttcagtaagagttactgtgtttctttccaaaactcattaatttagccatttaaaa

SEQ ID NO: 319087 - DNA, 97 bp, Homo sapiens; identical to SEQ ID NO: 203912
  chr15:62456139-62456236
  hypo

SEQ ID NO: 319088 - DNA, 291 bp, Homo sapiens; identical to SEQ ID NO: 203913
  chr15:62456395-62456686
  hypo

SEQ ID NO: 319089 - DNA, 130 bp, Homo sapiens; identical to SEQ ID NO: 203914
  chr15:62457008-62457138
  hypo

SEQ ID NO: 319090 - DNA, 271 bp, Homo sapiens; identical to SEQ ID NO: 290875
  chr15:62457296-62457567
  hypo

SEQ ID NO: 319091 - DNA, 72 bp, Homo sapiens; identical to SEQ ID NO: 267696
  chr15:62591901-62591973
  hypo

SEQ ID NO: 319092 - DNA, 235 bp, Homo sapiens; identical to SEQ ID NO: 267697
  chr15:62747448-62747683
  hypo

SEQ ID NO: 319093 - DNA, 217 bp, Homo sapiens; identical to SEQ ID NO: 267698
  chr15:62750295-62750512
  hypo

SEQ ID NO: 319094 - DNA, 45 bp, Homo sapiens; identical to SEQ ID NO: 267699
  chr15:62752750-62752795
  hypo

SEQ ID NO: 319095 - DNA, 41 bp, Homo sapiens; identical to SEQ ID NO: 267700
  chr15:62753414-62753455
  hypo

SEQ ID NO: 319096 - DNA, 525 bp, Homo sapiens; identical to SEQ ID NO: 267701
  chr15:62753662-62754187
  hypo

SEQ ID NO: 319097 - DNA, 99 bp, Homo sapiens; identical to SEQ ID NO: 216266
  chr15:62776552-62776651
  hypo

SEQ ID NO: 319098 - DNA, 38 bp, Homo sapiens; identical to SEQ ID NO: 216267
  chr15:62776891-62776929
  hypo

SEQ ID NO: 319099 - DNA, 152 bp, Homo sapiens; identical to SEQ ID NO: 267704
  chr15:62779386-62779538
  hypo

SEQ ID NO: 319100 - DNA, 32 bp, Homo sapiens; identical to SEQ ID NO: 216268
  chr15:62791806-62791838
  hypo

SEQ ID NO: 319101 - DNA, 180 bp, Homo sapiens; identical to SEQ ID NO: 216269
  chr15:62792078-62792258
  hypo

SEQ ID NO: 319102 - DNA, 180 bp, Homo sapiens; identical to SEQ ID NO: 216270
  chr15:62799429-62799609
  hypo

SEQ ID NO: 319103 - DNA, 76 bp, Homo sapiens; identical to SEQ ID NO: 267708
  chr15:62810501-62810577
  hypo

SEQ ID NO: 319104 - DNA, 73 bp, Homo sapiens; identical to SEQ ID NO: 216271
  chr15:62828095-62828168
  hypo

SEQ ID NO: 319105 - DNA, 87 bp, Homo sapiens; identical to SEQ ID NO: 267711
  chr15:62832519-62832606
  hypo

SEQ ID NO: 319106 - DNA, 93 bp, Homo sapiens; identical to SEQ ID NO: 267712
  chr15:62863460-62863553
  hypo

SEQ ID NO: 319107 - DNA, 40 bp, Homo sapiens; identical to SEQ ID NO: 216272
  chr15:62880086-62880126
  hypo

SEQ ID NO: 319108 - DNA, 52 bp, Homo sapiens; identical to SEQ ID NO: 216273
  chr15:62898023-62898075
  hypo

SEQ ID NO: 319109 - DNA, 97 bp, Homo sapiens; identical to SEQ ID NO: 216274
  chr15:62959085-62959182
  hypo

SEQ ID NO: 319110 - DNA, 88 bp, Homo sapiens; identical to SEQ ID NO: 267716
  chr15:62966654-62966742
  hypo

SEQ ID NO: 319111 - DNA, 35 bp, Homo sapiens; identical to SEQ ID NO: 267717
  chr15:62967409-62967444
  hypo

SEQ ID NO: 319112 - DNA, 184 bp, Homo sapiens; identical to SEQ ID NO: 216275
  chr15:62968124-62968308
  hypo

SEQ ID NO: 319113 - DNA, 161 bp, Homo sapiens; identical to SEQ ID NO: 267719
  chr15:62978882-62979043
  hypo

SEQ ID NO: 319114 - DNA, 346 bp, Homo sapiens; identical to SEQ ID NO: 267720
  chr15:62993097-62993443
  hypo

SEQ ID NO: 319115 - DNA, 263 bp, Homo sapiens; identical to SEQ ID NO: 216277
  chr15:63000749-63001012
  hypo

SEQ ID NO: 319116 - DNA, 184 bp, Homo sapiens; identical to SEQ ID NO: 267722
  chr15:63012433-63012617
  hypo

SEQ ID NO: 319117 - DNA, 141 bp, Homo sapiens; identical to SEQ ID NO: 267723
  chr15:63017545-63017686
  hypo

SEQ ID NO: 319118 - DNA, 161 bp, Homo sapiens; identical to SEQ ID NO: 267724
  chr15:63028501-63028662
  hypo

SEQ ID NO: 319119 - DNA, 244 bp, Homo sapiens; identical to SEQ ID NO: 267725
  chr15:63029115-63029359
  hypo

SEQ ID NO: 319120 - DNA, 318 bp, Homo sapiens; identical to SEQ ID NO: 267726
  chr15:63030466-63030784
  hypo

SEQ ID NO: 319121 - DNA, 72 bp, Homo sapiens; identical to SEQ ID NO: 267727
  chr15:63036390-63036462
  hypo

SEQ ID NO: 319122 - DNA, 93 bp, Homo sapiens; identical to SEQ ID NO: 216279
  chr15:63059823-63059916
  hypo

SEQ ID NO: 319123 - DNA, 127 bp, Homo sapiens; identical to SEQ ID NO: 216280
  chr15:63060546-63060673
  hypo

SEQ ID NO: 319124 - DNA, 82 bp, Homo sapiens; identical to SEQ ID NO: 216281
  chr15:63062564-63062646
  hypo

SEQ ID NO: 319125 - DNA, 101 bp, Homo sapiens; identical to SEQ ID NO: 267731
  chr15:63063189-63063290
  hypo

SEQ ID NO: 319126 - DNA, 194 bp, Homo sapiens; identical to SEQ ID NO: 216282
  chr15:63066065-63066259
  hypo

SEQ ID NO: 319127 - DNA, 346 bp, Homo sapiens; identical to SEQ ID NO: 267733
  chr15:63068833-63069179
  hypo

SEQ ID NO: 319128 - DNA, 141 bp, Homo sapiens; identical to SEQ ID NO: 267734
  chr15:63072879-63073020
  hypo

SEQ ID NO: 319129 - DNA, 403 bp, Homo sapiens; identical to SEQ ID NO: 267735
  chr15:63075603-63076006
  hypo

SEQ ID NO: 319130 - DNA, 156 bp, Homo sapiens; identical to SEQ ID NO: 216285
  chr15:63084827-63084983
  hypo

SEQ ID NO: 319131 - DNA, 654 bp, Homo sapiens; identical to SEQ ID NO: 216286
  chr15:63086976-63087630
  hypo

SEQ ID NO: 319132 - DNA, 263 bp, Homo sapiens; identical to SEQ ID NO: 216287
  chr15:63088321-63088584
  hypo

SEQ ID NO: 319133 - DNA, 770 bp, Homo sapiens; identical to SEQ ID NO: 267739
  chr15:63089567-63090337
  hypo

SEQ ID NO: 319134 - DNA, 150 bp, Homo sapiens; identical to SEQ ID NO: 267740
  chr15:63091223-63091373
  hypo

SEQ ID NO: 319135 - DNA, 181 bp, Homo sapiens; identical to SEQ ID NO: 267741
  chr15:63092761-63092942
  hypo

SEQ ID NO: 319136 - DNA, 93 bp, Homo sapiens; identical to SEQ ID NO: 267742
  chr15:63100845-63100938
  hypo

SEQ ID NO: 319137 - DNA, 64 bp, Homo sapiens; identical to SEQ ID NO: 267743
  chr15:63111787-63111851
  hypo

SEQ ID NO: 319138 - DNA, 170 bp, Homo sapiens; identical to SEQ ID NO: 216290
  chr15:63115972-63116142
  hypo

SEQ ID NO: 319139 - DNA, 172 bp, Homo sapiens; identical to SEQ ID NO: 216291
  chr15:63129979-63130151
  hypo

SEQ ID NO: 319140 - DNA, 211 bp, Homo sapiens; identical to SEQ ID NO: 203916
  chr15:63130456-63130667
  hypo

SEQ ID NO: 319141 - DNA, 1053 bp, Homo sapiens; identical to SEQ ID NO: 216293
  chr15:63132463-63133516
  hypo

SEQ ID NO: 319142 - DNA, 266 bp, Homo sapiens; identical to SEQ ID NO: 267748
  chr15:63167175-63167441
  hypo

SEQ ID NO: 319143 - DNA, 89 bp, Homo sapiens; identical to SEQ ID NO: 216294
  chr15:63245891-63245980
  hypo

SEQ ID NO: 319144 - DNA, 100 bp, Homo sapiens; identical to SEQ ID NO: 267750
  chr15:63267856-63267956
  hypo

SEQ ID NO: 319145 - DNA, 92 bp, Homo sapiens; identical to SEQ ID NO: 267751
  chr15:63282596-63282688
  hypo

SEQ ID NO: 319146 - DNA, 47 bp, Homo sapiens; identical to SEQ ID NO: 216295
  chr15:63321676-63321723
  hypo

SEQ ID NO: 319147 - DNA, 178 bp, Homo sapiens; identical to SEQ ID NO: 267753
  chr15:63382905-63383083
  hypo

SEQ ID NO: 319148 - DNA, 144 bp, Homo sapiens; identical to SEQ ID NO: 267754
  chr15:63585219-63585363
  hypo

SEQ ID NO: 319149 - DNA, 204 bp, Homo sapiens; identical to SEQ ID NO: 267755
  chr15:63592833-63593037
  hypo

SEQ ID NO: 319150 - DNA, 234 bp, Homo sapiens; identical to SEQ ID NO: 267756
  chr15:63597954-63598188
  hypo

SEQ ID NO: 319151 - DNA, 199 bp, Homo sapiens; identical to SEQ ID NO: 267757
  chr15:63614192-63614391
  hypo

SEQ ID NO: 319152 - DNA, 136 bp, Homo sapiens; identical to SEQ ID NO: 267758
  chr15:63647633-63647769
  hypo

SEQ ID NO: 319153 - DNA, 67 bp, Homo sapiens; identical to SEQ ID NO: 267759
  chr15:63660076-63660143
  hypo

SEQ ID NO: 319154 - DNA, 43 bp, Homo sapiens; identical to SEQ ID NO: 267760
  chr15:63665232-63665275
  hypo

SEQ ID NO: 319155 - DNA, 104 bp, Homo sapiens; identical to SEQ ID NO: 267761
  chr15:63695754-63695858
  hypo

SEQ ID NO: 319156 - DNA, 62 bp, Homo sapiens; identical to SEQ ID NO: 216296
  chr15:63753619-63753681
  hypo

SEQ ID NO: 319157 - DNA, 45 bp, Homo sapiens; identical to SEQ ID NO: 267763
  chr15:63772320-63772365
  hypo

SEQ ID NO: 319158 - DNA, 45 bp, Homo sapiens; identical to SEQ ID NO: 216297
  chr15:63772605-63772650
  hypo

SEQ ID NO: 319159 - DNA, 350 bp, Homo sapiens; identical to SEQ ID NO: 203920
  chr15:63795501-63795851
  hypo

SEQ ID NO: 319160 - DNA, 343 bp, Homo sapiens; identical to SEQ ID NO: 203921
  chr15:63795894-63796237
  hypo

SEQ ID NO: 319161 - DNA, 244 bp, Homo sapiens; identical to SEQ ID NO: 216300
  chr15:63889822-63890066
  hypo

SEQ ID NO: 319162 - DNA, 58 bp, Homo sapiens; identical to SEQ ID NO: 216301
  chr15:63901443-63901501
  hypo

SEQ ID NO: 319163 - DNA, 79 bp, Homo sapiens; identical to SEQ ID NO: 267767
  chr15:64109577-64109656
  hypo

SEQ ID NO: 319164 - DNA, 96 bp, Homo sapiens; identical to SEQ ID NO: 267768
  chr15:64234750-64234846
  hypo

SEQ ID NO: 319165 - DNA, 393 bp, Homo sapiens; identical to SEQ ID NO: 267769
  chr15:64439385-64439778
  hypo

SEQ ID NO: 319166 - DNA, 217 bp, Homo sapiens; identical to SEQ ID NO: 290889
  chr15:64454728-64454945
  hypo

SEQ ID NO: 319167 - DNA, 80 bp, Homo sapiens; identical to SEQ ID NO: 267771
  chr15:64481962-64482042
  hypo

SEQ ID NO: 319168 - DNA, 137 bp, Homo sapiens
  chr15:64649916-64650053
  hypo
gaaaagagacctcatttattgtgtctgggtgatttggggtttgaaaatattgggaaaatgaatggttggggtaaaagttaacaaagtaatactcgaaaaaaacaactcgtatctggaggctgggtgcggtggctcac

SEQ ID NO: 319169 - DNA, 147 bp, Homo sapiens; identical to SEQ ID NO: 267773
  chr15:64670701-64670848
  hypo

SEQ ID NO: 319170 - DNA, 240 bp, Homo sapiens; identical to SEQ ID NO: 216303
  chr15:64674683-64674923
  hypo

SEQ ID NO: 319171 - DNA, 120 bp, Homo sapiens; identical to SEQ ID NO: 216304
  chr15:64682671-64682791
  hypo

SEQ ID NO: 319172 - DNA, 79 bp, Homo sapiens; identical to SEQ ID NO: 216305
  chr15:64683091-64683170
  hypo

SEQ ID NO: 319173 - DNA, 84 bp, Homo sapiens; identical to SEQ ID NO: 267777
  chr15:64715655-64715739
  hypo

SEQ ID NO: 319174 - DNA, 88 bp, Homo sapiens; identical to SEQ ID NO: 216306
  chr15:64865096-64865184
  hypo

SEQ ID NO: 319175 - DNA, 39 bp, Homo sapiens; identical to SEQ ID NO: 267779
  chr15:65041216-65041255
  hypo

SEQ ID NO: 319176 - DNA, 186 bp, Homo sapiens; identical to SEQ ID NO: 216307
  chr15:65119040-65119226
  hypo

SEQ ID NO: 319177 - DNA, 102 bp, Homo sapiens; identical to SEQ ID NO: 216308
  chr15:65119640-65119742
  hypo

SEQ ID NO: 319178 - DNA, 419 bp, Homo sapiens; identical to SEQ ID NO: 290896
  chr15:65203768-65204187
  hypo

SEQ ID NO: 319179 - DNA, 40 bp, Homo sapiens; identical to SEQ ID NO: 290897
  chr15:65204235-65204275
  hypo

SEQ ID NO: 319180 - DNA, 33 bp, Homo sapiens; identical to SEQ ID NO: 216309
  chr15:65214147-65214180
  hypo

SEQ ID NO: 319181 - DNA, 110 bp, Homo sapiens; identical to SEQ ID NO: 267784
  chr15:65242069-65242179
  hypo

SEQ ID NO: 319182 - DNA, 78 bp, Homo sapiens; identical to SEQ ID NO: 267785
  chr15:65349771-65349849
  hypo

SEQ ID NO: 319183 - DNA, 143 bp, Homo sapiens; identical to SEQ ID NO: 267786
  chr15:65380109-65380252
  hypo

SEQ ID NO: 319184 - DNA, 195 bp, Homo sapiens; identical to SEQ ID NO: 267787
  chr15:65538640-65538835
  hypo

SEQ ID NO: 319185 - DNA, 187 bp, Homo sapiens
  chr15:65625301-65625488
  hypo
caccagctgagatgagaaagtggaaatgactccctgggtggaggggtattgacggacccggagggcacgcagaggccggggagcatgaccaagaccatccacccattcccaacgcaagcattcctcgggaagaacgcaccgcctttggcctggcctgggggccggtgaggggcgaggggcagggcga

SEQ ID NO: 319186 - DNA, 267 bp, Homo sapiens; identical to SEQ ID NO: 290909
  chr15:65714831-65715098
  hypo

SEQ ID NO: 319187 - DNA, 43 bp, Homo sapiens; identical to SEQ ID NO: 216310
  chr15:65901233-65901276
  hypo

SEQ ID NO: 319188 - DNA, 42 bp, Homo sapiens; identical to SEQ ID NO: 267792
  chr15:66618556-66618598
  hypo

SEQ ID NO: 319189 - DNA, 53 bp, Homo sapiens; identical to SEQ ID NO: 267793
  chr15:66886756-66886809
  hypo

SEQ ID NO: 319190 - DNA, 81 bp, Homo sapiens; identical to SEQ ID NO: 216311
  chr15:66929157-66929238
  hypo

SEQ ID NO: 319191 - DNA, 440 bp, Homo sapiens; identical to SEQ ID NO: 267795
  chr15:66946022-66946462
  hypo

SEQ ID NO: 319192 - DNA, 43 bp, Homo sapiens; identical to SEQ ID NO: 267796
  chr15:66951024-66951067
  hypo

SEQ ID NO: 319193 - DNA, 131 bp, Homo sapiens
  chr15:66963541-66963672
  hypo
gcccttcctctgccccgcccctctcctctgctctgctcctcccacagcttcccgctacctgccccagccactcccgcctcctggcttggttttccaggatgtccactgtgcagctgctcctcctctgttct

SEQ ID NO: 319194 - DNA, 159 bp, Homo sapiens
  chr15:66964083-66964242
  hypo
ggacacagagcgagtaggtgctgtccattcgcctttgctgtgtccctccattcctaccctgggagagccggggatccccatccactaaaggcatgtcatgcaggccccagggtcacacaagggagtgatggcacagcctgcctccgcggccccaggagg

SEQ ID NO: 319195 - DNA, 261 bp, Homo sapiens; identical to SEQ ID NO: 290918
  chr15:66994356-66994617
  hypo

SEQ ID NO: 319196 - DNA, 910 bp, Homo sapiens; identical to SEQ ID NO: 290920
  chr15:66995267-66996177
  hypo

SEQ ID NO: 319197 - DNA, 90 bp, Homo sapiens; identical to SEQ ID NO: 216314
  chr15:67011791-67011881
  hypo

SEQ ID NO: 319198 - DNA, 213 bp, Homo sapiens; identical to SEQ ID NO: 267800
  chr15:67049571-67049784
  hypo

SEQ ID NO: 319199 - DNA, 668 bp, Homo sapiens; identical to SEQ ID NO: 267801
  chr15:67073254-67073922
  hypo

SEQ ID NO: 319200 - DNA, 93 bp, Homo sapiens; identical to SEQ ID NO: 267802
  chr15:67088298-67088391
  hypo

SEQ ID NO: 319201 - DNA, 167 bp, Homo sapiens; identical to SEQ ID NO: 267803
  chr15:67100821-67100988
  hypo

SEQ ID NO: 319202 - DNA, 142 bp, Homo sapiens; identical to SEQ ID NO: 216317
  chr15:67137812-67137954
  hypo

SEQ ID NO: 319203 - DNA, 44 bp, Homo sapiens; identical to SEQ ID NO: 267805
  chr15:67149350-67149394
  hypo

SEQ ID NO: 319204 - DNA, 86 bp, Homo sapiens; identical to SEQ ID NO: 267806
  chr15:67368276-67368362
  hypo

SEQ ID NO: 319205 - DNA, 212 bp, Homo sapiens; identical to SEQ ID NO: 267807
  chr15:67457570-67457782
  hypo

SEQ ID NO: 319206 - DNA, 96 bp, Homo sapiens; identical to SEQ ID NO: 267808
  chr15:67480893-67480989
  hypo

SEQ ID NO: 319207 - DNA, 77 bp, Homo sapiens; identical to SEQ ID NO: 267809
  chr15:67481788-67481865
  hypo

SEQ ID NO: 319208 - DNA, 122 bp, Homo sapiens; identical to SEQ ID NO: 267810
  chr15:67482198-67482320
  hypo

SEQ ID NO: 319209 - DNA, 341 bp, Homo sapiens; identical to SEQ ID NO: 267812
  chr15:67757461-67757802
  hypo

SEQ ID NO: 319210 - DNA, 105 bp, Homo sapiens; identical to SEQ ID NO: 267813
  chr15:68085074-68085179
  hypo

SEQ ID NO: 319211 - DNA, 547 bp, Homo sapiens; identical to SEQ ID NO: 267814
  chr15:68098612-68099159
  hypo

SEQ ID NO: 319212 - DNA, 71 bp, Homo sapiens; identical to SEQ ID NO: 224883
  chr15:68177208-68177279
  hypo

SEQ ID NO: 319213 - DNA, 105 bp, Homo sapiens; identical to SEQ ID NO: 267815
  chr15:68394333-68394438
  hypo

SEQ ID NO: 319214 - DNA, 233 bp, Homo sapiens; identical to SEQ ID NO: 216319
  chr15:68502839-68503072
  hypo

SEQ ID NO: 319215 - DNA, 43 bp, Homo sapiens; identical to SEQ ID NO: 216320
  chr15:68506853-68506896
  hypo

SEQ ID NO: 319216 - DNA, 185 bp, Homo sapiens; identical to SEQ ID NO: 267818
  chr15:68614578-68614763
  hypo

SEQ ID NO: 319217 - DNA, 84 bp, Homo sapiens; identical to SEQ ID NO: 216321
  chr15:68624699-68624783
  hypo

SEQ ID NO: 319218 - DNA, 128 bp, Homo sapiens; identical to SEQ ID NO: 267820
  chr15:68854101-68854229
  hypo

SEQ ID NO: 319219 - DNA, 31 bp, Homo sapiens; identical to SEQ ID NO: 267821
  chr15:68854259-68854290
  hypo

SEQ ID NO: 319220 - DNA, 127 bp, Homo sapiens; identical to SEQ ID NO: 267822
  chr15:68888207-68888334
  hypo

SEQ ID NO: 319221 - DNA, 116 bp, Homo sapiens; identical to SEQ ID NO: 216322
  chr15:68893750-68893866
  hypo

SEQ ID NO: 319222 - DNA, 40 bp, Homo sapiens; identical to SEQ ID NO: 267824
  chr15:68899868-68899908
  hypo

SEQ ID NO: 319223 - DNA, 114 bp, Homo sapiens; identical to SEQ ID NO: 267825
  chr15:68908914-68909028
  hypo

SEQ ID NO: 319224 - DNA, 215 bp, Homo sapiens; identical to SEQ ID NO: 267826
  chr15:68937487-68937702
  hypo

SEQ ID NO: 319225 - DNA, 258 bp, Homo sapiens; identical to SEQ ID NO: 216323
  chr15:69002974-69003232
  hypo

SEQ ID NO: 319226 - DNA, 93 bp, Homo sapiens; identical to SEQ ID NO: 216324
  chr15:69003955-69004048
  hypo

SEQ ID NO: 319227 - DNA, 180 bp, Homo sapiens; identical to SEQ ID NO: 267829
  chr15:69011590-69011770
  hypo

SEQ ID NO: 319228 - DNA, 250 bp, Homo sapiens; identical to SEQ ID NO: 267830
  chr15:69076663-69076913
  hypo

SEQ ID NO: 319229 - DNA, 489 bp, Homo sapiens; identical to SEQ ID NO: 267831
  chr15:69099731-69100220
  hypo

SEQ ID NO: 319230 - DNA, 113 bp, Homo sapiens; identical to SEQ ID NO: 267832
  chr15:69285723-69285836
  hypo

SEQ ID NO: 319231 - DNA, 141 bp, Homo sapiens; identical to SEQ ID NO: 216326
  chr15:69322604-69322745
  hypo

SEQ ID NO: 319232 - DNA, 180 bp, Homo sapiens; identical to SEQ ID NO: 216327
  chr15:69322967-69323147
  hypo

SEQ ID NO: 319233 - DNA, 33 bp, Homo sapiens; identical to SEQ ID NO: 267835
  chr15:69325018-69325051
  hypo

SEQ ID NO: 319234 - DNA, 32 bp, Homo sapiens; identical to SEQ ID NO: 267836
  chr15:69369617-69369649
  hypo

SEQ ID NO: 319235 - DNA, 184 bp, Homo sapiens; identical to SEQ ID NO: 216328
  chr15:69387167-69387351
  hypo

SEQ ID NO: 319236 - DNA, 39 bp, Homo sapiens; identical to SEQ ID NO: 216329
  chr15:69461181-69461220
  hypo

SEQ ID NO: 319237 - DNA, 77 bp, Homo sapiens; identical to SEQ ID NO: 267839
  chr15:69481791-69481868
  hypo

SEQ ID NO: 319238 - DNA, 37 bp, Homo sapiens; identical to SEQ ID NO: 267840
  chr15:69566086-69566123
  hypo

SEQ ID NO: 319239 - DNA, 160 bp, Homo sapiens; identical to SEQ ID NO: 267841
  chr15:69577241-69577401
  hypo

SEQ ID NO: 319240 - DNA, 214 bp, Homo sapiens; identical to SEQ ID NO: 216330
  chr15:69590152-69590366
  hypo

SEQ ID NO: 319241 - DNA, 78 bp, Homo sapiens; identical to SEQ ID NO: 216331
  chr15:69715405-69715483
  hypo

SEQ ID NO: 319242 - DNA, 48 bp, Homo sapiens; identical to SEQ ID NO: 267844
  chr15:69754275-69754323
  hypo

SEQ ID NO: 319243 - DNA, 131 bp, Homo sapiens; identical to SEQ ID NO: 267845
  chr15:69793874-69794005
  hypo

SEQ ID NO: 319244 - DNA, 119 bp, Homo sapiens; identical to SEQ ID NO: 267846
  chr15:69851550-69851669
  hypo

SEQ ID NO: 319245 - DNA, 200 bp, Homo sapiens; identical to SEQ ID NO: 267847
  chr15:69879205-69879405
  hypo

SEQ ID NO: 319246 - DNA, 141 bp, Homo sapiens; identical to SEQ ID NO: 216332
  chr15:69883340-69883481
  hypo

SEQ ID NO: 319247 - DNA, 34 bp, Homo sapiens; identical to SEQ ID NO: 267849
  chr15:69900972-69901006
  hypo

SEQ ID NO: 319248 - DNA, 155 bp, Homo sapiens; identical to SEQ ID NO: 267850
  chr15:69925151-69925306
  hypo

SEQ ID NO: 319249 - DNA, 150 bp, Homo sapiens; identical to SEQ ID NO: 216333
  chr15:70126641-70126791
  hypo

SEQ ID NO: 319250 - DNA, 246 bp, Homo sapiens; identical to SEQ ID NO: 267852
  chr15:70133513-70133759
  hypo

SEQ ID NO: 319251 - DNA, 199 bp, Homo sapiens; identical to SEQ ID NO: 267853
  chr15:70339879-70340078
  hypo

SEQ ID NO: 319252 - DNA, 116 bp, Homo sapiens; identical to SEQ ID NO: 216334
  chr15:70342264-70342380
  hypo

SEQ ID NO: 319253 - DNA, 71 bp, Homo sapiens
  chr15:70347466-70347537
  hypo
gtgtagacgtgcctcgtggggttgctgatggtcacggcacacaccacctccccgtggctgagtgtgttgat

SEQ ID NO: 319254 - DNA, 33 bp, Homo sapiens
  chr15:70347575-70347608
  hypo
cgtcgtgggggaagggcacgggctgcatctgcc

SEQ ID NO: 319255 - DNA, 439 bp, Homo sapiens; identical to SEQ ID NO: 267856
  chr15:70352913-70353352
  hypo

SEQ ID NO: 319256 - DNA, 260 bp, Homo sapiens; identical to SEQ ID NO: 267857
  chr15:70354303-70354563
  hypo

SEQ ID NO: 319257 - DNA, 87 bp, Homo sapiens; identical to SEQ ID NO: 216336
  chr15:70355592-70355679
  hypo

SEQ ID NO: 319258 - DNA, 70 bp, Homo sapiens; identical to SEQ ID NO: 224884
  chr15:70388126-70388196
  hypo

SEQ ID NO: 319259 - DNA, 285 bp, Homo sapiens; identical to SEQ ID NO: 290962
  chr15:70388412-70388697
  hypo

SEQ ID NO: 319260 - DNA, 76 bp, Homo sapiens; identical to SEQ ID NO: 203948
  chr15:70391279-70391355
  hypo

SEQ ID NO: 319261 - DNA, 180 bp, Homo sapiens; identical to SEQ ID NO: 267859
  chr15:70703922-70704102
  hypo

SEQ ID NO: 319262 - DNA, 36 bp, Homo sapiens; identical to SEQ ID NO: 267860
  chr15:70707944-70707980
  hypo

SEQ ID NO: 319263 - DNA, 212 bp, Homo sapiens; identical to SEQ ID NO: 267861
  chr15:70718602-70718814
  hypo

SEQ ID NO: 319264 - DNA, 96 bp, Homo sapiens; identical to SEQ ID NO: 267862
  chr15:70926695-70926791
  hypo

SEQ ID NO: 319265 - DNA, 99 bp, Homo sapiens; identical to SEQ ID NO: 216338
  chr15:71047985-71048084
  hypo

SEQ ID NO: 319266 - DNA, 35 bp, Homo sapiens; identical to SEQ ID NO: 216339
  chr15:71124501-71124536
  hypo

SEQ ID NO: 319267 - DNA, 120 bp, Homo sapiens; identical to SEQ ID NO: 267865
  chr15:71152087-71152207
  hypo

SEQ ID NO: 319268 - DNA, 35 bp, Homo sapiens; identical to SEQ ID NO: 216340
  chr15:71164699-71164734
  hypo

SEQ ID NO: 319269 - DNA, 195 bp, Homo sapiens; identical to SEQ ID NO: 203955
  chr15:71184274-71184469
  hypo

SEQ ID NO: 319270 - DNA, 766 bp, Homo sapiens; identical to SEQ ID NO: 290974
  chr15:71184499-71185265
  hypo

SEQ ID NO: 319271 - DNA, 585 bp, Homo sapiens; identical to SEQ ID NO: 290976
  chr15:71407571-71408156
  hypo

SEQ ID NO: 319272 - DNA, 31 bp, Homo sapiens; identical to SEQ ID NO: 216343
  chr15:71466447-71466478
  hypo

SEQ ID NO: 319273 - DNA, 179 bp, Homo sapiens; identical to SEQ ID NO: 267868
  chr15:71704016-71704195
  hypo

SEQ ID NO: 319274 - DNA, 38 bp, Homo sapiens; identical to SEQ ID NO: 267869
  chr15:71880351-71880389
  hypo

SEQ ID NO: 319275 - DNA, 99 bp, Homo sapiens; identical to SEQ ID NO: 267870
  chr15:71966264-71966363
  hypo

SEQ ID NO: 319276 - DNA, 391 bp, Homo sapiens; identical to SEQ ID NO: 267871
  chr15:72039024-72039415
  hypo

SEQ ID NO: 319277 - DNA, 175 bp, Homo sapiens; identical to SEQ ID NO: 216344
  chr15:72040756-72040931
  hypo

SEQ ID NO: 319278 - DNA, 199 bp, Homo sapiens; identical to SEQ ID NO: 267873
  chr15:72042476-72042675
  hypo

SEQ ID NO: 319279 - DNA, 258 bp, Homo sapiens; identical to SEQ ID NO: 267874
  chr15:72081593-72081851
  hypo

SEQ ID NO: 319280 - DNA, 287 bp, Homo sapiens; identical to SEQ ID NO: 267875
  chr15:72082357-72082644
  hypo

SEQ ID NO: 319281 - DNA, 123 bp, Homo sapiens; identical to SEQ ID NO: 267876
  chr15:72093246-72093369
  hypo

SEQ ID NO: 319282 - DNA, 147 bp, Homo sapiens; identical to SEQ ID NO: 267877
  chr15:72109741-72109888
  hypo

SEQ ID NO: 319283 - DNA, 223 bp, Homo sapiens
  chr15:72462416-72462639
  hypo
tcacagttcagaggcagcagcgcaggcagaggttctgggatggctgacggagtaggcgggtctcacacagcgtctttcccgaaagccagaagttctgcttatgcctaggctgggaggaaaatcaacctgtctacctcatctccagtgccaggcagctcgtaggccaggctgagtgaggcctctagccccacccttgaggaggcacactgagagggaggaccct

SEQ ID NO: 319284 - DNA, 135 bp, Homo sapiens; identical to SEQ ID NO: 216346
  chr15:72462669-72462804
  hypo

SEQ ID NO: 319285 - DNA, 41 bp, Homo sapiens; identical to SEQ ID NO: 216347
  chr15:72471183-72471224
  hypo

SEQ ID NO: 319286 - DNA, 1074 bp, Homo sapiens; identical to SEQ ID NO: 203962
  chr15:72522952-72524026
  hypo

SEQ ID NO: 319287 - DNA, 37 bp, Homo sapiens; identical to SEQ ID NO: 267882
  chr15:72525047-72525084
  hypo

SEQ ID NO: 319288 - DNA, 37 bp, Homo sapiens; identical to SEQ ID NO: 267883
  chr15:72525324-72525361
  hypo

SEQ ID NO: 319289 - DNA, 80 bp, Homo sapiens; identical to SEQ ID NO: 267885
  chr15:72743819-72743899
  hypo

SEQ ID NO: 319290 - DNA, 42 bp, Homo sapiens; identical to SEQ ID NO: 267886
  chr15:72758599-72758641
  hypo

SEQ ID NO: 319291 - DNA, 204 bp, Homo sapiens; identical to SEQ ID NO: 216349
  chr15:72992555-72992759
  hypo

SEQ ID NO: 319292 - DNA, 95 bp, Homo sapiens; identical to SEQ ID NO: 267889
  chr15:73147250-73147345
  hypo

SEQ ID NO: 319293 - DNA, 297 bp, Homo sapiens; identical to SEQ ID NO: 290985
  chr15:73344008-73344305
  hypo

SEQ ID NO: 319294 - DNA, 212 bp, Homo sapiens; identical to SEQ ID NO: 267890
  chr15:73615718-73615930
  hypo

SEQ ID NO: 319295 - DNA, 46 bp, Homo sapiens; identical to SEQ ID NO: 267891
  chr15:73616153-73616199
  hypo

SEQ ID NO: 319296 - DNA, 111 bp, Homo sapiens; identical to SEQ ID NO: 267892
  chr15:73616437-73616548
  hypo

SEQ ID NO: 319297 - DNA, 57 bp, Homo sapiens; identical to SEQ ID NO: 267893
  chr15:73634701-73634758
  hypo

SEQ ID NO: 319298 - DNA, 99 bp, Homo sapiens; identical to SEQ ID NO: 267894
  chr15:73635760-73635859
  hypo

SEQ ID NO: 319299 - DNA, 84 bp, Homo sapiens; identical to SEQ ID NO: 216351
  chr15:73735440-73735524
  hypo

SEQ ID NO: 319300 - DNA, 333 bp, Homo sapiens; identical to SEQ ID NO: 216352
  chr15:73889351-73889684
  hypo

SEQ ID NO: 319301 - DNA, 180 bp, Homo sapiens; identical to SEQ ID NO: 267897
  chr15:73898087-73898267
  hypo

SEQ ID NO: 319302 - DNA, 412 bp, Homo sapiens; identical to SEQ ID NO: 290989
  chr15:74045243-74045655
  hypo

SEQ ID NO: 319303 - DNA, 201 bp, Homo sapiens; identical to SEQ ID NO: 267898
  chr15:74188046-74188247
  hypo

SEQ ID NO: 319304 - DNA, 32 bp, Homo sapiens; identical to SEQ ID NO: 267899
  chr15:74223034-74223066
  hypo

SEQ ID NO: 319305 - DNA, 408 bp, Homo sapiens; identical to SEQ ID NO: 267900
  chr15:74315317-74315725
  hypo

SEQ ID NO: 319306 - DNA, 116 bp, Homo sapiens; identical to SEQ ID NO: 267901
  chr15:74333742-74333858
  hypo

SEQ ID NO: 319307 - DNA, 91 bp, Homo sapiens; identical to SEQ ID NO: 216356
  chr15:74679876-74679967
  hypo

SEQ ID NO: 319308 - DNA, 42 bp, Homo sapiens; identical to SEQ ID NO: 267903
  chr15:74688410-74688452
  hypo

SEQ ID NO: 319309 - DNA, 174 bp, Homo sapiens; identical to SEQ ID NO: 267904
  chr15:74702942-74703116
  hypo

SEQ ID NO: 319310 - DNA, 389 bp, Homo sapiens; identical to SEQ ID NO: 291001
  chr15:74725114-74725503
  hypo

SEQ ID NO: 319311 - DNA, 680 bp, Homo sapiens; identical to SEQ ID NO: 126050
  chr15:74725548-74726228
  hypo

SEQ ID NO: 319312 - DNA, 38 bp, Homo sapiens; identical to SEQ ID NO: 267906
  chr15:74819046-74819084
  hypo

SEQ ID NO: 319313 - DNA, 31 bp, Homo sapiens; identical to SEQ ID NO: 267907
  chr15:74839796-74839827
  hypo

SEQ ID NO: 319314 - DNA, 71 bp, Homo sapiens
  chr15:74903825-74903896
  hypo
cctccggcactgcccgaagacggcttgccagctcggccctctgctgcctgctttctgccagctgctcccac

SEQ ID NO: 319315 - DNA, 176 bp, Homo sapiens; identical to SEQ ID NO: 291004
  chr15:74912313-74912489
  hypo

SEQ ID NO: 319316 - DNA, 125 bp, Homo sapiens; identical to SEQ ID NO: 267910
  chr15:74913937-74914062
  hypo

SEQ ID NO: 319317 - DNA, 591 bp, Homo sapiens; identical to SEQ ID NO: 267911
  chr15:75091223-75091814
  hypo

SEQ ID NO: 319318 - DNA, 64 bp, Homo sapiens; identical to SEQ ID NO: 267912
  chr15:75093183-75093247
  hypo

SEQ ID NO: 319319 - DNA, 47 bp, Homo sapiens; identical to SEQ ID NO: 267913
  chr15:75093277-75093324
  hypo

SEQ ID NO: 319320 - DNA, 82 bp, Homo sapiens; identical to SEQ ID NO: 267914
  chr15:75093354-75093436
  hypo

SEQ ID NO: 319321 - DNA, 183 bp, Homo sapiens; identical to SEQ ID NO: 216358
  chr15:75094768-75094951
  hypo

SEQ ID NO: 319322 - DNA, 103 bp, Homo sapiens; identical to SEQ ID NO: 216359
  chr15:75158701-75158804
  hypo

SEQ ID NO: 319323 - DNA, 42 bp, Homo sapiens; identical to SEQ ID NO: 216360
  chr15:75158924-75158966
  hypo

SEQ ID NO: 319324 - DNA, 142 bp, Homo sapiens; identical to SEQ ID NO: 216361
  chr15:75221041-75221183
  hypo

SEQ ID NO: 319325 - DNA, 247 bp, Homo sapiens; identical to SEQ ID NO: 291013
  chr15:75248843-75249090
  hypo

SEQ ID NO: 319326 - DNA, 58 bp, Homo sapiens; identical to SEQ ID NO: 267920
  chr15:75293194-75293252
  hypo

SEQ ID NO: 319327 - DNA, 32 bp, Homo sapiens; identical to SEQ ID NO: 216363
  chr15:75413015-75413047
  hypo

SEQ ID NO: 319328 - DNA, 103 bp, Homo sapiens; identical to SEQ ID NO: 267922
  chr15:75498358-75498461
  hypo

SEQ ID NO: 319329 - DNA, 113 bp, Homo sapiens; identical to SEQ ID NO: 267923
  chr15:75500845-75500958
  hypo

SEQ ID NO: 319330 - DNA, 151 bp, Homo sapiens; identical to SEQ ID NO: 267924
  chr15:75594676-75594827
  hypo

SEQ ID NO: 319331 - DNA, 69 bp, Homo sapiens; identical to SEQ ID NO: 216364
  chr15:75614951-75615020
  hypo

SEQ ID NO: 319332 - DNA, 455 bp, Homo sapiens; identical to SEQ ID NO: 126081
  chr15:75640520-75640975
  hypo

SEQ ID NO: 319333 - DNA, 215 bp, Homo sapiens; identical to SEQ ID NO: 267926
  chr15:75648427-75648642
  hypo

SEQ ID NO: 319334 - DNA, 104 bp, Homo sapiens; identical to SEQ ID NO: 216367
  chr15:75664801-75664905
  hypo

SEQ ID NO: 319335 - DNA, 196 bp, Homo sapiens; identical to SEQ ID NO: 216368
  chr15:75672985-75673181
  hypo

SEQ ID NO: 319336 - DNA, 36 bp, Homo sapiens; identical to SEQ ID NO: 216369
  chr15:75726682-75726718
  hypo

SEQ ID NO: 319337 - DNA, 258 bp, Homo sapiens; identical to SEQ ID NO: 267930
  chr15:75760809-75761067
  hypo

SEQ ID NO: 319338 - DNA, 205 bp, Homo sapiens; identical to SEQ ID NO: 267931
  chr15:75949260-75949465
  hypo

SEQ ID NO: 319339 - DNA, 219 bp, Homo sapiens; identical to SEQ ID NO: 224900
  chr15:75976176-75976395
  hypo

SEQ ID NO: 319340 - DNA, 126 bp, Homo sapiens; identical to SEQ ID NO: 216370
  chr15:75981377-75981503
  hypo

SEQ ID NO: 319341 - DNA, 153 bp, Homo sapiens; identical to SEQ ID NO: 267933
  chr15:75997150-75997303
  hypo

SEQ ID NO: 319342 - DNA, 263 bp, Homo sapiens; identical to SEQ ID NO: 267934
  chr15:76019477-76019740
  hypo

SEQ ID NO: 319343 - DNA, 186 bp, Homo sapiens; identical to SEQ ID NO: 216371
  chr15:76083847-76084033
  hypo

SEQ ID NO: 319344 - DNA, 62 bp, Homo sapiens; identical to SEQ ID NO: 216372
  chr15:76197521-76197583
  hypo

SEQ ID NO: 319345 - DNA, 120 bp, Homo sapiens; identical to SEQ ID NO: 267937
  chr15:76558867-76558987
  hypo

SEQ ID NO: 319346 - DNA, 42 bp, Homo sapiens; identical to SEQ ID NO: 267938
  chr15:77072238-77072280
  hypo

SEQ ID NO: 319347 - DNA, 120 bp, Homo sapiens; identical to SEQ ID NO: 267939
  chr15:77072340-77072460
  hypo

SEQ ID NO: 319348 - DNA, 392 bp, Homo sapiens; identical to SEQ ID NO: 267940
  chr15:77321763-77322155
  hypo

SEQ ID NO: 319349 - DNA, 34 bp, Homo sapiens; identical to SEQ ID NO: 267941
  chr15:77332740-77332774
  hypo

SEQ ID NO: 319350 - DNA, 34 bp, Homo sapiens; identical to SEQ ID NO: 216373
  chr15:77333014-77333048
  hypo

SEQ ID NO: 319351 - DNA, 31 bp, Homo sapiens; identical to SEQ ID NO: 267943
  chr15:77358028-77358059
  hypo

SEQ ID NO: 319352 - DNA, 183 bp, Homo sapiens; identical to SEQ ID NO: 267944
  chr15:77473436-77473619
  hypo

SEQ ID NO: 319353 - DNA, 209 bp, Homo sapiens; identical to SEQ ID NO: 267945
  chr15:77880953-77881162
  hypo

SEQ ID NO: 319354 - DNA, 33 bp, Homo sapiens
  chr15:77906718-77906751
  hypo
ggcgggcatggagtcgttgccgcccgcgttggc

SEQ ID NO: 319355 - DNA, 120 bp, Homo sapiens
  chr15:77906998-77907118
  hypo
ttgggcagtagcacatcagggaagtccttgaactccttgccctggacaaactcgggcgtggcgcacgtgggctgctgccggttgaagttgagccgccagcggcgccggaacacccacagg

SEQ ID NO: 319356 - DNA, 65 bp, Homo sapiens; identical to SEQ ID NO: 216374
  chr15:77908020-77908085
  hypo

SEQ ID NO: 319357 - DNA, 204 bp, Homo sapiens; identical to SEQ ID NO: 267948
  chr15:77936322-77936526
  hypo

SEQ ID NO: 319358 - DNA, 276 bp, Homo sapiens; identical to SEQ ID NO: 267949
  chr15:78010517-78010793
  hypo

SEQ ID NO: 319359 - DNA, 143 bp, Homo sapiens; identical to SEQ ID NO: 291049
  chr15:78110977-78111120
  hypo

SEQ ID NO: 319360 - DNA, 80 bp, Homo sapiens; identical to SEQ ID NO: 291050
  chr15:78111210-78111290
  hypo

SEQ ID NO: 319361 - DNA, 183 bp, Homo sapiens; identical to SEQ ID NO: 267950
  chr15:78159874-78160057
  hypo

SEQ ID NO: 319362 - DNA, 151 bp, Homo sapiens; identical to SEQ ID NO: 267951
  chr15:78165453-78165604
  hypo

SEQ ID NO: 319363 - DNA, 95 bp, Homo sapiens; identical to SEQ ID NO: 267952
  chr15:78181925-78182020
  hypo

SEQ ID NO: 319364 - DNA, 340 bp, Homo sapiens; identical to SEQ ID NO: 267953
  chr15:78189972-78190312
  hypo

SEQ ID NO: 319365 - DNA, 531 bp, Homo sapiens; identical to SEQ ID NO: 267954
  chr15:78191122-78191653
  hypo

SEQ ID NO: 319366 - DNA, 58 bp, Homo sapiens; identical to SEQ ID NO: 216375
  chr15:78193841-78193899
  hypo

SEQ ID NO: 319367 - DNA, 172 bp, Homo sapiens; identical to SEQ ID NO: 267956
  chr15:78267623-78267795
  hypo

SEQ ID NO: 319368 - DNA, 171 bp, Homo sapiens; identical to SEQ ID NO: 216376
  chr15:78268339-78268510
  hypo

SEQ ID NO: 319369 - DNA, 37 bp, Homo sapiens; identical to SEQ ID NO: 267958
  chr15:78285344-78285381
  hypo

SEQ ID NO: 319370 - DNA, 38 bp, Homo sapiens; identical to SEQ ID NO: 267959
  chr15:78295565-78295603
  hypo

SEQ ID NO: 319371 - DNA, 93 bp, Homo sapiens; identical to SEQ ID NO: 267960
  chr15:78403530-78403623
  hypo

SEQ ID NO: 319372 - DNA, 79 bp, Homo sapiens; identical to SEQ ID NO: 216377
  chr15:78450091-78450170
  hypo

SEQ ID NO: 319373 - DNA, 178 bp, Homo sapiens; identical to SEQ ID NO: 216378
  chr15:78463270-78463448
  hypo

SEQ ID NO: 319374 - DNA, 37 bp, Homo sapiens; identical to SEQ ID NO: 267963
  chr15:78487124-78487161
  hypo

SEQ ID NO: 319375 - DNA, 175 bp, Homo sapiens; identical to SEQ ID NO: 267964
  chr15:78498325-78498500
  hypo

SEQ ID NO: 319376 - DNA, 101 bp, Homo sapiens; identical to SEQ ID NO: 216379
  chr15:78501675-78501776
  hypo

SEQ ID NO: 319377 - DNA, 45 bp, Homo sapiens; identical to SEQ ID NO: 216380
  chr15:78501942-78501987
  hypo

SEQ ID NO: 319378 - DNA, 81 bp, Homo sapiens; identical to SEQ ID NO: 216381
  chr15:78510187-78510268
  hypo

SEQ ID NO: 319379 - DNA, 78 bp, Homo sapiens; identical to SEQ ID NO: 267967
  chr15:78554709-78554787
  hypo

SEQ ID NO: 319380 - DNA, 45 bp, Homo sapiens; identical to SEQ ID NO: 267968
  chr15:78555195-78555240
  hypo

SEQ ID NO: 319381 - DNA, 149 bp, Homo sapiens; identical to SEQ ID NO: 216382
  chr15:78566544-78566693
  hypo

SEQ ID NO: 319382 - DNA, 118 bp, Homo sapiens; identical to SEQ ID NO: 267971
  chr15:78577626-78577744
  hypo

SEQ ID NO: 319383 - DNA, 97 bp, Homo sapiens; identical to SEQ ID NO: 267973
  chr15:78681251-78681348
  hypo

SEQ ID NO: 319384 - DNA, 188 bp, Homo sapiens; identical to SEQ ID NO: 267974
  chr15:78698064-78698252
  hypo

SEQ ID NO: 319385 - DNA, 188 bp, Homo sapiens; identical to SEQ ID NO: 216383
  chr15:78699264-78699452
  hypo

SEQ ID NO: 319386 - DNA, 152 bp, Homo sapiens; identical to SEQ ID NO: 267976
  chr15:78922145-78922297
  hypo

SEQ ID NO: 319387 - DNA, 71 bp, Homo sapiens; identical to SEQ ID NO: 216384
  chr15:79031606-79031677
  hypo

SEQ ID NO: 319388 - DNA, 133 bp, Homo sapiens; identical to SEQ ID NO: 267978
  chr15:79050495-79050628
  hypo

SEQ ID NO: 319389 - DNA, 239 bp, Homo sapiens; identical to SEQ ID NO: 267979
  chr15:79055678-79055917
  hypo

SEQ ID NO: 319390 - DNA, 232 bp, Homo sapiens; identical to SEQ ID NO: 267980
  chr15:79056239-79056471
  hypo

SEQ ID NO: 319391 - DNA, 264 bp, Homo sapiens; identical to SEQ ID NO: 267981
  chr15:79069814-79070078
  hypo

SEQ ID NO: 319392 - DNA, 124 bp, Homo sapiens
  chr15:79081980-79082104
  hypo
gcgagggtgaagctcggctctcagtgtagcaatgggggcaggcacagtacctgtgcccgagctcgtgggctacagtgaaggccagcggcaggcccgtgtcctcgttgatgctgcagctgcggtg

SEQ ID NO: 319393 - DNA, 273 bp, Homo sapiens; identical to SEQ ID NO: 267983
  chr15:79163906-79164179
  hypo

SEQ ID NO: 319394 - DNA, 78 bp, Homo sapiens; identical to SEQ ID NO: 216385
  chr15:79208260-79208338
  hypo

SEQ ID NO: 319395 - DNA, 206 bp, Homo sapiens; identical to SEQ ID NO: 267985
  chr15:79218012-79218218
  hypo

SEQ ID NO: 319396 - DNA, 103 bp, Homo sapiens; identical to SEQ ID NO: 267986
  chr15:79222387-79222490
  hypo

SEQ ID NO: 319397 - DNA, 101 bp, Homo sapiens; identical to SEQ ID NO: 203989
  chr15:79237308-79237409
  hypo

SEQ ID NO: 319398 - DNA, 125 bp, Homo sapiens; identical to SEQ ID NO: 216387
  chr15:79309573-79309698
  hypo

SEQ ID NO: 319399 - DNA, 133 bp, Homo sapiens; identical to SEQ ID NO: 267988
  chr15:79310062-79310195
  hypo

SEQ ID NO: 319400 - DNA, 111 bp, Homo sapiens; identical to SEQ ID NO: 267989
  chr15:79471666-79471777
  hypo

SEQ ID NO: 319401 - DNA, 75 bp, Homo sapiens; identical to SEQ ID NO: 203992
  chr15:79723976-79724051
  hypo

SEQ ID NO: 319402 - DNA, 1247 bp, Homo sapiens; identical to SEQ ID NO: 203994
  chr15:80215297-80216544
  hypo

SEQ ID NO: 319403 - DNA, 223 bp, Homo sapiens; identical to SEQ ID NO: 267990
  chr15:80216925-80217148
  hypo

SEQ ID NO: 319404 - DNA, 79 bp, Homo sapiens; identical to SEQ ID NO: 267991
  chr15:80217366-80217445
  hypo

SEQ ID NO: 319405 - DNA, 95 bp, Homo sapiens; identical to SEQ ID NO: 267992
  chr15:80219641-80219736
  hypo

SEQ ID NO: 319406 - DNA, 195 bp, Homo sapiens; identical to SEQ ID NO: 267993
  chr15:80295590-80295785
  hypo

SEQ ID NO: 319407 - DNA, 39 bp, Homo sapiens; identical to SEQ ID NO: 267994
  chr15:80434194-80434233
  hypo

SEQ ID NO: 319408 - DNA, 36 bp, Homo sapiens; identical to SEQ ID NO: 216390
  chr15:80451294-80451330
  hypo

SEQ ID NO: 319409 - DNA, 202 bp, Homo sapiens; identical to SEQ ID NO: 216391
  chr15:80471843-80472045
  hypo

SEQ ID NO: 319410 - DNA, 246 bp, Homo sapiens; identical to SEQ ID NO: 267997
  chr15:80478408-80478654
  hypo

SEQ ID NO: 319411 - DNA, 162 bp, Homo sapiens; identical to SEQ ID NO: 267998
  chr15:80759864-80760026
  hypo

SEQ ID NO: 319412 - DNA, 113 bp, Homo sapiens; identical to SEQ ID NO: 267999
  chr15:80889494-80889607
  hypo

SEQ ID NO: 319413 - DNA, 235 bp, Homo sapiens; identical to SEQ ID NO: 268000
  chr15:80907144-80907379
  hypo

SEQ ID NO: 319414 - DNA, 176 bp, Homo sapiens; identical to SEQ ID NO: 216393
  chr15:81041839-81042015
  hypo

SEQ ID NO: 319415 - DNA, 370 bp, Homo sapiens; identical to SEQ ID NO: 268002
  chr15:81164289-81164659
  hypo

SEQ ID NO: 319416 - DNA, 94 bp, Homo sapiens; identical to SEQ ID NO: 268003
  chr15:81199005-81199099
  hypo

SEQ ID NO: 319417 - DNA, 229 bp, Homo sapiens; identical to SEQ ID NO: 268004
  chr15:81224341-81224570
  hypo

SEQ ID NO: 319418 - DNA, 151 bp, Homo sapiens; identical to SEQ ID NO: 268005
  chr15:81235652-81235803
  hypo

SEQ ID NO: 319419 - DNA, 120 bp, Homo sapiens; identical to SEQ ID NO: 216394
  chr15:81247852-81247972
  hypo

SEQ ID NO: 319420 - DNA, 46 bp, Homo sapiens; identical to SEQ ID NO: 268007
  chr15:81262921-81262967
  hypo

SEQ ID NO: 319421 - DNA, 207 bp, Homo sapiens; identical to SEQ ID NO: 204002
  chr15:81294107-81294314
  hypo

SEQ ID NO: 319422 - DNA, 169 bp, Homo sapiens; identical to SEQ ID NO: 268008
  chr15:81342115-81342284
  hypo

SEQ ID NO: 319423 - DNA, 183 bp, Homo sapiens; identical to SEQ ID NO: 216396
  chr15:81605218-81605401
  hypo

SEQ ID NO: 319424 - DNA, 200 bp, Homo sapiens; identical to SEQ ID NO: 268010
  chr15:81605679-81605879
  hypo

SEQ ID NO: 319425 - DNA, 43 bp, Homo sapiens; identical to SEQ ID NO: 268011
  chr15:82276016-82276059
  hypo

SEQ ID NO: 319426 - DNA, 214 bp, Homo sapiens; identical to SEQ ID NO: 204005
  chr15:82339664-82339878
  hypo

SEQ ID NO: 319427 - DNA, 86 bp, Homo sapiens; identical to SEQ ID NO: 204006
  chr15:83377915-83378001
  hypo

SEQ ID NO: 319428 - DNA, 125 bp, Homo sapiens; identical to SEQ ID NO: 204007
  chr15:83378087-83378212
  hypo

SEQ ID NO: 319429 - DNA, 104 bp, Homo sapiens; identical to SEQ ID NO: 268012
  chr15:83379974-83380078
  hypo

SEQ ID NO: 319430 - DNA, 91 bp, Homo sapiens; identical to SEQ ID NO: 268013
  chr15:83440820-83440911
  hypo

SEQ ID NO: 319431 - DNA, 94 bp, Homo sapiens; identical to SEQ ID NO: 268014
  chr15:83459217-83459311
  hypo

SEQ ID NO: 319432 - DNA, 95 bp, Homo sapiens; identical to SEQ ID NO: 268015
  chr15:83523581-83523676
  hypo

SEQ ID NO: 319433 - DNA, 120 bp, Homo sapiens; identical to SEQ ID NO: 216400
  chr15:83572358-83572478
  hypo

SEQ ID NO: 319434 - DNA, 375 bp, Homo sapiens; identical to SEQ ID NO: 291085
  chr15:83654593-83654968
  hypo

SEQ ID NO: 319435 - DNA, 134 bp, Homo sapiens; identical to SEQ ID NO: 224915
  chr15:83680651-83680785
  hypo

SEQ ID NO: 319436 - DNA, 60 bp, Homo sapiens; identical to SEQ ID NO: 268017
  chr15:83698963-83699023
  hypo

SEQ ID NO: 319437 - DNA, 41 bp, Homo sapiens; identical to SEQ ID NO: 216402
  chr15:83827862-83827903
  hypo

SEQ ID NO: 319438 - DNA, 139 bp, Homo sapiens; identical to SEQ ID NO: 291090
  chr15:84034239-84034378
  hypo

SEQ ID NO: 319439 - DNA, 86 bp, Homo sapiens; identical to SEQ ID NO: 291091
  chr15:84034412-84034498
  hypo

SEQ ID NO: 319440 - DNA, 195 bp, Homo sapiens; identical to SEQ ID NO: 126268
  chr15:84323434-84323629
  hypo

SEQ ID NO: 319441 - DNA, 217 bp, Homo sapiens; identical to SEQ ID NO: 268019
  chr15:84827426-84827643
  hypo

SEQ ID NO: 319442 - DNA, 577 bp, Homo sapiens; identical to SEQ ID NO: 291096
  chr15:85143661-85144238
  hypo

SEQ ID NO: 319443 - DNA, 148 bp, Homo sapiens; identical to SEQ ID NO: 204015
  chr15:85200368-85200516
  hypo

SEQ ID NO: 319444 - DNA, 123 bp, Homo sapiens; identical to SEQ ID NO: 291099
  chr15:85258869-85258992
  hypo

SEQ ID NO: 319445 - DNA, 74 bp, Homo sapiens; identical to SEQ ID NO: 216404
  chr15:85383065-85383139
  hypo

SEQ ID NO: 319446 - DNA, 82 bp, Homo sapiens; identical to SEQ ID NO: 268022
  chr15:85401076-85401158
  hypo

SEQ ID NO: 319447 - DNA, 89 bp, Homo sapiens; identical to SEQ ID NO: 216405
  chr15:85478275-85478364
  hypo

SEQ ID NO: 319448 - DNA, 437 bp, Homo sapiens; identical to SEQ ID NO: 291101
  chr15:85525136-85525573
  hypo

SEQ ID NO: 319449 - DNA, 101 bp, Homo sapiens; identical to SEQ ID NO: 268024
  chr15:85680561-85680662
  hypo

SEQ ID NO: 319450 - DNA, 203 bp, Homo sapiens
  chr15:85680889-85681092
  hypo
tgggtgtgtttgcccgggtctgtttagcctcacgcagatgcctgctcccatctgtcactctttaaaatgctcttagtgaaagcctaaaatgtaaacagaggctgtgaaagcatatcacattcctatctttctctccagcctttgtagacctgcctgatttaatgcagcatcttgacaacaactttaaatactggaaaggactg

SEQ ID NO: 319451 - DNA, 66 bp, Homo sapiens; identical to SEQ ID NO: 216407
  chr15:85681122-85681188
  hypo

SEQ ID NO: 319452 - DNA, 151 bp, Homo sapiens; identical to SEQ ID NO: 216408
  chr15:85695659-85695810
  hypo

SEQ ID NO: 319453 - DNA, 120 bp, Homo sapiens; identical to SEQ ID NO: 268027
  chr15:85725512-85725632
  hypo

SEQ ID NO: 319454 - DNA, 42 bp, Homo sapiens; identical to SEQ ID NO: 268028
  chr15:85774090-85774132
  hypo

SEQ ID NO: 319455 - DNA, 32 bp, Homo sapiens; identical to SEQ ID NO: 216409
  chr15:85886327-85886359
  hypo

SEQ ID NO: 319456 - DNA, 31 bp, Homo sapiens; identical to SEQ ID NO: 268030
  chr15:86095826-86095857
  hypo

SEQ ID NO: 319457 - DNA, 31 bp, Homo sapiens; identical to SEQ ID NO: 216410
  chr15:86096037-86096068
  hypo

SEQ ID NO: 319458 - DNA, 116 bp, Homo sapiens; identical to SEQ ID NO: 268032
  chr15:86220154-86220270
  hypo

SEQ ID NO: 319459 - DNA, 367 bp, Homo sapiens; identical to SEQ ID NO: 268033
  chr15:86284347-86284714
  hypo

SEQ ID NO: 319460 - DNA, 97 bp, Homo sapiens; identical to SEQ ID NO: 268034
  chr15:86293194-86293291
  hypo

SEQ ID NO: 319461 - DNA, 166 bp, Homo sapiens; identical to SEQ ID NO: 268035
  chr15:86295446-86295612
  hypo

SEQ ID NO: 319462 - DNA, 333 bp, Homo sapiens; identical to SEQ ID NO: 268036
  chr15:86306285-86306618
  hypo

SEQ ID NO: 319463 - DNA, 363 bp, Homo sapiens; identical to SEQ ID NO: 268037
  chr15:86313542-86313905
  hypo

SEQ ID NO: 319464 - DNA, 98 bp, Homo sapiens; identical to SEQ ID NO: 268038
  chr15:86332522-86332620
  hypo

SEQ ID NO: 319465 - DNA, 42 bp, Homo sapiens; identical to SEQ ID NO: 268039
  chr15:88493813-88493855
  hypo

SEQ ID NO: 319466 - DNA, 266 bp, Homo sapiens; identical to SEQ ID NO: 268040
  chr15:89179287-89179553
  hypo

SEQ ID NO: 319467 - DNA, 219 bp, Homo sapiens; identical to SEQ ID NO: 268041
  chr15:89284711-89284930
  hypo

SEQ ID NO: 319468 - DNA, 136 bp, Homo sapiens; identical to SEQ ID NO: 268042
  chr15:89386710-89386846
  hypo

SEQ ID NO: 319469 - DNA, 227 bp, Homo sapiens; identical to SEQ ID NO: 268043
  chr15:89388857-89389084
  hypo

SEQ ID NO: 319470 - DNA, 186 bp, Homo sapiens; identical to SEQ ID NO: 216411
  chr15:89404008-89404194
  hypo

SEQ ID NO: 319471 - DNA, 35 bp, Homo sapiens; identical to SEQ ID NO: 268045
  chr15:89605894-89605929
  hypo

SEQ ID NO: 319472 - DNA, 139 bp, Homo sapiens; identical to SEQ ID NO: 268046
  chr15:89659579-89659718
  hypo

SEQ ID NO: 319473 - DNA, 45 bp, Homo sapiens; identical to SEQ ID NO: 268047
  chr15:89807367-89807412
  hypo

SEQ ID NO: 319474 - DNA, 40 bp, Homo sapiens; identical to SEQ ID NO: 216412
  chr15:89809026-89809066
  hypo

SEQ ID NO: 319475 - DNA, 67 bp, Homo sapiens
  chr15:89876311-89876378
  hypo
cctgcccctacttaccaggccgagggggatatggccaccgccaatgtggggcaagttccctctgcca

SEQ ID NO: 319476 - DNA, 345 bp, Homo sapiens; identical to SEQ ID NO: 291120
  chr15:89905400-89905745
  hypo

SEQ ID NO: 319477 - DNA, 234 bp, Homo sapiens; identical to SEQ ID NO: 291121
  chr15:89905890-89906124
  hypo

SEQ ID NO: 319478 - DNA, 68 bp, Homo sapiens; identical to SEQ ID NO: 216414
  chr15:90171832-90171900
  hypo

SEQ ID NO: 319479 - DNA, 72 bp, Homo sapiens; identical to SEQ ID NO: 268051
  chr15:90192228-90192300
  hypo

SEQ ID NO: 319480 - DNA, 250 bp, Homo sapiens; identical to SEQ ID NO: 268052
  chr15:90192511-90192761
  hypo

SEQ ID NO: 319481 - DNA, 58 bp, Homo sapiens; identical to SEQ ID NO: 216415
  chr15:90192966-90193024
  hypo

SEQ ID NO: 319482 - DNA, 243 bp, Homo sapiens; identical to SEQ ID NO: 268054
  chr15:90214507-90214750
  hypo

SEQ ID NO: 319483 - DNA, 32 bp, Homo sapiens; identical to SEQ ID NO: 216416
  chr15:90296997-90297029
  hypo

SEQ ID NO: 319484 - DNA, 41 bp, Homo sapiens; identical to SEQ ID NO: 268056
  chr15:90317994-90318035
  hypo

SEQ ID NO: 319485 - DNA, 80 bp, Homo sapiens; identical to SEQ ID NO: 268057
  chr15:90342641-90342721
  hypo

SEQ ID NO: 319486 - DNA, 212 bp, Homo sapiens; identical to SEQ ID NO: 268058
  chr15:90378767-90378979
  hypo

SEQ ID NO: 319487 - DNA, 136 bp, Homo sapiens; identical to SEQ ID NO: 216417
  chr15:90451518-90451654
  hypo

SEQ ID NO: 319488 - DNA, 140 bp, Homo sapiens; identical to SEQ ID NO: 291136
  chr15:90455670-90455810
  hypo

SEQ ID NO: 319489 - DNA, 242 bp, Homo sapiens; identical to SEQ ID NO: 204031
  chr15:90455967-90456209
  hypo

SEQ ID NO: 319490 - DNA, 50 bp, Homo sapiens; identical to SEQ ID NO: 216419
  chr15:90501230-90501280
  hypo

SEQ ID NO: 319491 - DNA, 129 bp, Homo sapiens; identical to SEQ ID NO: 216420
  chr15:90501636-90501765
  hypo

SEQ ID NO: 319492 - DNA, 36 bp, Homo sapiens; identical to SEQ ID NO: 216421
  chr15:90548960-90548996
  hypo

SEQ ID NO: 319493 - DNA, 92 bp, Homo sapiens; identical to SEQ ID NO: 268063
  chr15:90590718-90590810
  hypo

SEQ ID NO: 319494 - DNA, 159 bp, Homo sapiens; identical to SEQ ID NO: 216422
  chr15:90606083-90606242
  hypo

SEQ ID NO: 319495 - DNA, 505 bp, Homo sapiens; identical to SEQ ID NO: 268065
  chr15:90611268-90611773
  hypo

SEQ ID NO: 319496 - DNA, 153 bp, Homo sapiens; identical to SEQ ID NO: 268066
  chr15:90617275-90617428
  hypo

SEQ ID NO: 319497 - DNA, 68 bp, Homo sapiens; identical to SEQ ID NO: 204032
  chr15:90628227-90628295
  hypo

SEQ ID NO: 319498 - DNA, 243 bp, Homo sapiens; identical to SEQ ID NO: 204033
  chr15:90631580-90631823
  hypo

SEQ ID NO: 319499 - DNA, 81 bp, Homo sapiens; identical to SEQ ID NO: 204034
  chr15:90634777-90634858
  hypo

SEQ ID NO: 319500 - DNA, 32 bp, Homo sapiens; identical to SEQ ID NO: 268067
  chr15:90702246-90702278
  hypo

SEQ ID NO: 319501 - DNA, 146 bp, Homo sapiens; identical to SEQ ID NO: 268068
  chr15:90719188-90719334
  hypo

SEQ ID NO: 319502 - DNA, 36 bp, Homo sapiens; identical to SEQ ID NO: 216427
  chr15:90729568-90729604
  hypo

SEQ ID NO: 319503 - DNA, 254 bp, Homo sapiens; identical to SEQ ID NO: 268070
  chr15:90746124-90746378
  hypo

SEQ ID NO: 319504 - DNA, 132 bp, Homo sapiens; identical to SEQ ID NO: 268071
  chr15:90746748-90746880
  hypo

SEQ ID NO: 319505 - DNA, 36 bp, Homo sapiens; identical to SEQ ID NO: 268072
  chr15:90751191-90751227
  hypo

SEQ ID NO: 319506 - DNA, 202 bp, Homo sapiens; identical to SEQ ID NO: 216429
  chr15:90753863-90754065
  hypo

SEQ ID NO: 319507 - DNA, 203 bp, Homo sapiens; identical to SEQ ID NO: 216430
  chr15:90755553-90755756
  hypo

SEQ ID NO: 319508 - DNA, 39 bp, Homo sapiens; identical to SEQ ID NO: 216431
  chr15:90756079-90756118
  hypo

SEQ ID NO: 319509 - DNA, 151 bp, Homo sapiens; identical to SEQ ID NO: 216432
  chr15:90761175-90761326
  hypo

SEQ ID NO: 319510 - DNA, 217 bp, Homo sapiens; identical to SEQ ID NO: 204035
  chr15:90792593-90792810
  hypo

SEQ ID NO: 319511 - DNA, 200 bp, Homo sapiens; identical to SEQ ID NO: 268076
  chr15:90806189-90806389
  hypo

SEQ ID NO: 319512 - DNA, 60 bp, Homo sapiens; identical to SEQ ID NO: 291143
  chr15:90891947-90892007
  hypo

SEQ ID NO: 319513 - DNA, 374 bp, Homo sapiens; identical to SEQ ID NO: 216434
  chr15:90903997-90904371
  hypo

SEQ ID NO: 319514 - DNA, 120 bp, Homo sapiens; identical to SEQ ID NO: 216435
  chr15:91072203-91072323
  hypo

SEQ ID NO: 319515 - DNA, 37 bp, Homo sapiens; identical to SEQ ID NO: 216436
  chr15:91072383-91072420
  hypo

SEQ ID NO: 319516 - DNA, 95 bp, Homo sapiens; identical to SEQ ID NO: 268080
  chr15:91083105-91083200
  hypo

SEQ ID NO: 319517 - DNA, 80 bp, Homo sapiens; identical to SEQ ID NO: 268081
  chr15:91162925-91163005
  hypo

SEQ ID NO: 319518 - DNA, 39 bp, Homo sapiens; identical to SEQ ID NO: 268084
  chr15:91268410-91268449
  hypo

SEQ ID NO: 319519 - DNA, 40 bp, Homo sapiens; identical to SEQ ID NO: 216437
  chr15:91311952-91311992
  hypo

SEQ ID NO: 319520 - DNA, 40 bp, Homo sapiens; identical to SEQ ID NO: 216438
  chr15:91312232-91312272
  hypo

SEQ ID NO: 319521 - DNA, 50 bp, Homo sapiens; identical to SEQ ID NO: 216439
  chr15:91312875-91312925
  hypo

SEQ ID NO: 319522 - DNA, 43 bp, Homo sapiens; identical to SEQ ID NO: 268089
  chr15:91365251-91365294
  hypo

SEQ ID NO: 319523 - DNA, 196 bp, Homo sapiens; identical to SEQ ID NO: 268090
  chr15:91407799-91407995
  hypo

SEQ ID NO: 319524 - DNA, 72 bp, Homo sapiens; identical to SEQ ID NO: 204036
  chr15:91414358-91414430
  hypo

SEQ ID NO: 319525 - DNA, 107 bp, Homo sapiens; identical to SEQ ID NO: 216441
  chr15:91423323-91423430
  hypo

SEQ ID NO: 319526 - DNA, 285 bp, Homo sapiens; identical to SEQ ID NO: 268092
  chr15:91425022-91425307
  hypo

SEQ ID NO: 319527 - DNA, 121 bp, Homo sapiens; identical to SEQ ID NO: 291148
  chr15:91427348-91427469
  hypo

SEQ ID NO: 319528 - DNA, 87 bp, Homo sapiens; identical to SEQ ID NO: 291149
  chr15:91427979-91428066
  hypo

SEQ ID NO: 319529 - DNA, 92 bp, Homo sapiens; identical to SEQ ID NO: 268093
  chr15:91497739-91497831
  hypo

SEQ ID NO: 319530 - DNA, 109 bp, Homo sapiens
  chr15:91500831-91500940
  hypo
aggcatggacagctgggccatgggaccctggaggcagagctggagccacggctgttggaggcgttgcagggcctagtcatggctgaggtggccgcggggggctggcatt

SEQ ID NO: 319531 - DNA, 120 bp, Homo sapiens; identical to SEQ ID NO: 216443
  chr15:91501898-91502018
  hypo

SEQ ID NO: 319532 - DNA, 417 bp, Homo sapiens; identical to SEQ ID NO: 216444
  chr15:91503630-91504047
  hypo

SEQ ID NO: 319533 - DNA, 134 bp, Homo sapiens; identical to SEQ ID NO: 268097
  chr15:91557050-91557184
  hypo

SEQ ID NO: 319534 - DNA, 117 bp, Homo sapiens; identical to SEQ ID NO: 268098
  chr15:91584151-91584268
  hypo

SEQ ID NO: 319535 - DNA, 308 bp, Homo sapiens; identical to SEQ ID NO: 268099
  chr15:91840017-91840325
  hypo

SEQ ID NO: 319536 - DNA, 319 bp, Homo sapiens; identical to SEQ ID NO: 268100
  chr15:92006743-92007062
  hypo

SEQ ID NO: 319537 - DNA, 39 bp, Homo sapiens; identical to SEQ ID NO: 268101
  chr15:92021563-92021602
  hypo

SEQ ID NO: 319538 - DNA, 123 bp, Homo sapiens; identical to SEQ ID NO: 204039
  chr15:92459207-92459330
  hypo

SEQ ID NO: 319539 - DNA, 131 bp, Homo sapiens; identical to SEQ ID NO: 268103
  chr15:92509294-92509425
  hypo

SEQ ID NO: 319540 - DNA, 194 bp, Homo sapiens; identical to SEQ ID NO: 268104
  chr15:92987936-92988130
  hypo

SEQ ID NO: 319541 - DNA, 186 bp, Homo sapiens; identical to SEQ ID NO: 216447
  chr15:93153520-93153706
  hypo

SEQ ID NO: 319542 - DNA, 74 bp, Homo sapiens; identical to SEQ ID NO: 268106
  chr15:93176138-93176212
  hypo

SEQ ID NO: 319543 - DNA, 270 bp, Homo sapiens; identical to SEQ ID NO: 268107
  chr15:93179834-93180104
  hypo

SEQ ID NO: 319544 - DNA, 180 bp, Homo sapiens; identical to SEQ ID NO: 268108
  chr15:93316009-93316189
  hypo

SEQ ID NO: 319545 - DNA, 120 bp, Homo sapiens; identical to SEQ ID NO: 216448
  chr15:93350343-93350463
  hypo

SEQ ID NO: 319546 - DNA, 123 bp, Homo sapiens; identical to SEQ ID NO: 268111
  chr15:93362349-93362472
  hypo

SEQ ID NO: 319547 - DNA, 31 bp, Homo sapiens; identical to SEQ ID NO: 216449
  chr15:93368949-93368980
  hypo

SEQ ID NO: 319548 - DNA, 120 bp, Homo sapiens; identical to SEQ ID NO: 268113
  chr15:93399862-93399982
  hypo

SEQ ID NO: 319549 - DNA, 37 bp, Homo sapiens; identical to SEQ ID NO: 268114
  chr15:93432397-93432434
  hypo

SEQ ID NO: 319550 - DNA, 159 bp, Homo sapiens; identical to SEQ ID NO: 268115
  chr15:93433733-93433892
  hypo

SEQ ID NO: 319551 - DNA, 94 bp, Homo sapiens; identical to SEQ ID NO: 216450
  chr15:93504239-93504333
  hypo

SEQ ID NO: 319552 - DNA, 34 bp, Homo sapiens; identical to SEQ ID NO: 268117
  chr15:93505379-93505413
  hypo

SEQ ID NO: 319553 - DNA, 77 bp, Homo sapiens; identical to SEQ ID NO: 268118
  chr15:93524851-93524928
  hypo

SEQ ID NO: 319554 - DNA, 137 bp, Homo sapiens; identical to SEQ ID NO: 216451
  chr15:93546307-93546444
  hypo

SEQ ID NO: 319555 - DNA, 81 bp, Homo sapiens; identical to SEQ ID NO: 216452
  chr15:93567908-93567989
  hypo

SEQ ID NO: 319556 - DNA, 665 bp, Homo sapiens; identical to SEQ ID NO: 268121
  chr15:93588122-93588787
  hypo

SEQ ID NO: 319557 - DNA, 229 bp, Homo sapiens
  chr15:93595181-93595410
  hypo
aagggcagggctgtgccctacagccgccccctcccccttaccttgctggtggcagtggccgctgagccgggcagcacaggcgtgttggtgacctgcacgttcaggtaattattgtcgatgagcggccaggcgccctgcaccttgcaggtctggaagcggtcggtgaaagtcctgaggtgtgggtccccgaagaggccacagtgcgtgtagttgggggtggccgagtgct

SEQ ID NO: 319558 - DNA, 135 bp, Homo sapiens; identical to SEQ ID NO: 216455
  chr15:93595508-93595643
  hypo

SEQ ID NO: 319559 - DNA, 37 bp, Homo sapiens; identical to SEQ ID NO: 216456
  chr15:93642692-93642729
  hypo

SEQ ID NO: 319560 - DNA, 44 bp, Homo sapiens; identical to SEQ ID NO: 268124
  chr15:93897785-93897829
  hypo

SEQ ID NO: 319561 - DNA, 100 bp, Homo sapiens; identical to SEQ ID NO: 268125
  chr15:93957516-93957616
  hypo

SEQ ID NO: 319562 - DNA, 32 bp, Homo sapiens; identical to SEQ ID NO: 216457
  chr15:94014475-94014507
  hypo

SEQ ID NO: 319563 - DNA, 42 bp, Homo sapiens; identical to SEQ ID NO: 268127
  chr15:94025234-94025276
  hypo

SEQ ID NO: 319564 - DNA, 392 bp, Homo sapiens; identical to SEQ ID NO: 216458
  chr15:94048777-94049169
  hypo

SEQ ID NO: 319565 - DNA, 32 bp, Homo sapiens; identical to SEQ ID NO: 268129
  chr15:94442495-94442527
  hypo

SEQ ID NO: 319566 - DNA, 1065 bp, Homo sapiens; identical to SEQ ID NO: 291161
  chr15:94774274-94775339
  hypo

SEQ ID NO: 319567 - DNA, 220 bp, Homo sapiens; identical to SEQ ID NO: 268131
  chr15:94778462-94778682
  hypo

SEQ ID NO: 319568 - DNA, 43 bp, Homo sapiens; identical to SEQ ID NO: 216459
  chr15:94794563-94794606
  hypo

SEQ ID NO: 319569 - DNA, 76 bp, Homo sapiens; identical to SEQ ID NO: 268133
  chr15:94841669-94841745
  hypo

SEQ ID NO: 319570 - DNA, 381 bp, Homo sapiens; identical to SEQ ID NO: 268134
  chr15:94881644-94882025
  hypo

SEQ ID NO: 319571 - DNA, 76 bp, Homo sapiens; identical to SEQ ID NO: 268135
  chr15:94925967-94926043
  hypo

SEQ ID NO: 319572 - DNA, 56 bp, Homo sapiens; identical to SEQ ID NO: 268136
  chr15:95019094-95019150
  hypo

SEQ ID NO: 319573 - DNA, 212 bp, Homo sapiens; identical to SEQ ID NO: 268137
  chr15:95019400-95019612
  hypo

SEQ ID NO: 319574 - DNA, 390 bp, Homo sapiens; identical to SEQ ID NO: 268138
  chr15:95398763-95399153
  hypo

SEQ ID NO: 319575 - DNA, 89 bp, Homo sapiens; identical to SEQ ID NO: 268139
  chr15:96007651-96007740
  hypo

SEQ ID NO: 319576 - DNA, 34 bp, Homo sapiens; identical to SEQ ID NO: 268140
  chr15:96817336-96817370
  hypo

SEQ ID NO: 319577 - DNA, 81 bp, Homo sapiens; identical to SEQ ID NO: 268141
  chr15:96817400-96817481
  hypo

SEQ ID NO: 319578 - DNA, 837 bp, Homo sapiens; identical to SEQ ID NO: 291166
  chr15:96873421-96874258
  hypo

SEQ ID NO: 319579 - DNA, 212 bp, Homo sapiens; identical to SEQ ID NO: 268142
  chr15:98292427-98292639
  hypo

SEQ ID NO: 319580 - DNA, 136 bp, Homo sapiens; identical to SEQ ID NO: 216461
  chr15:98448107-98448243
  hypo

SEQ ID NO: 319581 - DNA, 268 bp, Homo sapiens; identical to SEQ ID NO: 291185
  chr15:98503609-98503877
  hypo

SEQ ID NO: 319582 - DNA, 168 bp, Homo sapiens; identical to SEQ ID NO: 291186
  chr15:98503946-98504114
  hypo

SEQ ID NO: 319583 - DNA, 56 bp, Homo sapiens; identical to SEQ ID NO: 268144
  chr15:98757743-98757799
  hypo

SEQ ID NO: 319584 - DNA, 34 bp, Homo sapiens; identical to SEQ ID NO: 291188
  chr15:98836393-98836427
  hypo

SEQ ID NO: 319585 - DNA, 139 bp, Homo sapiens; identical to SEQ ID NO: 268145
  chr15:98947754-98947893
  hypo

SEQ ID NO: 319586 - DNA, 276 bp, Homo sapiens; identical to SEQ ID NO: 291189
  chr15:98971414-98971690
  hypo

SEQ ID NO: 319587 - DNA, 259 bp, Homo sapiens; identical to SEQ ID NO: 268146
  chr15:99055007-99055266
  hypo

SEQ ID NO: 319588 - DNA, 123 bp, Homo sapiens; identical to SEQ ID NO: 268147
  chr15:99105788-99105911
  hypo

SEQ ID NO: 319589 - DNA, 212 bp, Homo sapiens; identical to SEQ ID NO: 268148
  chr15:99136066-99136278
  hypo

SEQ ID NO: 319590 - DNA, 180 bp, Homo sapiens; identical to SEQ ID NO: 268149
  chr15:99161542-99161722
  hypo

SEQ ID NO: 319591 - DNA, 56 bp, Homo sapiens; identical to SEQ ID NO: 268150
  chr15:99190074-99190130
  hypo

SEQ ID NO: 319592 - DNA, 45 bp, Homo sapiens; identical to SEQ ID NO: 268151
  chr15:99190189-99190234
  hypo

SEQ ID NO: 319593 - DNA, 33 bp, Homo sapiens; identical to SEQ ID NO: 268152
  chr15:99190315-99190348
  hypo

SEQ ID NO: 319594 - DNA, 510 bp, Homo sapiens; identical to SEQ ID NO: 291193
  chr15:99191216-99191726
  hypo

SEQ ID NO: 319595 - DNA, 210 bp, Homo sapiens; identical to SEQ ID NO: 126471
  chr15:99191748-99191958
  hypo

SEQ ID NO: 319596 - DNA, 582 bp, Homo sapiens; identical to SEQ ID NO: 291195
  chr15:99192162-99192744
  hypo

SEQ ID NO: 319597 - DNA, 110 bp, Homo sapiens; identical to SEQ ID NO: 204064
  chr15:99192792-99192902
  hypo

SEQ ID NO: 319598 - DNA, 265 bp, Homo sapiens; identical to SEQ ID NO: 204065
  chr15:99192941-99193206
  hypo

SEQ ID NO: 319599 - DNA, 223 bp, Homo sapiens; identical to SEQ ID NO: 268153
  chr15:99210728-99210951
  hypo

SEQ ID NO: 319600 - DNA, 76 bp, Homo sapiens; identical to SEQ ID NO: 268154
  chr15:99215806-99215882
  hypo

SEQ ID NO: 319601 - DNA, 37 bp, Homo sapiens; identical to SEQ ID NO: 216469
  chr15:99244847-99244884
  hypo

SEQ ID NO: 319602 - DNA, 63 bp, Homo sapiens; identical to SEQ ID NO: 268157
  chr15:99250992-99251055
  hypo

SEQ ID NO: 319603 - DNA, 103 bp, Homo sapiens
  chr15:99254456-99254559
  hypo
taagatggccattcgaaaacattaagcacagaagaatcccattcaggtaatcttctgttggctggctgtagaactacggagaacatctggagaaacacgtcaa

SEQ ID NO: 319604 - DNA, 224 bp, Homo sapiens; identical to SEQ ID NO: 216470
  chr15:99256135-99256359
  hypo

SEQ ID NO: 319605 - DNA, 124 bp, Homo sapiens; identical to SEQ ID NO: 268160
  chr15:99271450-99271574
  hypo

SEQ ID NO: 319606 - DNA, 209 bp, Homo sapiens; identical to SEQ ID NO: 216471
  chr15:99276212-99276421
  hypo

SEQ ID NO: 319607 - DNA, 341 bp, Homo sapiens; identical to SEQ ID NO: 268162
  chr15:99338922-99339263
  hypo

SEQ ID NO: 319608 - DNA, 38 bp, Homo sapiens; identical to SEQ ID NO: 216472
  chr15:99340602-99340640
  hypo

SEQ ID NO: 319609 - DNA, 180 bp, Homo sapiens; identical to SEQ ID NO: 268164
  chr15:99349404-99349584
  hypo

SEQ ID NO: 319610 - DNA, 172 bp, Homo sapiens; identical to SEQ ID NO: 268165
  chr15:99352651-99352823
  hypo

SEQ ID NO: 319611 - DNA, 120 bp, Homo sapiens; identical to SEQ ID NO: 216473
  chr15:99354751-99354871
  hypo

SEQ ID NO: 319612 - DNA, 69 bp, Homo sapiens; identical to SEQ ID NO: 268167
  chr15:99364726-99364795
  hypo

SEQ ID NO: 319613 - DNA, 159 bp, Homo sapiens; identical to SEQ ID NO: 216474
  chr15:99371126-99371285
  hypo

SEQ ID NO: 319614 - DNA, 93 bp, Homo sapiens; identical to SEQ ID NO: 268169
  chr15:99400735-99400828
  hypo

SEQ ID NO: 319615 - DNA, 42 bp, Homo sapiens; identical to SEQ ID NO: 268170
  chr15:99411823-99411865
  hypo

SEQ ID NO: 319616 - DNA, 136 bp, Homo sapiens; identical to SEQ ID NO: 268171
  chr15:99426895-99427031
  hypo

SEQ ID NO: 319617 - DNA, 85 bp, Homo sapiens; identical to SEQ ID NO: 268172
  chr15:99430912-99430997
  hypo

SEQ ID NO: 319618 - DNA, 79 bp, Homo sapiens; identical to SEQ ID NO: 268173
  chr15:99433317-99433396
  hypo

SEQ ID NO: 319619 - DNA, 120 bp, Homo sapiens; identical to SEQ ID NO: 268174
  chr15:99433456-99433576
  hypo

SEQ ID NO: 319620 - DNA, 494 bp, Homo sapiens; identical to SEQ ID NO: 216475
  chr15:99434483-99434977
  hypo

SEQ ID NO: 319621 - DNA, 108 bp, Homo sapiens; identical to SEQ ID NO: 216476
  chr15:99440185-99440293
  hypo

SEQ ID NO: 319622 - DNA, 211 bp, Homo sapiens; identical to SEQ ID NO: 216477
  chr15:99451866-99452077
  hypo

SEQ ID NO: 319623 - DNA, 61 bp, Homo sapiens
  chr15:99454576-99454637
  hypo
ccacgtcgaagaatcgcatcatcataacctggcaccggtaccggccccctgactacaggga

SEQ ID NO: 319624 - DNA, 335 bp, Homo sapiens
  chr15:99459879-99460214
  hypo
tggcttttcttttccgagaagacaaaatccccatcaggaagtatgccgacggcaccatcgacattgaggaggtcacagagaaccccaagactgaggtgtgtggtggggagaaagggccttgctgcgcctgccccaaaactgaagccgagaagcaggccgagaaggaggaggctgaataccgcaaagtctttgagaatttcctgcacaactccatcttcgtgcccaggtacccagctcatgtgaaatttcagttggcaaaacccactgctcaggccggttctgttgcctttctccccaccaggtagtgtgtaagtcagcagctggggggtacaata

SEQ ID NO: 319625 - DNA, 41 bp, Homo sapiens; identical to SEQ ID NO: 216478
  chr15:99461820-99461861
  hypo

SEQ ID NO: 319626 - DNA, 233 bp, Homo sapiens; identical to SEQ ID NO: 268182
  chr15:99465437-99465670
  hypo

SEQ ID NO: 319627 - DNA, 278 bp, Homo sapiens; identical to SEQ ID NO: 268183
  chr15:99482498-99482776
  hypo

SEQ ID NO: 319628 - DNA, 247 bp, Homo sapiens; identical to SEQ ID NO: 216479
  chr15:99497132-99497379
  hypo

SEQ ID NO: 319629 - DNA, 269 bp, Homo sapiens
  chr15:99504104-99504373
  hypo
gtggccggcgccgaggctcgtggcgtcacgccccccccgccagggctgtacctccgtctccctggtcctgctgctcacaggacagacggctcgctcccctcttccagcagctgctcttacaggcactgatgatttcgctgggaagtgtggcgggcagctttgcctaagcgtggatggctcctcggcaattccagcctaagtgaaggcgctcaggagcctcctgctggaacgcgacccatctctcccaggaccccggggatcttaaggtc

SEQ ID NO: 319630 - DNA, 137 bp, Homo sapiens; identical to SEQ ID NO: 268186
  chr15:99505059-99505196
  hypo

SEQ ID NO: 319631 - DNA, 105 bp, Homo sapiens; identical to SEQ ID NO: 216480
  chr15:99506042-99506147
  hypo

SEQ ID NO: 319632 - DNA, 42 bp, Homo sapiens; identical to SEQ ID NO: 216481
  chr15:99506177-99506219
  hypo

SEQ ID NO: 319633 - DNA, 105 bp, Homo sapiens; identical to SEQ ID NO: 216482
  chr15:99512752-99512857
  hypo

SEQ ID NO: 319634 - DNA, 97 bp, Homo sapiens; identical to SEQ ID NO: 268189
  chr15:99954583-99954680
  hypo

SEQ ID NO: 319635 - DNA, 472 bp, Homo sapiens; identical to SEQ ID NO: 268190
  chr15:99966717-99967189
  hypo

SEQ ID NO: 319636 - DNA, 98 bp, Homo sapiens; identical to SEQ ID NO: 268191
  chr15:99984008-99984106
  hypo

SEQ ID NO: 319637 - DNA, 234 bp, Homo sapiens; identical to SEQ ID NO: 268192
  chr15:100007568-100007802
  hypo

SEQ ID NO: 319638 - DNA, 60 bp, Homo sapiens; identical to SEQ ID NO: 291201
  chr15:100273844-100273904
  hypo

SEQ ID NO: 319639 - DNA, 51 bp, Homo sapiens; identical to SEQ ID NO: 204069
  chr15:100273946-100273997
  hypo

SEQ ID NO: 319640 - DNA, 92 bp, Homo sapiens; identical to SEQ ID NO: 216486
  chr15:100274190-100274282
  hypo

SEQ ID NO: 319641 - DNA, 99 bp, Homo sapiens; identical to SEQ ID NO: 268194
  chr15:100290729-100290828
  hypo

SEQ ID NO: 319642 - DNA, 209 bp, Homo sapiens; identical to SEQ ID NO: 216487
  chr15:100649031-100649240
  hypo

SEQ ID NO: 319643 - DNA, 204 bp, Homo sapiens; identical to SEQ ID NO: 216488
  chr15:100726606-100726810
  hypo

SEQ ID NO: 319644 - DNA, 254 bp, Homo sapiens; identical to SEQ ID NO: 268197
  chr15:100739956-100740210
  hypo

SEQ ID NO: 319645 - DNA, 102 bp, Homo sapiens; identical to SEQ ID NO: 216489
  chr15:100791527-100791629
  hypo

SEQ ID NO: 319646 - DNA, 145 bp, Homo sapiens; identical to SEQ ID NO: 268199
  chr15:100851744-100851889
  hypo

SEQ ID NO: 319647 - DNA, 177 bp, Homo sapiens; identical to SEQ ID NO: 268200
  chr15:100880285-100880462
  hypo

SEQ ID NO: 319648 - DNA, 474 bp, Homo sapiens; identical to SEQ ID NO: 204071
  chr15:100882092-100882566
  hypo

SEQ ID NO: 319649 - DNA, 42 bp, Homo sapiens; identical to SEQ ID NO: 268201
  chr15:101059359-101059401
  hypo

SEQ ID NO: 319650 - DNA, 237 bp, Homo sapiens; identical to SEQ ID NO: 216491
  chr15:101099270-101099507
  hypo

SEQ ID NO: 319651 - DNA, 35 bp, Homo sapiens; identical to SEQ ID NO: 268203
  chr15:101194866-101194901
  hypo

SEQ ID NO: 319652 - DNA, 193 bp, Homo sapiens; identical to SEQ ID NO: 216492
  chr15:101267000-101267193
  hypo

SEQ ID NO: 319653 - DNA, 106 bp, Homo sapiens; identical to SEQ ID NO: 268205
  chr15:101427825-101427931
  hypo

SEQ ID NO: 319654 - DNA, 524 bp, Homo sapiens; identical to SEQ ID NO: 291210
  chr15:101458274-101458798
  hypo

SEQ ID NO: 319655 - DNA, 693 bp, Homo sapiens; identical to SEQ ID NO: 291211
  chr15:101459313-101460006
  hypo

SEQ ID NO: 319656 - DNA, 163 bp, Homo sapiens; identical to SEQ ID NO: 216493
  chr15:101464764-101464927
  hypo

SEQ ID NO: 319657 - DNA, 174 bp, Homo sapiens; identical to SEQ ID NO: 216494
  chr15:101469411-101469585
  hypo

SEQ ID NO: 319658 - DNA, 89 bp, Homo sapiens
  chr15:101535315-101535404
  hypo
cagccctggtacaacaagcagtcacgggccacgcgatgatgtcttagggagatcatgcatgtgccatcgtgttttttgtgtggttgagc

SEQ ID NO: 319659 - DNA, 100 bp, Homo sapiens; identical to SEQ ID NO: 268209
  chr15:101591989-101592089
  hypo

SEQ ID NO: 319660 - DNA, 41 bp, Homo sapiens; identical to SEQ ID NO: 268210
  chr15:101679904-101679945
  hypo

SEQ ID NO: 319661 - DNA, 243 bp, Homo sapiens; identical to SEQ ID NO: 268211
  chr15:101719768-101720011
  hypo

SEQ ID NO: 319662 - DNA, 107 bp, Homo sapiens; identical to SEQ ID NO: 268212
  chr15:101720485-101720592
  hypo

SEQ ID NO: 319663 - DNA, 81 bp, Homo sapiens; identical to SEQ ID NO: 268214
  chr15:101739034-101739115
  hypo

SEQ ID NO: 319664 - DNA, 31 bp, Homo sapiens
  chr15:101785784-101785815
  hypo
taacagacaggggaacgtgaagctgccggtg

SEQ ID NO: 319665 - DNA, 154 bp, Homo sapiens; identical to SEQ ID NO: 224959
  chr15:101791012-101791166
  hypo

SEQ ID NO: 319666 - DNA, 170 bp, Homo sapiens; identical to SEQ ID NO: 268216
  chr15:101809434-101809604
  hypo

SEQ ID NO: 319667 - DNA, 185 bp, Homo sapiens
  chr15:101818142-101818327
  hypo
caagaaagtccccaccgatcctcaaggttctttctccaaaatcaaagccttttaggaaagaacgatcatagtaactgctctaacctgtgttgaattatactgtatcaccacaagacacgatcacagagttacttataatagtgtcctggctgtgttcctctgcctgcaacgccgtcccgcaccct

SEQ ID NO: 319668 - DNA, 175 bp, Homo sapiens
  chr15:101818357-101818532
  hypo
ggtgaccataaccatcctatttgaaatgtgaccttgggtttttctggagcatttgaagtgcacatacctagctgtgtttcaaaagaagggttgggaattgggaatagaactgaaaaaataatgaataggtgacaacatccgagtgctgcgtcaccactgtcgccaggagcagtgt

SEQ ID NO: 319669 - DNA, 338 bp, Homo sapiens; identical to SEQ ID NO: 291215
  chr15:101835610-101835948
  hypo

SEQ ID NO: 319670 - DNA, 187 bp, Homo sapiens; identical to SEQ ID NO: 268218
  chr15:101845352-101845539
  hypo

SEQ ID NO: 319671 - DNA, 465 bp, Homo sapiens; identical to SEQ ID NO: 268219
  chr15:101850124-101850589
  hypo

SEQ ID NO: 319672 - DNA, 196 bp, Homo sapiens; identical to SEQ ID NO: 216497
  chr15:101862667-101862863
  hypo

SEQ ID NO: 319673 - DNA, 116 bp, Homo sapiens; identical to SEQ ID NO: 268221
  chr15:101865103-101865219
  hypo

SEQ ID NO: 319674 - DNA, 424 bp, Homo sapiens; identical to SEQ ID NO: 268222
  chr15:101910612-101911036
  hypo

SEQ ID NO: 319675 - DNA, 288 bp, Homo sapiens; identical to SEQ ID NO: 216498
  chr15:101938605-101938893
  hypo

SEQ ID NO: 319676 - DNA, 33 bp, Homo sapiens; identical to SEQ ID NO: 216499
  chr15:101949373-101949406
  hypo

SEQ ID NO: 319677 - DNA, 32 bp, Homo sapiens; identical to SEQ ID NO: 216500
  chr15:101949766-101949798
  hypo

SEQ ID NO: 319678 - DNA, 137 bp, Homo sapiens; identical to SEQ ID NO: 268226
  chr15:101966967-101967104
  hypo

SEQ ID NO: 319679 - DNA, 42 bp, Homo sapiens; identical to SEQ ID NO: 268227
  chr15:101967391-101967433
  hypo

SEQ ID NO: 319680 - DNA, 129 bp, Homo sapiens; identical to SEQ ID NO: 268228
  chr15:101968052-101968181
  hypo

SEQ ID NO: 319681 - DNA, 214 bp, Homo sapiens; identical to SEQ ID NO: 216501
  chr15:101974813-101975027
  hypo

SEQ ID NO: 319682 - DNA, 114 bp, Homo sapiens; identical to SEQ ID NO: 268230
  chr15:101977435-101977549
  hypo

SEQ ID NO: 319683 - DNA, 39 bp, Homo sapiens; identical to SEQ ID NO: 268231
  chr15:101998574-101998613
  hypo

SEQ ID NO: 319684 - DNA, 172 bp, Homo sapiens; identical to SEQ ID NO: 216502
  chr15:102004885-102005057
  hypo

SEQ ID NO: 319685 - DNA, 213 bp, Homo sapiens; identical to SEQ ID NO: 268233
  chr15:102017128-102017341
  hypo

SEQ ID NO: 319686 - DNA, 236 bp, Homo sapiens; identical to SEQ ID NO: 268234
  chr15:102020331-102020567
  hypo

SEQ ID NO: 319687 - DNA, 283 bp, Homo sapiens; identical to SEQ ID NO: 268235
  chr15:102022132-102022415
  hypo

SEQ ID NO: 319688 - DNA, 75 bp, Homo sapiens; identical to SEQ ID NO: 268236
  chr15:102030590-102030665
  hypo

SEQ ID NO: 319689 - DNA, 166 bp, Homo sapiens; identical to SEQ ID NO: 216504
  chr15:102043329-102043495
  hypo

SEQ ID NO: 319690 - DNA, 161 bp, Homo sapiens; identical to SEQ ID NO: 268238
  chr15:102070179-102070340
  hypo

SEQ ID NO: 319691 - DNA, 156 bp, Homo sapiens; identical to SEQ ID NO: 268239
  chr15:102070859-102071015
  hypo

SEQ ID NO: 319692 - DNA, 504 bp, Homo sapiens; identical to SEQ ID NO: 268240
  chr15:102075402-102075906
  hypo

SEQ ID NO: 319693 - DNA, 36 bp, Homo sapiens; identical to SEQ ID NO: 268241
  chr15:102076394-102076430
  hypo

SEQ ID NO: 319694 - DNA, 580 bp, Homo sapiens; identical to SEQ ID NO: 216505
  chr15:102076807-102077387
  hypo

SEQ ID NO: 319695 - DNA, 152 bp, Homo sapiens; identical to SEQ ID NO: 268244
  chr15:102226031-102226183
  hypo

SEQ ID NO: 319696 - DNA, 174 bp, Homo sapiens; identical to SEQ ID NO: 216506
  chr15:102251172-102251346
  hypo

SEQ ID NO: 319697 - DNA, 119 bp, Homo sapiens; identical to SEQ ID NO: 216507
  chr16:84351-84470
  hypo

SEQ ID NO: 319698 - DNA, 259 bp, Homo sapiens; identical to SEQ ID NO: 268247
  chr16:91469-91728
  hypo

SEQ ID NO: 319699 - DNA, 391 bp, Homo sapiens; identical to SEQ ID NO: 268248
  chr16:94325-94716
  hypo

SEQ ID NO: 319700 - DNA, 93 bp, Homo sapiens; identical to SEQ ID NO: 216509
  chr16:101672-101765
  hypo

SEQ ID NO: 319701 - DNA, 118 bp, Homo sapiens; identical to SEQ ID NO: 216510
  chr16:111055-111173
  hypo

SEQ ID NO: 319702 - DNA, 147 bp, Homo sapiens; identical to SEQ ID NO: 268251
  chr16:111739-111886
  hypo

SEQ ID NO: 319703 - DNA, 54 bp, Homo sapiens; identical to SEQ ID NO: 216511
  chr16:112973-113027
  hypo

SEQ ID NO: 319704 - DNA, 104 bp, Homo sapiens; identical to SEQ ID NO: 216512
  chr16:114337-114441
  hypo

SEQ ID NO: 319705 - DNA, 275 bp, Homo sapiens; identical to SEQ ID NO: 268254
  chr16:114727-115002
  hypo

SEQ ID NO: 319706 - DNA, 293 bp, Homo sapiens; identical to SEQ ID NO: 216514
  chr16:117786-118079
  hypo

SEQ ID NO: 319707 - DNA, 143 bp, Homo sapiens; identical to SEQ ID NO: 216515
  chr16:136642-136785
  hypo

SEQ ID NO: 319708 - DNA, 180 bp, Homo sapiens; identical to SEQ ID NO: 216516
  chr16:142446-142626
  hypo

SEQ ID NO: 319709 - DNA, 120 bp, Homo sapiens; identical to SEQ ID NO: 216517
  chr16:189554-189674
  hypo

SEQ ID NO: 319710 - DNA, 365 bp, Homo sapiens; identical to SEQ ID NO: 291221
  chr16:204521-204886
  hypo

SEQ ID NO: 319711 - DNA, 356 bp, Homo sapiens; identical to SEQ ID NO: 291222
  chr16:231052-231408
  hypo

SEQ ID NO: 319712 - DNA, 40 bp, Homo sapiens; identical to SEQ ID NO: 216518
  chr16:232125-232165
  hypo

SEQ ID NO: 319713 - DNA, 39 bp, Homo sapiens; identical to SEQ ID NO: 268260
  chr16:232585-232624
  hypo

SEQ ID NO: 319714 - DNA, 89 bp, Homo sapiens; identical to SEQ ID NO: 268262
  chr16:255869-255958
  hypo

SEQ ID NO: 319715 - DNA, 36 bp, Homo sapiens; identical to SEQ ID NO: 216519
  chr16:299613-299649
  hypo

SEQ ID NO: 319716 - DNA, 74 bp, Homo sapiens; identical to SEQ ID NO: 216520
  chr16:299877-299951
  hypo

SEQ ID NO: 319717 - DNA, 36 bp, Homo sapiens; identical to SEQ ID NO: 268266
  chr16:310516-310552
  hypo

SEQ ID NO: 319718 - DNA, 354 bp, Homo sapiens; identical to SEQ ID NO: 216521
  chr16:311206-311560
  hypo

SEQ ID NO: 319719 - DNA, 50 bp, Homo sapiens; identical to SEQ ID NO: 268268
  chr16:316210-316260
  hypo

SEQ ID NO: 319720 - DNA, 387 bp, Homo sapiens; identical to SEQ ID NO: 291223
  chr16:325111-325498
  hypo

SEQ ID NO: 319721 - DNA, 53 bp, Homo sapiens; identical to SEQ ID NO: 291224
  chr16:325546-325599
  hypo

SEQ ID NO: 319722 - DNA, 212 bp, Homo sapiens; identical to SEQ ID NO: 224967
  chr16:325890-326102
  hypo

SEQ ID NO: 319723 - DNA, 188 bp, Homo sapiens; identical to SEQ ID NO: 268272
  chr16:334795-334983
  hypo

SEQ ID NO: 319724 - DNA, 136 bp, Homo sapiens; identical to SEQ ID NO: 268274
  chr16:339477-339613
  hypo

SEQ ID NO: 319725 - DNA, 121 bp, Homo sapiens; identical to SEQ ID NO: 268275
  chr16:341171-341292
  hypo

SEQ ID NO: 319726 - DNA, 84 bp, Homo sapiens; identical to SEQ ID NO: 291226
  chr16:347192-347276
  hypo

SEQ ID NO: 319727 - DNA, 382 bp, Homo sapiens; identical to SEQ ID NO: 268276
  chr16:350655-351037
  hypo

SEQ ID NO: 319728 - DNA, 134 bp, Homo sapiens; identical to SEQ ID NO: 216522
  chr16:354255-354389
  hypo

SEQ ID NO: 319729 - DNA, 333 bp, Homo sapiens; identical to SEQ ID NO: 216523
  chr16:356183-356516
  hypo

SEQ ID NO: 319730 - DNA, 190 bp, Homo sapiens; identical to SEQ ID NO: 216524
  chr16:360132-360322
  hypo

SEQ ID NO: 319731 - DNA, 143 bp, Homo sapiens; identical to SEQ ID NO: 216525
  chr16:364475-364618
  hypo

SEQ ID NO: 319732 - DNA, 81 bp, Homo sapiens; identical to SEQ ID NO: 216526
  chr16:364964-365045
  hypo

SEQ ID NO: 319733 - DNA, 261 bp, Homo sapiens; identical to SEQ ID NO: 52626
  chr16:374858-375119
  hypo

SEQ ID NO: 319734 - DNA, 46 bp, Homo sapiens; identical to SEQ ID NO: 268283
  chr16:400402-400448
  hypo

SEQ ID NO: 319735 - DNA, 197 bp, Homo sapiens
  chr16:409998-410195
  hypo
cacgcctctccgggcgctgccgcccccccgttggtgctcatctgtccttctgcccactatccccagcggccccgatacctgcacaccccagtgcccagcggttccccctcgagctggcaaggggacattaaatgggaggtgaggaagtgcggcccccagcgggcagctgcctttgccccggcccacctgcgcccccg

SEQ ID NO: 319736 - DNA, 281 bp, Homo sapiens
  chr16:410714-410995
  hypo
ggtggccgcgtcggcgacgtatgggccccgtggtgctgcggtgcacgacctctgtgctgtcaccccacagtgtccgctcctgcacgtacacgcgtgcacgcgcacacacgtgcacacgcacacacacacaagcacgccccgctttgatctctaaaggagagtccattgacaagctcttaatcgcagctgcccttgcagggcctgtccctgaagtcccgagtaatgggatttggcgcttctgatccatcgggctggccgcttcccgtgtcataggtggacat

SEQ ID NO: 319737 - DNA, 115 bp, Homo sapiens
  chr16:411606-411721
  hypo
gggaccagatgacgggcctcagaaccctatggtagccatggcaaccagcccctttagacaccgccacccccgagccactcctgactgctgagggagcaggcggcactgcccgtgg

SEQ ID NO: 319738 - DNA, 266 bp, Homo sapiens; identical to SEQ ID NO: 268286
  chr16:422074-422340
  hypo

SEQ ID NO: 319739 - DNA, 115 bp, Homo sapiens; identical to SEQ ID NO: 268287
  chr16:426699-426814
  hypo

SEQ ID NO: 319740 - DNA, 109 bp, Homo sapiens
  chr16:428821-428930
  hypo
aaggggacagctgccctctgcgttccaagcgggcaaggctcctaactgtcctcagggaacgcacccacgcctggtgcggggatggagaagggcccgtgggagacatcct

SEQ ID NO: 319741 - DNA, 503 bp, Homo sapiens
  chr16:429073-429576
  hypo
tttgggggcccctccctccgaggttaattaacgacaaaggcttcagaaggaaaagcacagtggacacagcagggggcgggaccctcccctctgctgcagctccccctccccacacactcaggagcgctgcctaggtctcactggagagtggctggctcaggcccaggcccctcctgaggagggagacaggtgagcagcaggctctcctgccagcctcgtgaccctcccatagaggcaccagaagaaacgatacacctgccaatagcagcctgtcggcaaatccaggccaagctccaggggaacctggcgtggcgactgggcaggggctggccaggctccacccacgacgcactccaggctttccaggtgtctgctggccaccaggtcccacccaccaggctgtggcctgataatgtgggcagagaaagctcaagtgctgggagctgaagcaggacagccccccaggaccacggtgtcccggagaaagccggcctctgcggggg

SEQ ID NO: 319742 - DNA, 92 bp, Homo sapiens; identical to SEQ ID NO: 268289
  chr16:439056-439148
  hypo

SEQ ID NO: 319743 - DNA, 78 bp, Homo sapiens; identical to SEQ ID NO: 268290
  chr16:440411-440489
  hypo

SEQ ID NO: 319744 - DNA, 180 bp, Homo sapiens; identical to SEQ ID NO: 216530
  chr16:460351-460531
  hypo

SEQ ID NO: 319745 - DNA, 87 bp, Homo sapiens
  chr16:468014-468101
  hypo
gtattttctaggattttatgtaagtggagtcataaggtacgcactcttttttgtccggcttctctcactgaacctgattgctcccag

SEQ ID NO: 319746 - DNA, 45 bp, Homo sapiens
  chr16:468131-468176
  hypo
tgaaatcctcttcagggttgagccgggctccgcgccgggtcctcc

SEQ ID NO: 319747 - DNA, 78 bp, Homo sapiens
  chr16:501383-501461
  hypo
cttaaacacagaatggggtgttaagatgattggagggcagcagcctattggaatcccgatgaacgtggaaaggtgtca

SEQ ID NO: 319748 - DNA, 120 bp, Homo sapiens; identical to SEQ ID NO: 216531
  chr16:505065-505185
  hypo

SEQ ID NO: 319749 - DNA, 31 bp, Homo sapiens; identical to SEQ ID NO: 268295
  chr16:505485-505516
  hypo

SEQ ID NO: 319750 - DNA, 49 bp, Homo sapiens; identical to SEQ ID NO: 268296
  chr16:512665-512714
  hypo

SEQ ID NO: 319751 - DNA, 305 bp, Homo sapiens; identical to SEQ ID NO: 268297
  chr16:514976-515281
  hypo

SEQ ID NO: 319752 - DNA, 228 bp, Homo sapiens; identical to SEQ ID NO: 28639
  chr16:521925-522153
  hypo

SEQ ID NO: 319753 - DNA, 328 bp, Homo sapiens; identical to SEQ ID NO: 268299
  chr16:524279-524607
  hypo

SEQ ID NO: 319754 - DNA, 568 bp, Homo sapiens; identical to SEQ ID NO: 268300
  chr16:525278-525846
  hypo

SEQ ID NO: 319755 - DNA, 217 bp, Homo sapiens; identical to SEQ ID NO: 268301
  chr16:532454-532671
  hypo

SEQ ID NO: 319756 - DNA, 141 bp, Homo sapiens; identical to SEQ ID NO: 216535
  chr16:533136-533277
  hypo

SEQ ID NO: 319757 - DNA, 163 bp, Homo sapiens; identical to SEQ ID NO: 216536
  chr16:534203-534366
  hypo

SEQ ID NO: 319758 - DNA, 158 bp, Homo sapiens; identical to SEQ ID NO: 216537
  chr16:537529-537687
  hypo

SEQ ID NO: 319759 - DNA, 62 bp, Homo sapiens; identical to SEQ ID NO: 268305
  chr16:541776-541838
  hypo

SEQ ID NO: 319760 - DNA, 103 bp, Homo sapiens; identical to SEQ ID NO: 291229
  chr16:565623-565726
  hypo

SEQ ID NO: 319761 - DNA, 45 bp, Homo sapiens; identical to SEQ ID NO: 268306
  chr16:567191-567236
  hypo

SEQ ID NO: 319762 - DNA, 138 bp, Homo sapiens
  chr16:571576-571714
  hypo
ccacctatgggggccgggcaggagcctctggggcctccactccgacatcaggacctgagatgaccgctgtgtggcgctctctccctgggcagggtggatgccacaggcccctctggctcccaggtgctgcttctccac

SEQ ID NO: 319763 - DNA, 154 bp, Homo sapiens; identical to SEQ ID NO: 216538
  chr16:571959-572113
  hypo

SEQ ID NO: 319764 - DNA, 65 bp, Homo sapiens; identical to SEQ ID NO: 268308
  chr16:573426-573491
  hypo

SEQ ID NO: 319765 - DNA, 251 bp, Homo sapiens; identical to SEQ ID NO: 291230
  chr16:577428-577679
  hypo

SEQ ID NO: 319766 - DNA, 479 bp, Homo sapiens; identical to SEQ ID NO: 268309
  chr16:584707-585186
  hypo

SEQ ID NO: 319767 - DNA, 72 bp, Homo sapiens; identical to SEQ ID NO: 216541
  chr16:587258-587330
  hypo

SEQ ID NO: 319768 - DNA, 165 bp, Homo sapiens; identical to SEQ ID NO: 216542
  chr16:588070-588235
  hypo

SEQ ID NO: 319769 - DNA, 67 bp, Homo sapiens; identical to SEQ ID NO: 216543
  chr16:588487-588554
  hypo

SEQ ID NO: 319770 - DNA, 591 bp, Homo sapiens; identical to SEQ ID NO: 268313
  chr16:594121-594712
  hypo

SEQ ID NO: 319771 - DNA, 666 bp, Homo sapiens; identical to SEQ ID NO: 268314
  chr16:595534-596200
  hypo

SEQ ID NO: 319772 - DNA, 363 bp, Homo sapiens; identical to SEQ ID NO: 268315
  chr16:604992-605355
  hypo

SEQ ID NO: 319773 - DNA, 164 bp, Homo sapiens
  chr16:611786-611950
  hypo
cccagccaggtctgcgtgtgtcctggggagtcggtgtgtagggcctgtgtgagcatgtgagtgccgtgttggagtggtttggaaagcccccccacacctggatgggtggtgagtgtgttatcacggacaagcagccgtgttcaccgtgatggagtgtgaggtgt

SEQ ID NO: 319774 - DNA, 92 bp, Homo sapiens; identical to SEQ ID NO: 216545
  chr16:612320-612412
  hypo

SEQ ID NO: 319775 - DNA, 40 bp, Homo sapiens; identical to SEQ ID NO: 216546
  chr16:613512-613552
  hypo

SEQ ID NO: 319776 - DNA, 45 bp, Homo sapiens; identical to SEQ ID NO: 216547
  chr16:614710-614755
  hypo

SEQ ID NO: 319777 - DNA, 107 bp, Homo sapiens
  chr16:615257-615364
  hypo
cccctgaggctgtctgtggcctgcagagcccccagggcgccgaggtctgacctgcagcgcctgaggtctgactgtctctgcctgcagcatgccggcccctctcctgc

SEQ ID NO: 319778 - DNA, 234 bp, Homo sapiens; identical to SEQ ID NO: 268320
  chr16:617604-617838
  hypo

SEQ ID NO: 319779 - DNA, 785 bp, Homo sapiens; identical to SEQ ID NO: 268321
  chr16:623991-624776
  hypo

SEQ ID NO: 319780 - DNA, 32 bp, Homo sapiens
  chr16:643850-643882
  hypo
aggatggaacagagcgctttgcatagagtgcc

SEQ ID NO: 319781 - DNA, 589 bp, Homo sapiens
  chr16:643994-644583
  hypo
gctccagggtgtgggccagggtggtgggcccgtgttggcccccaggaaccacccgcacagggtgcacacccttccccaagcccagccgctcccgctctgcagggggcatcgaaggtcctggattaaggcagttccaccctcggcaccgtgtccccacaaaccttcctgggagcaagttttcctcccgccacgttggtcagggtgtgtgtgcccgggtcctggaagacttcagaaggggttaatcctggcttgactttatttctctctctgctcttttggggttcagtgttggtggaagctgctgagtgacactccggtcctttgagcctggcaagttgtggggagaaacggagggaggcggttgtggacatggcgaggctaacatcacggtttgctgtggatgttggggcctggtggtcactgagatgtctgtggggccacacgctgcctgctgtacccatgggagcgagggcaccctgtgtgggtgtcccagcttcttcggcttcacgactccctgagctttctccaaacagttacaaacgtttcttctcatctggcttgaagttcgtggctccgaagtggccaattc

SEQ ID NO: 319782 - DNA, 295 bp, Homo sapiens; identical to SEQ ID NO: 268323
  chr16:660723-661018
  hypo

SEQ ID NO: 319783 - DNA, 48 bp, Homo sapiens; identical to SEQ ID NO: 216550
  chr16:666664-666712
  hypo

SEQ ID NO: 319784 - DNA, 77 bp, Homo sapiens; identical to SEQ ID NO: 216551
  chr16:667407-667484
  hypo

SEQ ID NO: 319785 - DNA, 330 bp, Homo sapiens; identical to SEQ ID NO: 216552
  chr16:668074-668404
  hypo

SEQ ID NO: 319786 - DNA, 166 bp, Homo sapiens; identical to SEQ ID NO: 216553
  chr16:670661-670827
  hypo

SEQ ID NO: 319787 - DNA, 291 bp, Homo sapiens; identical to SEQ ID NO: 216554
  chr16:671080-671371
  hypo

SEQ ID NO: 319788 - DNA, 246 bp, Homo sapiens; identical to SEQ ID NO: 216555
  chr16:671426-671672
  hypo

SEQ ID NO: 319789 - DNA, 96 bp, Homo sapiens; identical to SEQ ID NO: 268328
  chr16:672459-672555
  hypo

SEQ ID NO: 319790 - DNA, 324 bp, Homo sapiens
  chr16:672806-673130
  hypo
gtcgctagttttttaaaaatcagatcagttttagaaaacagaaggcagtggaagagtctgtttgtcccgtgctctgccccttgagacacgcagctgagggtgcttagggtgccgttcgttaggcggctgctggtcaccgagagtctccttttggtttctcactccgtggtcatttgggtccctgcggcctcactgtgacccacgccggagcaagcctccgggtcctcctgtgccatcgcccctgcccgtaacccctactcctcagacatggccatcccaggaagtgggggcccgctcagggcagcagccgggaggtgtggccag

SEQ ID NO: 319791 - DNA, 91 bp, Homo sapiens; identical to SEQ ID NO: 268330
  chr16:675966-676057
  hypo

SEQ ID NO: 319792 - DNA, 90 bp, Homo sapiens; identical to SEQ ID NO: 216556
  chr16:677347-677437
  hypo

SEQ ID NO: 319793 - DNA, 35 bp, Homo sapiens
  chr16:677802-677837
  hypo
gcgggaggagggggcgcggctgggctgctggtgct

SEQ ID NO: 319794 - DNA, 63 bp, Homo sapiens; identical to SEQ ID NO: 216557
  chr16:677909-677972
  hypo

SEQ ID NO: 319795 - DNA, 127 bp, Homo sapiens; identical to SEQ ID NO: 216558
  chr16:678084-678211
  hypo

SEQ ID NO: 319796 - DNA, 205 bp, Homo sapiens; identical to SEQ ID NO: 268333
  chr16:684417-684622
  hypo

SEQ ID NO: 319797 - DNA, 145 bp, Homo sapiens; identical to SEQ ID NO: 268334
  chr16:689010-689155
  hypo

SEQ ID NO: 319798 - DNA, 83 bp, Homo sapiens; identical to SEQ ID NO: 268335
  chr16:712804-712887
  hypo

SEQ ID NO: 319799 - DNA, 121 bp, Homo sapiens; identical to SEQ ID NO: 268336
  chr16:714161-714282
  hypo

SEQ ID NO: 319800 - DNA, 41 bp, Homo sapiens; identical to SEQ ID NO: 268337
  chr16:716021-716062
  hypo

SEQ ID NO: 319801 - DNA, 522 bp, Homo sapiens; identical to SEQ ID NO: 268338
  chr16:717199-717721
  hypo

SEQ ID NO: 319802 - DNA, 50 bp, Homo sapiens; identical to SEQ ID NO: 204077
  chr16:717960-718010
  hypo

SEQ ID NO: 319803 - DNA, 119 bp, Homo sapiens; identical to SEQ ID NO: 216561
  chr16:728001-728120
  hypo

SEQ ID NO: 319804 - DNA, 137 bp, Homo sapiens; identical to SEQ ID NO: 216562
  chr16:736747-736884
  hypo

SEQ ID NO: 319805 - DNA, 44 bp, Homo sapiens; identical to SEQ ID NO: 268344
  chr16:737200-737244
  hypo

SEQ ID NO: 319806 - DNA, 255 bp, Homo sapiens
  chr16:740914-741169
  hypo
ttaagtctcaatttcagtattttaatgccatcacctattttaatccccaggtccatcatgacatctggtcatccctagacaagttccgagtgcccccagtcttcccctccttcctcactcctcgacctcgggagcagcctcccaacggctttcctgggtccgtctttcccctttgatcagaaacccgcacagaagtcaggcaccaggtcttctgcctgaggcctctggcagctcccactatgctgtgaatgaacc

SEQ ID NO: 319807 - DNA, 76 bp, Homo sapiens; identical to SEQ ID NO: 291234
  chr16:745046-745122
  hypo

SEQ ID NO: 319808 - DNA, 97 bp, Homo sapiens; identical to SEQ ID NO: 291235
  chr16:745316-745413
  hypo

SEQ ID NO: 319809 - DNA, 111 bp, Homo sapiens; identical to SEQ ID NO: 204079
  chr16:765207-765318
  hypo

SEQ ID NO: 319810 - DNA, 62 bp, Homo sapiens; identical to SEQ ID NO: 224976
  chr16:765586-765648
  hypo

SEQ ID NO: 319811 - DNA, 518 bp, Homo sapiens; identical to SEQ ID NO: 216565
  chr16:767027-767545
  hypo

SEQ ID NO: 319812 - DNA, 95 bp, Homo sapiens; identical to SEQ ID NO: 268347
  chr16:771678-771773
  hypo

SEQ ID NO: 319813 - DNA, 583 bp, Homo sapiens; identical to SEQ ID NO: 268348
  chr16:771803-772386
  hypo

SEQ ID NO: 319814 - DNA, 255 bp, Homo sapiens; identical to SEQ ID NO: 291239
  chr16:778111-778366
  hypo

SEQ ID NO: 319815 - DNA, 121 bp, Homo sapiens; identical to SEQ ID NO: 224978
  chr16:778761-778882
  hypo

SEQ ID NO: 319816 - DNA, 162 bp, Homo sapiens; identical to SEQ ID NO: 268349
  chr16:783583-783745
  hypo

SEQ ID NO: 319817 - DNA, 44 bp, Homo sapiens
  chr16:798359-798403
  hypo
gtggttggacccagactgcctccccgcgtgtggcccatgcccca

SEQ ID NO: 319818 - DNA, 260 bp, Homo sapiens; identical to SEQ ID NO: 268351
  chr16:798433-798693
  hypo

SEQ ID NO: 319819 - DNA, 144 bp, Homo sapiens; identical to SEQ ID NO: 216568
  chr16:809245-809389
  hypo

SEQ ID NO: 319820 - DNA, 355 bp, Homo sapiens
  chr16:810054-810409
  hypo
ggtttcaggggcagggagggggcttctgtggccccaggtcaggaggagcagctcttccatcagcagcaggcagccagcccagatgcgtagggaagacagctcccacttcgccaggccagagagcgcccgggggcagctctgttccagtcgaccctgcgagaaaggggtgtgcgtgtgcctggagctgggccccgtcctgcctccctgacctgtgtgctcccacagccctgagacggacggctcacagccttgcgaggcccacactgcactgggggtcaggcttgtgctcccgggagtcctgtctgggctgcgtggccaccatccagagcctgctgacctgcgactgggggggcca

SEQ ID NO: 319821 - DNA, 477 bp, Homo sapiens; identical to SEQ ID NO: 268354
  chr16:816636-817113
  hypo

SEQ ID NO: 319822 - DNA, 99 bp, Homo sapiens; identical to SEQ ID NO: 268356
  chr16:830347-830446
  hypo

SEQ ID NO: 319823 - DNA, 140 bp, Homo sapiens; identical to SEQ ID NO: 268357
  chr16:834385-834525
  hypo

SEQ ID NO: 319824 - DNA, 410 bp, Homo sapiens; identical to SEQ ID NO: 268358
  chr16:844997-845407
  hypo

SEQ ID NO: 319825 - DNA, 124 bp, Homo sapiens
  chr16:845726-845850
  hypo
ctggtgtccggcatcgcgccagccacgcgcagccgggccacgccccaggccctgctcctcgatgccctctgcctgctcctggacattcttgcacccaagctccgccccgtgagtgccgtccccg

SEQ ID NO: 319826 - DNA, 104 bp, Homo sapiens; identical to SEQ ID NO: 268362
  chr16:876966-877070
  hypo

SEQ ID NO: 319827 - DNA, 307 bp, Homo sapiens; identical to SEQ ID NO: 216572
  chr16:894558-894865
  hypo

SEQ ID NO: 319828 - DNA, 299 bp, Homo sapiens
  chr16:898860-899159
  hypo
aaggctcatctgagcgtcggggcctcgctcctctttgcggctgcgtaatgctcatgggtgagcacacctggtctgttcatctgggctgtccccacctctgggctgctgcaaacgttccggtgcaagcacacccaggtccccgtttcccgctctcccgggtctacatgcagatgtggagttgcggggtcacgtggttcccgtttctagctctcccaggtctacgtgcagacgtggagttgcggggtcacgtggtccccgtttctagctctcccgggtctccgtgcagacgtggagttgcg

SEQ ID NO: 319829 - DNA, 41 bp, Homo sapiens; identical to SEQ ID NO: 216574
  chr16:899189-899230
  hypo

SEQ ID NO: 319830 - DNA, 275 bp, Homo sapiens; identical to SEQ ID NO: 268365
  chr16:902049-902324
  hypo

SEQ ID NO: 319831 - DNA, 96 bp, Homo sapiens; identical to SEQ ID NO: 216575
  chr16:919967-920063
  hypo

SEQ ID NO: 319832 - DNA, 44 bp, Homo sapiens
  chr16:924504-924548
  hypo
gctggctgggcggccgggctctgcggtcactgctcttgtgcacc

SEQ ID NO: 319833 - DNA, 220 bp, Homo sapiens
  chr16:929566-929786
  hypo
cacctggaacaggatctgcagcaccccgtggatgatgcacgcccgccggccgaggaagaggaagaagggcaccaggagctcgatgaagtggttgctgagcgtctcgaagcgatggaaccaccagggtgagtggtgcaggtagtacgccacaggattgggcatcggctgggtctgcagggacaggaggggccgtgaggtgcctggccgatctcggggggcg

SEQ ID NO: 319834 - DNA, 47 bp, Homo sapiens; identical to SEQ ID NO: 216576
  chr16:943646-943693
  hypo

SEQ ID NO: 319835 - DNA, 257 bp, Homo sapiens; identical to SEQ ID NO: 216577
  chr16:945417-945674
  hypo

SEQ ID NO: 319836 - DNA, 37 bp, Homo sapiens; identical to SEQ ID NO: 216578
  chr16:945732-945769
  hypo

SEQ ID NO: 319837 - DNA, 343 bp, Homo sapiens
  chr16:946357-946700
  hypo
gctgtacgtccctgccctcacatgccctgtgcccccaacgacagggagggcgccgaacacccgggagtgttactgtttaaagacctgaagggtgaactgttttaaaaactgagagtcaggtcttctggaggctgggtttgctcagatcacaaaagcaccggagactgtttcccgcttgggctcctgttctgcaaacaggcatgaaaacagccgagggtgtccagctgaccgggcggagaaggccccactcctcaaggcgctgcccacacccaggggagctgctgcttctgatgaaatgcacggctccaccgggcaggggcacaaccaccgccactgctccccc

SEQ ID NO: 319838 - DNA, 207 bp, Homo sapiens; identical to SEQ ID NO: 216579
  chr16:947037-947244
  hypo

SEQ ID NO: 319839 - DNA, 129 bp, Homo sapiens; identical to SEQ ID NO: 216580
  chr16:949645-949774
  hypo

SEQ ID NO: 319840 - DNA, 36 bp, Homo sapiens; identical to SEQ ID NO: 216581
  chr16:962797-962833
  hypo

SEQ ID NO: 319841 - DNA, 85 bp, Homo sapiens
  chr16:963398-963483
  hypo
tgcacggtccagggagatgctcctgagccctgcccgctggacagggtgcgacacccaactcctgccctggcgcctcgcccggtgc

SEQ ID NO: 319842 - DNA, 178 bp, Homo sapiens; identical to SEQ ID NO: 268375
  chr16:966496-966674
  hypo

SEQ ID NO: 319843 - DNA, 126 bp, Homo sapiens; identical to SEQ ID NO: 268376
  chr16:967568-967694
  hypo

SEQ ID NO: 319844 - DNA, 142 bp, Homo sapiens; identical to SEQ ID NO: 268377
  chr16:967906-968048
  hypo

SEQ ID NO: 319845 - DNA, 154 bp, Homo sapiens
  chr16:969055-969209
  hypo
ctgtgtgggcagtcggcatgtcggcgtggactcccaggctgcagaatcaggtgttcccctcaccacacagtctcgggggacagtctgttttcactcgcggcttttccagaccctcccctgacactcggcagtcggcgtttccaggtgtgctcag

SEQ ID NO: 319846 - DNA, 244 bp, Homo sapiens
  chr16:969239-969483
  hypo
ggagggtggtgtgtccaggggctatgtgagctcacacactcacagggaaggaacgtgggggttggcacacctgagaagtgggcgggaatcaccccacatgcccgcggcagggggcagggcagccctgtggcctctgcttcatctctgtcaggacctatggtggacacacacagctcctgccccaccttcatcactgctgagcccccctgggaaagctcatatctccagcgctcgcgtgaggaca

SEQ ID NO: 319847 - DNA, 35 bp, Homo sapiens; identical to SEQ ID NO: 268379
  chr16:969858-969893
  hypo

SEQ ID NO: 319848 - DNA, 266 bp, Homo sapiens; identical to SEQ ID NO: 216582
  chr16:981463-981729
  hypo

SEQ ID NO: 319849 - DNA, 226 bp, Homo sapiens; identical to SEQ ID NO: 216583
  chr16:981843-982069
  hypo

SEQ ID NO: 319850 - DNA, 281 bp, Homo sapiens; identical to SEQ ID NO: 216584
  chr16:982099-982380
  hypo

SEQ ID NO: 319851 - DNA, 171 bp, Homo sapiens; identical to SEQ ID NO: 268381
  chr16:1014778-1014949
  hypo

SEQ ID NO: 319852 - DNA, 465 bp, Homo sapiens
  chr16:1017655-1018120
  hypo
atccccgaccacctcgggcagcctcggtcctcccaggagccgtcacggcccgagaacgccgctgcccagatgtgaaccgggtgtccaggatacgcaggctgcacagtggcgtgaatgaagggcagggctgaactccagggcctacggacaatcgctgcacagccgggccagtggctgaccctgcttcctcgctgtccactgggggtagtggcgttgtcaccaggaggtcagcaccgggcagggtgctacttcagcatctgctcaacgcagtaatcacactagggacccgagtccacacgtcaggaagacaggtgtgtcttcaactctgagccctgtgaaaatgccgctttccgctaacacactccggctcccacagcacagcagggcatgcccgacaccccaggacgcccgcggtatgcacgtctgtgtgcagtgagcacacccctagcacctacacacctcggt

SEQ ID NO: 319853 - DNA, 64 bp, Homo sapiens
  chr16:1019685-1019749
  hypo
cggagccctctgggacggtgactgcccacgcgccccgctggctgcatctcggcctggcaggctc

SEQ ID NO: 319854 - DNA, 366 bp, Homo sapiens; identical to SEQ ID NO: 268384
  chr16:1022298-1022664
  hypo

SEQ ID NO: 319855 - DNA, 177 bp, Homo sapiens; identical to SEQ ID NO: 291241
  chr16:1035474-1035651
  hypo

SEQ ID NO: 319856 - DNA, 221 bp, Homo sapiens; identical to SEQ ID NO: 268385
  chr16:1036853-1037074
  hypo

SEQ ID NO: 319857 - DNA, 44 bp, Homo sapiens
  chr16:1037685-1037729
  hypo
ctacaattttaacacggtggcctgggtagggggccacccacccc

SEQ ID NO: 319858 - DNA, 185 bp, Homo sapiens; identical to SEQ ID NO: 178852
  chr16:1037750-1037935
  hypo

SEQ ID NO: 319859 - DNA, 222 bp, Homo sapiens
  chr16:1061204-1061426
  hypo
ggccagggcagagacgtaggacagagacgcagcgcagagcggccagggcagagatgcagggcagagacacagcgtagagcggccagggcagagacgcagggcagagacgcagggcagagacacagggcagagacgcagggcaaagcggcagggcagagacgcagggcaaagcggcagggcagagacgcagggcaaagcggcagggcagagacgcagggcaaa

SEQ ID NO: 319860 - DNA, 573 bp, Homo sapiens
  chr16:1075861-1076434
  hypo
gtgttcagcacagacgcagccctccactaaaagatatattttccatctgaggttggttgaatccccaaaagtggagttcacggacgcggccggctggctatatcatgcagccataaaagggaaagacgtacagacaccccacagatgagtcccggaaacacggcgcacgatgacacgagccagacacaaaaggacgcacattgtgactccatttacacgacaggtgcagagaaggaaagtccggagacagaacggagcccattggttggcgggggctggggagtggtgggagtgcctggtggtttgggggggactccctttgcgctgataaaaatgttctgaaagcgacagtgaagacgttcgcacagccctgcgaatacggcaaaggcccctcgagctgcgtgcttccgtggctgggtggcgtgctgtgtgaatcacatctcagtagagctgttaggtaaagaatgtaagcatctcattcattatttttatattgactgcacgctgccacgataatattgtggataaactgggtgaagtgaaatattagcatgaatttgaatttcacgtctt

SEQ ID NO: 319861 - DNA, 227 bp, Homo sapiens
  chr16:1077659-1077886
  hypo
tgacggtggtgggggcagggagggtggcgtccttccgtccctaagcgcacgcgggccgggcgctgctgaccacatcaccgtagtgaatgacttctttctcacggcggctggcgtcctattggctattaaatataatcattacaataattattaaatataagaatgtcatattgtattatattcttttacggatgggcaaggtgaggaccttgggccaggcccttcct

SEQ ID NO: 319862 - DNA, 48 bp, Homo sapiens
  chr16:1077949-1077997
  hypo
cccgctggccggagcaggcccggccactggacacggagcggcagaggc

SEQ ID NO: 319863 - DNA, 119 bp, Homo sapiens; identical to SEQ ID NO: 216587
  chr16:1081654-1081773
  hypo

SEQ ID NO: 319864 - DNA, 36 bp, Homo sapiens; identical to SEQ ID NO: 268392
  chr16:1095307-1095343
  hypo

SEQ ID NO: 319865 - DNA, 399 bp, Homo sapiens; identical to SEQ ID NO: 268393
  chr16:1110841-1111240
  hypo

SEQ ID NO: 319866 - DNA, 95 bp, Homo sapiens
  chr16:1111876-1111971
  hypo
ggtcccaaaagcaacgaccggcaccttgtaaggaggctgctgacagcagggagaagtcgggcgcgtgacgtcagaggcagagactggagagaggc

SEQ ID NO: 319867 - DNA, 49 bp, Homo sapiens
  chr16:1112017-1112066
  hypo
ctcccctggaggcttcggagggagtgtggccctgcggacacctcgatct

SEQ ID NO: 319868 - DNA, 255 bp, Homo sapiens; identical to SEQ ID NO: 268395
  chr16:1112295-1112550
  hypo

SEQ ID NO: 319869 - DNA, 59 bp, Homo sapiens
  chr16:1113830-1113889
  hypo
cggtgagccggcgtcgtggccacagccttcacactcccagccgctgcaggtccccgttt

SEQ ID NO: 319870 - DNA, 718 bp, Homo sapiens
  chr16:1129367-1130085
  hypo
ctctgtgcatgtcgctgccgctcctggtgttcgcggacgtgcaggagggcggtacctgcaacgccagctggccggagcccgtggggctgtggggcgccgtcttcatcatctacacggccgtgctgggcttcttcgcgccgctgctggtcatctgcctgtgctacctgctcatcgtggtgaaggtgagggcggcgggcgtgcgcgtgggctgcgtgcggcggcgctcggagcggaaggtgacgcgcatggtgttggtggtggtgctggtgtttgcgggatgttggctgcccttcttcaccgtcaacatcgtcaacctggccgtggcgctgccccaggagcccgcctccgccggcctctacttcttcgtggtcatcctctcctacgccaacagctgtgccaaccccgtcctctacggcttcctctctgacaacttccgccagagcttccagaaggttctgtgcctccgcaagggctctggtgccaaggacgctgacgccacggagccgcgtccagacaggatccggcagcagcaggaggccacgccacccgcgcaccgcgccgcagccaacgggcttatgcagaccagcaagctgtgagagtgcaggcggggggtgggcggccccgtgtcacccccaggagcggaggttgcactgcggtgacccccacccatgacctgccagtcaggatgctccccggcggtggtgtgaggacagagctg

SEQ ID NO: 319871 - DNA, 87 bp, Homo sapiens
  chr16:1154984-1155071
  hypo
cagctccgtctccacgtagtcgcccacgaggtaagggtgccagcattgctcgtggtactgcaggttgttggtggcgatggagaaggg

SEQ ID NO: 319872 - DNA, 79 bp, Homo sapiens
  chr16:1187523-1187602
  hypo
cactccaccaagagtgaaaacgtccattgcactgaaagctggagcccctcgctccccaccccacccccagaagcggccc

SEQ ID NO: 319873 - DNA, 339 bp, Homo sapiens
  chr16:1187632-1187971
  hypo
aggccccaggatggcgtgtgagcgggatcagccgcatgcgctgttttcctctggcttctcccacccggcacaatggccttgacattcaccgcacttccgcgtccgcagctcactcatccctggtgcggttgagtcatgtctcatggtctgaacgtccgcggtggtttagctgttctcctgtcggtgaacacgtgggccgtttccagctcggggctactgtaagtcaagctgccacgagcactgacgtagggaacagcgtgtgacacatgcttccatttatccagggtcaacacctacccgtagagagacgggatcatgcacccaatacacatttttttt

SEQ ID NO: 319874 - DNA, 109 bp, Homo sapiens; identical to SEQ ID NO: 216588
  chr16:1198574-1198683
  hypo

SEQ ID NO: 319875 - DNA, 227 bp, Homo sapiens; identical to SEQ ID NO: 268402
  chr16:1199857-1200084
  hypo

SEQ ID NO: 319876 - DNA, 118 bp, Homo sapiens
  chr16:1207089-1207207
  hypo
cgcgttcgcctgcgacacagctgccgccgtcccggcacacggacggggcggggcccccgggaatgcttggaggccaggaagggggaccctgcttcggtccctgcgagagcgagggagg

SEQ ID NO: 319877 - DNA, 98 bp, Homo sapiens
  chr16:1207528-1207626
  hypo
ggagtgtgagagggcacccgtctggaaagggccagtcccgcctgcgcccgcctccccgggctccacgtgccccgcaggcctctcgtgggcaggacggg

SEQ ID NO: 319878 - DNA, 211 bp, Homo sapiens; identical to SEQ ID NO: 268406
  chr16:1214594-1214805
  hypo

SEQ ID NO: 319879 - DNA, 162 bp, Homo sapiens
  chr16:1215023-1215185
  hypo
cgtgaaggacacctgtgcaggggtgggaacagtggcgctcacctgaccggggcaaggagggggctgatggggcaggaggagcggagaaggtgctggcatgtctgggcccgggagtgggtgggggtgcggcaggcaccagctgaccaccgtggcgcgattgct

SEQ ID NO: 319880 - DNA, 408 bp, Homo sapiens
  chr16:1216537-1216945
  hypo
ctcgcggtggtgcagccccagcagcgatgggttccagaatgctttcctcgccccgagaggaaaccctgcagtcagctgtctcggcgtctcccgctggccttttccgtctccgaggttggcctgttctggacgttccctgtatatgggatcccacgtggtgtggactcctgcaccggcttctctcgagctttgtgcgggccggtcgtccatcctccccgcagagccctgacccttccacggttagatgcgccctcatgtagacgggctgcggtgtttatctcttcaccgctggtggatgtctgggccgtttcaccctttgctgctgttcatggcgctgccgggccgtccctgctccaggttcgggggaaaccctggcttcgtgtctcttggacgtaaatctgggagcaa

SEQ ID NO: 319881 - DNA, 207 bp, Homo sapiens
  chr16:1216975-1217182
  hypo
gtcctcggaggaatggccaggctgttttccaaagcggtgcccacctgttgacccacctctcgcccccagcttttgggtccctgagtggtggttcagcagcagtgagtgctgacaaccacacccagccggagtccagggctgtgggagtggacacggcccttcctttcctcgccgaccctttggggcgtctcccatcgggaaatggca

SEQ ID NO: 319882 - DNA, 35 bp, Homo sapiens
  chr16:1218140-1218175
  hypo
agggcggcctctggtgcccccgccccctccagttg

SEQ ID NO: 319883 - DNA, 348 bp, Homo sapiens; identical to SEQ ID NO: 216590
  chr16:1236137-1236485
  hypo

SEQ ID NO: 319884 - DNA, 211 bp, Homo sapiens
  chr16:1237141-1237352
  hypo
ggtcgtcttcttgagcaaattggaaaagtaaggttgagcgttcctgagaatgaggggccgggaggggaggaggcggccagcgccgcgtggggccgtgggcagagcggacagggagggagcggcctcagccttggcaccctctacccagggcagggaggggtttgcccagccaggggtgggtacagagaggggagcacgtggctaagagtcc

SEQ ID NO: 319885 - DNA, 73 bp, Homo sapiens; identical to SEQ ID NO: 268412
  chr16:1247873-1247946
  hypo

SEQ ID NO: 319886 - DNA, 139 bp, Homo sapiens
  chr16:1248213-1248352
  hypo
ggtcatcccgagcccgagatgccacgtggtcagacctgccgcagccagttccctgcctcggccagtcccctgcctccactcctgcccctccacaccccagccctccaaaagcagcagacctgctgccctgggatggttg

SEQ ID NO: 319887 - DNA, 102 bp, Homo sapiens; identical to SEQ ID NO: 216592
  chr16:1248922-1249024
  hypo

SEQ ID NO: 319888 - DNA, 203 bp, Homo sapiens; identical to SEQ ID NO: 216593
  chr16:1250534-1250737
  hypo

SEQ ID NO: 319889 - DNA, 320 bp, Homo sapiens
  chr16:1251835-1252155
  hypo
gtacgtgggccacatattccgcaaggtcaagcggcgcagcttgcgcctctacgcccgctggcagagccgctggcgcaagaaggtggaccccagtgctgtgcaaggccagggtcccgggcaccgccagcgccgggcaggcaggcacacagcctcggtgcaccacctggtctaccaccaccatcaccaccaccaccaccactaccatttcagccatggcagcccccgcaggcccggccccgagccaggcgcctgcgacaccaggctggtccgagctggcgcgcccccctcgccaccttccccaggccgcggaccccccgacg

SEQ ID NO: 319890 - DNA, 196 bp, Homo sapiens
  chr16:1253116-1253312
  hypo
tgccgggatgctgtgtgccctcatgcgctggtacccagggcgtgcagacgagtgtcgggcgcatgctcctagcccttgaattgtgggagtccagccgctgtgtgttataagaggcacacgggctccaaagacagcacgaaaacatcacaggacggctcgatggtcattttcatgtcagtttcgtgttggagtaacc

SEQ ID NO: 319891 - DNA, 83 bp, Homo sapiens; identical to SEQ ID NO: 268417
  chr16:1254185-1254268
  hypo

SEQ ID NO: 319892 - DNA, 250 bp, Homo sapiens
  chr16:1262512-1262762
  hypo
actttccccagcccaggtaccggccctgtcccgcatgcctcaggccccgcttctgcggccgctgctcggggaagggcgggcatcccaggcctgctggggtcctccgcagggtgggcacaggcagccggaggtgctgggcgtgtggcgtgaggaggggctgcgctcgcccgccagtgtccgggctgctgtgtgcgtgcacgcgtgcggctctgcccggctcacagtctgcctgcatctccgccgtgcgccg

SEQ ID NO: 319893 - DNA, 100 bp, Homo sapiens; identical to SEQ ID NO: 216595
  chr16:1265050-1265150
  hypo

SEQ ID NO: 319894 - DNA, 239 bp, Homo sapiens; identical to SEQ ID NO: 216596
  chr16:1265333-1265572
  hypo

SEQ ID NO: 319895 - DNA, 58 bp, Homo sapiens
  chr16:1267126-1267184
  hypo
acacgcctcctgggcgtcctcacccggccctgcttccggagccttttctgcacgaggc

SEQ ID NO: 319896 - DNA, 35 bp, Homo sapiens
  chr16:1267214-1267249
  hypo
ccaggcttgtgacacgtgtgcggacgtgcacacag

SEQ ID NO: 319897 - DNA, 217 bp, Homo sapiens
  chr16:1267479-1267696
  hypo
agccctgcccctgccgggttccacttcaggcagcccagtccctgcagggccctcccccgggccctgtcccgacggtgggtgtggcgttgccacagtccagtgtctgtccaccaggtaagcttgattttggtcagccggcgcctactcatcccccgccacgcgcagtcacagacacacacaataatgattcttccatggcagccgccaggcctgatga

SEQ ID NO: 319898 - DNA, 94 bp, Homo sapiens; identical to SEQ ID NO: 216597
  chr16:1268565-1268659
  hypo

SEQ ID NO: 319899 - DNA, 152 bp, Homo sapiens; identical to SEQ ID NO: 216598
  chr16:1270045-1270197
  hypo

SEQ ID NO: 319900 - DNA, 353 bp, Homo sapiens; identical to SEQ ID NO: 216599
  chr16:1270449-1270802
  hypo

SEQ ID NO: 319901 - DNA, 75 bp, Homo sapiens
  chr16:1271080-1271155
  hypo
cctgacttgggtcccgtcgtgagcagaaaggcccggggaggatgacggcccaggccctggttctctgcccagcga

SEQ ID NO: 319902 - DNA, 39 bp, Homo sapiens; identical to SEQ ID NO: 216600
  chr16:1273470-1273509
  hypo

SEQ ID NO: 319903 - DNA, 39 bp, Homo sapiens; identical to SEQ ID NO: 268426
  chr16:1341419-1341458
  hypo

SEQ ID NO: 319904 - DNA, 133 bp, Homo sapiens; identical to SEQ ID NO: 268427
  chr16:1365759-1365892
  hypo

SEQ ID NO: 319905 - DNA, 142 bp, Homo sapiens; identical to SEQ ID NO: 216601
  chr16:1367993-1368135
  hypo

SEQ ID NO: 319906 - DNA, 33 bp, Homo sapiens; identical to SEQ ID NO: 268429
  chr16:1369126-1369159
  hypo

SEQ ID NO: 319907 - DNA, 193 bp, Homo sapiens; identical to SEQ ID NO: 216602
  chr16:1369189-1369382
  hypo

SEQ ID NO: 319908 - DNA, 100 bp, Homo sapiens; identical to SEQ ID NO: 268431
  chr16:1370327-1370427
  hypo

SEQ ID NO: 319909 - DNA, 83 bp, Homo sapiens; identical to SEQ ID NO: 268432
  chr16:1374351-1374434
  hypo

SEQ ID NO: 319910 - DNA, 144 bp, Homo sapiens; identical to SEQ ID NO: 291244
  chr16:1384098-1384242
  hypo

SEQ ID NO: 319911 - DNA, 145 bp, Homo sapiens; identical to SEQ ID NO: 268433
  chr16:1390248-1390393
  hypo

SEQ ID NO: 319912 - DNA, 55 bp, Homo sapiens
  chr16:1391650-1391705
  hypo
ccaccggggccacacggctggcaacacctggcgggatcaggatttggacctgaac

SEQ ID NO: 319913 - DNA, 399 bp, Homo sapiens; identical to SEQ ID NO: 216603
  chr16:1397859-1398258
  hypo

SEQ ID NO: 319914 - DNA, 87 bp, Homo sapiens
  chr16:1400758-1400845
  hypo
aggaacagcaggccgccgggtcacactgctgtggggcccctggactcacctacgatgcagaaggtggcagcaaacgcttccacgcag

SEQ ID NO: 319915 - DNA, 74 bp, Homo sapiens; identical to SEQ ID NO: 268437
  chr16:1406894-1406968
  hypo

SEQ ID NO: 319916 - DNA, 51 bp, Homo sapiens
  chr16:1407319-1407370
  hypo
aacagaaggccaggccgggccagcaccccagaggtctcagtggcattagcc

SEQ ID NO: 319917 - DNA, 274 bp, Homo sapiens
  chr16:1407936-1408210
  hypo
gtcccctccctgcctccacggcccaagccccagccttccccacagtcctggaggatggcccgtggctgacagtctcggtgggcgctgtgttaaggtggcgtccccagccaggtcccgactccccagcttaaagaacagggtggctgctgtggcttgactcacgagttgccactggccttgatgtgtacacgcccttgctctagcactgcctggggctggcctggctggagggtagggacgctgcacgccttccctcttcccccaggcgctggtg

SEQ ID NO: 319918 - DNA, 178 bp, Homo sapiens; identical to SEQ ID NO: 268440
  chr16:1414467-1414645
  hypo

SEQ ID NO: 319919 - DNA, 145 bp, Homo sapiens; identical to SEQ ID NO: 268441
  chr16:1416341-1416486
  hypo

SEQ ID NO: 319920 - DNA, 145 bp, Homo sapiens
  chr16:1424294-1424439
  hypo
ggccctgccctgtcgtccctgctggctgcaagttcttggaccctcactgatgcctggtactggacagtgtgctgctgaggcctgctctgagacaggcaaagccacccctgcctgtccctgaagggccctagacccccttcctcct

SEQ ID NO: 319921 - DNA, 185 bp, Homo sapiens; identical to SEQ ID NO: 216606
  chr16:1424469-1424654
  hypo

SEQ ID NO: 319922 - DNA, 492 bp, Homo sapiens
  chr16:1424908-1425400
  hypo
gggtgacttctgaagaagaacgctgccctagccgcacatgagatttgtcgggaacacagctgtggggcacgtggcctgcacctcacccctctgcccaggcctccgcttctcctccctggaagcagctggcaccagtcagcgccacggggaccatgggagcaaccacagggtggcgggtggcccctcgcccgaggcctggcgctcggcggtcacaccccccgagccccccagggcagccggagtatcctcgtgccgcggtggtggccccagcggagcacaggcagaggctggcgtggacgtggcgcagctggcaggtccgggcctctgaacttcaccccgaatctggccgcgctcagcagccacactgtgtggagaccgtgctccaccacccagagcggcaggcgggagagaagcctggctcgggagtggacggtggactccagaggccgcaaggcagaggccacccccaccccactccaccgcacagcacga

SEQ ID NO: 319923 - DNA, 428 bp, Homo sapiens
  chr16:1425684-1426112
  hypo
aagaccccctggggaccaggaacccacagtagcatccgaaaatgcctcagccctcaaggatgctcatcggcggagccaaaggcaggccttgggccagccgcacccagagccattcactcctctccttcccattcacaggacggtggcgtccctgagcggacatccaccctggcctgcagggtgggccagccctcccggtcgctgtcatccacttgacgttctcaggccatggctgaagagggcaagacctcaaagcctgactgaagtcgtgctgagcagcagagccgagacactgcaggcagtggcagaggaccacgcactgagcggccttggacaggtggctccaaggctgaaagtgagatctgtggcgggcagggcctcttccctcctccctccagggctggggcgctcctcctccctcactccaa

SEQ ID NO: 319924 - DNA, 243 bp, Homo sapiens; identical to SEQ ID NO: 204080
  chr16:1429037-1429280
  hypo

SEQ ID NO: 319925 - DNA, 248 bp, Homo sapiens; identical to SEQ ID NO: 268447
  chr16:1435412-1435660
  hypo

SEQ ID NO: 319926 - DNA, 72 bp, Homo sapiens; identical to SEQ ID NO: 216610
  chr16:1462654-1462726
  hypo

SEQ ID NO: 319927 - DNA, 32 bp, Homo sapiens; identical to SEQ ID NO: 216611
  chr16:1465337-1465369
  hypo

SEQ ID NO: 319928 - DNA, 34 bp, Homo sapiens; identical to SEQ ID NO: 268450
  chr16:1466431-1466465
  hypo

SEQ ID NO: 319929 - DNA, 120 bp, Homo sapiens; identical to SEQ ID NO: 216612
  chr16:1472168-1472288
  hypo

SEQ ID NO: 319930 - DNA, 150 bp, Homo sapiens; identical to SEQ ID NO: 268452
  chr16:1484608-1484758
  hypo

SEQ ID NO: 319931 - DNA, 41 bp, Homo sapiens
  chr16:1487860-1487901
  hypo
cggctgctcagagccgggagatggccactcagctcctttaa

SEQ ID NO: 319932 - DNA, 42 bp, Homo sapiens
  chr16:1488051-1488093
  hypo
agcaccagctctccatgcatctcctgccgggccagctcgcca

SEQ ID NO: 319933 - DNA, 183 bp, Homo sapiens
  chr16:1488497-1488680
  hypo
tcgagcactctgctcgggggaggcaaggtcattccctgctgagtcggccactgcggccccctcctgagtgggacatcaggggtccccccgcctgacagcacctgaggccccaggacacccaccaggctttctcctcggccagtaggacacggttcagcgacgcctggttctgctgcacaaact

SEQ ID NO: 319934 - DNA, 103 bp, Homo sapiens
  chr16:1488710-1488813
  hypo
cctggcactgctccaggaggtggctctcctgccagggggtggaggccgccctgagacctgcaccccggccccggccccacctgcccgccgcccgcccggcccc

SEQ ID NO: 319935 - DNA, 245 bp, Homo sapiens
  chr16:1493329-1493574
  hypo
ctggacctaggcccgggtctggcacctgcccctggagtccacccagctccggcaccactggcccctgggagctctgggcctgggcagcaggggtgagctgggctccaggcccagaagcagctgcccccaacacccaggaaaggggcagctcgacctgtgggtgggggagccgctcacctccggcgcctccttttcgggggcctgggctgccggccgcgcctcctgctgcaactgcctcagctctg

SEQ ID NO: 319936 - DNA, 577 bp, Homo sapiens
  chr16:1493691-1494268
  hypo
ccaccctggccggggcgagagtgggcgagtctggcggtgcccgccgtggaggcggaggcggcggcgacgtggtcctcccccgccagcaccccctgcagggctcaccactgctccagctggttccagtgcttggcggtgtcctgctcggggacagaggccgtggatgtcggatggctggactcatacctctccgagagctcctccaggctcaagggctcggggctggccaggcctcctgccaggaggagccccaggtcttccagggtgacggctctcagctgggaaggggccgatgcccctgagggtccactgtcagccaactctacaaggaggcatcttgggagcttgccccttggggcccggcccccactggagcttacgggaacaaggccccaaacccccgcaggaccctcgcccaccacccagagctcaacgcgtctccttgggtcacacaggatccagacgggcttggctcagacaagtccagggccctgcctgaagacacacagcactgggcggcaggaacaagcgagctggagggagcccggggtcagaagcagagcggtccccaccctca

SEQ ID NO: 319937 - DNA, 849 bp, Homo sapiens; identical to SEQ ID NO: 268457
  chr16:1510691-1511540
  hypo

SEQ ID NO: 319938 - DNA, 156 bp, Homo sapiens; identical to SEQ ID NO: 216616
  chr16:1523650-1523806
  hypo

SEQ ID NO: 319939 - DNA, 36 bp, Homo sapiens; identical to SEQ ID NO: 268459
  chr16:1536441-1536477
  hypo

SEQ ID NO: 319940 - DNA, 334 bp, Homo sapiens; identical to SEQ ID NO: 268460
  chr16:1541164-1541498
  hypo

SEQ ID NO: 319941 - DNA, 396 bp, Homo sapiens; identical to SEQ ID NO: 268461
  chr16:1557352-1557748
  hypo

SEQ ID NO: 319942 - DNA, 232 bp, Homo sapiens; identical to SEQ ID NO: 216618
  chr16:1560777-1561009
  hypo

SEQ ID NO: 319943 - DNA, 42 bp, Homo sapiens; identical to SEQ ID NO: 268463
  chr16:1575251-1575293
  hypo

SEQ ID NO: 319944 - DNA, 166 bp, Homo sapiens; identical to SEQ ID NO: 268464
  chr16:1575857-1576023
  hypo

SEQ ID NO: 319945 - DNA, 599 bp, Homo sapiens
  chr16:1576053-1576652
  hypo
tcctgtacagctgctcggcgtcctcctgaggaatgaggatgggcaggtgtcgtgcagcctccacacacccacgtctcaaacacactgttccacgccaggccaccggtcaccgcaccttcccacaccgccaagcacactgacacacggggccgctgtgggcacagcaaacgccacacacccacggggcatccccgtcccacggctggagagtgagatgcaccaccaaggggtaccccacctcccacagcccccctcccacagccccccctcccacagcctccccagaagtcccgtgctcagccctgctgacctgggggtctctcgggcgctctgttccaggcccacacacctgacaggcacacaccctggagagccggcggtcgcctagcctccacccacctcacctccaccgccgctgtctgcccagctctcctgggtcatgcctctcggctctgcccacatcagtgcaggctcaggccggtgggcgtgcctcctccttccccagggggccgtggctgtggcaggcgtggtgccttcccacccaccccatggcgggcgcccctcaccagcatgcccagctgcgtggccagcacggccac

SEQ ID NO: 319946 - DNA, 195 bp, Homo sapiens; identical to SEQ ID NO: 268466
  chr16:1578983-1579178
  hypo

SEQ ID NO: 319947 - DNA, 118 bp, Homo sapiens; identical to SEQ ID NO: 268467
  chr16:1579423-1579541
  hypo

SEQ ID NO: 319948 - DNA, 224 bp, Homo sapiens; identical to SEQ ID NO: 216619
  chr16:1580445-1580669
  hypo

SEQ ID NO: 319949 - DNA, 127 bp, Homo sapiens; identical to SEQ ID NO: 216620
  chr16:1580699-1580826
  hypo

SEQ ID NO: 319950 - DNA, 67 bp, Homo sapiens; identical to SEQ ID NO: 216621
  chr16:1613977-1614044
  hypo

SEQ ID NO: 319951 - DNA, 251 bp, Homo sapiens; identical to SEQ ID NO: 268470
  chr16:1614793-1615044
  hypo

SEQ ID NO: 319952 - DNA, 55 bp, Homo sapiens
  chr16:1642685-1642740
  hypo
gtgtcccggcagagcgactggtggagggacaggtgtcccggcagagtgactggtg

SEQ ID NO: 319953 - DNA, 176 bp, Homo sapiens; identical to SEQ ID NO: 268472
  chr16:1651461-1651637
  hypo

SEQ ID NO: 319954 - DNA, 383 bp, Homo sapiens; identical to SEQ ID NO: 216622
  chr16:1652262-1652645
  hypo

SEQ ID NO: 319955 - DNA, 434 bp, Homo sapiens; identical to SEQ ID NO: 224987
  chr16:1660449-1660883
  hypo

SEQ ID NO: 319956 - DNA, 700 bp, Homo sapiens; identical to SEQ ID NO: 224988
  chr16:1664481-1665181
  hypo

SEQ ID NO: 319957 - DNA, 176 bp, Homo sapiens; identical to SEQ ID NO: 268474
  chr16:1666426-1666602
  hypo

SEQ ID NO: 319958 - DNA, 196 bp, Homo sapiens; identical to SEQ ID NO: 216624
  chr16:1668009-1668205
  hypo

SEQ ID NO: 319959 - DNA, 150 bp, Homo sapiens; identical to SEQ ID NO: 216625
  chr16:1677033-1677183
  hypo

SEQ ID NO: 319960 - DNA, 206 bp, Homo sapiens; identical to SEQ ID NO: 268477
  chr16:1678527-1678733
  hypo

SEQ ID NO: 319961 - DNA, 82 bp, Homo sapiens; identical to SEQ ID NO: 268478
  chr16:1681341-1681423
  hypo

SEQ ID NO: 319962 - DNA, 440 bp, Homo sapiens; identical to SEQ ID NO: 268479
  chr16:1682397-1682837
  hypo

SEQ ID NO: 319963 - DNA, 128 bp, Homo sapiens; identical to SEQ ID NO: 216627
  chr16:1701258-1701386
  hypo

SEQ ID NO: 319964 - DNA, 130 bp, Homo sapiens; identical to SEQ ID NO: 216628
  chr16:1704526-1704656
  hypo

SEQ ID NO: 319965 - DNA, 59 bp, Homo sapiens; identical to SEQ ID NO: 216629
  chr16:1704800-1704859
  hypo

SEQ ID NO: 319966 - DNA, 143 bp, Homo sapiens; identical to SEQ ID NO: 216630
  chr16:1705539-1705682
  hypo

SEQ ID NO: 319967 - DNA, 93 bp, Homo sapiens; identical to SEQ ID NO: 268483
  chr16:1708014-1708107
  hypo

SEQ ID NO: 319968 - DNA, 39 bp, Homo sapiens; identical to SEQ ID NO: 268484
  chr16:1712683-1712722
  hypo

SEQ ID NO: 319969 - DNA, 128 bp, Homo sapiens; identical to SEQ ID NO: 268485
  chr16:1719761-1719889
  hypo

SEQ ID NO: 319970 - DNA, 123 bp, Homo sapiens; identical to SEQ ID NO: 268486
  chr16:1723672-1723795
  hypo

SEQ ID NO: 319971 - DNA, 103 bp, Homo sapiens
  chr16:1724905-1725008
  hypo
taatatgattacagcgaagactttcctgataagttctcaaactcgatgtgtgactgtttggcacttgagacaaacctgcctttgcagggaaagtgtctctcac

SEQ ID NO: 319972 - DNA, 371 bp, Homo sapiens
  chr16:1725038-1725409
  hypo
tgttcagtcccttgcatacctttgccttgagacttctgtgtctccttcccatttgggacacccaggtgagggcccagacatctggatgtggtcagacctcaccaaatatatgccttcgtggtggtctccctccttgcgccctcttgggtggccagcgttcctactgcagacggcccaacatccagtctttccccaggacagagctaacaagggcccctttgccttctcatcctcaggagttccaggcacatgagtcaccgtccatccacatccagtgtggcctggagctgctacagaggtgttgggcaggccatgcctgtgccgccatctctcccttcctgcctcatttcatcccccgcagcagccgggat

SEQ ID NO: 319973 - DNA, 230 bp, Homo sapiens; identical to SEQ ID NO: 216631
  chr16:1730076-1730306
  hypo

SEQ ID NO: 319974 - DNA, 119 bp, Homo sapiens; identical to SEQ ID NO: 216632
  chr16:1730761-1730880
  hypo

SEQ ID NO: 319975 - DNA, 198 bp, Homo sapiens; identical to SEQ ID NO: 268489
  chr16:1731569-1731767
  hypo

SEQ ID NO: 319976 - DNA, 41 bp, Homo sapiens; identical to SEQ ID NO: 89515
  chr16:1732071-1732112
  hypo

SEQ ID NO: 319977 - DNA, 164 bp, Homo sapiens; identical to SEQ ID NO: 268491
  chr16:1735954-1736118
  hypo

SEQ ID NO: 319978 - DNA, 747 bp, Homo sapiens
  chr16:1737555-1738302
  hypo
agcactccatggaaggcaggcggtaccactttgcccgttccacatggtctcatgcccagtggggagcccggccccttgcggttagtgagccagcctctactcctggtcacagtgtgtggtgccagccatcatggctccccatgccaggttcctgcttctcatggtccttctcacggttgttgggagttttcctatctctccagtgctcttggaagacggtttatggtatattatcaagggaagcctgaaagggaaactgctagttgtgttcaccacccaacgagatctggagtcctgccttctttctacacttagtcacacagacctagccccacagccctctagttgcagggcttgattgagaaaagtatgcagaggccgagagtgtgtgtgaccgaccacatcatagccatcgaatgtttatcaattcccattcagtgtttcagtgaatcttcagtagtctctgtgttctttgttagtcacctggtttagatgttccatgaattgttcttcctcttctagcaatgatgaccaacgtctatgaattgttaatatttaccggggactgtgctaagtgctttgcatgtgtatttttcatttggtgttcgctataactaggagtaggttgttttgctcctttcacagaggaggaaacaggcttggaaaaggtcactggcatgcataaatcccaagctagtcagtagcagagctagtcggtagcagaactagtccgtagcagagctagtc

SEQ ID NO: 319979 - DNA, 161 bp, Homo sapiens
  chr16:1739991-1740152
  hypo
gtacacatttctctgcagggcgagtcccgcatatccccaggtgttctgttaccacctgcaaaaggtagacacgcccgcccgaccccccacttgctgtgctctgttatagtcctccttgtcgctgcactctgggcccctagaactggtgtcccagaaagcca

SEQ ID NO: 319980 - DNA, 83 bp, Homo sapiens
  chr16:1740206-1740289
  hypo
gcaggtgcacagacccccagccgagcctcatctccacgcaagcacacgtgggctcttcatccggttgcttctgtggagcagtg

SEQ ID NO: 319981 - DNA, 68 bp, Homo sapiens; identical to SEQ ID NO: 268495
  chr16:1748235-1748303
  hypo

SEQ ID NO: 319982 - DNA, 121 bp, Homo sapiens; identical to SEQ ID NO: 268496
  chr16:1748861-1748982
  hypo

SEQ ID NO: 319983 - DNA, 90 bp, Homo sapiens; identical to SEQ ID NO: 268498
  chr16:1751083-1751173
  hypo

SEQ ID NO: 319984 - DNA, 144 bp, Homo sapiens; identical to SEQ ID NO: 216635
  chr16:1753652-1753796
  hypo

SEQ ID NO: 319985 - DNA, 106 bp, Homo sapiens; identical to SEQ ID NO: 268500
  chr16:1795484-1795590
  hypo

SEQ ID NO: 319986 - DNA, 1288 bp, Homo sapiens; identical to SEQ ID NO: 268501
  chr16:1796043-1797331
  hypo

SEQ ID NO: 319987 - DNA, 105 bp, Homo sapiens; identical to SEQ ID NO: 216636
  chr16:1804798-1804903
  hypo

SEQ ID NO: 319988 - DNA, 164 bp, Homo sapiens; identical to SEQ ID NO: 216637
  chr16:1805218-1805382
  hypo

SEQ ID NO: 319989 - DNA, 34 bp, Homo sapiens; identical to SEQ ID NO: 268504
  chr16:1807114-1807148
  hypo

SEQ ID NO: 319990 - DNA, 155 bp, Homo sapiens
  chr16:1807725-1807880
  hypo
tgcggtgtctccctcgccgctctctccctcgcccacgctggggggcttttggagactgggtacctgccacaccctgccacacacactctcctcttcacaggcctgcatcatgggggctgcggggggcctgccctcctgatgggcgatgggagcag

SEQ ID NO: 319991 - DNA, 430 bp, Homo sapiens
  chr16:1807999-1808429
  hypo
gctgctccctctctctcctgccctgcaacatgggagcagccgaatcattgctgggttttctgtaataagaatgtattgttagttccagtccctaattgacctttgtcccttccttcccctgcctctctgtgcgtcgctggactcgccaggggagttctcaggtgagtatctcactctcctgtctgtctcccctctgtgtgacggggggagtgggtggacgggggatgccccgagctatcccgtcaccgtggctgtgtggactgccccccacgtcgccgcagcgcctctgcttctgctcgcagccaccgccgctcggaagcttgttcggtttgctccaccagccacttgacaatgacctggatatccaacccccccagcctgaggagtcccccgcgggccatttctgaaggccctgcggagccctaagcca

SEQ ID NO: 319992 - DNA, 123 bp, Homo sapiens; identical to SEQ ID NO: 268506
  chr16:1810314-1810437
  hypo

SEQ ID NO: 319993 - DNA, 358 bp, Homo sapiens; identical to SEQ ID NO: 268507
  chr16:1812259-1812617
  hypo

SEQ ID NO: 319994 - DNA, 65 bp, Homo sapiens; identical to SEQ ID NO: 268508
  chr16:1812931-1812996
  hypo

SEQ ID NO: 319995 - DNA, 197 bp, Homo sapiens
  chr16:1813285-1813482
  hypo
ctgcagcaaggagccgtttcaggcgtctgtccagcagggagtcgctggtcatgcctgtgccccggcggcactccaggtcccggtctgtggaaccctcagtgactgtggcagcagagcagcctctgggtcgagcaggggccagctgtggcctccaagcccaggggcatagccggtgccaggaaagccacccttcccag

SEQ ID NO: 319996 - DNA, 216 bp, Homo sapiens; identical to SEQ ID NO: 216640
  chr16:1814037-1814253
  hypo

SEQ ID NO: 319997 - DNA, 133 bp, Homo sapiens; identical to SEQ ID NO: 216641
  chr16:1814369-1814502
  hypo

SEQ ID NO: 319998 - DNA, 73 bp, Homo sapiens; identical to SEQ ID NO: 268510
  chr16:1815140-1815213
  hypo

SEQ ID NO: 319999 - DNA, 307 bp, Homo sapiens; identical to SEQ ID NO: 216642
  chr16:1818407-1818714
  hypo

SEQ ID NO: 320000 - DNA, 227 bp, Homo sapiens; identical to SEQ ID NO: 268512
  chr16:1827934-1828161
  hypo

SEQ ID NO: 320001 - DNA, 173 bp, Homo sapiens
  chr16:1831184-1831357
  hypo
gagtcttactgaatgcggtgcatccaggagacaggcccaggtttggactggtcctctagcctcagaagcatctttttctccgactgattccgtgttcaggtaatgtctgcctgcctgcctagggcatctccacaccttaggccagccacgtccgcctcgcccgctggaaccta

SEQ ID NO: 320002 - DNA, 94 bp, Homo sapiens; identical to SEQ ID NO: 268514
  chr16:1835078-1835172
  hypo

SEQ ID NO: 320003 - DNA, 65 bp, Homo sapiens; identical to SEQ ID NO: 268515
  chr16:1839100-1839165
  hypo

SEQ ID NO: 320004 - DNA, 37 bp, Homo sapiens; identical to SEQ ID NO: 268516
  chr16:1881727-1881764
  hypo

SEQ ID NO: 320005 - DNA, 37 bp, Homo sapiens; identical to SEQ ID NO: 268517
  chr16:1881884-1881921
  hypo

SEQ ID NO: 320006 - DNA, 43 bp, Homo sapiens
  chr16:1889555-1889598
  hypo
tgttcagtgctatgcggtctacaagacagtcgtaaaaaacagt

SEQ ID NO: 320007 - DNA, 31 bp, Homo sapiens
  chr16:1889628-1889659
  hypo
gagtcatctgaaactgcgtacaccagtcctc

SEQ ID NO: 320008 - DNA, 31 bp, Homo sapiens; identical to SEQ ID NO: 268519
  chr16:1895226-1895257
  hypo

SEQ ID NO: 320009 - DNA, 36 bp, Homo sapiens; identical to SEQ ID NO: 268520
  chr16:1938628-1938664
  hypo

SEQ ID NO: 320010 - DNA, 32 bp, Homo sapiens; identical to SEQ ID NO: 268521
  chr16:1944317-1944349
  hypo

SEQ ID NO: 320011 - DNA, 294 bp, Homo sapiens
  chr16:1946679-1946973
  hypo
ctgcacctggcctacacggcttttaaatcttacattgtgcaccagagaagagtcaaacaaagcaaaattagcggcagaaagcacccccttgcttctctgtacacacgacccaggtgtatcgcagagcaaacacagtgaaagtgtgcacgctcgggaaaggcgcaggaactgacattttaccaaggtctctgaaggggcagaaaacaggccccgagaggcacagatgccaacaatgattgtcaggaatcaatgggaaagcgtgtttgtgcagcgctattggcatctgatgtgttt

SEQ ID NO: 320012 - DNA, 66 bp, Homo sapiens
  chr16:1947003-1947069
  hypo
ctttattaattgcacatattcctcttgacgaaagtgacatgccgatggcagcgttgtgggcttgaa

SEQ ID NO: 320013 - DNA, 162 bp, Homo sapiens
  chr16:1960052-1960214
  hypo
aggctaagaggctattaatccgtctccctgtgcacacacccaacactcgctgacctcaccaacactcaggcaattccacaaggctccagaaggaagcgtccactgcgcacctggattccggatgagccaaggtggtgggtgcggacccgactttaatcctgc

SEQ ID NO: 320014 - DNA, 100 bp, Homo sapiens; identical to SEQ ID NO: 268524
  chr16:1985415-1985515
  hypo

SEQ ID NO: 320015 - DNA, 379 bp, Homo sapiens; identical to SEQ ID NO: 268525
  chr16:1989198-1989577
  hypo

SEQ ID NO: 320016 - DNA, 85 bp, Homo sapiens; identical to SEQ ID NO: 268526
  chr16:1994702-1994787
  hypo

SEQ ID NO: 320017 - DNA, 110 bp, Homo sapiens; identical to SEQ ID NO: 216644
  chr16:1997451-1997561
  hypo

SEQ ID NO: 320018 - DNA, 418 bp, Homo sapiens; identical to SEQ ID NO: 268528
  chr16:2000529-2000947
  hypo

SEQ ID NO: 320019 - DNA, 515 bp, Homo sapiens; identical to SEQ ID NO: 268529
  chr16:2003499-2004014
  hypo

SEQ ID NO: 320020 - DNA, 120 bp, Homo sapiens; identical to SEQ ID NO: 268530
  chr16:2007511-2007631
  hypo

SEQ ID NO: 320021 - DNA, 120 bp, Homo sapiens; identical to SEQ ID NO: 268531
  chr16:2012608-2012728
  hypo

SEQ ID NO: 320022 - DNA, 216 bp, Homo sapiens; identical to SEQ ID NO: 268532
  chr16:2012908-2013124
  hypo

SEQ ID NO: 320023 - DNA, 208 bp, Homo sapiens; identical to SEQ ID NO: 268533
  chr16:2016682-2016890
  hypo

SEQ ID NO: 320024 - DNA, 368 bp, Homo sapiens; identical to SEQ ID NO: 268534
  chr16:2024265-2024633
  hypo

SEQ ID NO: 320025 - DNA, 308 bp, Homo sapiens; identical to SEQ ID NO: 268536
  chr16:2035675-2035983
  hypo

SEQ ID NO: 320026 - DNA, 96 bp, Homo sapiens; identical to SEQ ID NO: 204085
  chr16:2042503-2042599
  hypo

SEQ ID NO: 320027 - DNA, 230 bp, Homo sapiens; identical to SEQ ID NO: 126632
  chr16:2042617-2042847
  hypo

SEQ ID NO: 320028 - DNA, 245 bp, Homo sapiens; identical to SEQ ID NO: 268537
  chr16:2043001-2043246
  hypo

SEQ ID NO: 320029 - DNA, 308 bp, Homo sapiens; identical to SEQ ID NO: 216649
  chr16:2049434-2049742
  hypo

SEQ ID NO: 320030 - DNA, 140 bp, Homo sapiens; identical to SEQ ID NO: 268539
  chr16:2099383-2099523
  hypo

SEQ ID NO: 320031 - DNA, 94 bp, Homo sapiens
  chr16:2104668-2104762
  hypo
tctctggggcttggggcctccgaacacctctgcaacggcaggagctgggcgagttctgtcactgggaggtggtgctgctgacttggtctcaacc

SEQ ID NO: 320032 - DNA, 201 bp, Homo sapiens
  chr16:2105384-2105585
  hypo
ccgccgcttctcccccagctgactttgtcctgcagtggatggatgttggcttgtcctcggaattccttctggtgctggtgaacttggtcaaattcaatagctgttacctcgacgagtacatcgcaaggatggttcagtaagaaaagaattgagatcctgttctgataatggtcctaagttcagctccgcagtgaataaagt

SEQ ID NO: 320033 - DNA, 81 bp, Homo sapiens; identical to SEQ ID NO: 216651
  chr16:2106519-2106600
  hypo

SEQ ID NO: 320034 - DNA, 62 bp, Homo sapiens; identical to SEQ ID NO: 216652
  chr16:2106641-2106703
  hypo

SEQ ID NO: 320035 - DNA, 37 bp, Homo sapiens; identical to SEQ ID NO: 216653
  chr16:2106732-2106769
  hypo

SEQ ID NO: 320036 - DNA, 42 bp, Homo sapiens; identical to SEQ ID NO: 216654
  chr16:2106973-2107015
  hypo

SEQ ID NO: 320037 - DNA, 440 bp, Homo sapiens; identical to SEQ ID NO: 216655
  chr16:2107057-2107497
  hypo

SEQ ID NO: 320038 - DNA, 459 bp, Homo sapiens; identical to SEQ ID NO: 216656
  chr16:2108517-2108976
  hypo

SEQ ID NO: 320039 - DNA, 116 bp, Homo sapiens
  chr16:2124089-2124205
  hypo
acttgctaagcctcggctgttctcccggtggagcactcgaggttggcgaggggtaggcgaggctgcctctgctgcaagcgggtggggcctgaggtgtcctgtctcctgcagcgcga

SEQ ID NO: 320040 - DNA, 148 bp, Homo sapiens; identical to SEQ ID NO: 216657
  chr16:2125861-2126009
  hypo

SEQ ID NO: 320041 - DNA, 172 bp, Homo sapiens; identical to SEQ ID NO: 268546
  chr16:2126990-2127162
  hypo

SEQ ID NO: 320042 - DNA, 198 bp, Homo sapiens
  chr16:2129581-2129779
  hypo
acagaccaaggaggcgccggccaagctggagtcccaggctgggcagcaggtgtcccgtggggcccgggatcgggtccgttccatgtcgggtgagccttggccccagccacctccacacaggcaccggggctccctcagttgctgctggtcccagtgttcaggaaggccccgagcccaggggccggggtggctggcttc

SEQ ID NO: 320043 - DNA, 231 bp, Homo sapiens
  chr16:2131437-2131668
  hypo
ggccgtcagagcagcgctggctccgacatcgtggtcctgaggattgtgggagggagcatgagggcaaaaccagggcccaggccaggaggcccctggggggccagagatgggtaaggggaggtactggcctcaggccaaaggtgctgccgcctccgcagggaacaccagctggctgatgagcctggagaacccgctcagccctttctcctcggacatcaacaacatgcccct

SEQ ID NO: 320044 - DNA, 39 bp, Homo sapiens; identical to SEQ ID NO: 268549
  chr16:2134065-2134104
  hypo

SEQ ID NO: 320045 - DNA, 212 bp, Homo sapiens; identical to SEQ ID NO: 268550
  chr16:2134434-2134646
  hypo

SEQ ID NO: 320046 - DNA, 71 bp, Homo sapiens; identical to SEQ ID NO: 216659
  chr16:2135230-2135301
  hypo

SEQ ID NO: 320047 - DNA, 314 bp, Homo sapiens; identical to SEQ ID NO: 216660
  chr16:2135330-2135644
  hypo

SEQ ID NO: 320048 - DNA, 69 bp, Homo sapiens; identical to SEQ ID NO: 216661
  chr16:2141840-2141909
  hypo

SEQ ID NO: 320049 - DNA, 574 bp, Homo sapiens; identical to SEQ ID NO: 216662
  chr16:2141972-2142546
  hypo

SEQ ID NO: 320050 - DNA, 412 bp, Homo sapiens; identical to SEQ ID NO: 216663
  chr16:2142628-2143040
  hypo

SEQ ID NO: 320051 - DNA, 71 bp, Homo sapiens; identical to SEQ ID NO: 268553
  chr16:2144843-2144914
  hypo

SEQ ID NO: 320052 - DNA, 78 bp, Homo sapiens
  chr16:2145547-2145625
  hypo
agggaatgccagggcagaggcgccgccaggacggagggtgcaggctcaggcgcagggaaggccgtgctctgcgttggg

SEQ ID NO: 320053 - DNA, 151 bp, Homo sapiens
  chr16:2145727-2145878
  hypo
gcaagggacggccaagggttgaggaagccgggagggtgagggccacgcgctctgtgtggatgcggagtctgagctgccgtcagaaatccccgcggaagcactgaatctggatttcacagagctttgggccggagatacctggggctggtca

SEQ ID NO: 320054 - DNA, 182 bp, Homo sapiens; identical to SEQ ID NO: 216664
  chr16:2146181-2146363
  hypo

SEQ ID NO: 320055 - DNA, 63 bp, Homo sapiens; identical to SEQ ID NO: 216665
  chr16:2146462-2146525
  hypo

SEQ ID NO: 320056 - DNA, 36 bp, Homo sapiens; identical to SEQ ID NO: 268556
  chr16:2147116-2147152
  hypo

SEQ ID NO: 320057 - DNA, 67 bp, Homo sapiens; identical to SEQ ID NO: 268557
  chr16:2147356-2147423
  hypo

SEQ ID NO: 320058 - DNA, 56 bp, Homo sapiens; identical to SEQ ID NO: 216666
  chr16:2193200-2193256
  hypo

SEQ ID NO: 320059 - DNA, 383 bp, Homo sapiens; identical to SEQ ID NO: 268559
  chr16:2211793-2212176
  hypo

SEQ ID NO: 320060 - DNA, 101 bp, Homo sapiens
  chr16:2212858-2212959
  hypo
acagggctgtcccagctgcattctgccaggctcctggcttccaggctgcccaagtcctgaaagtgggacctgctcgggaggaggggcgcctgctgacagag

SEQ ID NO: 320061 - DNA, 302 bp, Homo sapiens; identical to SEQ ID NO: 216667
  chr16:2213343-2213645
  hypo

SEQ ID NO: 320062 - DNA, 281 bp, Homo sapiens
  chr16:2213723-2214004
  hypo
ttgcctcctagaggcctgcctgagccggggctggtggtggaaggctgctgcggcggccccacggtgccccacagcaggtctgcacacttgcagcagcccgtctgactcacaggggcctgggctccatctctcaagcccctcatttgtgctccacccacaggaggtgcttcccaaggaccgtagatgcctctctagagcatgagctcaggcaagagtgcccgctacaaccgcttctccggggggcccagcaatcttcccaccccagacgtcaccacaggggt

SEQ ID NO: 320063 - DNA, 54 bp, Homo sapiens; identical to SEQ ID NO: 268562
  chr16:2226066-2226120
  hypo

SEQ ID NO: 320064 - DNA, 390 bp, Homo sapiens; identical to SEQ ID NO: 268563
  chr16:2226419-2226809
  hypo

SEQ ID NO: 320065 - DNA, 95 bp, Homo sapiens; identical to SEQ ID NO: 216669
  chr16:2229595-2229690
  hypo

SEQ ID NO: 320066 - DNA, 265 bp, Homo sapiens; identical to SEQ ID NO: 216670
  chr16:2230223-2230488
  hypo

SEQ ID NO: 320067 - DNA, 196 bp, Homo sapiens
  chr16:2231183-2231379
  hypo
ggaggtactcctggcttcgagacatggggctgctgggcccagggggcccatctcccagcagctcctgcgagctgctcatgtgccgtgcccgaccacccaggctggagtcctgccgcgtggtggccctcggggtgggtggcaggtggctggagggcttctcagtggtgggccccacctcagccgggccagtcatggc

SEQ ID NO: 320068 - DNA, 161 bp, Homo sapiens
  chr16:2235039-2235200
  hypo
caacccagaaaccccggcttgtcacctgctcccagccctggccaccctggccctggccactaccccacctaccttgacgccttcagagcccgcgtgtagggcgtgacccccgctgccccggccgccagccatgccgctaatgctgccgcttcggtccccac

SEQ ID NO: 320069 - DNA, 65 bp, Homo sapiens; identical to SEQ ID NO: 268568
  chr16:2235438-2235503
  hypo

SEQ ID NO: 320070 - DNA, 242 bp, Homo sapiens; identical to SEQ ID NO: 268569
  chr16:2239261-2239503
  hypo

SEQ ID NO: 320071 - DNA, 341 bp, Homo sapiens; identical to SEQ ID NO: 268570
  chr16:2260756-2261097
  hypo

SEQ ID NO: 320072 - DNA, 92 bp, Homo sapiens; identical to SEQ ID NO: 216672
  chr16:2278291-2278383
  hypo

SEQ ID NO: 320073 - DNA, 402 bp, Homo sapiens; identical to SEQ ID NO: 216673
  chr16:2280801-2281203
  hypo

SEQ ID NO: 320074 - DNA, 237 bp, Homo sapiens; identical to SEQ ID NO: 216674
  chr16:2281402-2281639
  hypo

SEQ ID NO: 320075 - DNA, 71 bp, Homo sapiens; identical to SEQ ID NO: 216675
  chr16:2281702-2281773
  hypo

SEQ ID NO: 320076 - DNA, 824 bp, Homo sapiens; identical to SEQ ID NO: 28823
  chr16:2282326-2283150
  hypo

SEQ ID NO: 320077 - DNA, 188 bp, Homo sapiens; identical to SEQ ID NO: 268574
  chr16:2284111-2284299
  hypo

SEQ ID NO: 320078 - DNA, 50 bp, Homo sapiens; identical to SEQ ID NO: 268576
  chr16:2294342-2294392
  hypo

SEQ ID NO: 320079 - DNA, 146 bp, Homo sapiens; identical to SEQ ID NO: 224992
  chr16:2295263-2295409
  hypo

SEQ ID NO: 320080 - DNA, 120 bp, Homo sapiens; identical to SEQ ID NO: 268577
  chr16:2306144-2306264
  hypo

SEQ ID NO: 320081 - DNA, 94 bp, Homo sapiens; identical to SEQ ID NO: 216677
  chr16:2314153-2314247
  hypo

SEQ ID NO: 320082 - DNA, 185 bp, Homo sapiens; identical to SEQ ID NO: 268579
  chr16:2338097-2338282
  hypo

SEQ ID NO: 320083 - DNA, 160 bp, Homo sapiens; identical to SEQ ID NO: 268580
  chr16:2339391-2339551
  hypo

SEQ ID NO: 320084 - DNA, 396 bp, Homo sapiens; identical to SEQ ID NO: 268581
  chr16:2347405-2347801
  hypo

SEQ ID NO: 320085 - DNA, 540 bp, Homo sapiens; identical to SEQ ID NO: 268582
  chr16:2358232-2358772
  hypo

SEQ ID NO: 320086 - DNA, 54 bp, Homo sapiens; identical to SEQ ID NO: 268583
  chr16:2369672-2369726
  hypo

SEQ ID NO: 320087 - DNA, 621 bp, Homo sapiens; identical to SEQ ID NO: 268584
  chr16:2382128-2382749
  hypo

SEQ ID NO: 320088 - DNA, 149 bp, Homo sapiens; identical to SEQ ID NO: 268585
  chr16:2475885-2476034
  hypo

SEQ ID NO: 320089 - DNA, 226 bp, Homo sapiens; identical to SEQ ID NO: 268586
  chr16:2477161-2477387
  hypo

SEQ ID NO: 320090 - DNA, 510 bp, Homo sapiens; identical to SEQ ID NO: 216679
  chr16:2485934-2486444
  hypo

SEQ ID NO: 320091 - DNA, 60 bp, Homo sapiens
  chr16:2497819-2497879
  hypo
accagccatctcacaccccacgctgggctctcattggccactgacatcttgtctttttgg

SEQ ID NO: 320092 - DNA, 97 bp, Homo sapiens
  chr16:2498053-2498150
  hypo
ttggcgctggttgacaacagagaacagggtgaccatcgcctagagacagtcaggattcctgcggccacacagtgccgggcacagactttccaacaac

SEQ ID NO: 320093 - DNA, 108 bp, Homo sapiens; identical to SEQ ID NO: 268589
  chr16:2501133-2501241
  hypo

SEQ ID NO: 320094 - DNA, 115 bp, Homo sapiens; identical to SEQ ID NO: 268590
  chr16:2505252-2505367
  hypo

SEQ ID NO: 320095 - DNA, 99 bp, Homo sapiens; identical to SEQ ID NO: 216680
  chr16:2508556-2508655
  hypo

SEQ ID NO: 320096 - DNA, 268 bp, Homo sapiens; identical to SEQ ID NO: 291276
  chr16:2521459-2521727
  hypo

SEQ ID NO: 320097 - DNA, 119 bp, Homo sapiens; identical to SEQ ID NO: 291277
  chr16:2521857-2521976
  hypo

SEQ ID NO: 320098 - DNA, 52 bp, Homo sapiens; identical to SEQ ID NO: 216681
  chr16:2531017-2531069
  hypo

SEQ ID NO: 320099 - DNA, 33 bp, Homo sapiens; identical to SEQ ID NO: 216682
  chr16:2531177-2531210
  hypo

SEQ ID NO: 320100 - DNA, 40 bp, Homo sapiens; identical to SEQ ID NO: 216683
  chr16:2531240-2531280
  hypo

SEQ ID NO: 320101 - DNA, 32 bp, Homo sapiens
  chr16:2531772-2531804
  hypo
cccctgctcaggctccgagcagcaggctcagc

SEQ ID NO: 320102 - DNA, 47 bp, Homo sapiens; identical to SEQ ID NO: 268594
  chr16:2539901-2539948
  hypo

SEQ ID NO: 320103 - DNA, 401 bp, Homo sapiens; identical to SEQ ID NO: 216684
  chr16:2540427-2540828
  hypo

SEQ ID NO: 320104 - DNA, 70 bp, Homo sapiens; identical to SEQ ID NO: 216685
  chr16:2540933-2541003
  hypo

SEQ ID NO: 320105 - DNA, 176 bp, Homo sapiens; identical to SEQ ID NO: 268596
  chr16:2544810-2544986
  hypo

SEQ ID NO: 320106 - DNA, 277 bp, Homo sapiens
  chr16:2546128-2546405
  hypo
cctcccgagcacagcggcgctatggactctccaggatacaactgcttcgtggacaaagacaagatggacgctgccatccaggacctggggcccaaggagctgagctgcactgaactgcaggaactgaagcagctggcgcgccagggctactgggcccaaagccacgccctgcggggaaaggtgtaccagcgcctgatccgggacattccctgccgcacggtcacgcctgacgccagcgtgtacagcgacatcgtgggcaagatcgtgggcaagcaca

SEQ ID NO: 320107 - DNA, 553 bp, Homo sapiens
  chr16:2546506-2547059
  hypo
tgcctggccaaccagttccccgacatctccttctgccccgccctgccggccgtggtggccctgctgctgcactacagcatcgacgaggccgagtgcttcgagaaggcctgccgcatcctggcctgcaatgaccccggcaggaggctgatcgaccagagcttcctggcctttgagtcgtcctgcatgacgtttggggacctggtgaacaagtactgccaggcggcccacaagctgatggtggccgtgtcggaggatgtcctgcaggtctatgcggactggcagcgctggctgtttggggagctgcccctctgctacttcgcccgggtctttgacgtcttcctggtggagggctacaaggtgctgtaccgcgtggcgctggccatcctcaagttcttccacaaggtgagggccgggcagccgctggagtcggacagcgtgaagcaggacatccgcacgttcgtcagagacatcgcgaagacggtgtcccctgagaagctgctggagaaagcgttcgccatccgcctcttctcccgcaaggagatccagctcctgc

SEQ ID NO: 320108 - DNA, 145 bp, Homo sapiens; identical to SEQ ID NO: 216688
  chr16:2579464-2579609
  hypo

SEQ ID NO: 320109 - DNA, 390 bp, Homo sapiens; identical to SEQ ID NO: 268599
  chr16:2642768-2643158
  hypo

SEQ ID NO: 320110 - DNA, 465 bp, Homo sapiens; identical to SEQ ID NO: 268600
  chr16:2645427-2645892
  hypo

SEQ ID NO: 320111 - DNA, 122 bp, Homo sapiens; identical to SEQ ID NO: 268601
  chr16:2647311-2647433
  hypo

SEQ ID NO: 320112 - DNA, 249 bp, Homo sapiens; identical to SEQ ID NO: 216691
  chr16:2648042-2648291
  hypo

SEQ ID NO: 320113 - DNA, 66 bp, Homo sapiens; identical to SEQ ID NO: 268603
  chr16:2716589-2716655
  hypo

SEQ ID NO: 320114 - DNA, 209 bp, Homo sapiens; identical to SEQ ID NO: 268604
  chr16:2716878-2717087
  hypo

SEQ ID NO: 320115 - DNA, 101 bp, Homo sapiens; identical to SEQ ID NO: 268605
  chr16:2725742-2725843
  hypo

SEQ ID NO: 320116 - DNA, 36 bp, Homo sapiens; identical to SEQ ID NO: 268606
  chr16:2731315-2731351
  hypo

SEQ ID NO: 320117 - DNA, 64 bp, Homo sapiens; identical to SEQ ID NO: 216692
  chr16:2770028-2770092
  hypo

SEQ ID NO: 320118 - DNA, 43 bp, Homo sapiens; identical to SEQ ID NO: 268609
  chr16:2782315-2782358
  hypo

SEQ ID NO: 320119 - DNA, 194 bp, Homo sapiens
  chr16:2806405-2806599
  hypo
gcaccaacggctacgtccagcgcaacctgtccctggtgcggggccgccggggtgagcggcctgactacaagggagaggaggaactgcggcgcctggaggctgccctggtgaagcggcctaatcctgacatcctggaccacgagcgcaagcggcgcgtcgagctgcgatgcctcgagctggaggagatgatggaa

SEQ ID NO: 320120 - DNA, 165 bp, Homo sapiens
  chr16:2819593-2819758
  hypo
tggccaccatcatcttctcccgactctgtccacagcctcctccctgtctccccgtctccacgccattctcttccacatgtagccagagggacctttctaaaacgcacatctggctacttccctccactccacaaatccttcgggacgccctgtggcctgcaggac

SEQ ID NO: 320121 - DNA, 48 bp, Homo sapiens; identical to SEQ ID NO: 216693
  chr16:2849308-2849356
  hypo

SEQ ID NO: 320122 - DNA, 32 bp, Homo sapiens; identical to SEQ ID NO: 216694
  chr16:2849623-2849655
  hypo

SEQ ID NO: 320123 - DNA, 35 bp, Homo sapiens; identical to SEQ ID NO: 268613
  chr16:2959166-2959201
  hypo

SEQ ID NO: 320124 - DNA, 194 bp, Homo sapiens; identical to SEQ ID NO: 216695
  chr16:2974650-2974844
  hypo

SEQ ID NO: 320125 - DNA, 232 bp, Homo sapiens; identical to SEQ ID NO: 268615
  chr16:2975080-2975312
  hypo

SEQ ID NO: 320126 - DNA, 340 bp, Homo sapiens; identical to SEQ ID NO: 216696
  chr16:3021581-3021921
  hypo

SEQ ID NO: 320127 - DNA, 65 bp, Homo sapiens; identical to SEQ ID NO: 268617
  chr16:3051091-3051156
  hypo

SEQ ID NO: 320128 - DNA, 136 bp, Homo sapiens; identical to SEQ ID NO: 268618
  chr16:3052305-3052441
  hypo

SEQ ID NO: 320129 - DNA, 35 bp, Homo sapiens; identical to SEQ ID NO: 268619
  chr16:3053165-3053200
  hypo

SEQ ID NO: 320130 - DNA, 48 bp, Homo sapiens; identical to SEQ ID NO: 216697
  chr16:3062887-3062935
  hypo

SEQ ID NO: 320131 - DNA, 37 bp, Homo sapiens; identical to SEQ ID NO: 291287
  chr16:3097009-3097046
  hypo

SEQ ID NO: 320132 - DNA, 72 bp, Homo sapiens; identical to SEQ ID NO: 216698
  chr16:3139013-3139085
  hypo

SEQ ID NO: 320133 - DNA, 1077 bp, Homo sapiens; identical to SEQ ID NO: 216699
  chr16:3139367-3140444
  hypo

SEQ ID NO: 320134 - DNA, 61 bp, Homo sapiens; identical to SEQ ID NO: 268622
  chr16:3165156-3165217
  hypo

SEQ ID NO: 320135 - DNA, 133 bp, Homo sapiens; identical to SEQ ID NO: 268623
  chr16:3167169-3167302
  hypo

SEQ ID NO: 320136 - DNA, 67 bp, Homo sapiens; identical to SEQ ID NO: 268624
  chr16:3169009-3169076
  hypo

SEQ ID NO: 320137 - DNA, 439 bp, Homo sapiens; identical to SEQ ID NO: 268625
  chr16:3169370-3169809
  hypo

SEQ ID NO: 320138 - DNA, 128 bp, Homo sapiens; identical to SEQ ID NO: 216700
  chr16:3170504-3170632
  hypo

SEQ ID NO: 320139 - DNA, 187 bp, Homo sapiens; identical to SEQ ID NO: 216701
  chr16:3189117-3189304
  hypo

SEQ ID NO: 320140 - DNA, 44 bp, Homo sapiens; identical to SEQ ID NO: 268628
  chr16:3189704-3189748
  hypo

SEQ ID NO: 320141 - DNA, 327 bp, Homo sapiens; identical to SEQ ID NO: 268629
  chr16:3193319-3193646
  hypo

SEQ ID NO: 320142 - DNA, 322 bp, Homo sapiens; identical to SEQ ID NO: 204094
  chr16:3200663-3200985
  hypo

SEQ ID NO: 320143 - DNA, 317 bp, Homo sapiens; identical to SEQ ID NO: 291291
  chr16:3208782-3209099
  hypo

SEQ ID NO: 320144 - DNA, 107 bp, Homo sapiens
  chr16:3211536-3211643
  hypo
acaggtggcaggggcgtggttgtcaaataatcaaaatgatcaggcacttcaggtccccgggaaagcgggcacagaggtggccacccctgttcccctcctggcaccat

SEQ ID NO: 320145 - DNA, 125 bp, Homo sapiens; identical to SEQ ID NO: 216705
  chr16:3286323-3286448
  hypo

SEQ ID NO: 320146 - DNA, 87 bp, Homo sapiens; identical to SEQ ID NO: 216706
  chr16:3315530-3315617
  hypo

SEQ ID NO: 320147 - DNA, 137 bp, Homo sapiens; identical to SEQ ID NO: 216707
  chr16:3515977-3516114
  hypo

SEQ ID NO: 320148 - DNA, 110 bp, Homo sapiens; identical to SEQ ID NO: 268636
  chr16:3537863-3537973
  hypo

SEQ ID NO: 320149 - DNA, 145 bp, Homo sapiens; identical to SEQ ID NO: 268637
  chr16:3542403-3542548
  hypo

SEQ ID NO: 320150 - DNA, 88 bp, Homo sapiens; identical to SEQ ID NO: 216708
  chr16:3552081-3552169
  hypo

SEQ ID NO: 320151 - DNA, 37 bp, Homo sapiens; identical to SEQ ID NO: 216709
  chr16:3552775-3552812
  hypo

SEQ ID NO: 320152 - DNA, 181 bp, Homo sapiens; identical to SEQ ID NO: 268640
  chr16:3599033-3599214
  hypo

SEQ ID NO: 320153 - DNA, 118 bp, Homo sapiens; identical to SEQ ID NO: 268641
  chr16:3635039-3635157
  hypo

SEQ ID NO: 320154 - DNA, 217 bp, Homo sapiens
  chr16:3696477-3696694
  hypo
acctggggccatggcgggtgtaggggttgggtggggagaggatgtcctctgaaaaggtgacatttaagctgaaactggaatgacaagaaggccccagctctgcaggcagagcggaaggctcagagcttagaatcacgtaggtcatggaaagcattggatttcgtgttagggacaatgagaaactggtgacagattttaagtaggggaataaagagat

SEQ ID NO: 320155 - DNA, 83 bp, Homo sapiens
  chr16:3696802-3696885
  hypo
ctgcagaatctggaggacgtgcaggctcagggtgcatggtgcgggcggggctgagggggagcggggcctaggatgatctcagg

SEQ ID NO: 320156 - DNA, 121 bp, Homo sapiens; identical to SEQ ID NO: 268643
  chr16:3704780-3704901
  hypo

SEQ ID NO: 320157 - DNA, 77 bp, Homo sapiens; identical to SEQ ID NO: 268644
  chr16:3706729-3706806
  hypo

SEQ ID NO: 320158 - DNA, 165 bp, Homo sapiens; identical to SEQ ID NO: 216710
  chr16:3707025-3707190
  hypo

SEQ ID NO: 320159 - DNA, 383 bp, Homo sapiens; identical to SEQ ID NO: 216711
  chr16:3741882-3742265
  hypo

SEQ ID NO: 320160 - DNA, 176 bp, Homo sapiens
  chr16:3772842-3773018
  hypo
caatttagatcaacggcaaagcactgtcatctactcatcaaagctcctcagaatctactttgctagtctgggcattacactcacttaaatttcttcagtatcttataagggacctatgttttcccacctctgcctatttattatgaagtgtatacaagtaattcatgtggaattaa

SEQ ID NO: 320161 - DNA, 354 bp, Homo sapiens; identical to SEQ ID NO: 216712
  chr16:3776074-3776428
  hypo

SEQ ID NO: 320162 - DNA, 146 bp, Homo sapiens; identical to SEQ ID NO: 268649
  chr16:3777135-3777281
  hypo

SEQ ID NO: 320163 - DNA, 131 bp, Homo sapiens; identical to SEQ ID NO: 268650
  chr16:3781042-3781173
  hypo

SEQ ID NO: 320164 - DNA, 1164 bp, Homo sapiens; identical to SEQ ID NO: 204099
  chr16:3781398-3782562
  hypo

SEQ ID NO: 320165 - DNA, 924 bp, Homo sapiens; identical to SEQ ID NO: 216714
  chr16:3784366-3785290
  hypo

SEQ ID NO: 320166 - DNA, 182 bp, Homo sapiens; identical to SEQ ID NO: 216715
  chr16:3785796-3785978
  hypo

SEQ ID NO: 320167 - DNA, 152 bp, Homo sapiens; identical to SEQ ID NO: 216716
  chr16:3802012-3802164
  hypo

SEQ ID NO: 320168 - DNA, 207 bp, Homo sapiens; identical to SEQ ID NO: 216717
  chr16:3811572-3811779
  hypo

SEQ ID NO: 320169 - DNA, 209 bp, Homo sapiens; identical to SEQ ID NO: 216718
  chr16:3812494-3812703
  hypo

SEQ ID NO: 320170 - DNA, 265 bp, Homo sapiens; identical to SEQ ID NO: 268659
  chr16:3821348-3821613
  hypo

SEQ ID NO: 320171 - DNA, 42 bp, Homo sapiens; identical to SEQ ID NO: 268660
  chr16:3870817-3870859
  hypo

SEQ ID NO: 320172 - DNA, 50 bp, Homo sapiens; identical to SEQ ID NO: 268661
  chr16:3873408-3873458
  hypo

SEQ ID NO: 320173 - DNA, 148 bp, Homo sapiens; identical to SEQ ID NO: 216719
  chr16:3900218-3900366
  hypo

SEQ ID NO: 320174 - DNA, 78 bp, Homo sapiens; identical to SEQ ID NO: 268663
  chr16:3925259-3925337
  hypo

SEQ ID NO: 320175 - DNA, 309 bp, Homo sapiens; identical to SEQ ID NO: 204100
  chr16:3931082-3931391
  hypo

SEQ ID NO: 320176 - DNA, 111 bp, Homo sapiens; identical to SEQ ID NO: 225001
  chr16:3989147-3989258
  hypo

SEQ ID NO: 320177 - DNA, 86 bp, Homo sapiens; identical to SEQ ID NO: 216721
  chr16:3998751-3998837
  hypo

SEQ ID NO: 320178 - DNA, 75 bp, Homo sapiens; identical to SEQ ID NO: 268666
  chr16:4016326-4016401
  hypo

SEQ ID NO: 320179 - DNA, 237 bp, Homo sapiens; identical to SEQ ID NO: 268667
  chr16:4021225-4021462
  hypo

SEQ ID NO: 320180 - DNA, 138 bp, Homo sapiens; identical to SEQ ID NO: 268668
  chr16:4029240-4029378
  hypo

SEQ ID NO: 320181 - DNA, 218 bp, Homo sapiens; identical to SEQ ID NO: 268669
  chr16:4030046-4030264
  hypo

SEQ ID NO: 320182 - DNA, 122 bp, Homo sapiens; identical to SEQ ID NO: 89770
  chr16:4092845-4092967
  hypo

SEQ ID NO: 320183 - DNA, 39 bp, Homo sapiens; identical to SEQ ID NO: 268671
  chr16:4097830-4097869
  hypo

SEQ ID NO: 320184 - DNA, 273 bp, Homo sapiens; identical to SEQ ID NO: 268672
  chr16:4160070-4160343
  hypo

SEQ ID NO: 320185 - DNA, 106 bp, Homo sapiens; identical to SEQ ID NO: 179392
  chr16:4164069-4164175
  hypo

SEQ ID NO: 320186 - DNA, 554 bp, Homo sapiens; identical to SEQ ID NO: 268674
  chr16:4164399-4164953
  hypo

SEQ ID NO: 320187 - DNA, 284 bp, Homo sapiens; identical to SEQ ID NO: 291302
  chr16:4165532-4165816
  hypo

SEQ ID NO: 320188 - DNA, 1128 bp, Homo sapiens; identical to SEQ ID NO: 291303
  chr16:4165852-4166980
  hypo

SEQ ID NO: 320189 - DNA, 85 bp, Homo sapiens; identical to SEQ ID NO: 268675
  chr16:4174071-4174156
  hypo

SEQ ID NO: 320190 - DNA, 79 bp, Homo sapiens; identical to SEQ ID NO: 268676
  chr16:4183952-4184031
  hypo

SEQ ID NO: 320191 - DNA, 71 bp, Homo sapiens
  chr16:4203567-4203638
  hypo
ctggagacctgagtcctgttgtgtgtgaaggtggggcagggcagcagggcaaatgccgaaaacaaaaactg

SEQ ID NO: 320192 - DNA, 207 bp, Homo sapiens
  chr16:4203995-4204202
  hypo
atcgtgaacactggagattcaaacagcagagagaccacctcacaccattctgtcaacccgtgccaagtgcccaggcctgtgccaacgcttggcacacaatgattcaacagaggcagcctcatgcttcacggcccgatgctcgcttgttgtctatggccgtaggctaacctgcaaataaagaactggactgcacggaggtggtcattc

SEQ ID NO: 320193 - DNA, 553 bp, Homo sapiens; identical to SEQ ID NO: 225004
  chr16:4233232-4233785
  hypo

SEQ ID NO: 320194 - DNA, 204 bp, Homo sapiens; identical to SEQ ID NO: 204104
  chr16:4234087-4234291
  hypo

SEQ ID NO: 320195 - DNA, 549 bp, Homo sapiens; identical to SEQ ID NO: 268679
  chr16:4257893-4258442
  hypo

SEQ ID NO: 320196 - DNA, 482 bp, Homo sapiens; identical to SEQ ID NO: 268680
  chr16:4268166-4268648
  hypo

SEQ ID NO: 320197 - DNA, 381 bp, Homo sapiens
  chr16:4310354-4310735
  hypo
agaagcagagaggacgtggcctagggagaggcttccgccattcaagatcacctgtccccttcccggtccccagagcccactcccgggcgcctcctgctcacctgggtccgcagctgctgctgttcccgctccagcttctcctggtgcagcagcctcacctgttcctgctgctgctgcagctgcacctgctgcgcaatcaccttgagcttttccgggtacatgtgggcctccagcgagcgcacctggaggcaggacaacctgggctcagggccaaggccgggagcacaccctgccctgtcagtctcacagcagctcattcactcctgctgaaaaccctagcacagggcgggcccctctcaacagaggccagaagcctttcca

SEQ ID NO: 320198 - DNA, 52 bp, Homo sapiens; identical to SEQ ID NO: 216728
  chr16:4312582-4312634
  hypo

SEQ ID NO: 320199 - DNA, 153 bp, Homo sapiens; identical to SEQ ID NO: 268683
  chr16:4313275-4313428
  hypo

SEQ ID NO: 320200 - DNA, 377 bp, Homo sapiens; identical to SEQ ID NO: 225006
  chr16:4357423-4357800
  hypo

SEQ ID NO: 320201 - DNA, 462 bp, Homo sapiens; identical to SEQ ID NO: 268684
  chr16:4372512-4372974
  hypo

SEQ ID NO: 320202 - DNA, 306 bp, Homo sapiens; identical to SEQ ID NO: 268685
  chr16:4382286-4382592
  hypo

SEQ ID NO: 320203 - DNA, 204 bp, Homo sapiens
  chr16:4385112-4385316
  hypo
accatgtcaagcccgagaaggatgcggggtactgctgccactgggagggctgcgcccgccatggccgaggtttcaacgccaggtgaggtgggggagagaggggtagagggaggactggggtctccagtgagctgagccgtgccccccgccctccctggagcaggtacaagatgctcatccacatccgcacacacaccaacgaga

SEQ ID NO: 320204 - DNA, 44 bp, Homo sapiens; identical to SEQ ID NO: 268688
  chr16:4414173-4414217
  hypo

SEQ ID NO: 320205 - DNA, 116 bp, Homo sapiens; identical to SEQ ID NO: 268689
  chr16:4428515-4428631
  hypo

SEQ ID NO: 320206 - DNA, 42 bp, Homo sapiens; identical to SEQ ID NO: 268690
  chr16:4429224-4429266
  hypo

SEQ ID NO: 320207 - DNA, 70 bp, Homo sapiens; identical to SEQ ID NO: 216730
  chr16:4430996-4431066
  hypo

SEQ ID NO: 320208 - DNA, 298 bp, Homo sapiens; identical to SEQ ID NO: 216731
  chr16:4431189-4431487
  hypo

SEQ ID NO: 320209 - DNA, 1199 bp, Homo sapiens
  chr16:4431516-4432715
  hypo
ccgcttgcgcaacctccacgacctggatgtgtccgacaaccagctggagcgagtgccacctgtgatccgaggcctccggggcctgacgcgcctgcggctggccggcaacacccgcattgcccagctgcggcccgaggacctggccggcctggctgccctgcaggagctggatgtgagcaacctaagcctgcaggccctgcctggcgacctctcgggcctcttcccccgcctgcggctgctggcagctgcccgcaaccccttcaactgcgtgtgccccctgagctggtttggcccctgggtgcgcgagagccacgtcacactggccagccctgaggagacgcgctgccacttcccgcccaagaacgctggccggctgctcctggagcttgactacgccgactttggctgcccagccaccaccaccacagccacagtgcccaccacgaggcccgtggtgcgggagcccacagccttgtcttctagcttggctcctacctggcttagccccacagagccggccactgaggcccccagcccgccctccactgccccaccgactgtagggcctgtcccccagccccaggactgcccaccgtccacctgcctcaatgggggcacatgccacctggggacacggcaccacctggcgtgcttgtgccccgaaggcttcacgggcctgtactgtgagagccagatggggcaggggacacggcccagccctacaccagtcacgccgaggccaccacggtccctgaccctgggcatcgagccggtgagccccacctccctgcgcgtggggctgcagcgctacctccaggggagctccgtgcagctcaggagcctccgtctcacctatcgcaacctatcgggccctgataagcggctggtgacgctgcgactgcctgcctcgctcgctgagtacacggtcacccagctgcggcccaacgccacttactccgtctgtgtcatgcctttggggcccgggcgggtgccggagggcgaggaggcctgcggggaggcccatacacccccagccgtccactccaaccacgccccagtcacccaggcccgcgagggcaacctgccgctcctcattgcgcccgccctggccgcggtgctcctggccgcgctggctgcggtgggggcagcctactgtgtgcggcgggggcgggccatggcagcagcggctcaggacaaag

SEQ ID NO: 320210 - DNA, 176 bp, Homo sapiens; identical to SEQ ID NO: 268692
  chr16:4437960-4438136
  hypo

SEQ ID NO: 320211 - DNA, 99 bp, Homo sapiens; identical to SEQ ID NO: 268693
  chr16:4438391-4438490
  hypo

SEQ ID NO: 320212 - DNA, 466 bp, Homo sapiens
  chr16:4442609-4443075
  hypo
agggcaggcggccccgctccctgacccccagccacaccccactaggcaggaaggaggattgccagagaaggagctcccagaaggcctctccctcgagccggcccctcggctcacaccggccctggctgccagcagcggttttcctaatagaagccaggtgtgggccagatgccctgggcggaagtggggggcagggccacacggagagcggcattccaggcctgctgcccccgcaccagggcccgagcacaggccccagccagcagctggaaggggtgggagccacccacgctcttcccaggtctcctcgccccaaagccccgcaggggggctccctccagaaccagatcctctccctctctcttcgaggagctgggagccccttggatagcagccactctatccccacctcggcatcagtcaccgccccagccctgctggaagaggaggggagaggaggaggaag

SEQ ID NO: 320213 - DNA, 197 bp, Homo sapiens; identical to SEQ ID NO: 216734
  chr16:4478613-4478810
  hypo

SEQ ID NO: 320214 - DNA, 249 bp, Homo sapiens; identical to SEQ ID NO: 216735
  chr16:4511753-4512002
  hypo

SEQ ID NO: 320215 - DNA, 248 bp, Homo sapiens; identical to SEQ ID NO: 268698
  chr16:4513532-4513780
  hypo

SEQ ID NO: 320216 - DNA, 92 bp, Homo sapiens; identical to SEQ ID NO: 268699
  chr16:4527578-4527670
  hypo

SEQ ID NO: 320217 - DNA, 144 bp, Homo sapiens; identical to SEQ ID NO: 268700
  chr16:4557896-4558040
  hypo

SEQ ID NO: 320218 - DNA, 45 bp, Homo sapiens; identical to SEQ ID NO: 268701
  chr16:4606718-4606763
  hypo

SEQ ID NO: 320219 - DNA, 116 bp, Homo sapiens; identical to SEQ ID NO: 268702
  chr16:4644648-4644764
  hypo

SEQ ID NO: 320220 - DNA, 100 bp, Homo sapiens
  chr16:4645033-4645133
  hypo
accagagagagggccgtggccacaggaccatggcctgtgacgaaggacgatgagctaggaaaggtgctgggctggtgccaagggacgccagtccacggag

SEQ ID NO: 320221 - DNA, 246 bp, Homo sapiens; identical to SEQ ID NO: 268704
  chr16:4665340-4665586
  hypo

SEQ ID NO: 320222 - DNA, 100 bp, Homo sapiens; identical to SEQ ID NO: 268705
  chr16:4671351-4671451
  hypo

SEQ ID NO: 320223 - DNA, 92 bp, Homo sapiens; identical to SEQ ID NO: 216736
  chr16:4689936-4690028
  hypo

SEQ ID NO: 320224 - DNA, 526 bp, Homo sapiens; identical to SEQ ID NO: 216737
  chr16:4704660-4705186
  hypo

SEQ ID NO: 320225 - DNA, 455 bp, Homo sapiens; identical to SEQ ID NO: 268708
  chr16:4717781-4718236
  hypo

SEQ ID NO: 320226 - DNA, 100 bp, Homo sapiens; identical to SEQ ID NO: 268709
  chr16:4719477-4719577
  hypo

SEQ ID NO: 320227 - DNA, 103 bp, Homo sapiens; identical to SEQ ID NO: 216738
  chr16:4723493-4723596
  hypo

SEQ ID NO: 320228 - DNA, 226 bp, Homo sapiens; identical to SEQ ID NO: 268711
  chr16:4731810-4732036
  hypo

SEQ ID NO: 320229 - DNA, 67 bp, Homo sapiens; identical to SEQ ID NO: 268712
  chr16:4748493-4748560
  hypo

SEQ ID NO: 320230 - DNA, 101 bp, Homo sapiens; identical to SEQ ID NO: 268713
  chr16:4748901-4749002
  hypo

SEQ ID NO: 320231 - DNA, 336 bp, Homo sapiens; identical to SEQ ID NO: 268714
  chr16:4779953-4780289
  hypo

SEQ ID NO: 320232 - DNA, 291 bp, Homo sapiens; identical to SEQ ID NO: 216740
  chr16:4787716-4788007
  hypo

SEQ ID NO: 320233 - DNA, 142 bp, Homo sapiens; identical to SEQ ID NO: 268716
  chr16:4795507-4795649
  hypo

SEQ ID NO: 320234 - DNA, 592 bp, Homo sapiens; identical to SEQ ID NO: 268717
  chr16:4802455-4803047
  hypo

SEQ ID NO: 320235 - DNA, 134 bp, Homo sapiens; identical to SEQ ID NO: 268718
  chr16:4841348-4841482
  hypo

SEQ ID NO: 320236 - DNA, 93 bp, Homo sapiens; identical to SEQ ID NO: 216743
  chr16:4845270-4845363
  hypo

SEQ ID NO: 320237 - DNA, 174 bp, Homo sapiens; identical to SEQ ID NO: 216744
  chr16:4845962-4846136
  hypo

SEQ ID NO: 320238 - DNA, 393 bp, Homo sapiens; identical to SEQ ID NO: 291320
  chr16:4852797-4853190
  hypo

SEQ ID NO: 320239 - DNA, 96 bp, Homo sapiens; identical to SEQ ID NO: 216745
  chr16:4900508-4900604
  hypo

SEQ ID NO: 320240 - DNA, 117 bp, Homo sapiens; identical to SEQ ID NO: 216746
  chr16:4900634-4900751
  hypo

SEQ ID NO: 320241 - DNA, 138 bp, Homo sapiens; identical to SEQ ID NO: 216747
  chr16:4920096-4920234
  hypo

SEQ ID NO: 320242 - DNA, 200 bp, Homo sapiens; identical to SEQ ID NO: 216748
  chr16:4920289-4920489
  hypo

SEQ ID NO: 320243 - DNA, 335 bp, Homo sapiens; identical to SEQ ID NO: 216749
  chr16:4920526-4920861
  hypo

SEQ ID NO: 320244 - DNA, 50 bp, Homo sapiens
  chr16:4931479-4931529
  hypo
tccagctaagtgatcaggcacgttgagagtatacggtgtcctcagcacat

SEQ ID NO: 320245 - DNA, 78 bp, Homo sapiens
  chr16:4931559-4931637
  hypo
tcctgactcccagggtacagcgcccagtaactcatccttcattcagaggtttgctggccttcccggtttcccaaggag

SEQ ID NO: 320246 - DNA, 170 bp, Homo sapiens
  chr16:4931953-4932123
  hypo
cccacgtaccattgcgcgtgcagctggagcagaataccctcatttttaggaatctagtgatgcctcttgcctcagggaaacgtttctttgatggggagtttgagatttcttttccttgtttatgctttatttgtggtaatgaaagagcgaatgactgaacagccatggca

SEQ ID NO: 320247 - DNA, 147 bp, Homo sapiens
  chr16:4932153-4932300
  hypo
gggtggggcagagcagcctcggggtctgggggctgcaggggtttccctggcgcagcgaaagtctctgagcacttaccgggcgtgaccgtttcttaggtgtgagaggggctgtggcttttgtgcagcgactatgttggtgttaggggt

SEQ ID NO: 320248 - DNA, 511 bp, Homo sapiens; identical to SEQ ID NO: 268727
  chr16:4933220-4933731
  hypo

SEQ ID NO: 320249 - DNA, 80 bp, Homo sapiens; identical to SEQ ID NO: 268728
  chr16:4960036-4960116
  hypo

SEQ ID NO: 320250 - DNA, 157 bp, Homo sapiens; identical to SEQ ID NO: 216751
  chr16:4971735-4971892
  hypo

SEQ ID NO: 320251 - DNA, 167 bp, Homo sapiens; identical to SEQ ID NO: 216752
  chr16:4980311-4980478
  hypo

SEQ ID NO: 320252 - DNA, 366 bp, Homo sapiens; identical to SEQ ID NO: 268731
  chr16:4981429-4981795
  hypo

SEQ ID NO: 320253 - DNA, 681 bp, Homo sapiens; identical to SEQ ID NO: 204109
  chr16:5007929-5008610
  hypo

SEQ ID NO: 320254 - DNA, 207 bp, Homo sapiens; identical to SEQ ID NO: 268732
  chr16:5084818-5085025
  hypo

SEQ ID NO: 320255 - DNA, 141 bp, Homo sapiens; identical to SEQ ID NO: 291323
  chr16:5121865-5122006
  hypo

SEQ ID NO: 320256 - DNA, 204 bp, Homo sapiens; identical to SEQ ID NO: 268733
  chr16:5406087-5406291
  hypo

SEQ ID NO: 320257 - DNA, 78 bp, Homo sapiens; identical to SEQ ID NO: 268734
  chr16:5481660-5481738
  hypo

SEQ ID NO: 320258 - DNA, 206 bp, Homo sapiens; identical to SEQ ID NO: 216754
  chr16:5628622-5628828
  hypo

SEQ ID NO: 320259 - DNA, 380 bp, Homo sapiens; identical to SEQ ID NO: 268736
  chr16:5703273-5703653
  hypo

SEQ ID NO: 320260 - DNA, 31 bp, Homo sapiens; identical to SEQ ID NO: 268737
  chr16:6838744-6838775
  hypo

SEQ ID NO: 320261 - DNA, 99 bp, Homo sapiens; identical to SEQ ID NO: 268738
  chr16:6860826-6860925
  hypo

SEQ ID NO: 320262 - DNA, 34 bp, Homo sapiens; identical to SEQ ID NO: 268739
  chr16:6885177-6885211
  hypo

SEQ ID NO: 320263 - DNA, 32 bp, Homo sapiens; identical to SEQ ID NO: 268740
  chr16:8410251-8410283
  hypo

SEQ ID NO: 320264 - DNA, 252 bp, Homo sapiens; identical to SEQ ID NO: 216755
  chr16:8722899-8723151
  hypo

SEQ ID NO: 320265 - DNA, 829 bp, Homo sapiens; identical to SEQ ID NO: 291338
  chr16:8767886-8768715
  hypo

SEQ ID NO: 320266 - DNA, 244 bp, Homo sapiens
  chr16:8870109-8870353
  hypo
cttcaagagaggaggcggggcgcctggggtaagtgactcctgcagggtgtgcatgtgtgtgaagccttccaacacccgttcctcattccagccctaccggatcttcaacacctggctgggggacccgtccaagaacctgttgctggctgaggtcatcaacatcatcaagcgggaggacctgctaaataatgcagcccatgccgggaaggccctgctcacaggactgctggacctccaggtaaca

SEQ ID NO: 320267 - DNA, 442 bp, Homo sapiens; identical to SEQ ID NO: 268743
  chr16:8995949-8996391
  hypo

SEQ ID NO: 320268 - DNA, 84 bp, Homo sapiens; identical to SEQ ID NO: 216758
  chr16:9005257-9005341
  hypo

SEQ ID NO: 320269 - DNA, 129 bp, Homo sapiens; identical to SEQ ID NO: 268746
  chr16:9013680-9013809
  hypo

SEQ ID NO: 320270 - DNA, 31 bp, Homo sapiens; identical to SEQ ID NO: 268747
  chr16:9016042-9016073
  hypo

SEQ ID NO: 320271 - DNA, 32 bp, Homo sapiens
  chr16:9062199-9062231
  hypo
gttggccagtgcattcgctcacgcctgtaatc

SEQ ID NO: 320272 - DNA, 327 bp, Homo sapiens; identical to SEQ ID NO: 204118
  chr16:9186867-9187194
  hypo

SEQ ID NO: 320273 - DNA, 135 bp, Homo sapiens; identical to SEQ ID NO: 268749
  chr16:9218839-9218974
  hypo

SEQ ID NO: 320274 - DNA, 80 bp, Homo sapiens; identical to SEQ ID NO: 216760
  chr16:9222467-9222547
  hypo

SEQ ID NO: 320275 - DNA, 175 bp, Homo sapiens; identical to SEQ ID NO: 268751
  chr16:10031818-10031993
  hypo

SEQ ID NO: 320276 - DNA, 97 bp, Homo sapiens; identical to SEQ ID NO: 268752
  chr16:10517770-10517867
  hypo

SEQ ID NO: 320277 - DNA, 186 bp, Homo sapiens; identical to SEQ ID NO: 216761
  chr16:10631325-10631511
  hypo

SEQ ID NO: 320278 - DNA, 772 bp, Homo sapiens; identical to SEQ ID NO: 204120
  chr16:10673913-10674685
  hypo

SEQ ID NO: 320279 - DNA, 103 bp, Homo sapiens; identical to SEQ ID NO: 268754
  chr16:10823580-10823683
  hypo

SEQ ID NO: 320280 - DNA, 257 bp, Homo sapiens; identical to SEQ ID NO: 216763
  chr16:10868652-10868909
  hypo

SEQ ID NO: 320281 - DNA, 38 bp, Homo sapiens; identical to SEQ ID NO: 268756
  chr16:10913111-10913149
  hypo

SEQ ID NO: 320282 - DNA, 38 bp, Homo sapiens; identical to SEQ ID NO: 268757
  chr16:10913329-10913367
  hypo

SEQ ID NO: 320283 - DNA, 199 bp, Homo sapiens; identical to SEQ ID NO: 268758
  chr16:11000393-11000592
  hypo

SEQ ID NO: 320284 - DNA, 114 bp, Homo sapiens; identical to SEQ ID NO: 204121
  chr16:11035552-11035666
  hypo

SEQ ID NO: 320285 - DNA, 62 bp, Homo sapiens; identical to SEQ ID NO: 268759
  chr16:11037115-11037177
  hypo

SEQ ID NO: 320286 - DNA, 54 bp, Homo sapiens; identical to SEQ ID NO: 268760
  chr16:11072431-11072485
  hypo

SEQ ID NO: 320287 - DNA, 314 bp, Homo sapiens; identical to SEQ ID NO: 268761
  chr16:11072844-11073158
  hypo

SEQ ID NO: 320288 - DNA, 196 bp, Homo sapiens; identical to SEQ ID NO: 268762
  chr16:11085470-11085666
  hypo

SEQ ID NO: 320289 - DNA, 47 bp, Homo sapiens; identical to SEQ ID NO: 216766
  chr16:11118477-11118524
  hypo

SEQ ID NO: 320290 - DNA, 208 bp, Homo sapiens; identical to SEQ ID NO: 216767
  chr16:11118554-11118762
  hypo

SEQ ID NO: 320291 - DNA, 356 bp, Homo sapiens; identical to SEQ ID NO: 216768
  chr16:11151037-11151393
  hypo

SEQ ID NO: 320292 - DNA, 53 bp, Homo sapiens; identical to SEQ ID NO: 268765
  chr16:11157538-11157591
  hypo

SEQ ID NO: 320293 - DNA, 186 bp, Homo sapiens; identical to SEQ ID NO: 216769
  chr16:11174343-11174529
  hypo

SEQ ID NO: 320294 - DNA, 143 bp, Homo sapiens; identical to SEQ ID NO: 216770
  chr16:11178512-11178655
  hypo

SEQ ID NO: 320295 - DNA, 634 bp, Homo sapiens
  chr16:11178685-11179319
  hypo
ctgtggagaaagaggtagccggggctgggtggtgatttacctcgaggaaaattaatatggtgccatcaattctgaaggcagaaagggcccatggccagaaggctgcacgcaggctggaataactcacggcccatgagggccctgagtttggggaggcctctccttggccctggatataaatcagcagcccttttgcagagagagagtcggagttttgtcaggcctgggggaagggagccagcaccagaagcccctcttccccaggagcctgtcgttgtctgaagggttgaaaggcacctctgtgccacccttctcggccagcaccaagcactggactcatttacagacgaggccatgaagcccccaccctgggttccaggaggatcacgggaagggggctttcagcctggctgtcagagaagaatgtgacaggcccattttcactccacaggccttaattggatggtcagagggcacatctgtggcttataagaaacagatggcgggatgggttagtgaaggagaaagcacgcttgcttcaggttgagtgcccgtggaggtgctggggcagcacgctggcaagcaggcagactcggccaagacccagctttgtcacgtgcgtgaggccttggct

SEQ ID NO: 320296 - DNA, 234 bp, Homo sapiens; identical to SEQ ID NO: 268768
  chr16:11192355-11192589
  hypo

SEQ ID NO: 320297 - DNA, 346 bp, Homo sapiens; identical to SEQ ID NO: 216772
  chr16:11192848-11193194
  hypo

SEQ ID NO: 320298 - DNA, 616 bp, Homo sapiens; identical to SEQ ID NO: 268770
  chr16:11219553-11220169
  hypo

SEQ ID NO: 320299 - DNA, 41 bp, Homo sapiens; identical to SEQ ID NO: 268771
  chr16:11225773-11225814
  hypo

SEQ ID NO: 320300 - DNA, 178 bp, Homo sapiens
  chr16:11232440-11232618
  hypo
gtgatgcccgtgggcggatgagaaaagtcccacaggctggggtgcggccttccttacctttctctggccatttgccacttacttgtactataggattatattgcttgtttcaaaaaacctaaatgaccactgttttcactcaacagcgtatcctggagtgtttttcattttagttcgc

SEQ ID NO: 320301 - DNA, 110 bp, Homo sapiens; identical to SEQ ID NO: 216775
  chr16:11232663-11232773
  hypo

SEQ ID NO: 320302 - DNA, 213 bp, Homo sapiens; identical to SEQ ID NO: 268773
  chr16:11249099-11249312
  hypo

SEQ ID NO: 320303 - DNA, 49 bp, Homo sapiens; identical to SEQ ID NO: 268774
  chr16:11249342-11249391
  hypo

SEQ ID NO: 320304 - DNA, 226 bp, Homo sapiens; identical to SEQ ID NO: 268775
  chr16:11249644-11249870
  hypo

SEQ ID NO: 320305 - DNA, 104 bp, Homo sapiens; identical to SEQ ID NO: 216776
  chr16:11265077-11265181
  hypo

SEQ ID NO: 320306 - DNA, 134 bp, Homo sapiens; identical to SEQ ID NO: 268777
  chr16:11267978-11268112
  hypo

SEQ ID NO: 320307 - DNA, 393 bp, Homo sapiens; identical to SEQ ID NO: 268778
  chr16:11272123-11272516
  hypo

SEQ ID NO: 320308 - DNA, 596 bp, Homo sapiens; identical to SEQ ID NO: 268779
  chr16:11275089-11275685
  hypo

SEQ ID NO: 320309 - DNA, 138 bp, Homo sapiens
  chr16:11282895-11283033
  hypo
tttgcatgccccagcggatggtaggaaccactccgcttgttcattcaatccccgtgtttgttctttggctccactctgcagcactagctcccgggccaggctgggcgtggcgtagatggaagatggtaaagaagccag

SEQ ID NO: 320310 - DNA, 119 bp, Homo sapiens; identical to SEQ ID NO: 268781
  chr16:11323718-11323837
  hypo

SEQ ID NO: 320311 - DNA, 119 bp, Homo sapiens; identical to SEQ ID NO: 268782
  chr16:11344316-11344435
  hypo

SEQ ID NO: 320312 - DNA, 416 bp, Homo sapiens; identical to SEQ ID NO: 225015
  chr16:11348663-11349079
  hypo

SEQ ID NO: 320313 - DNA, 52 bp, Homo sapiens; identical to SEQ ID NO: 216777
  chr16:11370335-11370387
  hypo

SEQ ID NO: 320314 - DNA, 387 bp, Homo sapiens; identical to SEQ ID NO: 268784
  chr16:11398035-11398422
  hypo

SEQ ID NO: 320315 - DNA, 47 bp, Homo sapiens; identical to SEQ ID NO: 268785
  chr16:11443253-11443300
  hypo

SEQ ID NO: 320316 - DNA, 121 bp, Homo sapiens; identical to SEQ ID NO: 268786
  chr16:11541944-11542065
  hypo

SEQ ID NO: 320317 - DNA, 160 bp, Homo sapiens; identical to SEQ ID NO: 216779
  chr16:11622039-11622199
  hypo

SEQ ID NO: 320318 - DNA, 161 bp, Homo sapiens; identical to SEQ ID NO: 268788
  chr16:11641619-11641780
  hypo

SEQ ID NO: 320319 - DNA, 108 bp, Homo sapiens; identical to SEQ ID NO: 216780
  chr16:11703386-11703494
  hypo

SEQ ID NO: 320320 - DNA, 158 bp, Homo sapiens; identical to SEQ ID NO: 268790
  chr16:11712391-11712549
  hypo

SEQ ID NO: 320321 - DNA, 110 bp, Homo sapiens
  chr16:11770050-11770160
  hypo
gacgaggagagcatcgtgggggatggggagaccaaggaacccttcctgctggtgcagtattcggccaagggaccgtgcgtggagagaaaggccaagctgatgactcccaa

SEQ ID NO: 320322 - DNA, 134 bp, Homo sapiens
  chr16:11770190-11770324
  hypo
gcaaggctcctggtcctgtttgcagccggccaagaggcgctgggaggggcaaaaccatacggatgcgctgctgtctgagaggaagggctgacacttgctggcatggcctctgcgggcttcgtcatcgcatgcac

SEQ ID NO: 320323 - DNA, 186 bp, Homo sapiens; identical to SEQ ID NO: 216781
  chr16:11770870-11771056
  hypo

SEQ ID NO: 320324 - DNA, 214 bp, Homo sapiens; identical to SEQ ID NO: 216782
  chr16:11775050-11775264
  hypo

SEQ ID NO: 320325 - DNA, 72 bp, Homo sapiens; identical to SEQ ID NO: 268794
  chr16:11786030-11786102
  hypo

SEQ ID NO: 320326 - DNA, 187 bp, Homo sapiens; identical to SEQ ID NO: 216783
  chr16:11792617-11792804
  hypo

SEQ ID NO: 320327 - DNA, 213 bp, Homo sapiens; identical to SEQ ID NO: 268796
  chr16:11793450-11793663
  hypo

SEQ ID NO: 320328 - DNA, 31 bp, Homo sapiens; identical to SEQ ID NO: 268797
  chr16:11809451-11809482
  hypo

SEQ ID NO: 320329 - DNA, 180 bp, Homo sapiens; identical to SEQ ID NO: 216784
  chr16:11831275-11831455
  hypo

SEQ ID NO: 320330 - DNA, 45 bp, Homo sapiens; identical to SEQ ID NO: 268799
  chr16:11851041-11851086
  hypo

SEQ ID NO: 320331 - DNA, 179 bp, Homo sapiens
  chr16:11853076-11853255
  hypo
gaaaacctccatcacggagaatgcattcttgaataccatcaacctacttgtctgtatgaggtataaatcctagtacaactaattattagcttatcttagtttgtgcttcaacggcagctggccctacattatttagcttacgtggcattaaatgcttagcatctgtcacgtttttcaga

SEQ ID NO: 320332 - DNA, 141 bp, Homo sapiens; identical to SEQ ID NO: 216785
  chr16:11879780-11879921
  hypo

SEQ ID NO: 320333 - DNA, 39 bp, Homo sapiens; identical to SEQ ID NO: 216786
  chr16:11900211-11900250
  hypo

SEQ ID NO: 320334 - DNA, 40 bp, Homo sapiens; identical to SEQ ID NO: 216787
  chr16:11968754-11968794
  hypo

SEQ ID NO: 320335 - DNA, 89 bp, Homo sapiens; identical to SEQ ID NO: 216788
  chr16:11974694-11974783
  hypo

SEQ ID NO: 320336 - DNA, 44 bp, Homo sapiens; identical to SEQ ID NO: 268806
  chr16:11989479-11989523
  hypo

SEQ ID NO: 320337 - DNA, 180 bp, Homo sapiens; identical to SEQ ID NO: 216789
  chr16:12011433-12011613
  hypo

SEQ ID NO: 320338 - DNA, 120 bp, Homo sapiens; identical to SEQ ID NO: 268809
  chr16:12018078-12018198
  hypo

SEQ ID NO: 320339 - DNA, 36 bp, Homo sapiens; identical to SEQ ID NO: 268810
  chr16:12042328-12042364
  hypo

SEQ ID NO: 320340 - DNA, 120 bp, Homo sapiens; identical to SEQ ID NO: 268811
  chr16:12068910-12069030
  hypo

SEQ ID NO: 320341 - DNA, 224 bp, Homo sapiens; identical to SEQ ID NO: 216790
  chr16:12084473-12084697
  hypo

SEQ ID NO: 320342 - DNA, 148 bp, Homo sapiens; identical to SEQ ID NO: 268813
  chr16:12118317-12118465
  hypo

SEQ ID NO: 320343 - DNA, 160 bp, Homo sapiens
  chr16:12132239-12132399
  hypo
gttaacaggtgccccggggcagctcttctcaacaccccttcctggcacttgttcttgttggcattcggctttcaggtgtttggagaaccagaagcccttgcccgctttttgacttaaccccatgtttcaaagcagatcagtgtatatccctaaattaaat

SEQ ID NO: 320344 - DNA, 397 bp, Homo sapiens
  chr16:12132450-12132847
  hypo
acattaattctggcagtggaagcggaaccctgctgggataattcttatcatcatcagcatcaccctgactagctttaaaaggattctgtagcagtaagcaatttgcagaattgaaaggtgaaaacacactttaaagcgttcatgtagattcaaggtcggagggaggtgactgcatttttcaagacaggctgcaggtgagagtcacttgactggaaatgtgatggacgtaccgacaatggtctggggtatttcgaaatacgttgttggccagctggcccagggtgttgttgtcgccagattccccgtcctggtttcttgagtgaggcggagaatggaaggaaggctgttttgtacagttgtgtggagtagactgatcggatgagcttgggaagtggat

SEQ ID NO: 320345 - DNA, 78 bp, Homo sapiens; identical to SEQ ID NO: 216792
  chr16:12136759-12136837
  hypo

SEQ ID NO: 320346 - DNA, 111 bp, Homo sapiens; identical to SEQ ID NO: 216793
  chr16:12142577-12142688
  hypo

SEQ ID NO: 320347 - DNA, 33 bp, Homo sapiens; identical to SEQ ID NO: 268817
  chr16:12157506-12157539
  hypo

SEQ ID NO: 320348 - DNA, 479 bp, Homo sapiens; identical to SEQ ID NO: 268818
  chr16:12172489-12172968
  hypo

SEQ ID NO: 320349 - DNA, 170 bp, Homo sapiens; identical to SEQ ID NO: 216794
  chr16:12210602-12210772
  hypo

SEQ ID NO: 320350 - DNA, 88 bp, Homo sapiens; identical to SEQ ID NO: 216795
  chr16:12210896-12210984
  hypo

SEQ ID NO: 320351 - DNA, 88 bp, Homo sapiens; identical to SEQ ID NO: 204123
  chr16:12211191-12211279
  hypo

SEQ ID NO: 320352 - DNA, 196 bp, Homo sapiens; identical to SEQ ID NO: 268821
  chr16:12237125-12237321
  hypo

SEQ ID NO: 320353 - DNA, 181 bp, Homo sapiens; identical to SEQ ID NO: 268822
  chr16:12264697-12264878
  hypo

SEQ ID NO: 320354 - DNA, 54 bp, Homo sapiens; identical to SEQ ID NO: 268823
  chr16:12272503-12272557
  hypo

SEQ ID NO: 320355 - DNA, 85 bp, Homo sapiens; identical to SEQ ID NO: 268824
  chr16:12286197-12286282
  hypo

SEQ ID NO: 320356 - DNA, 137 bp, Homo sapiens; identical to SEQ ID NO: 268825
  chr16:12289443-12289580
  hypo

SEQ ID NO: 320357 - DNA, 188 bp, Homo sapiens; identical to SEQ ID NO: 268826
  chr16:12293539-12293727
  hypo

SEQ ID NO: 320358 - DNA, 83 bp, Homo sapiens; identical to SEQ ID NO: 268827
  chr16:12327925-12328008
  hypo

SEQ ID NO: 320359 - DNA, 101 bp, Homo sapiens; identical to SEQ ID NO: 268828
  chr16:12331021-12331122
  hypo

SEQ ID NO: 320360 - DNA, 169 bp, Homo sapiens; identical to SEQ ID NO: 268829
  chr16:12377985-12378154
  hypo

SEQ ID NO: 320361 - DNA, 84 bp, Homo sapiens; identical to SEQ ID NO: 268830
  chr16:12390747-12390831
  hypo

SEQ ID NO: 320362 - DNA, 82 bp, Homo sapiens; identical to SEQ ID NO: 268831
  chr16:12399116-12399198
  hypo

SEQ ID NO: 320363 - DNA, 358 bp, Homo sapiens; identical to SEQ ID NO: 268832
  chr16:12412005-12412363
  hypo

SEQ ID NO: 320364 - DNA, 92 bp, Homo sapiens; identical to SEQ ID NO: 268833
  chr16:12415815-12415907
  hypo

SEQ ID NO: 320365 - DNA, 80 bp, Homo sapiens; identical to SEQ ID NO: 268834
  chr16:12497524-12497604
  hypo

SEQ ID NO: 320366 - DNA, 135 bp, Homo sapiens; identical to SEQ ID NO: 268835
  chr16:12498045-12498180
  hypo

SEQ ID NO: 320367 - DNA, 327 bp, Homo sapiens; identical to SEQ ID NO: 268837
  chr16:12579140-12579467
  hypo

SEQ ID NO: 320368 - DNA, 272 bp, Homo sapiens; identical to SEQ ID NO: 268838
  chr16:12609442-12609714
  hypo

SEQ ID NO: 320369 - DNA, 36 bp, Homo sapiens
  chr16:12758795-12758831
  hypo
gctcatctagactgtagtatcggtgaacaattttct

SEQ ID NO: 320370 - DNA, 56 bp, Homo sapiens; identical to SEQ ID NO: 268840
  chr16:12777325-12777381
  hypo

SEQ ID NO: 320371 - DNA, 35 bp, Homo sapiens; identical to SEQ ID NO: 268841
  chr16:12782489-12782524
  hypo

SEQ ID NO: 320372 - DNA, 91 bp, Homo sapiens; identical to SEQ ID NO: 268842
  chr16:12800830-12800921
  hypo

SEQ ID NO: 320373 - DNA, 128 bp, Homo sapiens; identical to SEQ ID NO: 268843
  chr16:12850875-12851003
  hypo

SEQ ID NO: 320374 - DNA, 102 bp, Homo sapiens; identical to SEQ ID NO: 268844
  chr16:12867590-12867692
  hypo

SEQ ID NO: 320375 - DNA, 449 bp, Homo sapiens; identical to SEQ ID NO: 204124
  chr16:12897345-12897794
  hypo

SEQ ID NO: 320376 - DNA, 126 bp, Homo sapiens; identical to SEQ ID NO: 268845
  chr16:13157454-13157580
  hypo

SEQ ID NO: 320377 - DNA, 80 bp, Homo sapiens; identical to SEQ ID NO: 268846
  chr16:13643878-13643958
  hypo

SEQ ID NO: 320378 - DNA, 45 bp, Homo sapiens; identical to SEQ ID NO: 268847
  chr16:13740878-13740923
  hypo

SEQ ID NO: 320379 - DNA, 177 bp, Homo sapiens; identical to SEQ ID NO: 225021
  chr16:13877530-13877707
  hypo

SEQ ID NO: 320380 - DNA, 206 bp, Homo sapiens; identical to SEQ ID NO: 268848
  chr16:13977142-13977348
  hypo

SEQ ID NO: 320381 - DNA, 379 bp, Homo sapiens; identical to SEQ ID NO: 204125
  chr16:14396710-14397089
  hypo

SEQ ID NO: 320382 - DNA, 83 bp, Homo sapiens; identical to SEQ ID NO: 268849
  chr16:14494054-14494137
  hypo

SEQ ID NO: 320383 - DNA, 35 bp, Homo sapiens; identical to SEQ ID NO: 268850
  chr16:14525417-14525452
  hypo

SEQ ID NO: 320384 - DNA, 95 bp, Homo sapiens; identical to SEQ ID NO: 268851
  chr16:14525692-14525787
  hypo

SEQ ID NO: 320385 - DNA, 77 bp, Homo sapiens; identical to SEQ ID NO: 268852
  chr16:14632542-14632619
  hypo

SEQ ID NO: 320386 - DNA, 69 bp, Homo sapiens; identical to SEQ ID NO: 268853
  chr16:14692498-14692567
  hypo

SEQ ID NO: 320387 - DNA, 111 bp, Homo sapiens; identical to SEQ ID NO: 216800
  chr16:14725660-14725771
  hypo

SEQ ID NO: 320388 - DNA, 101 bp, Homo sapiens; identical to SEQ ID NO: 268855
  chr16:14728323-14728424
  hypo

SEQ ID NO: 320389 - DNA, 86 bp, Homo sapiens; identical to SEQ ID NO: 268857
  chr16:14734691-14734777
  hypo

SEQ ID NO: 320390 - DNA, 38 bp, Homo sapiens; identical to SEQ ID NO: 216801
  chr16:14735318-14735356
  hypo

SEQ ID NO: 320391 - DNA, 401 bp, Homo sapiens; identical to SEQ ID NO: 268859
  chr16:14761337-14761738
  hypo

SEQ ID NO: 320392 - DNA, 152 bp, Homo sapiens; identical to SEQ ID NO: 216803
  chr16:14763027-14763179
  hypo

SEQ ID NO: 320393 - DNA, 38 bp, Homo sapiens; identical to SEQ ID NO: 268861
  chr16:15055595-15055633
  hypo

SEQ ID NO: 320394 - DNA, 234 bp, Homo sapiens; identical to SEQ ID NO: 268862
  chr16:15122678-15122912
  hypo

SEQ ID NO: 320395 - DNA, 142 bp, Homo sapiens; identical to SEQ ID NO: 216804
  chr16:15129342-15129484
  hypo

SEQ ID NO: 320396 - DNA, 58 bp, Homo sapiens
  chr16:15191479-15191537
  hypo
cagagtgagactccgtctccaaaaaaaaaaaaaagaacataatgaacacctgtgaaca

SEQ ID NO: 320397 - DNA, 191 bp, Homo sapiens; identical to SEQ ID NO: 268865
  chr16:15541440-15541631
  hypo

SEQ ID NO: 320398 - DNA, 93 bp, Homo sapiens; identical to SEQ ID NO: 268866
  chr16:15602903-15602996
  hypo

SEQ ID NO: 320399 - DNA, 103 bp, Homo sapiens; identical to SEQ ID NO: 268868
  chr16:15606081-15606184
  hypo

SEQ ID NO: 320400 - DNA, 314 bp, Homo sapiens; identical to SEQ ID NO: 216805
  chr16:15606940-15607254
  hypo

SEQ ID NO: 320401 - DNA, 120 bp, Homo sapiens; identical to SEQ ID NO: 216806
  chr16:15607783-15607903
  hypo

SEQ ID NO: 320402 - DNA, 162 bp, Homo sapiens; identical to SEQ ID NO: 216807
  chr16:15608920-15609082
  hypo

SEQ ID NO: 320403 - DNA, 43 bp, Homo sapiens; identical to SEQ ID NO: 268872
  chr16:15626664-15626707
  hypo

SEQ ID NO: 320404 - DNA, 91 bp, Homo sapiens; identical to SEQ ID NO: 216808
  chr16:15649666-15649757
  hypo

SEQ ID NO: 320405 - DNA, 68 bp, Homo sapiens; identical to SEQ ID NO: 216809
  chr16:15693241-15693309
  hypo

SEQ ID NO: 320406 - DNA, 247 bp, Homo sapiens; identical to SEQ ID NO: 268875
  chr16:15704142-15704389
  hypo

SEQ ID NO: 320407 - DNA, 83 bp, Homo sapiens; identical to SEQ ID NO: 216811
  chr16:15707174-15707257
  hypo

SEQ ID NO: 320408 - DNA, 82 bp, Homo sapiens; identical to SEQ ID NO: 216812
  chr16:15707963-15708045
  hypo

SEQ ID NO: 320409 - DNA, 45 bp, Homo sapiens; identical to SEQ ID NO: 268878
  chr16:15710353-15710398
  hypo

SEQ ID NO: 320410 - DNA, 260 bp, Homo sapiens; identical to SEQ ID NO: 216813
  chr16:15723202-15723462
  hypo

SEQ ID NO: 320411 - DNA, 104 bp, Homo sapiens; identical to SEQ ID NO: 268880
  chr16:15728112-15728216
  hypo

SEQ ID NO: 320412 - DNA, 127 bp, Homo sapiens; identical to SEQ ID NO: 216814
  chr16:15729537-15729664
  hypo

SEQ ID NO: 320413 - DNA, 181 bp, Homo sapiens; identical to SEQ ID NO: 268882
  chr16:15729933-15730114
  hypo

SEQ ID NO: 320414 - DNA, 34 bp, Homo sapiens
  chr16:15746763-15746797
  hypo
ccttccgcctcagcctcccaacgtgccggggtgg

SEQ ID NO: 320415 - DNA, 39 bp, Homo sapiens
  chr16:15746825-15746864
  hypo
ttttaaaatctctaaagcgatctatgcttactgtatata

SEQ ID NO: 320416 - DNA, 99 bp, Homo sapiens; identical to SEQ ID NO: 216815
  chr16:15747494-15747593
  hypo

SEQ ID NO: 320417 - DNA, 53 bp, Homo sapiens; identical to SEQ ID NO: 216816
  chr16:15762731-15762784
  hypo

SEQ ID NO: 320418 - DNA, 95 bp, Homo sapiens
  chr16:15767615-15767710
  hypo
cacctgaggtgctgggattgcggcatgaggcaccgcacctggctctgggtgtttggtgaaggaaagtaatttggaagcagagcaggaatagaatc

SEQ ID NO: 320419 - DNA, 55 bp, Homo sapiens; identical to SEQ ID NO: 268888
  chr16:15798699-15798754
  hypo

SEQ ID NO: 320420 - DNA, 82 bp, Homo sapiens; identical to SEQ ID NO: 216817
  chr16:15799467-15799549
  hypo

SEQ ID NO: 320421 - DNA, 78 bp, Homo sapiens; identical to SEQ ID NO: 268890
  chr16:15808722-15808800
  hypo

SEQ ID NO: 320422 - DNA, 296 bp, Homo sapiens; identical to SEQ ID NO: 216818
  chr16:15820529-15820825
  hypo

SEQ ID NO: 320423 - DNA, 141 bp, Homo sapiens; identical to SEQ ID NO: 268892
  chr16:15843925-15844066
  hypo

SEQ ID NO: 320424 - DNA, 83 bp, Homo sapiens; identical to SEQ ID NO: 268893
  chr16:15979202-15979285
  hypo

SEQ ID NO: 320425 - DNA, 42 bp, Homo sapiens; identical to SEQ ID NO: 268894
  chr16:15991506-15991548
  hypo

SEQ ID NO: 320426 - DNA, 76 bp, Homo sapiens; identical to SEQ ID NO: 268895
  chr16:16019074-16019150
  hypo

SEQ ID NO: 320427 - DNA, 31 bp, Homo sapiens; identical to SEQ ID NO: 268896
  chr16:16022603-16022634
  hypo

SEQ ID NO: 320428 - DNA, 35 bp, Homo sapiens; identical to SEQ ID NO: 268897
  chr16:16041979-16042014
  hypo

SEQ ID NO: 320429 - DNA, 39 bp, Homo sapiens; identical to SEQ ID NO: 268898
  chr16:16090901-16090940
  hypo

SEQ ID NO: 320430 - DNA, 195 bp, Homo sapiens; identical to SEQ ID NO: 216819
  chr16:16103293-16103488
  hypo

SEQ ID NO: 320431 - DNA, 234 bp, Homo sapiens; identical to SEQ ID NO: 268900
  chr16:16180668-16180902
  hypo

SEQ ID NO: 320432 - DNA, 77 bp, Homo sapiens; identical to SEQ ID NO: 268901
  chr16:16188313-16188390
  hypo

SEQ ID NO: 320433 - DNA, 306 bp, Homo sapiens; identical to SEQ ID NO: 216820
  chr16:16208594-16208900
  hypo

SEQ ID NO: 320434 - DNA, 206 bp, Homo sapiens; identical to SEQ ID NO: 216821
  chr16:16219544-16219750
  hypo

SEQ ID NO: 320435 - DNA, 224 bp, Homo sapiens; identical to SEQ ID NO: 268904
  chr16:16227959-16228183
  hypo

SEQ ID NO: 320436 - DNA, 43 bp, Homo sapiens; identical to SEQ ID NO: 268905
  chr16:16245755-16245798
  hypo

SEQ ID NO: 320437 - DNA, 279 bp, Homo sapiens; identical to SEQ ID NO: 268906
  chr16:16259432-16259711
  hypo

SEQ ID NO: 320438 - DNA, 186 bp, Homo sapiens; identical to SEQ ID NO: 216823
  chr16:16282899-16283085
  hypo

SEQ ID NO: 320439 - DNA, 42 bp, Homo sapiens; identical to SEQ ID NO: 268908
  chr16:17054605-17054647
  hypo

SEQ ID NO: 320440 - DNA, 75 bp, Homo sapiens; identical to SEQ ID NO: 268909
  chr16:17294379-17294454
  hypo

SEQ ID NO: 320441 - DNA, 138 bp, Homo sapiens; identical to SEQ ID NO: 268910
  chr16:17357449-17357587
  hypo

SEQ ID NO: 320442 - DNA, 42 bp, Homo sapiens; identical to SEQ ID NO: 216824
  chr16:17754966-17755008
  hypo

SEQ ID NO: 320443 - DNA, 37 bp, Homo sapiens; identical to SEQ ID NO: 268912
  chr16:18036046-18036083
  hypo

SEQ ID NO: 320444 - DNA, 50 bp, Homo sapiens; identical to SEQ ID NO: 268913
  chr16:18076376-18076426
  hypo

SEQ ID NO: 320445 - DNA, 114 bp, Homo sapiens; identical to SEQ ID NO: 216825
  chr16:18804300-18804414
  hypo

SEQ ID NO: 320446 - DNA, 43 bp, Homo sapiens; identical to SEQ ID NO: 216826
  chr16:18884774-18884817
  hypo

SEQ ID NO: 320447 - DNA, 160 bp, Homo sapiens; identical to SEQ ID NO: 268918
  chr16:19051022-19051182
  hypo

SEQ ID NO: 320448 - DNA, 36 bp, Homo sapiens; identical to SEQ ID NO: 268919
  chr16:19085558-19085594
  hypo

SEQ ID NO: 320449 - DNA, 42 bp, Homo sapiens; identical to SEQ ID NO: 216827
  chr16:19184226-19184268
  hypo

SEQ ID NO: 320450 - DNA, 355 bp, Homo sapiens; identical to SEQ ID NO: 216828
  chr16:19185277-19185632
  hypo

SEQ ID NO: 320451 - DNA, 89 bp, Homo sapiens; identical to SEQ ID NO: 268922
  chr16:19252128-19252217
  hypo

SEQ ID NO: 320452 - DNA, 158 bp, Homo sapiens; identical to SEQ ID NO: 216829
  chr16:19431054-19431212
  hypo

SEQ ID NO: 320453 - DNA, 31 bp, Homo sapiens; identical to SEQ ID NO: 90082
  chr16:19456420-19456451
  hypo

SEQ ID NO: 320454 - DNA, 81 bp, Homo sapiens; identical to SEQ ID NO: 268925
  chr16:19485545-19485626
  hypo

SEQ ID NO: 320455 - DNA, 130 bp, Homo sapiens; identical to SEQ ID NO: 268926
  chr16:19528378-19528508
  hypo

SEQ ID NO: 320456 - DNA, 45 bp, Homo sapiens; identical to SEQ ID NO: 268927
  chr16:19568731-19568776
  hypo

SEQ ID NO: 320457 - DNA, 257 bp, Homo sapiens; identical to SEQ ID NO: 268928
  chr16:19606512-19606769
  hypo

SEQ ID NO: 320458 - DNA, 33 bp, Homo sapiens; identical to SEQ ID NO: 268929
  chr16:19630525-19630558
  hypo

SEQ ID NO: 320459 - DNA, 92 bp, Homo sapiens; identical to SEQ ID NO: 268930
  chr16:19665686-19665778
  hypo

SEQ ID NO: 320460 - DNA, 86 bp, Homo sapiens; identical to SEQ ID NO: 268931
  chr16:19706325-19706411
  hypo

SEQ ID NO: 320461 - DNA, 137 bp, Homo sapiens; identical to SEQ ID NO: 216830
  chr16:19708367-19708504
  hypo

SEQ ID NO: 320462 - DNA, 47 bp, Homo sapiens; identical to SEQ ID NO: 216831
  chr16:19708561-19708608
  hypo

SEQ ID NO: 320463 - DNA, 224 bp, Homo sapiens; identical to SEQ ID NO: 216832
  chr16:19719066-19719290
  hypo

SEQ ID NO: 320464 - DNA, 100 bp, Homo sapiens; identical to SEQ ID NO: 268934
  chr16:19743742-19743842
  hypo

SEQ ID NO: 320465 - DNA, 185 bp, Homo sapiens; identical to SEQ ID NO: 216833
  chr16:19845505-19845690
  hypo

SEQ ID NO: 320466 - DNA, 343 bp, Homo sapiens; identical to SEQ ID NO: 216834
  chr16:19904164-19904507
  hypo

SEQ ID NO: 320467 - DNA, 83 bp, Homo sapiens; identical to SEQ ID NO: 268938
  chr16:20335323-20335406
  hypo

SEQ ID NO: 320468 - DNA, 35 bp, Homo sapiens; identical to SEQ ID NO: 268939
  chr16:20702408-20702443
  hypo

SEQ ID NO: 320469 - DNA, 164 bp, Homo sapiens; identical to SEQ ID NO: 216835
  chr16:20754570-20754734
  hypo

SEQ ID NO: 320470 - DNA, 39 bp, Homo sapiens; identical to SEQ ID NO: 216836
  chr16:20803222-20803261
  hypo

SEQ ID NO: 320471 - DNA, 79 bp, Homo sapiens; identical to SEQ ID NO: 268942
  chr16:20816394-20816473
  hypo

SEQ ID NO: 320472 - DNA, 182 bp, Homo sapiens; identical to SEQ ID NO: 204133
  chr16:20817451-20817633
  hypo

SEQ ID NO: 320473 - DNA, 75 bp, Homo sapiens; identical to SEQ ID NO: 268944
  chr16:20822044-20822119
  hypo

SEQ ID NO: 320474 - DNA, 100 bp, Homo sapiens; identical to SEQ ID NO: 216838
  chr16:20823438-20823538
  hypo

SEQ ID NO: 320475 - DNA, 139 bp, Homo sapiens; identical to SEQ ID NO: 268946
  chr16:20966046-20966185
  hypo

SEQ ID NO: 320476 - DNA, 157 bp, Homo sapiens; identical to SEQ ID NO: 268947
  chr16:21174564-21174721
  hypo

SEQ ID NO: 320477 - DNA, 53 bp, Homo sapiens; identical to SEQ ID NO: 216839
  chr16:21178770-21178823
  hypo

SEQ ID NO: 320478 - DNA, 31 bp, Homo sapiens; identical to SEQ ID NO: 216840
  chr16:21179024-21179055
  hypo

SEQ ID NO: 320479 - DNA, 120 bp, Homo sapiens; identical to SEQ ID NO: 216841
  chr16:21515406-21515526
  hypo

SEQ ID NO: 320480 - DNA, 233 bp, Homo sapiens; identical to SEQ ID NO: 268952
  chr16:21535692-21535925
  hypo

SEQ ID NO: 320481 - DNA, 149 bp, Homo sapiens
  chr16:21539210-21539359
  hypo
gcatgtcagtgcgacccacagcggggctggagctgctgaatgtgcacaacacacttcaccccgggcctggttcaggagcgggcaaggcagctgtacaccctgtccttcagcaaactcctcttgatcgatggaatcgaagtcaggagcat

SEQ ID NO: 320482 - DNA, 92 bp, Homo sapiens; identical to SEQ ID NO: 268956
  chr16:21567013-21567105
  hypo

SEQ ID NO: 320483 - DNA, 192 bp, Homo sapiens; identical to SEQ ID NO: 216842
  chr16:21569156-21569348
  hypo

SEQ ID NO: 320484 - DNA, 380 bp, Homo sapiens
  chr16:21569399-21569779
  hypo
gtacgggggacagagggaggaggctctaggctctgacttgcccttgcagagcttggaatccaggagtgtcagacggtggtagagataaaaagctgtgtgtctgagaggtgagggcgtgggctttggggccctaaacttgcttgggacgcccgggagggcccccgtggaagcggcgtttcagtggagccctgaagatgggtttctatttgtcaggtgaagataatggcagctccaggcagaaagggacgaccagcggaaaggaccctggtgagagcagccaccacgacggaacaggcagaagcaccagctggcaaaggcactgtcaggggcagcgggagatgggattggaagggcaacagggttggcgcccgtggtggcaa

SEQ ID NO: 320485 - DNA, 40 bp, Homo sapiens; identical to SEQ ID NO: 216844
  chr16:21633194-21633234
  hypo

SEQ ID NO: 320486 - DNA, 80 bp, Homo sapiens; identical to SEQ ID NO: 216845
  chr16:21635698-21635778
  hypo

SEQ ID NO: 320487 - DNA, 34 bp, Homo sapiens; identical to SEQ ID NO: 216846
  chr16:21666771-21666805
  hypo

SEQ ID NO: 320488 - DNA, 80 bp, Homo sapiens; identical to SEQ ID NO: 216847
  chr16:22083799-22083879
  hypo

SEQ ID NO: 320489 - DNA, 80 bp, Homo sapiens; identical to SEQ ID NO: 216848
  chr16:22084119-22084199
  hypo

SEQ ID NO: 320490 - DNA, 42 bp, Homo sapiens; identical to SEQ ID NO: 268964
  chr16:22216816-22216858
  hypo

SEQ ID NO: 320491 - DNA, 230 bp, Homo sapiens; identical to SEQ ID NO: 291386
  chr16:22217232-22217462
  hypo

SEQ ID NO: 320492 - DNA, 123 bp, Homo sapiens; identical to SEQ ID NO: 268965
  chr16:22236967-22237090
  hypo

SEQ ID NO: 320493 - DNA, 90 bp, Homo sapiens; identical to SEQ ID NO: 216849
  chr16:22285049-22285139
  hypo

SEQ ID NO: 320494 - DNA, 189 bp, Homo sapiens; identical to SEQ ID NO: 268967
  chr16:22324533-22324722
  hypo

SEQ ID NO: 320495 - DNA, 414 bp, Homo sapiens; identical to SEQ ID NO: 216850
  chr16:22325983-22326397
  hypo

SEQ ID NO: 320496 - DNA, 325 bp, Homo sapiens
  chr16:22326427-22326752
  hypo
gagtcagagcaggcccgccagcgccgtgtgcagtcctatgagttcctgcagaagaagcacgcagaggagccctgggtccacctgcattactatggcctgagggtgagcggggcttcgtggggtcctgggggaaacacctcggtgcccggaagggtcatggtgtggcctccgtgtctcaccttgaacttaagtcaaattcatgagtcatagccacagatagaggatcgagtcctgtgggcagtttacacttcactccagccgagccacttagcgtgggccccaggagagcaagaggaaaagatgcgagtccttggttccctgggtg

SEQ ID NO: 320497 - DNA, 192 bp, Homo sapiens; identical to SEQ ID NO: 216852
  chr16:22358431-22358623
  hypo

SEQ ID NO: 320498 - DNA, 79 bp, Homo sapiens; identical to SEQ ID NO: 216853
  chr16:22398761-22398840
  hypo

SEQ ID NO: 320499 - DNA, 89 bp, Homo sapiens; identical to SEQ ID NO: 268971
  chr16:22411852-22411941
  hypo

SEQ ID NO: 320500 - DNA, 153 bp, Homo sapiens; identical to SEQ ID NO: 268972
  chr16:22792389-22792542
  hypo

SEQ ID NO: 320501 - DNA, 42 bp, Homo sapiens; identical to SEQ ID NO: 268973
  chr16:23093841-23093883
  hypo

SEQ ID NO: 320502 - DNA, 34 bp, Homo sapiens; identical to SEQ ID NO: 268974
  chr16:23157624-23157658
  hypo

SEQ ID NO: 320503 - DNA, 202 bp, Homo sapiens; identical to SEQ ID NO: 291389
  chr16:23193696-23193898
  hypo

SEQ ID NO: 320504 - DNA, 198 bp, Homo sapiens; identical to SEQ ID NO: 291390
  chr16:23194201-23194399
  hypo

SEQ ID NO: 320505 - DNA, 201 bp, Homo sapiens; identical to SEQ ID NO: 291391
  chr16:23194436-23194637
  hypo

SEQ ID NO: 320506 - DNA, 136 bp, Homo sapiens; identical to SEQ ID NO: 291392
  chr16:23313253-23313389
  hypo

SEQ ID NO: 320507 - DNA, 33 bp, Homo sapiens; identical to SEQ ID NO: 268975
  chr16:23331328-23331361
  hypo

SEQ ID NO: 320508 - DNA, 96 bp, Homo sapiens; identical to SEQ ID NO: 268976
  chr16:23332278-23332374
  hypo

SEQ ID NO: 320509 - DNA, 184 bp, Homo sapiens; identical to SEQ ID NO: 216855
  chr16:23402109-23402293
  hypo

SEQ ID NO: 320510 - DNA, 155 bp, Homo sapiens; identical to SEQ ID NO: 268978
  chr16:23402871-23403026
  hypo

SEQ ID NO: 320511 - DNA, 359 bp, Homo sapiens; identical to SEQ ID NO: 268979
  chr16:23410367-23410726
  hypo

SEQ ID NO: 320512 - DNA, 49 bp, Homo sapiens; identical to SEQ ID NO: 268981
  chr16:23481441-23481490
  hypo

SEQ ID NO: 320513 - DNA, 200 bp, Homo sapiens; identical to SEQ ID NO: 268982
  chr16:23496842-23497042
  hypo

SEQ ID NO: 320514 - DNA, 128 bp, Homo sapiens; identical to SEQ ID NO: 268983
  chr16:23497824-23497952
  hypo

SEQ ID NO: 320515 - DNA, 35 bp, Homo sapiens; identical to SEQ ID NO: 268984
  chr16:23510926-23510961
  hypo

SEQ ID NO: 320516 - DNA, 72 bp, Homo sapiens; identical to SEQ ID NO: 268985
  chr16:23511603-23511675
  hypo

SEQ ID NO: 320517 - DNA, 256 bp, Homo sapiens; identical to SEQ ID NO: 268986
  chr16:23539149-23539405
  hypo

SEQ ID NO: 320518 - DNA, 384 bp, Homo sapiens; identical to SEQ ID NO: 268988
  chr16:23577993-23578377
  hypo

SEQ ID NO: 320519 - DNA, 144 bp, Homo sapiens
  chr16:23595588-23595732
  hypo
aaaaaaagaaacccagtgcccgtcagcagtcactccccatcctccctagctctggcaaccacccgtgtactttctatctctggatttgcctcttcttgacatttcatgtaaatggtatataacgtgtcatcttctgtgtctggc

SEQ ID NO: 320520 - DNA, 36 bp, Homo sapiens
  chr16:23595762-23595798
  hypo
tgtgctgtaacacacgtcacccatgcattttttttt

SEQ ID NO: 320521 - DNA, 85 bp, Homo sapiens; identical to SEQ ID NO: 268990
  chr16:23606211-23606296
  hypo

SEQ ID NO: 320522 - DNA, 41 bp, Homo sapiens; identical to SEQ ID NO: 216856
  chr16:23689211-23689252
  hypo

SEQ ID NO: 320523 - DNA, 172 bp, Homo sapiens; identical to SEQ ID NO: 268992
  chr16:23702179-23702351
  hypo

SEQ ID NO: 320524 - DNA, 97 bp, Homo sapiens; identical to SEQ ID NO: 204138
  chr16:23766000-23766097
  hypo

SEQ ID NO: 320525 - DNA, 103 bp, Homo sapiens; identical to SEQ ID NO: 204139
  chr16:23766130-23766233
  hypo

SEQ ID NO: 320526 - DNA, 86 bp, Homo sapiens; identical to SEQ ID NO: 268994
  chr16:24079284-24079370
  hypo

SEQ ID NO: 320527 - DNA, 142 bp, Homo sapiens; identical to SEQ ID NO: 216859
  chr16:24118921-24119063
  hypo

SEQ ID NO: 320528 - DNA, 121 bp, Homo sapiens; identical to SEQ ID NO: 268996
  chr16:24131552-24131673
  hypo

SEQ ID NO: 320529 - DNA, 42 bp, Homo sapiens; identical to SEQ ID NO: 268997
  chr16:24288802-24288844
  hypo

SEQ ID NO: 320530 - DNA, 44 bp, Homo sapiens; identical to SEQ ID NO: 204140
  chr16:24354628-24354672
  hypo

SEQ ID NO: 320531 - DNA, 250 bp, Homo sapiens
  chr16:24372758-24373008
  hypo
tatggttggtccttttatttcggagccttctctttcatcatcgcagaaattgtaggagtggttgccgtgcacatctatattgaaaaacatcagcagttacgagccaaatcccactcggagttcctgaagaaatctacttttgcccgcctcccaccctacaggtatcgattccggaggcggtcaagttctcgctccaccgagcccagatcccgagacctgtcccccatcagcaaaggcttccacaccatcc

SEQ ID NO: 320532 - DNA, 41 bp, Homo sapiens; identical to SEQ ID NO: 268999
  chr16:24587543-24587584
  hypo

SEQ ID NO: 320533 - DNA, 34 bp, Homo sapiens; identical to SEQ ID NO: 269000
  chr16:24707390-24707424
  hypo

SEQ ID NO: 320534 - DNA, 163 bp, Homo sapiens; identical to SEQ ID NO: 269001
  chr16:24739330-24739493
  hypo

SEQ ID NO: 320535 - DNA, 80 bp, Homo sapiens; identical to SEQ ID NO: 216861
  chr16:24772184-24772264
  hypo

SEQ ID NO: 320536 - DNA, 761 bp, Homo sapiens; identical to SEQ ID NO: 216862
  chr16:24837123-24837884
  hypo

SEQ ID NO: 320537 - DNA, 247 bp, Homo sapiens; identical to SEQ ID NO: 269004
  chr16:24849492-24849739
  hypo

SEQ ID NO: 320538 - DNA, 153 bp, Homo sapiens; identical to SEQ ID NO: 216863
  chr16:25006925-25007078
  hypo

SEQ ID NO: 320539 - DNA, 125 bp, Homo sapiens; identical to SEQ ID NO: 269006
  chr16:25009670-25009795
  hypo

SEQ ID NO: 320540 - DNA, 82 bp, Homo sapiens
  chr16:25071330-25071412
  hypo
tcattcttgaagggagttgtggcgtgctccctttccagctgtggcaaaactgcttattttctcaccaacacagtttgttata

SEQ ID NO: 320541 - DNA, 84 bp, Homo sapiens; identical to SEQ ID NO: 269008
  chr16:25168834-25168918
  hypo

SEQ ID NO: 320542 - DNA, 42 bp, Homo sapiens; identical to SEQ ID NO: 216864
  chr16:25266495-25266537
  hypo

SEQ ID NO: 320543 - DNA, 107 bp, Homo sapiens; identical to SEQ ID NO: 216865
  chr16:25266573-25266680
  hypo

SEQ ID NO: 320544 - DNA, 31 bp, Homo sapiens; identical to SEQ ID NO: 269010
  chr16:25290985-25291016
  hypo

SEQ ID NO: 320545 - DNA, 118 bp, Homo sapiens
  chr16:27052120-27052238
  hypo
ccatatttccaaacagaatgcgacggttccaggcaaagcaaatcaatattgtgctccgccattcatcttcattcgcgccacatccgcgcgctatccccggcgcttctcgcccaggctc

SEQ ID NO: 320546 - DNA, 119 bp, Homo sapiens
  chr16:27052308-27052427
  hypo
tcattaatacccgcatcggtcatttttacgagcctgccttaccccgaactcctcaccaccccggtgttgagtacactgttagtgatgcaggcagacacggagaggatgaaattgccact

SEQ ID NO: 320547 - DNA, 158 bp, Homo sapiens; identical to SEQ ID NO: 269012
  chr16:27063490-27063648
  hypo

SEQ ID NO: 320548 - DNA, 143 bp, Homo sapiens; identical to SEQ ID NO: 204142
  chr16:27121251-27121394
  hypo

SEQ ID NO: 320549 - DNA, 35 bp, Homo sapiens; identical to SEQ ID NO: 269013
  chr16:27219620-27219655
  hypo

SEQ ID NO: 320550 - DNA, 37 bp, Homo sapiens; identical to SEQ ID NO: 269014
  chr16:27220819-27220856
  hypo

SEQ ID NO: 320551 - DNA, 32 bp, Homo sapiens; identical to SEQ ID NO: 269015
  chr16:27242669-27242701
  hypo

SEQ ID NO: 320552 - DNA, 477 bp, Homo sapiens; identical to SEQ ID NO: 269016
  chr16:27244720-27245197
  hypo

SEQ ID NO: 320553 - DNA, 165 bp, Homo sapiens; identical to SEQ ID NO: 269017
  chr16:27268604-27268769
  hypo

SEQ ID NO: 320554 - DNA, 258 bp, Homo sapiens; identical to SEQ ID NO: 204144
  chr16:27280121-27280379
  hypo

SEQ ID NO: 320555 - DNA, 36 bp, Homo sapiens; identical to SEQ ID NO: 216868
  chr16:27309235-27309271
  hypo

SEQ ID NO: 320556 - DNA, 179 bp, Homo sapiens; identical to SEQ ID NO: 269019
  chr16:27356584-27356763
  hypo

SEQ ID NO: 320557 - DNA, 81 bp, Homo sapiens; identical to SEQ ID NO: 216869
  chr16:27475124-27475205
  hypo

SEQ ID NO: 320558 - DNA, 73 bp, Homo sapiens; identical to SEQ ID NO: 216870
  chr16:27475235-27475308
  hypo

SEQ ID NO: 320559 - DNA, 574 bp, Homo sapiens; identical to SEQ ID NO: 216871
  chr16:27475618-27476192
  hypo

SEQ ID NO: 320560 - DNA, 188 bp, Homo sapiens; identical to SEQ ID NO: 269023
  chr16:27506624-27506812
  hypo

SEQ ID NO: 320561 - DNA, 338 bp, Homo sapiens; identical to SEQ ID NO: 216872
  chr16:27510216-27510554
  hypo

SEQ ID NO: 320562 - DNA, 238 bp, Homo sapiens; identical to SEQ ID NO: 269025
  chr16:27517091-27517329
  hypo

SEQ ID NO: 320563 - DNA, 68 bp, Homo sapiens; identical to SEQ ID NO: 216873
  chr16:27523536-27523604
  hypo

SEQ ID NO: 320564 - DNA, 37 bp, Homo sapiens; identical to SEQ ID NO: 216874
  chr16:27539546-27539583
  hypo

SEQ ID NO: 320565 - DNA, 55 bp, Homo sapiens; identical to SEQ ID NO: 216875
  chr16:27539976-27540031
  hypo

SEQ ID NO: 320566 - DNA, 160 bp, Homo sapiens; identical to SEQ ID NO: 269030
  chr16:27568346-27568506
  hypo

SEQ ID NO: 320567 - DNA, 103 bp, Homo sapiens; identical to SEQ ID NO: 269031
  chr16:27640048-27640151
  hypo

SEQ ID NO: 320568 - DNA, 113 bp, Homo sapiens; identical to SEQ ID NO: 269032
  chr16:27735234-27735347
  hypo

SEQ ID NO: 320569 - DNA, 543 bp, Homo sapiens; identical to SEQ ID NO: 269033
  chr16:27748861-27749404
  hypo

SEQ ID NO: 320570 - DNA, 189 bp, Homo sapiens
  chr16:27750033-27750222
  hypo
gagtccagaagttacctacaggctgccttgaggcagtggtcctcacacggcatcctcctggctcccttccaactgcagctgccgtgaacatgggacagtccccgcatgtggacagtgccctgcctcaggtgctcgtggggtgctctgccgtgggagcacactcagctcgtgcatgtgttggggcatcag

SEQ ID NO: 320571 - DNA, 635 bp, Homo sapiens; identical to SEQ ID NO: 269035
  chr16:27780834-27781469
  hypo

SEQ ID NO: 320572 - DNA, 243 bp, Homo sapiens; identical to SEQ ID NO: 269036
  chr16:27790983-27791226
  hypo

SEQ ID NO: 320573 - DNA, 42 bp, Homo sapiens; identical to SEQ ID NO: 269037
  chr16:27945907-27945949
  hypo

SEQ ID NO: 320574 - DNA, 172 bp, Homo sapiens; identical to SEQ ID NO: 216876
  chr16:28043670-28043842
  hypo

SEQ ID NO: 320575 - DNA, 94 bp, Homo sapiens; identical to SEQ ID NO: 269039
  chr16:28093979-28094073
  hypo

SEQ ID NO: 320576 - DNA, 194 bp, Homo sapiens
  chr16:28104368-28104562
  hypo
ccaccccaggaggccgcataacccggcctgctctcaatgcctgcccccactcagcacctccaagccctgaggcaattaattaacaaggcttttaaaagatgttttcaaatgatacaaacagggaagggcggaaaagggagtccttgagctacagaaattcttcactgaagagcctttcacgtaagtgcttttcc

SEQ ID NO: 320577 - DNA, 156 bp, Homo sapiens; identical to SEQ ID NO: 216878
  chr16:28116153-28116309
  hypo

SEQ ID NO: 320578 - DNA, 164 bp, Homo sapiens; identical to SEQ ID NO: 216879
  chr16:28128687-28128851
  hypo

SEQ ID NO: 320579 - DNA, 88 bp, Homo sapiens; identical to SEQ ID NO: 269043
  chr16:28183883-28183971
  hypo

SEQ ID NO: 320580 - DNA, 141 bp, Homo sapiens; identical to SEQ ID NO: 216880
  chr16:28332354-28332495
  hypo

SEQ ID NO: 320581 - DNA, 111 bp, Homo sapiens; identical to SEQ ID NO: 269045
  chr16:28585539-28585650
  hypo

SEQ ID NO: 320582 - DNA, 120 bp, Homo sapiens; identical to SEQ ID NO: 216881
  chr16:28822780-28822900
  hypo

SEQ ID NO: 320583 - DNA, 129 bp, Homo sapiens; identical to SEQ ID NO: 269047
  chr16:28845818-28845947
  hypo

SEQ ID NO: 320584 - DNA, 43 bp, Homo sapiens
  chr16:28878637-28878680
  hypo
ttctcctgacttaggcctctcggccccgactcagcatcccctg

SEQ ID NO: 320585 - DNA, 43 bp, Homo sapiens; identical to SEQ ID NO: 216882
  chr16:28887802-28887845
  hypo

SEQ ID NO: 320586 - DNA, 203 bp, Homo sapiens; identical to SEQ ID NO: 269050
  chr16:28911981-28912184
  hypo

SEQ ID NO: 320587 - DNA, 231 bp, Homo sapiens; identical to SEQ ID NO: 216883
  chr16:28914705-28914936
  hypo

SEQ ID NO: 320588 - DNA, 74 bp, Homo sapiens; identical to SEQ ID NO: 216884
  chr16:28915762-28915836
  hypo

SEQ ID NO: 320589 - DNA, 530 bp, Homo sapiens; identical to SEQ ID NO: 269053
  chr16:28922055-28922585
  hypo

SEQ ID NO: 320590 - DNA, 116 bp, Homo sapiens; identical to SEQ ID NO: 216886
  chr16:28925776-28925892
  hypo

SEQ ID NO: 320591 - DNA, 113 bp, Homo sapiens; identical to SEQ ID NO: 216887
  chr16:29001662-29001775
  hypo

SEQ ID NO: 320592 - DNA, 99 bp, Homo sapiens; identical to SEQ ID NO: 269056
  chr16:29023076-29023175
  hypo

SEQ ID NO: 320593 - DNA, 178 bp, Homo sapiens; identical to SEQ ID NO: 269057
  chr16:29118743-29118921
  hypo

SEQ ID NO: 320594 - DNA, 217 bp, Homo sapiens; identical to SEQ ID NO: 269058
  chr16:29150831-29151048
  hypo

SEQ ID NO: 320595 - DNA, 54 bp, Homo sapiens; identical to SEQ ID NO: 216888
  chr16:29153320-29153374
  hypo

SEQ ID NO: 320596 - DNA, 280 bp, Homo sapiens; identical to SEQ ID NO: 216889
  chr16:29170096-29170376
  hypo

SEQ ID NO: 320597 - DNA, 187 bp, Homo sapiens; identical to SEQ ID NO: 269061
  chr16:29198308-29198495
  hypo

SEQ ID NO: 320598 - DNA, 35 bp, Homo sapiens; identical to SEQ ID NO: 269062
  chr16:29229643-29229678
  hypo

SEQ ID NO: 320599 - DNA, 175 bp, Homo sapiens
  chr16:29230296-29230471
  hypo
gcaatccacatgcactcacaataggctcttatgcacagaccctcacactcatgtgaacacactcatgcacacgcaagacttacatattcacactcacacccgtgggcacacccagacatggatacacactcatacaggcacacacgtatccagacacccacgcacagacacactc

SEQ ID NO: 320600 - DNA, 105 bp, Homo sapiens; identical to SEQ ID NO: 269064
  chr16:29231513-29231618
  hypo

SEQ ID NO: 320601 - DNA, 181 bp, Homo sapiens; identical to SEQ ID NO: 269065
  chr16:29231867-29232048
  hypo

SEQ ID NO: 320602 - DNA, 77 bp, Homo sapiens; identical to SEQ ID NO: 269066
  chr16:29262666-29262743
  hypo

SEQ ID NO: 320603 - DNA, 117 bp, Homo sapiens; identical to SEQ ID NO: 216890
  chr16:29324695-29324812
  hypo

SEQ ID NO: 320604 - DNA, 34 bp, Homo sapiens; identical to SEQ ID NO: 269068
  chr16:29420290-29420324
  hypo

SEQ ID NO: 320605 - DNA, 79 bp, Homo sapiens; identical to SEQ ID NO: 204150
  chr16:29606232-29606311
  hypo

SEQ ID NO: 320606 - DNA, 537 bp, Homo sapiens; identical to SEQ ID NO: 204152
  chr16:29624654-29625191
  hypo

SEQ ID NO: 320607 - DNA, 35 bp, Homo sapiens; identical to SEQ ID NO: 225043
  chr16:29691806-29691841
  hypo

SEQ ID NO: 320608 - DNA, 99 bp, Homo sapiens; identical to SEQ ID NO: 269069
  chr16:29697748-29697847
  hypo

SEQ ID NO: 320609 - DNA, 180 bp, Homo sapiens; identical to SEQ ID NO: 269070
  chr16:29703876-29704056
  hypo

SEQ ID NO: 320610 - DNA, 413 bp, Homo sapiens; identical to SEQ ID NO: 216893
  chr16:29755602-29756015
  hypo

SEQ ID NO: 320611 - DNA, 84 bp, Homo sapiens; identical to SEQ ID NO: 269072
  chr16:29797109-29797193
  hypo

SEQ ID NO: 320612 - DNA, 31 bp, Homo sapiens; identical to SEQ ID NO: 269073
  chr16:29820500-29820531
  hypo

SEQ ID NO: 320613 - DNA, 225 bp, Homo sapiens; identical to SEQ ID NO: 269074
  chr16:29820788-29821013
  hypo

SEQ ID NO: 320614 - DNA, 83 bp, Homo sapiens; identical to SEQ ID NO: 269075
  chr16:29821043-29821126
  hypo

SEQ ID NO: 320615 - DNA, 285 bp, Homo sapiens; identical to SEQ ID NO: 204153
  chr16:29822515-29822800
  hypo

SEQ ID NO: 320616 - DNA, 123 bp, Homo sapiens; identical to SEQ ID NO: 269076
  chr16:29825625-29825748
  hypo

SEQ ID NO: 320617 - DNA, 34 bp, Homo sapiens; identical to SEQ ID NO: 269078
  chr16:29834879-29834913
  hypo

SEQ ID NO: 320618 - DNA, 120 bp, Homo sapiens; identical to SEQ ID NO: 216895
  chr16:29835153-29835273
  hypo

SEQ ID NO: 320619 - DNA, 136 bp, Homo sapiens; identical to SEQ ID NO: 204154
  chr16:29836031-29836167
  hypo

SEQ ID NO: 320620 - DNA, 217 bp, Homo sapiens; identical to SEQ ID NO: 269080
  chr16:29853060-29853277
  hypo

SEQ ID NO: 320621 - DNA, 207 bp, Homo sapiens; identical to SEQ ID NO: 216897
  chr16:29857083-29857290
  hypo

SEQ ID NO: 320622 - DNA, 34 bp, Homo sapiens; identical to SEQ ID NO: 269082
  chr16:29866930-29866964
  hypo

SEQ ID NO: 320623 - DNA, 161 bp, Homo sapiens; identical to SEQ ID NO: 269083
  chr16:29873348-29873509
  hypo

SEQ ID NO: 320624 - DNA, 168 bp, Homo sapiens; identical to SEQ ID NO: 204157
  chr16:29910605-29910773
  hypo

SEQ ID NO: 320625 - DNA, 398 bp, Homo sapiens; identical to SEQ ID NO: 216899
  chr16:29912776-29913174
  hypo

SEQ ID NO: 320626 - DNA, 133 bp, Homo sapiens; identical to SEQ ID NO: 216900
  chr16:29913204-29913337
  hypo

SEQ ID NO: 320627 - DNA, 112 bp, Homo sapiens; identical to SEQ ID NO: 291436
  chr16:29938085-29938197
  hypo

SEQ ID NO: 320628 - DNA, 104 bp, Homo sapiens; identical to SEQ ID NO: 269085
  chr16:29971777-29971881
  hypo

SEQ ID NO: 320629 - DNA, 215 bp, Homo sapiens; identical to SEQ ID NO: 269086
  chr16:29997641-29997856
  hypo

SEQ ID NO: 320630 - DNA, 170 bp, Homo sapiens; identical to SEQ ID NO: 269087
  chr16:30000466-30000636
  hypo

SEQ ID NO: 320631 - DNA, 287 bp, Homo sapiens; identical to SEQ ID NO: 216901
  chr16:30000930-30001217
  hypo

SEQ ID NO: 320632 - DNA, 80 bp, Homo sapiens
  chr16:30017148-30017228
  hypo
cctctgaacctcccctaatccgacctcctccctgttgggggagagggacggggcagcgtggagaggcaggagtgaggagc

SEQ ID NO: 320633 - DNA, 56 bp, Homo sapiens
  chr16:30017858-30017914
  hypo
gagccagctccccagcccctccctggcctccctccatgtcccgtcccctcctgggt

SEQ ID NO: 320634 - DNA, 37 bp, Homo sapiens; identical to SEQ ID NO: 269090
  chr16:30018172-30018209
  hypo

SEQ ID NO: 320635 - DNA, 56 bp, Homo sapiens; identical to SEQ ID NO: 216902
  chr16:30018522-30018578
  hypo

SEQ ID NO: 320636 - DNA, 121 bp, Homo sapiens; identical to SEQ ID NO: 269092
  chr16:30040914-30041035
  hypo

SEQ ID NO: 320637 - DNA, 204 bp, Homo sapiens; identical to SEQ ID NO: 216903
  chr16:30061414-30061618
  hypo

SEQ ID NO: 320638 - DNA, 120 bp, Homo sapiens; identical to SEQ ID NO: 269094
  chr16:30073149-30073269
  hypo

SEQ ID NO: 320639 - DNA, 33 bp, Homo sapiens; identical to SEQ ID NO: 269095
  chr16:30079668-30079701
  hypo

SEQ ID NO: 320640 - DNA, 33 bp, Homo sapiens; identical to SEQ ID NO: 216904
  chr16:30124861-30124894
  hypo

SEQ ID NO: 320641 - DNA, 127 bp, Homo sapiens; identical to SEQ ID NO: 216905
  chr16:30125291-30125418
  hypo

SEQ ID NO: 320642 - DNA, 155 bp, Homo sapiens; identical to SEQ ID NO: 216906
  chr16:30169920-30170075
  hypo

SEQ ID NO: 320643 - DNA, 43 bp, Homo sapiens; identical to SEQ ID NO: 269101
  chr16:30195390-30195433
  hypo

SEQ ID NO: 320644 - DNA, 403 bp, Homo sapiens; identical to SEQ ID NO: 216907
  chr16:30199143-30199546
  hypo

SEQ ID NO: 320645 - DNA, 95 bp, Homo sapiens
  chr16:30354617-30354712
  hypo
ctcttccaggtggaatttgacgatgccaccaaggcatcaggtgagtgccagctggggctcgaggactttctcctctccgctccctgttctgggag

SEQ ID NO: 320646 - DNA, 73 bp, Homo sapiens
  chr16:30354742-30354815
  hypo
ggagagctggaaggtgctgctttccttgtgctgctggcgcgccactgcacttcagcctgggagacagagcgag

SEQ ID NO: 320647 - DNA, 157 bp, Homo sapiens; identical to SEQ ID NO: 269104
  chr16:30402328-30402485
  hypo

SEQ ID NO: 320648 - DNA, 52 bp, Homo sapiens; identical to SEQ ID NO: 269106
  chr16:30442022-30442074
  hypo

SEQ ID NO: 320649 - DNA, 39 bp, Homo sapiens; identical to SEQ ID NO: 269107
  chr16:30506741-30506780
  hypo

SEQ ID NO: 320650 - DNA, 668 bp, Homo sapiens
  chr16:30566778-30567446
  hypo
cccgcagtccgggcacgggtagggcttctcgccggtgtgggtgcgcacgtggcgccgcaggtccgaggggtaggcgaaggcgcggccacagtccgggcaggggaagggggtctcgccgctgtgcacgcgccggtgctggtagagggcagagctctggctgaagcggcggccacagtcggcgcagccatagggtttctcgccggtgtggacgcgcaggtgcgaagtcagcgccgagcgctgcgtgaaggcccggccacactccagacagcggtggggccgctccccacgatggatggcccggtgtttgctcagggaggaagcgtggccgaagcccttgccgcagtcagtgcagtggaagggcttctcgccagtgtgactgtagacgtgctccaccagtgtggagcgccaggcaaagctcttcccgcacacgtagcagccatgacgctggtcagctcgggggacaggggggtgggcacagagggaggggcgtccccggtgcggtgccttggacagctgctcccaaccataagggggcccggccgagggggcttggggagacttcagcccaggagacccggcggccacagggtcgggcttctccagggctcccgtcccttccctttgtctttcctttttcttgtttctggaatctgctgagagataaagag

SEQ ID NO: 320651 - DNA, 119 bp, Homo sapiens
  chr16:30567509-30567628
  hypo
gcctgctggatccccggctgctcctgggagatggaggagtgacacctgttcctcggctgcagagccagacagagccgggagggagagaacagcccattccgcctcggggctggggaaat

SEQ ID NO: 320652 - DNA, 111 bp, Homo sapiens; identical to SEQ ID NO: 269109
  chr16:30567840-30567951
  hypo

SEQ ID NO: 320653 - DNA, 689 bp, Homo sapiens; identical to SEQ ID NO: 291456
  chr16:30596384-30597073
  hypo

SEQ ID NO: 320654 - DNA, 38 bp, Homo sapiens; identical to SEQ ID NO: 269110
  chr16:30609413-30609451
  hypo

SEQ ID NO: 320655 - DNA, 33 bp, Homo sapiens; identical to SEQ ID NO: 269111
  chr16:30610867-30610900
  hypo

SEQ ID NO: 320656 - DNA, 47 bp, Homo sapiens; identical to SEQ ID NO: 269112
  chr16:30737305-30737352
  hypo

SEQ ID NO: 320657 - DNA, 115 bp, Homo sapiens; identical to SEQ ID NO: 216909
  chr16:30780232-30780347
  hypo

SEQ ID NO: 320658 - DNA, 56 bp, Homo sapiens; identical to SEQ ID NO: 216910
  chr16:30784032-30784088
  hypo

SEQ ID NO: 320659 - DNA, 100 bp, Homo sapiens; identical to SEQ ID NO: 216911
  chr16:30794665-30794765
  hypo

SEQ ID NO: 320660 - DNA, 68 bp, Homo sapiens; identical to SEQ ID NO: 216912
  chr16:30826509-30826577
  hypo

SEQ ID NO: 320661 - DNA, 41 bp, Homo sapiens; identical to SEQ ID NO: 269119
  chr16:30831399-30831440
  hypo

SEQ ID NO: 320662 - DNA, 46 bp, Homo sapiens
  chr16:30833278-30833324
  hypo
gagccctctgtatcgtggcctgccgcaaagcagatactcctccgga

SEQ ID NO: 320663 - DNA, 42 bp, Homo sapiens
  chr16:30833354-30833396
  hypo
ccatggatgccctccctgccacacagcgcctgctggacaccg

SEQ ID NO: 320664 - DNA, 47 bp, Homo sapiens; identical to SEQ ID NO: 216913
  chr16:30835266-30835313
  hypo

SEQ ID NO: 320665 - DNA, 660 bp, Homo sapiens; identical to SEQ ID NO: 269122
  chr16:30845547-30846207
  hypo

SEQ ID NO: 320666 - DNA, 153 bp, Homo sapiens; identical to SEQ ID NO: 225049
  chr16:30905625-30905778
  hypo

SEQ ID NO: 320667 - DNA, 47 bp, Homo sapiens; identical to SEQ ID NO: 216915
  chr16:30907062-30907109
  hypo

SEQ ID NO: 320668 - DNA, 42 bp, Homo sapiens; identical to SEQ ID NO: 269124
  chr16:30938666-30938708
  hypo

SEQ ID NO: 320669 - DNA, 146 bp, Homo sapiens; identical to SEQ ID NO: 269125
  chr16:30939038-30939184
  hypo

SEQ ID NO: 320670 - DNA, 198 bp, Homo sapiens; identical to SEQ ID NO: 269126
  chr16:30939779-30939977
  hypo

SEQ ID NO: 320671 - DNA, 458 bp, Homo sapiens; identical to SEQ ID NO: 269127
  chr16:30958051-30958509
  hypo

SEQ ID NO: 320672 - DNA, 556 bp, Homo sapiens; identical to SEQ ID NO: 291471
  chr16:30959757-30960313
  hypo

SEQ ID NO: 320673 - DNA, 267 bp, Homo sapiens; identical to SEQ ID NO: 291472
  chr16:30964613-30964880
  hypo

SEQ ID NO: 320674 - DNA, 64 bp, Homo sapiens; identical to SEQ ID NO: 216919
  chr16:30968112-30968176
  hypo

SEQ ID NO: 320675 - DNA, 226 bp, Homo sapiens; identical to SEQ ID NO: 269130
  chr16:30991260-30991486
  hypo

SEQ ID NO: 320676 - DNA, 253 bp, Homo sapiens; identical to SEQ ID NO: 269131
  chr16:30991713-30991966
  hypo

SEQ ID NO: 320677 - DNA, 148 bp, Homo sapiens; identical to SEQ ID NO: 216920
  chr16:30993851-30993999
  hypo

SEQ ID NO: 320678 - DNA, 204 bp, Homo sapiens; identical to SEQ ID NO: 216921
  chr16:30995028-30995232
  hypo

SEQ ID NO: 320679 - DNA, 150 bp, Homo sapiens; identical to SEQ ID NO: 269134
  chr16:30999438-30999588
  hypo

SEQ ID NO: 320680 - DNA, 210 bp, Homo sapiens; identical to SEQ ID NO: 269135
  chr16:31000909-31001119
  hypo

SEQ ID NO: 320681 - DNA, 63 bp, Homo sapiens; identical to SEQ ID NO: 269136
  chr16:31009764-31009827
  hypo

SEQ ID NO: 320682 - DNA, 142 bp, Homo sapiens; identical to SEQ ID NO: 269137
  chr16:31012794-31012936
  hypo

SEQ ID NO: 320683 - DNA, 104 bp, Homo sapiens; identical to SEQ ID NO: 269138
  chr16:31013740-31013844
  hypo

SEQ ID NO: 320684 - DNA, 37 bp, Homo sapiens; identical to SEQ ID NO: 269139
  chr16:31039944-31039981
  hypo

SEQ ID NO: 320685 - DNA, 108 bp, Homo sapiens; identical to SEQ ID NO: 269140
  chr16:31073553-31073661
  hypo

SEQ ID NO: 320686 - DNA, 334 bp, Homo sapiens; identical to SEQ ID NO: 225052
  chr16:31075206-31075540
  hypo

SEQ ID NO: 320687 - DNA, 230 bp, Homo sapiens; identical to SEQ ID NO: 269141
  chr16:31099849-31100079
  hypo

SEQ ID NO: 320688 - DNA, 319 bp, Homo sapiens; identical to SEQ ID NO: 204175
  chr16:31117073-31117392
  hypo

SEQ ID NO: 320689 - DNA, 319 bp, Homo sapiens; identical to SEQ ID NO: 216925
  chr16:31131559-31131878
  hypo

SEQ ID NO: 320690 - DNA, 220 bp, Homo sapiens; identical to SEQ ID NO: 216926
  chr16:31138387-31138607
  hypo

SEQ ID NO: 320691 - DNA, 306 bp, Homo sapiens; identical to SEQ ID NO: 269144
  chr16:31142700-31143006
  hypo

SEQ ID NO: 320692 - DNA, 271 bp, Homo sapiens; identical to SEQ ID NO: 204176
  chr16:31153837-31154108
  hypo

SEQ ID NO: 320693 - DNA, 110 bp, Homo sapiens; identical to SEQ ID NO: 269145
  chr16:31384660-31384770
  hypo

SEQ ID NO: 320694 - DNA, 114 bp, Homo sapiens; identical to SEQ ID NO: 269146
  chr16:31415513-31415627
  hypo

SEQ ID NO: 320695 - DNA, 306 bp, Homo sapiens; identical to SEQ ID NO: 269147
  chr16:31422484-31422790
  hypo

SEQ ID NO: 320696 - DNA, 50 bp, Homo sapiens; identical to SEQ ID NO: 269148
  chr16:31438631-31438681
  hypo

SEQ ID NO: 320697 - DNA, 82 bp, Homo sapiens; identical to SEQ ID NO: 216929
  chr16:31447348-31447430
  hypo

SEQ ID NO: 320698 - DNA, 403 bp, Homo sapiens; identical to SEQ ID NO: 291484
  chr16:31453960-31454363
  hypo

SEQ ID NO: 320699 - DNA, 202 bp, Homo sapiens; identical to SEQ ID NO: 269150
  chr16:31464579-31464781
  hypo

SEQ ID NO: 320700 - DNA, 351 bp, Homo sapiens; identical to SEQ ID NO: 269151
  chr16:31475825-31476176
  hypo

SEQ ID NO: 320701 - DNA, 215 bp, Homo sapiens; identical to SEQ ID NO: 269152
  chr16:31487139-31487354
  hypo

SEQ ID NO: 320702 - DNA, 184 bp, Homo sapiens; identical to SEQ ID NO: 225056
  chr16:31487758-31487942
  hypo

SEQ ID NO: 320703 - DNA, 67 bp, Homo sapiens; identical to SEQ ID NO: 216931
  chr16:31497941-31498008
  hypo

SEQ ID NO: 320704 - DNA, 270 bp, Homo sapiens
  chr16:31500252-31500522
  hypo
caggcggcacagggcgggcagctcttcgattacatccaggcagtctctagctacctggcaccgcccgtgtccgccgtcttcgtgctggcgctcttcgtgccgcgcgttaatgagcaggtgagcggcacgcgcgtggtgacggcagggctgggcttgcacatcctcagcaggctgacctgtttccttcgcagggcgccttctggggactcatcgggggcctgctgatgggcctggcacgcctgattcccgagttctccttcggctcgggca

SEQ ID NO: 320705 - DNA, 92 bp, Homo sapiens
  chr16:31500673-31500765
  hypo
gccccaggcaagcactgtgggacacagcacctaccctctgcttcctggagtgcccagctgggaggacctgaatttctcgactgagggttggg

SEQ ID NO: 320706 - DNA, 164 bp, Homo sapiens; identical to SEQ ID NO: 269155
  chr16:31508122-31508286
  hypo

SEQ ID NO: 320707 - DNA, 37 bp, Homo sapiens; identical to SEQ ID NO: 216934
  chr16:31557995-31558032
  hypo

SEQ ID NO: 320708 - DNA, 60 bp, Homo sapiens; identical to SEQ ID NO: 269157
  chr16:31607115-31607175
  hypo

SEQ ID NO: 320709 - DNA, 410 bp, Homo sapiens; identical to SEQ ID NO: 225057
  chr16:31712179-31712589
  hypo

SEQ ID NO: 320710 - DNA, 125 bp, Homo sapiens; identical to SEQ ID NO: 269158
  chr16:31725813-31725938
  hypo

SEQ ID NO: 320711 - DNA, 36 bp, Homo sapiens; identical to SEQ ID NO: 269160
  chr16:32649134-32649170
  hypo

SEQ ID NO: 320712 - DNA, 175 bp, Homo sapiens; identical to SEQ ID NO: 269161
  chr16:34986007-34986182
  hypo

SEQ ID NO: 320713 - DNA, 542 bp, Homo sapiens; identical to SEQ ID NO: 216935
  chr16:46683291-46683833
  hypo

SEQ ID NO: 320714 - DNA, 97 bp, Homo sapiens; identical to SEQ ID NO: 216936
  chr16:46717908-46718005
  hypo

SEQ ID NO: 320715 - DNA, 109 bp, Homo sapiens; identical to SEQ ID NO: 216937
  chr16:46781699-46781808
  hypo

SEQ ID NO: 320716 - DNA, 303 bp, Homo sapiens; identical to SEQ ID NO: 216938
  chr16:46934654-46934957
  hypo

SEQ ID NO: 320717 - DNA, 93 bp, Homo sapiens; identical to SEQ ID NO: 269167
  chr16:46941061-46941154
  hypo

SEQ ID NO: 320718 - DNA, 137 bp, Homo sapiens; identical to SEQ ID NO: 216939
  chr16:46945509-46945646
  hypo

SEQ ID NO: 320719 - DNA, 78 bp, Homo sapiens; identical to SEQ ID NO: 216940
  chr16:46952490-46952568
  hypo

SEQ ID NO: 320720 - DNA, 34 bp, Homo sapiens; identical to SEQ ID NO: 216941
  chr16:46992085-46992119
  hypo

SEQ ID NO: 320721 - DNA, 44 bp, Homo sapiens; identical to SEQ ID NO: 216942
  chr16:47001892-47001936
  hypo

SEQ ID NO: 320722 - DNA, 310 bp, Homo sapiens; identical to SEQ ID NO: 291498
  chr16:47176462-47176772
  hypo

SEQ ID NO: 320723 - DNA, 40 bp, Homo sapiens; identical to SEQ ID NO: 216944
  chr16:47288965-47289005
  hypo

SEQ ID NO: 320724 - DNA, 189 bp, Homo sapiens; identical to SEQ ID NO: 216945
  chr16:48177832-48178021
  hypo

SEQ ID NO: 320725 - DNA, 107 bp, Homo sapiens; identical to SEQ ID NO: 269174
  chr16:48209332-48209439
  hypo

SEQ ID NO: 320726 - DNA, 45 bp, Homo sapiens; identical to SEQ ID NO: 216946
  chr16:48290944-48290989
  hypo

SEQ ID NO: 320727 - DNA, 214 bp, Homo sapiens; identical to SEQ ID NO: 269176
  chr16:48291761-48291975
  hypo

SEQ ID NO: 320728 - DNA, 351 bp, Homo sapiens; identical to SEQ ID NO: 216947
  chr16:48381406-48381757
  hypo

SEQ ID NO: 320729 - DNA, 97 bp, Homo sapiens; identical to SEQ ID NO: 269178
  chr16:48420736-48420833
  hypo

SEQ ID NO: 320730 - DNA, 153 bp, Homo sapiens; identical to SEQ ID NO: 269179
  chr16:48530539-48530692
  hypo

SEQ ID NO: 320731 - DNA, 86 bp, Homo sapiens; identical to SEQ ID NO: 216948
  chr16:48530910-48530996
  hypo

SEQ ID NO: 320732 - DNA, 99 bp, Homo sapiens; identical to SEQ ID NO: 269181
  chr16:48535068-48535167
  hypo

SEQ ID NO: 320733 - DNA, 156 bp, Homo sapiens; identical to SEQ ID NO: 216949
  chr16:48577583-48577739
  hypo

SEQ ID NO: 320734 - DNA, 95 bp, Homo sapiens; identical to SEQ ID NO: 216950
  chr16:48641693-48641788
  hypo

SEQ ID NO: 320735 - DNA, 147 bp, Homo sapiens; identical to SEQ ID NO: 269185
  chr16:48663529-48663676
  hypo

SEQ ID NO: 320736 - DNA, 114 bp, Homo sapiens; identical to SEQ ID NO: 269186
  chr16:49465046-49465160
  hypo

SEQ ID NO: 320737 - DNA, 41 bp, Homo sapiens
  chr16:49577674-49577715
  hypo
gtgggaactcaggcacagagcgccagctccagacgcaagcc

SEQ ID NO: 320738 - DNA, 31 bp, Homo sapiens
  chr16:49577767-49577798
  hypo
tgggcaagtcgctgacctctctgaatctcag

SEQ ID NO: 320739 - DNA, 221 bp, Homo sapiens; identical to SEQ ID NO: 269188
  chr16:49670789-49671010
  hypo

SEQ ID NO: 320740 - DNA, 107 bp, Homo sapiens; identical to SEQ ID NO: 269189
  chr16:49671511-49671618
  hypo

SEQ ID NO: 320741 - DNA, 37 bp, Homo sapiens
  chr16:49671969-49672006
  hypo
ccacgctgcccagtacagggtcgggactgacactgtg

SEQ ID NO: 320742 - DNA, 388 bp, Homo sapiens; identical to SEQ ID NO: 269191
  chr16:49672243-49672631
  hypo

SEQ ID NO: 320743 - DNA, 67 bp, Homo sapiens; identical to SEQ ID NO: 180388
  chr16:49767035-49767102
  hypo

SEQ ID NO: 320744 - DNA, 32 bp, Homo sapiens; identical to SEQ ID NO: 216951
  chr16:50218668-50218700
  hypo

SEQ ID NO: 320745 - DNA, 44 bp, Homo sapiens; identical to SEQ ID NO: 216952
  chr16:50227517-50227561
  hypo

SEQ ID NO: 320746 - DNA, 87 bp, Homo sapiens; identical to SEQ ID NO: 269196
  chr16:50272245-50272332
  hypo

SEQ ID NO: 320747 - DNA, 143 bp, Homo sapiens; identical to SEQ ID NO: 269197
  chr16:50285663-50285806
  hypo

SEQ ID NO: 320748 - DNA, 409 bp, Homo sapiens
  chr16:50335358-50335767
  hypo
ggagctaatccgagcgaggccttcacagtgcgcctggcacgtcacagcattctatgtattctcgtcactcttggtttattttccatgaggtggttattaatctcccagatttccgagagacacactttcaaaacaagctttggatgaaactcaggaaagcagggagtggcctgggagccactgggcaggagcctctgagtgtcctgggtgctgactgcaggtcccctggtggctccaggaccccacggtggaggaggcagttccactgccctggccaggtggggcccgccttggcctgtctgctgcccgaccctggcctgcttcagggagtccggcacgtctggccacttctctgtgaatcatccatgaggcttgctcaagaatgtcggcccagccagcgagtggctcc

SEQ ID NO: 320749 - DNA, 192 bp, Homo sapiens
  chr16:50335818-50336010
  hypo
gggggaccaagggctggcctgtgagcctccctacacatctgctggcctcactctgcccccagcacccccagtgctgcaccatccatactgagccagcatctgggaaaacccctgccggtacctgtgtcccattccaccaccctcctagaatagggccctgatcctcgccctgtaccccggccctggccccgc

SEQ ID NO: 320750 - DNA, 141 bp, Homo sapiens
  chr16:50336215-50336356
  hypo
gcagccccccaccccgtgctgagatggatgcccggctcgaagctagtgctcagatagcccttgaatgagtgaagcagagctcctcacccaggaggctccaaaatccacccccgcaggctgccaggttgagcagggaaaact

SEQ ID NO: 320751 - DNA, 239 bp, Homo sapiens; identical to SEQ ID NO: 216956
  chr16:50336386-50336625
  hypo

SEQ ID NO: 320752 - DNA, 116 bp, Homo sapiens; identical to SEQ ID NO: 269200
  chr16:50346833-50346949
  hypo

SEQ ID NO: 320753 - DNA, 277 bp, Homo sapiens; identical to SEQ ID NO: 269201
  chr16:50425278-50425555
  hypo

SEQ ID NO: 320754 - DNA, 183 bp, Homo sapiens; identical to SEQ ID NO: 216957
  chr16:50633343-50633526
  hypo

SEQ ID NO: 320755 - DNA, 72 bp, Homo sapiens; identical to SEQ ID NO: 269203
  chr16:50666332-50666404
  hypo

SEQ ID NO: 320756 - DNA, 66 bp, Homo sapiens; identical to SEQ ID NO: 204188
  chr16:50773734-50773800
  hypo

SEQ ID NO: 320757 - DNA, 57 bp, Homo sapiens; identical to SEQ ID NO: 216959
  chr16:50897229-50897286
  hypo

SEQ ID NO: 320758 - DNA, 578 bp, Homo sapiens; identical to SEQ ID NO: 269205
  chr16:51025075-51025653
  hypo

SEQ ID NO: 320759 - DNA, 99 bp, Homo sapiens; identical to SEQ ID NO: 291516
  chr16:51189084-51189183
  hypo

SEQ ID NO: 320760 - DNA, 58 bp, Homo sapiens; identical to SEQ ID NO: 204191
  chr16:51189374-51189432
  hypo

SEQ ID NO: 320761 - DNA, 93 bp, Homo sapiens; identical to SEQ ID NO: 269206
  chr16:52498848-52498941
  hypo

SEQ ID NO: 320762 - DNA, 191 bp, Homo sapiens; identical to SEQ ID NO: 269207
  chr16:53337682-53337873
  hypo

SEQ ID NO: 320763 - DNA, 45 bp, Homo sapiens; identical to SEQ ID NO: 216962
  chr16:53448551-53448596
  hypo

SEQ ID NO: 320764 - DNA, 61 bp, Homo sapiens
  chr16:53467395-53467456
  hypo
acggcagacaggagtttggttattcaaatcagcctaccagaaaattcggagactggggttt

SEQ ID NO: 320765 - DNA, 278 bp, Homo sapiens
  chr16:53563654-53563932
  hypo
tacagaagcttgcagcaaagctcttgataatgttactcttgataaagttgcctggccaccctctctaagtaaataaaggggagaggaatatgacgcatattaattcacccagtttgcagcctactggaggacgagaggggaaaaaaaagttgcaatgggttcagcgcgtggcattttatatgaataccaaaattgcattcatgattcacatagactttacgataatatattaatattaaaactaaaggtcattccacgtaacagttaagctgcctgag

SEQ ID NO: 320766 - DNA, 240 bp, Homo sapiens; identical to SEQ ID NO: 216964
  chr16:53659274-53659514
  hypo

SEQ ID NO: 320767 - DNA, 82 bp, Homo sapiens; identical to SEQ ID NO: 216965
  chr16:53825645-53825727
  hypo

SEQ ID NO: 320768 - DNA, 130 bp, Homo sapiens; identical to SEQ ID NO: 216966
  chr16:54128713-54128843
  hypo

SEQ ID NO: 320769 - DNA, 35 bp, Homo sapiens; identical to SEQ ID NO: 269214
  chr16:54198162-54198197
  hypo

SEQ ID NO: 320770 - DNA, 95 bp, Homo sapiens; identical to SEQ ID NO: 269215
  chr16:54441923-54442018
  hypo

SEQ ID NO: 320771 - DNA, 212 bp, Homo sapiens; identical to SEQ ID NO: 269216
  chr16:55052638-55052850
  hypo

SEQ ID NO: 320772 - DNA, 46 bp, Homo sapiens; identical to SEQ ID NO: 216967
  chr16:55053597-55053643
  hypo

SEQ ID NO: 320773 - DNA, 35 bp, Homo sapiens; identical to SEQ ID NO: 269218
  chr16:55215532-55215567
  hypo

SEQ ID NO: 320774 - DNA, 34 bp, Homo sapiens; identical to SEQ ID NO: 269219
  chr16:55215807-55215841
  hypo

SEQ ID NO: 320775 - DNA, 195 bp, Homo sapiens; identical to SEQ ID NO: 291546
  chr16:55362578-55362773
  hypo

SEQ ID NO: 320776 - DNA, 142 bp, Homo sapiens; identical to SEQ ID NO: 204212
  chr16:55513539-55513681
  hypo

SEQ ID NO: 320777 - DNA, 129 bp, Homo sapiens; identical to SEQ ID NO: 291554
  chr16:55513947-55514076
  hypo

SEQ ID NO: 320778 - DNA, 210 bp, Homo sapiens; identical to SEQ ID NO: 216969
  chr16:55739211-55739421
  hypo

SEQ ID NO: 320779 - DNA, 60 bp, Homo sapiens; identical to SEQ ID NO: 204213
  chr16:56225663-56225723
  hypo

SEQ ID NO: 320780 - DNA, 268 bp, Homo sapiens; identical to SEQ ID NO: 204214
  chr16:56225881-56226149
  hypo

SEQ ID NO: 320781 - DNA, 55 bp, Homo sapiens; identical to SEQ ID NO: 225070
  chr16:56227984-56228039
  hypo

SEQ ID NO: 320782 - DNA, 89 bp, Homo sapiens; identical to SEQ ID NO: 204215
  chr16:56228280-56228369
  hypo

SEQ ID NO: 320783 - DNA, 71 bp, Homo sapiens; identical to SEQ ID NO: 204216
  chr16:56228591-56228662
  hypo

SEQ ID NO: 320784 - DNA, 254 bp, Homo sapiens; identical to SEQ ID NO: 269221
  chr16:56309852-56310106
  hypo

SEQ ID NO: 320785 - DNA, 54 bp, Homo sapiens; identical to SEQ ID NO: 269222
  chr16:56345486-56345540
  hypo

SEQ ID NO: 320786 - DNA, 57 bp, Homo sapiens; identical to SEQ ID NO: 269223
  chr16:56368403-56368460
  hypo

SEQ ID NO: 320787 - DNA, 165 bp, Homo sapiens; identical to SEQ ID NO: 269224
  chr16:56368690-56368855
  hypo

SEQ ID NO: 320788 - DNA, 253 bp, Homo sapiens; identical to SEQ ID NO: 269225
  chr16:56370683-56370936
  hypo

SEQ ID NO: 320789 - DNA, 365 bp, Homo sapiens; identical to SEQ ID NO: 269226
  chr16:56397996-56398361
  hypo

SEQ ID NO: 320790 - DNA, 189 bp, Homo sapiens; identical to SEQ ID NO: 216975
  chr16:56398931-56399120
  hypo

SEQ ID NO: 320791 - DNA, 194 bp, Homo sapiens; identical to SEQ ID NO: 269228
  chr16:56407221-56407415
  hypo

SEQ ID NO: 320792 - DNA, 217 bp, Homo sapiens; identical to SEQ ID NO: 291563
  chr16:56642231-56642448
  hypo

SEQ ID NO: 320793 - DNA, 69 bp, Homo sapiens; identical to SEQ ID NO: 291565
  chr16:56666592-56666661
  hypo

SEQ ID NO: 320794 - DNA, 135 bp, Homo sapiens; identical to SEQ ID NO: 216976
  chr16:56782260-56782395
  hypo

SEQ ID NO: 320795 - DNA, 74 bp, Homo sapiens; identical to SEQ ID NO: 269230
  chr16:56812017-56812091
  hypo

SEQ ID NO: 320796 - DNA, 114 bp, Homo sapiens; identical to SEQ ID NO: 216977
  chr16:56857028-56857142
  hypo

SEQ ID NO: 320797 - DNA, 311 bp, Homo sapiens; identical to SEQ ID NO: 216978
  chr16:56857408-56857719
  hypo

SEQ ID NO: 320798 - DNA, 40 bp, Homo sapiens; identical to SEQ ID NO: 269233
  chr16:56869746-56869786
  hypo

SEQ ID NO: 320799 - DNA, 43 bp, Homo sapiens; identical to SEQ ID NO: 269234
  chr16:56902581-56902624
  hypo

SEQ ID NO: 320800 - DNA, 266 bp, Homo sapiens; identical to SEQ ID NO: 216979
  chr16:56928223-56928489
  hypo

SEQ ID NO: 320801 - DNA, 78 bp, Homo sapiens; identical to SEQ ID NO: 269236
  chr16:56951555-56951633
  hypo

SEQ ID NO: 320802 - DNA, 39 bp, Homo sapiens; identical to SEQ ID NO: 269237
  chr16:56953540-56953579
  hypo

SEQ ID NO: 320803 - DNA, 360 bp, Homo sapiens; identical to SEQ ID NO: 291576
  chr16:57126699-57127059
  hypo

SEQ ID NO: 320804 - DNA, 168 bp, Homo sapiens; identical to SEQ ID NO: 269239
  chr16:57289764-57289932
  hypo

SEQ ID NO: 320805 - DNA, 373 bp, Homo sapiens; identical to SEQ ID NO: 269240
  chr16:57298909-57299282
  hypo

SEQ ID NO: 320806 - DNA, 94 bp, Homo sapiens; identical to SEQ ID NO: 269241
  chr16:57304016-57304110
  hypo

SEQ ID NO: 320807 - DNA, 84 bp, Homo sapiens; identical to SEQ ID NO: 269242
  chr16:57304959-57305043
  hypo

SEQ ID NO: 320808 - DNA, 206 bp, Homo sapiens; identical to SEQ ID NO: 291579
  chr16:57318412-57318618
  hypo

SEQ ID NO: 320809 - DNA, 31 bp, Homo sapiens; identical to SEQ ID NO: 216981
  chr16:57326589-57326620
  hypo

SEQ ID NO: 320810 - DNA, 316 bp, Homo sapiens; identical to SEQ ID NO: 269244
  chr16:57416036-57416352
  hypo

SEQ ID NO: 320811 - DNA, 274 bp, Homo sapiens; identical to SEQ ID NO: 269245
  chr16:57537288-57537562
  hypo

SEQ ID NO: 320812 - DNA, 287 bp, Homo sapiens; identical to SEQ ID NO: 216982
  chr16:57559708-57559995
  hypo

SEQ ID NO: 320813 - DNA, 188 bp, Homo sapiens; identical to SEQ ID NO: 269247
  chr16:57601801-57601989
  hypo

SEQ ID NO: 320814 - DNA, 59 bp, Homo sapiens; identical to SEQ ID NO: 269248
  chr16:57657365-57657424
  hypo

SEQ ID NO: 320815 - DNA, 108 bp, Homo sapiens; identical to SEQ ID NO: 269249
  chr16:57674290-57674398
  hypo

SEQ ID NO: 320816 - DNA, 57 bp, Homo sapiens; identical to SEQ ID NO: 269250
  chr16:57686683-57686740
  hypo

SEQ ID NO: 320817 - DNA, 101 bp, Homo sapiens; identical to SEQ ID NO: 216983
  chr16:57697546-57697647
  hypo

SEQ ID NO: 320818 - DNA, 224 bp, Homo sapiens; identical to SEQ ID NO: 216984
  chr16:57734046-57734270
  hypo

SEQ ID NO: 320819 - DNA, 75 bp, Homo sapiens; identical to SEQ ID NO: 269253
  chr16:57737538-57737613
  hypo

SEQ ID NO: 320820 - DNA, 207 bp, Homo sapiens; identical to SEQ ID NO: 269254
  chr16:57759978-57760185
  hypo

SEQ ID NO: 320821 - DNA, 338 bp, Homo sapiens
  chr16:57935116-57935454
  hypo
catgaagccgcagacgctcttctccctccccaacaatctcgctctgccctgggctggcaggcacccctccagctcagttccttgaaagccagggggatggtgaaccccagatcccgtggtggctgccaggccagctcaccttcttgcacacatagtcgttgggcaggtagacaacagagcgaagcctcttcagcatgtcaaagatcatctgccggtcacagccctgtcccggtgaggaagggaaaggaactttttagagaagattgggcttggagcctcccacagccctgagcgtgagggcaccaaaaggtgtacctgaaagagtgcgactttgctaa

SEQ ID NO: 320822 - DNA, 48 bp, Homo sapiens
  chr16:57935605-57935653
  hypo
ctactggctcaccagggcacaccattgccctgccgcatggaaccactc

SEQ ID NO: 320823 - DNA, 1325 bp, Homo sapiens; identical to SEQ ID NO: 216986
  chr16:58030194-58031519
  hypo

SEQ ID NO: 320824 - DNA, 749 bp, Homo sapiens; identical to SEQ ID NO: 291587
  chr16:58059829-58060578
  hypo

SEQ ID NO: 320825 - DNA, 147 bp, Homo sapiens; identical to SEQ ID NO: 269258
  chr16:58062996-58063143
  hypo

SEQ ID NO: 320826 - DNA, 67 bp, Homo sapiens; identical to SEQ ID NO: 216988
  chr16:58076202-58076269
  hypo

SEQ ID NO: 320827 - DNA, 151 bp, Homo sapiens; identical to SEQ ID NO: 269260
  chr16:58077138-58077289
  hypo

SEQ ID NO: 320828 - DNA, 174 bp, Homo sapiens; identical to SEQ ID NO: 269261
  chr16:58078935-58079109
  hypo

SEQ ID NO: 320829 - DNA, 212 bp, Homo sapiens; identical to SEQ ID NO: 269262
  chr16:58119931-58120143
  hypo

SEQ ID NO: 320830 - DNA, 37 bp, Homo sapiens
  chr16:58120758-58120795
  hypo
agcagcacctgcctcgaaggttgctatgagagcaatt

SEQ ID NO: 320831 - DNA, 111 bp, Homo sapiens
  chr16:58192179-58192290
  hypo
gtgatctctctatacgcgttaagacgtttgatttggttcttgttctgcttatggaaaagtgggagaaccgcaacagacctggggaaagagacgggaggagggaaagacgtc

SEQ ID NO: 320832 - DNA, 124 bp, Homo sapiens; identical to SEQ ID NO: 204230
  chr16:58426260-58426384
  hypo

SEQ ID NO: 320833 - DNA, 101 bp, Homo sapiens; identical to SEQ ID NO: 216990
  chr16:58558294-58558395
  hypo

SEQ ID NO: 320834 - DNA, 79 bp, Homo sapiens; identical to SEQ ID NO: 269267
  chr16:58633212-58633291
  hypo

SEQ ID NO: 320835 - DNA, 133 bp, Homo sapiens; identical to SEQ ID NO: 216991
  chr16:61615418-61615551
  hypo

SEQ ID NO: 320836 - DNA, 205 bp, Homo sapiens; identical to SEQ ID NO: 291600
  chr16:65157317-65157522
  hypo

SEQ ID NO: 320837 - DNA, 290 bp, Homo sapiens; identical to SEQ ID NO: 269269
  chr16:66420654-66420944
  hypo

SEQ ID NO: 320838 - DNA, 127 bp, Homo sapiens; identical to SEQ ID NO: 291603
  chr16:66461989-66462116
  hypo

SEQ ID NO: 320839 - DNA, 161 bp, Homo sapiens; identical to SEQ ID NO: 269270
  chr16:66514521-66514682
  hypo

SEQ ID NO: 320840 - DNA, 116 bp, Homo sapiens; identical to SEQ ID NO: 269271
  chr16:66542831-66542947
  hypo

SEQ ID NO: 320841 - DNA, 159 bp, Homo sapiens; identical to SEQ ID NO: 269272
  chr16:66579299-66579458
  hypo

SEQ ID NO: 320842 - DNA, 618 bp, Homo sapiens; identical to SEQ ID NO: 269273
  chr16:66600011-66600629
  hypo

SEQ ID NO: 320843 - DNA, 569 bp, Homo sapiens; identical to SEQ ID NO: 291605
  chr16:66638452-66639021
  hypo

SEQ ID NO: 320844 - DNA, 74 bp, Homo sapiens
  chr16:66652463-66652537
  hypo
acgcctgggccacacgcaggacatggcacccactagggttgttcaggtctcattcactgcaagcaagaattcac

SEQ ID NO: 320845 - DNA, 173 bp, Homo sapiens; identical to SEQ ID NO: 29297
  chr16:66652773-66652946
  hypo

SEQ ID NO: 320846 - DNA, 316 bp, Homo sapiens; identical to SEQ ID NO: 291606
  chr16:66730083-66730399
  hypo

SEQ ID NO: 320847 - DNA, 64 bp, Homo sapiens; identical to SEQ ID NO: 269275
  chr16:66752187-66752251
  hypo

SEQ ID NO: 320848 - DNA, 180 bp, Homo sapiens; identical to SEQ ID NO: 216996
  chr16:66781286-66781466
  hypo

SEQ ID NO: 320849 - DNA, 757 bp, Homo sapiens; identical to SEQ ID NO: 269277
  chr16:66835306-66836063
  hypo

SEQ ID NO: 320850 - DNA, 81 bp, Homo sapiens; identical to SEQ ID NO: 216998
  chr16:66942966-66943047
  hypo

SEQ ID NO: 320851 - DNA, 246 bp, Homo sapiens; identical to SEQ ID NO: 291609
  chr16:66959003-66959249
  hypo

SEQ ID NO: 320852 - DNA, 120 bp, Homo sapiens; identical to SEQ ID NO: 269279
  chr16:66986333-66986453
  hypo

SEQ ID NO: 320853 - DNA, 190 bp, Homo sapiens; identical to SEQ ID NO: 217000
  chr16:67006195-67006385
  hypo

SEQ ID NO: 320854 - DNA, 43 bp, Homo sapiens; identical to SEQ ID NO: 269281
  chr16:67138796-67138839
  hypo

SEQ ID NO: 320855 - DNA, 144 bp, Homo sapiens; identical to SEQ ID NO: 217001
  chr16:67175552-67175696
  hypo

SEQ ID NO: 320856 - DNA, 203 bp, Homo sapiens; identical to SEQ ID NO: 291611
  chr16:67183854-67184057
  hypo

SEQ ID NO: 320857 - DNA, 130 bp, Homo sapiens; identical to SEQ ID NO: 291612
  chr16:67184512-67184642
  hypo

SEQ ID NO: 320858 - DNA, 150 bp, Homo sapiens; identical to SEQ ID NO: 204242
  chr16:67189018-67189168
  hypo

SEQ ID NO: 320859 - DNA, 374 bp, Homo sapiens; identical to SEQ ID NO: 204243
  chr16:67189259-67189633
  hypo

SEQ ID NO: 320860 - DNA, 208 bp, Homo sapiens; identical to SEQ ID NO: 269283
  chr16:67213017-67213225
  hypo

SEQ ID NO: 320861 - DNA, 194 bp, Homo sapiens; identical to SEQ ID NO: 217004
  chr16:67221091-67221285
  hypo

SEQ ID NO: 320862 - DNA, 101 bp, Homo sapiens; identical to SEQ ID NO: 269285
  chr16:67222915-67223016
  hypo

SEQ ID NO: 320863 - DNA, 251 bp, Homo sapiens; identical to SEQ ID NO: 269286
  chr16:67235496-67235747
  hypo

SEQ ID NO: 320864 - DNA, 32 bp, Homo sapiens; identical to SEQ ID NO: 269287
  chr16:67241298-67241330
  hypo

SEQ ID NO: 320865 - DNA, 73 bp, Homo sapiens
  chr16:67241530-67241603
  hypo
cccctcccacgaagcgggactggacacaggacacctggggcagctgggcttggaagcgtctgacggcggccat

SEQ ID NO: 320866 - DNA, 231 bp, Homo sapiens; identical to SEQ ID NO: 217005
  chr16:67270958-67271189
  hypo

SEQ ID NO: 320867 - DNA, 215 bp, Homo sapiens; identical to SEQ ID NO: 204249
  chr16:67280008-67280223
  hypo

SEQ ID NO: 320868 - DNA, 457 bp, Homo sapiens; identical to SEQ ID NO: 204251
  chr16:67281140-67281597
  hypo

SEQ ID NO: 320869 - DNA, 107 bp, Homo sapiens
  chr16:67313745-67313852
  hypo
agggacacccttaacgttattccctcttcccaggcctgaattgcagttcctgtgccctggcactaagactggcacctcctgcggcccatgcccttcgcctgcattgc

SEQ ID NO: 320870 - DNA, 130 bp, Homo sapiens
  chr16:67313958-67314088
  hypo
cctggagaatggggatgagtccccagactctcagggccatgccaccgactggagatttgctgtgtgcagtttcagggatgcctgggaagaggaggaacctgcttcccagatgcacgttaaggacccaggt

SEQ ID NO: 320871 - DNA, 69 bp, Homo sapiens; identical to SEQ ID NO: 269291
  chr16:67337018-67337087
  hypo

SEQ ID NO: 320872 - DNA, 368 bp, Homo sapiens; identical to SEQ ID NO: 217008
  chr16:67469689-67470057
  hypo

SEQ ID NO: 320873 - DNA, 49 bp, Homo sapiens; identical to SEQ ID NO: 217009
  chr16:67470488-67470537
  hypo

SEQ ID NO: 320874 - DNA, 122 bp, Homo sapiens; identical to SEQ ID NO: 217010
  chr16:67470863-67470985
  hypo

SEQ ID NO: 320875 - DNA, 79 bp, Homo sapiens; identical to SEQ ID NO: 217011
  chr16:67472275-67472354
  hypo

SEQ ID NO: 320876 - DNA, 79 bp, Homo sapiens; identical to SEQ ID NO: 217012
  chr16:67472414-67472493
  hypo

SEQ ID NO: 320877 - DNA, 218 bp, Homo sapiens; identical to SEQ ID NO: 269297
  chr16:67478341-67478559
  hypo

SEQ ID NO: 320878 - DNA, 41 bp, Homo sapiens; identical to SEQ ID NO: 217013
  chr16:67511577-67511618
  hypo

SEQ ID NO: 320879 - DNA, 64 bp, Homo sapiens; identical to SEQ ID NO: 217014
  chr16:67518130-67518194
  hypo

SEQ ID NO: 320880 - DNA, 201 bp, Homo sapiens; identical to SEQ ID NO: 225094
  chr16:67563142-67563343
  hypo

SEQ ID NO: 320881 - DNA, 65 bp, Homo sapiens; identical to SEQ ID NO: 225095
  chr16:67563576-67563641
  hypo

SEQ ID NO: 320882 - DNA, 145 bp, Homo sapiens; identical to SEQ ID NO: 225096
  chr16:67564103-67564248
  hypo

SEQ ID NO: 320883 - DNA, 467 bp, Homo sapiens; identical to SEQ ID NO: 291636
  chr16:67571536-67572003
  hypo

SEQ ID NO: 320884 - DNA, 66 bp, Homo sapiens; identical to SEQ ID NO: 269300
  chr16:67574479-67574545
  hypo

SEQ ID NO: 320885 - DNA, 98 bp, Homo sapiens
  chr16:67578535-67578633
  hypo
gagcacgatcctcccgagccctaccctgaggcctgagctacttggccacccatgttctccagaaactgggcacatttgggcccctgcgctgccaggag

SEQ ID NO: 320886 - DNA, 255 bp, Homo sapiens; identical to SEQ ID NO: 291637
  chr16:67678786-67679041
  hypo

SEQ ID NO: 320887 - DNA, 199 bp, Homo sapiens; identical to SEQ ID NO: 269302
  chr16:67681427-67681626
  hypo

SEQ ID NO: 320888 - DNA, 119 bp, Homo sapiens; identical to SEQ ID NO: 291638
  chr16:67700713-67700832
  hypo

SEQ ID NO: 320889 - DNA, 271 bp, Homo sapiens; identical to SEQ ID NO: 291639
  chr16:67701091-67701362
  hypo

SEQ ID NO: 320890 - DNA, 289 bp, Homo sapiens; identical to SEQ ID NO: 217017
  chr16:67709089-67709378
  hypo

SEQ ID NO: 320891 - DNA, 99 bp, Homo sapiens; identical to SEQ ID NO: 269304
  chr16:67848821-67848920
  hypo

SEQ ID NO: 320892 - DNA, 202 bp, Homo sapiens; identical to SEQ ID NO: 217018
  chr16:67920022-67920224
  hypo

SEQ ID NO: 320893 - DNA, 140 bp, Homo sapiens; identical to SEQ ID NO: 217019
  chr16:67965742-67965882
  hypo

SEQ ID NO: 320894 - DNA, 37 bp, Homo sapiens
  chr16:67981967-67982004
  hypo
gatagtacttgaaccggggccgccagttgggggtcct

SEQ ID NO: 320895 - DNA, 155 bp, Homo sapiens; identical to SEQ ID NO: 204261
  chr16:68118915-68119070
  hypo

SEQ ID NO: 320896 - DNA, 39 bp, Homo sapiens; identical to SEQ ID NO: 269308
  chr16:68250713-68250752
  hypo

SEQ ID NO: 320897 - DNA, 72 bp, Homo sapiens; identical to SEQ ID NO: 204262
  chr16:68269813-68269885
  hypo

SEQ ID NO: 320898 - DNA, 112 bp, Homo sapiens; identical to SEQ ID NO: 204263
  chr16:68269896-68270008
  hypo

SEQ ID NO: 320899 - DNA, 105 bp, Homo sapiens; identical to SEQ ID NO: 204264
  chr16:68270022-68270127
  hypo

SEQ ID NO: 320900 - DNA, 146 bp, Homo sapiens; identical to SEQ ID NO: 204265
  chr16:68270157-68270303
  hypo

SEQ ID NO: 320901 - DNA, 637 bp, Homo sapiens; identical to SEQ ID NO: 291654
  chr16:68270867-68271504
  hypo

SEQ ID NO: 320902 - DNA, 57 bp, Homo sapiens; identical to SEQ ID NO: 204267
  chr16:68298829-68298886
  hypo

SEQ ID NO: 320903 - DNA, 46 bp, Homo sapiens; identical to SEQ ID NO: 217027
  chr16:68386060-68386106
  hypo

SEQ ID NO: 320904 - DNA, 181 bp, Homo sapiens; identical to SEQ ID NO: 217028
  chr16:68386187-68386368
  hypo

SEQ ID NO: 320905 - DNA, 810 bp, Homo sapiens; identical to SEQ ID NO: 53222
  chr16:68481955-68482765
  hypo

SEQ ID NO: 320906 - DNA, 260 bp, Homo sapiens; identical to SEQ ID NO: 269311
  chr16:68525540-68525800
  hypo

SEQ ID NO: 320907 - DNA, 231 bp, Homo sapiens; identical to SEQ ID NO: 269312
  chr16:68526075-68526306
  hypo

SEQ ID NO: 320908 - DNA, 91 bp, Homo sapiens; identical to SEQ ID NO: 225106
  chr16:68564224-68564315
  hypo

SEQ ID NO: 320909 - DNA, 35 bp, Homo sapiens; identical to SEQ ID NO: 269313
  chr16:68697407-68697442
  hypo

SEQ ID NO: 320910 - DNA, 191 bp, Homo sapiens; identical to SEQ ID NO: 217030
  chr16:68737004-68737195
  hypo

SEQ ID NO: 320911 - DNA, 34 bp, Homo sapiens; identical to SEQ ID NO: 217031
  chr16:68739594-68739628
  hypo

SEQ ID NO: 320912 - DNA, 120 bp, Homo sapiens; identical to SEQ ID NO: 217032
  chr16:68743256-68743376
  hypo

SEQ ID NO: 320913 - DNA, 45 bp, Homo sapiens; identical to SEQ ID NO: 269317
  chr16:68755703-68755748
  hypo

SEQ ID NO: 320914 - DNA, 88 bp, Homo sapiens; identical to SEQ ID NO: 269319
  chr16:68782327-68782415
  hypo

SEQ ID NO: 320915 - DNA, 37 bp, Homo sapiens; identical to SEQ ID NO: 269320
  chr16:68838288-68838325
  hypo

SEQ ID NO: 320916 - DNA, 167 bp, Homo sapiens; identical to SEQ ID NO: 217033
  chr16:68849366-68849533
  hypo

SEQ ID NO: 320917 - DNA, 140 bp, Homo sapiens; identical to SEQ ID NO: 269322
  chr16:68854968-68855108
  hypo

SEQ ID NO: 320918 - DNA, 224 bp, Homo sapiens; identical to SEQ ID NO: 269323
  chr16:68856757-68856981
  hypo

SEQ ID NO: 320919 - DNA, 82 bp, Homo sapiens; identical to SEQ ID NO: 217035
  chr16:68876700-68876782
  hypo

SEQ ID NO: 320920 - DNA, 77 bp, Homo sapiens; identical to SEQ ID NO: 217036
  chr16:68942210-68942287
  hypo

SEQ ID NO: 320921 - DNA, 34 bp, Homo sapiens; identical to SEQ ID NO: 269326
  chr16:69077094-69077128
  hypo

SEQ ID NO: 320922 - DNA, 134 bp, Homo sapiens; identical to SEQ ID NO: 217037
  chr16:69129258-69129392
  hypo

SEQ ID NO: 320923 - DNA, 45 bp, Homo sapiens; identical to SEQ ID NO: 217038
  chr16:69133540-69133585
  hypo

SEQ ID NO: 320924 - DNA, 45 bp, Homo sapiens; identical to SEQ ID NO: 217039
  chr16:69133633-69133678
  hypo

SEQ ID NO: 320925 - DNA, 251 bp, Homo sapiens; identical to SEQ ID NO: 269329
  chr16:69134520-69134771
  hypo

SEQ ID NO: 320926 - DNA, 963 bp, Homo sapiens; identical to SEQ ID NO: 291667
  chr16:69139582-69140545
  hypo

SEQ ID NO: 320927 - DNA, 796 bp, Homo sapiens; identical to SEQ ID NO: 269330
  chr16:69143278-69144074
  hypo

SEQ ID NO: 320928 - DNA, 278 bp, Homo sapiens; identical to SEQ ID NO: 269331
  chr16:69264949-69265227
  hypo

SEQ ID NO: 320929 - DNA, 56 bp, Homo sapiens; identical to SEQ ID NO: 269332
  chr16:69334742-69334798
  hypo

SEQ ID NO: 320930 - DNA, 35 bp, Homo sapiens; identical to SEQ ID NO: 269333
  chr16:69344404-69344439
  hypo

SEQ ID NO: 320931 - DNA, 34 bp, Homo sapiens; identical to SEQ ID NO: 269334
  chr16:69344499-69344533
  hypo

SEQ ID NO: 320932 - DNA, 33 bp, Homo sapiens; identical to SEQ ID NO: 217041
  chr16:69352180-69352213
  hypo

SEQ ID NO: 320933 - DNA, 217 bp, Homo sapiens; identical to SEQ ID NO: 217042
  chr16:69352349-69352566
  hypo

SEQ ID NO: 320934 - DNA, 399 bp, Homo sapiens; identical to SEQ ID NO: 217043
  chr16:69352596-69352995
  hypo

SEQ ID NO: 320935 - DNA, 584 bp, Homo sapiens; identical to SEQ ID NO: 269336
  chr16:69354734-69355318
  hypo

SEQ ID NO: 320936 - DNA, 126 bp, Homo sapiens; identical to SEQ ID NO: 217046
  chr16:69358551-69358677
  hypo

SEQ ID NO: 320937 - DNA, 89 bp, Homo sapiens; identical to SEQ ID NO: 204274
  chr16:69373055-69373144
  hypo

SEQ ID NO: 320938 - DNA, 185 bp, Homo sapiens; identical to SEQ ID NO: 217048
  chr16:69383486-69383671
  hypo

SEQ ID NO: 320939 - DNA, 100 bp, Homo sapiens; identical to SEQ ID NO: 269339
  chr16:69391672-69391772
  hypo

SEQ ID NO: 320940 - DNA, 32 bp, Homo sapiens; identical to SEQ ID NO: 269340
  chr16:69397588-69397620
  hypo

SEQ ID NO: 320941 - DNA, 36 bp, Homo sapiens; identical to SEQ ID NO: 217049
  chr16:69439224-69439260
  hypo

SEQ ID NO: 320942 - DNA, 230 bp, Homo sapiens; identical to SEQ ID NO: 269342
  chr16:69446265-69446495
  hypo

SEQ ID NO: 320943 - DNA, 84 bp, Homo sapiens; identical to SEQ ID NO: 217050
  chr16:69495121-69495205
  hypo

SEQ ID NO: 320944 - DNA, 145 bp, Homo sapiens; identical to SEQ ID NO: 269344
  chr16:69557041-69557186
  hypo

SEQ ID NO: 320945 - DNA, 275 bp, Homo sapiens; identical to SEQ ID NO: 217051
  chr16:69557609-69557884
  hypo

SEQ ID NO: 320946 - DNA, 134 bp, Homo sapiens; identical to SEQ ID NO: 269346
  chr16:69560823-69560957
  hypo

SEQ ID NO: 320947 - DNA, 41 bp, Homo sapiens; identical to SEQ ID NO: 269347
  chr16:69613048-69613089
  hypo

SEQ ID NO: 320948 - DNA, 38 bp, Homo sapiens; identical to SEQ ID NO: 217052
  chr16:69642741-69642779
  hypo

SEQ ID NO: 320949 - DNA, 240 bp, Homo sapiens; identical to SEQ ID NO: 217053
  chr16:69757714-69757954
  hypo

SEQ ID NO: 320950 - DNA, 87 bp, Homo sapiens; identical to SEQ ID NO: 269350
  chr16:69759428-69759515
  hypo

SEQ ID NO: 320951 - DNA, 240 bp, Homo sapiens; identical to SEQ ID NO: 217054
  chr16:69761437-69761677
  hypo

SEQ ID NO: 320952 - DNA, 182 bp, Homo sapiens; identical to SEQ ID NO: 217055
  chr16:69825950-69826132
  hypo

SEQ ID NO: 320953 - DNA, 439 bp, Homo sapiens; identical to SEQ ID NO: 217056
  chr16:69833662-69834101
  hypo

SEQ ID NO: 320954 - DNA, 124 bp, Homo sapiens; identical to SEQ ID NO: 217057
  chr16:69906918-69907042
  hypo

SEQ ID NO: 320955 - DNA, 207 bp, Homo sapiens; identical to SEQ ID NO: 217058
  chr16:69921952-69922159
  hypo

SEQ ID NO: 320956 - DNA, 139 bp, Homo sapiens; identical to SEQ ID NO: 217059
  chr16:69922446-69922585
  hypo

SEQ ID NO: 320957 - DNA, 159 bp, Homo sapiens; identical to SEQ ID NO: 269357
  chr16:69955523-69955682
  hypo

SEQ ID NO: 320958 - DNA, 150 bp, Homo sapiens; identical to SEQ ID NO: 217061
  chr16:70151413-70151563
  hypo

SEQ ID NO: 320959 - DNA, 160 bp, Homo sapiens; identical to SEQ ID NO: 269359
  chr16:70185997-70186157
  hypo

SEQ ID NO: 320960 - DNA, 289 bp, Homo sapiens; identical to SEQ ID NO: 217062
  chr16:70196488-70196777
  hypo

SEQ ID NO: 320961 - DNA, 130 bp, Homo sapiens; identical to SEQ ID NO: 217063
  chr16:70286315-70286445
  hypo

SEQ ID NO: 320962 - DNA, 176 bp, Homo sapiens; identical to SEQ ID NO: 217064
  chr16:70328602-70328778
  hypo

SEQ ID NO: 320963 - DNA, 54 bp, Homo sapiens; identical to SEQ ID NO: 217065
  chr16:70399211-70399265
  hypo

SEQ ID NO: 320964 - DNA, 410 bp, Homo sapiens; identical to SEQ ID NO: 269364
  chr16:70433887-70434297
  hypo

SEQ ID NO: 320965 - DNA, 55 bp, Homo sapiens; identical to SEQ ID NO: 269365
  chr16:70442006-70442061
  hypo

SEQ ID NO: 320966 - DNA, 46 bp, Homo sapiens; identical to SEQ ID NO: 269366
  chr16:70442308-70442354
  hypo

SEQ ID NO: 320967 - DNA, 376 bp, Homo sapiens; identical to SEQ ID NO: 204275
  chr16:70472227-70472603
  hypo

SEQ ID NO: 320968 - DNA, 120 bp, Homo sapiens; identical to SEQ ID NO: 269367
  chr16:70479294-70479414
  hypo

SEQ ID NO: 320969 - DNA, 50 bp, Homo sapiens; identical to SEQ ID NO: 217067
  chr16:70507080-70507130
  hypo

SEQ ID NO: 320970 - DNA, 40 bp, Homo sapiens; identical to SEQ ID NO: 217068
  chr16:70508778-70508818
  hypo

SEQ ID NO: 320971 - DNA, 102 bp, Homo sapiens; identical to SEQ ID NO: 217069
  chr16:70595195-70595297
  hypo

SEQ ID NO: 320972 - DNA, 432 bp, Homo sapiens; identical to SEQ ID NO: 269372
  chr16:70680609-70681041
  hypo

SEQ ID NO: 320973 - DNA, 349 bp, Homo sapiens; identical to SEQ ID NO: 269373
  chr16:70727987-70728336
  hypo

SEQ ID NO: 320974 - DNA, 187 bp, Homo sapiens; identical to SEQ ID NO: 269374
  chr16:70754253-70754440
  hypo

SEQ ID NO: 320975 - DNA, 398 bp, Homo sapiens; identical to SEQ ID NO: 269375
  chr16:70754644-70755042
  hypo

SEQ ID NO: 320976 - DNA, 148 bp, Homo sapiens; identical to SEQ ID NO: 217072
  chr16:70783611-70783759
  hypo

SEQ ID NO: 320977 - DNA, 116 bp, Homo sapiens; identical to SEQ ID NO: 269378
  chr16:70795368-70795484
  hypo

SEQ ID NO: 320978 - DNA, 37 bp, Homo sapiens; identical to SEQ ID NO: 269379
  chr16:70796478-70796515
  hypo

SEQ ID NO: 320979 - DNA, 393 bp, Homo sapiens; identical to SEQ ID NO: 269380
  chr16:70807992-70808385
  hypo

SEQ ID NO: 320980 - DNA, 322 bp, Homo sapiens; identical to SEQ ID NO: 269381
  chr16:70811508-70811830
  hypo

SEQ ID NO: 320981 - DNA, 96 bp, Homo sapiens; identical to SEQ ID NO: 269382
  chr16:70829399-70829495
  hypo

SEQ ID NO: 320982 - DNA, 45 bp, Homo sapiens; identical to SEQ ID NO: 217075
  chr16:71324585-71324630
  hypo

SEQ ID NO: 320983 - DNA, 182 bp, Homo sapiens; identical to SEQ ID NO: 269384
  chr16:71537485-71537667
  hypo

SEQ ID NO: 320984 - DNA, 92 bp, Homo sapiens; identical to SEQ ID NO: 269385
  chr16:71661396-71661488
  hypo

SEQ ID NO: 320985 - DNA, 148 bp, Homo sapiens; identical to SEQ ID NO: 269386
  chr16:71674493-71674641
  hypo

SEQ ID NO: 320986 - DNA, 98 bp, Homo sapiens; identical to SEQ ID NO: 217076
  chr16:71715646-71715744
  hypo

SEQ ID NO: 320987 - DNA, 42 bp, Homo sapiens; identical to SEQ ID NO: 217077
  chr16:71716353-71716395
  hypo

SEQ ID NO: 320988 - DNA, 136 bp, Homo sapiens; identical to SEQ ID NO: 217078
  chr16:71748846-71748982
  hypo

SEQ ID NO: 320989 - DNA, 137 bp, Homo sapiens; identical to SEQ ID NO: 217079
  chr16:71754750-71754887
  hypo

SEQ ID NO: 320990 - DNA, 35 bp, Homo sapiens; identical to SEQ ID NO: 269391
  chr16:71756040-71756075
  hypo

SEQ ID NO: 320991 - DNA, 45 bp, Homo sapiens; identical to SEQ ID NO: 217080
  chr16:71870744-71870789
  hypo

SEQ ID NO: 320992 - DNA, 89 bp, Homo sapiens; identical to SEQ ID NO: 269393
  chr16:71878716-71878805
  hypo

SEQ ID NO: 320993 - DNA, 230 bp, Homo sapiens; identical to SEQ ID NO: 269394
  chr16:71894094-71894324
  hypo

SEQ ID NO: 320994 - DNA, 34 bp, Homo sapiens; identical to SEQ ID NO: 269395
  chr16:71948332-71948366
  hypo

SEQ ID NO: 320995 - DNA, 38 bp, Homo sapiens; identical to SEQ ID NO: 269396
  chr16:72018727-72018765
  hypo

SEQ ID NO: 320996 - DNA, 32 bp, Homo sapiens; identical to SEQ ID NO: 269397
  chr16:72032871-72032903
  hypo

SEQ ID NO: 320997 - DNA, 54 bp, Homo sapiens; identical to SEQ ID NO: 29407
  chr16:72460075-72460129
  hypo

SEQ ID NO: 320998 - DNA, 333 bp, Homo sapiens; identical to SEQ ID NO: 217083
  chr16:72461254-72461587
  hypo

SEQ ID NO: 320999 - DNA, 81 bp, Homo sapiens; identical to SEQ ID NO: 217084
  chr16:72461701-72461782
  hypo

SEQ ID NO: 321000 - DNA, 208 bp, Homo sapiens; identical to SEQ ID NO: 204280
  chr16:72699010-72699218
  hypo

SEQ ID NO: 321001 - DNA, 148 bp, Homo sapiens; identical to SEQ ID NO: 269401
  chr16:72906617-72906765
  hypo

SEQ ID NO: 321002 - DNA, 198 bp, Homo sapiens; identical to SEQ ID NO: 269402
  chr16:72916141-72916339
  hypo

SEQ ID NO: 321003 - DNA, 115 bp, Homo sapiens; identical to SEQ ID NO: 217086
  chr16:72945691-72945806
  hypo

SEQ ID NO: 321004 - DNA, 212 bp, Homo sapiens; identical to SEQ ID NO: 217087
  chr16:72949233-72949445
  hypo

SEQ ID NO: 321005 - DNA, 118 bp, Homo sapiens; identical to SEQ ID NO: 217088
  chr16:72957814-72957932
  hypo

SEQ ID NO: 321006 - DNA, 174 bp, Homo sapiens; identical to SEQ ID NO: 269406
  chr16:72958495-72958669
  hypo

SEQ ID NO: 321007 - DNA, 410 bp, Homo sapiens; identical to SEQ ID NO: 269407
  chr16:72958709-72959119
  hypo

SEQ ID NO: 321008 - DNA, 67 bp, Homo sapiens
  chr16:72963492-72963559
  hypo
tgtgttctgaaaggtggcctcgccctgtggctcttgccccagaggatgcctggggccacgcgggctg

SEQ ID NO: 321009 - DNA, 101 bp, Homo sapiens; identical to SEQ ID NO: 217089
  chr16:72984703-72984804
  hypo

SEQ ID NO: 321010 - DNA, 413 bp, Homo sapiens; identical to SEQ ID NO: 269410
  chr16:72991203-72991616
  hypo

SEQ ID NO: 321011 - DNA, 488 bp, Homo sapiens; identical to SEQ ID NO: 269411
  chr16:72991939-72992427
  hypo

SEQ ID NO: 321012 - DNA, 1013 bp, Homo sapiens; identical to SEQ ID NO: 269412
  chr16:72993525-72994538
  hypo

SEQ ID NO: 321013 - DNA, 192 bp, Homo sapiens; identical to SEQ ID NO: 269413
  chr16:72997030-72997222
  hypo

SEQ ID NO: 321014 - DNA, 86 bp, Homo sapiens; identical to SEQ ID NO: 217092
  chr16:73007796-73007882
  hypo

SEQ ID NO: 321015 - DNA, 96 bp, Homo sapiens; identical to SEQ ID NO: 269415
  chr16:73029802-73029898
  hypo

SEQ ID NO: 321016 - DNA, 47 bp, Homo sapiens; identical to SEQ ID NO: 269416
  chr16:73047783-73047830
  hypo

SEQ ID NO: 321017 - DNA, 334 bp, Homo sapiens; identical to SEQ ID NO: 291692
  chr16:73091551-73091885
  hypo

SEQ ID NO: 321018 - DNA, 217 bp, Homo sapiens; identical to SEQ ID NO: 53263
  chr16:73091900-73092117
  hypo

SEQ ID NO: 321019 - DNA, 166 bp, Homo sapiens; identical to SEQ ID NO: 291694
  chr16:73092380-73092546
  hypo

SEQ ID NO: 321020 - DNA, 94 bp, Homo sapiens; identical to SEQ ID NO: 217095
  chr16:73208571-73208665
  hypo

SEQ ID NO: 321021 - DNA, 36 bp, Homo sapiens; identical to SEQ ID NO: 269418
  chr16:73222730-73222766
  hypo

SEQ ID NO: 321022 - DNA, 211 bp, Homo sapiens; identical to SEQ ID NO: 269419
  chr16:73675853-73676064
  hypo

SEQ ID NO: 321023 - DNA, 35 bp, Homo sapiens; identical to SEQ ID NO: 269420
  chr16:74408512-74408547
  hypo

SEQ ID NO: 321024 - DNA, 89 bp, Homo sapiens; identical to SEQ ID NO: 217096
  chr16:74490377-74490466
  hypo

SEQ ID NO: 321025 - DNA, 45 bp, Homo sapiens; identical to SEQ ID NO: 269422
  chr16:74511568-74511613
  hypo

SEQ ID NO: 321026 - DNA, 43 bp, Homo sapiens; identical to SEQ ID NO: 269423
  chr16:74540183-74540226
  hypo

SEQ ID NO: 321027 - DNA, 205 bp, Homo sapiens; identical to SEQ ID NO: 269424
  chr16:74554955-74555160
  hypo

SEQ ID NO: 321028 - DNA, 213 bp, Homo sapiens; identical to SEQ ID NO: 204285
  chr16:74659412-74659625
  hypo

SEQ ID NO: 321029 - DNA, 32 bp, Homo sapiens; identical to SEQ ID NO: 217098
  chr16:74694094-74694126
  hypo

SEQ ID NO: 321030 - DNA, 32 bp, Homo sapiens; identical to SEQ ID NO: 217099
  chr16:74694366-74694398
  hypo

SEQ ID NO: 321031 - DNA, 435 bp, Homo sapiens; identical to SEQ ID NO: 269428
  chr16:74752677-74753112
  hypo

SEQ ID NO: 321032 - DNA, 447 bp, Homo sapiens; identical to SEQ ID NO: 269429
  chr16:74782379-74782826
  hypo

SEQ ID NO: 321033 - DNA, 79 bp, Homo sapiens; identical to SEQ ID NO: 225115
  chr16:74808949-74809028
  hypo

SEQ ID NO: 321034 - DNA, 149 bp, Homo sapiens; identical to SEQ ID NO: 269430
  chr16:74872626-74872775
  hypo

SEQ ID NO: 321035 - DNA, 146 bp, Homo sapiens; identical to SEQ ID NO: 269432
  chr16:74901700-74901846
  hypo

SEQ ID NO: 321036 - DNA, 335 bp, Homo sapiens; identical to SEQ ID NO: 269433
  chr16:74908780-74909115
  hypo

SEQ ID NO: 321037 - DNA, 103 bp, Homo sapiens; identical to SEQ ID NO: 269434
  chr16:74917222-74917325
  hypo

SEQ ID NO: 321038 - DNA, 127 bp, Homo sapiens; identical to SEQ ID NO: 217103
  chr16:74984548-74984675
  hypo

SEQ ID NO: 321039 - DNA, 40 bp, Homo sapiens; identical to SEQ ID NO: 204287
  chr16:75018963-75019003
  hypo

SEQ ID NO: 321040 - DNA, 363 bp, Homo sapiens; identical to SEQ ID NO: 225117
  chr16:75033799-75034162
  hypo

SEQ ID NO: 321041 - DNA, 43 bp, Homo sapiens; identical to SEQ ID NO: 217106
  chr16:75057287-75057330
  hypo

SEQ ID NO: 321042 - DNA, 32 bp, Homo sapiens; identical to SEQ ID NO: 269438
  chr16:75075662-75075694
  hypo

SEQ ID NO: 321043 - DNA, 44 bp, Homo sapiens; identical to SEQ ID NO: 217107
  chr16:75113037-75113081
  hypo

SEQ ID NO: 321044 - DNA, 44 bp, Homo sapiens; identical to SEQ ID NO: 217108
  chr16:75113381-75113425
  hypo

SEQ ID NO: 321045 - DNA, 40 bp, Homo sapiens; identical to SEQ ID NO: 217109
  chr16:75113750-75113790
  hypo

SEQ ID NO: 321046 - DNA, 195 bp, Homo sapiens; identical to SEQ ID NO: 217110
  chr16:75127914-75128109
  hypo

SEQ ID NO: 321047 - DNA, 379 bp, Homo sapiens; identical to SEQ ID NO: 217111
  chr16:75136326-75136705
  hypo

SEQ ID NO: 321048 - DNA, 297 bp, Homo sapiens; identical to SEQ ID NO: 217112
  chr16:75138821-75139118
  hypo

SEQ ID NO: 321049 - DNA, 56 bp, Homo sapiens; identical to SEQ ID NO: 217113
  chr16:75148497-75148553
  hypo

SEQ ID NO: 321050 - DNA, 150 bp, Homo sapiens
  chr16:75149151-75149301
  hypo
gcacaccttggcgatagcacagggctgccagccggctgacctgctccacgttctggggccacaccacagcatcaggaggttcgcacctagaaccagaccctcagcgatttagcggggcgtgacaccctctggtcccgaggtgttgcaggg

SEQ ID NO: 321051 - DNA, 220 bp, Homo sapiens; identical to SEQ ID NO: 269447
  chr16:75222815-75223035
  hypo

SEQ ID NO: 321052 - DNA, 154 bp, Homo sapiens
  chr16:75226944-75227098
  hypo
ttgcatacatatctcctttacgtcatctccggtcaatgcatacttgagtctattcctgaggaagacgatcagcggaagacattccctcagcttgtggggacctgtcgatggacgaggtgcaaatataccctttagtttgtcgagcatccaatgc

SEQ ID NO: 321053 - DNA, 65 bp, Homo sapiens
  chr16:75227128-75227193
  hypo
ttagggccccaggccatggtgaaaccctgcgacggaagatcagcgctcttttgaagtgccttgta

SEQ ID NO: 321054 - DNA, 95 bp, Homo sapiens; identical to SEQ ID NO: 269449
  chr16:75258689-75258784
  hypo

SEQ ID NO: 321055 - DNA, 307 bp, Homo sapiens; identical to SEQ ID NO: 291712
  chr16:75299751-75300058
  hypo

SEQ ID NO: 321056 - DNA, 41 bp, Homo sapiens; identical to SEQ ID NO: 217116
  chr16:75458366-75458407
  hypo

SEQ ID NO: 321057 - DNA, 134 bp, Homo sapiens
  chr16:75469119-75469253
  hypo
ttttgttaattttggataatgctacaatccattgctgcaaagaactcgaaaatgcacacgccaacataggagttctttttatgcccccaaacactaagtctctcatccaacccctcaatcggggcataataaaa

SEQ ID NO: 321058 - DNA, 44 bp, Homo sapiens; identical to SEQ ID NO: 269454
  chr16:75479780-75479824
  hypo

SEQ ID NO: 321059 - DNA, 76 bp, Homo sapiens; identical to SEQ ID NO: 217117
  chr16:75495229-75495305
  hypo

SEQ ID NO: 321060 - DNA, 457 bp, Homo sapiens; identical to SEQ ID NO: 269456
  chr16:75513119-75513576
  hypo

SEQ ID NO: 321061 - DNA, 34 bp, Homo sapiens; identical to SEQ ID NO: 269457
  chr16:75527396-75527430
  hypo

SEQ ID NO: 321062 - DNA, 176 bp, Homo sapiens; identical to SEQ ID NO: 291713
  chr16:75529727-75529903
  hypo

SEQ ID NO: 321063 - DNA, 404 bp, Homo sapiens; identical to SEQ ID NO: 269459
  chr16:75563100-75563504
  hypo

SEQ ID NO: 321064 - DNA, 138 bp, Homo sapiens; identical to SEQ ID NO: 217120
  chr16:75606235-75606373
  hypo

SEQ ID NO: 321065 - DNA, 88 bp, Homo sapiens; identical to SEQ ID NO: 217121
  chr16:75622685-75622773
  hypo

SEQ ID NO: 321066 - DNA, 313 bp, Homo sapiens; identical to SEQ ID NO: 217122
  chr16:77227371-77227684
  hypo

SEQ ID NO: 321067 - DNA, 580 bp, Homo sapiens; identical to SEQ ID NO: 217123
  chr16:77228259-77228839
  hypo

SEQ ID NO: 321068 - DNA, 43 bp, Homo sapiens; identical to SEQ ID NO: 217124
  chr16:77229453-77229496
  hypo

SEQ ID NO: 321069 - DNA, 370 bp, Homo sapiens; identical to SEQ ID NO: 269465
  chr16:77232998-77233368
  hypo

SEQ ID NO: 321070 - DNA, 82 bp, Homo sapiens; identical to SEQ ID NO: 204296
  chr16:77246930-77247012
  hypo

SEQ ID NO: 321071 - DNA, 204 bp, Homo sapiens; identical to SEQ ID NO: 204297
  chr16:77247511-77247715
  hypo

SEQ ID NO: 321072 - DNA, 95 bp, Homo sapiens; identical to SEQ ID NO: 291721
  chr16:77469120-77469215
  hypo

SEQ ID NO: 321073 - DNA, 255 bp, Homo sapiens; identical to SEQ ID NO: 291722
  chr16:77747179-77747434
  hypo

SEQ ID NO: 321074 - DNA, 291 bp, Homo sapiens; identical to SEQ ID NO: 217129
  chr16:77752653-77752944
  hypo

SEQ ID NO: 321075 - DNA, 567 bp, Homo sapiens; identical to SEQ ID NO: 217130
  chr16:77753304-77753871
  hypo

SEQ ID NO: 321076 - DNA, 49 bp, Homo sapiens; identical to SEQ ID NO: 204300
  chr16:77822068-77822117
  hypo

SEQ ID NO: 321077 - DNA, 44 bp, Homo sapiens; identical to SEQ ID NO: 291725
  chr16:78139958-78140002
  hypo

SEQ ID NO: 321078 - DNA, 33 bp, Homo sapiens; identical to SEQ ID NO: 217132
  chr16:78159169-78159202
  hypo

SEQ ID NO: 321079 - DNA, 343 bp, Homo sapiens; identical to SEQ ID NO: 291726
  chr16:78322868-78323211
  hypo

SEQ ID NO: 321080 - DNA, 174 bp, Homo sapiens; identical to SEQ ID NO: 269472
  chr16:78409036-78409210
  hypo

SEQ ID NO: 321081 - DNA, 32 bp, Homo sapiens; identical to SEQ ID NO: 225129
  chr16:78425003-78425035
  hypo

SEQ ID NO: 321082 - DNA, 206 bp, Homo sapiens; identical to SEQ ID NO: 269473
  chr16:78519525-78519731
  hypo

SEQ ID NO: 321083 - DNA, 103 bp, Homo sapiens; identical to SEQ ID NO: 204305
  chr16:79636191-79636294
  hypo

SEQ ID NO: 321084 - DNA, 101 bp, Homo sapiens; identical to SEQ ID NO: 291736
  chr16:79804457-79804558
  hypo

SEQ ID NO: 321085 - DNA, 212 bp, Homo sapiens; identical to SEQ ID NO: 291737
  chr16:79804596-79804808
  hypo

SEQ ID NO: 321086 - DNA, 76 bp, Homo sapiens; identical to SEQ ID NO: 217134
  chr16:80641602-80641678
  hypo

SEQ ID NO: 321087 - DNA, 225 bp, Homo sapiens
  chr16:80641903-80642128
  hypo
cagtgaagccctctgagccttgctgtcttcatgtgtaaaatgggtctatcaaaaggacaagcacgcaggaggcgcaggaactcaccacggcactgcaggatgccatctccttgacccgcagcatgacctcctggctgaacgtggtgggccagaagacctgcgacaccagccccctgctgcaggcctcctgggcggtgagcttccgcccacagaacagcatctcat

SEQ ID NO: 321088 - DNA, 396 bp, Homo sapiens; identical to SEQ ID NO: 269476
  chr16:80646291-80646687
  hypo

SEQ ID NO: 321089 - DNA, 38 bp, Homo sapiens; identical to SEQ ID NO: 217135
  chr16:80654697-80654735
  hypo

SEQ ID NO: 321090 - DNA, 158 bp, Homo sapiens; identical to SEQ ID NO: 269478
  chr16:80714339-80714497
  hypo

SEQ ID NO: 321091 - DNA, 538 bp, Homo sapiens; identical to SEQ ID NO: 291740
  chr16:80837424-80837962
  hypo

SEQ ID NO: 321092 - DNA, 36 bp, Homo sapiens; identical to SEQ ID NO: 269479
  chr16:80931968-80932004
  hypo

SEQ ID NO: 321093 - DNA, 134 bp, Homo sapiens; identical to SEQ ID NO: 269481
  chr16:81087464-81087598
  hypo

SEQ ID NO: 321094 - DNA, 115 bp, Homo sapiens; identical to SEQ ID NO: 269482
  chr16:81309505-81309620
  hypo

SEQ ID NO: 321095 - DNA, 198 bp, Homo sapiens; identical to SEQ ID NO: 217137
  chr16:81315519-81315717
  hypo

SEQ ID NO: 321096 - DNA, 201 bp, Homo sapiens; identical to SEQ ID NO: 217138
  chr16:81323324-81323525
  hypo

SEQ ID NO: 321097 - DNA, 191 bp, Homo sapiens; identical to SEQ ID NO: 269485
  chr16:81335173-81335364
  hypo

SEQ ID NO: 321098 - DNA, 127 bp, Homo sapiens; identical to SEQ ID NO: 269486
  chr16:81361632-81361759
  hypo

SEQ ID NO: 321099 - DNA, 41 bp, Homo sapiens; identical to SEQ ID NO: 217139
  chr16:81453688-81453729
  hypo

SEQ ID NO: 321100 - DNA, 188 bp, Homo sapiens; identical to SEQ ID NO: 217140
  chr16:81492930-81493118
  hypo

SEQ ID NO: 321101 - DNA, 42 bp, Homo sapiens; identical to SEQ ID NO: 269489
  chr16:81493362-81493404
  hypo

SEQ ID NO: 321102 - DNA, 250 bp, Homo sapiens; identical to SEQ ID NO: 217141
  chr16:81505617-81505867
  hypo

SEQ ID NO: 321103 - DNA, 113 bp, Homo sapiens; identical to SEQ ID NO: 269491
  chr16:81520548-81520661
  hypo

SEQ ID NO: 321104 - DNA, 254 bp, Homo sapiens; identical to SEQ ID NO: 217142
  chr16:81533315-81533569
  hypo

SEQ ID NO: 321105 - DNA, 317 bp, Homo sapiens; identical to SEQ ID NO: 269493
  chr16:81556854-81557171
  hypo

SEQ ID NO: 321106 - DNA, 102 bp, Homo sapiens
  chr16:81557201-81557303
  hypo
aaccgtggttgcctcatttagatcccagccaaacccccttcccgcgaaaagccatggtggcctagaacgaagtctggaaaagaaccaagaggacagcatctt

SEQ ID NO: 321107 - DNA, 253 bp, Homo sapiens; identical to SEQ ID NO: 217144
  chr16:81557355-81557608
  hypo

SEQ ID NO: 321108 - DNA, 280 bp, Homo sapiens; identical to SEQ ID NO: 217145
  chr16:81563919-81564199
  hypo

SEQ ID NO: 321109 - DNA, 162 bp, Homo sapiens; identical to SEQ ID NO: 217146
  chr16:81564229-81564391
  hypo

SEQ ID NO: 321110 - DNA, 261 bp, Homo sapiens; identical to SEQ ID NO: 217147
  chr16:81564541-81564802
  hypo

SEQ ID NO: 321111 - DNA, 640 bp, Homo sapiens; identical to SEQ ID NO: 217148
  chr16:81565569-81566209
  hypo

SEQ ID NO: 321112 - DNA, 158 bp, Homo sapiens; identical to SEQ ID NO: 217149
  chr16:81580487-81580645
  hypo

SEQ ID NO: 321113 - DNA, 31 bp, Homo sapiens; identical to SEQ ID NO: 269498
  chr16:81581959-81581990
  hypo

SEQ ID NO: 321114 - DNA, 262 bp, Homo sapiens; identical to SEQ ID NO: 269499
  chr16:81620081-81620343
  hypo

SEQ ID NO: 321115 - DNA, 291 bp, Homo sapiens; identical to SEQ ID NO: 217150
  chr16:81626931-81627222
  hypo

SEQ ID NO: 321116 - DNA, 97 bp, Homo sapiens; identical to SEQ ID NO: 217151
  chr16:81632815-81632912
  hypo

SEQ ID NO: 321117 - DNA, 46 bp, Homo sapiens; identical to SEQ ID NO: 269502
  chr16:81654530-81654576
  hypo

SEQ ID NO: 321118 - DNA, 44 bp, Homo sapiens; identical to SEQ ID NO: 269503
  chr16:81655118-81655162
  hypo

SEQ ID NO: 321119 - DNA, 108 bp, Homo sapiens; identical to SEQ ID NO: 269504
  chr16:81655707-81655815
  hypo

SEQ ID NO: 321120 - DNA, 142 bp, Homo sapiens; identical to SEQ ID NO: 217152
  chr16:81684997-81685139
  hypo

SEQ ID NO: 321121 - DNA, 127 bp, Homo sapiens; identical to SEQ ID NO: 269506
  chr16:81688957-81689084
  hypo

SEQ ID NO: 321122 - DNA, 143 bp, Homo sapiens
  chr16:81694540-81694683
  hypo
tcttttgcaaggtacgggattgctgagctggggctgtggctgcaggaagtaacctccctctgtgcgcataccagggattgggtttgcacagaaaggccaaaaacctgggccccaccgtcttgggtcacggtcccagacacagg

SEQ ID NO: 321123 - DNA, 367 bp, Homo sapiens
  chr16:81694713-81695080
  hypo
gggctacacccacgtctctgccagacaggtgacaaagagtcacaaggggaacatcttgcttttccttggaatcacttcccggctgtcttaggagacaggttgctgcagatttcctgggctcatgacgtcagagctgggttattattagccaaggttcctctgcgcagtggctggcccacggtggggtgcggctgtggggctttccctgaacacgggaggcagcacggtgctccaggttagcttagaggagctgtggagcagggcatccgctgccgggcacccggcgccagccttgcagtgggattcacataggacatgtccagggcacatctttgtggctcaggccgaaccatcacacaaacctgtt

SEQ ID NO: 321124 - DNA, 164 bp, Homo sapiens; identical to SEQ ID NO: 269508
  chr16:81700317-81700481
  hypo

SEQ ID NO: 321125 - DNA, 128 bp, Homo sapiens; identical to SEQ ID NO: 269509
  chr16:81700925-81701053
  hypo

SEQ ID NO: 321126 - DNA, 400 bp, Homo sapiens; identical to SEQ ID NO: 269510
  chr16:81703540-81703940
  hypo

SEQ ID NO: 321127 - DNA, 453 bp, Homo sapiens; identical to SEQ ID NO: 269511
  chr16:81737255-81737708
  hypo

SEQ ID NO: 321128 - DNA, 359 bp, Homo sapiens; identical to SEQ ID NO: 269512
  chr16:81741576-81741935
  hypo

SEQ ID NO: 321129 - DNA, 59 bp, Homo sapiens; identical to SEQ ID NO: 269513
  chr16:81765482-81765541
  hypo

SEQ ID NO: 321130 - DNA, 377 bp, Homo sapiens; identical to SEQ ID NO: 269514
  chr16:81924958-81925335
  hypo

SEQ ID NO: 321131 - DNA, 197 bp, Homo sapiens; identical to SEQ ID NO: 269516
  chr16:81942077-81942274
  hypo

SEQ ID NO: 321132 - DNA, 173 bp, Homo sapiens; identical to SEQ ID NO: 269517
  chr16:81958725-81958898
  hypo

SEQ ID NO: 321133 - DNA, 207 bp, Homo sapiens; identical to SEQ ID NO: 217153
  chr16:82172390-82172597
  hypo

SEQ ID NO: 321134 - DNA, 44 bp, Homo sapiens; identical to SEQ ID NO: 269519
  chr16:83862928-83862972
  hypo

SEQ ID NO: 321135 - DNA, 453 bp, Homo sapiens; identical to SEQ ID NO: 217154
  chr16:83863590-83864043
  hypo

SEQ ID NO: 321136 - DNA, 217 bp, Homo sapiens; identical to SEQ ID NO: 269521
  chr16:83934482-83934699
  hypo

SEQ ID NO: 321137 - DNA, 150 bp, Homo sapiens; identical to SEQ ID NO: 217155
  chr16:83941759-83941909
  hypo

SEQ ID NO: 321138 - DNA, 383 bp, Homo sapiens; identical to SEQ ID NO: 269523
  chr16:83945610-83945993
  hypo

SEQ ID NO: 321139 - DNA, 468 bp, Homo sapiens; identical to SEQ ID NO: 269524
  chr16:83957599-83958067
  hypo

SEQ ID NO: 321140 - DNA, 127 bp, Homo sapiens
  chr16:83969106-83969233
  hypo
gggtgtgttgggggcaccgttcagctgggaggctttgcagcaacccagggtcacagggaggggcccaggggtcagaatccaaatctatttgcaggtggagctggtgggttcgcgaagggactggggt

SEQ ID NO: 321141 - DNA, 41 bp, Homo sapiens; identical to SEQ ID NO: 217157
  chr16:83999491-83999532
  hypo

SEQ ID NO: 321142 - DNA, 39 bp, Homo sapiens; identical to SEQ ID NO: 217158
  chr16:84004407-84004446
  hypo

SEQ ID NO: 321143 - DNA, 180 bp, Homo sapiens; identical to SEQ ID NO: 269529
  chr16:84017889-84018069
  hypo

SEQ ID NO: 321144 - DNA, 74 bp, Homo sapiens
  chr16:84074762-84074836
  hypo
aagagcgcggcgtccgcgcttccccaaaagggaattctggctttgcacccggcaggcaggagagcggaacatcc

SEQ ID NO: 321145 - DNA, 87 bp, Homo sapiens
  chr16:84074871-84074958
  hypo
agtgtgggagtgtcacaccagttttaggctcaatctgcacacaggagtcgagctttgtttttgtgtgtttaagacagagtctcactc

SEQ ID NO: 321146 - DNA, 152 bp, Homo sapiens; identical to SEQ ID NO: 269531
  chr16:84085875-84086027
  hypo

SEQ ID NO: 321147 - DNA, 242 bp, Homo sapiens
  chr16:84129122-84129364
  hypo
atgtctggactttccgcgccttccctgggtaatagcacacacctgtatatcccataagcaccttccctgggtaatagcacacacctgtatatcccatctgccagagcacatctgcctgcagtgtctgggcaacctggcgcgggatggctctcagcagccgtctgctcgaatgccttcccgtagcatgccagaagccagagcccagggagaggctggctcttcgcaggggacgtgatgattgc

SEQ ID NO: 321148 - DNA, 81 bp, Homo sapiens
  chr16:84129394-84129475
  hypo
ggtactgtggggtcagctacaggcaagggagagaaagatcagaacagaagagcaaaacgaactacacgatacccgccaggc

SEQ ID NO: 321149 - DNA, 619 bp, Homo sapiens; identical to SEQ ID NO: 269533
  chr16:84132212-84132831
  hypo

SEQ ID NO: 321150 - DNA, 236 bp, Homo sapiens; identical to SEQ ID NO: 269534
  chr16:84153001-84153237
  hypo

SEQ ID NO: 321151 - DNA, 123 bp, Homo sapiens; identical to SEQ ID NO: 269535
  chr16:84170876-84170999
  hypo

SEQ ID NO: 321152 - DNA, 156 bp, Homo sapiens; identical to SEQ ID NO: 269536
  chr16:84191396-84191552
  hypo

SEQ ID NO: 321153 - DNA, 208 bp, Homo sapiens; identical to SEQ ID NO: 269537
  chr16:84224887-84225095
  hypo

SEQ ID NO: 321154 - DNA, 150 bp, Homo sapiens; identical to SEQ ID NO: 269538
  chr16:84270371-84270521
  hypo

SEQ ID NO: 321155 - DNA, 194 bp, Homo sapiens; identical to SEQ ID NO: 269539
  chr16:84296330-84296524
  hypo

SEQ ID NO: 321156 - DNA, 195 bp, Homo sapiens; identical to SEQ ID NO: 269540
  chr16:84343757-84343952
  hypo

SEQ ID NO: 321157 - DNA, 113 bp, Homo sapiens; identical to SEQ ID NO: 217160
  chr16:84423862-84423975
  hypo

SEQ ID NO: 321158 - DNA, 110 bp, Homo sapiens
  chr16:84483332-84483442
  hypo
gagacaatctggcacgtgggtggcagctgcttttgtcatggttgatacgaccaagccattcagtagctccctgttcttgtcacatcacgcctctgctgacgaaatggctc

SEQ ID NO: 321159 - DNA, 272 bp, Homo sapiens; identical to SEQ ID NO: 217162
  chr16:84483472-84483744
  hypo

SEQ ID NO: 321160 - DNA, 133 bp, Homo sapiens; identical to SEQ ID NO: 269543
  chr16:84496272-84496405
  hypo

SEQ ID NO: 321161 - DNA, 273 bp, Homo sapiens; identical to SEQ ID NO: 269544
  chr16:84535207-84535480
  hypo

SEQ ID NO: 321162 - DNA, 212 bp, Homo sapiens; identical to SEQ ID NO: 217164
  chr16:84535780-84535992
  hypo

SEQ ID NO: 321163 - DNA, 255 bp, Homo sapiens; identical to SEQ ID NO: 269546
  chr16:84537368-84537623
  hypo

SEQ ID NO: 321164 - DNA, 32 bp, Homo sapiens; identical to SEQ ID NO: 269547
  chr16:84553146-84553178
  hypo

SEQ ID NO: 321165 - DNA, 139 bp, Homo sapiens; identical to SEQ ID NO: 217165
  chr16:84593079-84593218
  hypo

SEQ ID NO: 321166 - DNA, 104 bp, Homo sapiens; identical to SEQ ID NO: 269549
  chr16:84602924-84603028
  hypo

SEQ ID NO: 321167 - DNA, 388 bp, Homo sapiens; identical to SEQ ID NO: 269550
  chr16:84607793-84608181
  hypo

SEQ ID NO: 321168 - DNA, 58 bp, Homo sapiens
  chr16:84617727-84617785
  hypo
tctgtcctgggcaccagccgggtacttctgtgtggcagacaacagctgtggccagcca

SEQ ID NO: 321169 - DNA, 817 bp, Homo sapiens; identical to SEQ ID NO: 204321
  chr16:84650976-84651793
  hypo

SEQ ID NO: 321170 - DNA, 254 bp, Homo sapiens; identical to SEQ ID NO: 269552
  chr16:84683895-84684149
  hypo

SEQ ID NO: 321171 - DNA, 218 bp, Homo sapiens; identical to SEQ ID NO: 269553
  chr16:84695419-84695637
  hypo

SEQ ID NO: 321172 - DNA, 102 bp, Homo sapiens; identical to SEQ ID NO: 269554
  chr16:84717283-84717385
  hypo

SEQ ID NO: 321173 - DNA, 41 bp, Homo sapiens; identical to SEQ ID NO: 269555
  chr16:84735938-84735979
  hypo

SEQ ID NO: 321174 - DNA, 185 bp, Homo sapiens; identical to SEQ ID NO: 217167
  chr16:84749467-84749652
  hypo

SEQ ID NO: 321175 - DNA, 90 bp, Homo sapiens; identical to SEQ ID NO: 217168
  chr16:84780671-84780761
  hypo

SEQ ID NO: 321176 - DNA, 231 bp, Homo sapiens; identical to SEQ ID NO: 269558
  chr16:84800549-84800780
  hypo

SEQ ID NO: 321177 - DNA, 63 bp, Homo sapiens; identical to SEQ ID NO: 217169
  chr16:84812705-84812768
  hypo

SEQ ID NO: 321178 - DNA, 362 bp, Homo sapiens; identical to SEQ ID NO: 29529
  chr16:84813521-84813883
  hypo

SEQ ID NO: 321179 - DNA, 617 bp, Homo sapiens; identical to SEQ ID NO: 269561
  chr16:84822975-84823592
  hypo

SEQ ID NO: 321180 - DNA, 450 bp, Homo sapiens; identical to SEQ ID NO: 269562
  chr16:84824664-84825114
  hypo

SEQ ID NO: 321181 - DNA, 69 bp, Homo sapiens; identical to SEQ ID NO: 269563
  chr16:84868032-84868101
  hypo

SEQ ID NO: 321182 - DNA, 148 bp, Homo sapiens; identical to SEQ ID NO: 269564
  chr16:84886291-84886439
  hypo

SEQ ID NO: 321183 - DNA, 158 bp, Homo sapiens; identical to SEQ ID NO: 269565
  chr16:84904248-84904406
  hypo

SEQ ID NO: 321184 - DNA, 45 bp, Homo sapiens; identical to SEQ ID NO: 269566
  chr16:84954215-84954260
  hypo

SEQ ID NO: 321185 - DNA, 182 bp, Homo sapiens; identical to SEQ ID NO: 217171
  chr16:84965070-84965252
  hypo

SEQ ID NO: 321186 - DNA, 198 bp, Homo sapiens; identical to SEQ ID NO: 269568
  chr16:84974274-84974472
  hypo

SEQ ID NO: 321187 - DNA, 277 bp, Homo sapiens; identical to SEQ ID NO: 269569
  chr16:84987803-84988080
  hypo

SEQ ID NO: 321188 - DNA, 41 bp, Homo sapiens; identical to SEQ ID NO: 269570
  chr16:84997910-84997951
  hypo

SEQ ID NO: 321189 - DNA, 314 bp, Homo sapiens; identical to SEQ ID NO: 217173
  chr16:84998380-84998694
  hypo

SEQ ID NO: 321190 - DNA, 102 bp, Homo sapiens; identical to SEQ ID NO: 217174
  chr16:85001517-85001619
  hypo

SEQ ID NO: 321191 - DNA, 82 bp, Homo sapiens; identical to SEQ ID NO: 217175
  chr16:85001679-85001761
  hypo

SEQ ID NO: 321192 - DNA, 154 bp, Homo sapiens; identical to SEQ ID NO: 217176
  chr16:85007919-85008073
  hypo

SEQ ID NO: 321193 - DNA, 143 bp, Homo sapiens; identical to SEQ ID NO: 217177
  chr16:85008291-85008434
  hypo

SEQ ID NO: 321194 - DNA, 186 bp, Homo sapiens; identical to SEQ ID NO: 269575
  chr16:85008678-85008864
  hypo

SEQ ID NO: 321195 - DNA, 341 bp, Homo sapiens; identical to SEQ ID NO: 269576
  chr16:85009390-85009731
  hypo

SEQ ID NO: 321196 - DNA, 190 bp, Homo sapiens; identical to SEQ ID NO: 217178
  chr16:85009949-85010139
  hypo

SEQ ID NO: 321197 - DNA, 254 bp, Homo sapiens; identical to SEQ ID NO: 217179
  chr16:85010169-85010423
  hypo

SEQ ID NO: 321198 - DNA, 118 bp, Homo sapiens; identical to SEQ ID NO: 269578
  chr16:85011214-85011332
  hypo

SEQ ID NO: 321199 - DNA, 120 bp, Homo sapiens; identical to SEQ ID NO: 269579
  chr16:85013863-85013983
  hypo

SEQ ID NO: 321200 - DNA, 97 bp, Homo sapiens; identical to SEQ ID NO: 269580
  chr16:85015385-85015482
  hypo

SEQ ID NO: 321201 - DNA, 458 bp, Homo sapiens; identical to SEQ ID NO: 269581
  chr16:85019752-85020210
  hypo

SEQ ID NO: 321202 - DNA, 143 bp, Homo sapiens; identical to SEQ ID NO: 269582
  chr16:85024470-85024613
  hypo

SEQ ID NO: 321203 - DNA, 93 bp, Homo sapiens; identical to SEQ ID NO: 269583
  chr16:85026076-85026169
  hypo

SEQ ID NO: 321204 - DNA, 147 bp, Homo sapiens; identical to SEQ ID NO: 269585
  chr16:85029250-85029397
  hypo

SEQ ID NO: 321205 - DNA, 42 bp, Homo sapiens; identical to SEQ ID NO: 269586
  chr16:85030031-85030073
  hypo

SEQ ID NO: 321206 - DNA, 39 bp, Homo sapiens; identical to SEQ ID NO: 269587
  chr16:85032152-85032191
  hypo

SEQ ID NO: 321207 - DNA, 85 bp, Homo sapiens; identical to SEQ ID NO: 217180
  chr16:85033742-85033827
  hypo

SEQ ID NO: 321208 - DNA, 106 bp, Homo sapiens; identical to SEQ ID NO: 217181
  chr16:85033902-85034008
  hypo

SEQ ID NO: 321209 - DNA, 85 bp, Homo sapiens; identical to SEQ ID NO: 269589
  chr16:85037000-85037085
  hypo

SEQ ID NO: 321210 - DNA, 97 bp, Homo sapiens; identical to SEQ ID NO: 225138
  chr16:85143894-85143991
  hypo

SEQ ID NO: 321211 - DNA, 46 bp, Homo sapiens; identical to SEQ ID NO: 217182
  chr16:85147115-85147161
  hypo

SEQ ID NO: 321212 - DNA, 162 bp, Homo sapiens; identical to SEQ ID NO: 269592
  chr16:85151028-85151190
  hypo

SEQ ID NO: 321213 - DNA, 208 bp, Homo sapiens; identical to SEQ ID NO: 217183
  chr16:85196722-85196930
  hypo

SEQ ID NO: 321214 - DNA, 844 bp, Homo sapiens; identical to SEQ ID NO: 291766
  chr16:85202555-85203399
  hypo

SEQ ID NO: 321215 - DNA, 173 bp, Homo sapiens; identical to SEQ ID NO: 217184
  chr16:85214271-85214444
  hypo

SEQ ID NO: 321216 - DNA, 374 bp, Homo sapiens; identical to SEQ ID NO: 269595
  chr16:85216377-85216751
  hypo

SEQ ID NO: 321217 - DNA, 88 bp, Homo sapiens; identical to SEQ ID NO: 269596
  chr16:85241883-85241971
  hypo

SEQ ID NO: 321218 - DNA, 200 bp, Homo sapiens; identical to SEQ ID NO: 217185
  chr16:85245559-85245759
  hypo

SEQ ID NO: 321219 - DNA, 45 bp, Homo sapiens; identical to SEQ ID NO: 269598
  chr16:85283528-85283573
  hypo

SEQ ID NO: 321220 - DNA, 187 bp, Homo sapiens; identical to SEQ ID NO: 269599
  chr16:85305676-85305863
  hypo

SEQ ID NO: 321221 - DNA, 43 bp, Homo sapiens; identical to SEQ ID NO: 269600
  chr16:85305893-85305936
  hypo

SEQ ID NO: 321222 - DNA, 53 bp, Homo sapiens
  chr16:85317797-85317850
  hypo
tctgcccggcgggtcgtgctttagctgtcgctgtagggcgactcttggcgtgt

SEQ ID NO: 321223 - DNA, 107 bp, Homo sapiens
  chr16:85317882-85317989
  hypo
tgacagcagagaaggatcagacagggagaaggcgggagagggcagagcaggccgagggaaagagagagaggtctcccggcgggggccgggcgcgagagcctctgctt

SEQ ID NO: 321224 - DNA, 214 bp, Homo sapiens
  chr16:85318221-85318435
  hypo
gtggtgagaacctgctaactggatattaaacgcccgctgctgggagagtcgtggtccacagtaggatgtgatcgttcaggctggagggatcgtggggaaaatggtggctcatggaatactaaggggaaggctgtcaggtgcgggcggggctggcacacacagctcaccttcagctgaggaagctgcctgctccgctgccgtcctggcagtcagt

SEQ ID NO: 321225 - DNA, 84 bp, Homo sapiens; identical to SEQ ID NO: 217187
  chr16:85321496-85321580
  hypo

SEQ ID NO: 321226 - DNA, 169 bp, Homo sapiens; identical to SEQ ID NO: 217188
  chr16:85327232-85327401
  hypo

SEQ ID NO: 321227 - DNA, 164 bp, Homo sapiens
  chr16:85328798-85328962
  hypo
cttcccagggcctccgcacacaccggtccaccttctgcctgaggatggcctgtgctgggcatttcctgggaatggaatcctgcagtacaagctcttttgtggcttctctcactcgggaccagcctggggcgaaaccctgtctctactaaaaatacaaacaaatc

SEQ ID NO: 321228 - DNA, 123 bp, Homo sapiens
  chr16:85328994-85329117
  hypo
gtcagcacatcagcccttttatggctgagtgattattccaccgtgcgcgtagaccgcgtcctttttgcccatccaccgccgatggccgtttgggctgtctccacctttcggctgctgtcacgt

SEQ ID NO: 321229 - DNA, 172 bp, Homo sapiens; identical to SEQ ID NO: 269606
  chr16:85329623-85329795
  hypo

SEQ ID NO: 321230 - DNA, 44 bp, Homo sapiens; identical to SEQ ID NO: 217189
  chr16:85332745-85332789
  hypo

SEQ ID NO: 321231 - DNA, 95 bp, Homo sapiens; identical to SEQ ID NO: 217190
  chr16:85336635-85336730
  hypo

SEQ ID NO: 321232 - DNA, 194 bp, Homo sapiens; identical to SEQ ID NO: 269610
  chr16:85351334-85351528
  hypo

SEQ ID NO: 321233 - DNA, 83 bp, Homo sapiens; identical to SEQ ID NO: 269611
  chr16:85369411-85369494
  hypo

SEQ ID NO: 321234 - DNA, 208 bp, Homo sapiens; identical to SEQ ID NO: 269612
  chr16:85377785-85377993
  hypo

SEQ ID NO: 321235 - DNA, 157 bp, Homo sapiens; identical to SEQ ID NO: 269613
  chr16:85389787-85389944
  hypo

SEQ ID NO: 321236 - DNA, 36 bp, Homo sapiens; identical to SEQ ID NO: 217191
  chr16:85399704-85399740
  hypo

SEQ ID NO: 321237 - DNA, 48 bp, Homo sapiens; identical to SEQ ID NO: 217192
  chr16:85399770-85399818
  hypo

SEQ ID NO: 321238 - DNA, 298 bp, Homo sapiens; identical to SEQ ID NO: 217193
  chr16:85407686-85407984
  hypo

SEQ ID NO: 321239 - DNA, 161 bp, Homo sapiens; identical to SEQ ID NO: 217194
  chr16:85410442-85410603
  hypo

SEQ ID NO: 321240 - DNA, 153 bp, Homo sapiens; identical to SEQ ID NO: 217195
  chr16:85417768-85417921
  hypo

SEQ ID NO: 321241 - DNA, 116 bp, Homo sapiens; identical to SEQ ID NO: 217196
  chr16:85423785-85423901
  hypo

SEQ ID NO: 321242 - DNA, 171 bp, Homo sapiens; identical to SEQ ID NO: 217197
  chr16:85426317-85426488
  hypo

SEQ ID NO: 321243 - DNA, 111 bp, Homo sapiens; identical to SEQ ID NO: 217198
  chr16:85428081-85428192
  hypo

SEQ ID NO: 321244 - DNA, 285 bp, Homo sapiens; identical to SEQ ID NO: 269621
  chr16:85428653-85428938
  hypo

SEQ ID NO: 321245 - DNA, 94 bp, Homo sapiens; identical to SEQ ID NO: 217199
  chr16:85432465-85432559
  hypo

SEQ ID NO: 321246 - DNA, 100 bp, Homo sapiens; identical to SEQ ID NO: 269623
  chr16:85453278-85453378
  hypo

SEQ ID NO: 321247 - DNA, 144 bp, Homo sapiens; identical to SEQ ID NO: 269624
  chr16:85454710-85454854
  hypo

SEQ ID NO: 321248 - DNA, 32 bp, Homo sapiens; identical to SEQ ID NO: 269625
  chr16:85457902-85457934
  hypo

SEQ ID NO: 321249 - DNA, 38 bp, Homo sapiens; identical to SEQ ID NO: 269626
  chr16:85458421-85458459
  hypo

SEQ ID NO: 321250 - DNA, 67 bp, Homo sapiens
  chr16:85464302-85464369
  hypo
gcggcggcagtctagggcattcgtctgaagggcaccgctggggaaatcctgacgtaggcacacacgt

SEQ ID NO: 321251 - DNA, 201 bp, Homo sapiens; identical to SEQ ID NO: 217200
  chr16:85465097-85465298
  hypo

SEQ ID NO: 321252 - DNA, 71 bp, Homo sapiens; identical to SEQ ID NO: 217201
  chr16:85485676-85485747
  hypo

SEQ ID NO: 321253 - DNA, 112 bp, Homo sapiens; identical to SEQ ID NO: 217202
  chr16:85485855-85485967
  hypo

SEQ ID NO: 321254 - DNA, 137 bp, Homo sapiens; identical to SEQ ID NO: 269630
  chr16:85492605-85492742
  hypo

SEQ ID NO: 321255 - DNA, 148 bp, Homo sapiens; identical to SEQ ID NO: 217203
  chr16:85497297-85497445
  hypo

SEQ ID NO: 321256 - DNA, 130 bp, Homo sapiens; identical to SEQ ID NO: 217204
  chr16:85497475-85497605
  hypo

SEQ ID NO: 321257 - DNA, 148 bp, Homo sapiens; identical to SEQ ID NO: 269633
  chr16:85498783-85498931
  hypo

SEQ ID NO: 321258 - DNA, 59 bp, Homo sapiens; identical to SEQ ID NO: 269634
  chr16:85506194-85506253
  hypo

SEQ ID NO: 321259 - DNA, 69 bp, Homo sapiens; identical to SEQ ID NO: 217205
  chr16:85517149-85517218
  hypo

SEQ ID NO: 321260 - DNA, 158 bp, Homo sapiens; identical to SEQ ID NO: 217206
  chr16:85517620-85517778
  hypo

SEQ ID NO: 321261 - DNA, 141 bp, Homo sapiens; identical to SEQ ID NO: 269636
  chr16:85520266-85520407
  hypo

SEQ ID NO: 321262 - DNA, 41 bp, Homo sapiens; identical to SEQ ID NO: 217207
  chr16:85523184-85523225
  hypo

SEQ ID NO: 321263 - DNA, 413 bp, Homo sapiens; identical to SEQ ID NO: 269638
  chr16:85529540-85529953
  hypo

SEQ ID NO: 321264 - DNA, 107 bp, Homo sapiens; identical to SEQ ID NO: 217209
  chr16:85535588-85535695
  hypo

SEQ ID NO: 321265 - DNA, 173 bp, Homo sapiens
  chr16:85537318-85537491
  hypo
gtcgaagcaaacctcgccgatgacagaccctgtaattagaaactgtagtgtccccgagactggtctttaaaactgtcagaagccaagcggccgtcatttgatacaagactatcatcacccgtgaacccattagctgcaggtaaataacatattatgccagggacggaaagcag

SEQ ID NO: 321266 - DNA, 321 bp, Homo sapiens; identical to SEQ ID NO: 217211
  chr16:85541368-85541689
  hypo

SEQ ID NO: 321267 - DNA, 196 bp, Homo sapiens; identical to SEQ ID NO: 217212
  chr16:85543126-85543322
  hypo

SEQ ID NO: 321268 - DNA, 70 bp, Homo sapiens; identical to SEQ ID NO: 269643
  chr16:85543643-85543713
  hypo

SEQ ID NO: 321269 - DNA, 279 bp, Homo sapiens; identical to SEQ ID NO: 269644
  chr16:85554503-85554782
  hypo

SEQ ID NO: 321270 - DNA, 133 bp, Homo sapiens; identical to SEQ ID NO: 269645
  chr16:85555419-85555552
  hypo

SEQ ID NO: 321271 - DNA, 281 bp, Homo sapiens; identical to SEQ ID NO: 269646
  chr16:85566453-85566734
  hypo

SEQ ID NO: 321272 - DNA, 1060 bp, Homo sapiens; identical to SEQ ID NO: 291770
  chr16:85589833-85590893
  hypo

SEQ ID NO: 321273 - DNA, 521 bp, Homo sapiens; identical to SEQ ID NO: 269648
  chr16:85616219-85616740
  hypo

SEQ ID NO: 321274 - DNA, 70 bp, Homo sapiens
  chr16:85617678-85617748
  hypo
ggcacgcatggggacggggacacaggctcgccagctgcacagcccgcagactggccttgggtctttgtgt

SEQ ID NO: 321275 - DNA, 172 bp, Homo sapiens; identical to SEQ ID NO: 217215
  chr16:85618049-85618221
  hypo

SEQ ID NO: 321276 - DNA, 70 bp, Homo sapiens; identical to SEQ ID NO: 269651
  chr16:85643877-85643947
  hypo

SEQ ID NO: 321277 - DNA, 63 bp, Homo sapiens; identical to SEQ ID NO: 269652
  chr16:85644011-85644074
  hypo

SEQ ID NO: 321278 - DNA, 528 bp, Homo sapiens; identical to SEQ ID NO: 269653
  chr16:85661248-85661776
  hypo

SEQ ID NO: 321279 - DNA, 259 bp, Homo sapiens; identical to SEQ ID NO: 217217
  chr16:85671775-85672034
  hypo

SEQ ID NO: 321280 - DNA, 111 bp, Homo sapiens; identical to SEQ ID NO: 217218
  chr16:85672078-85672189
  hypo

SEQ ID NO: 321281 - DNA, 280 bp, Homo sapiens
  chr16:85672904-85673184
  hypo
cctcctcggaatggcggcctggccaccgcctccctccctgcctctcctaccaggacctcttctgcacagacacccaaccacccccataggcatctgaaacctcagcctaggagtcccaagactggggggatgggtcccagccctgtgtcccaccccctgcgctggacagattctgactcccctctaagcctcctgggcgccaggcctagcctgccttgcgggtgtgtcgggatccccccatcatcccttgtccttggaggtgcttgttgactgactgaat

SEQ ID NO: 321282 - DNA, 352 bp, Homo sapiens; identical to SEQ ID NO: 217220
  chr16:85673486-85673838
  hypo

SEQ ID NO: 321283 - DNA, 237 bp, Homo sapiens; identical to SEQ ID NO: 217221
  chr16:85673886-85674123
  hypo

SEQ ID NO: 321284 - DNA, 148 bp, Homo sapiens
  chr16:85674334-85674482
  hypo
caaagaaaacagcaaaacaaacacggaggaaggatcccgcctggcaggcgcgcctcgcgtgggtgtcagtctgcggcggcggcggctctgcaggcgtctggagcccgtctgtctcccgcgcaggtgtgagcgccgcgggcgtcctcat

SEQ ID NO: 321285 - DNA, 74 bp, Homo sapiens; identical to SEQ ID NO: 217223
  chr16:85678761-85678835
  hypo

SEQ ID NO: 321286 - DNA, 128 bp, Homo sapiens
  chr16:85679455-85679583
  hypo
cattctacctgcttctaccatgcttcctatgcatgcattctaccatgcttctaccatgctttctatgcatgcattctgcctgcttctaccacgcattctacctgcttctaccacgcattctacctgct

SEQ ID NO: 321287 - DNA, 337 bp, Homo sapiens; identical to SEQ ID NO: 269661
  chr16:85682220-85682557
  hypo

SEQ ID NO: 321288 - DNA, 433 bp, Homo sapiens; identical to SEQ ID NO: 269662
  chr16:85682761-85683194
  hypo

SEQ ID NO: 321289 - DNA, 88 bp, Homo sapiens; identical to SEQ ID NO: 217226
  chr16:85683224-85683312
  hypo

SEQ ID NO: 321290 - DNA, 58 bp, Homo sapiens; identical to SEQ ID NO: 217227
  chr16:85683912-85683970
  hypo

SEQ ID NO: 321291 - DNA, 82 bp, Homo sapiens; identical to SEQ ID NO: 217228
  chr16:85693857-85693939
  hypo

SEQ ID NO: 321292 - DNA, 204 bp, Homo sapiens; identical to SEQ ID NO: 217229
  chr16:85699441-85699645
  hypo

SEQ ID NO: 321293 - DNA, 79 bp, Homo sapiens; identical to SEQ ID NO: 217230
  chr16:85704416-85704495
  hypo

SEQ ID NO: 321294 - DNA, 50 bp, Homo sapiens
  chr16:85731400-85731450
  hypo
gtggagtgcgggagcgtcacctgaggttggatccccaaacaggatccaag

SEQ ID NO: 321295 - DNA, 234 bp, Homo sapiens; identical to SEQ ID NO: 269671
  chr16:85743824-85744058
  hypo

SEQ ID NO: 321296 - DNA, 60 bp, Homo sapiens; identical to SEQ ID NO: 269672
  chr16:85847019-85847079
  hypo

SEQ ID NO: 321297 - DNA, 137 bp, Homo sapiens; identical to SEQ ID NO: 269673
  chr16:85849284-85849421
  hypo

SEQ ID NO: 321298 - DNA, 178 bp, Homo sapiens; identical to SEQ ID NO: 204326
  chr16:85932120-85932298
  hypo

SEQ ID NO: 321299 - DNA, 37 bp, Homo sapiens; identical to SEQ ID NO: 269674
  chr16:85954880-85954917
  hypo

SEQ ID NO: 321300 - DNA, 420 bp, Homo sapiens; identical to SEQ ID NO: 269675
  chr16:85966401-85966821
  hypo

SEQ ID NO: 321301 - DNA, 215 bp, Homo sapiens; identical to SEQ ID NO: 269676
  chr16:85985997-85986212
  hypo

SEQ ID NO: 321302 - DNA, 297 bp, Homo sapiens; identical to SEQ ID NO: 269677
  chr16:86096353-86096650
  hypo

SEQ ID NO: 321303 - DNA, 163 bp, Homo sapiens; identical to SEQ ID NO: 217233
  chr16:86101896-86102059
  hypo

SEQ ID NO: 321304 - DNA, 266 bp, Homo sapiens; identical to SEQ ID NO: 217234
  chr16:86102114-86102380
  hypo

SEQ ID NO: 321305 - DNA, 109 bp, Homo sapiens; identical to SEQ ID NO: 269679
  chr16:86244209-86244318
  hypo

SEQ ID NO: 321306 - DNA, 284 bp, Homo sapiens; identical to SEQ ID NO: 291780
  chr16:86542673-86542957
  hypo

SEQ ID NO: 321307 - DNA, 259 bp, Homo sapiens; identical to SEQ ID NO: 291781
  chr16:86543364-86543623
  hypo

SEQ ID NO: 321308 - DNA, 352 bp, Homo sapiens; identical to SEQ ID NO: 291782
  chr16:86543822-86544174
  hypo

SEQ ID NO: 321309 - DNA, 357 bp, Homo sapiens; identical to SEQ ID NO: 269680
  chr16:86560978-86561335
  hypo

SEQ ID NO: 321310 - DNA, 48 bp, Homo sapiens; identical to SEQ ID NO: 269681
  chr16:86561824-86561872
  hypo

SEQ ID NO: 321311 - DNA, 122 bp, Homo sapiens; identical to SEQ ID NO: 269682
  chr16:86562411-86562533
  hypo

SEQ ID NO: 321312 - DNA, 189 bp, Homo sapiens; identical to SEQ ID NO: 269683
  chr16:86570329-86570518
  hypo

SEQ ID NO: 321313 - DNA, 413 bp, Homo sapiens; identical to SEQ ID NO: 291787
  chr16:86609633-86610046
  hypo

SEQ ID NO: 321314 - DNA, 327 bp, Homo sapiens; identical to SEQ ID NO: 269684
  chr16:86665870-86666197
  hypo

SEQ ID NO: 321315 - DNA, 155 bp, Homo sapiens; identical to SEQ ID NO: 269685
  chr16:86740874-86741029
  hypo

SEQ ID NO: 321316 - DNA, 160 bp, Homo sapiens; identical to SEQ ID NO: 269686
  chr16:86741299-86741459
  hypo

SEQ ID NO: 321317 - DNA, 132 bp, Homo sapiens
  chr16:86878502-86878634
  hypo
gagccgtcagactggttcccaaagcaaacactgagctaatttttccagcatatgcctttcatgtctgggctgcttcaggctttgctgggtcactgggctctttgttgctgcctccgccgaagtccctggccc

SEQ ID NO: 321318 - DNA, 40 bp, Homo sapiens; identical to SEQ ID NO: 217236
  chr16:86903435-86903475
  hypo

SEQ ID NO: 321319 - DNA, 103 bp, Homo sapiens; identical to SEQ ID NO: 217237
  chr16:87022725-87022828
  hypo

SEQ ID NO: 321320 - DNA, 46 bp, Homo sapiens; identical to SEQ ID NO: 217238
  chr16:87092621-87092667
  hypo

SEQ ID NO: 321321 - DNA, 35 bp, Homo sapiens; identical to SEQ ID NO: 269691
  chr16:87146940-87146975
  hypo

SEQ ID NO: 321322 - DNA, 397 bp, Homo sapiens; identical to SEQ ID NO: 269692
  chr16:87157397-87157794
  hypo

SEQ ID NO: 321323 - DNA, 126 bp, Homo sapiens; identical to SEQ ID NO: 269693
  chr16:87177254-87177380
  hypo

SEQ ID NO: 321324 - DNA, 117 bp, Homo sapiens; identical to SEQ ID NO: 217239
  chr16:87219677-87219794
  hypo

SEQ ID NO: 321325 - DNA, 215 bp, Homo sapiens; identical to SEQ ID NO: 269696
  chr16:87249996-87250211
  hypo

SEQ ID NO: 321326 - DNA, 137 bp, Homo sapiens; identical to SEQ ID NO: 269697
  chr16:87250241-87250378
  hypo

SEQ ID NO: 321327 - DNA, 209 bp, Homo sapiens; identical to SEQ ID NO: 269698
  chr16:87289526-87289735
  hypo

SEQ ID NO: 321328 - DNA, 37 bp, Homo sapiens; identical to SEQ ID NO: 217240
  chr16:87310542-87310579
  hypo

SEQ ID NO: 321329 - DNA, 183 bp, Homo sapiens
  chr16:87311888-87312071
  hypo
ccaggcagcaggccaggaccacgccgcatgttcacaggctcagttatagccgtcgaccacgccacggcgcccaaccacgccacggagcccgaccacgcctcgaccatgccacggcgcctgaacttttatctccatttctcaggtgaggacctgaggctcgggtggccccgtcactttcctagg

SEQ ID NO: 321330 - DNA, 245 bp, Homo sapiens
  chr16:87356524-87356769
  hypo
gatgtgtctgtgatcggggcagccccaagagcacgtatcccgggacatgatgtgttgtggtctgtgtggggtcagagccgtcagtgttcactgccgcgtgcccagtgcttagcactgtttgccgcatgggagatgcaggtcacaacccggtagcgcctagtggcccgggggacacctggcttgtctgggcctgttggctgacaggtaggagggactgccatccattgttggggcaaaggatgctg

SEQ ID NO: 321331 - DNA, 104 bp, Homo sapiens; identical to SEQ ID NO: 217241
  chr16:87391987-87392091
  hypo

SEQ ID NO: 321332 - DNA, 467 bp, Homo sapiens; identical to SEQ ID NO: 291789
  chr16:87417701-87418168
  hypo

SEQ ID NO: 321333 - DNA, 64 bp, Homo sapiens; identical to SEQ ID NO: 204330
  chr16:87418200-87418264
  hypo

SEQ ID NO: 321334 - DNA, 141 bp, Homo sapiens; identical to SEQ ID NO: 269703
  chr16:87420752-87420893
  hypo

SEQ ID NO: 321335 - DNA, 48 bp, Homo sapiens; identical to SEQ ID NO: 217244
  chr16:87443507-87443555
  hypo

SEQ ID NO: 321336 - DNA, 308 bp, Homo sapiens; identical to SEQ ID NO: 269705
  chr16:87444919-87445227
  hypo

SEQ ID NO: 321337 - DNA, 47 bp, Homo sapiens; identical to SEQ ID NO: 217246
  chr16:87447846-87447893
  hypo

SEQ ID NO: 321338 - DNA, 178 bp, Homo sapiens; identical to SEQ ID NO: 269707
  chr16:87465351-87465529
  hypo

SEQ ID NO: 321339 - DNA, 141 bp, Homo sapiens; identical to SEQ ID NO: 269708
  chr16:87465771-87465912
  hypo

SEQ ID NO: 321340 - DNA, 118 bp, Homo sapiens; identical to SEQ ID NO: 269709
  chr16:87471742-87471860
  hypo

SEQ ID NO: 321341 - DNA, 95 bp, Homo sapiens; identical to SEQ ID NO: 269710
  chr16:87493948-87494043
  hypo

SEQ ID NO: 321342 - DNA, 800 bp, Homo sapiens; identical to SEQ ID NO: 204331
  chr16:87525701-87526501
  hypo

SEQ ID NO: 321343 - DNA, 523 bp, Homo sapiens; identical to SEQ ID NO: 204332
  chr16:87526561-87527084
  hypo

SEQ ID NO: 321344 - DNA, 86 bp, Homo sapiens; identical to SEQ ID NO: 217249
  chr16:87594871-87594957
  hypo

SEQ ID NO: 321345 - DNA, 169 bp, Homo sapiens; identical to SEQ ID NO: 269712
  chr16:87625740-87625909
  hypo

SEQ ID NO: 321346 - DNA, 279 bp, Homo sapiens; identical to SEQ ID NO: 291794
  chr16:87635461-87635740
  hypo

SEQ ID NO: 321347 - DNA, 144 bp, Homo sapiens; identical to SEQ ID NO: 291795
  chr16:87635827-87635971
  hypo

SEQ ID NO: 321348 - DNA, 189 bp, Homo sapiens; identical to SEQ ID NO: 291796
  chr16:87636008-87636197
  hypo

SEQ ID NO: 321349 - DNA, 179 bp, Homo sapiens; identical to SEQ ID NO: 217252
  chr16:87681106-87681285
  hypo

SEQ ID NO: 321350 - DNA, 101 bp, Homo sapiens; identical to SEQ ID NO: 217253
  chr16:87681315-87681416
  hypo

SEQ ID NO: 321351 - DNA, 100 bp, Homo sapiens; identical to SEQ ID NO: 269715
  chr16:87724407-87724507
  hypo

SEQ ID NO: 321352 - DNA, 537 bp, Homo sapiens; identical to SEQ ID NO: 269716
  chr16:87738500-87739037
  hypo

SEQ ID NO: 321353 - DNA, 754 bp, Homo sapiens; identical to SEQ ID NO: 269717
  chr16:87739314-87740068
  hypo

SEQ ID NO: 321354 - DNA, 137 bp, Homo sapiens
  chr16:87740771-87740908
  hypo
tcttggactggagcaggcctaggttgggagttagcgcaccacagccttcgggggcaaggaggccgcagcgctgaagccaggaggagctggatggggacacctggtggcagccatgtggggacgttgggagccctcgc

SEQ ID NO: 321355 - DNA, 443 bp, Homo sapiens; identical to SEQ ID NO: 269719
  chr16:87744569-87745012
  hypo

SEQ ID NO: 321356 - DNA, 178 bp, Homo sapiens; identical to SEQ ID NO: 269720
  chr16:87756599-87756777
  hypo

SEQ ID NO: 321357 - DNA, 221 bp, Homo sapiens; identical to SEQ ID NO: 217256
  chr16:87776440-87776661
  hypo

SEQ ID NO: 321358 - DNA, 97 bp, Homo sapiens; identical to SEQ ID NO: 217257
  chr16:87782716-87782813
  hypo

SEQ ID NO: 321359 - DNA, 150 bp, Homo sapiens; identical to SEQ ID NO: 269723
  chr16:87784654-87784804
  hypo

SEQ ID NO: 321360 - DNA, 35 bp, Homo sapiens; identical to SEQ ID NO: 269724
  chr16:87807642-87807677
  hypo

SEQ ID NO: 321361 - DNA, 160 bp, Homo sapiens; identical to SEQ ID NO: 269725
  chr16:87856804-87856964
  hypo

SEQ ID NO: 321362 - DNA, 158 bp, Homo sapiens; identical to SEQ ID NO: 217258
  chr16:87864417-87864575
  hypo

SEQ ID NO: 321363 - DNA, 215 bp, Homo sapiens; identical to SEQ ID NO: 269727
  chr16:87874192-87874407
  hypo

SEQ ID NO: 321364 - DNA, 151 bp, Homo sapiens; identical to SEQ ID NO: 217259
  chr16:87895432-87895583
  hypo

SEQ ID NO: 321365 - DNA, 490 bp, Homo sapiens; identical to SEQ ID NO: 225160
  chr16:87902836-87903326
  hypo

SEQ ID NO: 321366 - DNA, 82 bp, Homo sapiens; identical to SEQ ID NO: 269729
  chr16:87911934-87912016
  hypo

SEQ ID NO: 321367 - DNA, 92 bp, Homo sapiens; identical to SEQ ID NO: 217260
  chr16:87916177-87916269
  hypo

SEQ ID NO: 321368 - DNA, 79 bp, Homo sapiens; identical to SEQ ID NO: 217261
  chr16:87916329-87916408
  hypo

SEQ ID NO: 321369 - DNA, 167 bp, Homo sapiens; identical to SEQ ID NO: 269731
  chr16:87934227-87934394
  hypo

SEQ ID NO: 321370 - DNA, 45 bp, Homo sapiens; identical to SEQ ID NO: 269732
  chr16:87934808-87934853
  hypo

SEQ ID NO: 321371 - DNA, 120 bp, Homo sapiens; identical to SEQ ID NO: 269733
  chr16:87962653-87962773
  hypo

SEQ ID NO: 321372 - DNA, 37 bp, Homo sapiens; identical to SEQ ID NO: 269734
  chr16:87983755-87983792
  hypo

SEQ ID NO: 321373 - DNA, 32 bp, Homo sapiens; identical to SEQ ID NO: 269735
  chr16:88004307-88004339
  hypo

SEQ ID NO: 321374 - DNA, 130 bp, Homo sapiens; identical to SEQ ID NO: 225161
  chr16:88031994-88032124
  hypo

SEQ ID NO: 321375 - DNA, 364 bp, Homo sapiens; identical to SEQ ID NO: 217262
  chr16:88037886-88038250
  hypo

SEQ ID NO: 321376 - DNA, 293 bp, Homo sapiens; identical to SEQ ID NO: 269737
  chr16:88047709-88048002
  hypo

SEQ ID NO: 321377 - DNA, 150 bp, Homo sapiens; identical to SEQ ID NO: 269738
  chr16:88048979-88049129
  hypo

SEQ ID NO: 321378 - DNA, 300 bp, Homo sapiens; identical to SEQ ID NO: 217263
  chr16:88049613-88049913
  hypo

SEQ ID NO: 321379 - DNA, 49 bp, Homo sapiens
  chr16:88056264-88056313
  hypo
caggcttgtgttctcgtgcaggtttggaggccagatgcctgggatgaag

SEQ ID NO: 321380 - DNA, 67 bp, Homo sapiens
  chr16:88056343-88056410
  hypo
ccctttccctctcccagcttctggtggtggccgcatccctccagtctctggccgcatccccctcggc

SEQ ID NO: 321381 - DNA, 98 bp, Homo sapiens; identical to SEQ ID NO: 269741
  chr16:88056979-88057077
  hypo

SEQ ID NO: 321382 - DNA, 280 bp, Homo sapiens; identical to SEQ ID NO: 291802
  chr16:88060796-88061076
  hypo

SEQ ID NO: 321383 - DNA, 282 bp, Homo sapiens; identical to SEQ ID NO: 217264
  chr16:88073665-88073947
  hypo

SEQ ID NO: 321384 - DNA, 49 bp, Homo sapiens; identical to SEQ ID NO: 217265
  chr16:88078972-88079021
  hypo

SEQ ID NO: 321385 - DNA, 50 bp, Homo sapiens; identical to SEQ ID NO: 269744
  chr16:88084706-88084756
  hypo

SEQ ID NO: 321386 - DNA, 471 bp, Homo sapiens; identical to SEQ ID NO: 269745
  chr16:88091519-88091990
  hypo

SEQ ID NO: 321387 - DNA, 311 bp, Homo sapiens
  chr16:88096550-88096861
  hypo
gtagggaccctggcgtgacctcatttttgctgcttcacgtttaagatctgactgctgagttgtcctcatcaccaatttcaaatcaagcccaaatccacaaactatatctcagcctcctgtgtgttttaagaggctgcgccgtgcatggaggtgccctcagcctgcagcagcgcagccaagcggagggcgcaccgcggccttctgtgtgactgttctcagagcacgctgtgccttcatttctgcgtgtttcacggcgttgcccttgtggtatctgctgaccccggttcccttatttctaggcccagtgcctc

SEQ ID NO: 321388 - DNA, 301 bp, Homo sapiens; identical to SEQ ID NO: 269747
  chr16:88097580-88097881
  hypo

SEQ ID NO: 321389 - DNA, 267 bp, Homo sapiens
  chr16:88101544-88101811
  hypo
gtcaatgccccctccgtccccaacagacccgccctccccccactgtctgcctccttgtgtcgtcagtccgtgacacgccacgtgtgtgatgaggaggtgcttggagtggcactgctctgcgtgtggccacgcacttcgtttccattttcacacgtagttcagagctgggtgtccgacagaggtgcccgaggtggaaagcgtcgtgcactcgtcccacctgtggcccctgcagagctccggctgtgtggcacgggctcctgagagctg

SEQ ID NO: 321390 - DNA, 364 bp, Homo sapiens
  chr16:88101969-88102333
  hypo
agtcaagtccctgcaccgcgcagaccattgcctggtgttcaggagttttcaaggcctcggcctggtgggaatagttgagaaacgctggttcaggcagcttgctttattcacagccctgagacacctctgggacagcccctgaggatatttttcccggaactttctcggggccaggagtgtgcctgtgctgtgatgagtgggaaacgcagtttgtgcagggcctcacagaagagcccactggtgcgggtgctggctgcctcctccagtgggcgccagctcggggtctgtggcaggaacgtgggtggctgcggatccacccaggacagagtgactgcctgggcgcgtggtggaactgagtgcagaa

SEQ ID NO: 321391 - DNA, 190 bp, Homo sapiens; identical to SEQ ID NO: 217268
  chr16:88106132-88106322
  hypo

SEQ ID NO: 321392 - DNA, 104 bp, Homo sapiens
  chr16:88106398-88106502
  hypo
ctgaacactggaggcagaaggtggccctgcatccgggagcagtcttggccccgcagcctccgtgccacctgctttgggaacgtgcccagcggggacgttgtcct

SEQ ID NO: 321393 - DNA, 40 bp, Homo sapiens; identical to SEQ ID NO: 217269
  chr16:88106973-88107013
  hypo

SEQ ID NO: 321394 - DNA, 568 bp, Homo sapiens; identical to SEQ ID NO: 269751
  chr16:88109979-88110547
  hypo

SEQ ID NO: 321395 - DNA, 369 bp, Homo sapiens; identical to SEQ ID NO: 269752
  chr16:88111278-88111647
  hypo

SEQ ID NO: 321396 - DNA, 87 bp, Homo sapiens; identical to SEQ ID NO: 269753
  chr16:88151480-88151567
  hypo

SEQ ID NO: 321397 - DNA, 34 bp, Homo sapiens
  chr16:88164301-88164335
  hypo
aactctgtgtcaaaaaaaaaaaaaaaaaaaaaga

SEQ ID NO: 321398 - DNA, 116 bp, Homo sapiens
  chr16:88164572-88164688
  hypo
gccggggacgggggtgcgaggggcgtgtgcttctcctgttcctgcgtggctcggttccacggcgggcagcgcggcgttcgcctggcatttctggcgggtgaaattgcacaaaggta

SEQ ID NO: 321399 - DNA, 147 bp, Homo sapiens; identical to SEQ ID NO: 269755
  chr16:88233713-88233860
  hypo

SEQ ID NO: 321400 - DNA, 91 bp, Homo sapiens; identical to SEQ ID NO: 269756
  chr16:88237696-88237787
  hypo

SEQ ID NO: 321401 - DNA, 71 bp, Homo sapiens; identical to SEQ ID NO: 217272
  chr16:88260676-88260747
  hypo

SEQ ID NO: 321402 - DNA, 327 bp, Homo sapiens; identical to SEQ ID NO: 217273
  chr16:88338949-88339276
  hypo

SEQ ID NO: 321403 - DNA, 132 bp, Homo sapiens
  chr16:88356136-88356268
  hypo
cagcacagatggcgggagctacggcaagtccggtgatgctggagggggtgtgactgacgaggagggtttgtgccagagcaggcggcaccaccactcctcggagactgtgtgggacccgagcgacccctccat

SEQ ID NO: 321404 - DNA, 129 bp, Homo sapiens; identical to SEQ ID NO: 269760
  chr16:88361636-88361765
  hypo

SEQ ID NO: 321405 - DNA, 250 bp, Homo sapiens; identical to SEQ ID NO: 217274
  chr16:88368369-88368619
  hypo

SEQ ID NO: 321406 - DNA, 268 bp, Homo sapiens; identical to SEQ ID NO: 269762
  chr16:88385554-88385822
  hypo

SEQ ID NO: 321407 - DNA, 76 bp, Homo sapiens; identical to SEQ ID NO: 269763
  chr16:88442479-88442555
  hypo

SEQ ID NO: 321408 - DNA, 90 bp, Homo sapiens; identical to SEQ ID NO: 269764
  chr16:88458614-88458704
  hypo

SEQ ID NO: 321409 - DNA, 431 bp, Homo sapiens
  chr16:88460215-88460646
  hypo
aaccacaagtggggcggacgctgccccaccggtctccggccagcagctttgagggcatgtgtccaggagacgtcatcggggaccccaaagggcgagccatgctggggcctcaggaaggaggggctcatgctacacctctgctgtccgacaggaggggggtttgacacgtctacacctgtgctatccgagaggagcggggtttgacacgtctacacctgtgctgtccaagaggagcagggtttgacacgtctacacctgcgctgcctgagaggagcagggtttgacacgactacacctgcgctgtctgagaggagcggggtttgacacgcctacacctgcgctgtccgagagggatggggtttgacaggtctacacctgcgctgcctgggaggagcggagtttgacacatgtacacctgtgctgtccaagag

SEQ ID NO: 321410 - DNA, 635 bp, Homo sapiens; identical to SEQ ID NO: 269766
  chr16:88479696-88480331
  hypo

SEQ ID NO: 321411 - DNA, 229 bp, Homo sapiens
  chr16:88480664-88480893
  hypo
acggccacagatcacggccacggatcccatcacgcccgggcttcagtctccaacacaaacacctgctgggcatcgggaaacgggaacaaactttggtgtggggtggaggcatctggcctcgggggcacctggaggaggccacagtctcgttacctccaccccaaagagccctggggaccgcagactcgagttgttggaggcccagggatgctgtggcgccgggatttga

SEQ ID NO: 321412 - DNA, 746 bp, Homo sapiens; identical to SEQ ID NO: 217276
  chr16:88480934-88481680
  hypo

SEQ ID NO: 321413 - DNA, 189 bp, Homo sapiens; identical to SEQ ID NO: 217277
  chr16:88493599-88493788
  hypo

SEQ ID NO: 321414 - DNA, 32 bp, Homo sapiens; identical to SEQ ID NO: 217278
  chr16:88498087-88498119
  hypo

SEQ ID NO: 321415 - DNA, 69 bp, Homo sapiens; identical to SEQ ID NO: 269772
  chr16:88501887-88501956
  hypo

SEQ ID NO: 321416 - DNA, 205 bp, Homo sapiens; identical to SEQ ID NO: 217279
  chr16:88512691-88512896
  hypo

SEQ ID NO: 321417 - DNA, 83 bp, Homo sapiens; identical to SEQ ID NO: 269775
  chr16:88513364-88513447
  hypo

SEQ ID NO: 321418 - DNA, 271 bp, Homo sapiens; identical to SEQ ID NO: 225164
  chr16:88519038-88519309
  hypo

SEQ ID NO: 321419 - DNA, 45 bp, Homo sapiens; identical to SEQ ID NO: 217281
  chr16:88537675-88537720
  hypo

SEQ ID NO: 321420 - DNA, 205 bp, Homo sapiens; identical to SEQ ID NO: 269777
  chr16:88538054-88538259
  hypo

SEQ ID NO: 321421 - DNA, 394 bp, Homo sapiens; identical to SEQ ID NO: 217282
  chr16:88545423-88545817
  hypo

SEQ ID NO: 321422 - DNA, 374 bp, Homo sapiens
  chr16:88547819-88548193
  hypo
accacccccacccccaccaccgctgcctcctcgccgggggccgtggacagggcagctcgcaagtcggccttgctgggccttggtttactcacctgtaaagtgggaatgacctggcttcccactgtgggtattgggatgtggttggcgagtgggatttccacgatggctgcccccaaggtcctgcttacgctactccactccaccctgccacagccgtcaccgagtccccgtactgtcctcataccccctcctccatgcaccctgtccccctgcactttcctgaccgcccctacctgctgaggtctgtgtgggctgccaccctctacaccccaggttccccatctgaaatgaaattggaagaccatctcgctgga

SEQ ID NO: 321423 - DNA, 503 bp, Homo sapiens
  chr16:88550903-88551406
  hypo
gctgtgaccatggggcttggcggccgcaggacctggggtctgggctcaggagggccacggcccctcccactcctgagtgtgtcgggaggctctgcccccatcgtgcttcacacaggacagtagaaggctgggcgggtcaggccttgtggagtatgggtgcagagggggcagtcgcagcacgcaggctgagtcagggcctggggacctggggagcagtcaaacaggatatggaagggcacctctgtcctctgttcacactggacaccatcacccatcaccagccccgccggcggatgtcagcacacacacctgcactcagcgccactccacagccactgtggggtccggagcagctgcccccgcacttgggccgcgtggccttgtctcagtctgccttgtcacctgtcaggtggactcctggagttcccccaccccgatgtgtgagtctctgagggacccaggccctgaggcactccacccccaggtgctgcagacacctgtgc

SEQ ID NO: 321424 - DNA, 306 bp, Homo sapiens; identical to SEQ ID NO: 217284
  chr16:88551574-88551880
  hypo

SEQ ID NO: 321425 - DNA, 214 bp, Homo sapiens; identical to SEQ ID NO: 269782
  chr16:88596786-88597000
  hypo

SEQ ID NO: 321426 - DNA, 44 bp, Homo sapiens; identical to SEQ ID NO: 217285
  chr16:88642725-88642769
  hypo

SEQ ID NO: 321427 - DNA, 113 bp, Homo sapiens; identical to SEQ ID NO: 269785
  chr16:88644982-88645095
  hypo

SEQ ID NO: 321428 - DNA, 144 bp, Homo sapiens; identical to SEQ ID NO: 217286
  chr16:88645407-88645551
  hypo

SEQ ID NO: 321429 - DNA, 39 bp, Homo sapiens; identical to SEQ ID NO: 217287
  chr16:88647117-88647156
  hypo

SEQ ID NO: 321430 - DNA, 185 bp, Homo sapiens; identical to SEQ ID NO: 217288
  chr16:88647913-88648098
  hypo

SEQ ID NO: 321431 - DNA, 198 bp, Homo sapiens; identical to SEQ ID NO: 217289
  chr16:88649040-88649238
  hypo

SEQ ID NO: 321432 - DNA, 258 bp, Homo sapiens; identical to SEQ ID NO: 269790
  chr16:88664686-88664944
  hypo

SEQ ID NO: 321433 - DNA, 493 bp, Homo sapiens; identical to SEQ ID NO: 269791
  chr16:88673630-88674123
  hypo

SEQ ID NO: 321434 - DNA, 225 bp, Homo sapiens; identical to SEQ ID NO: 269792
  chr16:88683207-88683432
  hypo

SEQ ID NO: 321435 - DNA, 36 bp, Homo sapiens; identical to SEQ ID NO: 269794
  chr16:88684167-88684203
  hypo

SEQ ID NO: 321436 - DNA, 64 bp, Homo sapiens; identical to SEQ ID NO: 217291
  chr16:88689149-88689213
  hypo

SEQ ID NO: 321437 - DNA, 38 bp, Homo sapiens; identical to SEQ ID NO: 217292
  chr16:88690944-88690982
  hypo

SEQ ID NO: 321438 - DNA, 124 bp, Homo sapiens; identical to SEQ ID NO: 217293
  chr16:88698502-88698626
  hypo

SEQ ID NO: 321439 - DNA, 163 bp, Homo sapiens; identical to SEQ ID NO: 269798
  chr16:88699819-88699982
  hypo

SEQ ID NO: 321440 - DNA, 447 bp, Homo sapiens; identical to SEQ ID NO: 269799
  chr16:88702316-88702763
  hypo

SEQ ID NO: 321441 - DNA, 711 bp, Homo sapiens; identical to SEQ ID NO: 269800
  chr16:88711755-88712466
  hypo

SEQ ID NO: 321442 - DNA, 91 bp, Homo sapiens; identical to SEQ ID NO: 225166
  chr16:88721558-88721649
  hypo

SEQ ID NO: 321443 - DNA, 65 bp, Homo sapiens
  chr16:88722261-88722326
  hypo
gcctgaccacagaggcctcccggccacagcaggggtgacgcaggggcaacttccagatcccagcg

SEQ ID NO: 321444 - DNA, 113 bp, Homo sapiens; identical to SEQ ID NO: 217296
  chr16:88722817-88722930
  hypo

SEQ ID NO: 321445 - DNA, 192 bp, Homo sapiens; identical to SEQ ID NO: 269802
  chr16:88722960-88723152
  hypo

SEQ ID NO: 321446 - DNA, 317 bp, Homo sapiens; identical to SEQ ID NO: 217298
  chr16:88725339-88725656
  hypo

SEQ ID NO: 321447 - DNA, 163 bp, Homo sapiens; identical to SEQ ID NO: 217299
  chr16:88725686-88725849
  hypo

SEQ ID NO: 321448 - DNA, 127 bp, Homo sapiens; identical to SEQ ID NO: 217300
  chr16:88738306-88738433
  hypo

SEQ ID NO: 321449 - DNA, 54 bp, Homo sapiens; identical to SEQ ID NO: 269805
  chr16:88756879-88756933
  hypo

SEQ ID NO: 321450 - DNA, 31 bp, Homo sapiens; identical to SEQ ID NO: 217301
  chr16:88757496-88757527
  hypo

SEQ ID NO: 321451 - DNA, 45 bp, Homo sapiens; identical to SEQ ID NO: 217302
  chr16:88757686-88757731
  hypo

SEQ ID NO: 321452 - DNA, 133 bp, Homo sapiens; identical to SEQ ID NO: 225167
  chr16:88764923-88765056
  hypo

SEQ ID NO: 321453 - DNA, 322 bp, Homo sapiens; identical to SEQ ID NO: 269807
  chr16:88776937-88777259
  hypo

SEQ ID NO: 321454 - DNA, 31 bp, Homo sapiens; identical to SEQ ID NO: 269808
  chr16:88780638-88780669
  hypo

SEQ ID NO: 321455 - DNA, 38 bp, Homo sapiens; identical to SEQ ID NO: 269809
  chr16:88780699-88780737
  hypo

SEQ ID NO: 321456 - DNA, 177 bp, Homo sapiens; identical to SEQ ID NO: 269810
  chr16:88780767-88780944
  hypo

SEQ ID NO: 321457 - DNA, 38 bp, Homo sapiens; identical to SEQ ID NO: 269811
  chr16:88785880-88785918
  hypo

SEQ ID NO: 321458 - DNA, 101 bp, Homo sapiens; identical to SEQ ID NO: 217303
  chr16:88787977-88788078
  hypo

SEQ ID NO: 321459 - DNA, 62 bp, Homo sapiens; identical to SEQ ID NO: 217304
  chr16:88788384-88788446
  hypo

SEQ ID NO: 321460 - DNA, 100 bp, Homo sapiens
  chr16:88791425-88791525
  hypo
ggtccagccagggccgccaccactgcctccgtggcggggaggagccccctggactgtcgggccctgtggaggggcagggtgagcatgaggcagcagtcaa

SEQ ID NO: 321461 - DNA, 352 bp, Homo sapiens
  chr16:88791819-88792171
  hypo
tcacctggctccaggccggggtccttggggcccagggtgtcctgggggcgactgcggtccacccggccctgcctgtgcttctcctgcttggcacggatacgctccatcctgtggtggggaaaggtggggtatgctgagcattggggggaggagccggggagtccccgccccagaggcacctactgtcttttcagctgggccagggacttctcctctatcctgcggtgaaagtcaatgctcttgaggttggcagcgttgtagagggcgaagcccctgtagggaggcggggatggggtgtgagcaccaggcactcgaccccagcaacatgggcagccgccgctccccgctcagc

SEQ ID NO: 321462 - DNA, 531 bp, Homo sapiens
  chr16:88792744-88793275
  hypo
atggctaaggaagacgcggcgctgcagcagcaggaagaagaagcagacgctgtcccagatgatgccagcctcctccacaggcagcaggcagtcctggtctctgtccatcatctccttggctgcaaggcaggcaccggcaagggtcaggcccagggcccaggagcagggggcttccccacgccctcccccgccaccgtcctggccactcacggtcatagtagcccttgacggtgcatacaaggctgaagagctggatgacccagcagaagccggtctgcatctgctccacgaagacgcaggccaggagctgggggagagcagggtcagcggggccagcggggccccagggcggtgggtgcgggggggccggaggctcaccgacagcatgttcttggagatgatgacggtgacgttgtacagaatgaggcagtcccacagcacgaggcgggcccgtgtgtccctctgcagcagggccgtgccgaagagcagcaggtagaagcaggccagcaggtagcccagcccgaagatgct

SEQ ID NO: 321463 - DNA, 339 bp, Homo sapiens; identical to SEQ ID NO: 217306
  chr16:88793673-88794012
  hypo

SEQ ID NO: 321464 - DNA, 206 bp, Homo sapiens
  chr16:88794360-88794566
  hypo
atgataggacagtgcgtgtgataggacagctctgaaaacaacggccagaagctgcacggacgcctgcagccaggaaaagttcaacctgcagcaaccacagctgggaacgcgctgctcagcacgtgggaccgggatccatgcgacagcctagacagacctcagtgtgctctgccaagtgaaagaagccagacctaaaggccacctgc

SEQ ID NO: 321465 - DNA, 45 bp, Homo sapiens
  chr16:88794761-88794806
  hypo
catctgccacagagggaacctcgcgacacaaaaacaaagtgaccc

SEQ ID NO: 321466 - DNA, 34 bp, Homo sapiens; identical to SEQ ID NO: 269817
  chr16:88796722-88796756
  hypo

SEQ ID NO: 321467 - DNA, 391 bp, Homo sapiens
  chr16:88797397-88797788
  hypo
ccctgagccggccacgtgcacaaatgtgactccccatctcagaccgcagggtgctgtgtgccttgagcagacctgcagcaccaggacagccacgcaaatccagtctcacggcgtcagcaacgctaccggcctccctccggaacttcccaagagacaggagaggcgggggcggcttagacccaagacaagagactagagcaaacatcagaccagatcccgtctgaaaaccaaatggccacaaagaagggtgctgaggccggggctgtttgaatgcagaggacacgtttgacgatggcactgccaggagacgggaccacgggtgtggggctgtgggctcagacaccctcacccaggagacgcatgctcgaggcagcacttgggtgtgaggcat

SEQ ID NO: 321468 - DNA, 201 bp, Homo sapiens; identical to SEQ ID NO: 269820
  chr16:88799617-88799818
  hypo

SEQ ID NO: 321469 - DNA, 227 bp, Homo sapiens
  chr16:88800137-88800364
  hypo
ccccacttggctgcccctgtgatggtgtgagggtcagtgcggggcacaaacggggattcccgggtcccctgtgaggaagaggctctggagcccagaggggactctgccaacgccccccgagctgggacatggcacagcagactgggtggcagctgtgctctgcccgcccaacccaccttcaggcacctgcgtggcctggtggggagtggccacgcccagcccctcgt

SEQ ID NO: 321470 - DNA, 602 bp, Homo sapiens; identical to SEQ ID NO: 269822
  chr16:88800570-88801172
  hypo

SEQ ID NO: 321471 - DNA, 152 bp, Homo sapiens; identical to SEQ ID NO: 269823
  chr16:88801433-88801585
  hypo

SEQ ID NO: 321472 - DNA, 300 bp, Homo sapiens
  chr16:88802331-88802631
  hypo
acaggggtggtgcccgtgccaacacaaggttgtctgtttattcagtcaacaaacgctcactgagaagctactctgggctggctctgggtgggcagaaggggacagacagacacatctgccttcttggcgctgccactcccccgggcaagtggacattgaacaggacgacaaccctgatgggtctgcgcacccaggcacccccggatgtggtggtgcacactcaccatggcaccaaggtccagacaggggtagcgggtgtgctccagccccagctggcgcaggctgacggggcccagggtg

SEQ ID NO: 321473 - DNA, 581 bp, Homo sapiens
  chr16:88802685-88803266
  hypo
gtcatcccatacagcaggatgcagggcgagcacagcatggccagttggtggcggctgcgcaccgtccagatgaggcaggcccagagcagcagtacgaaggtcagccagctgtggtaggtgatgctccatacctgcgcggcagagagggctgcacagctgcccagcgcaccccacccaggcgatgccccacacctgcgcggcagagggggctgcacagctgcccagcgcaccccacccaggcgatgccccacacctgcgcggcagagggggctgcacagctgcccagcgcaccccacccaggcgatgccccacacctgcgcggcagagggggccgcccaccccaacccccacagccgcctaccatcatggcaatgagcgcgcacacatagctctggtccatgatgaggtggcccaggctgtggagcggagacgcctccctgggctcagcccgcttgggccgcactgcaggtggggacagcggtcagcttcggcaggttgatctgcaggcctccccaccctgactatgccctaaaatctgggccctgggcaagcacacagcaggagagacaggcccccggtgg

SEQ ID NO: 321474 - DNA, 45 bp, Homo sapiens; identical to SEQ ID NO: 217310
  chr16:88805797-88805842
  hypo

SEQ ID NO: 321475 - DNA, 750 bp, Homo sapiens; identical to SEQ ID NO: 217311
  chr16:88805932-88806682
  hypo

SEQ ID NO: 321476 - DNA, 80 bp, Homo sapiens; identical to SEQ ID NO: 269826
  chr16:88810535-88810615
  hypo

SEQ ID NO: 321477 - DNA, 105 bp, Homo sapiens; identical to SEQ ID NO: 225168
  chr16:88817839-88817944
  hypo

SEQ ID NO: 321478 - DNA, 382 bp, Homo sapiens; identical to SEQ ID NO: 269827
  chr16:88821278-88821660
  hypo

SEQ ID NO: 321479 - DNA, 41 bp, Homo sapiens; identical to SEQ ID NO: 269828
  chr16:88823488-88823529
  hypo

SEQ ID NO: 321480 - DNA, 114 bp, Homo sapiens; identical to SEQ ID NO: 217312
  chr16:88826508-88826622
  hypo

SEQ ID NO: 321481 - DNA, 46 bp, Homo sapiens
  chr16:88826974-88827020
  hypo
cgaggggaacgacccgcctttaaggcagcaggacccagggagccca

SEQ ID NO: 321482 - DNA, 251 bp, Homo sapiens
  chr16:88827070-88827321
  hypo
caggaagcccaggacaggcagggtcccaagcggagacacccgcctttgacgcagcagcacccagggggcccgggacaggcaggggcccgaggggagccacccgccttcgacgcagcaggaggtaaacggaatgttcctcacctacttggagcccggccagcagcctggggcactgaggagcttctggaccatttaattagctcggtgtccaggtttaattagctcagtgtccaggaaactcagttttatgg

SEQ ID NO: 321483 - DNA, 59 bp, Homo sapiens; identical to SEQ ID NO: 217313
  chr16:88831171-88831230
  hypo

SEQ ID NO: 321484 - DNA, 142 bp, Homo sapiens; identical to SEQ ID NO: 217314
  chr16:88831297-88831439
  hypo

SEQ ID NO: 321485 - DNA, 105 bp, Homo sapiens; identical to SEQ ID NO: 269832
  chr16:88831981-88832086
  hypo

SEQ ID NO: 321486 - DNA, 114 bp, Homo sapiens; identical to SEQ ID NO: 204339
  chr16:88851818-88851932
  hypo

SEQ ID NO: 321487 - DNA, 37 bp, Homo sapiens
  chr16:88871965-88872002
  hypo
atcgtgggcatgctccacaaccgctccgagacgccca

SEQ ID NO: 321488 - DNA, 507 bp, Homo sapiens; identical to SEQ ID NO: 204340
  chr16:88878527-88879034
  hypo

SEQ ID NO: 321489 - DNA, 433 bp, Homo sapiens
  chr16:88883579-88884012
  hypo
ctatgggacccccaagcaggggacagaaaagctgctcctgagaggccctgactgctgcggcccccagggctggacaagacgacgacgcatcctttgtggcctgaacacagacttcagtgaaactttggaggcacgtctgtgcttgtgtttctggccgatgctggcgtgatgaggccgtttctctactggaggtgaacaaggcctggtcttgtcaggctgcacggaggtgctgctctgggtgggtgcctatgagtgagatcaggtctgatgcgaaggtctctggggctggcccagcatgaaggaggcacaaatgagaacctcgcaggtgggccctggggccgccgccactcaacagtgcccaccagcccacccgggacccaccgggcagtgccgttcctgcctcggtgccttcagagcccgggagtttggaggt

SEQ ID NO: 321490 - DNA, 254 bp, Homo sapiens
  chr16:88884279-88884533
  hypo
acgagggcctcaccactgacggaggcggggaagcacgcctgcctctgccctgtgctggccacggttcatcctgggccccgggtgggtggctgcagccccggcaaagagacggccgcccacacaccagccacttaccatgaccgcccagttgcacacgttgagctggggctgcgcggggaccaaggcctcctggtgctgctggacgaccgaggtgatcctgctgagggcctcctggtactcggcgctggcaaagc

SEQ ID NO: 321491 - DNA, 157 bp, Homo sapiens; identical to SEQ ID NO: 269836
  chr16:88892177-88892334
  hypo

SEQ ID NO: 321492 - DNA, 254 bp, Homo sapiens; identical to SEQ ID NO: 269837
  chr16:88892588-88892842
  hypo

SEQ ID NO: 321493 - DNA, 66 bp, Homo sapiens; identical to SEQ ID NO: 269838
  chr16:88894327-88894393
  hypo

SEQ ID NO: 321494 - DNA, 46 bp, Homo sapiens; identical to SEQ ID NO: 217317
  chr16:88897188-88897234
  hypo

SEQ ID NO: 321495 - DNA, 682 bp, Homo sapiens; identical to SEQ ID NO: 269840
  chr16:88898119-88898801
  hypo

SEQ ID NO: 321496 - DNA, 263 bp, Homo sapiens; identical to SEQ ID NO: 269841
  chr16:88910570-88910833
  hypo

SEQ ID NO: 321497 - DNA, 239 bp, Homo sapiens; identical to SEQ ID NO: 217319
  chr16:88927321-88927560
  hypo

SEQ ID NO: 321498 - DNA, 149 bp, Homo sapiens; identical to SEQ ID NO: 217320
  chr16:88933926-88934075
  hypo

SEQ ID NO: 321499 - DNA, 52 bp, Homo sapiens; identical to SEQ ID NO: 217321
  chr16:88942321-88942373
  hypo

SEQ ID NO: 321500 - DNA, 210 bp, Homo sapiens; identical to SEQ ID NO: 217322
  chr16:88943232-88943442
  hypo

SEQ ID NO: 321501 - DNA, 54 bp, Homo sapiens; identical to SEQ ID NO: 217323
  chr16:88945018-88945072
  hypo

SEQ ID NO: 321502 - DNA, 293 bp, Homo sapiens; identical to SEQ ID NO: 217324
  chr16:88946079-88946372
  hypo

SEQ ID NO: 321503 - DNA, 381 bp, Homo sapiens; identical to SEQ ID NO: 204341
  chr16:88950011-88950392
  hypo

SEQ ID NO: 321504 - DNA, 363 bp, Homo sapiens
  chr16:88956712-88957075
  hypo
ctggcctcacccaggggccaacagctgctaagtggcaggctcgggctcaagccagggagcatctggtctggtctgtcctctggacccccgaggggaggcctggcccagcagagatggagcccacagcagtacgggcagtgctcaggctgggcccgaaggtgtggccaggctggcagctcccaactaagctccacggaaccctgaccccaacacgtgctcggcagagaaggtcacatggtcagacacatttggggaacctttcctcagctcctgctagagatgtgcagccgtcttggggaaatggagacccgcagagatggcagtctgactccacggcactcccgtgcccgtcccgtctgtgtg

SEQ ID NO: 321505 - DNA, 42 bp, Homo sapiens; identical to SEQ ID NO: 217327
  chr16:88958253-88958295
  hypo

SEQ ID NO: 321506 - DNA, 339 bp, Homo sapiens
  chr16:88958479-88958818
  hypo
caggcagcccaggagctgggcacggcctgagagggtgcaggtggcatcgtgggagcgggtccacgcccggttgtcagcgtggagcccatgtaaggagtggccgtggctgcaacctcattaaacggagggaatatgcatgtcccaaggccccggctgtccctgcccaactcaccaccaggcccagcaccagtgtgcgcacgcgctccccaatctctggggagatgtcgctgccaaactgctgcagtgtggtgaggaagcgcttgagcttgctgagctgccgggccccgcaggctgggggcaggtgctgtgtggacaaggaggctgtggacgaggtggccg

SEQ ID NO: 321507 - DNA, 117 bp, Homo sapiens
  chr16:88958899-88959016
  hypo
gagggaagcggacatgaggacacaaaggtgatggtgacaacacaacccagacggcggcgacagtgagggaagcagcgactaaggtgacaatgtcaaaagtgacggcaacaatgatga

SEQ ID NO: 321508 - DNA, 279 bp, Homo sapiens; identical to SEQ ID NO: 269856
  chr16:88959983-88960262
  hypo

SEQ ID NO: 321509 - DNA, 101 bp, Homo sapiens
  chr16:88961769-88961870
  hypo
ctgcgaagtgcgcccgggtcaggaagctgtgctgtggcccgggctgggctctacacctgcacacaggctgcgcggttatcacacacatcccatgcggcaaa

SEQ ID NO: 321510 - DNA, 254 bp, Homo sapiens
  chr16:88961900-88962154
  hypo
gggcagcccggctcccccagattgcctcccgtccccggcaggccccacacaccgagcaaacagcgctgggcacagtggcacaggggggaggccggccctgtgctctggatgttcttggtggagcggggggaacaggtgtgcccacgactgcctcccccggggcccagcgctcactctgctctcactccagcctgggcctcacagatacccactgcaggggctgtgggaggccaggagggcgggggatgctacag

SEQ ID NO: 321511 - DNA, 45 bp, Homo sapiens
  chr16:88965557-88965602
  hypo
cggccctcaagtctccgttcagactcagtctcccatcagcttggc

SEQ ID NO: 321512 - DNA, 80 bp, Homo sapiens; identical to SEQ ID NO: 269864
  chr16:88968850-88968930
  hypo

SEQ ID NO: 321513 - DNA, 79 bp, Homo sapiens; identical to SEQ ID NO: 217329
  chr16:88970534-88970613
  hypo

SEQ ID NO: 321514 - DNA, 485 bp, Homo sapiens; identical to SEQ ID NO: 217330
  chr16:88978122-88978607
  hypo

SEQ ID NO: 321515 - DNA, 162 bp, Homo sapiens
  chr16:88993230-88993392
  hypo
gctcacaaggccttccgtgcctgtcccttgtgccccacctcacagcgaggtccttgcagcagcagggcagccccgtccggcccccgctgcctccctgccctcatctcctttctctgagacaaggctcctcactggtcctggaggtggcggcacactcctgcc

SEQ ID NO: 321516 - DNA, 193 bp, Homo sapiens; identical to SEQ ID NO: 217331
  chr16:88994147-88994340
  hypo

SEQ ID NO: 321517 - DNA, 102 bp, Homo sapiens
  chr16:88997823-88997925
  hypo
cgctcacaaggaccggtctgtggcaagtgacaagtgacctttccaacccgaaggtctcctcggcagaagccccttcatgtgccaaggacgagccagaggtgg

SEQ ID NO: 321518 - DNA, 38 bp, Homo sapiens; identical to SEQ ID NO: 269870
  chr16:89004837-89004875
  hypo

SEQ ID NO: 321519 - DNA, 48 bp, Homo sapiens; identical to SEQ ID NO: 269871
  chr16:89004905-89004953
  hypo

SEQ ID NO: 321520 - DNA, 399 bp, Homo sapiens; identical to SEQ ID NO: 291816
  chr16:89006909-89007308
  hypo

SEQ ID NO: 321521 - DNA, 91 bp, Homo sapiens; identical to SEQ ID NO: 204343
  chr16:89007789-89007880
  hypo

SEQ ID NO: 321522 - DNA, 373 bp, Homo sapiens; identical to SEQ ID NO: 204344
  chr16:89007995-89008368
  hypo

SEQ ID NO: 321523 - DNA, 201 bp, Homo sapiens
  chr16:89010085-89010286
  hypo
tgtgcggatgctcccggaacgcccattttacaggtggagaggctgagcctctcagccacaccgacttcctgctgccttatccaagaactggtttcttgccctggatgcggccaagtcacagctcctgggcatttcgaggggacatttaaggaggagactaccagccctatgtgaaagatgtctgcagtctgtccgacaagg

SEQ ID NO: 321524 - DNA, 143 bp, Homo sapiens; identical to SEQ ID NO: 269873
  chr16:89012313-89012456
  hypo

SEQ ID NO: 321525 - DNA, 294 bp, Homo sapiens; identical to SEQ ID NO: 269874
  chr16:89016745-89017039
  hypo

SEQ ID NO: 321526 - DNA, 200 bp, Homo sapiens; identical to SEQ ID NO: 269876
  chr16:89027649-89027849
  hypo

SEQ ID NO: 321527 - DNA, 166 bp, Homo sapiens; identical to SEQ ID NO: 269877
  chr16:89028919-89029085
  hypo

SEQ ID NO: 321528 - DNA, 53 bp, Homo sapiens; identical to SEQ ID NO: 269879
  chr16:89072218-89072271
  hypo

SEQ ID NO: 321529 - DNA, 164 bp, Homo sapiens; identical to SEQ ID NO: 269881
  chr16:89089219-89089383
  hypo

SEQ ID NO: 321530 - DNA, 224 bp, Homo sapiens; identical to SEQ ID NO: 269882
  chr16:89089443-89089667
  hypo

SEQ ID NO: 321531 - DNA, 78 bp, Homo sapiens
  chr16:89103370-89103448
  hypo
gggcctgtgccctgcgcagtcctgagctcgtctgcgcggggctgctggcctctagcaaggtgcaccggggtgtgaggt

SEQ ID NO: 321532 - DNA, 125 bp, Homo sapiens
  chr16:89103837-89103962
  hypo
tgaatgtgctttaaggaggccccggccctaggtggacacaggcgcacagagaagacagggccccagagggtctcagtgatctgtccaggacctgggcccgtgggctgtggcgccgaggctggaca

SEQ ID NO: 321533 - DNA, 33 bp, Homo sapiens
  chr16:89109415-89109448
  hypo
ctaacccaggtggcaaacaggggccgcccgact

SEQ ID NO: 321534 - DNA, 142 bp, Homo sapiens
  chr16:89109659-89109801
  hypo
agctctgctcgctcagcctcgtccccgcctctgacatccttccattcccgctcatggccctctctgtctgccaccaccctccccgccatgggtgcttaaagcccccggcagctgccctcccgtcccccaacatggcccttcc

SEQ ID NO: 321535 - DNA, 102 bp, Homo sapiens; identical to SEQ ID NO: 269886
  chr16:89115645-89115747
  hypo

SEQ ID NO: 321536 - DNA, 87 bp, Homo sapiens
  chr16:89122410-89122497
  hypo
cgcctgtgtgtgtgcgtgagcgtgggtggacttccaagtgtgtgcagagtcacatgcgggtgatcctaggcgtgcatccgcctgtga

SEQ ID NO: 321537 - DNA, 418 bp, Homo sapiens; identical to SEQ ID NO: 269890
  chr16:89129270-89129688
  hypo

SEQ ID NO: 321538 - DNA, 724 bp, Homo sapiens
  chr16:89130512-89131236
  hypo
ggggcacagaggagcctccccgggcctcagcctgggtcttgcctctgggctgcgggagccggggagcctcggccgtgttctgggctccacacagtcccgagccccacaagatcagccctggcttggttctgtacgttgcttcctgcaggggaggggagggggaggggaatggccaacagctggtgttcagggtgccctgtgggatggcatggcccctcaggtatcagggagtcccgttagactaggctcctaaccaggacctgggcaggggagcatcacagcgctggggccccagactgctgcccaccggctgcctgggttcctctctgaacctcagtctcctcatcggcctggcgggaacagctgctcgctcctgttctttccccgtcaggcgtgtgagacgtgtctcctttctctccgccaagagtgaactccctttgaccaggcctcgtggtggttcagggagagatgttcgtgaagcaagggcgtcccgtgagcctggcccgtcacccgacctctaggcttcacaaaccttcagatctgagcaacacacagtcgtgaccctgtggctccagagctccctctccaagtggcttctccgggtcccgcagagcaggccctgcagatccaaggccaacctcctaggaccccggcctcccacccacaggagggttttccctcggtcctaagcggccctccttccagcacggcagggagacctggg

SEQ ID NO: 321539 - DNA, 39 bp, Homo sapiens; identical to SEQ ID NO: 217339
  chr16:89131266-89131305
  hypo

SEQ ID NO: 321540 - DNA, 277 bp, Homo sapiens; identical to SEQ ID NO: 269892
  chr16:89132011-89132288
  hypo

SEQ ID NO: 321541 - DNA, 137 bp, Homo sapiens
  chr16:89137879-89138016
  hypo
agatggaacaggagcgaggtcgcctgtatcctccgggaaatgctcctggaggtcagggcagccgggtgagcactgggtccggctgctctccccagcttctcttctccagtcagccaacccagcctccgcgagagaca

SEQ ID NO: 321542 - DNA, 211 bp, Homo sapiens; identical to SEQ ID NO: 217341
  chr16:89139281-89139492
  hypo

SEQ ID NO: 321543 - DNA, 53 bp, Homo sapiens; identical to SEQ ID NO: 217342
  chr16:89139898-89139951
  hypo

SEQ ID NO: 321544 - DNA, 312 bp, Homo sapiens; identical to SEQ ID NO: 217343
  chr16:89140055-89140367
  hypo

SEQ ID NO: 321545 - DNA, 704 bp, Homo sapiens
  chr16:89140434-89141138
  hypo
tacatgcaccagttgagtgtggacctgtcatgtgtgaacttgtcacgtgaagacctgtcacatgtgaacctgtcacgaggacctgtcacgtgtggacctgtcacgtgtggacctgtcacgtgaggacctgtcacgtgtggacctgtcacgtgaggatctgtcgtgtggtcctgtcgtctgtgggcctgtcacgtgaggacctgtcatgtgtggactgtcacgtgtggacctgtcacgtgtggactgtcacgtgtggacctctcatacatgcaccagtcacgtgtagacctgtcacgtgtgaacctgtcgtgtggtcctgtcgtctgtgggcctgtcacgtgtggatctgtcacgtgtggacctgtcatacatgcaccagtcacgtgtggacctgtcgtgtggtcctgtcatctgtgggcctgtcacgtgtggacctgtcacgtgaggacctgtcacgtgtggatctgtcacgtatggactctcacgtgtggacctgtcatacatgcaccagtcacgtgtggacctgtcacgtgtgaacctgtcgtgtggtcctgtcgtctgtgggcctgtcacgtgtggatctgtcacgtgtggactgtcacgtgtggacctgtcatacatgcaccagtcacgtgtggacctgtcgtgtggtcctgtcgtctgtgggcctgtcacgtgtggacctgtcacgtgaggacctgtca

SEQ ID NO: 321546 - DNA, 227 bp, Homo sapiens
  chr16:89141696-89141923
  hypo
ctcatccctgctaccgggtacctgccgtagctatgtccagcccaggtcactgagtgtgtaaacacacctcacgtccgcgtcgagaaggcgtcaccagtgcctgctgaacaaagaaggtctggcccagtgtggctgcagccaggaggccaaggagaccagtgagagcaccgccctcgccactgacgctcttgctgggctcattgttgtgctgggcccagtggagcaaa

SEQ ID NO: 321547 - DNA, 163 bp, Homo sapiens; identical to SEQ ID NO: 217346
  chr16:89141953-89142116
  hypo

SEQ ID NO: 321548 - DNA, 240 bp, Homo sapiens; identical to SEQ ID NO: 269897
  chr16:89147081-89147321
  hypo

SEQ ID NO: 321549 - DNA, 37 bp, Homo sapiens; identical to SEQ ID NO: 269898
  chr16:89149007-89149044
  hypo

SEQ ID NO: 321550 - DNA, 153 bp, Homo sapiens; identical to SEQ ID NO: 269899
  chr16:89162716-89162869
  hypo

SEQ ID NO: 321551 - DNA, 106 bp, Homo sapiens; identical to SEQ ID NO: 269900
  chr16:89163233-89163339
  hypo

SEQ ID NO: 321552 - DNA, 424 bp, Homo sapiens; identical to SEQ ID NO: 269901
  chr16:89165356-89165780
  hypo

SEQ ID NO: 321553 - DNA, 327 bp, Homo sapiens; identical to SEQ ID NO: 217347
  chr16:89169088-89169415
  hypo

SEQ ID NO: 321554 - DNA, 626 bp, Homo sapiens; identical to SEQ ID NO: 217348
  chr16:89169475-89170101
  hypo

SEQ ID NO: 321555 - DNA, 66 bp, Homo sapiens; identical to SEQ ID NO: 217349
  chr16:89172068-89172134
  hypo

SEQ ID NO: 321556 - DNA, 102 bp, Homo sapiens
  chr16:89172536-89172638
  hypo
tggggtctctgcctggggatctgctgtcatcttccagacactgcagactggctcattaatggacacgggaaagcctcagaccttcaacggacacgggaaagc

SEQ ID NO: 321557 - DNA, 324 bp, Homo sapiens; identical to SEQ ID NO: 269905
  chr16:89179513-89179837
  hypo

SEQ ID NO: 321558 - DNA, 274 bp, Homo sapiens; identical to SEQ ID NO: 204345
  chr16:89189485-89189759
  hypo

SEQ ID NO: 321559 - DNA, 363 bp, Homo sapiens; identical to SEQ ID NO: 217351
  chr16:89198318-89198681
  hypo

SEQ ID NO: 321560 - DNA, 62 bp, Homo sapiens; identical to SEQ ID NO: 217352
  chr16:89202505-89202567
  hypo

SEQ ID NO: 321561 - DNA, 126 bp, Homo sapiens
  chr16:89203215-89203341
  hypo
agatggcaaaggtctgtttcaggtaactcctctgacggccacaacgatgtcttcagacgtcaaaggtctgtctcaggtaactcctctgacggccacaacgatgtcttcagacgtcaaaggtctgtc

SEQ ID NO: 321562 - DNA, 89 bp, Homo sapiens
  chr16:89216567-89216656
  hypo
gttccctctctggacgcaccctcctgcctccaccctgacttgccgtctcctgagcactgaagatatttttggcttgtccgatgtgactc

SEQ ID NO: 321563 - DNA, 368 bp, Homo sapiens
  chr16:89216686-89217054
  hypo
ggcagcatcagggcaccacacatgcctgggcttgcacaacacagcgggagcactgccactcagcagcagctgctgctttcattaaacagttaccttgagaagaaaagataggtgtcgagggctgagagctgtgctagagtttcagggtccgagttggcaggaactgaagtcccgatgctcctcagcccttggctgtcctcagggctgccctctgcgtggggacaccaggccgcccctgcccagggacaccaggccgcctgctcctgctctgtgcatctctcacatcaggctcctcacccagcattgtttgggctatgacagtggctgtgacaagaccctaagacgggaagctgcgtgcagggcacttg

SEQ ID NO: 321564 - DNA, 63 bp, Homo sapiens; identical to SEQ ID NO: 217354
  chr16:89219255-89219318
  hypo

SEQ ID NO: 321565 - DNA, 225 bp, Homo sapiens; identical to SEQ ID NO: 217355
  chr16:89219372-89219597
  hypo

SEQ ID NO: 321566 - DNA, 89 bp, Homo sapiens; identical to SEQ ID NO: 217356
  chr16:89220238-89220327
  hypo

SEQ ID NO: 321567 - DNA, 86 bp, Homo sapiens
  chr16:89225782-89225868
  hypo
tctgagcaggaagcccgtaggtccccacaggcgggtgcacggaaggggtgggtcctgggcccaacaggcaccccctgagcaccagc

SEQ ID NO: 321568 - DNA, 215 bp, Homo sapiens
  chr16:89226047-89226262
  hypo
gttgagggcgagggtgtgaatcacgagcttggggccaaagcccaaggtcgtcccctctggccggcaagctcaggctcacacggggagccaccaggctggactgggtgcagcttacggacgtggcgcgtgctgtgggcgtcgggccgcggctcctccatgcagtacttacactgctgtctgcagatcgcacccaatcaggagggaatggtccaggc

SEQ ID NO: 321569 - DNA, 170 bp, Homo sapiens
  chr16:89245121-89245291
  hypo
cgctgtatgaattacggatacatctccagctgctcttgatggactggagctgaactctcgcatcccggggttcagttcccacaaagcagcctggagaggtggagggggacgggcactttcctgcaggcacctcccctgccgctcccccggaccctccacagccagcccac

SEQ ID NO: 321570 - DNA, 201 bp, Homo sapiens
  chr16:89245442-89245643
  hypo
tgtccctcccagccagaggcctggaaccctagcgctacctcccagtggcccatgcactcgccaggggctgcagacagcctggctgctgagtgggcccagtaggagactcgggggcagctggatgggggctttgagggccagtacttggggtgtggccaccaaggccctggctcagtccgacgggggcggggctcacgtgcc

SEQ ID NO: 321571 - DNA, 93 bp, Homo sapiens; identical to SEQ ID NO: 217357
  chr16:89254515-89254608
  hypo

SEQ ID NO: 321572 - DNA, 149 bp, Homo sapiens; identical to SEQ ID NO: 217358
  chr16:89254764-89254913
  hypo

SEQ ID NO: 321573 - DNA, 98 bp, Homo sapiens; identical to SEQ ID NO: 217359
  chr16:89255153-89255251
  hypo

SEQ ID NO: 321574 - DNA, 377 bp, Homo sapiens; identical to SEQ ID NO: 217360
  chr16:89260393-89260770
  hypo

SEQ ID NO: 321575 - DNA, 157 bp, Homo sapiens; identical to SEQ ID NO: 127778
  chr16:89267957-89268114
  hypo

SEQ ID NO: 321576 - DNA, 35 bp, Homo sapiens; identical to SEQ ID NO: 269918
  chr16:89279952-89279987
  hypo

SEQ ID NO: 321577 - DNA, 80 bp, Homo sapiens; identical to SEQ ID NO: 269919
  chr16:89292227-89292307
  hypo

SEQ ID NO: 321578 - DNA, 42 bp, Homo sapiens; identical to SEQ ID NO: 269920
  chr16:89347101-89347143
  hypo

SEQ ID NO: 321579 - DNA, 143 bp, Homo sapiens; identical to SEQ ID NO: 269921
  chr16:89351879-89352022
  hypo

SEQ ID NO: 321580 - DNA, 63 bp, Homo sapiens; identical to SEQ ID NO: 217362
  chr16:89354320-89354383
  hypo

SEQ ID NO: 321581 - DNA, 240 bp, Homo sapiens; identical to SEQ ID NO: 269923
  chr16:89354780-89355020
  hypo

SEQ ID NO: 321582 - DNA, 293 bp, Homo sapiens; identical to SEQ ID NO: 217363
  chr16:89357463-89357756
  hypo

SEQ ID NO: 321583 - DNA, 314 bp, Homo sapiens; identical to SEQ ID NO: 217364
  chr16:89359017-89359331
  hypo

SEQ ID NO: 321584 - DNA, 154 bp, Homo sapiens
  chr16:89360166-89360320
  hypo
gggaggagctggggcggtgttggggctgcagtatgtttacatcccgaagtgcaggcgttgccatgctcttaagttatcaaaggaccctaggaggcgtgtgtcagaggaacaggcagaggcaaaggcgttccttagaagtcagtctttaggctgg

SEQ ID NO: 321585 - DNA, 100 bp, Homo sapiens; identical to SEQ ID NO: 269927
  chr16:89366815-89366915
  hypo

SEQ ID NO: 321586 - DNA, 43 bp, Homo sapiens; identical to SEQ ID NO: 269928
  chr16:89366945-89366988
  hypo

SEQ ID NO: 321587 - DNA, 31 bp, Homo sapiens; identical to SEQ ID NO: 269929
  chr16:89387488-89387519
  hypo

SEQ ID NO: 321588 - DNA, 51 bp, Homo sapiens; identical to SEQ ID NO: 269930
  chr16:89389596-89389647
  hypo

SEQ ID NO: 321589 - DNA, 415 bp, Homo sapiens; identical to SEQ ID NO: 217365
  chr16:89409898-89410313
  hypo

SEQ ID NO: 321590 - DNA, 197 bp, Homo sapiens; identical to SEQ ID NO: 269932
  chr16:89437347-89437544
  hypo

SEQ ID NO: 321591 - DNA, 45 bp, Homo sapiens; identical to SEQ ID NO: 217367
  chr16:89437574-89437619
  hypo

SEQ ID NO: 321592 - DNA, 324 bp, Homo sapiens; identical to SEQ ID NO: 269934
  chr16:89438583-89438907
  hypo

SEQ ID NO: 321593 - DNA, 120 bp, Homo sapiens; identical to SEQ ID NO: 217368
  chr16:89442145-89442265
  hypo

SEQ ID NO: 321594 - DNA, 136 bp, Homo sapiens; identical to SEQ ID NO: 217369
  chr16:89442325-89442461
  hypo

SEQ ID NO: 321595 - DNA, 295 bp, Homo sapiens; identical to SEQ ID NO: 217370
  chr16:89445365-89445660
  hypo

SEQ ID NO: 321596 - DNA, 84 bp, Homo sapiens; identical to SEQ ID NO: 217371
  chr16:89446069-89446153
  hypo

SEQ ID NO: 321597 - DNA, 77 bp, Homo sapiens; identical to SEQ ID NO: 269939
  chr16:89461030-89461107
  hypo

SEQ ID NO: 321598 - DNA, 40 bp, Homo sapiens; identical to SEQ ID NO: 269940
  chr16:89468177-89468217
  hypo

SEQ ID NO: 321599 - DNA, 518 bp, Homo sapiens; identical to SEQ ID NO: 269941
  chr16:89468448-89468966
  hypo

SEQ ID NO: 321600 - DNA, 70 bp, Homo sapiens; identical to SEQ ID NO: 269942
  chr16:89471629-89471699
  hypo

SEQ ID NO: 321601 - DNA, 241 bp, Homo sapiens; identical to SEQ ID NO: 217372
  chr16:89500005-89500246
  hypo

SEQ ID NO: 321602 - DNA, 76 bp, Homo sapiens; identical to SEQ ID NO: 217373
  chr16:89504486-89504562
  hypo

SEQ ID NO: 321603 - DNA, 208 bp, Homo sapiens; identical to SEQ ID NO: 269945
  chr16:89531901-89532109
  hypo

SEQ ID NO: 321604 - DNA, 37 bp, Homo sapiens; identical to SEQ ID NO: 217374
  chr16:89545055-89545092
  hypo

SEQ ID NO: 321605 - DNA, 99 bp, Homo sapiens; identical to SEQ ID NO: 217375
  chr16:89548161-89548260
  hypo

SEQ ID NO: 321606 - DNA, 32 bp, Homo sapiens; identical to SEQ ID NO: 269948
  chr16:89553884-89553916
  hypo

SEQ ID NO: 321607 - DNA, 100 bp, Homo sapiens; identical to SEQ ID NO: 217376
  chr16:89577032-89577132
  hypo

SEQ ID NO: 321608 - DNA, 39 bp, Homo sapiens; identical to SEQ ID NO: 269952
  chr16:89584297-89584336
  hypo

SEQ ID NO: 321609 - DNA, 208 bp, Homo sapiens; identical to SEQ ID NO: 269953
  chr16:89588832-89589040
  hypo

SEQ ID NO: 321610 - DNA, 159 bp, Homo sapiens; identical to SEQ ID NO: 269954
  chr16:89597145-89597304
  hypo

SEQ ID NO: 321611 - DNA, 113 bp, Homo sapiens; identical to SEQ ID NO: 269955
  chr16:89603719-89603832
  hypo

SEQ ID NO: 321612 - DNA, 263 bp, Homo sapiens; identical to SEQ ID NO: 204348
  chr16:89614907-89615170
  hypo

SEQ ID NO: 321613 - DNA, 153 bp, Homo sapiens; identical to SEQ ID NO: 204349
  chr16:89627717-89627870
  hypo

SEQ ID NO: 321614 - DNA, 117 bp, Homo sapiens; identical to SEQ ID NO: 217379
  chr16:89647543-89647660
  hypo

SEQ ID NO: 321615 - DNA, 300 bp, Homo sapiens; identical to SEQ ID NO: 217380
  chr16:89647764-89648064
  hypo

SEQ ID NO: 321616 - DNA, 56 bp, Homo sapiens; identical to SEQ ID NO: 217381
  chr16:89649562-89649618
  hypo

SEQ ID NO: 321617 - DNA, 255 bp, Homo sapiens; identical to SEQ ID NO: 269961
  chr16:89649648-89649903
  hypo

SEQ ID NO: 321618 - DNA, 388 bp, Homo sapiens
  chr16:89650277-89650665
  hypo
gggtctgcaggagccggcagctacacagccccgggggtacacagacacctcctctcaggccccgctgggtggggtcagccagcctggggcctctggtcccccacggtggggtcaggccccacctggccaagcctggagcccgggcgtccccctgccaggtgatcgccgaggacatctcggggaacaacggctacgtggagctctccttccgggccaggaagctggacgacaaggtgagtgcaggtgccgggcacgcctggctcaggctgaggtccgggaaccggttcgaaaacccggtccctgcccagcgctgacctcgcgtggctatgtcccgtgtgagacgtgtgcggagtgtgcctggggctgggcgtgctgccgtcacggtcgc

SEQ ID NO: 321619 - DNA, 155 bp, Homo sapiens
  chr16:89650710-89650865
  hypo
ctgggctggggctggggcagctccctcctgtggggaccactcatgaccctgctcagggatggggaaataggcccagcacccccgaggccactgtcgtgacaggaggaactggaacagcgcgcggttctgcgggctcgtcacgtgggtgggcagaa

SEQ ID NO: 321620 - DNA, 186 bp, Homo sapiens
  chr16:89663966-89664152
  hypo
tggagggtgaagcctccatgtgatgttcgtggagccggggcatctcccacctgctgggacctcctcgccctgagtttgagatttcccctgaatgatcttgcctgagaaaaacaaattgtcctaaccctgaatccaggcccacccatccccacatcggtccatccacccacccatccgtccacccat

SEQ ID NO: 321621 - DNA, 142 bp, Homo sapiens
  chr16:89674365-89674507
  hypo
cttaattcctctagcgccgctgggttagggtctccacagccgagctggtctcagcacagtggcccttgacgtttgcggggatgggttccgggaccccagtagatcatacaatccatggatgctcaagtccctgatagaaact

SEQ ID NO: 321622 - DNA, 35 bp, Homo sapiens
  chr16:89674563-89674598
  hypo
ggtgctcgtggctagcgggacgcccgcactgcact

SEQ ID NO: 321623 - DNA, 83 bp, Homo sapiens
  chr16:89688046-89688129
  hypo
tgagtgtgggctcccgtccctcgcacatgcaaggaagggctcaggtgagcaggtgcgcgtgtgcggctcacctgtgcatgcac

SEQ ID NO: 321624 - DNA, 146 bp, Homo sapiens; identical to SEQ ID NO: 217383
  chr16:89697117-89697263
  hypo

SEQ ID NO: 321625 - DNA, 210 bp, Homo sapiens
  chr16:89704274-89704484
  hypo
tatccagacctgatcgctgagctgctcaggaggaactggacggaggcggaggtcaagggcgcactggctgacaacctgctgagggtcttcgaggctgtggaacaggtgaggatggggtggccacctgagtctcccccaccaccaccagcaggcaggctgccccacccgtgtctgtctgtccccaggccagcaacctcacacaggctcccg

SEQ ID NO: 321626 - DNA, 178 bp, Homo sapiens
  chr16:89704696-89704874
  hypo
tccagatgccaggagccctgctgcccacatgcaaggaccagcatctcctgagaggacgcctgggcttacctggggggcaggatgcctggggacagttcaggacacacacacagtaggcccgcaataaaagcaacaccccttcacatcctggggtacgtgtcatcggcatccggctcag

SEQ ID NO: 321627 - DNA, 224 bp, Homo sapiens; identical to SEQ ID NO: 217384
  chr16:89713325-89713549
  hypo

SEQ ID NO: 321628 - DNA, 31 bp, Homo sapiens; identical to SEQ ID NO: 217385
  chr16:89713636-89713667
  hypo

SEQ ID NO: 321629 - DNA, 47 bp, Homo sapiens; identical to SEQ ID NO: 217386
  chr16:89715825-89715872
  hypo

SEQ ID NO: 321630 - DNA, 65 bp, Homo sapiens; identical to SEQ ID NO: 217387
  chr16:89755908-89755973
  hypo

SEQ ID NO: 321631 - DNA, 97 bp, Homo sapiens; identical to SEQ ID NO: 269971
  chr16:89762087-89762184
  hypo

SEQ ID NO: 321632 - DNA, 59 bp, Homo sapiens
  chr16:89763776-89763835
  hypo
tgtccatctgtgcacgctgtagccacaagcgccgctgggcgtcgccaagcagcacacgc

SEQ ID NO: 321633 - DNA, 837 bp, Homo sapiens; identical to SEQ ID NO: 217389
  chr16:89763872-89764709
  hypo

SEQ ID NO: 321634 - DNA, 180 bp, Homo sapiens; identical to SEQ ID NO: 269973
  chr16:89770174-89770354
  hypo

SEQ ID NO: 321635 - DNA, 75 bp, Homo sapiens; identical to SEQ ID NO: 217390
  chr16:89800299-89800374
  hypo

SEQ ID NO: 321636 - DNA, 85 bp, Homo sapiens; identical to SEQ ID NO: 217391
  chr16:89807744-89807829
  hypo

SEQ ID NO: 321637 - DNA, 39 bp, Homo sapiens; identical to SEQ ID NO: 269976
  chr16:89809822-89809861
  hypo

SEQ ID NO: 321638 - DNA, 102 bp, Homo sapiens; identical to SEQ ID NO: 217392
  chr16:89815125-89815227
  hypo

SEQ ID NO: 321639 - DNA, 36 bp, Homo sapiens; identical to SEQ ID NO: 269978
  chr16:89824587-89824623
  hypo

SEQ ID NO: 321640 - DNA, 38 bp, Homo sapiens; identical to SEQ ID NO: 217393
  chr16:89830047-89830085
  hypo

SEQ ID NO: 321641 - DNA, 131 bp, Homo sapiens; identical to SEQ ID NO: 269980
  chr16:89845487-89845618
  hypo

SEQ ID NO: 321642 - DNA, 130 bp, Homo sapiens
  chr16:89846018-89846148
  hypo
cccgtatcccttaacggcaggatcctcgattcacagccctgactcctgtctctctctgaatagacagtggccaacctgccccatgtggctctgggcagaaatgggacacactccaaagagccccagacgc

SEQ ID NO: 321643 - DNA, 64 bp, Homo sapiens
  chr16:89846240-89846304
  hypo
gcagctgctagaggccttttcggcagcccagcctacctggcctccatgacggtgactgggatgt

SEQ ID NO: 321644 - DNA, 162 bp, Homo sapiens; identical to SEQ ID NO: 269982
  chr16:89846596-89846758
  hypo

SEQ ID NO: 321645 - DNA, 325 bp, Homo sapiens; identical to SEQ ID NO: 269983
  chr16:89871398-89871723
  hypo

SEQ ID NO: 321646 - DNA, 237 bp, Homo sapiens; identical to SEQ ID NO: 291832
  chr16:89894335-89894572
  hypo

SEQ ID NO: 321647 - DNA, 44 bp, Homo sapiens; identical to SEQ ID NO: 217395
  chr16:89899919-89899963
  hypo

SEQ ID NO: 321648 - DNA, 737 bp, Homo sapiens
  chr16:89900815-89901552
  hypo
acctgcccgcactcgcggttggccatcgtagaagcctggataagcatagcccgtgtgaatctgtgaacctgcccgcactcgcggttggccatcgtagaagtgtggataagcatagcccatgtgaatctgtgaacctgcccgcattcgcggttggccgtcgtagaaggccccataagcatagcccgtgtgaatctgtgaacctgcccgcactcgcggttggccgttgtagaagcctggataagcatagcccgtgtgaatctgtgaacctgcccgcactcgcggttggccgtcgtagaagcctggataagcatagcccgtgtgaatctgtgaacctgcccgcactcgcggttggccatcgtagaagtgtggataagcatagcccatgtgaatctgtgaacctgcccgcattcgcggttggccgtcgtagaaggccccataagcatagcccgtgtgaatctgtgaacctgcccgcactcgcagctggccgtcgtagaaggccccacaagcatagcccgtgtgaatctgtgaacctgcccgcactcgcggctggccgtcgtagaaggccccataagcatagcccgggtgaatctgtgaacctgcccgcactcgcggttggccgtcgtagaagcgtggataagcatagcccgtgtgaatctgtgaacctgcccgcactcgcagttggccgtcgtagaagcctagataagcatagcccgtgtgaatctgtgaacctgcccgca

SEQ ID NO: 321649 - DNA, 84 bp, Homo sapiens
  chr16:89901590-89901674
  hypo
cccgtgtgaatctgtgaacctgcctgcgctcgcggttggccgtcttagaagcgtggataagcatagcccgtgtgatttttcgct

SEQ ID NO: 321650 - DNA, 106 bp, Homo sapiens; identical to SEQ ID NO: 269986
  chr16:89918308-89918414
  hypo

SEQ ID NO: 321651 - DNA, 64 bp, Homo sapiens; identical to SEQ ID NO: 269987
  chr16:89920072-89920136
  hypo

SEQ ID NO: 321652 - DNA, 87 bp, Homo sapiens; identical to SEQ ID NO: 269988
  chr16:89926090-89926177
  hypo

SEQ ID NO: 321653 - DNA, 213 bp, Homo sapiens; identical to SEQ ID NO: 217397
  chr16:89947431-89947644
  hypo

SEQ ID NO: 321654 - DNA, 183 bp, Homo sapiens; identical to SEQ ID NO: 269990
  chr16:89949813-89949996
  hypo

SEQ ID NO: 321655 - DNA, 208 bp, Homo sapiens; identical to SEQ ID NO: 217398
  chr16:89960587-89960795
  hypo

SEQ ID NO: 321656 - DNA, 310 bp, Homo sapiens; identical to SEQ ID NO: 217399
  chr16:89966590-89966900
  hypo

SEQ ID NO: 321657 - DNA, 37 bp, Homo sapiens; identical to SEQ ID NO: 269993
  chr16:89970851-89970888
  hypo

SEQ ID NO: 321658 - DNA, 96 bp, Homo sapiens; identical to SEQ ID NO: 269994
  chr16:89971008-89971104
  hypo

SEQ ID NO: 321659 - DNA, 398 bp, Homo sapiens; identical to SEQ ID NO: 217400
  chr16:89971726-89972124
  hypo

SEQ ID NO: 321660 - DNA, 440 bp, Homo sapiens; identical to SEQ ID NO: 217401
  chr16:89972235-89972675
  hypo

SEQ ID NO: 321661 - DNA, 496 bp, Homo sapiens; identical to SEQ ID NO: 217402
  chr16:89972802-89973298
  hypo

SEQ ID NO: 321662 - DNA, 69 bp, Homo sapiens; identical to SEQ ID NO: 269996
  chr16:89982538-89982607
  hypo

SEQ ID NO: 321663 - DNA, 381 bp, Homo sapiens; identical to SEQ ID NO: 269997
  chr16:89985819-89986200
  hypo

SEQ ID NO: 321664 - DNA, 318 bp, Homo sapiens
  chr16:90037382-90037700
  hypo
tatcagaaaggtcgctcaaatttacagagtggcatgacgcactgtctagtatgagcagtgctttgttggtgagattattttgggcactgtatttttcaacggcaaaaaaagtaagtgaaccattcatgaaagatgctcctggtcacccaagcctttctgttggagcgccaaatcacgggcaaactgggcttcaagaacccttcagagccttgcgggtttctgagcggtacaccagtaagggcttcaacttaaagtccccagctgcactgccaccaagcagcagcatcaagcgatctttggatgacttaaaccctggct

SEQ ID NO: 321665 - DNA, 137 bp, Homo sapiens
  chr16:90037740-90037877
  hypo
tctcttccaatcaagtctcgtctcatctacgttaaagacacctggggggtgtactcaccttcttcgatgatgcttttcagcatttctgtgtacatgtccttgttgctgggagctgcgctgttcatcttgaagtgggg

SEQ ID NO: 321666 - DNA, 102 bp, Homo sapiens; identical to SEQ ID NO: 217404
  chr16:90044787-90044889
  hypo

SEQ ID NO: 321667 - DNA, 95 bp, Homo sapiens; identical to SEQ ID NO: 217405
  chr16:90053009-90053104
  hypo

SEQ ID NO: 321668 - DNA, 189 bp, Homo sapiens; identical to SEQ ID NO: 217406
  chr16:90053307-90053496
  hypo

SEQ ID NO: 321669 - DNA, 123 bp, Homo sapiens; identical to SEQ ID NO: 270002
  chr16:90057596-90057719
  hypo

SEQ ID NO: 321670 - DNA, 135 bp, Homo sapiens; identical to SEQ ID NO: 217407
  chr16:90059132-90059267
  hypo

SEQ ID NO: 321671 - DNA, 78 bp, Homo sapiens; identical to SEQ ID NO: 217408
  chr16:90066540-90066618
  hypo

SEQ ID NO: 321672 - DNA, 64 bp, Homo sapiens; identical to SEQ ID NO: 217409
  chr16:90066981-90067045
  hypo

SEQ ID NO: 321673 - DNA, 284 bp, Homo sapiens; identical to SEQ ID NO: 270005
  chr16:90068123-90068407
  hypo

SEQ ID NO: 321674 - DNA, 461 bp, Homo sapiens; identical to SEQ ID NO: 270006
  chr16:90072249-90072710
  hypo

SEQ ID NO: 321675 - DNA, 45 bp, Homo sapiens; identical to SEQ ID NO: 225179
  chr16:90087050-90087095
  hypo

SEQ ID NO: 321676 - DNA, 206 bp, Homo sapiens; identical to SEQ ID NO: 270007
  chr16:90109929-90110135
  hypo

SEQ ID NO: 321677 - DNA, 81 bp, Homo sapiens; identical to SEQ ID NO: 270008
  chr16:90115266-90115347
  hypo

SEQ ID NO: 321678 - DNA, 54 bp, Homo sapiens
  chr17:401102-401156
  hypo
gcccctgtggctctcgggcattagcctgtaggtcttctgctgcaaagcgcctct

SEQ ID NO: 321679 - DNA, 152 bp, Homo sapiens; identical to SEQ ID NO: 217412
  chr17:512963-513115
  hypo

SEQ ID NO: 321680 - DNA, 41 bp, Homo sapiens; identical to SEQ ID NO: 270011
  chr17:523202-523243
  hypo

SEQ ID NO: 321681 - DNA, 383 bp, Homo sapiens; identical to SEQ ID NO: 204356
  chr17:523544-523927
  hypo

SEQ ID NO: 321682 - DNA, 114 bp, Homo sapiens; identical to SEQ ID NO: 217414
  chr17:536283-536397
  hypo

SEQ ID NO: 321683 - DNA, 116 bp, Homo sapiens
  chr17:536432-536548
  hypo
cccgcaatcacgtcccgcaatcgatcacgccccacaatcgatcgcatgctgtgcatcccccacgagctgcctgatgttggtggccaccgtgcaccggccagccttgcagagagaga

SEQ ID NO: 321684 - DNA, 491 bp, Homo sapiens; identical to SEQ ID NO: 291844
  chr17:576352-576843
  hypo

SEQ ID NO: 321685 - DNA, 49 bp, Homo sapiens; identical to SEQ ID NO: 217417
  chr17:591791-591840
  hypo

SEQ ID NO: 321686 - DNA, 152 bp, Homo sapiens; identical to SEQ ID NO: 217418
  chr17:597509-597661
  hypo

SEQ ID NO: 321687 - DNA, 278 bp, Homo sapiens; identical to SEQ ID NO: 270017
  chr17:633611-633889
  hypo

SEQ ID NO: 321688 - DNA, 263 bp, Homo sapiens; identical to SEQ ID NO: 217419
  chr17:634276-634539
  hypo

SEQ ID NO: 321689 - DNA, 78 bp, Homo sapiens; identical to SEQ ID NO: 225182
  chr17:635476-635554
  hypo

SEQ ID NO: 321690 - DNA, 138 bp, Homo sapiens; identical to SEQ ID NO: 204358
  chr17:635798-635936
  hypo

SEQ ID NO: 321691 - DNA, 299 bp, Homo sapiens; identical to SEQ ID NO: 53517
  chr17:635959-636258
  hypo

SEQ ID NO: 321692 - DNA, 140 bp, Homo sapiens; identical to SEQ ID NO: 270019
  chr17:641127-641267
  hypo

SEQ ID NO: 321693 - DNA, 257 bp, Homo sapiens; identical to SEQ ID NO: 217422
  chr17:662966-663223
  hypo

SEQ ID NO: 321694 - DNA, 137 bp, Homo sapiens; identical to SEQ ID NO: 217423
  chr17:663955-664092
  hypo

SEQ ID NO: 321695 - DNA, 36 bp, Homo sapiens; identical to SEQ ID NO: 270022
  chr17:684166-684202
  hypo

SEQ ID NO: 321696 - DNA, 84 bp, Homo sapiens; identical to SEQ ID NO: 217424
  chr17:692538-692622
  hypo

SEQ ID NO: 321697 - DNA, 327 bp, Homo sapiens; identical to SEQ ID NO: 217425
  chr17:692652-692979
  hypo

SEQ ID NO: 321698 - DNA, 464 bp, Homo sapiens; identical to SEQ ID NO: 217426
  chr17:693367-693831
  hypo

SEQ ID NO: 321699 - DNA, 198 bp, Homo sapiens; identical to SEQ ID NO: 270025
  chr17:710849-711047
  hypo

SEQ ID NO: 321700 - DNA, 103 bp, Homo sapiens; identical to SEQ ID NO: 270026
  chr17:730082-730185
  hypo

SEQ ID NO: 321701 - DNA, 33 bp, Homo sapiens; identical to SEQ ID NO: 270027
  chr17:744617-744650
  hypo

SEQ ID NO: 321702 - DNA, 34 bp, Homo sapiens; identical to SEQ ID NO: 270028
  chr17:797966-798000
  hypo

SEQ ID NO: 321703 - DNA, 96 bp, Homo sapiens; identical to SEQ ID NO: 270029
  chr17:817716-817812
  hypo

SEQ ID NO: 321704 - DNA, 92 bp, Homo sapiens; identical to SEQ ID NO: 217427
  chr17:835941-836033
  hypo

SEQ ID NO: 321705 - DNA, 150 bp, Homo sapiens; identical to SEQ ID NO: 217428
  chr17:836153-836303
  hypo

SEQ ID NO: 321706 - DNA, 409 bp, Homo sapiens; identical to SEQ ID NO: 270032
  chr17:839511-839920
  hypo

SEQ ID NO: 321707 - DNA, 151 bp, Homo sapiens; identical to SEQ ID NO: 291851
  chr17:850231-850382
  hypo

SEQ ID NO: 321708 - DNA, 79 bp, Homo sapiens; identical to SEQ ID NO: 217429
  chr17:851784-851863
  hypo

SEQ ID NO: 321709 - DNA, 136 bp, Homo sapiens; identical to SEQ ID NO: 217430
  chr17:851893-852029
  hypo

SEQ ID NO: 321710 - DNA, 32 bp, Homo sapiens; identical to SEQ ID NO: 217431
  chr17:864608-864640
  hypo

SEQ ID NO: 321711 - DNA, 180 bp, Homo sapiens; identical to SEQ ID NO: 270036
  chr17:874468-874648
  hypo

SEQ ID NO: 321712 - DNA, 68 bp, Homo sapiens
  chr17:876752-876820
  hypo
ttcccaggcttcgtcgatcagcagcagtctggagcgtcattggcagatagaaatacagagctcagtaa

SEQ ID NO: 321713 - DNA, 84 bp, Homo sapiens; identical to SEQ ID NO: 225185
  chr17:883202-883286
  hypo

SEQ ID NO: 321714 - DNA, 64 bp, Homo sapiens; identical to SEQ ID NO: 217432
  chr17:916258-916322
  hypo

SEQ ID NO: 321715 - DNA, 525 bp, Homo sapiens; identical to SEQ ID NO: 270040
  chr17:929504-930029
  hypo

SEQ ID NO: 321716 - DNA, 564 bp, Homo sapiens; identical to SEQ ID NO: 270041
  chr17:951705-952269
  hypo

SEQ ID NO: 321717 - DNA, 66 bp, Homo sapiens; identical to SEQ ID NO: 270042
  chr17:952745-952811
  hypo

SEQ ID NO: 321718 - DNA, 496 bp, Homo sapiens; identical to SEQ ID NO: 270043
  chr17:972915-973411
  hypo

SEQ ID NO: 321719 - DNA, 89 bp, Homo sapiens; identical to SEQ ID NO: 270044
  chr17:978612-978701
  hypo

SEQ ID NO: 321720 - DNA, 288 bp, Homo sapiens; identical to SEQ ID NO: 270045
  chr17:995006-995294
  hypo

SEQ ID NO: 321721 - DNA, 338 bp, Homo sapiens; identical to SEQ ID NO: 270046
  chr17:1028626-1028964
  hypo

SEQ ID NO: 321722 - DNA, 65 bp, Homo sapiens; identical to SEQ ID NO: 270047
  chr17:1043599-1043664
  hypo

SEQ ID NO: 321723 - DNA, 110 bp, Homo sapiens; identical to SEQ ID NO: 270048
  chr17:1053213-1053323
  hypo

SEQ ID NO: 321724 - DNA, 59 bp, Homo sapiens; identical to SEQ ID NO: 270049
  chr17:1053672-1053731
  hypo

SEQ ID NO: 321725 - DNA, 137 bp, Homo sapiens; identical to SEQ ID NO: 270050
  chr17:1094003-1094140
  hypo

SEQ ID NO: 321726 - DNA, 73 bp, Homo sapiens; identical to SEQ ID NO: 225186
  chr17:1132222-1132295
  hypo

SEQ ID NO: 321727 - DNA, 42 bp, Homo sapiens; identical to SEQ ID NO: 270051
  chr17:1158236-1158278
  hypo

SEQ ID NO: 321728 - DNA, 36 bp, Homo sapiens
  chr17:1193058-1193094
  hypo
ctgcatgctgggaccggtttatccaagtccagctac

SEQ ID NO: 321729 - DNA, 151 bp, Homo sapiens
  chr17:1193124-1193275
  hypo
atacaagtccaaacactgcacggccctcttcctgagtcccagctggaggaagggcacctccactcatccagcacccaagctgggaacctgggaatcattcgagtcacgttcctcccagcacccaagccgggaaccccggaatcgtctgaat

SEQ ID NO: 321730 - DNA, 53 bp, Homo sapiens; identical to SEQ ID NO: 270053
  chr17:1208267-1208320
  hypo

SEQ ID NO: 321731 - DNA, 214 bp, Homo sapiens; identical to SEQ ID NO: 270054
  chr17:1240771-1240985
  hypo

SEQ ID NO: 321732 - DNA, 214 bp, Homo sapiens; identical to SEQ ID NO: 270055
  chr17:1241045-1241259
  hypo

SEQ ID NO: 321733 - DNA, 98 bp, Homo sapiens; identical to SEQ ID NO: 270056
  chr17:1244357-1244455
  hypo

SEQ ID NO: 321734 - DNA, 94 bp, Homo sapiens; identical to SEQ ID NO: 217433
  chr17:1244961-1245055
  hypo

SEQ ID NO: 321735 - DNA, 87 bp, Homo sapiens; identical to SEQ ID NO: 270058
  chr17:1255769-1255856
  hypo

SEQ ID NO: 321736 - DNA, 44 bp, Homo sapiens; identical to SEQ ID NO: 270059
  chr17:1298785-1298829
  hypo

SEQ ID NO: 321737 - DNA, 208 bp, Homo sapiens; identical to SEQ ID NO: 270060
  chr17:1352363-1352571
  hypo

SEQ ID NO: 321738 - DNA, 204 bp, Homo sapiens; identical to SEQ ID NO: 270061
  chr17:1373309-1373513
  hypo

SEQ ID NO: 321739 - DNA, 235 bp, Homo sapiens; identical to SEQ ID NO: 270062
  chr17:1375239-1375474
  hypo

SEQ ID NO: 321740 - DNA, 81 bp, Homo sapiens; identical to SEQ ID NO: 217435
  chr17:1376039-1376120
  hypo

SEQ ID NO: 321741 - DNA, 235 bp, Homo sapiens; identical to SEQ ID NO: 270064
  chr17:1386238-1386473
  hypo

SEQ ID NO: 321742 - DNA, 135 bp, Homo sapiens; identical to SEQ ID NO: 217436
  chr17:1386690-1386825
  hypo

SEQ ID NO: 321743 - DNA, 116 bp, Homo sapiens; identical to SEQ ID NO: 217437
  chr17:1387481-1387597
  hypo

SEQ ID NO: 321744 - DNA, 294 bp, Homo sapiens; identical to SEQ ID NO: 270067
  chr17:1407885-1408179
  hypo

SEQ ID NO: 321745 - DNA, 164 bp, Homo sapiens; identical to SEQ ID NO: 217439
  chr17:1410272-1410436
  hypo

SEQ ID NO: 321746 - DNA, 142 bp, Homo sapiens; identical to SEQ ID NO: 217440
  chr17:1412248-1412390
  hypo

SEQ ID NO: 321747 - DNA, 98 bp, Homo sapiens; identical to SEQ ID NO: 217441
  chr17:1412463-1412561
  hypo

SEQ ID NO: 321748 - DNA, 67 bp, Homo sapiens; identical to SEQ ID NO: 270070
  chr17:1437270-1437337
  hypo

SEQ ID NO: 321749 - DNA, 65 bp, Homo sapiens; identical to SEQ ID NO: 217442
  chr17:1451501-1451566
  hypo

SEQ ID NO: 321750 - DNA, 324 bp, Homo sapiens; identical to SEQ ID NO: 217443
  chr17:1454051-1454375
  hypo

SEQ ID NO: 321751 - DNA, 224 bp, Homo sapiens; identical to SEQ ID NO: 270073
  chr17:1462629-1462853
  hypo

SEQ ID NO: 321752 - DNA, 186 bp, Homo sapiens
  chr17:1494364-1494550
  hypo
cggggttggcgctgcggtggggtcacctcttgggtgaaatcaggcaaatccctttccctcccccaggccttcctgagcgcctctgcagaacagggcgggcggggccgcctccccttttggggtgaggtgggaatggggtgagccgatacccacagagcactccctgcccgtcgcccggctgcggtc

SEQ ID NO: 321753 - DNA, 197 bp, Homo sapiens; identical to SEQ ID NO: 270075
  chr17:1523771-1523968
  hypo

SEQ ID NO: 321754 - DNA, 204 bp, Homo sapiens; identical to SEQ ID NO: 270076
  chr17:1527254-1527458
  hypo

SEQ ID NO: 321755 - DNA, 39 bp, Homo sapiens; identical to SEQ ID NO: 270079
  chr17:1562742-1562781
  hypo

SEQ ID NO: 321756 - DNA, 183 bp, Homo sapiens; identical to SEQ ID NO: 204364
  chr17:1588082-1588265
  hypo

SEQ ID NO: 321757 - DNA, 802 bp, Homo sapiens; identical to SEQ ID NO: 291859
  chr17:1613225-1614027
  hypo

SEQ ID NO: 321758 - DNA, 120 bp, Homo sapiens; identical to SEQ ID NO: 270080
  chr17:1694044-1694164
  hypo

SEQ ID NO: 321759 - DNA, 156 bp, Homo sapiens; identical to SEQ ID NO: 217446
  chr17:1694900-1695056
  hypo

SEQ ID NO: 321760 - DNA, 180 bp, Homo sapiens; identical to SEQ ID NO: 270082
  chr17:1695176-1695356
  hypo

SEQ ID NO: 321761 - DNA, 220 bp, Homo sapiens; identical to SEQ ID NO: 270083
  chr17:1703829-1704049
  hypo

SEQ ID NO: 321762 - DNA, 204 bp, Homo sapiens; identical to SEQ ID NO: 217448
  chr17:1756126-1756330
  hypo

SEQ ID NO: 321763 - DNA, 297 bp, Homo sapiens; identical to SEQ ID NO: 217449
  chr17:1775556-1775853
  hypo

SEQ ID NO: 321764 - DNA, 402 bp, Homo sapiens; identical to SEQ ID NO: 217450
  chr17:1783887-1784289
  hypo

SEQ ID NO: 321765 - DNA, 119 bp, Homo sapiens; identical to SEQ ID NO: 217451
  chr17:1784821-1784940
  hypo

SEQ ID NO: 321766 - DNA, 161 bp, Homo sapiens; identical to SEQ ID NO: 217452
  chr17:1792141-1792302
  hypo

SEQ ID NO: 321767 - DNA, 466 bp, Homo sapiens; identical to SEQ ID NO: 217453
  chr17:1801623-1802089
  hypo

SEQ ID NO: 321768 - DNA, 58 bp, Homo sapiens; identical to SEQ ID NO: 270090
  chr17:1802318-1802376
  hypo

SEQ ID NO: 321769 - DNA, 281 bp, Homo sapiens; identical to SEQ ID NO: 270091
  chr17:1817208-1817489
  hypo

SEQ ID NO: 321770 - DNA, 146 bp, Homo sapiens
  chr17:1824435-1824581
  hypo
agtggaggagtagacgattgggtcgaaaccaaattggtcaaaaggacaaactggtcaagagcgactatttccgccgcagccttggctgttccacaagccggttctgccaaggactcgtcatccccaggcggagtgccacctacatg

SEQ ID NO: 321771 - DNA, 79 bp, Homo sapiens
  chr17:1824611-1824690
  hypo
gctgagggtgaaacgaaggagtccgggccagttcttagcctttttcaggatctgatgaaaaggccgtgctggcctgcac

SEQ ID NO: 321772 - DNA, 52 bp, Homo sapiens; identical to SEQ ID NO: 217454
  chr17:1837750-1837802
  hypo

SEQ ID NO: 321773 - DNA, 174 bp, Homo sapiens; identical to SEQ ID NO: 217455
  chr17:1938562-1938736
  hypo

SEQ ID NO: 321774 - DNA, 53 bp, Homo sapiens; identical to SEQ ID NO: 217456
  chr17:1940206-1940259
  hypo

SEQ ID NO: 321775 - DNA, 328 bp, Homo sapiens; identical to SEQ ID NO: 225189
  chr17:1954662-1954990
  hypo

SEQ ID NO: 321776 - DNA, 665 bp, Homo sapiens; identical to SEQ ID NO: 291873
  chr17:1961434-1962099
  hypo

SEQ ID NO: 321777 - DNA, 175 bp, Homo sapiens; identical to SEQ ID NO: 270096
  chr17:1990505-1990680
  hypo

SEQ ID NO: 321778 - DNA, 47 bp, Homo sapiens; identical to SEQ ID NO: 270097
  chr17:2006932-2006979
  hypo

SEQ ID NO: 321779 - DNA, 31 bp, Homo sapiens; identical to SEQ ID NO: 217457
  chr17:2015469-2015500
  hypo

SEQ ID NO: 321780 - DNA, 64 bp, Homo sapiens; identical to SEQ ID NO: 270099
  chr17:2111757-2111821
  hypo

SEQ ID NO: 321781 - DNA, 50 bp, Homo sapiens; identical to SEQ ID NO: 270100
  chr17:2135566-2135616
  hypo

SEQ ID NO: 321782 - DNA, 148 bp, Homo sapiens; identical to SEQ ID NO: 217458
  chr17:2146555-2146703
  hypo

SEQ ID NO: 321783 - DNA, 162 bp, Homo sapiens; identical to SEQ ID NO: 291874
  chr17:2156702-2156864
  hypo

SEQ ID NO: 321784 - DNA, 147 bp, Homo sapiens; identical to SEQ ID NO: 270102
  chr17:2181379-2181526
  hypo

SEQ ID NO: 321785 - DNA, 156 bp, Homo sapiens; identical to SEQ ID NO: 217459
  chr17:2182384-2182540
  hypo

SEQ ID NO: 321786 - DNA, 95 bp, Homo sapiens
  chr17:2249956-2250051
  hypo
gcaaaccagtctggcggcagcaggggggtgggtggggttctctgtgtgctgttcccaggcccgaggatcagaacctatgtaactgccacctccgt

SEQ ID NO: 321787 - DNA, 32 bp, Homo sapiens
  chr17:2250081-2250113
  hypo
ctcaaaactaccactatggggccaggcatggt

SEQ ID NO: 321788 - DNA, 38 bp, Homo sapiens; identical to SEQ ID NO: 270108
  chr17:2263307-2263345
  hypo

SEQ ID NO: 321789 - DNA, 51 bp, Homo sapiens
  chr17:2278750-2278801
  hypo
agtgcaggtggagccgccctgtgttcaccccccaggtgtttatctcagtgg

SEQ ID NO: 321790 - DNA, 452 bp, Homo sapiens
  chr17:2278925-2279377
  hypo
tccagactcaggactgccctcctctcgcaattactccgtggcctcgggcatccagtcaagcctagatgaggggcagagcgtgggcttcgaagaggaggacggcggtggggaggaaggctccagtgggcccggccctgcagctcacactttgagggagccccaggatcccagccaggagaagcctcaggccggagaactggaggccggagaggagcttgcggctgtgtgtgcggctgcctacactgtgcgtacatgctccccaggctgttcccagccgccccagaggccctcctgacatcccagagctggggaagcgctggtggggtggaaggcggggcgccctgactgccctggaagggagttctgagcccatttctcagcatccccacaggactcgctctggtctctgggttccgttttgctgcatttcttggggcgtcacctcctgcccc

SEQ ID NO: 321791 - DNA, 122 bp, Homo sapiens; identical to SEQ ID NO: 270110
  chr17:2289841-2289963
  hypo

SEQ ID NO: 321792 - DNA, 128 bp, Homo sapiens; identical to SEQ ID NO: 270111
  chr17:2290294-2290422
  hypo

SEQ ID NO: 321793 - DNA, 393 bp, Homo sapiens; identical to SEQ ID NO: 270112
  chr17:2291779-2292172
  hypo

SEQ ID NO: 321794 - DNA, 50 bp, Homo sapiens; identical to SEQ ID NO: 204369
  chr17:2302239-2302289
  hypo

SEQ ID NO: 321795 - DNA, 202 bp, Homo sapiens; identical to SEQ ID NO: 217462
  chr17:2326291-2326493
  hypo

SEQ ID NO: 321796 - DNA, 39 bp, Homo sapiens; identical to SEQ ID NO: 217463
  chr17:2326810-2326849
  hypo

SEQ ID NO: 321797 - DNA, 120 bp, Homo sapiens; identical to SEQ ID NO: 217464
  chr17:2388546-2388666
  hypo

SEQ ID NO: 321798 - DNA, 77 bp, Homo sapiens; identical to SEQ ID NO: 270117
  chr17:2539951-2540028
  hypo

SEQ ID NO: 321799 - DNA, 39 bp, Homo sapiens; identical to SEQ ID NO: 270118
  chr17:2590520-2590559
  hypo

SEQ ID NO: 321800 - DNA, 203 bp, Homo sapiens; identical to SEQ ID NO: 217465
  chr17:2595624-2595827
  hypo

SEQ ID NO: 321801 - DNA, 235 bp, Homo sapiens; identical to SEQ ID NO: 270120
  chr17:2599038-2599273
  hypo

SEQ ID NO: 321802 - DNA, 85 bp, Homo sapiens; identical to SEQ ID NO: 217467
  chr17:2603725-2603810
  hypo

SEQ ID NO: 321803 - DNA, 34 bp, Homo sapiens; identical to SEQ ID NO: 217468
  chr17:2616132-2616166
  hypo

SEQ ID NO: 321804 - DNA, 273 bp, Homo sapiens; identical to SEQ ID NO: 270123
  chr17:2616826-2617099
  hypo

SEQ ID NO: 321805 - DNA, 77 bp, Homo sapiens; identical to SEQ ID NO: 204370
  chr17:2627362-2627439
  hypo

SEQ ID NO: 321806 - DNA, 44 bp, Homo sapiens; identical to SEQ ID NO: 217470
  chr17:2684790-2684834
  hypo

SEQ ID NO: 321807 - DNA, 240 bp, Homo sapiens; identical to SEQ ID NO: 217471
  chr17:2684894-2685134
  hypo

SEQ ID NO: 321808 - DNA, 44 bp, Homo sapiens; identical to SEQ ID NO: 217472
  chr17:2685194-2685238
  hypo

SEQ ID NO: 321809 - DNA, 95 bp, Homo sapiens; identical to SEQ ID NO: 270127
  chr17:2708584-2708679
  hypo

SEQ ID NO: 321810 - DNA, 983 bp, Homo sapiens; identical to SEQ ID NO: 291882
  chr17:2756601-2757584
  hypo

SEQ ID NO: 321811 - DNA, 84 bp, Homo sapiens; identical to SEQ ID NO: 270128
  chr17:2767337-2767421
  hypo

SEQ ID NO: 321812 - DNA, 101 bp, Homo sapiens; identical to SEQ ID NO: 270129
  chr17:2799189-2799290
  hypo

SEQ ID NO: 321813 - DNA, 180 bp, Homo sapiens; identical to SEQ ID NO: 270130
  chr17:2805373-2805553
  hypo

SEQ ID NO: 321814 - DNA, 156 bp, Homo sapiens; identical to SEQ ID NO: 270131
  chr17:2811367-2811523
  hypo

SEQ ID NO: 321815 - DNA, 145 bp, Homo sapiens; identical to SEQ ID NO: 270132
  chr17:2868866-2869011
  hypo

SEQ ID NO: 321816 - DNA, 287 bp, Homo sapiens; identical to SEQ ID NO: 217474
  chr17:2908449-2908736
  hypo

SEQ ID NO: 321817 - DNA, 168 bp, Homo sapiens; identical to SEQ ID NO: 270134
  chr17:3374890-3375058
  hypo

SEQ ID NO: 321818 - DNA, 35 bp, Homo sapiens; identical to SEQ ID NO: 217475
  chr17:3375581-3375616
  hypo

SEQ ID NO: 321819 - DNA, 86 bp, Homo sapiens; identical to SEQ ID NO: 270136
  chr17:3474665-3474751
  hypo

SEQ ID NO: 321820 - DNA, 321 bp, Homo sapiens; identical to SEQ ID NO: 270137
  chr17:3486255-3486576
  hypo

SEQ ID NO: 321821 - DNA, 72 bp, Homo sapiens; identical to SEQ ID NO: 217476
  chr17:3500360-3500432
  hypo

SEQ ID NO: 321822 - DNA, 121 bp, Homo sapiens; identical to SEQ ID NO: 270139
  chr17:3560847-3560968
  hypo

SEQ ID NO: 321823 - DNA, 84 bp, Homo sapiens; identical to SEQ ID NO: 270140
  chr17:3561543-3561627
  hypo

SEQ ID NO: 321824 - DNA, 250 bp, Homo sapiens; identical to SEQ ID NO: 270141
  chr17:3562849-3563099
  hypo

SEQ ID NO: 321825 - DNA, 43 bp, Homo sapiens; identical to SEQ ID NO: 217477
  chr17:3577299-3577342
  hypo

SEQ ID NO: 321826 - DNA, 141 bp, Homo sapiens; identical to SEQ ID NO: 291890
  chr17:3599032-3599173
  hypo

SEQ ID NO: 321827 - DNA, 391 bp, Homo sapiens; identical to SEQ ID NO: 291891
  chr17:3599244-3599635
  hypo

SEQ ID NO: 321828 - DNA, 190 bp, Homo sapiens; identical to SEQ ID NO: 270144
  chr17:3653522-3653712
  hypo

SEQ ID NO: 321829 - DNA, 99 bp, Homo sapiens; identical to SEQ ID NO: 270145
  chr17:3660155-3660254
  hypo

SEQ ID NO: 321830 - DNA, 67 bp, Homo sapiens; identical to SEQ ID NO: 217480
  chr17:3664936-3665003
  hypo

SEQ ID NO: 321831 - DNA, 158 bp, Homo sapiens; identical to SEQ ID NO: 270147
  chr17:3711312-3711470
  hypo

SEQ ID NO: 321832 - DNA, 609 bp, Homo sapiens; identical to SEQ ID NO: 217481
  chr17:3716185-3716794
  hypo

SEQ ID NO: 321833 - DNA, 73 bp, Homo sapiens; identical to SEQ ID NO: 217482
  chr17:3721569-3721642
  hypo

SEQ ID NO: 321834 - DNA, 39 bp, Homo sapiens
  chr17:3741553-3741592
  hypo
acagaatgaaaggcatgagccgtatcagaggcaagccgc

SEQ ID NO: 321835 - DNA, 240 bp, Homo sapiens
  chr17:3755034-3755274
  hypo
atgccactcatggttttcttttttctccaccgctcctgccctacggcctttgcaggttcttcaacttccacaacagtggcattctgccagagctcaatcctgggccccttctcactccctcgactagctcatcacacgcatggcttccaactccacggccgtccacacgctgagggcccccgcgtctccatttccagttctcgcctctccctcgagctccagatgcgcatgtccagctgc

SEQ ID NO: 321836 - DNA, 155 bp, Homo sapiens; identical to SEQ ID NO: 225197
  chr17:3778891-3779046
  hypo

SEQ ID NO: 321837 - DNA, 111 bp, Homo sapiens; identical to SEQ ID NO: 270152
  chr17:3793345-3793456
  hypo

SEQ ID NO: 321838 - DNA, 175 bp, Homo sapiens; identical to SEQ ID NO: 217483
  chr17:3844263-3844438
  hypo

SEQ ID NO: 321839 - DNA, 135 bp, Homo sapiens; identical to SEQ ID NO: 217484
  chr17:3844806-3844941
  hypo

SEQ ID NO: 321840 - DNA, 370 bp, Homo sapiens; identical to SEQ ID NO: 270155
  chr17:3850755-3851125
  hypo

SEQ ID NO: 321841 - DNA, 156 bp, Homo sapiens; identical to SEQ ID NO: 270156
  chr17:3860424-3860580
  hypo

SEQ ID NO: 321842 - DNA, 457 bp, Homo sapiens; identical to SEQ ID NO: 291893
  chr17:3867210-3867667
  hypo

SEQ ID NO: 321843 - DNA, 229 bp, Homo sapiens; identical to SEQ ID NO: 291894
  chr17:3867879-3868108
  hypo

SEQ ID NO: 321844 - DNA, 91 bp, Homo sapiens; identical to SEQ ID NO: 217486
  chr17:3884835-3884926
  hypo

SEQ ID NO: 321845 - DNA, 558 bp, Homo sapiens; identical to SEQ ID NO: 270158
  chr17:3980237-3980795
  hypo

SEQ ID NO: 321846 - DNA, 115 bp, Homo sapiens; identical to SEQ ID NO: 270159
  chr17:3985688-3985803
  hypo

SEQ ID NO: 321847 - DNA, 31 bp, Homo sapiens; identical to SEQ ID NO: 217488
  chr17:4039291-4039322
  hypo

SEQ ID NO: 321848 - DNA, 31 bp, Homo sapiens; identical to SEQ ID NO: 217489
  chr17:4039622-4039653
  hypo

SEQ ID NO: 321849 - DNA, 104 bp, Homo sapiens; identical to SEQ ID NO: 270162
  chr17:4048008-4048112
  hypo

SEQ ID NO: 321850 - DNA, 345 bp, Homo sapiens; identical to SEQ ID NO: 270163
  chr17:4048747-4049092
  hypo

SEQ ID NO: 321851 - DNA, 31 bp, Homo sapiens; identical to SEQ ID NO: 270164
  chr17:4063865-4063896
  hypo

SEQ ID NO: 321852 - DNA, 288 bp, Homo sapiens; identical to SEQ ID NO: 270165
  chr17:4074112-4074400
  hypo

SEQ ID NO: 321853 - DNA, 85 bp, Homo sapiens; identical to SEQ ID NO: 217490
  chr17:4076474-4076559
  hypo

SEQ ID NO: 321854 - DNA, 307 bp, Homo sapiens; identical to SEQ ID NO: 270167
  chr17:4079169-4079476
  hypo

SEQ ID NO: 321855 - DNA, 41 bp, Homo sapiens; identical to SEQ ID NO: 270168
  chr17:4090911-4090952
  hypo

SEQ ID NO: 321856 - DNA, 144 bp, Homo sapiens; identical to SEQ ID NO: 270169
  chr17:4137079-4137223
  hypo

SEQ ID NO: 321857 - DNA, 240 bp, Homo sapiens; identical to SEQ ID NO: 270170
  chr17:4144869-4145109
  hypo

SEQ ID NO: 321858 - DNA, 206 bp, Homo sapiens; identical to SEQ ID NO: 270171
  chr17:4151786-4151992
  hypo

SEQ ID NO: 321859 - DNA, 45 bp, Homo sapiens; identical to SEQ ID NO: 217491
  chr17:4161526-4161571
  hypo

SEQ ID NO: 321860 - DNA, 141 bp, Homo sapiens; identical to SEQ ID NO: 217492
  chr17:4215641-4215782
  hypo

SEQ ID NO: 321861 - DNA, 74 bp, Homo sapiens; identical to SEQ ID NO: 217493
  chr17:4236551-4236625
  hypo

SEQ ID NO: 321862 - DNA, 120 bp, Homo sapiens; identical to SEQ ID NO: 270175
  chr17:4250033-4250153
  hypo

SEQ ID NO: 321863 - DNA, 36 bp, Homo sapiens; identical to SEQ ID NO: 217494
  chr17:4273440-4273476
  hypo

SEQ ID NO: 321864 - DNA, 37 bp, Homo sapiens; identical to SEQ ID NO: 270177
  chr17:4289153-4289190
  hypo

SEQ ID NO: 321865 - DNA, 377 bp, Homo sapiens; identical to SEQ ID NO: 217495
  chr17:4392108-4392485
  hypo

SEQ ID NO: 321866 - DNA, 87 bp, Homo sapiens
  chr17:4436331-4436418
  hypo
gggcatgtggatcccgctctacctgcaccgcgcccaagttgtgcagaagacagcagagacgtgcaacagcccgccctgtggggccaa

SEQ ID NO: 321867 - DNA, 169 bp, Homo sapiens
  chr17:4436450-4436619
  hypo
gctggtgagggacctcggacaggagagcccctcagccttagccctgagccgcctcaactcgtgcgccaccatcctctgtccccacagcctcatctttggggccatcacctgctttacgggatttctgggcgtggtcacgggggcaggagccacgcgctggtgccgcctg

SEQ ID NO: 321868 - DNA, 51 bp, Homo sapiens
  chr17:4446257-4446308
  hypo
cctgtgtctcatgcacgcagccctcagcagtgttgcccttcaagacccgga

SEQ ID NO: 321869 - DNA, 137 bp, Homo sapiens
  chr17:4446376-4446513
  hypo
accaaccgctccacctgggcgtgcagggcccctgcgcgctcacccaagtcgtggcagtagcgccgggcacggcacaggtggtgcctgtgggtggtgaggacgagagctggtcagaacattctcggtccaccctgctc

SEQ ID NO: 321870 - DNA, 87 bp, Homo sapiens; identical to SEQ ID NO: 217496
  chr17:4461986-4462073
  hypo

SEQ ID NO: 321871 - DNA, 561 bp, Homo sapiens; identical to SEQ ID NO: 217497
  chr17:4500076-4500637
  hypo

SEQ ID NO: 321872 - DNA, 122 bp, Homo sapiens; identical to SEQ ID NO: 270183
  chr17:4643851-4643973
  hypo

SEQ ID NO: 321873 - DNA, 42 bp, Homo sapiens; identical to SEQ ID NO: 225200
  chr17:4647512-4647554
  hypo

SEQ ID NO: 321874 - DNA, 36 bp, Homo sapiens; identical to SEQ ID NO: 270184
  chr17:4649705-4649741
  hypo

SEQ ID NO: 321875 - DNA, 264 bp, Homo sapiens; identical to SEQ ID NO: 270185
  chr17:4685680-4685944
  hypo

SEQ ID NO: 321876 - DNA, 541 bp, Homo sapiens; identical to SEQ ID NO: 217498
  chr17:4795536-4796077
  hypo

SEQ ID NO: 321877 - DNA, 517 bp, Homo sapiens; identical to SEQ ID NO: 291905
  chr17:4853393-4853910
  hypo

SEQ ID NO: 321878 - DNA, 358 bp, Homo sapiens; identical to SEQ ID NO: 204381
  chr17:4890353-4890711
  hypo

SEQ ID NO: 321879 - DNA, 118 bp, Homo sapiens; identical to SEQ ID NO: 204382
  chr17:4901561-4901679
  hypo

SEQ ID NO: 321880 - DNA, 157 bp, Homo sapiens; identical to SEQ ID NO: 217502
  chr17:4916076-4916233
  hypo

SEQ ID NO: 321881 - DNA, 31 bp, Homo sapiens; identical to SEQ ID NO: 270188
  chr17:4928167-4928198
  hypo

SEQ ID NO: 321882 - DNA, 281 bp, Homo sapiens; identical to SEQ ID NO: 291909
  chr17:4938733-4939014
  hypo

SEQ ID NO: 321883 - DNA, 55 bp, Homo sapiens; identical to SEQ ID NO: 204383
  chr17:4981985-4982040
  hypo

SEQ ID NO: 321884 - DNA, 35 bp, Homo sapiens; identical to SEQ ID NO: 270189
  chr17:5168548-5168583
  hypo

SEQ ID NO: 321885 - DNA, 247 bp, Homo sapiens; identical to SEQ ID NO: 217504
  chr17:5269054-5269301
  hypo

SEQ ID NO: 321886 - DNA, 164 bp, Homo sapiens; identical to SEQ ID NO: 217505
  chr17:5392214-5392378
  hypo

SEQ ID NO: 321887 - DNA, 171 bp, Homo sapiens; identical to SEQ ID NO: 217506
  chr17:5405104-5405275
  hypo

SEQ ID NO: 321888 - DNA, 163 bp, Homo sapiens; identical to SEQ ID NO: 270193
  chr17:5465216-5465379
  hypo

SEQ ID NO: 321889 - DNA, 147 bp, Homo sapiens; identical to SEQ ID NO: 217507
  chr17:6023533-6023680
  hypo

SEQ ID NO: 321890 - DNA, 157 bp, Homo sapiens; identical to SEQ ID NO: 217508
  chr17:6023875-6024032
  hypo

SEQ ID NO: 321891 - DNA, 138 bp, Homo sapiens; identical to SEQ ID NO: 270195
  chr17:6419897-6420035
  hypo

SEQ ID NO: 321892 - DNA, 174 bp, Homo sapiens; identical to SEQ ID NO: 270196
  chr17:6456918-6457092
  hypo

SEQ ID NO: 321893 - DNA, 603 bp, Homo sapiens; identical to SEQ ID NO: 291921
  chr17:6459172-6459775
  hypo

SEQ ID NO: 321894 - DNA, 42 bp, Homo sapiens; identical to SEQ ID NO: 217509
  chr17:6470126-6470168
  hypo

SEQ ID NO: 321895 - DNA, 718 bp, Homo sapiens; identical to SEQ ID NO: 270198
  chr17:6474307-6475025
  hypo

SEQ ID NO: 321896 - DNA, 37 bp, Homo sapiens; identical to SEQ ID NO: 270199
  chr17:6755547-6755584
  hypo

SEQ ID NO: 321897 - DNA, 37 bp, Homo sapiens; identical to SEQ ID NO: 270200
  chr17:6755824-6755861
  hypo

SEQ ID NO: 321898 - DNA, 92 bp, Homo sapiens; identical to SEQ ID NO: 270201
  chr17:6899902-6899994
  hypo

SEQ ID NO: 321899 - DNA, 39 bp, Homo sapiens; identical to SEQ ID NO: 270202
  chr17:7048539-7048578
  hypo

SEQ ID NO: 321900 - DNA, 159 bp, Homo sapiens; identical to SEQ ID NO: 270203
  chr17:7076077-7076236
  hypo

SEQ ID NO: 321901 - DNA, 64 bp, Homo sapiens; identical to SEQ ID NO: 217510
  chr17:7077090-7077154
  hypo

SEQ ID NO: 321902 - DNA, 34 bp, Homo sapiens; identical to SEQ ID NO: 270205
  chr17:7116701-7116735
  hypo

SEQ ID NO: 321903 - DNA, 211 bp, Homo sapiens; identical to SEQ ID NO: 270206
  chr17:7121867-7122078
  hypo

SEQ ID NO: 321904 - DNA, 190 bp, Homo sapiens; identical to SEQ ID NO: 291934
  chr17:7146325-7146515
  hypo

SEQ ID NO: 321905 - DNA, 76 bp, Homo sapiens; identical to SEQ ID NO: 291935
  chr17:7146588-7146664
  hypo

SEQ ID NO: 321906 - DNA, 72 bp, Homo sapiens; identical to SEQ ID NO: 270208
  chr17:7187872-7187944
  hypo

SEQ ID NO: 321907 - DNA, 114 bp, Homo sapiens; identical to SEQ ID NO: 217513
  chr17:7188331-7188445
  hypo

SEQ ID NO: 321908 - DNA, 56 bp, Homo sapiens; identical to SEQ ID NO: 270210
  chr17:7192899-7192955
  hypo

SEQ ID NO: 321909 - DNA, 293 bp, Homo sapiens; identical to SEQ ID NO: 291942
  chr17:7199730-7200023
  hypo

SEQ ID NO: 321910 - DNA, 572 bp, Homo sapiens; identical to SEQ ID NO: 217514
  chr17:7224753-7225325
  hypo

SEQ ID NO: 321911 - DNA, 302 bp, Homo sapiens; identical to SEQ ID NO: 270212
  chr17:7227167-7227469
  hypo

SEQ ID NO: 321912 - DNA, 1357 bp, Homo sapiens; identical to SEQ ID NO: 291945
  chr17:7254485-7255842
  hypo

SEQ ID NO: 321913 - DNA, 140 bp, Homo sapiens
  chr17:7285130-7285270
  hypo
cctttgtgtcttagccgtgtggggcagtgtatctaggtgtttggaggcagtgaactgccatgtcccatggatgtgacacgtatgtacaaggaacatctcatggaaggacacagatgagcctgggcgttttgtggccgcat

SEQ ID NO: 321914 - DNA, 51 bp, Homo sapiens; identical to SEQ ID NO: 270214
  chr17:7292301-7292352
  hypo

SEQ ID NO: 321915 - DNA, 43 bp, Homo sapiens; identical to SEQ ID NO: 270215
  chr17:7318437-7318480
  hypo

SEQ ID NO: 321916 - DNA, 33 bp, Homo sapiens; identical to SEQ ID NO: 270216
  chr17:7318916-7318949
  hypo

SEQ ID NO: 321917 - DNA, 323 bp, Homo sapiens; identical to SEQ ID NO: 270217
  chr17:7320351-7320674
  hypo

SEQ ID NO: 321918 - DNA, 629 bp, Homo sapiens; identical to SEQ ID NO: 291948
  chr17:7340252-7340881
  hypo

SEQ ID NO: 321919 - DNA, 160 bp, Homo sapiens; identical to SEQ ID NO: 217518
  chr17:7367404-7367564
  hypo

SEQ ID NO: 321920 - DNA, 72 bp, Homo sapiens; identical to SEQ ID NO: 217519
  chr17:7368875-7368947
  hypo

SEQ ID NO: 321921 - DNA, 177 bp, Homo sapiens; identical to SEQ ID NO: 217520
  chr17:7369222-7369399
  hypo

SEQ ID NO: 321922 - DNA, 35 bp, Homo sapiens; identical to SEQ ID NO: 270220
  chr17:7384627-7384662
  hypo

SEQ ID NO: 321923 - DNA, 249 bp, Homo sapiens
  chr17:7419658-7419907
  hypo
ttactcagtctaccgattaaaatgccgacctcttcaagaaacactctcactgacacacccagaaagaatgtttttccagctctctgggcgttccttaactcagtcaagttgacgcgtaccattaaccaccactgtgtgcccaggcatagttttctcatttatcccgtttgagtttccctgagatttttgattctgtaaaattgccttttagcgtatttgggaagtttttagactttttttttttttttt

SEQ ID NO: 321924 - DNA, 222 bp, Homo sapiens
  chr17:7460247-7460469
  hypo
gcagtaagagagtggcgaagggtttgccaggagagtgggggacaagctacagggctgggagggtgagttggggtttgggtgggatgggatgcctgcgtcgctgaggaaattggaaattgaggcgagggcaggcagaggcctggactcggcctgttgtccccaccccaggtgcactttgatgaggggaaggctgtctacctgaagctggacttgctggtggat

SEQ ID NO: 321925 - DNA, 101 bp, Homo sapiens; identical to SEQ ID NO: 217522
  chr17:7480063-7480164
  hypo

SEQ ID NO: 321926 - DNA, 385 bp, Homo sapiens; identical to SEQ ID NO: 291954
  chr17:7486279-7486664
  hypo

SEQ ID NO: 321927 - DNA, 317 bp, Homo sapiens; identical to SEQ ID NO: 291955
  chr17:7486947-7487264
  hypo

SEQ ID NO: 321928 - DNA, 619 bp, Homo sapiens; identical to SEQ ID NO: 217523
  chr17:7491960-7492579
  hypo

SEQ ID NO: 321929 - DNA, 141 bp, Homo sapiens; identical to SEQ ID NO: 270228
  chr17:7493109-7493250
  hypo

SEQ ID NO: 321930 - DNA, 273 bp, Homo sapiens; identical to SEQ ID NO: 270229
  chr17:7493323-7493596
  hypo

SEQ ID NO: 321931 - DNA, 540 bp, Homo sapiens; identical to SEQ ID NO: 270230
  chr17:7493626-7494166
  hypo

SEQ ID NO: 321932 - DNA, 97 bp, Homo sapiens; identical to SEQ ID NO: 270231
  chr17:7496712-7496809
  hypo

SEQ ID NO: 321933 - DNA, 41 bp, Homo sapiens; identical to SEQ ID NO: 217525
  chr17:7536911-7536952
  hypo

SEQ ID NO: 321934 - DNA, 165 bp, Homo sapiens; identical to SEQ ID NO: 204402
  chr17:7571719-7571884
  hypo

SEQ ID NO: 321935 - DNA, 773 bp, Homo sapiens; identical to SEQ ID NO: 204403
  chr17:7572184-7572957
  hypo

SEQ ID NO: 321936 - DNA, 46 bp, Homo sapiens; identical to SEQ ID NO: 204404
  chr17:7573922-7573968
  hypo

SEQ ID NO: 321937 - DNA, 301 bp, Homo sapiens; identical to SEQ ID NO: 204405
  chr17:7576546-7576847
  hypo

SEQ ID NO: 321938 - DNA, 163 bp, Homo sapiens; identical to SEQ ID NO: 204406
  chr17:7578570-7578733
  hypo

SEQ ID NO: 321939 - DNA, 36 bp, Homo sapiens; identical to SEQ ID NO: 204407
  chr17:7579249-7579285
  hypo

SEQ ID NO: 321940 - DNA, 60 bp, Homo sapiens; identical to SEQ ID NO: 204408
  chr17:7579880-7579940
  hypo

SEQ ID NO: 321941 - DNA, 329 bp, Homo sapiens; identical to SEQ ID NO: 204409
  chr17:7590625-7590954
  hypo

SEQ ID NO: 321942 - DNA, 206 bp, Homo sapiens; identical to SEQ ID NO: 270233
  chr17:7662608-7662814
  hypo

SEQ ID NO: 321943 - DNA, 197 bp, Homo sapiens; identical to SEQ ID NO: 217534
  chr17:7690145-7690342
  hypo

SEQ ID NO: 321944 - DNA, 139 bp, Homo sapiens; identical to SEQ ID NO: 270235
  chr17:7702407-7702546
  hypo

SEQ ID NO: 321945 - DNA, 176 bp, Homo sapiens; identical to SEQ ID NO: 270236
  chr17:7710676-7710852
  hypo

SEQ ID NO: 321946 - DNA, 33 bp, Homo sapiens
  chr17:7727216-7727249
  hypo
cgcgtggccttctgcgtgacctccttcatcatc

SEQ ID NO: 321947 - DNA, 95 bp, Homo sapiens; identical to SEQ ID NO: 217535
  chr17:7769321-7769416
  hypo

SEQ ID NO: 321948 - DNA, 35 bp, Homo sapiens; identical to SEQ ID NO: 217536
  chr17:7769716-7769751
  hypo

SEQ ID NO: 321949 - DNA, 42 bp, Homo sapiens; identical to SEQ ID NO: 270240
  chr17:7797154-7797196
  hypo

SEQ ID NO: 321950 - DNA, 184 bp, Homo sapiens; identical to SEQ ID NO: 217537
  chr17:7798625-7798809
  hypo

SEQ ID NO: 321951 - DNA, 101 bp, Homo sapiens; identical to SEQ ID NO: 217538
  chr17:7800249-7800350
  hypo

SEQ ID NO: 321952 - DNA, 212 bp, Homo sapiens; identical to SEQ ID NO: 217539
  chr17:7806524-7806736
  hypo

SEQ ID NO: 321953 - DNA, 125 bp, Homo sapiens; identical to SEQ ID NO: 217540
  chr17:7807180-7807305
  hypo

SEQ ID NO: 321954 - DNA, 478 bp, Homo sapiens; identical to SEQ ID NO: 270245
  chr17:7809785-7810263
  hypo

SEQ ID NO: 321955 - DNA, 49 bp, Homo sapiens; identical to SEQ ID NO: 217542
  chr17:7811072-7811121
  hypo

SEQ ID NO: 321956 - DNA, 126 bp, Homo sapiens; identical to SEQ ID NO: 270247
  chr17:7812554-7812680
  hypo

SEQ ID NO: 321957 - DNA, 79 bp, Homo sapiens; identical to SEQ ID NO: 217543
  chr17:7813720-7813799
  hypo

SEQ ID NO: 321958 - DNA, 120 bp, Homo sapiens; identical to SEQ ID NO: 217544
  chr17:7892730-7892850
  hypo

SEQ ID NO: 321959 - DNA, 235 bp, Homo sapiens; identical to SEQ ID NO: 270250
  chr17:7951707-7951942
  hypo

SEQ ID NO: 321960 - DNA, 291 bp, Homo sapiens; identical to SEQ ID NO: 270251
  chr17:8012302-8012593
  hypo

SEQ ID NO: 321961 - DNA, 213 bp, Homo sapiens; identical to SEQ ID NO: 270252
  chr17:8064842-8065055
  hypo

SEQ ID NO: 321962 - DNA, 40 bp, Homo sapiens; identical to SEQ ID NO: 270253
  chr17:8074475-8074515
  hypo

SEQ ID NO: 321963 - DNA, 272 bp, Homo sapiens; identical to SEQ ID NO: 217545
  chr17:8104639-8104911
  hypo

SEQ ID NO: 321964 - DNA, 472 bp, Homo sapiens; identical to SEQ ID NO: 217546
  chr17:8138410-8138882
  hypo

SEQ ID NO: 321965 - DNA, 458 bp, Homo sapiens; identical to SEQ ID NO: 270256
  chr17:8197551-8198009
  hypo

SEQ ID NO: 321966 - DNA, 38 bp, Homo sapiens; identical to SEQ ID NO: 270257
  chr17:8276463-8276501
  hypo

SEQ ID NO: 321967 - DNA, 244 bp, Homo sapiens
  chr17:8295898-8296142
  hypo
acgtggggaacacgcgccgcgcgcatggagtcagctccagcctctctgtcgagcggaagcccctgcgggggtcggggaagcccaaggccctctctgtgcccaggtcctcccctctgcctgcccgcgtgcccctcggagcttggtggcaccagggctgccgtgggcctcctgtcccaccccaggccacggctagcccggcggcctccctgaggtgcggctcacgcctgcttcctcaccagcagca

SEQ ID NO: 321968 - DNA, 258 bp, Homo sapiens; identical to SEQ ID NO: 217549
  chr17:8311456-8311714
  hypo

SEQ ID NO: 321969 - DNA, 103 bp, Homo sapiens; identical to SEQ ID NO: 270260
  chr17:8319005-8319108
  hypo

SEQ ID NO: 321970 - DNA, 83 bp, Homo sapiens; identical to SEQ ID NO: 217550
  chr17:8325971-8326054
  hypo

SEQ ID NO: 321971 - DNA, 59 bp, Homo sapiens; identical to SEQ ID NO: 217551
  chr17:8365227-8365286
  hypo

SEQ ID NO: 321972 - DNA, 142 bp, Homo sapiens; identical to SEQ ID NO: 270263
  chr17:8371939-8372081
  hypo

SEQ ID NO: 321973 - DNA, 82 bp, Homo sapiens; identical to SEQ ID NO: 270264
  chr17:8380284-8380366
  hypo

SEQ ID NO: 321974 - DNA, 208 bp, Homo sapiens; identical to SEQ ID NO: 270265
  chr17:8383607-8383815
  hypo

SEQ ID NO: 321975 - DNA, 163 bp, Homo sapiens
  chr17:8384350-8384513
  hypo
aagtgaaggcctgcagtgcccgttggcgcaccccacggctcccccctgcggtgtgcagggctcagcaggactggcacgggtgcagtgcccgttagtgcacaccacggctcccacctgcggtgtgcagggctcggcaggactggcacggggtaccatggctgag

SEQ ID NO: 321976 - DNA, 379 bp, Homo sapiens; identical to SEQ ID NO: 270268
  chr17:8430760-8431139
  hypo

SEQ ID NO: 321977 - DNA, 158 bp, Homo sapiens; identical to SEQ ID NO: 217553
  chr17:8438422-8438580
  hypo

SEQ ID NO: 321978 - DNA, 104 bp, Homo sapiens; identical to SEQ ID NO: 270270
  chr17:8458246-8458350
  hypo

SEQ ID NO: 321979 - DNA, 57 bp, Homo sapiens; identical to SEQ ID NO: 270271
  chr17:8471465-8471522
  hypo

SEQ ID NO: 321980 - DNA, 386 bp, Homo sapiens; identical to SEQ ID NO: 270272
  chr17:8638483-8638869
  hypo

SEQ ID NO: 321981 - DNA, 126 bp, Homo sapiens; identical to SEQ ID NO: 217554
  chr17:8700777-8700903
  hypo

SEQ ID NO: 321982 - DNA, 227 bp, Homo sapiens; identical to SEQ ID NO: 217555
  chr17:8731954-8732181
  hypo

SEQ ID NO: 321983 - DNA, 156 bp, Homo sapiens; identical to SEQ ID NO: 270275
  chr17:8738595-8738751
  hypo

SEQ ID NO: 321984 - DNA, 33 bp, Homo sapiens; identical to SEQ ID NO: 225226
  chr17:8759640-8759673
  hypo

SEQ ID NO: 321985 - DNA, 88 bp, Homo sapiens; identical to SEQ ID NO: 270277
  chr17:8814770-8814858
  hypo

SEQ ID NO: 321986 - DNA, 102 bp, Homo sapiens; identical to SEQ ID NO: 270278
  chr17:8932900-8933002
  hypo

SEQ ID NO: 321987 - DNA, 214 bp, Homo sapiens; identical to SEQ ID NO: 270279
  chr17:8977464-8977678
  hypo

SEQ ID NO: 321988 - DNA, 44 bp, Homo sapiens; identical to SEQ ID NO: 270280
  chr17:9041943-9041987
  hypo

SEQ ID NO: 321989 - DNA, 147 bp, Homo sapiens; identical to SEQ ID NO: 217556
  chr17:9054227-9054374
  hypo

SEQ ID NO: 321990 - DNA, 37 bp, Homo sapiens; identical to SEQ ID NO: 270282
  chr17:9065578-9065615
  hypo

SEQ ID NO: 321991 - DNA, 44 bp, Homo sapiens
  chr17:9065675-9065719
  hypo
gttgctctggaggcccttctgcgtggcttgcagatggccgccct

SEQ ID NO: 321992 - DNA, 106 bp, Homo sapiens
  chr17:9065749-9065855
  hypo
gtgcacatgcgtccctgcgtctctctgtgtcctcatctcctcttcctacaacgacacagtcatactggcatagggcccactctgagggccttgttttaagactctg

SEQ ID NO: 321993 - DNA, 456 bp, Homo sapiens; identical to SEQ ID NO: 270284
  chr17:9065915-9066371
  hypo

SEQ ID NO: 321994 - DNA, 117 bp, Homo sapiens; identical to SEQ ID NO: 270285
  chr17:9066671-9066788
  hypo

SEQ ID NO: 321995 - DNA, 33 bp, Homo sapiens; identical to SEQ ID NO: 270286
  chr17:9122496-9122529
  hypo

SEQ ID NO: 321996 - DNA, 275 bp, Homo sapiens; identical to SEQ ID NO: 270287
  chr17:9124886-9125161
  hypo

SEQ ID NO: 321997 - DNA, 204 bp, Homo sapiens; identical to SEQ ID NO: 217558
  chr17:9127008-9127212
  hypo

SEQ ID NO: 321998 - DNA, 191 bp, Homo sapiens; identical to SEQ ID NO: 217559
  chr17:9150998-9151189
  hypo

SEQ ID NO: 321999 - DNA, 77 bp, Homo sapiens; identical to SEQ ID NO: 270290
  chr17:9153811-9153888
  hypo

SEQ ID NO: 322000 - DNA, 210 bp, Homo sapiens; identical to SEQ ID NO: 270291
  chr17:9154766-9154976
  hypo

SEQ ID NO: 322001 - DNA, 215 bp, Homo sapiens; identical to SEQ ID NO: 217560
  chr17:9233914-9234129
  hypo

SEQ ID NO: 322002 - DNA, 193 bp, Homo sapiens; identical to SEQ ID NO: 270293
  chr17:9264056-9264249
  hypo

SEQ ID NO: 322003 - DNA, 31 bp, Homo sapiens; identical to SEQ ID NO: 217561
  chr17:9393283-9393314
  hypo

SEQ ID NO: 322004 - DNA, 164 bp, Homo sapiens; identical to SEQ ID NO: 270295
  chr17:9474685-9474849
  hypo

SEQ ID NO: 322005 - DNA, 1476 bp, Homo sapiens; identical to SEQ ID NO: 292009
  chr17:9548035-9549511
  hypo

SEQ ID NO: 322006 - DNA, 38 bp, Homo sapiens; identical to SEQ ID NO: 270296
  chr17:9576953-9576991
  hypo

SEQ ID NO: 322007 - DNA, 225 bp, Homo sapiens; identical to SEQ ID NO: 217563
  chr17:9631365-9631590
  hypo

SEQ ID NO: 322008 - DNA, 329 bp, Homo sapiens; identical to SEQ ID NO: 270298
  chr17:9674879-9675208
  hypo

SEQ ID NO: 322009 - DNA, 45 bp, Homo sapiens; identical to SEQ ID NO: 270299
  chr17:9719665-9719710
  hypo

SEQ ID NO: 322010 - DNA, 104 bp, Homo sapiens; identical to SEQ ID NO: 270300
  chr17:9719770-9719874
  hypo

SEQ ID NO: 322011 - DNA, 171 bp, Homo sapiens
  chr17:9807968-9808139
  hypo
atctcggagcaccacgctctcagagccagtggcccgcatcccccgctccacccacagatccactccctctgcagcagctgcagcaggggacccccagcccggagcgaccccggcaccgcccagccagaaggggagaggggagactgaccatgacgatctccagcacttcat

SEQ ID NO: 322012 - DNA, 265 bp, Homo sapiens
  chr17:9808175-9808440
  hypo
gggagaaggcccactccagcttctggttggtcttgcccgcggtggtcatgtgcagggcgatgacgtactccttgaagtccagggtgccgtcgaggttggaatcgaagctgcggaacacatgctgggcgtaggccttggggtcggtgtcggggaagaacttggcgtagatgctctggaactgctgctgggtgatgcggccggtgggacagtccttcaggaaggactggtaccaggagcacagctcctcctccgagaacttggtgtt

SEQ ID NO: 322013 - DNA, 99 bp, Homo sapiens; identical to SEQ ID NO: 217564
  chr17:9893605-9893704
  hypo

SEQ ID NO: 322014 - DNA, 184 bp, Homo sapiens; identical to SEQ ID NO: 270305
  chr17:10216484-10216668
  hypo

SEQ ID NO: 322015 - DNA, 64 bp, Homo sapiens; identical to SEQ ID NO: 270306
  chr17:10561724-10561788
  hypo

SEQ ID NO: 322016 - DNA, 187 bp, Homo sapiens; identical to SEQ ID NO: 204429
  chr17:10632700-10632887
  hypo

SEQ ID NO: 322017 - DNA, 295 bp, Homo sapiens; identical to SEQ ID NO: 204430
  chr17:10633350-10633645
  hypo

SEQ ID NO: 322018 - DNA, 169 bp, Homo sapiens; identical to SEQ ID NO: 270307
  chr17:11774905-11775074
  hypo

SEQ ID NO: 322019 - DNA, 62 bp, Homo sapiens; identical to SEQ ID NO: 270308
  chr17:12018835-12018897
  hypo

SEQ ID NO: 322020 - DNA, 134 bp, Homo sapiens; identical to SEQ ID NO: 270309
  chr17:12032509-12032643
  hypo

SEQ ID NO: 322021 - DNA, 203 bp, Homo sapiens; identical to SEQ ID NO: 217567
  chr17:12517842-12518045
  hypo

SEQ ID NO: 322022 - DNA, 44 bp, Homo sapiens; identical to SEQ ID NO: 217568
  chr17:12744163-12744207
  hypo

SEQ ID NO: 322023 - DNA, 135 bp, Homo sapiens; identical to SEQ ID NO: 204432
  chr17:12877185-12877320
  hypo

SEQ ID NO: 322024 - DNA, 48 bp, Homo sapiens; identical to SEQ ID NO: 204433
  chr17:12877650-12877698
  hypo

SEQ ID NO: 322025 - DNA, 254 bp, Homo sapiens; identical to SEQ ID NO: 270312
  chr17:12890248-12890502
  hypo

SEQ ID NO: 322026 - DNA, 242 bp, Homo sapiens; identical to SEQ ID NO: 217571
  chr17:12905698-12905940
  hypo

SEQ ID NO: 322027 - DNA, 283 bp, Homo sapiens; identical to SEQ ID NO: 270314
  chr17:13950031-13950314
  hypo

SEQ ID NO: 322028 - DNA, 260 bp, Homo sapiens; identical to SEQ ID NO: 204436
  chr17:14204242-14204502
  hypo

SEQ ID NO: 322029 - DNA, 168 bp, Homo sapiens; identical to SEQ ID NO: 204437
  chr17:14204834-14205002
  hypo

SEQ ID NO: 322030 - DNA, 86 bp, Homo sapiens; identical to SEQ ID NO: 292029
  chr17:14212387-14212473
  hypo

SEQ ID NO: 322031 - DNA, 32 bp, Homo sapiens; identical to SEQ ID NO: 292030
  chr17:14212686-14212718
  hypo

SEQ ID NO: 322032 - DNA, 44 bp, Homo sapiens; identical to SEQ ID NO: 217574
  chr17:14236462-14236506
  hypo

SEQ ID NO: 322033 - DNA, 38 bp, Homo sapiens; identical to SEQ ID NO: 270316
  chr17:14674674-14674712
  hypo

SEQ ID NO: 322034 - DNA, 80 bp, Homo sapiens; identical to SEQ ID NO: 270317
  chr17:14739356-14739436
  hypo

SEQ ID NO: 322035 - DNA, 89 bp, Homo sapiens; identical to SEQ ID NO: 217575
  chr17:15411143-15411232
  hypo

SEQ ID NO: 322036 - DNA, 153 bp, Homo sapiens; identical to SEQ ID NO: 270319
  chr17:15500064-15500217
  hypo

SEQ ID NO: 322037 - DNA, 87 bp, Homo sapiens; identical to SEQ ID NO: 270320
  chr17:15608019-15608106
  hypo

SEQ ID NO: 322038 - DNA, 45 bp, Homo sapiens; identical to SEQ ID NO: 270321
  chr17:15843704-15843749
  hypo

SEQ ID NO: 322039 - DNA, 31 bp, Homo sapiens; identical to SEQ ID NO: 270322
  chr17:15870826-15870857
  hypo

SEQ ID NO: 322040 - DNA, 186 bp, Homo sapiens; identical to SEQ ID NO: 270323
  chr17:15873031-15873217
  hypo

SEQ ID NO: 322041 - DNA, 55 bp, Homo sapiens; identical to SEQ ID NO: 270324
  chr17:15952212-15952267
  hypo

SEQ ID NO: 322042 - DNA, 211 bp, Homo sapiens; identical to SEQ ID NO: 217576
  chr17:15952498-15952709
  hypo

SEQ ID NO: 322043 - DNA, 120 bp, Homo sapiens; identical to SEQ ID NO: 270326
  chr17:16149817-16149937
  hypo

SEQ ID NO: 322044 - DNA, 35 bp, Homo sapiens; identical to SEQ ID NO: 204444
  chr17:16256906-16256941
  hypo

SEQ ID NO: 322045 - DNA, 111 bp, Homo sapiens; identical to SEQ ID NO: 292042
  chr17:16257038-16257149
  hypo

SEQ ID NO: 322046 - DNA, 118 bp, Homo sapiens; identical to SEQ ID NO: 217579
  chr17:16282523-16282641
  hypo

SEQ ID NO: 322047 - DNA, 674 bp, Homo sapiens; identical to SEQ ID NO: 204447
  chr17:16283956-16284630
  hypo

SEQ ID NO: 322048 - DNA, 53 bp, Homo sapiens; identical to SEQ ID NO: 204448
  chr17:16285065-16285118
  hypo

SEQ ID NO: 322049 - DNA, 40 bp, Homo sapiens; identical to SEQ ID NO: 270328
  chr17:16305047-16305087
  hypo

SEQ ID NO: 322050 - DNA, 209 bp, Homo sapiens; identical to SEQ ID NO: 270329
  chr17:16369823-16370032
  hypo

SEQ ID NO: 322051 - DNA, 121 bp, Homo sapiens; identical to SEQ ID NO: 217582
  chr17:16385291-16385412
  hypo

SEQ ID NO: 322052 - DNA, 273 bp, Homo sapiens; identical to SEQ ID NO: 217583
  chr17:16391199-16391472
  hypo

SEQ ID NO: 322053 - DNA, 57 bp, Homo sapiens; identical to SEQ ID NO: 225243
  chr17:16395229-16395286
  hypo

SEQ ID NO: 322054 - DNA, 172 bp, Homo sapiens; identical to SEQ ID NO: 270332
  chr17:16399904-16400076
  hypo

SEQ ID NO: 322055 - DNA, 200 bp, Homo sapiens; identical to SEQ ID NO: 270333
  chr17:16434315-16434515
  hypo

SEQ ID NO: 322056 - DNA, 237 bp, Homo sapiens; identical to SEQ ID NO: 270334
  chr17:16923461-16923698
  hypo

SEQ ID NO: 322057 - DNA, 197 bp, Homo sapiens; identical to SEQ ID NO: 270335
  chr17:16927737-16927934
  hypo

SEQ ID NO: 322058 - DNA, 44 bp, Homo sapiens; identical to SEQ ID NO: 270336
  chr17:16929738-16929782
  hypo

SEQ ID NO: 322059 - DNA, 200 bp, Homo sapiens; identical to SEQ ID NO: 270337
  chr17:16960605-16960805
  hypo

SEQ ID NO: 322060 - DNA, 294 bp, Homo sapiens; identical to SEQ ID NO: 270338
  chr17:16994699-16994993
  hypo

SEQ ID NO: 322061 - DNA, 119 bp, Homo sapiens; identical to SEQ ID NO: 270339
  chr17:17012232-17012351
  hypo

SEQ ID NO: 322062 - DNA, 226 bp, Homo sapiens; identical to SEQ ID NO: 270340
  chr17:17031180-17031406
  hypo

SEQ ID NO: 322063 - DNA, 465 bp, Homo sapiens; identical to SEQ ID NO: 270341
  chr17:17045701-17046166
  hypo

SEQ ID NO: 322064 - DNA, 300 bp, Homo sapiens; identical to SEQ ID NO: 217585
  chr17:17062274-17062574
  hypo

SEQ ID NO: 322065 - DNA, 296 bp, Homo sapiens; identical to SEQ ID NO: 217586
  chr17:17062763-17063059
  hypo

SEQ ID NO: 322066 - DNA, 484 bp, Homo sapiens; identical to SEQ ID NO: 270343
  chr17:17067430-17067914
  hypo

SEQ ID NO: 322067 - DNA, 351 bp, Homo sapiens; identical to SEQ ID NO: 217587
  chr17:17080460-17080811
  hypo

SEQ ID NO: 322068 - DNA, 200 bp, Homo sapiens; identical to SEQ ID NO: 270345
  chr17:17083737-17083937
  hypo

SEQ ID NO: 322069 - DNA, 239 bp, Homo sapiens; identical to SEQ ID NO: 270346
  chr17:17104698-17104937
  hypo

SEQ ID NO: 322070 - DNA, 401 bp, Homo sapiens; identical to SEQ ID NO: 270347
  chr17:17105843-17106244
  hypo

SEQ ID NO: 322071 - DNA, 238 bp, Homo sapiens; identical to SEQ ID NO: 270348
  chr17:17120250-17120488
  hypo

SEQ ID NO: 322072 - DNA, 63 bp, Homo sapiens
  chr17:17123825-17123888
  hypo
aagggaagggtgcacgtcagaagcaaatccaggatgcgaagccaggtctgtctgatgccaaag

SEQ ID NO: 322073 - DNA, 260 bp, Homo sapiens; identical to SEQ ID NO: 270350
  chr17:17124507-17124767
  hypo

SEQ ID NO: 322074 - DNA, 98 bp, Homo sapiens; identical to SEQ ID NO: 270351
  chr17:17142228-17142326
  hypo

SEQ ID NO: 322075 - DNA, 59 bp, Homo sapiens; identical to SEQ ID NO: 270352
  chr17:17223897-17223956
  hypo

SEQ ID NO: 322076 - DNA, 243 bp, Homo sapiens; identical to SEQ ID NO: 270353
  chr17:17224332-17224575
  hypo

SEQ ID NO: 322077 - DNA, 206 bp, Homo sapiens; identical to SEQ ID NO: 270354
  chr17:17250660-17250866
  hypo

SEQ ID NO: 322078 - DNA, 311 bp, Homo sapiens; identical to SEQ ID NO: 217590
  chr17:17251122-17251433
  hypo

SEQ ID NO: 322079 - DNA, 101 bp, Homo sapiens; identical to SEQ ID NO: 270356
  chr17:17255033-17255134
  hypo

SEQ ID NO: 322080 - DNA, 124 bp, Homo sapiens; identical to SEQ ID NO: 270357
  chr17:17280606-17280730
  hypo

SEQ ID NO: 322081 - DNA, 52 bp, Homo sapiens; identical to SEQ ID NO: 292058
  chr17:17287173-17287225
  hypo

SEQ ID NO: 322082 - DNA, 36 bp, Homo sapiens; identical to SEQ ID NO: 270358
  chr17:17303348-17303384
  hypo

SEQ ID NO: 322083 - DNA, 183 bp, Homo sapiens; identical to SEQ ID NO: 270359
  chr17:17325164-17325347
  hypo

SEQ ID NO: 322084 - DNA, 77 bp, Homo sapiens; identical to SEQ ID NO: 217591
  chr17:17330586-17330663
  hypo

SEQ ID NO: 322085 - DNA, 247 bp, Homo sapiens; identical to SEQ ID NO: 270361
  chr17:17344148-17344395
  hypo

SEQ ID NO: 322086 - DNA, 480 bp, Homo sapiens; identical to SEQ ID NO: 292061
  chr17:17399572-17400052
  hypo

SEQ ID NO: 322087 - DNA, 52 bp, Homo sapiens; identical to SEQ ID NO: 217593
  chr17:17402429-17402481
  hypo

SEQ ID NO: 322088 - DNA, 36 bp, Homo sapiens; identical to SEQ ID NO: 270363
  chr17:17431920-17431956
  hypo

SEQ ID NO: 322089 - DNA, 132 bp, Homo sapiens; identical to SEQ ID NO: 217594
  chr17:17447945-17448077
  hypo

SEQ ID NO: 322090 - DNA, 163 bp, Homo sapiens; identical to SEQ ID NO: 270365
  chr17:17488195-17488358
  hypo

SEQ ID NO: 322091 - DNA, 92 bp, Homo sapiens; identical to SEQ ID NO: 270366
  chr17:17590235-17590327
  hypo

SEQ ID NO: 322092 - DNA, 31 bp, Homo sapiens; identical to SEQ ID NO: 270367
  chr17:17590447-17590478
  hypo

SEQ ID NO: 322093 - DNA, 130 bp, Homo sapiens; identical to SEQ ID NO: 270368
  chr17:17602525-17602655
  hypo

SEQ ID NO: 322094 - DNA, 111 bp, Homo sapiens; identical to SEQ ID NO: 270369
  chr17:17614485-17614596
  hypo

SEQ ID NO: 322095 - DNA, 296 bp, Homo sapiens; identical to SEQ ID NO: 270370
  chr17:17615237-17615533
  hypo

SEQ ID NO: 322096 - DNA, 92 bp, Homo sapiens; identical to SEQ ID NO: 217595
  chr17:17618837-17618929
  hypo

SEQ ID NO: 322097 - DNA, 240 bp, Homo sapiens; identical to SEQ ID NO: 217596
  chr17:17637949-17638189
  hypo

SEQ ID NO: 322098 - DNA, 35 bp, Homo sapiens; identical to SEQ ID NO: 270373
  chr17:17697718-17697753
  hypo

SEQ ID NO: 322099 - DNA, 66 bp, Homo sapiens; identical to SEQ ID NO: 270374
  chr17:17717225-17717291
  hypo

SEQ ID NO: 322100 - DNA, 89 bp, Homo sapiens; identical to SEQ ID NO: 217597
  chr17:17717880-17717969
  hypo

SEQ ID NO: 322101 - DNA, 87 bp, Homo sapiens; identical to SEQ ID NO: 270376
  chr17:17748668-17748755
  hypo

SEQ ID NO: 322102 - DNA, 182 bp, Homo sapiens; identical to SEQ ID NO: 270377
  chr17:17881580-17881762
  hypo

SEQ ID NO: 322103 - DNA, 108 bp, Homo sapiens; identical to SEQ ID NO: 270378
  chr17:17908138-17908246
  hypo

SEQ ID NO: 322104 - DNA, 90 bp, Homo sapiens; identical to SEQ ID NO: 217598
  chr17:17910221-17910311
  hypo

SEQ ID NO: 322105 - DNA, 135 bp, Homo sapiens; identical to SEQ ID NO: 217599
  chr17:17910351-17910486
  hypo

SEQ ID NO: 322106 - DNA, 260 bp, Homo sapiens; identical to SEQ ID NO: 217600
  chr17:18024622-18024882
  hypo

SEQ ID NO: 322107 - DNA, 174 bp, Homo sapiens; identical to SEQ ID NO: 270381
  chr17:18026591-18026765
  hypo

SEQ ID NO: 322108 - DNA, 158 bp, Homo sapiens; identical to SEQ ID NO: 270382
  chr17:18083364-18083522
  hypo

SEQ ID NO: 322109 - DNA, 188 bp, Homo sapiens; identical to SEQ ID NO: 217601
  chr17:18139366-18139554
  hypo

SEQ ID NO: 322110 - DNA, 98 bp, Homo sapiens; identical to SEQ ID NO: 270384
  chr17:18144920-18145018
  hypo

SEQ ID NO: 322111 - DNA, 453 bp, Homo sapiens; identical to SEQ ID NO: 270385
  chr17:18149873-18150326
  hypo

SEQ ID NO: 322112 - DNA, 77 bp, Homo sapiens; identical to SEQ ID NO: 270388
  chr17:18167537-18167614
  hypo

SEQ ID NO: 322113 - DNA, 61 bp, Homo sapiens; identical to SEQ ID NO: 270389
  chr17:18267503-18267564
  hypo

SEQ ID NO: 322114 - DNA, 38 bp, Homo sapiens; identical to SEQ ID NO: 270390
  chr17:18278353-18278391
  hypo

SEQ ID NO: 322115 - DNA, 139 bp, Homo sapiens; identical to SEQ ID NO: 270391
  chr17:18399916-18400055
  hypo

SEQ ID NO: 322116 - DNA, 79 bp, Homo sapiens; identical to SEQ ID NO: 270392
  chr17:18527462-18527541
  hypo

SEQ ID NO: 322117 - DNA, 217 bp, Homo sapiens; identical to SEQ ID NO: 270393
  chr17:18677636-18677853
  hypo

SEQ ID NO: 322118 - DNA, 34 bp, Homo sapiens; identical to SEQ ID NO: 270394
  chr17:18760368-18760402
  hypo

SEQ ID NO: 322119 - DNA, 196 bp, Homo sapiens; identical to SEQ ID NO: 270395
  chr17:18853337-18853533
  hypo

SEQ ID NO: 322120 - DNA, 622 bp, Homo sapiens; identical to SEQ ID NO: 270396
  chr17:18854648-18855270
  hypo

SEQ ID NO: 322121 - DNA, 64 bp, Homo sapiens; identical to SEQ ID NO: 270397
  chr17:18855509-18855573
  hypo

SEQ ID NO: 322122 - DNA, 169 bp, Homo sapiens; identical to SEQ ID NO: 270398
  chr17:18885752-18885921
  hypo

SEQ ID NO: 322123 - DNA, 94 bp, Homo sapiens; identical to SEQ ID NO: 270399
  chr17:18895396-18895490
  hypo

SEQ ID NO: 322124 - DNA, 190 bp, Homo sapiens; identical to SEQ ID NO: 217603
  chr17:18918297-18918487
  hypo

SEQ ID NO: 322125 - DNA, 328 bp, Homo sapiens; identical to SEQ ID NO: 204459
  chr17:19140730-19141058
  hypo

SEQ ID NO: 322126 - DNA, 88 bp, Homo sapiens; identical to SEQ ID NO: 270401
  chr17:19203399-19203487
  hypo

SEQ ID NO: 322127 - DNA, 79 bp, Homo sapiens; identical to SEQ ID NO: 217605
  chr17:19211655-19211734
  hypo

SEQ ID NO: 322128 - DNA, 216 bp, Homo sapiens
  chr17:19211764-19211980
  hypo
cctgtctgtgcatgcatgtaagcctccacccaacaggtgtttgtcagccaggggtgagtgctacaagggagaggtgcagaggtgcagagtctgacacagcatcaggatggaggggaaggaccaggtccgggaagccgagctctgactacaaaagaggaggtgggtgcgctgagggaacagcctgcacggagacccgggaggaggacagggcaagga

SEQ ID NO: 322129 - DNA, 102 bp, Homo sapiens; identical to SEQ ID NO: 217606
  chr17:19233948-19234050
  hypo

SEQ ID NO: 322130 - DNA, 49 bp, Homo sapiens; identical to SEQ ID NO: 270404
  chr17:19234671-19234720
  hypo

SEQ ID NO: 322131 - DNA, 424 bp, Homo sapiens; identical to SEQ ID NO: 225251
  chr17:19282073-19282497
  hypo

SEQ ID NO: 322132 - DNA, 120 bp, Homo sapiens; identical to SEQ ID NO: 217608
  chr17:19513141-19513261
  hypo

SEQ ID NO: 322133 - DNA, 268 bp, Homo sapiens; identical to SEQ ID NO: 270406
  chr17:19606607-19606875
  hypo

SEQ ID NO: 322134 - DNA, 90 bp, Homo sapiens; identical to SEQ ID NO: 270407
  chr17:19616225-19616315
  hypo

SEQ ID NO: 322135 - DNA, 401 bp, Homo sapiens; identical to SEQ ID NO: 270408
  chr17:19617063-19617464
  hypo

SEQ ID NO: 322136 - DNA, 77 bp, Homo sapiens; identical to SEQ ID NO: 217610
  chr17:19618657-19618734
  hypo

SEQ ID NO: 322137 - DNA, 148 bp, Homo sapiens; identical to SEQ ID NO: 270410
  chr17:19623343-19623491
  hypo

SEQ ID NO: 322138 - DNA, 65 bp, Homo sapiens; identical to SEQ ID NO: 217611
  chr17:19641468-19641533
  hypo

SEQ ID NO: 322139 - DNA, 58 bp, Homo sapiens; identical to SEQ ID NO: 270412
  chr17:19642884-19642942
  hypo

SEQ ID NO: 322140 - DNA, 37 bp, Homo sapiens; identical to SEQ ID NO: 270413
  chr17:19643641-19643678
  hypo

SEQ ID NO: 322141 - DNA, 174 bp, Homo sapiens; identical to SEQ ID NO: 270414
  chr17:19644760-19644934
  hypo

SEQ ID NO: 322142 - DNA, 374 bp, Homo sapiens; identical to SEQ ID NO: 270415
  chr17:19646480-19646854
  hypo

SEQ ID NO: 322143 - DNA, 36 bp, Homo sapiens; identical to SEQ ID NO: 270416
  chr17:19647412-19647448
  hypo

SEQ ID NO: 322144 - DNA, 88 bp, Homo sapiens; identical to SEQ ID NO: 270417
  chr17:19650045-19650133
  hypo

SEQ ID NO: 322145 - DNA, 44 bp, Homo sapiens; identical to SEQ ID NO: 270418
  chr17:19686487-19686531
  hypo

SEQ ID NO: 322146 - DNA, 104 bp, Homo sapiens; identical to SEQ ID NO: 217612
  chr17:19687003-19687107
  hypo

SEQ ID NO: 322147 - DNA, 120 bp, Homo sapiens; identical to SEQ ID NO: 270420
  chr17:19736607-19736727
  hypo

SEQ ID NO: 322148 - DNA, 116 bp, Homo sapiens; identical to SEQ ID NO: 217613
  chr17:19771712-19771828
  hypo

SEQ ID NO: 322149 - DNA, 71 bp, Homo sapiens; identical to SEQ ID NO: 270423
  chr17:19772163-19772234
  hypo

SEQ ID NO: 322150 - DNA, 45 bp, Homo sapiens; identical to SEQ ID NO: 270424
  chr17:19773273-19773318
  hypo

SEQ ID NO: 322151 - DNA, 89 bp, Homo sapiens; identical to SEQ ID NO: 217614
  chr17:19842322-19842411
  hypo

SEQ ID NO: 322152 - DNA, 93 bp, Homo sapiens; identical to SEQ ID NO: 270426
  chr17:19861688-19861781
  hypo

SEQ ID NO: 322153 - DNA, 120 bp, Homo sapiens; identical to SEQ ID NO: 270428
  chr17:19902538-19902658
  hypo

SEQ ID NO: 322154 - DNA, 100 bp, Homo sapiens; identical to SEQ ID NO: 270429
  chr17:19989101-19989201
  hypo

SEQ ID NO: 322155 - DNA, 172 bp, Homo sapiens; identical to SEQ ID NO: 217615
  chr17:20013842-20014014
  hypo

SEQ ID NO: 322156 - DNA, 246 bp, Homo sapiens; identical to SEQ ID NO: 204463
  chr17:20059180-20059426
  hypo

SEQ ID NO: 322157 - DNA, 120 bp, Homo sapiens; identical to SEQ ID NO: 270431
  chr17:20065370-20065490
  hypo

SEQ ID NO: 322158 - DNA, 34 bp, Homo sapiens; identical to SEQ ID NO: 270432
  chr17:20065730-20065764
  hypo

SEQ ID NO: 322159 - DNA, 83 bp, Homo sapiens; identical to SEQ ID NO: 217617
  chr17:20087136-20087219
  hypo

SEQ ID NO: 322160 - DNA, 377 bp, Homo sapiens; identical to SEQ ID NO: 270434
  chr17:20107950-20108327
  hypo

SEQ ID NO: 322161 - DNA, 78 bp, Homo sapiens; identical to SEQ ID NO: 270435
  chr17:20141015-20141093
  hypo

SEQ ID NO: 322162 - DNA, 42 bp, Homo sapiens; identical to SEQ ID NO: 270436
  chr17:20163532-20163574
  hypo

SEQ ID NO: 322163 - DNA, 76 bp, Homo sapiens; identical to SEQ ID NO: 217618
  chr17:20170298-20170374
  hypo

SEQ ID NO: 322164 - DNA, 137 bp, Homo sapiens; identical to SEQ ID NO: 270438
  chr17:20190317-20190454
  hypo

SEQ ID NO: 322165 - DNA, 33 bp, Homo sapiens; identical to SEQ ID NO: 270439
  chr17:20220061-20220094
  hypo

SEQ ID NO: 322166 - DNA, 82 bp, Homo sapiens; identical to SEQ ID NO: 270440
  chr17:20467688-20467770
  hypo

SEQ ID NO: 322167 - DNA, 153 bp, Homo sapiens; identical to SEQ ID NO: 270441
  chr17:20805561-20805714
  hypo

SEQ ID NO: 322168 - DNA, 187 bp, Homo sapiens; identical to SEQ ID NO: 270444
  chr17:20841354-20841541
  hypo

SEQ ID NO: 322169 - DNA, 251 bp, Homo sapiens; identical to SEQ ID NO: 270445
  chr17:20903659-20903910
  hypo

SEQ ID NO: 322170 - DNA, 133 bp, Homo sapiens; identical to SEQ ID NO: 217619
  chr17:20905669-20905802
  hypo

SEQ ID NO: 322171 - DNA, 439 bp, Homo sapiens; identical to SEQ ID NO: 270447
  chr17:20908044-20908483
  hypo

SEQ ID NO: 322172 - DNA, 195 bp, Homo sapiens; identical to SEQ ID NO: 217620
  chr17:20914087-20914282
  hypo

SEQ ID NO: 322173 - DNA, 185 bp, Homo sapiens; identical to SEQ ID NO: 217621
  chr17:20919060-20919245
  hypo

SEQ ID NO: 322174 - DNA, 130 bp, Homo sapiens; identical to SEQ ID NO: 270450
  chr17:20920703-20920833
  hypo

SEQ ID NO: 322175 - DNA, 94 bp, Homo sapiens; identical to SEQ ID NO: 270451
  chr17:20950574-20950668
  hypo

SEQ ID NO: 322176 - DNA, 43 bp, Homo sapiens; identical to SEQ ID NO: 270452
  chr17:21100034-21100077
  hypo

SEQ ID NO: 322177 - DNA, 246 bp, Homo sapiens
  chr17:21104115-21104361
  hypo
ggcaggcacacctggctgcggtgcagaggagagtcatggggagctgagccacctggccattggccgtaatatgggagtgacgagtgaagacattcataacaagccaccccagaacctcagcccagcatgaaggtaactccctccagcctccttcaaagatgggagcaattccaagtgaaggatggtggaaatcggactgtcgggaaacttcaaggaaaaagaacaggcaatcgtagttcttcctac

SEQ ID NO: 322178 - DNA, 41 bp, Homo sapiens; identical to SEQ ID NO: 270454
  chr17:21128221-21128262
  hypo

SEQ ID NO: 322179 - DNA, 83 bp, Homo sapiens; identical to SEQ ID NO: 217622
  chr17:21160808-21160891
  hypo

SEQ ID NO: 322180 - DNA, 87 bp, Homo sapiens; identical to SEQ ID NO: 270456
  chr17:21204236-21204323
  hypo

SEQ ID NO: 322181 - DNA, 47 bp, Homo sapiens; identical to SEQ ID NO: 217623
  chr17:21221775-21221822
  hypo

SEQ ID NO: 322182 - DNA, 181 bp, Homo sapiens; identical to SEQ ID NO: 217624
  chr17:21793592-21793773
  hypo

SEQ ID NO: 322183 - DNA, 215 bp, Homo sapiens; identical to SEQ ID NO: 270459
  chr17:21832214-21832429
  hypo

SEQ ID NO: 322184 - DNA, 211 bp, Homo sapiens; identical to SEQ ID NO: 270460
  chr17:25336166-25336377
  hypo

SEQ ID NO: 322185 - DNA, 130 bp, Homo sapiens; identical to SEQ ID NO: 270461
  chr17:25485413-25485543
  hypo

SEQ ID NO: 322186 - DNA, 120 bp, Homo sapiens; identical to SEQ ID NO: 270462
  chr17:25619836-25619956
  hypo

SEQ ID NO: 322187 - DNA, 317 bp, Homo sapiens
  chr17:25620256-25620573
  hypo
aaaaaaagcggctatgcaacactctactctgtcccatgaatatctgccacatatttgaattcccagtcttatacgccccaggcctttgcaatgtttagggtccacacgagaagccattaaaatgcaaatacgtcatctgtgaccgggaaccaagctggcatctagcagatactgacacatttatcagtctgatgtgtggacaactaggtgcctcccagaggccttcaggtaaggtggaggaagggccaattctgagctgacacagtgggatccatcttggccaggacagtgggatccatcttggccaggacaaaggc

SEQ ID NO: 322188 - DNA, 72 bp, Homo sapiens; identical to SEQ ID NO: 270465
  chr17:25680101-25680173
  hypo

SEQ ID NO: 322189 - DNA, 118 bp, Homo sapiens; identical to SEQ ID NO: 270466
  chr17:25748141-25748259
  hypo

SEQ ID NO: 322190 - DNA, 127 bp, Homo sapiens; identical to SEQ ID NO: 270467
  chr17:25829641-25829768
  hypo

SEQ ID NO: 322191 - DNA, 166 bp, Homo sapiens; identical to SEQ ID NO: 270468
  chr17:25842424-25842590
  hypo

SEQ ID NO: 322192 - DNA, 210 bp, Homo sapiens
  chr17:25878807-25879017
  hypo
tgcctccagcaccacggtccaggccgctgtcacctcctgcagaatctctgcagtggcacctcgccccttgcattccattttccacccagcagccagggtgctcacctagaaaggtgacttggatcccatcctttttcagtgcttcctgtttccttcaggataaacgccagatgccttccttgatctggcctctctcgcctctgtttgctc

SEQ ID NO: 322193 - DNA, 354 bp, Homo sapiens
  chr17:25879047-25879401
  hypo
tttgcacttgctccccacttccctggagtgctctgcccatgactcatcccttgaatatttttctggtgttgagtgttgtcaccgcctccaggcagtcgtccctggtgatgtgatctaaagatcatcccctgcccatcattctcgcctgcgcacctgagtttattttctcaatgacactgaccactttctggagtgacctaaccgatttgttgtctgtggtctgtctgctccccctgggatgcgagcaccatgagacacggccttgctgtttgggtttgtttgccacaaaatccccattgagtgtcgggcccaatatggcagttgcttggttgcgacagatataaaaataaatac

SEQ ID NO: 322194 - DNA, 173 bp, Homo sapiens; identical to SEQ ID NO: 217628
  chr17:25904461-25904634
  hypo

SEQ ID NO: 322195 - DNA, 115 bp, Homo sapiens
  chr17:25907595-25907710
  hypo
cacggtgctgagatcgatgttttcaattcccatcccaccactttcttagctctctggccttgggcagtgtctgtggcctccctgagtcacagtgacctccactgtacactgggga

SEQ ID NO: 322196 - DNA, 60 bp, Homo sapiens; identical to SEQ ID NO: 217630
  chr17:25931232-25931292
  hypo

SEQ ID NO: 322197 - DNA, 83 bp, Homo sapiens; identical to SEQ ID NO: 217631
  chr17:25931759-25931842
  hypo

SEQ ID NO: 322198 - DNA, 34 bp, Homo sapiens; identical to SEQ ID NO: 217632
  chr17:25933867-25933901
  hypo

SEQ ID NO: 322199 - DNA, 228 bp, Homo sapiens; identical to SEQ ID NO: 217633
  chr17:25934804-25935032
  hypo

SEQ ID NO: 322200 - DNA, 322 bp, Homo sapiens; identical to SEQ ID NO: 270477
  chr17:25936170-25936492
  hypo

SEQ ID NO: 322201 - DNA, 97 bp, Homo sapiens; identical to SEQ ID NO: 217634
  chr17:25948172-25948269
  hypo

SEQ ID NO: 322202 - DNA, 110 bp, Homo sapiens; identical to SEQ ID NO: 270479
  chr17:25970770-25970880
  hypo

SEQ ID NO: 322203 - DNA, 118 bp, Homo sapiens; identical to SEQ ID NO: 270480
  chr17:25971187-25971305
  hypo

SEQ ID NO: 322204 - DNA, 48 bp, Homo sapiens; identical to SEQ ID NO: 292097
  chr17:26120916-26120964
  hypo

SEQ ID NO: 322205 - DNA, 80 bp, Homo sapiens; identical to SEQ ID NO: 217635
  chr17:26263499-26263579
  hypo

SEQ ID NO: 322206 - DNA, 39 bp, Homo sapiens; identical to SEQ ID NO: 270482
  chr17:26530852-26530891
  hypo

SEQ ID NO: 322207 - DNA, 121 bp, Homo sapiens; identical to SEQ ID NO: 270483
  chr17:26594094-26594215
  hypo

SEQ ID NO: 322208 - DNA, 327 bp, Homo sapiens; identical to SEQ ID NO: 270484
  chr17:26851581-26851908
  hypo

SEQ ID NO: 322209 - DNA, 77 bp, Homo sapiens; identical to SEQ ID NO: 270485
  chr17:26862778-26862855
  hypo

SEQ ID NO: 322210 - DNA, 101 bp, Homo sapiens; identical to SEQ ID NO: 217636
  chr17:26864424-26864525
  hypo

SEQ ID NO: 322211 - DNA, 332 bp, Homo sapiens; identical to SEQ ID NO: 204469
  chr17:26925694-26926026
  hypo

SEQ ID NO: 322212 - DNA, 342 bp, Homo sapiens; identical to SEQ ID NO: 11045
  chr17:26926083-26926425
  hypo

SEQ ID NO: 322213 - DNA, 135 bp, Homo sapiens; identical to SEQ ID NO: 217639
  chr17:26959955-26960090
  hypo

SEQ ID NO: 322214 - DNA, 238 bp, Homo sapiens; identical to SEQ ID NO: 217640
  chr17:26960859-26961097
  hypo

SEQ ID NO: 322215 - DNA, 68 bp, Homo sapiens; identical to SEQ ID NO: 217641
  chr17:26961702-26961770
  hypo

SEQ ID NO: 322216 - DNA, 191 bp, Homo sapiens; identical to SEQ ID NO: 217642
  chr17:26962146-26962337
  hypo

SEQ ID NO: 322217 - DNA, 129 bp, Homo sapiens; identical to SEQ ID NO: 217643
  chr17:27011597-27011726
  hypo

SEQ ID NO: 322218 - DNA, 64 bp, Homo sapiens; identical to SEQ ID NO: 270492
  chr17:27028074-27028138
  hypo

SEQ ID NO: 322219 - DNA, 283 bp, Homo sapiens
  chr17:27056869-27057152
  hypo
gagatttaaggccaagacttgaggaatgaggaccagtagtctgcaggtgaagggagaacttttcaggcaaaggaaatagcgtatgtgaaatgtctcacatgggaaaacagagcattcaagaaaccgagaaagactagtaatagttggaatgtagtgggcaaggtagagaatggtataaaatgtaattgtcgagggcggggactagattatggcctgataacctgagataaaaggttcatttgccacaaacggttttgttttgtttttgtttttgtttttgaga

SEQ ID NO: 322220 - DNA, 176 bp, Homo sapiens; identical to SEQ ID NO: 270494
  chr17:27074939-27075115
  hypo

SEQ ID NO: 322221 - DNA, 128 bp, Homo sapiens; identical to SEQ ID NO: 270495
  chr17:27075316-27075444
  hypo

SEQ ID NO: 322222 - DNA, 174 bp, Homo sapiens
  chr17:27085331-27085505
  hypo
tgggatcgggggctcggttgccaggggctcggtgggccttgctcagcatggccaggctctgttctcggaagcaggcctgttggaaatccccacttaggtaatccactgtttgcatcaagctgttctggcttgccactggaccgcccccggtccctgctcggtagtgggccccgg

SEQ ID NO: 322223 - DNA, 59 bp, Homo sapiens
  chr17:27085535-27085594
  hypo
tgggctgcccaccgtggaacggcatggcaaggtcctgagaccccgagctgtcgctattg

SEQ ID NO: 322224 - DNA, 35 bp, Homo sapiens; identical to SEQ ID NO: 270497
  chr17:27086030-27086065
  hypo

SEQ ID NO: 322225 - DNA, 35 bp, Homo sapiens; identical to SEQ ID NO: 217645
  chr17:27138132-27138167
  hypo

SEQ ID NO: 322226 - DNA, 96 bp, Homo sapiens; identical to SEQ ID NO: 270499
  chr17:27171310-27171406
  hypo

SEQ ID NO: 322227 - DNA, 38 bp, Homo sapiens; identical to SEQ ID NO: 270500
  chr17:27179810-27179848
  hypo

SEQ ID NO: 322228 - DNA, 206 bp, Homo sapiens; identical to SEQ ID NO: 217646
  chr17:27207673-27207879
  hypo

SEQ ID NO: 322229 - DNA, 492 bp, Homo sapiens; identical to SEQ ID NO: 270503
  chr17:27228011-27228503
  hypo

SEQ ID NO: 322230 - DNA, 65 bp, Homo sapiens; identical to SEQ ID NO: 292115
  chr17:27332301-27332366
  hypo

SEQ ID NO: 322231 - DNA, 136 bp, Homo sapiens; identical to SEQ ID NO: 292116
  chr17:27332733-27332869
  hypo

SEQ ID NO: 322232 - DNA, 87 bp, Homo sapiens; identical to SEQ ID NO: 292117
  chr17:27333201-27333288
  hypo

SEQ ID NO: 322233 - DNA, 65 bp, Homo sapiens; identical to SEQ ID NO: 270504
  chr17:27393154-27393219
  hypo

SEQ ID NO: 322234 - DNA, 532 bp, Homo sapiens; identical to SEQ ID NO: 217647
  chr17:27406521-27407053
  hypo

SEQ ID NO: 322235 - DNA, 69 bp, Homo sapiens; identical to SEQ ID NO: 217648
  chr17:27407262-27407331
  hypo

SEQ ID NO: 322236 - DNA, 66 bp, Homo sapiens; identical to SEQ ID NO: 217649
  chr17:27407717-27407783
  hypo

SEQ ID NO: 322237 - DNA, 165 bp, Homo sapiens; identical to SEQ ID NO: 217650
  chr17:27411026-27411191
  hypo

SEQ ID NO: 322238 - DNA, 130 bp, Homo sapiens; identical to SEQ ID NO: 217651
  chr17:27411533-27411663
  hypo

SEQ ID NO: 322239 - DNA, 305 bp, Homo sapiens; identical to SEQ ID NO: 217652
  chr17:27411693-27411998
  hypo

SEQ ID NO: 322240 - DNA, 156 bp, Homo sapiens; identical to SEQ ID NO: 270510
  chr17:27412341-27412497
  hypo

SEQ ID NO: 322241 - DNA, 36 bp, Homo sapiens; identical to SEQ ID NO: 270512
  chr17:27421183-27421219
  hypo

SEQ ID NO: 322242 - DNA, 108 bp, Homo sapiens; identical to SEQ ID NO: 217653
  chr17:27421468-27421576
  hypo

SEQ ID NO: 322243 - DNA, 54 bp, Homo sapiens; identical to SEQ ID NO: 204475
  chr17:27893141-27893195
  hypo

SEQ ID NO: 322244 - DNA, 402 bp, Homo sapiens; identical to SEQ ID NO: 53841
  chr17:27893344-27893746
  hypo

SEQ ID NO: 322245 - DNA, 133 bp, Homo sapiens; identical to SEQ ID NO: 217656
  chr17:27902814-27902947
  hypo

SEQ ID NO: 322246 - DNA, 199 bp, Homo sapiens; identical to SEQ ID NO: 217657
  chr17:27903154-27903353
  hypo

SEQ ID NO: 322247 - DNA, 36 bp, Homo sapiens; identical to SEQ ID NO: 270518
  chr17:27908746-27908782
  hypo

SEQ ID NO: 322248 - DNA, 139 bp, Homo sapiens
  chr17:27909036-27909175
  hypo
tgccttggcagccacgtgcagaggtgtggtgcccttctctgggtggaagaagttggcctgggcacccagggagagcaggcgcagacatgtctccaggttgcctgtccgcacgctcgagtgtagttgctaagaggagcag

SEQ ID NO: 322249 - DNA, 178 bp, Homo sapiens
  chr17:27909205-27909383
  hypo
cgcacctccccacccacaagctgcaccctggctgcccctgggacacctagcagctccaaggaggcctgcccaaaccagactatgtcgggaggacagaggcttcccgctaggggttaatgccaattaataaacgctgccgtcagtcaccatctaccacgtgtgctgtgtgccctgctta

SEQ ID NO: 322250 - DNA, 723 bp, Homo sapiens; identical to SEQ ID NO: 270520
  chr17:27934686-27935409
  hypo

SEQ ID NO: 322251 - DNA, 95 bp, Homo sapiens; identical to SEQ ID NO: 217659
  chr17:27939247-27939342
  hypo

SEQ ID NO: 322252 - DNA, 903 bp, Homo sapiens; identical to SEQ ID NO: 292123
  chr17:27942512-27943415
  hypo

SEQ ID NO: 322253 - DNA, 243 bp, Homo sapiens; identical to SEQ ID NO: 217661
  chr17:28299376-28299619
  hypo

SEQ ID NO: 322254 - DNA, 242 bp, Homo sapiens; identical to SEQ ID NO: 204481
  chr17:28563016-28563258
  hypo

SEQ ID NO: 322255 - DNA, 176 bp, Homo sapiens
  chr17:28715809-28715985
  hypo
cttccctgttgccctggggctaaggagtggcccggagctgattgcgggcctggggccaggctgtcaggagtgtcaggctgggaggtcaccccacgtgtggcggacactggggacttggccccaagtggcccgcgcagagcctcctcccgagcccaggaacccgggacccttagtgg

SEQ ID NO: 322256 - DNA, 35 bp, Homo sapiens; identical to SEQ ID NO: 270524
  chr17:28740014-28740049
  hypo

SEQ ID NO: 322257 - DNA, 240 bp, Homo sapiens; identical to SEQ ID NO: 270525
  chr17:29232004-29232244
  hypo

SEQ ID NO: 322258 - DNA, 85 bp, Homo sapiens
  chr17:29234397-29234482
  hypo
ctaggagatgtaaggagagtggaaagaaaagaattatttctggaagatggggagccagttttgtgaaaaacggggaattcaggag

SEQ ID NO: 322259 - DNA, 33 bp, Homo sapiens; identical to SEQ ID NO: 217663
  chr17:29247879-29247912
  hypo

SEQ ID NO: 322260 - DNA, 347 bp, Homo sapiens; identical to SEQ ID NO: 292132
  chr17:29248940-29249287
  hypo

SEQ ID NO: 322261 - DNA, 488 bp, Homo sapiens; identical to SEQ ID NO: 128356
  chr17:29421899-29422387
  hypo

SEQ ID NO: 322262 - DNA, 144 bp, Homo sapiens; identical to SEQ ID NO: 204486
  chr17:29483000-29483144
  hypo

SEQ ID NO: 322263 - DNA, 91 bp, Homo sapiens; identical to SEQ ID NO: 204487
  chr17:29486027-29486118
  hypo

SEQ ID NO: 322264 - DNA, 191 bp, Homo sapiens; identical to SEQ ID NO: 204488
  chr17:29490203-29490394
  hypo

SEQ ID NO: 322265 - DNA, 109 bp, Homo sapiens; identical to SEQ ID NO: 204489
  chr17:29496908-29497017
  hypo

SEQ ID NO: 322266 - DNA, 68 bp, Homo sapiens; identical to SEQ ID NO: 204490
  chr17:29508439-29508507
  hypo

SEQ ID NO: 322267 - DNA, 46 bp, Homo sapiens; identical to SEQ ID NO: 204491
  chr17:29508715-29508761
  hypo

SEQ ID NO: 322268 - DNA, 163 bp, Homo sapiens; identical to SEQ ID NO: 204492
  chr17:29509520-29509683
  hypo

SEQ ID NO: 322269 - DNA, 174 bp, Homo sapiens; identical to SEQ ID NO: 204493
  chr17:29527439-29527613
  hypo

SEQ ID NO: 322270 - DNA, 123 bp, Homo sapiens; identical to SEQ ID NO: 204494
  chr17:29528054-29528177
  hypo

SEQ ID NO: 322271 - DNA, 75 bp, Homo sapiens; identical to SEQ ID NO: 204495
  chr17:29528428-29528503
  hypo

SEQ ID NO: 322272 - DNA, 140 bp, Homo sapiens; identical to SEQ ID NO: 204496
  chr17:29533249-29533389
  hypo

SEQ ID NO: 322273 - DNA, 59 bp, Homo sapiens; identical to SEQ ID NO: 204497
  chr17:29541468-29541527
  hypo

SEQ ID NO: 322274 - DNA, 47 bp, Homo sapiens; identical to SEQ ID NO: 204498
  chr17:29541556-29541603
  hypo

SEQ ID NO: 322275 - DNA, 136 bp, Homo sapiens; identical to SEQ ID NO: 204499
  chr17:29546009-29546145
  hypo

SEQ ID NO: 322276 - DNA, 80 bp, Homo sapiens; identical to SEQ ID NO: 204500
  chr17:29548867-29548947
  hypo

SEQ ID NO: 322277 - DNA, 124 bp, Homo sapiens; identical to SEQ ID NO: 204501
  chr17:29550461-29550585
  hypo

SEQ ID NO: 322278 - DNA, 156 bp, Homo sapiens; identical to SEQ ID NO: 204502
  chr17:29552112-29552268
  hypo

SEQ ID NO: 322279 - DNA, 250 bp, Homo sapiens; identical to SEQ ID NO: 204503
  chr17:29553452-29553702
  hypo

SEQ ID NO: 322280 - DNA, 74 bp, Homo sapiens; identical to SEQ ID NO: 204504
  chr17:29554235-29554309
  hypo

SEQ ID NO: 322281 - DNA, 84 bp, Homo sapiens; identical to SEQ ID NO: 204505
  chr17:29554540-29554624
  hypo

SEQ ID NO: 322282 - DNA, 441 bp, Homo sapiens; identical to SEQ ID NO: 204506
  chr17:29556042-29556483
  hypo

SEQ ID NO: 322283 - DNA, 140 bp, Homo sapiens; identical to SEQ ID NO: 204507
  chr17:29556852-29556992
  hypo

SEQ ID NO: 322284 - DNA, 123 bp, Homo sapiens; identical to SEQ ID NO: 204508
  chr17:29557277-29557400
  hypo

SEQ ID NO: 322285 - DNA, 84 bp, Homo sapiens; identical to SEQ ID NO: 204509
  chr17:29557859-29557943
  hypo

SEQ ID NO: 322286 - DNA, 117 bp, Homo sapiens; identical to SEQ ID NO: 204510
  chr17:29559090-29559207
  hypo

SEQ ID NO: 322287 - DNA, 514 bp, Homo sapiens; identical to SEQ ID NO: 204511
  chr17:29559717-29560231
  hypo

SEQ ID NO: 322288 - DNA, 104 bp, Homo sapiens; identical to SEQ ID NO: 204512
  chr17:29562628-29562732
  hypo

SEQ ID NO: 322289 - DNA, 278 bp, Homo sapiens; identical to SEQ ID NO: 204513
  chr17:29562761-29563039
  hypo

SEQ ID NO: 322290 - DNA, 136 bp, Homo sapiens; identical to SEQ ID NO: 204514
  chr17:29576001-29576137
  hypo

SEQ ID NO: 322291 - DNA, 63 bp, Homo sapiens; identical to SEQ ID NO: 204515
  chr17:29579955-29580018
  hypo

SEQ ID NO: 322292 - DNA, 159 bp, Homo sapiens; identical to SEQ ID NO: 204516
  chr17:29585361-29585520
  hypo

SEQ ID NO: 322293 - DNA, 98 bp, Homo sapiens; identical to SEQ ID NO: 204517
  chr17:29586049-29586147
  hypo

SEQ ID NO: 322294 - DNA, 147 bp, Homo sapiens; identical to SEQ ID NO: 204518
  chr17:29587386-29587533
  hypo

SEQ ID NO: 322295 - DNA, 147 bp, Homo sapiens; identical to SEQ ID NO: 204519
  chr17:29588728-29588875
  hypo

SEQ ID NO: 322296 - DNA, 111 bp, Homo sapiens; identical to SEQ ID NO: 204520
  chr17:29592246-29592357
  hypo

SEQ ID NO: 322297 - DNA, 433 bp, Homo sapiens; identical to SEQ ID NO: 204521
  chr17:29652837-29653270
  hypo

SEQ ID NO: 322298 - DNA, 341 bp, Homo sapiens; identical to SEQ ID NO: 204522
  chr17:29654516-29654857
  hypo

SEQ ID NO: 322299 - DNA, 203 bp, Homo sapiens; identical to SEQ ID NO: 204523
  chr17:29657313-29657516
  hypo

SEQ ID NO: 322300 - DNA, 194 bp, Homo sapiens; identical to SEQ ID NO: 204524
  chr17:29661855-29662049
  hypo

SEQ ID NO: 322301 - DNA, 582 bp, Homo sapiens; identical to SEQ ID NO: 204525
  chr17:29663350-29663932
  hypo

SEQ ID NO: 322302 - DNA, 215 bp, Homo sapiens; identical to SEQ ID NO: 204526
  chr17:29664385-29664600
  hypo

SEQ ID NO: 322303 - DNA, 321 bp, Homo sapiens; identical to SEQ ID NO: 204527
  chr17:29664836-29665157
  hypo

SEQ ID NO: 322304 - DNA, 102 bp, Homo sapiens; identical to SEQ ID NO: 204528
  chr17:29665721-29665823
  hypo

SEQ ID NO: 322305 - DNA, 141 bp, Homo sapiens; identical to SEQ ID NO: 204529
  chr17:29667522-29667663
  hypo

SEQ ID NO: 322306 - DNA, 127 bp, Homo sapiens; identical to SEQ ID NO: 204530
  chr17:29670026-29670153
  hypo

SEQ ID NO: 322307 - DNA, 141 bp, Homo sapiens; identical to SEQ ID NO: 204531
  chr17:29676130-29676271
  hypo

SEQ ID NO: 322308 - DNA, 142 bp, Homo sapiens; identical to SEQ ID NO: 204532
  chr17:29677200-29677342
  hypo

SEQ ID NO: 322309 - DNA, 158 bp, Homo sapiens; identical to SEQ ID NO: 204533
  chr17:29679274-29679432
  hypo

SEQ ID NO: 322310 - DNA, 123 bp, Homo sapiens; identical to SEQ ID NO: 204534
  chr17:29683477-29683600
  hypo

SEQ ID NO: 322311 - DNA, 410 bp, Homo sapiens; identical to SEQ ID NO: 204535
  chr17:29683977-29684387
  hypo

SEQ ID NO: 322312 - DNA, 143 bp, Homo sapiens; identical to SEQ ID NO: 204536
  chr17:29685497-29685640
  hypo

SEQ ID NO: 322313 - DNA, 47 bp, Homo sapiens; identical to SEQ ID NO: 204537
  chr17:29685986-29686033
  hypo

SEQ ID NO: 322314 - DNA, 217 bp, Homo sapiens; identical to SEQ ID NO: 204538
  chr17:29687504-29687721
  hypo

SEQ ID NO: 322315 - DNA, 3665 bp, Homo sapiens; identical to SEQ ID NO: 204539
  chr17:29701030-29704695
  hypo

SEQ ID NO: 322316 - DNA, 133 bp, Homo sapiens; identical to SEQ ID NO: 270528
  chr17:29773385-29773518
  hypo

SEQ ID NO: 322317 - DNA, 149 bp, Homo sapiens; identical to SEQ ID NO: 270529
  chr17:29855419-29855568
  hypo

SEQ ID NO: 322318 - DNA, 36 bp, Homo sapiens; identical to SEQ ID NO: 270531
  chr17:30301485-30301521
  hypo

SEQ ID NO: 322319 - DNA, 71 bp, Homo sapiens; identical to SEQ ID NO: 217719
  chr17:30333041-30333112
  hypo

SEQ ID NO: 322320 - DNA, 308 bp, Homo sapiens; identical to SEQ ID NO: 270533
  chr17:30347557-30347865
  hypo

SEQ ID NO: 322321 - DNA, 241 bp, Homo sapiens; identical to SEQ ID NO: 270534
  chr17:30348356-30348597
  hypo

SEQ ID NO: 322322 - DNA, 149 bp, Homo sapiens; identical to SEQ ID NO: 217720
  chr17:30529221-30529370
  hypo

SEQ ID NO: 322323 - DNA, 40 bp, Homo sapiens; identical to SEQ ID NO: 270536
  chr17:30582939-30582979
  hypo

SEQ ID NO: 322324 - DNA, 1559 bp, Homo sapiens; identical to SEQ ID NO: 292193
  chr17:30592474-30594033
  hypo

SEQ ID NO: 322325 - DNA, 32 bp, Homo sapiens; identical to SEQ ID NO: 270537
  chr17:30684634-30684666
  hypo

SEQ ID NO: 322326 - DNA, 154 bp, Homo sapiens; identical to SEQ ID NO: 217722
  chr17:30804369-30804523
  hypo

SEQ ID NO: 322327 - DNA, 89 bp, Homo sapiens; identical to SEQ ID NO: 204542
  chr17:30813422-30813511
  hypo

SEQ ID NO: 322328 - DNA, 116 bp, Homo sapiens; identical to SEQ ID NO: 270540
  chr17:30823891-30824007
  hypo

SEQ ID NO: 322329 - DNA, 199 bp, Homo sapiens; identical to SEQ ID NO: 217724
  chr17:30844875-30845074
  hypo

SEQ ID NO: 322330 - DNA, 330 bp, Homo sapiens; identical to SEQ ID NO: 217725
  chr17:30954335-30954665
  hypo

SEQ ID NO: 322331 - DNA, 253 bp, Homo sapiens; identical to SEQ ID NO: 270543
  chr17:31047963-31048216
  hypo

SEQ ID NO: 322332 - DNA, 45 bp, Homo sapiens; identical to SEQ ID NO: 270544
  chr17:31099652-31099697
  hypo

SEQ ID NO: 322333 - DNA, 108 bp, Homo sapiens; identical to SEQ ID NO: 204545
  chr17:31203740-31203848
  hypo

SEQ ID NO: 322334 - DNA, 42 bp, Homo sapiens; identical to SEQ ID NO: 270546
  chr17:32520158-32520200
  hypo

SEQ ID NO: 322335 - DNA, 274 bp, Homo sapiens; identical to SEQ ID NO: 217727
  chr17:33344314-33344588
  hypo

SEQ ID NO: 322336 - DNA, 165 bp, Homo sapiens; identical to SEQ ID NO: 270548
  chr17:33348605-33348770
  hypo

SEQ ID NO: 322337 - DNA, 66 bp, Homo sapiens; identical to SEQ ID NO: 217728
  chr17:33351140-33351206
  hypo

SEQ ID NO: 322338 - DNA, 34 bp, Homo sapiens; identical to SEQ ID NO: 270550
  chr17:33354438-33354472
  hypo

SEQ ID NO: 322339 - DNA, 98 bp, Homo sapiens; identical to SEQ ID NO: 217729
  chr17:33568807-33568905
  hypo

SEQ ID NO: 322340 - DNA, 77 bp, Homo sapiens; identical to SEQ ID NO: 270552
  chr17:33578345-33578422
  hypo

SEQ ID NO: 322341 - DNA, 743 bp, Homo sapiens; identical to SEQ ID NO: 292217
  chr17:33814244-33814987
  hypo

SEQ ID NO: 322342 - DNA, 34 bp, Homo sapiens; identical to SEQ ID NO: 270553
  chr17:33898171-33898205
  hypo

SEQ ID NO: 322343 - DNA, 76 bp, Homo sapiens; identical to SEQ ID NO: 270555
  chr17:33924082-33924158
  hypo

SEQ ID NO: 322344 - DNA, 112 bp, Homo sapiens; identical to SEQ ID NO: 270556
  chr17:35039667-35039779
  hypo

SEQ ID NO: 322345 - DNA, 172 bp, Homo sapiens; identical to SEQ ID NO: 270557
  chr17:35045439-35045611
  hypo

SEQ ID NO: 322346 - DNA, 117 bp, Homo sapiens; identical to SEQ ID NO: 270558
  chr17:35099227-35099344
  hypo

SEQ ID NO: 322347 - DNA, 208 bp, Homo sapiens; identical to SEQ ID NO: 217731
  chr17:35336168-35336376
  hypo

SEQ ID NO: 322348 - DNA, 35 bp, Homo sapiens; identical to SEQ ID NO: 217732
  chr17:35414066-35414101
  hypo

SEQ ID NO: 322349 - DNA, 164 bp, Homo sapiens; identical to SEQ ID NO: 270561
  chr17:35488971-35489135
  hypo

SEQ ID NO: 322350 - DNA, 140 bp, Homo sapiens; identical to SEQ ID NO: 270562
  chr17:35501215-35501355
  hypo

SEQ ID NO: 322351 - DNA, 171 bp, Homo sapiens; identical to SEQ ID NO: 270563
  chr17:35545258-35545429
  hypo

SEQ ID NO: 322352 - DNA, 456 bp, Homo sapiens; identical to SEQ ID NO: 292228
  chr17:35716404-35716860
  hypo

SEQ ID NO: 322353 - DNA, 38 bp, Homo sapiens; identical to SEQ ID NO: 217733
  chr17:35802039-35802077
  hypo

SEQ ID NO: 322354 - DNA, 31 bp, Homo sapiens; identical to SEQ ID NO: 217734
  chr17:35845347-35845378
  hypo

SEQ ID NO: 322355 - DNA, 162 bp, Homo sapiens; identical to SEQ ID NO: 217735
  chr17:35872861-35873023
  hypo

SEQ ID NO: 322356 - DNA, 82 bp, Homo sapiens; identical to SEQ ID NO: 270567
  chr17:36076477-36076559
  hypo

SEQ ID NO: 322357 - DNA, 46 bp, Homo sapiens; identical to SEQ ID NO: 11164
  chr17:36762362-36762408
  hypo

SEQ ID NO: 322358 - DNA, 42 bp, Homo sapiens; identical to SEQ ID NO: 270568
  chr17:36818503-36818545
  hypo

SEQ ID NO: 322359 - DNA, 110 bp, Homo sapiens; identical to SEQ ID NO: 270569
  chr17:36864035-36864145
  hypo

SEQ ID NO: 322360 - DNA, 56 bp, Homo sapiens
  chr17:36875865-36875921
  hypo
ctgggggcaggagggacacccgagggaggagggacggagagaccggcgtgggctgg

SEQ ID NO: 322361 - DNA, 414 bp, Homo sapiens
  chr17:36876379-36876793
  hypo
gcaacttccgcccttctctcctgacccgtgtggcctcgaccccagcctcaggctccgccccaggtcttcacacctgtggctccccaagtcccgcctctcttctcagagctcacctgtgtccctccttaggatggcgccgccttttcaagggctgagcactggctcccctccaggccccgcccccggtcccctggccccgcctccgccccctcgcccctccctcaggttcctcgctctctccgcagtcgtggagatgctgaaggcgctgcacgcgctgcagaaggagaaccagcggctgcaagagcagatcctgagcctgacggccaaaaaggagcggctgcagattctcaacgtgcagctctctgtgcccttccctgccctgcctgctgccctgcctgccgccaacggccctgt

SEQ ID NO: 322362 - DNA, 222 bp, Homo sapiens; identical to SEQ ID NO: 204568
  chr17:36886754-36886976
  hypo

SEQ ID NO: 322363 - DNA, 37 bp, Homo sapiens; identical to SEQ ID NO: 204569
  chr17:36904350-36904387
  hypo

SEQ ID NO: 322364 - DNA, 450 bp, Homo sapiens; identical to SEQ ID NO: 204570
  chr17:36905017-36905467
  hypo

SEQ ID NO: 322365 - DNA, 61 bp, Homo sapiens; identical to SEQ ID NO: 217741
  chr17:36927315-36927376
  hypo

SEQ ID NO: 322366 - DNA, 42 bp, Homo sapiens; identical to SEQ ID NO: 217742
  chr17:36967822-36967864
  hypo

SEQ ID NO: 322367 - DNA, 39 bp, Homo sapiens; identical to SEQ ID NO: 270573
  chr17:37000766-37000805
  hypo

SEQ ID NO: 322368 - DNA, 120 bp, Homo sapiens; identical to SEQ ID NO: 270575
  chr17:37012074-37012194
  hypo

SEQ ID NO: 322369 - DNA, 195 bp, Homo sapiens; identical to SEQ ID NO: 217743
  chr17:37074888-37075083
  hypo

SEQ ID NO: 322370 - DNA, 151 bp, Homo sapiens; identical to SEQ ID NO: 270577
  chr17:37084534-37084685
  hypo

SEQ ID NO: 322371 - DNA, 31 bp, Homo sapiens; identical to SEQ ID NO: 270578
  chr17:37111337-37111368
  hypo

SEQ ID NO: 322372 - DNA, 150 bp, Homo sapiens; identical to SEQ ID NO: 270579
  chr17:37171929-37172079
  hypo

SEQ ID NO: 322373 - DNA, 35 bp, Homo sapiens; identical to SEQ ID NO: 270580
  chr17:37276419-37276454
  hypo

SEQ ID NO: 322374 - DNA, 81 bp, Homo sapiens; identical to SEQ ID NO: 270581
  chr17:37313706-37313787
  hypo

SEQ ID NO: 322375 - DNA, 39 bp, Homo sapiens; identical to SEQ ID NO: 217744
  chr17:37445220-37445259
  hypo

SEQ ID NO: 322376 - DNA, 34 bp, Homo sapiens; identical to SEQ ID NO: 217745
  chr17:37452478-37452512
  hypo

SEQ ID NO: 322377 - DNA, 31 bp, Homo sapiens; identical to SEQ ID NO: 217746
  chr17:37455741-37455772
  hypo

SEQ ID NO: 322378 - DNA, 85 bp, Homo sapiens; identical to SEQ ID NO: 217747
  chr17:37483846-37483931
  hypo

SEQ ID NO: 322379 - DNA, 161 bp, Homo sapiens; identical to SEQ ID NO: 270586
  chr17:37583067-37583228
  hypo

SEQ ID NO: 322380 - DNA, 180 bp, Homo sapiens; identical to SEQ ID NO: 270587
  chr17:37583288-37583468
  hypo

SEQ ID NO: 322381 - DNA, 39 bp, Homo sapiens; identical to SEQ ID NO: 217748
  chr17:37694844-37694883
  hypo

SEQ ID NO: 322382 - DNA, 33 bp, Homo sapiens; identical to SEQ ID NO: 217749
  chr17:37701201-37701234
  hypo

SEQ ID NO: 322383 - DNA, 146 bp, Homo sapiens; identical to SEQ ID NO: 292264
  chr17:37762839-37762985
  hypo

SEQ ID NO: 322384 - DNA, 339 bp, Homo sapiens; identical to SEQ ID NO: 204583
  chr17:37774745-37775084
  hypo

SEQ ID NO: 322385 - DNA, 336 bp, Homo sapiens; identical to SEQ ID NO: 204584
  chr17:37782849-37783185
  hypo

SEQ ID NO: 322386 - DNA, 118 bp, Homo sapiens; identical to SEQ ID NO: 292268
  chr17:37783775-37783893
  hypo

SEQ ID NO: 322387 - DNA, 220 bp, Homo sapiens; identical to SEQ ID NO: 217754
  chr17:37819039-37819259
  hypo

SEQ ID NO: 322388 - DNA, 52 bp, Homo sapiens; identical to SEQ ID NO: 204587
  chr17:37823746-37823798
  hypo

SEQ ID NO: 322389 - DNA, 525 bp, Homo sapiens; identical to SEQ ID NO: 292272
  chr17:37823945-37824470
  hypo

SEQ ID NO: 322390 - DNA, 93 bp, Homo sapiens; identical to SEQ ID NO: 292273
  chr17:37844398-37844491
  hypo

SEQ ID NO: 322391 - DNA, 99 bp, Homo sapiens; identical to SEQ ID NO: 217757
  chr17:37881018-37881117
  hypo

SEQ ID NO: 322392 - DNA, 31 bp, Homo sapiens
  chr17:37887589-37887620
  hypo
agtgctgggattacaggcgtgagccaccacg

SEQ ID NO: 322393 - DNA, 47 bp, Homo sapiens; identical to SEQ ID NO: 225345
  chr17:38024015-38024062
  hypo

SEQ ID NO: 322394 - DNA, 84 bp, Homo sapiens; identical to SEQ ID NO: 270594
  chr17:38075339-38075423
  hypo

SEQ ID NO: 322395 - DNA, 120 bp, Homo sapiens; identical to SEQ ID NO: 217758
  chr17:38105714-38105834
  hypo

SEQ ID NO: 322396 - DNA, 138 bp, Homo sapiens
  chr17:38179105-38179243
  hypo
aggagccaggggcccgggatctggggctcctacaccctgccaccccagcatggctgtccagtaaggcccgcagagggggccccagatgttgctccgcccctcaggctgaatcccagtctctggccagagctccccaag

SEQ ID NO: 322397 - DNA, 124 bp, Homo sapiens
  chr17:38179273-38179397
  hypo
aggccacctggctcacggcagcctctcagggaagcctggcagaccaggccaggtgtggggagccaggggacaggacccatgtcggcccacagccactccagcccaagtaccttaatcaggttgt

SEQ ID NO: 322398 - DNA, 147 bp, Homo sapiens; identical to SEQ ID NO: 217760
  chr17:38179430-38179577
  hypo

SEQ ID NO: 322399 - DNA, 39 bp, Homo sapiens; identical to SEQ ID NO: 204593
  chr17:38228513-38228552
  hypo

SEQ ID NO: 322400 - DNA, 46 bp, Homo sapiens; identical to SEQ ID NO: 217762
  chr17:38244541-38244587
  hypo

SEQ ID NO: 322401 - DNA, 504 bp, Homo sapiens; identical to SEQ ID NO: 217763
  chr17:38249240-38249744
  hypo

SEQ ID NO: 322402 - DNA, 164 bp, Homo sapiens; identical to SEQ ID NO: 270600
  chr17:38250103-38250267
  hypo

SEQ ID NO: 322403 - DNA, 124 bp, Homo sapiens; identical to SEQ ID NO: 217764
  chr17:38251853-38251977
  hypo

SEQ ID NO: 322404 - DNA, 120 bp, Homo sapiens; identical to SEQ ID NO: 270602
  chr17:38276209-38276329
  hypo

SEQ ID NO: 322405 - DNA, 328 bp, Homo sapiens; identical to SEQ ID NO: 270603
  chr17:38334998-38335326
  hypo

SEQ ID NO: 322406 - DNA, 37 bp, Homo sapiens; identical to SEQ ID NO: 217765
  chr17:38380418-38380455
  hypo

SEQ ID NO: 322407 - DNA, 436 bp, Homo sapiens; identical to SEQ ID NO: 204598
  chr17:38498112-38498548
  hypo

SEQ ID NO: 322408 - DNA, 584 bp, Homo sapiens; identical to SEQ ID NO: 292296
  chr17:38498596-38499180
  hypo

SEQ ID NO: 322409 - DNA, 78 bp, Homo sapiens; identical to SEQ ID NO: 217768
  chr17:38511651-38511729
  hypo

SEQ ID NO: 322410 - DNA, 91 bp, Homo sapiens; identical to SEQ ID NO: 217769
  chr17:38513565-38513656
  hypo

SEQ ID NO: 322411 - DNA, 41 bp, Homo sapiens; identical to SEQ ID NO: 270607
  chr17:38638673-38638714
  hypo

SEQ ID NO: 322412 - DNA, 97 bp, Homo sapiens; identical to SEQ ID NO: 270608
  chr17:38656559-38656656
  hypo

SEQ ID NO: 322413 - DNA, 321 bp, Homo sapiens; identical to SEQ ID NO: 217770
  chr17:38668670-38668991
  hypo

SEQ ID NO: 322414 - DNA, 42 bp, Homo sapiens; identical to SEQ ID NO: 270610
  chr17:38692022-38692064
  hypo

SEQ ID NO: 322415 - DNA, 224 bp, Homo sapiens; identical to SEQ ID NO: 270611
  chr17:38711764-38711988
  hypo

SEQ ID NO: 322416 - DNA, 323 bp, Homo sapiens; identical to SEQ ID NO: 270612
  chr17:38774236-38774559
  hypo

SEQ ID NO: 322417 - DNA, 339 bp, Homo sapiens; identical to SEQ ID NO: 270613
  chr17:39657291-39657630
  hypo

SEQ ID NO: 322418 - DNA, 551 bp, Homo sapiens; identical to SEQ ID NO: 217772
  chr17:39658615-39659166
  hypo

SEQ ID NO: 322419 - DNA, 145 bp, Homo sapiens; identical to SEQ ID NO: 217773
  chr17:39659196-39659341
  hypo

SEQ ID NO: 322420 - DNA, 229 bp, Homo sapiens; identical to SEQ ID NO: 217774
  chr17:39659565-39659794
  hypo

SEQ ID NO: 322421 - DNA, 109 bp, Homo sapiens; identical to SEQ ID NO: 270617
  chr17:39661340-39661449
  hypo

SEQ ID NO: 322422 - DNA, 148 bp, Homo sapiens; identical to SEQ ID NO: 270618
  chr17:39671696-39671844
  hypo

SEQ ID NO: 322423 - DNA, 498 bp, Homo sapiens; identical to SEQ ID NO: 270619
  chr17:39672145-39672643
  hypo

SEQ ID NO: 322424 - DNA, 411 bp, Homo sapiens; identical to SEQ ID NO: 270620
  chr17:39673044-39673455
  hypo

SEQ ID NO: 322425 - DNA, 118 bp, Homo sapiens; identical to SEQ ID NO: 217776
  chr17:39676657-39676775
  hypo

SEQ ID NO: 322426 - DNA, 452 bp, Homo sapiens; identical to SEQ ID NO: 217777
  chr17:39680350-39680802
  hypo

SEQ ID NO: 322427 - DNA, 142 bp, Homo sapiens; identical to SEQ ID NO: 217778
  chr17:39681121-39681263
  hypo

SEQ ID NO: 322428 - DNA, 293 bp, Homo sapiens; identical to SEQ ID NO: 204601
  chr17:39683516-39683809
  hypo

SEQ ID NO: 322429 - DNA, 815 bp, Homo sapiens; identical to SEQ ID NO: 292305
  chr17:39683839-39684654
  hypo

SEQ ID NO: 322430 - DNA, 111 bp, Homo sapiens; identical to SEQ ID NO: 270625
  chr17:39694232-39694343
  hypo

SEQ ID NO: 322431 - DNA, 212 bp, Homo sapiens; identical to SEQ ID NO: 217781
  chr17:39788236-39788448
  hypo

SEQ ID NO: 322432 - DNA, 63 bp, Homo sapiens
  chr17:39803737-39803800
  hypo
gccagctgcgtgaacgcccgtaactctttacggcagaagaccaagggtgcgtctggtcctcag

SEQ ID NO: 322433 - DNA, 128 bp, Homo sapiens
  chr17:39855695-39855823
  hypo
caatgcagatctaaaactgcgatggaatgtgcacttataaaaacaatgccactgtctttttttaaccagtgaacagattgcaatataaagtccactaaagccaggcgcggtgactcacacttgtaatc

SEQ ID NO: 322434 - DNA, 286 bp, Homo sapiens; identical to SEQ ID NO: 270629
  chr17:40318143-40318429
  hypo

SEQ ID NO: 322435 - DNA, 136 bp, Homo sapiens; identical to SEQ ID NO: 270630
  chr17:40330251-40330387
  hypo

SEQ ID NO: 322436 - DNA, 50 bp, Homo sapiens; identical to SEQ ID NO: 292307
  chr17:40332756-40332806
  hypo

SEQ ID NO: 322437 - DNA, 53 bp, Homo sapiens; identical to SEQ ID NO: 225351
  chr17:40333432-40333485
  hypo

SEQ ID NO: 322438 - DNA, 118 bp, Homo sapiens; identical to SEQ ID NO: 217782
  chr17:40337520-40337638
  hypo

SEQ ID NO: 322439 - DNA, 105 bp, Homo sapiens; identical to SEQ ID NO: 217783
  chr17:40353736-40353841
  hypo

SEQ ID NO: 322440 - DNA, 203 bp, Homo sapiens; identical to SEQ ID NO: 270633
  chr17:40362204-40362407
  hypo

SEQ ID NO: 322441 - DNA, 138 bp, Homo sapiens; identical to SEQ ID NO: 217784
  chr17:40370156-40370294
  hypo

SEQ ID NO: 322442 - DNA, 662 bp, Homo sapiens; identical to SEQ ID NO: 217785
  chr17:40371745-40372407
  hypo

SEQ ID NO: 322443 - DNA, 167 bp, Homo sapiens; identical to SEQ ID NO: 270636
  chr17:40372620-40372787
  hypo

SEQ ID NO: 322444 - DNA, 437 bp, Homo sapiens; identical to SEQ ID NO: 270637
  chr17:40375287-40375724
  hypo

SEQ ID NO: 322445 - DNA, 81 bp, Homo sapiens; identical to SEQ ID NO: 217787
  chr17:40387769-40387850
  hypo

SEQ ID NO: 322446 - DNA, 77 bp, Homo sapiens; identical to SEQ ID NO: 204604
  chr17:40427488-40427565
  hypo

SEQ ID NO: 322447 - DNA, 33 bp, Homo sapiens; identical to SEQ ID NO: 270639
  chr17:40427609-40427642
  hypo

SEQ ID NO: 322448 - DNA, 33 bp, Homo sapiens; identical to SEQ ID NO: 270640
  chr17:40427746-40427779
  hypo

SEQ ID NO: 322449 - DNA, 517 bp, Homo sapiens; identical to SEQ ID NO: 292311
  chr17:40428745-40429262
  hypo

SEQ ID NO: 322450 - DNA, 208 bp, Homo sapiens; identical to SEQ ID NO: 270641
  chr17:40436565-40436773
  hypo

SEQ ID NO: 322451 - DNA, 147 bp, Homo sapiens; identical to SEQ ID NO: 217790
  chr17:40447592-40447739
  hypo

SEQ ID NO: 322452 - DNA, 165 bp, Homo sapiens; identical to SEQ ID NO: 270643
  chr17:40453235-40453400
  hypo

SEQ ID NO: 322453 - DNA, 36 bp, Homo sapiens; identical to SEQ ID NO: 217791
  chr17:40453899-40453935
  hypo

SEQ ID NO: 322454 - DNA, 418 bp, Homo sapiens; identical to SEQ ID NO: 270645
  chr17:40456105-40456523
  hypo

SEQ ID NO: 322455 - DNA, 159 bp, Homo sapiens; identical to SEQ ID NO: 270646
  chr17:40458359-40458518
  hypo

SEQ ID NO: 322456 - DNA, 107 bp, Homo sapiens; identical to SEQ ID NO: 270647
  chr17:40459507-40459614
  hypo

SEQ ID NO: 322457 - DNA, 42 bp, Homo sapiens; identical to SEQ ID NO: 270649
  chr17:40514602-40514644
  hypo

SEQ ID NO: 322458 - DNA, 35 bp, Homo sapiens; identical to SEQ ID NO: 270650
  chr17:40533448-40533483
  hypo

SEQ ID NO: 322459 - DNA, 32 bp, Homo sapiens; identical to SEQ ID NO: 270651
  chr17:40548836-40548868
  hypo

SEQ ID NO: 322460 - DNA, 557 bp, Homo sapiens; identical to SEQ ID NO: 128645
  chr17:40574882-40575439
  hypo

SEQ ID NO: 322461 - DNA, 42 bp, Homo sapiens; identical to SEQ ID NO: 270652
  chr17:40609955-40609997
  hypo

SEQ ID NO: 322462 - DNA, 76 bp, Homo sapiens; identical to SEQ ID NO: 217794
  chr17:40616719-40616795
  hypo

SEQ ID NO: 322463 - DNA, 191 bp, Homo sapiens
  chr17:40689405-40689596
  hypo
ctgcccgcaggtaccgctattaccagaatgtgtgcacgcaaagctactctttcgtgtggtgggactgggcccgctgggagcgagagatagactggatggcgctgaatggcatcaacctggcactggcctggagcggccaggaggccatctggcagcgggtgcgtgcccactgtcccttccccaccctcctc

SEQ ID NO: 322464 - DNA, 48 bp, Homo sapiens
  chr17:40689642-40689690
  hypo
gcgcagtgtctctctctagaagtgctttcagcgtgcacagtggcttgg

SEQ ID NO: 322465 - DNA, 196 bp, Homo sapiens; identical to SEQ ID NO: 270655
  chr17:40695505-40695701
  hypo

SEQ ID NO: 322466 - DNA, 610 bp, Homo sapiens; identical to SEQ ID NO: 270656
  chr17:40699094-40699704
  hypo

SEQ ID NO: 322467 - DNA, 93 bp, Homo sapiens; identical to SEQ ID NO: 217795
  chr17:40705245-40705338
  hypo

SEQ ID NO: 322468 - DNA, 67 bp, Homo sapiens
  chr17:40705838-40705905
  hypo
ccagcaagttcgcgctcgaaggcttatgcgagagtctggcggttctgctgctgccctttggggtcca

SEQ ID NO: 322469 - DNA, 42 bp, Homo sapiens; identical to SEQ ID NO: 270658
  chr17:40711057-40711099
  hypo

SEQ ID NO: 322470 - DNA, 33 bp, Homo sapiens; identical to SEQ ID NO: 270659
  chr17:40743622-40743655
  hypo

SEQ ID NO: 322471 - DNA, 100 bp, Homo sapiens
  chr17:40801993-40802093
  hypo
aaaaacaactacagaaacatcccattttgttctatttcacaactaaaatatgaatttagtacaactcccttcacataaagagcgtcggctctttgccatc

SEQ ID NO: 322472 - DNA, 40 bp, Homo sapiens; identical to SEQ ID NO: 217796
  chr17:40804385-40804425
  hypo

SEQ ID NO: 322473 - DNA, 104 bp, Homo sapiens; identical to SEQ ID NO: 270662
  chr17:40820751-40820855
  hypo

SEQ ID NO: 322474 - DNA, 108 bp, Homo sapiens; identical to SEQ ID NO: 217797
  chr17:40847766-40847874
  hypo

SEQ ID NO: 322475 - DNA, 33 bp, Homo sapiens; identical to SEQ ID NO: 270664
  chr17:40856548-40856581
  hypo

SEQ ID NO: 322476 - DNA, 55 bp, Homo sapiens; identical to SEQ ID NO: 270665
  chr17:40897648-40897703
  hypo

SEQ ID NO: 322477 - DNA, 95 bp, Homo sapiens; identical to SEQ ID NO: 270666
  chr17:40929522-40929617
  hypo

SEQ ID NO: 322478 - DNA, 35 bp, Homo sapiens; identical to SEQ ID NO: 270667
  chr17:40939517-40939552
  hypo

SEQ ID NO: 322479 - DNA, 211 bp, Homo sapiens; identical to SEQ ID NO: 292328
  chr17:40950645-40950856
  hypo

SEQ ID NO: 322480 - DNA, 93 bp, Homo sapiens
  chr17:40951180-40951273
  hypo
ggcccagcagaatgagcaagcagtgagggaggcttcggggcggctgggccgcttcagggagccccagatcgtgggtgcggctgcagggccggg

SEQ ID NO: 322481 - DNA, 58 bp, Homo sapiens; identical to SEQ ID NO: 217798
  chr17:41131474-41131532
  hypo

SEQ ID NO: 322482 - DNA, 38 bp, Homo sapiens; identical to SEQ ID NO: 270671
  chr17:41152508-41152546
  hypo

SEQ ID NO: 322483 - DNA, 43 bp, Homo sapiens; identical to SEQ ID NO: 270672
  chr17:41177996-41178039
  hypo

SEQ ID NO: 322484 - DNA, 134 bp, Homo sapiens
  chr17:41188391-41188525
  hypo
aaatggatctgctgcgccagcaaacaactgtccattgtgtcctgatgagggacgagcagggaaaaccaatcacttatgatgcaaatgagccgacggctgcagcctcctcacattcactgagtgcttctcttctg

SEQ ID NO: 322485 - DNA, 514 bp, Homo sapiens; identical to SEQ ID NO: 225356
  chr17:41196311-41196825
  hypo

SEQ ID NO: 322486 - DNA, 589 bp, Homo sapiens; identical to SEQ ID NO: 292334
  chr17:41197125-41197714
  hypo

SEQ ID NO: 322487 - DNA, 76 bp, Homo sapiens; identical to SEQ ID NO: 292335
  chr17:41197743-41197819
  hypo

SEQ ID NO: 322488 - DNA, 61 bp, Homo sapiens; identical to SEQ ID NO: 225358
  chr17:41199659-41199720
  hypo

SEQ ID NO: 322489 - DNA, 32 bp, Homo sapiens; identical to SEQ ID NO: 292337
  chr17:41203102-41203134
  hypo

SEQ ID NO: 322490 - DNA, 38 bp, Homo sapiens; identical to SEQ ID NO: 292338
  chr17:41209114-41209152
  hypo

SEQ ID NO: 322491 - DNA, 41 bp, Homo sapiens; identical to SEQ ID NO: 225362
  chr17:41215349-41215390
  hypo

SEQ ID NO: 322492 - DNA, 88 bp, Homo sapiens; identical to SEQ ID NO: 225364
  chr17:41219624-41219712
  hypo

SEQ ID NO: 322493 - DNA, 311 bp, Homo sapiens; identical to SEQ ID NO: 225365
  chr17:41222944-41223255
  hypo

SEQ ID NO: 322494 - DNA, 191 bp, Homo sapiens; identical to SEQ ID NO: 225366
  chr17:41226347-41226538
  hypo

SEQ ID NO: 322495 - DNA, 127 bp, Homo sapiens; identical to SEQ ID NO: 225367
  chr17:41228504-41228631
  hypo

SEQ ID NO: 322496 - DNA, 172 bp, Homo sapiens; identical to SEQ ID NO: 225368
  chr17:41234420-41234592
  hypo

SEQ ID NO: 322497 - DNA, 89 bp, Homo sapiens; identical to SEQ ID NO: 225369
  chr17:41242960-41243049
  hypo

SEQ ID NO: 322498 - DNA, 3426 bp, Homo sapiens; identical to SEQ ID NO: 225370
  chr17:41243451-41246877
  hypo

SEQ ID NO: 322499 - DNA, 77 bp, Homo sapiens; identical to SEQ ID NO: 225371
  chr17:41247862-41247939
  hypo

SEQ ID NO: 322500 - DNA, 46 bp, Homo sapiens; identical to SEQ ID NO: 225372
  chr17:41249260-41249306
  hypo

SEQ ID NO: 322501 - DNA, 106 bp, Homo sapiens; identical to SEQ ID NO: 225373
  chr17:41251791-41251897
  hypo

SEQ ID NO: 322502 - DNA, 140 bp, Homo sapiens; identical to SEQ ID NO: 225374
  chr17:41256138-41256278
  hypo

SEQ ID NO: 322503 - DNA, 89 bp, Homo sapiens; identical to SEQ ID NO: 225375
  chr17:41256884-41256973
  hypo

SEQ ID NO: 322504 - DNA, 78 bp, Homo sapiens; identical to SEQ ID NO: 225376
  chr17:41258472-41258550
  hypo

SEQ ID NO: 322505 - DNA, 57 bp, Homo sapiens; identical to SEQ ID NO: 292353
  chr17:41276075-41276132
  hypo

SEQ ID NO: 322506 - DNA, 120 bp, Homo sapiens
  chr17:41290192-41290312
  hypo
ctccatctcaaaaggaaaaaaaagcaaaagagaaaaaacccaaacaaacaaaacccctgaacttccctgcgggcacattttctctggcagcctttttcaatgagagctatgttttctccg

SEQ ID NO: 322507 - DNA, 37 bp, Homo sapiens; identical to SEQ ID NO: 270676
  chr17:41320359-41320396
  hypo

SEQ ID NO: 322508 - DNA, 36 bp, Homo sapiens; identical to SEQ ID NO: 270677
  chr17:41320636-41320672
  hypo

SEQ ID NO: 322509 - DNA, 147 bp, Homo sapiens; identical to SEQ ID NO: 217799
  chr17:41389669-41389816
  hypo

SEQ ID NO: 322510 - DNA, 43 bp, Homo sapiens; identical to SEQ ID NO: 217800
  chr17:41399427-41399470
  hypo

SEQ ID NO: 322511 - DNA, 33 bp, Homo sapiens; identical to SEQ ID NO: 270680
  chr17:41444581-41444614
  hypo

SEQ ID NO: 322512 - DNA, 235 bp, Homo sapiens; identical to SEQ ID NO: 270681
  chr17:41456127-41456362
  hypo

SEQ ID NO: 322513 - DNA, 42 bp, Homo sapiens; identical to SEQ ID NO: 217801
  chr17:41570142-41570184
  hypo

SEQ ID NO: 322514 - DNA, 136 bp, Homo sapiens; identical to SEQ ID NO: 270683
  chr17:41610027-41610163
  hypo

SEQ ID NO: 322515 - DNA, 120 bp, Homo sapiens; identical to SEQ ID NO: 270684
  chr17:41672277-41672397
  hypo

SEQ ID NO: 322516 - DNA, 41 bp, Homo sapiens; identical to SEQ ID NO: 217802
  chr17:41692630-41692671
  hypo

SEQ ID NO: 322517 - DNA, 101 bp, Homo sapiens; identical to SEQ ID NO: 292360
  chr17:41723353-41723454
  hypo

SEQ ID NO: 322518 - DNA, 244 bp, Homo sapiens; identical to SEQ ID NO: 292361
  chr17:41723534-41723778
  hypo

SEQ ID NO: 322519 - DNA, 41 bp, Homo sapiens; identical to SEQ ID NO: 217804
  chr17:41895347-41895388
  hypo

SEQ ID NO: 322520 - DNA, 37 bp, Homo sapiens; identical to SEQ ID NO: 270687
  chr17:41915919-41915956
  hypo

SEQ ID NO: 322521 - DNA, 122 bp, Homo sapiens; identical to SEQ ID NO: 292372
  chr17:42015411-42015533
  hypo

SEQ ID NO: 322522 - DNA, 291 bp, Homo sapiens; identical to SEQ ID NO: 292373
  chr17:42015571-42015862
  hypo

SEQ ID NO: 322523 - DNA, 57 bp, Homo sapiens; identical to SEQ ID NO: 217805
  chr17:42019594-42019651
  hypo

SEQ ID NO: 322524 - DNA, 84 bp, Homo sapiens; identical to SEQ ID NO: 204621
  chr17:42030245-42030329
  hypo

SEQ ID NO: 322525 - DNA, 191 bp, Homo sapiens; identical to SEQ ID NO: 204626
  chr17:42092357-42092548
  hypo

SEQ ID NO: 322526 - DNA, 324 bp, Homo sapiens; identical to SEQ ID NO: 270689
  chr17:42097491-42097815
  hypo

SEQ ID NO: 322527 - DNA, 124 bp, Homo sapiens; identical to SEQ ID NO: 270690
  chr17:42098921-42099045
  hypo

SEQ ID NO: 322528 - DNA, 96 bp, Homo sapiens; identical to SEQ ID NO: 270691
  chr17:42100159-42100255
  hypo

SEQ ID NO: 322529 - DNA, 453 bp, Homo sapiens; identical to SEQ ID NO: 270692
  chr17:42109843-42110296
  hypo

SEQ ID NO: 322530 - DNA, 208 bp, Homo sapiens; identical to SEQ ID NO: 292383
  chr17:42200974-42201182
  hypo

SEQ ID NO: 322531 - DNA, 91 bp, Homo sapiens; identical to SEQ ID NO: 270695
  chr17:42249458-42249549
  hypo

SEQ ID NO: 322532 - DNA, 355 bp, Homo sapiens; identical to SEQ ID NO: 217808
  chr17:42254322-42254677
  hypo

SEQ ID NO: 322533 - DNA, 433 bp, Homo sapiens; identical to SEQ ID NO: 292387
  chr17:42287874-42288307
  hypo

SEQ ID NO: 322534 - DNA, 117 bp, Homo sapiens; identical to SEQ ID NO: 217809
  chr17:42289050-42289167
  hypo

SEQ ID NO: 322535 - DNA, 216 bp, Homo sapiens; identical to SEQ ID NO: 270698
  chr17:42292484-42292700
  hypo

SEQ ID NO: 322536 - DNA, 614 bp, Homo sapiens; identical to SEQ ID NO: 292390
  chr17:42298856-42299470
  hypo

SEQ ID NO: 322537 - DNA, 418 bp, Homo sapiens; identical to SEQ ID NO: 270700
  chr17:42328460-42328878
  hypo

SEQ ID NO: 322538 - DNA, 256 bp, Homo sapiens; identical to SEQ ID NO: 270701
  chr17:42334640-42334896
  hypo

SEQ ID NO: 322539 - DNA, 91 bp, Homo sapiens
  chr17:42335363-42335454
  hypo
gccgaaggtgatggcgggtgacagtgcagcaaagtagatgaagatgacggcagccaggacctgggggctgaatgcatctgtgatgtcactc

SEQ ID NO: 322540 - DNA, 128 bp, Homo sapiens; identical to SEQ ID NO: 270703
  chr17:42338004-42338132
  hypo

SEQ ID NO: 322541 - DNA, 60 bp, Homo sapiens; identical to SEQ ID NO: 217811
  chr17:42395460-42395520
  hypo

SEQ ID NO: 322542 - DNA, 40 bp, Homo sapiens; identical to SEQ ID NO: 217812
  chr17:42395550-42395590
  hypo

SEQ ID NO: 322543 - DNA, 62 bp, Homo sapiens; identical to SEQ ID NO: 204629
  chr17:42402710-42402772
  hypo

SEQ ID NO: 322544 - DNA, 195 bp, Homo sapiens; identical to SEQ ID NO: 204630
  chr17:42402917-42403112
  hypo

SEQ ID NO: 322545 - DNA, 198 bp, Homo sapiens; identical to SEQ ID NO: 270706
  chr17:42427016-42427214
  hypo

SEQ ID NO: 322546 - DNA, 388 bp, Homo sapiens; identical to SEQ ID NO: 217815
  chr17:42427764-42428152
  hypo

SEQ ID NO: 322547 - DNA, 152 bp, Homo sapiens; identical to SEQ ID NO: 204631
  chr17:42441042-42441194
  hypo

SEQ ID NO: 322548 - DNA, 180 bp, Homo sapiens; identical to SEQ ID NO: 270708
  chr17:42590362-42590542
  hypo

SEQ ID NO: 322549 - DNA, 75 bp, Homo sapiens; identical to SEQ ID NO: 204634
  chr17:42635073-42635148
  hypo

SEQ ID NO: 322550 - DNA, 95 bp, Homo sapiens; identical to SEQ ID NO: 270709
  chr17:42706595-42706690
  hypo

SEQ ID NO: 322551 - DNA, 124 bp, Homo sapiens; identical to SEQ ID NO: 292404
  chr17:42906458-42906582
  hypo

SEQ ID NO: 322552 - DNA, 159 bp, Homo sapiens; identical to SEQ ID NO: 217819
  chr17:42942200-42942359
  hypo

SEQ ID NO: 322553 - DNA, 63 bp, Homo sapiens; identical to SEQ ID NO: 217820
  chr17:42981556-42981619
  hypo

SEQ ID NO: 322554 - DNA, 207 bp, Homo sapiens; identical to SEQ ID NO: 217821
  chr17:42992858-42993065
  hypo

SEQ ID NO: 322555 - DNA, 43 bp, Homo sapiens; identical to SEQ ID NO: 204639
  chr17:43045529-43045572
  hypo

SEQ ID NO: 322556 - DNA, 309 bp, Homo sapiens; identical to SEQ ID NO: 217823
  chr17:43121047-43121356
  hypo

SEQ ID NO: 322557 - DNA, 139 bp, Homo sapiens; identical to SEQ ID NO: 217824
  chr17:43121666-43121805
  hypo

SEQ ID NO: 322558 - DNA, 85 bp, Homo sapiens; identical to SEQ ID NO: 217825
  chr17:43124006-43124091
  hypo

SEQ ID NO: 322559 - DNA, 33 bp, Homo sapiens; identical to SEQ ID NO: 217826
  chr17:43173433-43173466
  hypo

SEQ ID NO: 322560 - DNA, 185 bp, Homo sapiens; identical to SEQ ID NO: 217827
  chr17:43179707-43179892
  hypo

SEQ ID NO: 322561 - DNA, 258 bp, Homo sapiens; identical to SEQ ID NO: 217828
  chr17:43180325-43180583
  hypo

SEQ ID NO: 322562 - DNA, 88 bp, Homo sapiens; identical to SEQ ID NO: 217829
  chr17:43181005-43181093
  hypo

SEQ ID NO: 322563 - DNA, 47 bp, Homo sapiens; identical to SEQ ID NO: 270722
  chr17:43193914-43193961
  hypo

SEQ ID NO: 322564 - DNA, 53 bp, Homo sapiens; identical to SEQ ID NO: 217830
  chr17:43196206-43196259
  hypo

SEQ ID NO: 322565 - DNA, 223 bp, Homo sapiens; identical to SEQ ID NO: 270724
  chr17:43208547-43208770
  hypo

SEQ ID NO: 322566 - DNA, 98 bp, Homo sapiens; identical to SEQ ID NO: 217831
  chr17:43211171-43211269
  hypo

SEQ ID NO: 322567 - DNA, 31 bp, Homo sapiens; identical to SEQ ID NO: 270726
  chr17:43234070-43234101
  hypo

SEQ ID NO: 322568 - DNA, 91 bp, Homo sapiens; identical to SEQ ID NO: 270727
  chr17:43246546-43246637
  hypo

SEQ ID NO: 322569 - DNA, 436 bp, Homo sapiens; identical to SEQ ID NO: 217832
  chr17:43246869-43247305
  hypo

SEQ ID NO: 322570 - DNA, 32 bp, Homo sapiens; identical to SEQ ID NO: 270729
  chr17:43296203-43296235
  hypo

SEQ ID NO: 322571 - DNA, 48 bp, Homo sapiens; identical to SEQ ID NO: 292413
  chr17:43298577-43298625
  hypo

SEQ ID NO: 322572 - DNA, 235 bp, Homo sapiens; identical to SEQ ID NO: 292414
  chr17:43298666-43298901
  hypo

SEQ ID NO: 322573 - DNA, 113 bp, Homo sapiens; identical to SEQ ID NO: 217833
  chr17:43321183-43321296
  hypo

SEQ ID NO: 322574 - DNA, 88 bp, Homo sapiens; identical to SEQ ID NO: 217834
  chr17:43321347-43321435
  hypo

SEQ ID NO: 322575 - DNA, 876 bp, Homo sapiens; identical to SEQ ID NO: 54190
  chr17:43324795-43325671
  hypo

SEQ ID NO: 322576 - DNA, 162 bp, Homo sapiens; identical to SEQ ID NO: 270731
  chr17:43347689-43347851
  hypo

SEQ ID NO: 322577 - DNA, 99 bp, Homo sapiens; identical to SEQ ID NO: 217836
  chr17:44799504-44799603
  hypo

SEQ ID NO: 322578 - DNA, 571 bp, Homo sapiens; identical to SEQ ID NO: 217837
  chr17:44845576-44846147
  hypo

SEQ ID NO: 322579 - DNA, 77 bp, Homo sapiens; identical to SEQ ID NO: 270735
  chr17:45253201-45253278
  hypo

SEQ ID NO: 322580 - DNA, 37 bp, Homo sapiens; identical to SEQ ID NO: 270736
  chr17:45590572-45590609
  hypo

SEQ ID NO: 322581 - DNA, 81 bp, Homo sapiens; identical to SEQ ID NO: 217838
  chr17:45599273-45599354
  hypo

SEQ ID NO: 322582 - DNA, 148 bp, Homo sapiens; identical to SEQ ID NO: 270738
  chr17:45689891-45690039
  hypo

SEQ ID NO: 322583 - DNA, 228 bp, Homo sapiens; identical to SEQ ID NO: 217839
  chr17:45885682-45885910
  hypo

SEQ ID NO: 322584 - DNA, 54 bp, Homo sapiens; identical to SEQ ID NO: 270740
  chr17:45886228-45886282
  hypo

SEQ ID NO: 322585 - DNA, 103 bp, Homo sapiens; identical to SEQ ID NO: 270741
  chr17:45891076-45891179
  hypo

SEQ ID NO: 322586 - DNA, 389 bp, Homo sapiens; identical to SEQ ID NO: 270742
  chr17:45894355-45894744
  hypo

SEQ ID NO: 322587 - DNA, 619 bp, Homo sapiens; identical to SEQ ID NO: 292438
  chr17:45928210-45928829
  hypo

SEQ ID NO: 322588 - DNA, 81 bp, Homo sapiens; identical to SEQ ID NO: 270743
  chr17:45943943-45944024
  hypo

SEQ ID NO: 322589 - DNA, 151 bp, Homo sapiens; identical to SEQ ID NO: 270744
  chr17:45944324-45944475
  hypo

SEQ ID NO: 322590 - DNA, 37 bp, Homo sapiens; identical to SEQ ID NO: 217841
  chr17:45970935-45970972
  hypo

SEQ ID NO: 322591 - DNA, 135 bp, Homo sapiens; identical to SEQ ID NO: 270746
  chr17:46006392-46006527
  hypo

SEQ ID NO: 322592 - DNA, 37 bp, Homo sapiens; identical to SEQ ID NO: 270747
  chr17:46017956-46017993
  hypo

SEQ ID NO: 322593 - DNA, 37 bp, Homo sapiens; identical to SEQ ID NO: 270748
  chr17:46018233-46018270
  hypo

SEQ ID NO: 322594 - DNA, 99 bp, Homo sapiens
  chr17:46080828-46080927
  hypo
ttggattcgctcatgggagctgagccagccccagcagggaagaagggtcgctttggcattcattctcctgcagttaccaggcctcgccgcctgccgggc

SEQ ID NO: 322595 - DNA, 298 bp, Homo sapiens; identical to SEQ ID NO: 292442
  chr17:46089283-46089581
  hypo

SEQ ID NO: 322596 - DNA, 33 bp, Homo sapiens; identical to SEQ ID NO: 217842
  chr17:46123911-46123944
  hypo

SEQ ID NO: 322597 - DNA, 233 bp, Homo sapiens; identical to SEQ ID NO: 204656
  chr17:46124668-46124901
  hypo

SEQ ID NO: 322598 - DNA, 165 bp, Homo sapiens; identical to SEQ ID NO: 204657
  chr17:46125148-46125313
  hypo

SEQ ID NO: 322599 - DNA, 152 bp, Homo sapiens; identical to SEQ ID NO: 217845
  chr17:46152422-46152574
  hypo

SEQ ID NO: 322600 - DNA, 152 bp, Homo sapiens; identical to SEQ ID NO: 217846
  chr17:46152814-46152966
  hypo

SEQ ID NO: 322601 - DNA, 44 bp, Homo sapiens; identical to SEQ ID NO: 270753
  chr17:46170653-46170697
  hypo

SEQ ID NO: 322602 - DNA, 57 bp, Homo sapiens; identical to SEQ ID NO: 270754
  chr17:46176826-46176883
  hypo

SEQ ID NO: 322603 - DNA, 37 bp, Homo sapiens; identical to SEQ ID NO: 270756
  chr17:46223566-46223603
  hypo

SEQ ID NO: 322604 - DNA, 120 bp, Homo sapiens; identical to SEQ ID NO: 270757
  chr17:46235537-46235657
  hypo

SEQ ID NO: 322605 - DNA, 31 bp, Homo sapiens; identical to SEQ ID NO: 270758
  chr17:46409045-46409076
  hypo

SEQ ID NO: 322606 - DNA, 140 bp, Homo sapiens; identical to SEQ ID NO: 292447
  chr17:46570076-46570216
  hypo

SEQ ID NO: 322607 - DNA, 238 bp, Homo sapiens; identical to SEQ ID NO: 270759
  chr17:46607012-46607250
  hypo

SEQ ID NO: 322608 - DNA, 189 bp, Homo sapiens; identical to SEQ ID NO: 204660
  chr17:46659085-46659274
  hypo

SEQ ID NO: 322609 - DNA, 45 bp, Homo sapiens; identical to SEQ ID NO: 204661
  chr17:46659384-46659429
  hypo

SEQ ID NO: 322610 - DNA, 297 bp, Homo sapiens; identical to SEQ ID NO: 225401
  chr17:46683517-46683814
  hypo

SEQ ID NO: 322611 - DNA, 83 bp, Homo sapiens; identical to SEQ ID NO: 204666
  chr17:46687507-46687590
  hypo

SEQ ID NO: 322612 - DNA, 162 bp, Homo sapiens; identical to SEQ ID NO: 204670
  chr17:46696376-46696538
  hypo

SEQ ID NO: 322613 - DNA, 266 bp, Homo sapiens; identical to SEQ ID NO: 292462
  chr17:46696643-46696909
  hypo

SEQ ID NO: 322614 - DNA, 171 bp, Homo sapiens; identical to SEQ ID NO: 204675
  chr17:46724200-46724371
  hypo

SEQ ID NO: 322615 - DNA, 92 bp, Homo sapiens; identical to SEQ ID NO: 292468
  chr17:46724660-46724752
  hypo

SEQ ID NO: 322616 - DNA, 113 bp, Homo sapiens; identical to SEQ ID NO: 292472
  chr17:46805459-46805572
  hypo

SEQ ID NO: 322617 - DNA, 57 bp, Homo sapiens; identical to SEQ ID NO: 204678
  chr17:46806111-46806168
  hypo

SEQ ID NO: 322618 - DNA, 90 bp, Homo sapiens; identical to SEQ ID NO: 270760
  chr17:46983833-46983923
  hypo

SEQ ID NO: 322619 - DNA, 34 bp, Homo sapiens; identical to SEQ ID NO: 270761
  chr17:46993884-46993918
  hypo

SEQ ID NO: 322620 - DNA, 348 bp, Homo sapiens; identical to SEQ ID NO: 292486
  chr17:47073560-47073908
  hypo

SEQ ID NO: 322621 - DNA, 152 bp, Homo sapiens; identical to SEQ ID NO: 204688
  chr17:47074409-47074561
  hypo

SEQ ID NO: 322622 - DNA, 210 bp, Homo sapiens; identical to SEQ ID NO: 270762
  chr17:47092596-47092806
  hypo

SEQ ID NO: 322623 - DNA, 192 bp, Homo sapiens
  chr17:47170372-47170564
  hypo
agagatgcggaatgtggtagagaggtaatattcaagttagtcggcctccttgtttttctttgtctcccccttgcacctgctctgccctgattttactgctgaggacacctggaccaaacagaggaaaggtgaattggtctctctctgtcctggagccgggatacaagcttcttctcccgcccttggaaatca

SEQ ID NO: 322624 - DNA, 119 bp, Homo sapiens
  chr17:47170956-47171075
  hypo
ttatgaatatgatctgtaacttatccatttttggggaaacccttttgctcatagtaaatggtccatttactatggtccattttgtaaatattcatatgtgtgcttaaaaagaatgtata

SEQ ID NO: 322625 - DNA, 180 bp, Homo sapiens; identical to SEQ ID NO: 270765
  chr17:47177621-47177801
  hypo

SEQ ID NO: 322626 - DNA, 125 bp, Homo sapiens; identical to SEQ ID NO: 292490
  chr17:47301641-47301766
  hypo

SEQ ID NO: 322627 - DNA, 434 bp, Homo sapiens; identical to SEQ ID NO: 128936
  chr17:47301801-47302235
  hypo

SEQ ID NO: 322628 - DNA, 643 bp, Homo sapiens; identical to SEQ ID NO: 292492
  chr17:47307801-47308444
  hypo

SEQ ID NO: 322629 - DNA, 39 bp, Homo sapiens; identical to SEQ ID NO: 217856
  chr17:47442684-47442723
  hypo

SEQ ID NO: 322630 - DNA, 53 bp, Homo sapiens; identical to SEQ ID NO: 292495
  chr17:47547746-47547799
  hypo

SEQ ID NO: 322631 - DNA, 95 bp, Homo sapiens; identical to SEQ ID NO: 217857
  chr17:47583840-47583935
  hypo

SEQ ID NO: 322632 - DNA, 445 bp, Homo sapiens; identical to SEQ ID NO: 270768
  chr17:47629443-47629888
  hypo

SEQ ID NO: 322633 - DNA, 67 bp, Homo sapiens; identical to SEQ ID NO: 292500
  chr17:47653242-47653309
  hypo

SEQ ID NO: 322634 - DNA, 720 bp, Homo sapiens; identical to SEQ ID NO: 292501
  chr17:47653373-47654093
  hypo

SEQ ID NO: 322635 - DNA, 39 bp, Homo sapiens
  chr17:47657458-47657497
  hypo
gagcatccatgtcccggagaggggtccctcaacagtcag

SEQ ID NO: 322636 - DNA, 181 bp, Homo sapiens; identical to SEQ ID NO: 270770
  chr17:47657769-47657950
  hypo

SEQ ID NO: 322637 - DNA, 34 bp, Homo sapiens; identical to SEQ ID NO: 270771
  chr17:47851979-47852013
  hypo

SEQ ID NO: 322638 - DNA, 92 bp, Homo sapiens; identical to SEQ ID NO: 217858
  chr17:47895284-47895376
  hypo

SEQ ID NO: 322639 - DNA, 162 bp, Homo sapiens; identical to SEQ ID NO: 217859
  chr17:47911774-47911936
  hypo

SEQ ID NO: 322640 - DNA, 281 bp, Homo sapiens; identical to SEQ ID NO: 292505
  chr17:47928527-47928808
  hypo

SEQ ID NO: 322641 - DNA, 173 bp, Homo sapiens; identical to SEQ ID NO: 225421
  chr17:47929093-47929266
  hypo

SEQ ID NO: 322642 - DNA, 63 bp, Homo sapiens; identical to SEQ ID NO: 217860
  chr17:47998383-47998446
  hypo

SEQ ID NO: 322643 - DNA, 545 bp, Homo sapiens; identical to SEQ ID NO: 292513
  chr17:48072070-48072615
  hypo

SEQ ID NO: 322644 - DNA, 42 bp, Homo sapiens; identical to SEQ ID NO: 217862
  chr17:48139110-48139152
  hypo

SEQ ID NO: 322645 - DNA, 113 bp, Homo sapiens; identical to SEQ ID NO: 270776
  chr17:48183244-48183357
  hypo

SEQ ID NO: 322646 - DNA, 140 bp, Homo sapiens; identical to SEQ ID NO: 217863
  chr17:48243308-48243448
  hypo

SEQ ID NO: 322647 - DNA, 79 bp, Homo sapiens; identical to SEQ ID NO: 270778
  chr17:48258096-48258175
  hypo

SEQ ID NO: 322648 - DNA, 219 bp, Homo sapiens; identical to SEQ ID NO: 270779
  chr17:48258578-48258797
  hypo

SEQ ID NO: 322649 - DNA, 196 bp, Homo sapiens; identical to SEQ ID NO: 270780
  chr17:48263246-48263442
  hypo

SEQ ID NO: 322650 - DNA, 33 bp, Homo sapiens; identical to SEQ ID NO: 217864
  chr17:48268219-48268252
  hypo

SEQ ID NO: 322651 - DNA, 159 bp, Homo sapiens; identical to SEQ ID NO: 270782
  chr17:48530415-48530574
  hypo

SEQ ID NO: 322652 - DNA, 46 bp, Homo sapiens; identical to SEQ ID NO: 270783
  chr17:48539230-48539276
  hypo

SEQ ID NO: 322653 - DNA, 40 bp, Homo sapiens; identical to SEQ ID NO: 217865
  chr17:48555662-48555702
  hypo

SEQ ID NO: 322654 - DNA, 325 bp, Homo sapiens; identical to SEQ ID NO: 217866
  chr17:48565118-48565443
  hypo

SEQ ID NO: 322655 - DNA, 40 bp, Homo sapiens; identical to SEQ ID NO: 270786
  chr17:48589712-48589752
  hypo

SEQ ID NO: 322656 - DNA, 603 bp, Homo sapiens; identical to SEQ ID NO: 270788
  chr17:48613866-48614469
  hypo

SEQ ID NO: 322657 - DNA, 45 bp, Homo sapiens
  chr17:48620600-48620645
  hypo
ccctctcccttgcttcgccaaggctagcgagaaactcagtcttag

SEQ ID NO: 322658 - DNA, 93 bp, Homo sapiens
  chr17:48653424-48653517
  hypo
cagcttctaccatgccgactgccacttagagccagtccgctgccaggcgccccctcccaggtccccatctgaggcatccggcaggactgtggg

SEQ ID NO: 322659 - DNA, 144 bp, Homo sapiens; identical to SEQ ID NO: 217867
  chr17:48687014-48687158
  hypo

SEQ ID NO: 322660 - DNA, 92 bp, Homo sapiens; identical to SEQ ID NO: 217868
  chr17:48687246-48687338
  hypo

SEQ ID NO: 322661 - DNA, 156 bp, Homo sapiens; identical to SEQ ID NO: 217869
  chr17:48763550-48763706
  hypo

SEQ ID NO: 322662 - DNA, 208 bp, Homo sapiens; identical to SEQ ID NO: 270793
  chr17:48764876-48765084
  hypo

SEQ ID NO: 322663 - DNA, 231 bp, Homo sapiens; identical to SEQ ID NO: 217870
  chr17:48776791-48777022
  hypo

SEQ ID NO: 322664 - DNA, 140 bp, Homo sapiens; identical to SEQ ID NO: 217871
  chr17:48844995-48845135
  hypo

SEQ ID NO: 322665 - DNA, 105 bp, Homo sapiens; identical to SEQ ID NO: 217872
  chr17:48881298-48881403
  hypo

SEQ ID NO: 322666 - DNA, 37 bp, Homo sapiens; identical to SEQ ID NO: 270797
  chr17:48890603-48890640
  hypo

SEQ ID NO: 322667 - DNA, 60 bp, Homo sapiens; identical to SEQ ID NO: 217873
  chr17:48911127-48911187
  hypo

SEQ ID NO: 322668 - DNA, 98 bp, Homo sapiens; identical to SEQ ID NO: 217874
  chr17:48911230-48911328
  hypo

SEQ ID NO: 322669 - DNA, 191 bp, Homo sapiens; identical to SEQ ID NO: 270799
  chr17:48921801-48921992
  hypo

SEQ ID NO: 322670 - DNA, 505 bp, Homo sapiens; identical to SEQ ID NO: 270800
  chr17:48970596-48971101
  hypo

SEQ ID NO: 322671 - DNA, 82 bp, Homo sapiens; identical to SEQ ID NO: 270801
  chr17:48971131-48971213
  hypo

SEQ ID NO: 322672 - DNA, 146 bp, Homo sapiens; identical to SEQ ID NO: 270802
  chr17:48995485-48995631
  hypo

SEQ ID NO: 322673 - DNA, 264 bp, Homo sapiens; identical to SEQ ID NO: 292537
  chr17:49008887-49009151
  hypo

SEQ ID NO: 322674 - DNA, 115 bp, Homo sapiens; identical to SEQ ID NO: 204711
  chr17:49028000-49028115
  hypo

SEQ ID NO: 322675 - DNA, 32 bp, Homo sapiens; identical to SEQ ID NO: 270803
  chr17:49047591-49047623
  hypo

SEQ ID NO: 322676 - DNA, 36 bp, Homo sapiens; identical to SEQ ID NO: 217876
  chr17:49129052-49129088
  hypo

SEQ ID NO: 322677 - DNA, 32 bp, Homo sapiens; identical to SEQ ID NO: 270805
  chr17:49194752-49194784
  hypo

SEQ ID NO: 322678 - DNA, 34 bp, Homo sapiens; identical to SEQ ID NO: 217877
  chr17:49229605-49229639
  hypo

SEQ ID NO: 322679 - DNA, 163 bp, Homo sapiens; identical to SEQ ID NO: 217878
  chr17:49281027-49281190
  hypo

SEQ ID NO: 322680 - DNA, 46 bp, Homo sapiens; identical to SEQ ID NO: 270808
  chr17:49354211-49354257
  hypo

SEQ ID NO: 322681 - DNA, 215 bp, Homo sapiens; identical to SEQ ID NO: 292543
  chr17:50235416-50235631
  hypo

SEQ ID NO: 322682 - DNA, 78 bp, Homo sapiens; identical to SEQ ID NO: 217879
  chr17:52832078-52832156
  hypo

SEQ ID NO: 322683 - DNA, 43 bp, Homo sapiens; identical to SEQ ID NO: 270810
  chr17:52865183-52865226
  hypo

SEQ ID NO: 322684 - DNA, 36 bp, Homo sapiens; identical to SEQ ID NO: 217880
  chr17:53314420-53314456
  hypo

SEQ ID NO: 322685 - DNA, 36 bp, Homo sapiens; identical to SEQ ID NO: 270812
  chr17:53398066-53398102
  hypo

SEQ ID NO: 322686 - DNA, 76 bp, Homo sapiens; identical to SEQ ID NO: 217881
  chr17:53409743-53409819
  hypo

SEQ ID NO: 322687 - DNA, 100 bp, Homo sapiens; identical to SEQ ID NO: 270814
  chr17:53410259-53410359
  hypo

SEQ ID NO: 322688 - DNA, 80 bp, Homo sapiens; identical to SEQ ID NO: 270816
  chr17:53550719-53550799
  hypo

SEQ ID NO: 322689 - DNA, 37 bp, Homo sapiens; identical to SEQ ID NO: 270817
  chr17:53579056-53579093
  hypo

SEQ ID NO: 322690 - DNA, 185 bp, Homo sapiens; identical to SEQ ID NO: 270818
  chr17:53852162-53852347
  hypo

SEQ ID NO: 322691 - DNA, 32 bp, Homo sapiens; identical to SEQ ID NO: 292551
  chr17:54672364-54672396
  hypo

SEQ ID NO: 322692 - DNA, 353 bp, Homo sapiens; identical to SEQ ID NO: 204717
  chr17:54910847-54911200
  hypo

SEQ ID NO: 322693 - DNA, 295 bp, Homo sapiens; identical to SEQ ID NO: 204718
  chr17:54911484-54911779
  hypo

SEQ ID NO: 322694 - DNA, 527 bp, Homo sapiens; identical to SEQ ID NO: 204719
  chr17:54911874-54912401
  hypo

SEQ ID NO: 322695 - DNA, 271 bp, Homo sapiens; identical to SEQ ID NO: 217885
  chr17:54976882-54977153
  hypo

SEQ ID NO: 322696 - DNA, 93 bp, Homo sapiens; identical to SEQ ID NO: 217886
  chr17:55037155-55037248
  hypo

SEQ ID NO: 322697 - DNA, 35 bp, Homo sapiens; identical to SEQ ID NO: 270821
  chr17:55161300-55161335
  hypo

SEQ ID NO: 322698 - DNA, 43 bp, Homo sapiens
  chr17:55184835-55184878
  hypo
gtgtgcctctttttctttgtttaaaaaaattattattattttg

SEQ ID NO: 322699 - DNA, 124 bp, Homo sapiens
  chr17:55363924-55364048
  hypo
ctgttggtaattgtgcttctcggaggtgaccacgtcattggtatccgggctccataaacaaggggctgccttaccagtgacctttcccgcctaaaaccgaaggccccaaggtcgcttgtctgat

SEQ ID NO: 322700 - DNA, 154 bp, Homo sapiens
  chr17:55364229-55364383
  hypo
gagatggcagtctggctcattaaaatgccgaggtaggtttaagctgattgccaagtgcgggtcctgcaggtcagagtgtgatgcccagaaacaaagcaaggcctagggagaggctggcctggaggcaactggctcgcgccgcagagagttttga

SEQ ID NO: 322701 - DNA, 62 bp, Homo sapiens; identical to SEQ ID NO: 270824
  chr17:55368497-55368559
  hypo

SEQ ID NO: 322702 - DNA, 58 bp, Homo sapiens; identical to SEQ ID NO: 217887
  chr17:55378749-55378807
  hypo

SEQ ID NO: 322703 - DNA, 66 bp, Homo sapiens; identical to SEQ ID NO: 217888
  chr17:55379076-55379142
  hypo

SEQ ID NO: 322704 - DNA, 34 bp, Homo sapiens; identical to SEQ ID NO: 217889
  chr17:55426663-55426697
  hypo

SEQ ID NO: 322705 - DNA, 44 bp, Homo sapiens; identical to SEQ ID NO: 217890
  chr17:55519664-55519708
  hypo

SEQ ID NO: 322706 - DNA, 124 bp, Homo sapiens; identical to SEQ ID NO: 270829
  chr17:55536230-55536354
  hypo

SEQ ID NO: 322707 - DNA, 67 bp, Homo sapiens; identical to SEQ ID NO: 270830
  chr17:55605295-55605362
  hypo

SEQ ID NO: 322708 - DNA, 32 bp, Homo sapiens; identical to SEQ ID NO: 270831
  chr17:55615595-55615627
  hypo

SEQ ID NO: 322709 - DNA, 144 bp, Homo sapiens; identical to SEQ ID NO: 270832
  chr17:55643992-55644136
  hypo

SEQ ID NO: 322710 - DNA, 474 bp, Homo sapiens; identical to SEQ ID NO: 270833
  chr17:55644492-55644966
  hypo

SEQ ID NO: 322711 - DNA, 91 bp, Homo sapiens; identical to SEQ ID NO: 270834
  chr17:55647400-55647491
  hypo

SEQ ID NO: 322712 - DNA, 151 bp, Homo sapiens; identical to SEQ ID NO: 270835
  chr17:55664889-55665040
  hypo

SEQ ID NO: 322713 - DNA, 182 bp, Homo sapiens; identical to SEQ ID NO: 217892
  chr17:55752305-55752487
  hypo

SEQ ID NO: 322714 - DNA, 382 bp, Homo sapiens; identical to SEQ ID NO: 217893
  chr17:55753392-55753774
  hypo

SEQ ID NO: 322715 - DNA, 70 bp, Homo sapiens; identical to SEQ ID NO: 217894
  chr17:55828323-55828393
  hypo

SEQ ID NO: 322716 - DNA, 269 bp, Homo sapiens; identical to SEQ ID NO: 217895
  chr17:55917219-55917488
  hypo

SEQ ID NO: 322717 - DNA, 136 bp, Homo sapiens; identical to SEQ ID NO: 270840
  chr17:56009116-56009252
  hypo

SEQ ID NO: 322718 - DNA, 462 bp, Homo sapiens; identical to SEQ ID NO: 225439
  chr17:56032083-56032545
  hypo

SEQ ID NO: 322719 - DNA, 39 bp, Homo sapiens; identical to SEQ ID NO: 270842
  chr17:56037720-56037759
  hypo

SEQ ID NO: 322720 - DNA, 476 bp, Homo sapiens; identical to SEQ ID NO: 292570
  chr17:56296380-56296856
  hypo

SEQ ID NO: 322721 - DNA, 215 bp, Homo sapiens; identical to SEQ ID NO: 292571
  chr17:56327007-56327222
  hypo

SEQ ID NO: 322722 - DNA, 77 bp, Homo sapiens; identical to SEQ ID NO: 270843
  chr17:56389453-56389530
  hypo

SEQ ID NO: 322723 - DNA, 610 bp, Homo sapiens; identical to SEQ ID NO: 204722
  chr17:56401719-56402329
  hypo

SEQ ID NO: 322724 - DNA, 1162 bp, Homo sapiens; identical to SEQ ID NO: 204724
  chr17:56429044-56430206
  hypo

SEQ ID NO: 322725 - DNA, 63 bp, Homo sapiens
  chr17:56435237-56435300
  hypo
gcagatgctggaggcgtcaactgggccaggggctggctcagggagggccctggggcactgtgg

SEQ ID NO: 322726 - DNA, 216 bp, Homo sapiens
  chr17:56435330-56435546
  hypo
gttggatctggtgacttgctgatcaggagaaggtggctctggctggggctgtgtccgaggaataggaggcctggactgggggactccggtttctgggccaggcttcctgccatgccactggaaccgctttttgtagtggtggtgccggtggcggtggtagtggacatggctggaaacctgggtttcccctgtgggcaccaccgagtccaaggaacg

SEQ ID NO: 322727 - DNA, 108 bp, Homo sapiens; identical to SEQ ID NO: 270845
  chr17:56439850-56439958
  hypo

SEQ ID NO: 322728 - DNA, 32 bp, Homo sapiens; identical to SEQ ID NO: 217899
  chr17:56471400-56471432
  hypo

SEQ ID NO: 322729 - DNA, 150 bp, Homo sapiens; identical to SEQ ID NO: 217900
  chr17:56569817-56569967
  hypo

SEQ ID NO: 322730 - DNA, 145 bp, Homo sapiens
  chr17:56743008-56743153
  hypo
agttcctaagcattaaatgatagcaaggtacagctttaaacagtaagcaacggtaacaaccctgcaaccccaaagcattcttaagaaccaaaagaaacaatgaaaaaaaaaaataaggctgggcgcggtggctcacgcctataat

SEQ ID NO: 322731 - DNA, 41 bp, Homo sapiens; identical to SEQ ID NO: 270850
  chr17:57007398-57007439
  hypo

SEQ ID NO: 322732 - DNA, 209 bp, Homo sapiens; identical to SEQ ID NO: 217901
  chr17:57185658-57185867
  hypo

SEQ ID NO: 322733 - DNA, 39 bp, Homo sapiens; identical to SEQ ID NO: 217902
  chr17:57244237-57244276
  hypo

SEQ ID NO: 322734 - DNA, 62 bp, Homo sapiens; identical to SEQ ID NO: 217903
  chr17:57297129-57297191
  hypo

SEQ ID NO: 322735 - DNA, 78 bp, Homo sapiens; identical to SEQ ID NO: 270854
  chr17:57465465-57465543
  hypo

SEQ ID NO: 322736 - DNA, 180 bp, Homo sapiens; identical to SEQ ID NO: 217904
  chr17:57476111-57476291
  hypo

SEQ ID NO: 322737 - DNA, 76 bp, Homo sapiens; identical to SEQ ID NO: 217905
  chr17:57591255-57591331
  hypo

SEQ ID NO: 322738 - DNA, 58 bp, Homo sapiens; identical to SEQ ID NO: 270857
  chr17:57743551-57743609
  hypo

SEQ ID NO: 322739 - DNA, 159 bp, Homo sapiens; identical to SEQ ID NO: 217906
  chr17:57787136-57787295
  hypo

SEQ ID NO: 322740 - DNA, 40 bp, Homo sapiens; identical to SEQ ID NO: 270860
  chr17:57788142-57788182
  hypo

SEQ ID NO: 322741 - DNA, 31 bp, Homo sapiens; identical to SEQ ID NO: 217907
  chr17:57832470-57832501
  hypo

SEQ ID NO: 322742 - DNA, 104 bp, Homo sapiens; identical to SEQ ID NO: 270863
  chr17:57902282-57902386
  hypo

SEQ ID NO: 322743 - DNA, 39 bp, Homo sapiens; identical to SEQ ID NO: 270864
  chr17:57932454-57932493
  hypo

SEQ ID NO: 322744 - DNA, 77 bp, Homo sapiens; identical to SEQ ID NO: 217908
  chr17:57937325-57937402
  hypo

SEQ ID NO: 322745 - DNA, 42 bp, Homo sapiens; identical to SEQ ID NO: 270866
  chr17:57938218-57938260
  hypo

SEQ ID NO: 322746 - DNA, 61 bp, Homo sapiens; identical to SEQ ID NO: 270867
  chr17:57948191-57948252
  hypo

SEQ ID NO: 322747 - DNA, 104 bp, Homo sapiens; identical to SEQ ID NO: 270869
  chr17:58497635-58497739
  hypo

SEQ ID NO: 322748 - DNA, 59 bp, Homo sapiens; identical to SEQ ID NO: 217909
  chr17:58512811-58512870
  hypo

SEQ ID NO: 322749 - DNA, 33 bp, Homo sapiens; identical to SEQ ID NO: 270871
  chr17:58559518-58559551
  hypo

SEQ ID NO: 322750 - DNA, 36 bp, Homo sapiens; identical to SEQ ID NO: 217910
  chr17:58590466-58590502
  hypo

SEQ ID NO: 322751 - DNA, 44 bp, Homo sapiens; identical to SEQ ID NO: 270873
  chr17:58628050-58628094
  hypo

SEQ ID NO: 322752 - DNA, 801 bp, Homo sapiens; identical to SEQ ID NO: 204729
  chr17:58677543-58678344
  hypo

SEQ ID NO: 322753 - DNA, 77 bp, Homo sapiens; identical to SEQ ID NO: 217912
  chr17:58690758-58690835
  hypo

SEQ ID NO: 322754 - DNA, 242 bp, Homo sapiens; identical to SEQ ID NO: 204730
  chr17:58700868-58701110
  hypo

SEQ ID NO: 322755 - DNA, 125 bp, Homo sapiens; identical to SEQ ID NO: 204731
  chr17:58711213-58711338
  hypo

SEQ ID NO: 322756 - DNA, 191 bp, Homo sapiens; identical to SEQ ID NO: 204732
  chr17:58725252-58725443
  hypo

SEQ ID NO: 322757 - DNA, 250 bp, Homo sapiens; identical to SEQ ID NO: 204733
  chr17:58733952-58734202
  hypo

SEQ ID NO: 322758 - DNA, 1530 bp, Homo sapiens; identical to SEQ ID NO: 204734
  chr17:58740342-58741872
  hypo

SEQ ID NO: 322759 - DNA, 749 bp, Homo sapiens; identical to SEQ ID NO: 204735
  chr17:58742892-58743641
  hypo

SEQ ID NO: 322760 - DNA, 141 bp, Homo sapiens; identical to SEQ ID NO: 270875
  chr17:59161859-59162000
  hypo

SEQ ID NO: 322761 - DNA, 258 bp, Homo sapiens; identical to SEQ ID NO: 217919
  chr17:59239010-59239268
  hypo

SEQ ID NO: 322762 - DNA, 159 bp, Homo sapiens; identical to SEQ ID NO: 270877
  chr17:59278997-59279156
  hypo

SEQ ID NO: 322763 - DNA, 41 bp, Homo sapiens; identical to SEQ ID NO: 217920
  chr17:59395455-59395496
  hypo

SEQ ID NO: 322764 - DNA, 123 bp, Homo sapiens; identical to SEQ ID NO: 270879
  chr17:59415328-59415451
  hypo

SEQ ID NO: 322765 - DNA, 361 bp, Homo sapiens; identical to SEQ ID NO: 270880
  chr17:59430810-59431171
  hypo

SEQ ID NO: 322766 - DNA, 44 bp, Homo sapiens; identical to SEQ ID NO: 270881
  chr17:59431396-59431440
  hypo

SEQ ID NO: 322767 - DNA, 162 bp, Homo sapiens; identical to SEQ ID NO: 217921
  chr17:59434280-59434442
  hypo

SEQ ID NO: 322768 - DNA, 70 bp, Homo sapiens; identical to SEQ ID NO: 270883
  chr17:59445737-59445807
  hypo

SEQ ID NO: 322769 - DNA, 599 bp, Homo sapiens; identical to SEQ ID NO: 270884
  chr17:59520971-59521570
  hypo

SEQ ID NO: 322770 - DNA, 36 bp, Homo sapiens; identical to SEQ ID NO: 270885
  chr17:60006119-60006155
  hypo

SEQ ID NO: 322771 - DNA, 180 bp, Homo sapiens; identical to SEQ ID NO: 217922
  chr17:60014065-60014245
  hypo

SEQ ID NO: 322772 - DNA, 32 bp, Homo sapiens; identical to SEQ ID NO: 217923
  chr17:60084915-60084947
  hypo

SEQ ID NO: 322773 - DNA, 80 bp, Homo sapiens; identical to SEQ ID NO: 270888
  chr17:60218566-60218646
  hypo

SEQ ID NO: 322774 - DNA, 39 bp, Homo sapiens; identical to SEQ ID NO: 270889
  chr17:60517095-60517134
  hypo

SEQ ID NO: 322775 - DNA, 167 bp, Homo sapiens; identical to SEQ ID NO: 217924
  chr17:60525979-60526146
  hypo

SEQ ID NO: 322776 - DNA, 38 bp, Homo sapiens; identical to SEQ ID NO: 217925
  chr17:60564359-60564397
  hypo

SEQ ID NO: 322777 - DNA, 87 bp, Homo sapiens; identical to SEQ ID NO: 217926
  chr17:60564888-60564975
  hypo

SEQ ID NO: 322778 - DNA, 36 bp, Homo sapiens; identical to SEQ ID NO: 217927
  chr17:60565575-60565611
  hypo

SEQ ID NO: 322779 - DNA, 44 bp, Homo sapiens; identical to SEQ ID NO: 270895
  chr17:60691187-60691231
  hypo

SEQ ID NO: 322780 - DNA, 231 bp, Homo sapiens
  chr17:60744620-60744851
  hypo
gcaccaggcttcccgaactggctcaggcttccgagggagcagagggaggtaggaggttctgagcagggccccgggagccacggtgtgagcttctctctccgggggtgctggcgccctgccctccccacagaccagccggacaaccccagtgaggagaactgtggagtgatccgcactgagtcctcgggcggctggcagaaccgtgactgcagcatcgcgctgccctatgtg

SEQ ID NO: 322781 - DNA, 318 bp, Homo sapiens; identical to SEQ ID NO: 270897
  chr17:60747507-60747825
  hypo

SEQ ID NO: 322782 - DNA, 149 bp, Homo sapiens; identical to SEQ ID NO: 270898
  chr17:60747905-60748054
  hypo

SEQ ID NO: 322783 - DNA, 119 bp, Homo sapiens; identical to SEQ ID NO: 270899
  chr17:60748865-60748984
  hypo

SEQ ID NO: 322784 - DNA, 41 bp, Homo sapiens; identical to SEQ ID NO: 270900
  chr17:60750844-60750885
  hypo

SEQ ID NO: 322785 - DNA, 150 bp, Homo sapiens; identical to SEQ ID NO: 217928
  chr17:60753744-60753894
  hypo

SEQ ID NO: 322786 - DNA, 235 bp, Homo sapiens; identical to SEQ ID NO: 217929
  chr17:60754652-60754887
  hypo

SEQ ID NO: 322787 - DNA, 74 bp, Homo sapiens; identical to SEQ ID NO: 270903
  chr17:60755990-60756064
  hypo

SEQ ID NO: 322788 - DNA, 252 bp, Homo sapiens; identical to SEQ ID NO: 270904
  chr17:60757611-60757863
  hypo

SEQ ID NO: 322789 - DNA, 49 bp, Homo sapiens; identical to SEQ ID NO: 217930
  chr17:60758441-60758490
  hypo

SEQ ID NO: 322790 - DNA, 103 bp, Homo sapiens; identical to SEQ ID NO: 270906
  chr17:60759235-60759338
  hypo

SEQ ID NO: 322791 - DNA, 217 bp, Homo sapiens; identical to SEQ ID NO: 217931
  chr17:60766571-60766788
  hypo

SEQ ID NO: 322792 - DNA, 116 bp, Homo sapiens; identical to SEQ ID NO: 217932
  chr17:60766818-60766934
  hypo

SEQ ID NO: 322793 - DNA, 229 bp, Homo sapiens; identical to SEQ ID NO: 217933
  chr17:60767107-60767336
  hypo

SEQ ID NO: 322794 - DNA, 51 bp, Homo sapiens; identical to SEQ ID NO: 225460
  chr17:60771357-60771408
  hypo

SEQ ID NO: 322795 - DNA, 192 bp, Homo sapiens; identical to SEQ ID NO: 292604
  chr17:60781450-60781642
  hypo

SEQ ID NO: 322796 - DNA, 165 bp, Homo sapiens; identical to SEQ ID NO: 270910
  chr17:60793413-60793578
  hypo

SEQ ID NO: 322797 - DNA, 221 bp, Homo sapiens; identical to SEQ ID NO: 270911
  chr17:60858152-60858373
  hypo

SEQ ID NO: 322798 - DNA, 46 bp, Homo sapiens; identical to SEQ ID NO: 204741
  chr17:60885402-60885448
  hypo

SEQ ID NO: 322799 - DNA, 322 bp, Homo sapiens; identical to SEQ ID NO: 292606
  chr17:60885548-60885870
  hypo

SEQ ID NO: 322800 - DNA, 34 bp, Homo sapiens; identical to SEQ ID NO: 217936
  chr17:61000668-61000702
  hypo

SEQ ID NO: 322801 - DNA, 104 bp, Homo sapiens; identical to SEQ ID NO: 270913
  chr17:61050279-61050383
  hypo

SEQ ID NO: 322802 - DNA, 120 bp, Homo sapiens; identical to SEQ ID NO: 270914
  chr17:61382595-61382715
  hypo

SEQ ID NO: 322803 - DNA, 184 bp, Homo sapiens; identical to SEQ ID NO: 270915
  chr17:61498925-61499109
  hypo

SEQ ID NO: 322804 - DNA, 393 bp, Homo sapiens; identical to SEQ ID NO: 270916
  chr17:61514950-61515343
  hypo

SEQ ID NO: 322805 - DNA, 75 bp, Homo sapiens; identical to SEQ ID NO: 270917
  chr17:61521531-61521606
  hypo

SEQ ID NO: 322806 - DNA, 210 bp, Homo sapiens; identical to SEQ ID NO: 270918
  chr17:61527570-61527780
  hypo

SEQ ID NO: 322807 - DNA, 118 bp, Homo sapiens; identical to SEQ ID NO: 204745
  chr17:61553820-61553938
  hypo

SEQ ID NO: 322808 - DNA, 48 bp, Homo sapiens; identical to SEQ ID NO: 204746
  chr17:61553939-61553987
  hypo

SEQ ID NO: 322809 - DNA, 334 bp, Homo sapiens; identical to SEQ ID NO: 292613
  chr17:61554094-61554428
  hypo

SEQ ID NO: 322810 - DNA, 114 bp, Homo sapiens; identical to SEQ ID NO: 270919
  chr17:61601564-61601678
  hypo

SEQ ID NO: 322811 - DNA, 339 bp, Homo sapiens
  chr17:61607516-61607855
  hypo
ttcattctcaacttcgaggacctggcccagctcctggccaagtgcagcagccgcagcttgtcccagcgcctgttgtcccagagcttcctgggctccggtgaggcagagtgagggtggtggtgggagggacgcatgagggtcccctggccgtggctgctctgactcctggccctggtttcagagggctctcatggcaggccaggcggaccagggccaggcacaggcaggggcaagtacaggaccatcagccagatcccacagttcacgctcaacttcgtggagttcaacttggagaagcaccgctccagctccaccacggagattgagatcatcgcgccc

SEQ ID NO: 322812 - DNA, 89 bp, Homo sapiens; identical to SEQ ID NO: 270921
  chr17:61611415-61611504
  hypo

SEQ ID NO: 322813 - DNA, 103 bp, Homo sapiens; identical to SEQ ID NO: 217940
  chr17:61637142-61637245
  hypo

SEQ ID NO: 322814 - DNA, 109 bp, Homo sapiens; identical to SEQ ID NO: 292617
  chr17:61777763-61777872
  hypo

SEQ ID NO: 322815 - DNA, 73 bp, Homo sapiens; identical to SEQ ID NO: 129188
  chr17:61778423-61778496
  hypo

SEQ ID NO: 322816 - DNA, 147 bp, Homo sapiens; identical to SEQ ID NO: 217941
  chr17:61817226-61817373
  hypo

SEQ ID NO: 322817 - DNA, 92 bp, Homo sapiens; identical to SEQ ID NO: 217942
  chr17:61864835-61864927
  hypo

SEQ ID NO: 322818 - DNA, 41 bp, Homo sapiens; identical to SEQ ID NO: 270926
  chr17:61892318-61892359
  hypo

SEQ ID NO: 322819 - DNA, 283 bp, Homo sapiens; identical to SEQ ID NO: 292622
  chr17:61921000-61921283
  hypo

SEQ ID NO: 322820 - DNA, 78 bp, Homo sapiens; identical to SEQ ID NO: 270927
  chr17:61925862-61925940
  hypo

SEQ ID NO: 322821 - DNA, 148 bp, Homo sapiens; identical to SEQ ID NO: 217944
  chr17:62010938-62011086
  hypo

SEQ ID NO: 322822 - DNA, 231 bp, Homo sapiens; identical to SEQ ID NO: 270929
  chr17:62022680-62022911
  hypo

SEQ ID NO: 322823 - DNA, 344 bp, Homo sapiens; identical to SEQ ID NO: 270930
  chr17:62050024-62050368
  hypo

SEQ ID NO: 322824 - DNA, 193 bp, Homo sapiens; identical to SEQ ID NO: 270931
  chr17:62067099-62067292
  hypo

SEQ ID NO: 322825 - DNA, 115 bp, Homo sapiens; identical to SEQ ID NO: 270932
  chr17:62131680-62131795
  hypo

SEQ ID NO: 322826 - DNA, 37 bp, Homo sapiens; identical to SEQ ID NO: 217945
  chr17:62209843-62209880
  hypo

SEQ ID NO: 322827 - DNA, 165 bp, Homo sapiens; identical to SEQ ID NO: 270934
  chr17:62236399-62236564
  hypo

SEQ ID NO: 322828 - DNA, 40 bp, Homo sapiens; identical to SEQ ID NO: 270935
  chr17:62659472-62659512
  hypo

SEQ ID NO: 322829 - DNA, 34 bp, Homo sapiens; identical to SEQ ID NO: 270936
  chr17:62659957-62659991
  hypo

SEQ ID NO: 322830 - DNA, 66 bp, Homo sapiens; identical to SEQ ID NO: 270937
  chr17:62773360-62773426
  hypo

SEQ ID NO: 322831 - DNA, 255 bp, Homo sapiens
  chr17:62782499-62782754
  hypo
ctggccatgactgcccagggcgtgggctgccctgaacaactgcaccgccccttggcacggcacaaagcagatgttcaatacattcctgcccatagagcgaagcctgctgccctgcgtgcttgggccaggctgtgggtgtggcgaagggtagggctgggaggcagctggctgggtgtcccgcatacctgattgtggtgtcaaactcagaggggaagatgatgtcgtggtgctggcagatctggcagatgaagctgc

SEQ ID NO: 322832 - DNA, 290 bp, Homo sapiens
  chr17:62782784-62783074
  hypo
gctgggaggcaaattcaatcagggccttgaggaatccttcatatacctcatctgcgatctgcggagggtaagtaggaatccttcatacaccccgtctgcgatctgcggagggctggtaaactgaggccccaggcctttcaagcagctgcactgagtcgccatggcaccctgcctagagaacttctacccccagtttccatgcgggcaagaaaagaaaacctccctgaatcaggctgagtagtggcagcatccagcccgtgggtactgaggtcactcggggcttatgggat

SEQ ID NO: 322833 - DNA, 284 bp, Homo sapiens; identical to SEQ ID NO: 270939
  chr17:62783322-62783606
  hypo

SEQ ID NO: 322834 - DNA, 37 bp, Homo sapiens; identical to SEQ ID NO: 270940
  chr17:62831163-62831200
  hypo

SEQ ID NO: 322835 - DNA, 62 bp, Homo sapiens; identical to SEQ ID NO: 204753
  chr17:62915906-62915968
  hypo

SEQ ID NO: 322836 - DNA, 320 bp, Homo sapiens; identical to SEQ ID NO: 270941
  chr17:62935835-62936155
  hypo

SEQ ID NO: 322837 - DNA, 86 bp, Homo sapiens; identical to SEQ ID NO: 270942
  chr17:63056651-63056737
  hypo

SEQ ID NO: 322838 - DNA, 99 bp, Homo sapiens; identical to SEQ ID NO: 270943
  chr17:63069466-63069565
  hypo

SEQ ID NO: 322839 - DNA, 242 bp, Homo sapiens; identical to SEQ ID NO: 270944
  chr17:63152519-63152761
  hypo

SEQ ID NO: 322840 - DNA, 31 bp, Homo sapiens; identical to SEQ ID NO: 270945
  chr17:63459276-63459307
  hypo

SEQ ID NO: 322841 - DNA, 85 bp, Homo sapiens; identical to SEQ ID NO: 270946
  chr17:63497915-63498000
  hypo

SEQ ID NO: 322842 - DNA, 350 bp, Homo sapiens; identical to SEQ ID NO: 217948
  chr17:63534022-63534372
  hypo

SEQ ID NO: 322843 - DNA, 1721 bp, Homo sapiens; identical to SEQ ID NO: 292631
  chr17:63555673-63557394
  hypo

SEQ ID NO: 322844 - DNA, 687 bp, Homo sapiens; identical to SEQ ID NO: 225470
  chr17:64187875-64188562
  hypo

SEQ ID NO: 322845 - DNA, 121 bp, Homo sapiens; identical to SEQ ID NO: 204755
  chr17:64257870-64257991
  hypo

SEQ ID NO: 322846 - DNA, 173 bp, Homo sapiens; identical to SEQ ID NO: 225472
  chr17:64298539-64298712
  hypo

SEQ ID NO: 322847 - DNA, 685 bp, Homo sapiens; identical to SEQ ID NO: 225473
  chr17:64298989-64299674
  hypo

SEQ ID NO: 322848 - DNA, 347 bp, Homo sapiens
  chr17:64671978-64672325
  hypo
gctgacccagcagtacctgtaacgtgtcccacccttgccagggtttgtgtgcctgcatggttttagaggttccaagtcagagcccctaaaccccttgccttattgctagacagcttgaccgcccccggaacatcacgtgggaagggcgctcggtaaatcctgttctggaggcaatctgtcactccaccagtttcccaatcaacatttgccgaggagttctggctcccggtgcagaactgacttgtggcgacgtgagggaactggcagcttcttagacccaagttctccctcgcagcatcgtcagaagaggcccaaagtagagacgcaaacaaaccctgagaacagcg

SEQ ID NO: 322849 - DNA, 73 bp, Homo sapiens; identical to SEQ ID NO: 217952
  chr17:64672597-64672670
  hypo

SEQ ID NO: 322850 - DNA, 386 bp, Homo sapiens; identical to SEQ ID NO: 270949
  chr17:64716161-64716547
  hypo

SEQ ID NO: 322851 - DNA, 437 bp, Homo sapiens; identical to SEQ ID NO: 217953
  chr17:64751203-64751640
  hypo

SEQ ID NO: 322852 - DNA, 73 bp, Homo sapiens; identical to SEQ ID NO: 217954
  chr17:64752172-64752245
  hypo

SEQ ID NO: 322853 - DNA, 221 bp, Homo sapiens; identical to SEQ ID NO: 270952
  chr17:64953396-64953617
  hypo

SEQ ID NO: 322854 - DNA, 142 bp, Homo sapiens; identical to SEQ ID NO: 270953
  chr17:65027610-65027752
  hypo

SEQ ID NO: 322855 - DNA, 273 bp, Homo sapiens; identical to SEQ ID NO: 270954
  chr17:65040725-65040998
  hypo

SEQ ID NO: 322856 - DNA, 37 bp, Homo sapiens; identical to SEQ ID NO: 217955
  chr17:65109642-65109679
  hypo

SEQ ID NO: 322857 - DNA, 56 bp, Homo sapiens; identical to SEQ ID NO: 225474
  chr17:65242142-65242198
  hypo

SEQ ID NO: 322858 - DNA, 91 bp, Homo sapiens; identical to SEQ ID NO: 270956
  chr17:65297543-65297634
  hypo

SEQ ID NO: 322859 - DNA, 40 bp, Homo sapiens; identical to SEQ ID NO: 270957
  chr17:65298392-65298432
  hypo

SEQ ID NO: 322860 - DNA, 42 bp, Homo sapiens; identical to SEQ ID NO: 270958
  chr17:65314671-65314713
  hypo

SEQ ID NO: 322861 - DNA, 41 bp, Homo sapiens; identical to SEQ ID NO: 204758
  chr17:65352419-65352460
  hypo

SEQ ID NO: 322862 - DNA, 44 bp, Homo sapiens; identical to SEQ ID NO: 270961
  chr17:65573104-65573148
  hypo

SEQ ID NO: 322863 - DNA, 271 bp, Homo sapiens; identical to SEQ ID NO: 270962
  chr17:65668882-65669153
  hypo

SEQ ID NO: 322864 - DNA, 37 bp, Homo sapiens; identical to SEQ ID NO: 217957
  chr17:65711559-65711596
  hypo

SEQ ID NO: 322865 - DNA, 39 bp, Homo sapiens; identical to SEQ ID NO: 217958
  chr17:65712253-65712292
  hypo

SEQ ID NO: 322866 - DNA, 201 bp, Homo sapiens; identical to SEQ ID NO: 270965
  chr17:66384596-66384797
  hypo

SEQ ID NO: 322867 - DNA, 218 bp, Homo sapiens; identical to SEQ ID NO: 270966
  chr17:66416571-66416789
  hypo

SEQ ID NO: 322868 - DNA, 302 bp, Homo sapiens
  chr17:66420416-66420718
  hypo
aaaagctcacgctgcgaccgacccgcagagccgatgtgggaaatcacaaaacaacagccccagccctgcatgcagggccccaccgcagctttgttttctaagccaaatgtgctcactagagggttccacggatctgcgggagaaagaagccagacctgcactccatccttttacaattggaagctcaatggacacaaaacaatgatcaggagaagtttccataacaaagcctaatggacattgtttcagtgcccaagtggcagctcctctctggctctaggagctgatgctccaagtcttgg

SEQ ID NO: 322869 - DNA, 32 bp, Homo sapiens; identical to SEQ ID NO: 217961
  chr17:66421685-66421717
  hypo

SEQ ID NO: 322870 - DNA, 107 bp, Homo sapiens; identical to SEQ ID NO: 270969
  chr17:66426284-66426391
  hypo

SEQ ID NO: 322871 - DNA, 43 bp, Homo sapiens; identical to SEQ ID NO: 204760
  chr17:66434420-66434463
  hypo

SEQ ID NO: 322872 - DNA, 450 bp, Homo sapiens; identical to SEQ ID NO: 270971
  chr17:66440110-66440560
  hypo

SEQ ID NO: 322873 - DNA, 230 bp, Homo sapiens; identical to SEQ ID NO: 270972
  chr17:66446928-66447158
  hypo

SEQ ID NO: 322874 - DNA, 32 bp, Homo sapiens; identical to SEQ ID NO: 270973
  chr17:66461887-66461919
  hypo

SEQ ID NO: 322875 - DNA, 308 bp, Homo sapiens; identical to SEQ ID NO: 217965
  chr17:66538786-66539094
  hypo

SEQ ID NO: 322876 - DNA, 507 bp, Homo sapiens; identical to SEQ ID NO: 270975
  chr17:66539462-66539969
  hypo

SEQ ID NO: 322877 - DNA, 146 bp, Homo sapiens; identical to SEQ ID NO: 204761
  chr17:66596140-66596286
  hypo

SEQ ID NO: 322878 - DNA, 79 bp, Homo sapiens; identical to SEQ ID NO: 217968
  chr17:66913061-66913140
  hypo

SEQ ID NO: 322879 - DNA, 127 bp, Homo sapiens; identical to SEQ ID NO: 270977
  chr17:67081066-67081193
  hypo

SEQ ID NO: 322880 - DNA, 209 bp, Homo sapiens; identical to SEQ ID NO: 270978
  chr17:67468376-67468585
  hypo

SEQ ID NO: 322881 - DNA, 204 bp, Homo sapiens; identical to SEQ ID NO: 204763
  chr17:68164928-68165132
  hypo

SEQ ID NO: 322882 - DNA, 31 bp, Homo sapiens; identical to SEQ ID NO: 270979
  chr17:68197136-68197167
  hypo

SEQ ID NO: 322883 - DNA, 174 bp, Homo sapiens; identical to SEQ ID NO: 217970
  chr17:70220136-70220310
  hypo

SEQ ID NO: 322884 - DNA, 51 bp, Homo sapiens; identical to SEQ ID NO: 204765
  chr17:70270193-70270244
  hypo

SEQ ID NO: 322885 - DNA, 93 bp, Homo sapiens; identical to SEQ ID NO: 217972
  chr17:70380740-70380833
  hypo

SEQ ID NO: 322886 - DNA, 148 bp, Homo sapiens; identical to SEQ ID NO: 270982
  chr17:70409455-70409603
  hypo

SEQ ID NO: 322887 - DNA, 342 bp, Homo sapiens; identical to SEQ ID NO: 270983
  chr17:70441816-70442158
  hypo

SEQ ID NO: 322888 - DNA, 64 bp, Homo sapiens; identical to SEQ ID NO: 270984
  chr17:70507522-70507586
  hypo

SEQ ID NO: 322889 - DNA, 141 bp, Homo sapiens
  chr17:70657362-70657503
  hypo
gttctctgaccatggcgccccctggagttgtgcagtgggacactcctgcttgagcgcagattgctgctcagcctggggtgtagttctggggttcgaggtgcacgctctcaggagaggtagtggagagagtcatgggtttct

SEQ ID NO: 322890 - DNA, 403 bp, Homo sapiens
  chr17:70657541-70657944
  hypo
ttgctctccaggctatattccctggccggttgattatgaaaggagaatggcatatccctgacaagccctgcttcaccccggctttcagatcctcccatgtgcgatgagcgtgtgtgttcttgtgtggcaggcccttacatactgttttgattgttatcatcttgccgtgaaaggcctgattgttcaggcctggagatgacatcaccggcttcccactagggcagcctgtcgaggtgtttgatgagcctgcaggtgggaaggggctgggtactccccgcagggctgcccggccctacctgctcagaggagctggcttagcacgcaagggatcttcccccaccctcttggtgcagttctcggaaacttcttggtgcaggctggcgagatgagatgacccatccat

SEQ ID NO: 322891 - DNA, 85 bp, Homo sapiens; identical to SEQ ID NO: 270986
  chr17:70705003-70705088
  hypo

SEQ ID NO: 322892 - DNA, 603 bp, Homo sapiens
  chr17:70712101-70712704
  hypo
ttgggattacagacgtgagccaccgtgcccggccaaaatgtaccatcttgatcaatttttaagtgcacagacaggtcatggtaagtgtgaaaaaatacctaactcccgccctcgttctcctcgcaccctccctgacccaccccaaaaaggcccaagggagcccccctgcattcccaacctgcaggcatgaggtcatacaagcggggtgttgggcagaggcccctggcagatggcagggtagggcccccagcactccattctggacagaatgaaaacctgacgacctatctgatggaattacacggaagaaaggaaattcgtcttttaagaacaagcgggaggcggatgactgaagtcccaaagaatgctgtggttgaacctttttttttttgttgtttgttttctggcacagtctgtctctatgactgagctgagtaacgtgtttcccgtgacaaaggcccctttcttacgacagtttaatagctccaatacgggggacagccctgactctcccatgggccagcgtctgaaggcggccacagaaaaagggagggaaagccgccgctcttctccaagttggtccagactgaactgagagagtat

SEQ ID NO: 322893 - DNA, 87 bp, Homo sapiens
  chr17:70712734-70712821
  hypo
actcctgaaataaaaaatagaagttaccaaagggatggggaacacacatgcagaggcacagagaagaatatggatgaaaaagtggcc

SEQ ID NO: 322894 - DNA, 352 bp, Homo sapiens; identical to SEQ ID NO: 270988
  chr17:70713693-70714045
  hypo

SEQ ID NO: 322895 - DNA, 33 bp, Homo sapiens; identical to SEQ ID NO: 270989
  chr17:70785406-70785439
  hypo

SEQ ID NO: 322896 - DNA, 120 bp, Homo sapiens; identical to SEQ ID NO: 270990
  chr17:70948870-70948990
  hypo

SEQ ID NO: 322897 - DNA, 34 bp, Homo sapiens; identical to SEQ ID NO: 270991
  chr17:71026284-71026318
  hypo

SEQ ID NO: 322898 - DNA, 46 bp, Homo sapiens; identical to SEQ ID NO: 270992
  chr17:71126821-71126867
  hypo

SEQ ID NO: 322899 - DNA, 240 bp, Homo sapiens; identical to SEQ ID NO: 292660
  chr17:71160878-71161118
  hypo

SEQ ID NO: 322900 - DNA, 42 bp, Homo sapiens; identical to SEQ ID NO: 270993
  chr17:71190856-71190898
  hypo

SEQ ID NO: 322901 - DNA, 222 bp, Homo sapiens; identical to SEQ ID NO: 217974
  chr17:71201650-71201872
  hypo

SEQ ID NO: 322902 - DNA, 46 bp, Homo sapiens; identical to SEQ ID NO: 217975
  chr17:71202331-71202377
  hypo

SEQ ID NO: 322903 - DNA, 134 bp, Homo sapiens; identical to SEQ ID NO: 217976
  chr17:71202407-71202541
  hypo

SEQ ID NO: 322904 - DNA, 149 bp, Homo sapiens; identical to SEQ ID NO: 217977
  chr17:71202870-71203019
  hypo

SEQ ID NO: 322905 - DNA, 209 bp, Homo sapiens; identical to SEQ ID NO: 217978
  chr17:71269220-71269429
  hypo

SEQ ID NO: 322906 - DNA, 87 bp, Homo sapiens; identical to SEQ ID NO: 217979
  chr17:71272524-71272611
  hypo

SEQ ID NO: 322907 - DNA, 86 bp, Homo sapiens; identical to SEQ ID NO: 270999
  chr17:71276454-71276540
  hypo

SEQ ID NO: 322908 - DNA, 166 bp, Homo sapiens; identical to SEQ ID NO: 217980
  chr17:71280549-71280715
  hypo

SEQ ID NO: 322909 - DNA, 527 bp, Homo sapiens; identical to SEQ ID NO: 271001
  chr17:71281745-71282272
  hypo

SEQ ID NO: 322910 - DNA, 1600 bp, Homo sapiens; identical to SEQ ID NO: 292664
  chr17:71306967-71308567
  hypo

SEQ ID NO: 322911 - DNA, 102 bp, Homo sapiens; identical to SEQ ID NO: 217983
  chr17:71312422-71312524
  hypo

SEQ ID NO: 322912 - DNA, 258 bp, Homo sapiens; identical to SEQ ID NO: 271003
  chr17:71325320-71325578
  hypo

SEQ ID NO: 322913 - DNA, 154 bp, Homo sapiens; identical to SEQ ID NO: 271004
  chr17:71326305-71326459
  hypo

SEQ ID NO: 322914 - DNA, 199 bp, Homo sapiens; identical to SEQ ID NO: 271005
  chr17:71345761-71345960
  hypo

SEQ ID NO: 322915 - DNA, 204 bp, Homo sapiens; identical to SEQ ID NO: 217985
  chr17:71354224-71354428
  hypo

SEQ ID NO: 322916 - DNA, 137 bp, Homo sapiens; identical to SEQ ID NO: 217986
  chr17:71364486-71364623
  hypo

SEQ ID NO: 322917 - DNA, 120 bp, Homo sapiens
  chr17:71391356-71391476
  hypo
cctggacctggacgcggtactctgtccactcctccaggtcctcgatggtgtagtcccgctccacacggtcctgcaccacgtggctcagcgtcttgccatgcccgtctgaccggctgtact

SEQ ID NO: 322918 - DNA, 83 bp, Homo sapiens; identical to SEQ ID NO: 271009
  chr17:71401759-71401842
  hypo

SEQ ID NO: 322919 - DNA, 90 bp, Homo sapiens; identical to SEQ ID NO: 271010
  chr17:71417096-71417186
  hypo

SEQ ID NO: 322920 - DNA, 241 bp, Homo sapiens; identical to SEQ ID NO: 271011
  chr17:71419536-71419777
  hypo

SEQ ID NO: 322921 - DNA, 128 bp, Homo sapiens; identical to SEQ ID NO: 271012
  chr17:71420061-71420189
  hypo

SEQ ID NO: 322922 - DNA, 297 bp, Homo sapiens; identical to SEQ ID NO: 217987
  chr17:71431601-71431898
  hypo

SEQ ID NO: 322923 - DNA, 170 bp, Homo sapiens; identical to SEQ ID NO: 217988
  chr17:71492642-71492812
  hypo

SEQ ID NO: 322924 - DNA, 229 bp, Homo sapiens; identical to SEQ ID NO: 271015
  chr17:71507291-71507520
  hypo

SEQ ID NO: 322925 - DNA, 35 bp, Homo sapiens; identical to SEQ ID NO: 271016
  chr17:71533240-71533275
  hypo

SEQ ID NO: 322926 - DNA, 343 bp, Homo sapiens; identical to SEQ ID NO: 217989
  chr17:71548539-71548882
  hypo

SEQ ID NO: 322927 - DNA, 432 bp, Homo sapiens; identical to SEQ ID NO: 217990
  chr17:71744648-71745080
  hypo

SEQ ID NO: 322928 - DNA, 160 bp, Homo sapiens; identical to SEQ ID NO: 271019
  chr17:71772787-71772947
  hypo

SEQ ID NO: 322929 - DNA, 144 bp, Homo sapiens; identical to SEQ ID NO: 271020
  chr17:72020385-72020529
  hypo

SEQ ID NO: 322930 - DNA, 55 bp, Homo sapiens; identical to SEQ ID NO: 271021
  chr17:72198104-72198159
  hypo

SEQ ID NO: 322931 - DNA, 472 bp, Homo sapiens; identical to SEQ ID NO: 292670
  chr17:72208668-72209140
  hypo

SEQ ID NO: 322932 - DNA, 200 bp, Homo sapiens
  chr17:72220054-72220254
  hypo
aaacgcaggcgagacgctaaagcagccttgtggggcggacaaagctctgagcacaaggaaggggaccaaggctgctgcaatacatggccggggctgaaataagagactcagaggacagagttctggacaggccgggaggtcacagtcgagtgcggttcccagtacagtggaagagctttgagaagtgactggtgttaaaa

SEQ ID NO: 322933 - DNA, 83 bp, Homo sapiens; identical to SEQ ID NO: 271023
  chr17:72221625-72221708
  hypo

SEQ ID NO: 322934 - DNA, 42 bp, Homo sapiens; identical to SEQ ID NO: 271024
  chr17:72243967-72244009
  hypo

SEQ ID NO: 322935 - DNA, 446 bp, Homo sapiens
  chr17:72249046-72249492
  hypo
gggccagaatgatctgcaggaggcaggctggggaccgcgttttagaggagtctcaaggagacacgcgtggccagagagtcctgggaggaaaggcagggaagtaggacaggacctggctgcctcggagcctccttcacccttcacagccggccatcttctacccattgttctagaaacagagactacgatgacattgatgatgatgacccctttaacccccaagcctggcgcatggcggctcacagtcccccgaggggacagcttcacagcttctgcagctacagcagtggcctgggaagtcagaccagcctgcagcccccggcccagaccatctccaacgcccctgtctccgagtacatgtacggcctgcacacacacccaggctgggtagcactgcccggacagcatgttgggtggggtccacagtgccgggtgtggggaggaag

SEQ ID NO: 322936 - DNA, 222 bp, Homo sapiens; identical to SEQ ID NO: 271026
  chr17:72249921-72250143
  hypo

SEQ ID NO: 322937 - DNA, 336 bp, Homo sapiens; identical to SEQ ID NO: 271027
  chr17:72260300-72260636
  hypo

SEQ ID NO: 322938 - DNA, 310 bp, Homo sapiens
  chr17:72277705-72278015
  hypo
attgccctcctcagagagcaactgcaataactaaacagggtaatgcttagcatatagtcggcactcaggatttttttttaatgcggatgcagcttctggacaaattcctaggatctccccaccaccccttgcttcctgccccaaccagattgagaacctggagctgtcctggcaggacctgtggagatagggaaggggccggtggggtccctcaccccacaccctccctctgccccccagcagccggcaccatggagattgtgtacgtgtacgtcaagaagcgcagcgagttcgggaagcagtgcaattt

SEQ ID NO: 322939 - DNA, 61 bp, Homo sapiens; identical to SEQ ID NO: 217992
  chr17:72278143-72278204
  hypo

SEQ ID NO: 322940 - DNA, 34 bp, Homo sapiens; identical to SEQ ID NO: 217993
  chr17:72290214-72290248
  hypo

SEQ ID NO: 322941 - DNA, 181 bp, Homo sapiens; identical to SEQ ID NO: 217994
  chr17:72367882-72368063
  hypo

SEQ ID NO: 322942 - DNA, 351 bp, Homo sapiens
  chr17:72368130-72368481
  hypo
tgccaccccctgcaccatcgggccgcctcgtccccaggccggacccgccgggccattgctgctgtcctgagtgctgccctgttgaccggcatccccttctactggtggctggacatgtggagagacaccgactcacccagaacactggacgaggtcctcaagtgggctcactgtctcactgtctatttcatcccttgtggcgtgttcctggtcaccaactcggccatcatccaccggctacggaggaggggccggagtgggctgcagccccgggtgggcaagagcacagccatcctcctgggcatcaccacactgttcaccctcctgtgggcgccccgggtcttcgtcatg

SEQ ID NO: 322943 - DNA, 49 bp, Homo sapiens; identical to SEQ ID NO: 271032
  chr17:72370873-72370922
  hypo

SEQ ID NO: 322944 - DNA, 150 bp, Homo sapiens; identical to SEQ ID NO: 271033
  chr17:72391682-72391832
  hypo

SEQ ID NO: 322945 - DNA, 374 bp, Homo sapiens; identical to SEQ ID NO: 204778
  chr17:72449939-72450313
  hypo

SEQ ID NO: 322946 - DNA, 337 bp, Homo sapiens; identical to SEQ ID NO: 54557
  chr17:72450330-72450667
  hypo

SEQ ID NO: 322947 - DNA, 193 bp, Homo sapiens; identical to SEQ ID NO: 271034
  chr17:72700708-72700901
  hypo

SEQ ID NO: 322948 - DNA, 162 bp, Homo sapiens; identical to SEQ ID NO: 271035
  chr17:72799715-72799877
  hypo

SEQ ID NO: 322949 - DNA, 149 bp, Homo sapiens
  chr17:72800465-72800614
  hypo
acactggctcaaaagcagcacctgtgtgcagagaagaaatagctgagtgtgcgctgtgcagtgcaccctggccctgaggagaggagccacagaaccccagagggtttacagccagcagagaggtgcgagggactcggctatgatggccc

SEQ ID NO: 322950 - DNA, 34 bp, Homo sapiens; identical to SEQ ID NO: 271037
  chr17:72808771-72808805
  hypo

SEQ ID NO: 322951 - DNA, 269 bp, Homo sapiens; identical to SEQ ID NO: 217998
  chr17:72811189-72811458
  hypo

SEQ ID NO: 322952 - DNA, 237 bp, Homo sapiens; identical to SEQ ID NO: 271039
  chr17:72811680-72811917
  hypo

SEQ ID NO: 322953 - DNA, 209 bp, Homo sapiens; identical to SEQ ID NO: 271040
  chr17:72818431-72818640
  hypo

SEQ ID NO: 322954 - DNA, 96 bp, Homo sapiens; identical to SEQ ID NO: 217999
  chr17:72823372-72823468
  hypo

SEQ ID NO: 322955 - DNA, 36 bp, Homo sapiens; identical to SEQ ID NO: 218000
  chr17:72823708-72823744
  hypo

SEQ ID NO: 322956 - DNA, 521 bp, Homo sapiens; identical to SEQ ID NO: 218001
  chr17:72824033-72824554
  hypo

SEQ ID NO: 322957 - DNA, 98 bp, Homo sapiens; identical to SEQ ID NO: 271044
  chr17:72827958-72828056
  hypo

SEQ ID NO: 322958 - DNA, 237 bp, Homo sapiens; identical to SEQ ID NO: 271045
  chr17:72875512-72875749
  hypo

SEQ ID NO: 322959 - DNA, 258 bp, Homo sapiens; identical to SEQ ID NO: 204780
  chr17:72920292-72920550
  hypo

SEQ ID NO: 322960 - DNA, 216 bp, Homo sapiens; identical to SEQ ID NO: 292685
  chr17:72920580-72920796
  hypo

SEQ ID NO: 322961 - DNA, 155 bp, Homo sapiens; identical to SEQ ID NO: 271046
  chr17:72940421-72940576
  hypo

SEQ ID NO: 322962 - DNA, 904 bp, Homo sapiens; identical to SEQ ID NO: 292689
  chr17:72983606-72984510
  hypo

SEQ ID NO: 322963 - DNA, 43 bp, Homo sapiens; identical to SEQ ID NO: 271047
  chr17:72999880-72999923
  hypo

SEQ ID NO: 322964 - DNA, 120 bp, Homo sapiens; identical to SEQ ID NO: 271048
  chr17:73003500-73003620
  hypo

SEQ ID NO: 322965 - DNA, 145 bp, Homo sapiens; identical to SEQ ID NO: 271049
  chr17:73003740-73003885
  hypo

SEQ ID NO: 322966 - DNA, 236 bp, Homo sapiens; identical to SEQ ID NO: 271050
  chr17:73016427-73016663
  hypo

SEQ ID NO: 322967 - DNA, 266 bp, Homo sapiens; identical to SEQ ID NO: 271051
  chr17:73016884-73017150
  hypo

SEQ ID NO: 322968 - DNA, 209 bp, Homo sapiens; identical to SEQ ID NO: 271052
  chr17:73055604-73055813
  hypo

SEQ ID NO: 322969 - DNA, 34 bp, Homo sapiens; identical to SEQ ID NO: 271053
  chr17:73067479-73067513
  hypo

SEQ ID NO: 322970 - DNA, 86 bp, Homo sapiens; identical to SEQ ID NO: 11496
  chr17:73073967-73074053
  hypo

SEQ ID NO: 322971 - DNA, 405 bp, Homo sapiens; identical to SEQ ID NO: 271054
  chr17:73075227-73075632
  hypo

SEQ ID NO: 322972 - DNA, 363 bp, Homo sapiens; identical to SEQ ID NO: 225497
  chr17:73084122-73084485
  hypo

SEQ ID NO: 322973 - DNA, 240 bp, Homo sapiens; identical to SEQ ID NO: 271055
  chr17:73086308-73086548
  hypo

SEQ ID NO: 322974 - DNA, 113 bp, Homo sapiens
  chr17:73089510-73089623
  hypo
tgccaaggccaacgcgtgggcctctggccacctcccaggggtggtgcccctctgtgacacctggtacttgggtatgaggaagggatggcttagctgcccagagaaggtggcag

SEQ ID NO: 322975 - DNA, 369 bp, Homo sapiens
  chr17:73090127-73090496
  hypo
gaggtgcctgggttgcaaagccaggcggagccttgcgtcctttctgtgggatccattccgacacaggcgtaggtgtgctggggcgctcagtgccaggctgggaagagcgctggggccagcccaccaagactctcctgctttccagctggctggtctctctgaacctcggttgcttcctctgcaatctgagggtgatgcccggcatcctgcccagctcccacatggaatagcagggaagaccactgtcttccctggaggtgctgggagctgggaaatgtatgcggctgtgaattattaatattttggagaccctcactagggcagggagtggcttcaggataggaaaggggacgcaaggaagacaccagg

SEQ ID NO: 322976 - DNA, 104 bp, Homo sapiens; identical to SEQ ID NO: 218007
  chr17:73090971-73091075
  hypo

SEQ ID NO: 322977 - DNA, 257 bp, Homo sapiens
  chr17:73091180-73091437
  hypo
ccccggctacctcctggctactccctccacttgccaccagcagcctgcctattattccaggtcctgccctcaaactgggagggaggtgaggctcggagaaagcgccaccctcctgggtgagctctgaatctgccacatggcctctggcctgcagggttggggcagggagtgggaatcccagagggctgcttctcacacaggcagagcagggttcctgggccaggggctaggaaccgggcacccggcggggaacctac

SEQ ID NO: 322978 - DNA, 36 bp, Homo sapiens; identical to SEQ ID NO: 271059
  chr17:73094149-73094185
  hypo

SEQ ID NO: 322979 - DNA, 43 bp, Homo sapiens; identical to SEQ ID NO: 218009
  chr17:73095832-73095875
  hypo

SEQ ID NO: 322980 - DNA, 351 bp, Homo sapiens; identical to SEQ ID NO: 271061
  chr17:73096166-73096517
  hypo

SEQ ID NO: 322981 - DNA, 168 bp, Homo sapiens; identical to SEQ ID NO: 271062
  chr17:73100141-73100309
  hypo

SEQ ID NO: 322982 - DNA, 46 bp, Homo sapiens
  chr17:73115914-73115960
  hypo
agctgtattttgagctgcccttgccgagggcctgcccagccaccag

SEQ ID NO: 322983 - DNA, 79 bp, Homo sapiens
  chr17:73124803-73124882
  hypo
aacaaggagcacatcctgcacgcaggaggtgtcccactcatcatcaactgcctatccagccccaatgaggagacggtgc

SEQ ID NO: 322984 - DNA, 180 bp, Homo sapiens; identical to SEQ ID NO: 218011
  chr17:73124912-73125092
  hypo

SEQ ID NO: 322985 - DNA, 221 bp, Homo sapiens; identical to SEQ ID NO: 271065
  chr17:73131495-73131716
  hypo

SEQ ID NO: 322986 - DNA, 161 bp, Homo sapiens; identical to SEQ ID NO: 218012
  chr17:73132152-73132313
  hypo

SEQ ID NO: 322987 - DNA, 34 bp, Homo sapiens; identical to SEQ ID NO: 218013
  chr17:73136019-73136053
  hypo

SEQ ID NO: 322988 - DNA, 32 bp, Homo sapiens; identical to SEQ ID NO: 218014
  chr17:73148048-73148080
  hypo

SEQ ID NO: 322989 - DNA, 40 bp, Homo sapiens; identical to SEQ ID NO: 271069
  chr17:73151712-73151752
  hypo

SEQ ID NO: 322990 - DNA, 120 bp, Homo sapiens; identical to SEQ ID NO: 218015
  chr17:73154765-73154885
  hypo

SEQ ID NO: 322991 - DNA, 120 bp, Homo sapiens; identical to SEQ ID NO: 271071
  chr17:73172030-73172150
  hypo

SEQ ID NO: 322992 - DNA, 180 bp, Homo sapiens; identical to SEQ ID NO: 218016
  chr17:73209661-73209841
  hypo

SEQ ID NO: 322993 - DNA, 63 bp, Homo sapiens; identical to SEQ ID NO: 218017
  chr17:73215386-73215449
  hypo

SEQ ID NO: 322994 - DNA, 39 bp, Homo sapiens
  chr17:73236162-73236201
  hypo
gaagaagtccaggtcggactgttccctctatgaacaaca

SEQ ID NO: 322995 - DNA, 118 bp, Homo sapiens
  chr17:73236302-73236420
  hypo
ttccccgctgcagctggcacgctctggagggaaggacagctaactgcagcccaggagacatgacgctggaaagtggaggtccttggcacagtagtgctgtcaccgatcctgtgcccct

SEQ ID NO: 322996 - DNA, 151 bp, Homo sapiens; identical to SEQ ID NO: 218018
  chr17:73241507-73241658
  hypo

SEQ ID NO: 322997 - DNA, 31 bp, Homo sapiens; identical to SEQ ID NO: 218019
  chr17:73241838-73241869
  hypo

SEQ ID NO: 322998 - DNA, 38 bp, Homo sapiens; identical to SEQ ID NO: 271078
  chr17:73242142-73242180
  hypo

SEQ ID NO: 322999 - DNA, 182 bp, Homo sapiens; identical to SEQ ID NO: 218020
  chr17:73242494-73242676
  hypo

SEQ ID NO: 323000 - DNA, 78 bp, Homo sapiens; identical to SEQ ID NO: 218021
  chr17:73245039-73245117
  hypo

SEQ ID NO: 323001 - DNA, 214 bp, Homo sapiens; identical to SEQ ID NO: 271081
  chr17:73274193-73274407
  hypo

SEQ ID NO: 323002 - DNA, 397 bp, Homo sapiens; identical to SEQ ID NO: 218023
  chr17:73311549-73311946
  hypo

SEQ ID NO: 323003 - DNA, 83 bp, Homo sapiens; identical to SEQ ID NO: 204789
  chr17:73422368-73422451
  hypo

SEQ ID NO: 323004 - DNA, 202 bp, Homo sapiens; identical to SEQ ID NO: 271083
  chr17:73465135-73465337
  hypo

SEQ ID NO: 323005 - DNA, 142 bp, Homo sapiens; identical to SEQ ID NO: 218025
  chr17:73498113-73498255
  hypo

SEQ ID NO: 323006 - DNA, 483 bp, Homo sapiens; identical to SEQ ID NO: 225499
  chr17:73511002-73511485
  hypo

SEQ ID NO: 323007 - DNA, 230 bp, Homo sapiens
  chr17:73517993-73518223
  hypo
agctgggagagtggcagagccgagaacggagtcacgggagccggtaagcggcgctggaacttcgagcagatctccttccccaacatggcttcagacagccgccacacccttctgcgcgccccagccccagagctgctcccggccaacgtggctgggcgggagacagacgctgagtcctggtgccagaagctgaaccagcgcaaggagaagctctccaggcgggaacggga

SEQ ID NO: 323008 - DNA, 117 bp, Homo sapiens; identical to SEQ ID NO: 218028
  chr17:73518286-73518403
  hypo

SEQ ID NO: 323009 - DNA, 77 bp, Homo sapiens; identical to SEQ ID NO: 184556
  chr17:73532630-73532707
  hypo

SEQ ID NO: 323010 - DNA, 99 bp, Homo sapiens; identical to SEQ ID NO: 271087
  chr17:73543234-73543333
  hypo

SEQ ID NO: 323011 - DNA, 50 bp, Homo sapiens; identical to SEQ ID NO: 271089
  chr17:73569825-73569875
  hypo

SEQ ID NO: 323012 - DNA, 80 bp, Homo sapiens; identical to SEQ ID NO: 292709
  chr17:73584287-73584367
  hypo

SEQ ID NO: 323013 - DNA, 178 bp, Homo sapiens; identical to SEQ ID NO: 292710
  chr17:73584951-73585129
  hypo

SEQ ID NO: 323014 - DNA, 214 bp, Homo sapiens; identical to SEQ ID NO: 225501
  chr17:73585691-73585905
  hypo

SEQ ID NO: 323015 - DNA, 136 bp, Homo sapiens; identical to SEQ ID NO: 271092
  chr17:73590839-73590975
  hypo

SEQ ID NO: 323016 - DNA, 286 bp, Homo sapiens
  chr17:73606094-73606380
  hypo
tattcttttcctgtcgtttctgtgaagcatccagggcttctctggtccaaagtcagtttttacatgaatgtcaggcttaagggattccagtgccaggcaggaagcataagtttggactcttcatttcgcccccgctctttcccggcctccaggaagcggtacctccggcggcgggcagctttgggacagctgaacaccatcctgctggtggcccagcccctgctccagaggcggcagagactgcaggtgcaggggcttgggtggggcggttcagggtagaagccag

SEQ ID NO: 323017 - DNA, 71 bp, Homo sapiens; identical to SEQ ID NO: 218031
  chr17:73606459-73606530
  hypo

SEQ ID NO: 323018 - DNA, 56 bp, Homo sapiens; identical to SEQ ID NO: 271094
  chr17:73607689-73607745
  hypo

SEQ ID NO: 323019 - DNA, 273 bp, Homo sapiens
  chr17:73607994-73608267
  hypo
caccgagtgcctgccgcctgaggttcctgcccggcccagcctgactctcccagcagacattgacctgttccctttctccagcttcgtcgccatcggctttcaggtgggcgcccaggcctaagctcttcccgctggcctcaccgctctgagttagcacctgcctgacagatgctgcgtttttttccccgctgtcagctcttgccctccttcctccccagcctttggggctgtgagtagcgctgaattgctctgaaaataaccgttgaatgtaat

SEQ ID NO: 323020 - DNA, 78 bp, Homo sapiens; identical to SEQ ID NO: 271096
  chr17:73611623-73611701
  hypo

SEQ ID NO: 323021 - DNA, 545 bp, Homo sapiens
  chr17:73612817-73613362
  hypo
gtaccagagccgcccgggccccgtgcctgtgcccgtgcagccatccaggtgggcccccacggggaggtggccagggctgtcccgctcctcggggaatcaccctatgaacttagtgacctcttgcttctcccacgaggcctcccaaagctttcctgaggaaaatcgaccccaaggacgaggctctggccaagctgggtatcaacggtgcccactcgtccccgccggtgagcaccccagcctgtctcccccagagtgtgtgctgctgcactggggagctcaaggctctctggggcgaacttggccttgtgctgtgactcagcccgtgtactttctccgtatccccccagatgctgtcccccagcccaggaaagggccccccgccagctgtggctcctcgacccaaggccccgctacagcttgggccctctagctccatcaaggaaaagcaggggccccttctggacctgtttggccagaagctgcctattgcccacacacccccacctccaccagcgccaccactgcctctgcccgaggacccaggg

SEQ ID NO: 323022 - DNA, 541 bp, Homo sapiens; identical to SEQ ID NO: 218033
  chr17:73613424-73613965
  hypo

SEQ ID NO: 323023 - DNA, 212 bp, Homo sapiens
  chr17:73615717-73615929
  hypo
gcaggacccaggagactgcccgagacccaccaccttcctgtagggcgagagtggcagcgacgtgcagctgttagccgtgtcccaccgtgggctgcgactgctcaaggtgacccaaggccccggcctccgccccgaccagctgaagattctctgctcatacaggtgcgctagcccacgaccctgggctagaggtgggggcaggtggcaaggtg

SEQ ID NO: 323024 - DNA, 123 bp, Homo sapiens
  chr17:73616587-73616710
  hypo
cctgccgacatagtgcagccggctgccgctcccgacttttccttctccaaggagcagaggagtggctggcacaagggtcagctgtccaacggggaaccagggctggctcggtgggacagggcc

SEQ ID NO: 323025 - DNA, 38 bp, Homo sapiens; identical to SEQ ID NO: 271099
  chr17:73618512-73618550
  hypo

SEQ ID NO: 323026 - DNA, 190 bp, Homo sapiens; identical to SEQ ID NO: 218035
  chr17:73635125-73635315
  hypo

SEQ ID NO: 323027 - DNA, 75 bp, Homo sapiens
  chr17:73638313-73638388
  hypo
ccagacagagcatcccgaggtgcctccccggggcttccccagagcctcaagaagtctgtgtttttcacatgcttc

SEQ ID NO: 323028 - DNA, 47 bp, Homo sapiens; identical to SEQ ID NO: 218036
  chr17:73639435-73639482
  hypo

SEQ ID NO: 323029 - DNA, 157 bp, Homo sapiens; identical to SEQ ID NO: 218037
  chr17:73639512-73639669
  hypo

SEQ ID NO: 323030 - DNA, 156 bp, Homo sapiens; identical to SEQ ID NO: 218038
  chr17:73680637-73680793
  hypo

SEQ ID NO: 323031 - DNA, 443 bp, Homo sapiens; identical to SEQ ID NO: 271105
  chr17:73691884-73692327
  hypo

SEQ ID NO: 323032 - DNA, 46 bp, Homo sapiens; identical to SEQ ID NO: 271107
  chr17:73718995-73719041
  hypo

SEQ ID NO: 323033 - DNA, 220 bp, Homo sapiens; identical to SEQ ID NO: 271108
  chr17:73726225-73726445
  hypo

SEQ ID NO: 323034 - DNA, 35 bp, Homo sapiens; identical to SEQ ID NO: 271109
  chr17:73736028-73736063
  hypo

SEQ ID NO: 323035 - DNA, 63 bp, Homo sapiens; identical to SEQ ID NO: 271110
  chr17:73739826-73739889
  hypo

SEQ ID NO: 323036 - DNA, 71 bp, Homo sapiens; identical to SEQ ID NO: 271111
  chr17:73753020-73753091
  hypo

SEQ ID NO: 323037 - DNA, 49 bp, Homo sapiens; identical to SEQ ID NO: 271112
  chr17:73792091-73792140
  hypo

SEQ ID NO: 323038 - DNA, 36 bp, Homo sapiens; identical to SEQ ID NO: 218040
  chr17:73800544-73800580
  hypo

SEQ ID NO: 323039 - DNA, 174 bp, Homo sapiens
  chr17:73808671-73808845
  hypo
ggcatccacacctcggccgcgccctccctataatcctgctcatagctgccctggggatttggctcaccaccacctactgcctgctctagccgaggccccgacctggcccgcatcccaccctacacccaccattcaaaaggcgcctctaggggcgttttccctgacacatcatgt

SEQ ID NO: 323040 - DNA, 31 bp, Homo sapiens; identical to SEQ ID NO: 218041
  chr17:73811153-73811184
  hypo

SEQ ID NO: 323041 - DNA, 215 bp, Homo sapiens; identical to SEQ ID NO: 218042
  chr17:73811214-73811429
  hypo

SEQ ID NO: 323042 - DNA, 243 bp, Homo sapiens; identical to SEQ ID NO: 271117
  chr17:73821494-73821737
  hypo

SEQ ID NO: 323043 - DNA, 44 bp, Homo sapiens; identical to SEQ ID NO: 218043
  chr17:73822058-73822102
  hypo

SEQ ID NO: 323044 - DNA, 165 bp, Homo sapiens; identical to SEQ ID NO: 218044
  chr17:73830728-73830893
  hypo

SEQ ID NO: 323045 - DNA, 420 bp, Homo sapiens; identical to SEQ ID NO: 271120
  chr17:73836061-73836481
  hypo

SEQ ID NO: 323046 - DNA, 315 bp, Homo sapiens; identical to SEQ ID NO: 271121
  chr17:73870804-73871119
  hypo

SEQ ID NO: 323047 - DNA, 45 bp, Homo sapiens; identical to SEQ ID NO: 225503
  chr17:73874667-73874712
  hypo

SEQ ID NO: 323048 - DNA, 65 bp, Homo sapiens; identical to SEQ ID NO: 218045
  chr17:73887194-73887259
  hypo

SEQ ID NO: 323049 - DNA, 160 bp, Homo sapiens; identical to SEQ ID NO: 218046
  chr17:73890917-73891077
  hypo

SEQ ID NO: 323050 - DNA, 80 bp, Homo sapiens
  chr17:73895617-73895697
  hypo
tcagagaagtcaatcggctggtcctgcttgaagagcaggaaggcaagacggtggatgccggagcctcgggcagggaaggg

SEQ ID NO: 323051 - DNA, 31 bp, Homo sapiens; identical to SEQ ID NO: 218047
  chr17:73904785-73904816
  hypo

SEQ ID NO: 323052 - DNA, 110 bp, Homo sapiens; identical to SEQ ID NO: 218048
  chr17:73910328-73910438
  hypo

SEQ ID NO: 323053 - DNA, 170 bp, Homo sapiens; identical to SEQ ID NO: 271127
  chr17:73911102-73911272
  hypo

SEQ ID NO: 323054 - DNA, 44 bp, Homo sapiens; identical to SEQ ID NO: 271128
  chr17:73915888-73915932
  hypo

SEQ ID NO: 323055 - DNA, 128 bp, Homo sapiens; identical to SEQ ID NO: 271129
  chr17:73923089-73923217
  hypo

SEQ ID NO: 323056 - DNA, 371 bp, Homo sapiens; identical to SEQ ID NO: 271130
  chr17:74003302-74003673
  hypo

SEQ ID NO: 323057 - DNA, 535 bp, Homo sapiens; identical to SEQ ID NO: 271131
  chr17:74003894-74004429
  hypo

SEQ ID NO: 323058 - DNA, 289 bp, Homo sapiens
  chr17:74005166-74005455
  hypo
ctgcaccaccaccttctcctcgggcttcctcctctccagcagcaggcgcttgctctgcagctcgtacaccgcgtcctccgcggcccgcctcttctgggccgcctcccgcacctcctggcggagccgctctgcttctttctccagcaccgggtccttctcgtggcgcaccacctccttgctcaccgtcttggtctccaccttggcccgctcgcgcctccactcgtcgcgctcaccctgcaggcggatgagctgctcctgggagcgcccgtggctgttgacgagctcgttg

SEQ ID NO: 323059 - DNA, 169 bp, Homo sapiens; identical to SEQ ID NO: 218049
  chr17:74005497-74005666
  hypo

SEQ ID NO: 323060 - DNA, 102 bp, Homo sapiens; identical to SEQ ID NO: 271133
  chr17:74008701-74008803
  hypo

SEQ ID NO: 323061 - DNA, 223 bp, Homo sapiens; identical to SEQ ID NO: 218050
  chr17:74013674-74013897
  hypo

SEQ ID NO: 323062 - DNA, 36 bp, Homo sapiens; identical to SEQ ID NO: 271135
  chr17:74014165-74014201
  hypo

SEQ ID NO: 323063 - DNA, 155 bp, Homo sapiens; identical to SEQ ID NO: 218051
  chr17:74019375-74019530
  hypo

SEQ ID NO: 323064 - DNA, 383 bp, Homo sapiens; identical to SEQ ID NO: 271137
  chr17:74021479-74021862
  hypo

SEQ ID NO: 323065 - DNA, 145 bp, Homo sapiens
  chr17:74028159-74028304
  hypo
gagcgagactccggctcaaaaaaaaaaaaaaaccaaaaaaaaatttttttaaaggcatgcatgcaaagatagcatctccccaccttgaagggcctggtgagtccttcctctcacctggccctggcttgctccttggtggattgag

SEQ ID NO: 323066 - DNA, 122 bp, Homo sapiens
  chr17:74028413-74028535
  hypo
ctggcagctcacctggcctgggacctgagcaagaggcttgatcagaccaagaacagtgagactctcggctccaagactgccagacacagctgggcatatgtgcagcccggccacagggtggc

SEQ ID NO: 323067 - DNA, 32 bp, Homo sapiens; identical to SEQ ID NO: 271139
  chr17:74040832-74040864
  hypo

SEQ ID NO: 323068 - DNA, 31 bp, Homo sapiens; identical to SEQ ID NO: 271140
  chr17:74041104-74041135
  hypo

SEQ ID NO: 323069 - DNA, 226 bp, Homo sapiens; identical to SEQ ID NO: 218052
  chr17:74042043-74042269
  hypo

SEQ ID NO: 323070 - DNA, 170 bp, Homo sapiens; identical to SEQ ID NO: 271142
  chr17:74046449-74046619
  hypo

SEQ ID NO: 323071 - DNA, 44 bp, Homo sapiens; identical to SEQ ID NO: 218053
  chr17:74049485-74049529
  hypo

SEQ ID NO: 323072 - DNA, 40 bp, Homo sapiens; identical to SEQ ID NO: 218054
  chr17:74050637-74050677
  hypo

SEQ ID NO: 323073 - DNA, 39 bp, Homo sapiens; identical to SEQ ID NO: 218055
  chr17:74050857-74050896
  hypo

SEQ ID NO: 323074 - DNA, 132 bp, Homo sapiens; identical to SEQ ID NO: 292720
  chr17:74072091-74072223
  hypo

SEQ ID NO: 323075 - DNA, 131 bp, Homo sapiens; identical to SEQ ID NO: 204799
  chr17:74072580-74072711
  hypo

SEQ ID NO: 323076 - DNA, 121 bp, Homo sapiens; identical to SEQ ID NO: 271147
  chr17:74081023-74081144
  hypo

SEQ ID NO: 323077 - DNA, 71 bp, Homo sapiens; identical to SEQ ID NO: 271148
  chr17:74086417-74086488
  hypo

SEQ ID NO: 323078 - DNA, 414 bp, Homo sapiens; identical to SEQ ID NO: 271149
  chr17:74086702-74087116
  hypo

SEQ ID NO: 323079 - DNA, 50 bp, Homo sapiens; identical to SEQ ID NO: 271150
  chr17:74094005-74094055
  hypo

SEQ ID NO: 323080 - DNA, 59 bp, Homo sapiens; identical to SEQ ID NO: 292726
  chr17:74235822-74235881
  hypo

SEQ ID NO: 323081 - DNA, 973 bp, Homo sapiens; identical to SEQ ID NO: 129386
  chr17:74235976-74236949
  hypo

SEQ ID NO: 323082 - DNA, 320 bp, Homo sapiens
  chr17:74269541-74269861
  hypo
gtgccttcaggccccggctgtctctgcagcagcccactcaagggagagaagcggagggcggcaaacagaaacctgcccagccggctgcaggggttcgcctccagccattggcactgcttccccggaatcccacgccaggggtcaggaaccaccctgagccagcagcaagagcgcagcaggcagctgccaccctcacccccagagtgctggacactgacagcacgggccccagcaccccaggctagaaggcaggtctagagccagaaggcagggcacccccaatctagctgaggccaggagagagctggtggggtgagcac

SEQ ID NO: 323083 - DNA, 113 bp, Homo sapiens; identical to SEQ ID NO: 218057
  chr17:74275071-74275184
  hypo

SEQ ID NO: 323084 - DNA, 509 bp, Homo sapiens; identical to SEQ ID NO: 271153
  chr17:74303710-74304219
  hypo

SEQ ID NO: 323085 - DNA, 33 bp, Homo sapiens; identical to SEQ ID NO: 271154
  chr17:74333712-74333745
  hypo

SEQ ID NO: 323086 - DNA, 168 bp, Homo sapiens; identical to SEQ ID NO: 271155
  chr17:74364507-74364675
  hypo

SEQ ID NO: 323087 - DNA, 291 bp, Homo sapiens; identical to SEQ ID NO: 218058
  chr17:74387385-74387676
  hypo

SEQ ID NO: 323088 - DNA, 120 bp, Homo sapiens; identical to SEQ ID NO: 271157
  chr17:74388648-74388768
  hypo

SEQ ID NO: 323089 - DNA, 132 bp, Homo sapiens; identical to SEQ ID NO: 218059
  chr17:74390231-74390363
  hypo

SEQ ID NO: 323090 - DNA, 193 bp, Homo sapiens; identical to SEQ ID NO: 218060
  chr17:74390459-74390652
  hypo

SEQ ID NO: 323091 - DNA, 151 bp, Homo sapiens; identical to SEQ ID NO: 218061
  chr17:74391568-74391719
  hypo

SEQ ID NO: 323092 - DNA, 368 bp, Homo sapiens; identical to SEQ ID NO: 218062
  chr17:74392144-74392512
  hypo

SEQ ID NO: 323093 - DNA, 39 bp, Homo sapiens; identical to SEQ ID NO: 271161
  chr17:74397333-74397372
  hypo

SEQ ID NO: 323094 - DNA, 118 bp, Homo sapiens; identical to SEQ ID NO: 218063
  chr17:74415734-74415852
  hypo

SEQ ID NO: 323095 - DNA, 34 bp, Homo sapiens; identical to SEQ ID NO: 218064
  chr17:74427555-74427589
  hypo

SEQ ID NO: 323096 - DNA, 156 bp, Homo sapiens; identical to SEQ ID NO: 218065
  chr17:74435187-74435343
  hypo

SEQ ID NO: 323097 - DNA, 132 bp, Homo sapiens; identical to SEQ ID NO: 271165
  chr17:74472949-74473081
  hypo

SEQ ID NO: 323098 - DNA, 76 bp, Homo sapiens; identical to SEQ ID NO: 218066
  chr17:74475341-74475417
  hypo

SEQ ID NO: 323099 - DNA, 150 bp, Homo sapiens; identical to SEQ ID NO: 271167
  chr17:74529368-74529518
  hypo

SEQ ID NO: 323100 - DNA, 194 bp, Homo sapiens; identical to SEQ ID NO: 218067
  chr17:74531809-74532003
  hypo

SEQ ID NO: 323101 - DNA, 68 bp, Homo sapiens; identical to SEQ ID NO: 218068
  chr17:74533185-74533253
  hypo

SEQ ID NO: 323102 - DNA, 93 bp, Homo sapiens; identical to SEQ ID NO: 218069
  chr17:74551787-74551880
  hypo

SEQ ID NO: 323103 - DNA, 190 bp, Homo sapiens; identical to SEQ ID NO: 271171
  chr17:74571583-74571773
  hypo

SEQ ID NO: 323104 - DNA, 180 bp, Homo sapiens; identical to SEQ ID NO: 271172
  chr17:74574205-74574385
  hypo

SEQ ID NO: 323105 - DNA, 34 bp, Homo sapiens; identical to SEQ ID NO: 218070
  chr17:74579152-74579186
  hypo

SEQ ID NO: 323106 - DNA, 285 bp, Homo sapiens; identical to SEQ ID NO: 218071
  chr17:74621443-74621728
  hypo

SEQ ID NO: 323107 - DNA, 149 bp, Homo sapiens; identical to SEQ ID NO: 271175
  chr17:74623752-74623901
  hypo

SEQ ID NO: 323108 - DNA, 148 bp, Homo sapiens; identical to SEQ ID NO: 218073
  chr17:74625059-74625207
  hypo

SEQ ID NO: 323109 - DNA, 180 bp, Homo sapiens; identical to SEQ ID NO: 271177
  chr17:74629609-74629789
  hypo

SEQ ID NO: 323110 - DNA, 41 bp, Homo sapiens; identical to SEQ ID NO: 271178
  chr17:74638682-74638723
  hypo

SEQ ID NO: 323111 - DNA, 79 bp, Homo sapiens; identical to SEQ ID NO: 271179
  chr17:74640873-74640952
  hypo

SEQ ID NO: 323112 - DNA, 40 bp, Homo sapiens; identical to SEQ ID NO: 271180
  chr17:74651097-74651137
  hypo

SEQ ID NO: 323113 - DNA, 250 bp, Homo sapiens; identical to SEQ ID NO: 218074
  chr17:74667047-74667297
  hypo

SEQ ID NO: 323114 - DNA, 224 bp, Homo sapiens; identical to SEQ ID NO: 204804
  chr17:74732259-74732483
  hypo

SEQ ID NO: 323115 - DNA, 232 bp, Homo sapiens; identical to SEQ ID NO: 204805
  chr17:74732973-74733205
  hypo

SEQ ID NO: 323116 - DNA, 253 bp, Homo sapiens; identical to SEQ ID NO: 218077
  chr17:74771040-74771293
  hypo

SEQ ID NO: 323117 - DNA, 87 bp, Homo sapiens; identical to SEQ ID NO: 218078
  chr17:74771572-74771659
  hypo

SEQ ID NO: 323118 - DNA, 189 bp, Homo sapiens; identical to SEQ ID NO: 271184
  chr17:74858668-74858857
  hypo

SEQ ID NO: 323119 - DNA, 88 bp, Homo sapiens; identical to SEQ ID NO: 204806
  chr17:74864229-74864317
  hypo

SEQ ID NO: 323120 - DNA, 40 bp, Homo sapiens; identical to SEQ ID NO: 292742
  chr17:74864603-74864643
  hypo

SEQ ID NO: 323121 - DNA, 117 bp, Homo sapiens
  chr17:74908613-74908730
  hypo
tgttgtagtttattcgcagatgttcacggcagatgtcctggccactgatggagcaacaaggctggacggatgagccggtcccgctctgctcctcgggtctcggtgtttcaattaact

SEQ ID NO: 323122 - DNA, 131 bp, Homo sapiens; identical to SEQ ID NO: 218081
  chr17:74908814-74908945
  hypo

SEQ ID NO: 323123 - DNA, 59 bp, Homo sapiens; identical to SEQ ID NO: 271186
  chr17:74928819-74928878
  hypo

SEQ ID NO: 323124 - DNA, 136 bp, Homo sapiens; identical to SEQ ID NO: 271187
  chr17:75132759-75132895
  hypo

SEQ ID NO: 323125 - DNA, 37 bp, Homo sapiens; identical to SEQ ID NO: 218082
  chr17:75196310-75196347
  hypo

SEQ ID NO: 323126 - DNA, 216 bp, Homo sapiens; identical to SEQ ID NO: 218083
  chr17:75196527-75196743
  hypo

SEQ ID NO: 323127 - DNA, 671 bp, Homo sapiens; identical to SEQ ID NO: 218084
  chr17:75206843-75207514
  hypo

SEQ ID NO: 323128 - DNA, 209 bp, Homo sapiens
  chr17:75207630-75207839
  hypo
cccctgcctgctctttctttagctttcaccttctccagggccttctgttctgtccagcccagggcagtcctctgaaccactcatgtacgagctcacagtgtttggtgtttctaagacctggcctcttagagtgtgtgtgaagatggtgtatgggagatcttggacctctaggtgcaggtcacaaagaacacagagcttggtgcatgaca

SEQ ID NO: 323129 - DNA, 336 bp, Homo sapiens; identical to SEQ ID NO: 218086
  chr17:75207987-75208323
  hypo

SEQ ID NO: 323130 - DNA, 349 bp, Homo sapiens; identical to SEQ ID NO: 218087
  chr17:75209343-75209692
  hypo

SEQ ID NO: 323131 - DNA, 723 bp, Homo sapiens; identical to SEQ ID NO: 218088
  chr17:75213327-75214050
  hypo

SEQ ID NO: 323132 - DNA, 35 bp, Homo sapiens; identical to SEQ ID NO: 271193
  chr17:75300269-75300304
  hypo

SEQ ID NO: 323133 - DNA, 114 bp, Homo sapiens; identical to SEQ ID NO: 271194
  chr17:75303152-75303266
  hypo

SEQ ID NO: 323134 - DNA, 59 bp, Homo sapiens; identical to SEQ ID NO: 271195
  chr17:75304442-75304501
  hypo

SEQ ID NO: 323135 - DNA, 158 bp, Homo sapiens; identical to SEQ ID NO: 271196
  chr17:75306482-75306640
  hypo

SEQ ID NO: 323136 - DNA, 201 bp, Homo sapiens; identical to SEQ ID NO: 271197
  chr17:75354844-75355045
  hypo

SEQ ID NO: 323137 - DNA, 146 bp, Homo sapiens; identical to SEQ ID NO: 271198
  chr17:75373025-75373171
  hypo

SEQ ID NO: 323138 - DNA, 387 bp, Homo sapiens; identical to SEQ ID NO: 271199
  chr17:75398244-75398631
  hypo

SEQ ID NO: 323139 - DNA, 75 bp, Homo sapiens
  chr17:75411741-75411816
  hypo
ctccagtgctgccctgtgcccggcaccgaagccgagggaaggcagcattagtatgagctcccagcccaccgggct

SEQ ID NO: 323140 - DNA, 110 bp, Homo sapiens; identical to SEQ ID NO: 218091
  chr17:75411846-75411956
  hypo

SEQ ID NO: 323141 - DNA, 115 bp, Homo sapiens
  chr17:75413667-75413782
  hypo
cacatagccaaacaaaagcacgtttctaactgaagctgttggagagttcctgaggactttataccagacaagggccggtaagtggaagttcaatacgcaggagccattccttttg

SEQ ID NO: 323142 - DNA, 334 bp, Homo sapiens; identical to SEQ ID NO: 218092
  chr17:75413812-75414146
  hypo

SEQ ID NO: 323143 - DNA, 166 bp, Homo sapiens; identical to SEQ ID NO: 271202
  chr17:75420113-75420279
  hypo

SEQ ID NO: 323144 - DNA, 278 bp, Homo sapiens; identical to SEQ ID NO: 218093
  chr17:75434081-75434359
  hypo

SEQ ID NO: 323145 - DNA, 141 bp, Homo sapiens; identical to SEQ ID NO: 271204
  chr17:75445189-75445330
  hypo

SEQ ID NO: 323146 - DNA, 88 bp, Homo sapiens; identical to SEQ ID NO: 271205
  chr17:75452015-75452103
  hypo

SEQ ID NO: 323147 - DNA, 59 bp, Homo sapiens; identical to SEQ ID NO: 271206
  chr17:75452368-75452427
  hypo

SEQ ID NO: 323148 - DNA, 147 bp, Homo sapiens; identical to SEQ ID NO: 218094
  chr17:75452754-75452901
  hypo

SEQ ID NO: 323149 - DNA, 183 bp, Homo sapiens; identical to SEQ ID NO: 218095
  chr17:75473918-75474101
  hypo

SEQ ID NO: 323150 - DNA, 313 bp, Homo sapiens; identical to SEQ ID NO: 271209
  chr17:75476524-75476837
  hypo

SEQ ID NO: 323151 - DNA, 515 bp, Homo sapiens; identical to SEQ ID NO: 218096
  chr17:75476867-75477382
  hypo

SEQ ID NO: 323152 - DNA, 105 bp, Homo sapiens; identical to SEQ ID NO: 93616
  chr17:75478248-75478353
  hypo

SEQ ID NO: 323153 - DNA, 122 bp, Homo sapiens; identical to SEQ ID NO: 218097
  chr17:75490716-75490838
  hypo

SEQ ID NO: 323154 - DNA, 73 bp, Homo sapiens; identical to SEQ ID NO: 271213
  chr17:75502859-75502932
  hypo

SEQ ID NO: 323155 - DNA, 222 bp, Homo sapiens; identical to SEQ ID NO: 271214
  chr17:75522311-75522533
  hypo

SEQ ID NO: 323156 - DNA, 220 bp, Homo sapiens
  chr17:75523272-75523492
  hypo
gagccagaaacaatgagaagcacaattccggcagcatctctcctcccggtcatttgcatagcacaacctctccctccaccccctcctgtctcccacgtggatcttcatgtaattaattaatatcgcgttcatcagagcttaattcatgttcttgtaatatacaaggattaaaaaaaaatcctaccaagagagcagtaataggctccggcttttctggtct

SEQ ID NO: 323157 - DNA, 41 bp, Homo sapiens; identical to SEQ ID NO: 271218
  chr17:75586408-75586449
  hypo

SEQ ID NO: 323158 - DNA, 116 bp, Homo sapiens; identical to SEQ ID NO: 271219
  chr17:75599499-75599615
  hypo

SEQ ID NO: 323159 - DNA, 31 bp, Homo sapiens; identical to SEQ ID NO: 271220
  chr17:75603635-75603666
  hypo

SEQ ID NO: 323160 - DNA, 206 bp, Homo sapiens; identical to SEQ ID NO: 271221
  chr17:75643461-75643667
  hypo

SEQ ID NO: 323161 - DNA, 49 bp, Homo sapiens; identical to SEQ ID NO: 271222
  chr17:75733570-75733619
  hypo

SEQ ID NO: 323162 - DNA, 67 bp, Homo sapiens
  chr17:75797044-75797111
  hypo
catatggtctttcagtgaggcgcgtggagcggtgatttatgactgtcaccagcccagcgctgtctcc

SEQ ID NO: 323163 - DNA, 34 bp, Homo sapiens; identical to SEQ ID NO: 271225
  chr17:75798045-75798079
  hypo

SEQ ID NO: 323164 - DNA, 61 bp, Homo sapiens; identical to SEQ ID NO: 271226
  chr17:75828065-75828126
  hypo

SEQ ID NO: 323165 - DNA, 151 bp, Homo sapiens; identical to SEQ ID NO: 271227
  chr17:75840892-75841043
  hypo

SEQ ID NO: 323166 - DNA, 133 bp, Homo sapiens; identical to SEQ ID NO: 271228
  chr17:75844070-75844203
  hypo

SEQ ID NO: 323167 - DNA, 309 bp, Homo sapiens; identical to SEQ ID NO: 271229
  chr17:75848773-75849082
  hypo

SEQ ID NO: 323168 - DNA, 182 bp, Homo sapiens; identical to SEQ ID NO: 271230
  chr17:75875369-75875551
  hypo

SEQ ID NO: 323169 - DNA, 42 bp, Homo sapiens; identical to SEQ ID NO: 271231
  chr17:75896717-75896759
  hypo

SEQ ID NO: 323170 - DNA, 182 bp, Homo sapiens; identical to SEQ ID NO: 218099
  chr17:76034963-76035145
  hypo

SEQ ID NO: 323171 - DNA, 48 bp, Homo sapiens; identical to SEQ ID NO: 271233
  chr17:76046728-76046776
  hypo

SEQ ID NO: 323172 - DNA, 42 bp, Homo sapiens; identical to SEQ ID NO: 271234
  chr17:76076532-76076574
  hypo

SEQ ID NO: 323173 - DNA, 68 bp, Homo sapiens; identical to SEQ ID NO: 271235
  chr17:76089069-76089137
  hypo

SEQ ID NO: 323174 - DNA, 96 bp, Homo sapiens; identical to SEQ ID NO: 218100
  chr17:76100941-76101037
  hypo

SEQ ID NO: 323175 - DNA, 53 bp, Homo sapiens; identical to SEQ ID NO: 271237
  chr17:76104281-76104334
  hypo

SEQ ID NO: 323176 - DNA, 62 bp, Homo sapiens; identical to SEQ ID NO: 271238
  chr17:76106967-76107029
  hypo

SEQ ID NO: 323177 - DNA, 133 bp, Homo sapiens; identical to SEQ ID NO: 218101
  chr17:76114990-76115123
  hypo

SEQ ID NO: 323178 - DNA, 309 bp, Homo sapiens; identical to SEQ ID NO: 271240
  chr17:76118506-76118815
  hypo

SEQ ID NO: 323179 - DNA, 117 bp, Homo sapiens; identical to SEQ ID NO: 218102
  chr17:76121808-76121925
  hypo

SEQ ID NO: 323180 - DNA, 189 bp, Homo sapiens; identical to SEQ ID NO: 218103
  chr17:76129456-76129645
  hypo

SEQ ID NO: 323181 - DNA, 142 bp, Homo sapiens; identical to SEQ ID NO: 271243
  chr17:76132637-76132779
  hypo

SEQ ID NO: 323182 - DNA, 240 bp, Homo sapiens; identical to SEQ ID NO: 218104
  chr17:76145402-76145642
  hypo

SEQ ID NO: 323183 - DNA, 197 bp, Homo sapiens; identical to SEQ ID NO: 218105
  chr17:76152520-76152717
  hypo

SEQ ID NO: 323184 - DNA, 95 bp, Homo sapiens; identical to SEQ ID NO: 218106
  chr17:76153510-76153605
  hypo

SEQ ID NO: 323185 - DNA, 94 bp, Homo sapiens; identical to SEQ ID NO: 218107
  chr17:76153905-76153999
  hypo

SEQ ID NO: 323186 - DNA, 273 bp, Homo sapiens; identical to SEQ ID NO: 271249
  chr17:76166933-76167206
  hypo

SEQ ID NO: 323187 - DNA, 301 bp, Homo sapiens; identical to SEQ ID NO: 218108
  chr17:76167732-76168033
  hypo

SEQ ID NO: 323188 - DNA, 44 bp, Homo sapiens; identical to SEQ ID NO: 271251
  chr17:76173533-76173577
  hypo

SEQ ID NO: 323189 - DNA, 199 bp, Homo sapiens; identical to SEQ ID NO: 271252
  chr17:76175395-76175594
  hypo

SEQ ID NO: 323190 - DNA, 80 bp, Homo sapiens; identical to SEQ ID NO: 218109
  chr17:76176965-76177045
  hypo

SEQ ID NO: 323191 - DNA, 343 bp, Homo sapiens
  chr17:76187064-76187407
  hypo
gtactgtcccagccgatgggttgtccgactgggagcagaggaagccttgaggacctactcacagataggaattgaaggtactagtgtgacctctccgtggccgcattgggtgtccttaagcatgtggcagtgattcagaatgctgggggttgggggggctgtgctgcaccacctgggcctcgaggggcatttcccaaacaccaggcactttataaacctccctgctcaggggcaggtgcccaggaccccttgctgcagggactactggaggcaggagaggtccgggggaggtccacggctcagtcgaccatgcctggcctttcttgctcagccatccataccc

SEQ ID NO: 323192 - DNA, 40 bp, Homo sapiens; identical to SEQ ID NO: 271255
  chr17:76209678-76209718
  hypo

SEQ ID NO: 323193 - DNA, 500 bp, Homo sapiens; identical to SEQ ID NO: 271256
  chr17:76215739-76216239
  hypo

SEQ ID NO: 323194 - DNA, 195 bp, Homo sapiens; identical to SEQ ID NO: 218111
  chr17:76232494-76232689
  hypo

SEQ ID NO: 323195 - DNA, 41 bp, Homo sapiens; identical to SEQ ID NO: 93666
  chr17:76275113-76275154
  hypo

SEQ ID NO: 323196 - DNA, 164 bp, Homo sapiens; identical to SEQ ID NO: 225518
  chr17:76337744-76337908
  hypo

SEQ ID NO: 323197 - DNA, 384 bp, Homo sapiens; identical to SEQ ID NO: 225519
  chr17:76338191-76338575
  hypo

SEQ ID NO: 323198 - DNA, 166 bp, Homo sapiens; identical to SEQ ID NO: 204813
  chr17:76349231-76349397
  hypo

SEQ ID NO: 323199 - DNA, 502 bp, Homo sapiens
  chr17:76395086-76395588
  hypo
aaggtgggtagggtcgtcttcacccagagcagaaatgctgcgagtgggtggggtagtgccccaggagaaggttgggtgcagttaccaggagaagggtgaatgggtgctgtgtggcaagaagagcaggcgtctgccacgctgaggacttcaggcctgagacatggccagcatgcaggacagaggttggcctggaagtcctctggctaggagtagccccagctggtgtgactgattcaggtggacggcacaggtgaaggcgaggccacgtggaggtggctcctcattgggggcaggacgccttcctgttgtgagtcaggtgccgttttctctgtccgtgttcaggccggaagaactcccgcacaatgctgctcccactcctgcggaggttcccagagcaggtccgagtctccctctttcacacgccgcacctccgtgggctgcttcggctcctcatccctgagcgcttcaacgagaccatcggcctccagcacattaaggtgta

SEQ ID NO: 323200 - DNA, 64 bp, Homo sapiens
  chr17:76395713-76395777
  hypo
tggagaacctgcttgtaggtctggctgctgtgcacccgcggcacctccccgacactgtctctgc

SEQ ID NO: 323201 - DNA, 38 bp, Homo sapiens; identical to SEQ ID NO: 271261
  chr17:76396177-76396215
  hypo

SEQ ID NO: 323202 - DNA, 39 bp, Homo sapiens
  chr17:76396873-76396912
  hypo
ccctgcagctgcagggggacgacacggtgcaggtggtgg

SEQ ID NO: 323203 - DNA, 139 bp, Homo sapiens; identical to SEQ ID NO: 218114
  chr17:76397569-76397708
  hypo

SEQ ID NO: 323204 - DNA, 100 bp, Homo sapiens; identical to SEQ ID NO: 218115
  chr17:76404659-76404759
  hypo

SEQ ID NO: 323205 - DNA, 292 bp, Homo sapiens; identical to SEQ ID NO: 218116
  chr17:76404803-76405095
  hypo

SEQ ID NO: 323206 - DNA, 48 bp, Homo sapiens; identical to SEQ ID NO: 218117
  chr17:76405130-76405178
  hypo

SEQ ID NO: 323207 - DNA, 541 bp, Homo sapiens; identical to SEQ ID NO: 271265
  chr17:76425213-76425754
  hypo

SEQ ID NO: 323208 - DNA, 146 bp, Homo sapiens; identical to SEQ ID NO: 271266
  chr17:76430187-76430333
  hypo

SEQ ID NO: 323209 - DNA, 181 bp, Homo sapiens; identical to SEQ ID NO: 271267
  chr17:76441610-76441791
  hypo

SEQ ID NO: 323210 - DNA, 143 bp, Homo sapiens
  chr17:76455189-76455332
  hypo
agaagcggacgatgttgatgcaccaggagcacaggccggcggcggccgtggacttggagcggatgaactcggggtcgaacgtcgggttgccttggtagggcctagcgagggaaccagagggccggagtcgtcaccctgtcctg

SEQ ID NO: 323211 - DNA, 41 bp, Homo sapiens; identical to SEQ ID NO: 218120
  chr17:76456117-76456158
  hypo

SEQ ID NO: 323212 - DNA, 193 bp, Homo sapiens; identical to SEQ ID NO: 271270
  chr17:76457712-76457905
  hypo

SEQ ID NO: 323213 - DNA, 141 bp, Homo sapiens; identical to SEQ ID NO: 271271
  chr17:76459428-76459569
  hypo

SEQ ID NO: 323214 - DNA, 272 bp, Homo sapiens; identical to SEQ ID NO: 271272
  chr17:76460803-76461075
  hypo

SEQ ID NO: 323215 - DNA, 238 bp, Homo sapiens; identical to SEQ ID NO: 271273
  chr17:76464457-76464695
  hypo

SEQ ID NO: 323216 - DNA, 203 bp, Homo sapiens; identical to SEQ ID NO: 271274
  chr17:76482432-76482635
  hypo

SEQ ID NO: 323217 - DNA, 172 bp, Homo sapiens; identical to SEQ ID NO: 271275
  chr17:76487505-76487677
  hypo

SEQ ID NO: 323218 - DNA, 95 bp, Homo sapiens
  chr17:76498806-76498901
  hypo
acgcagtgagcgatcgctggcgcctgctaacgcagacattcctgctgaaagcttagatggttttccaggggaccacagttaacagcggagcccat

SEQ ID NO: 323219 - DNA, 86 bp, Homo sapiens
  chr17:76498972-76499058
  hypo
ctgggtagtccaggatccactgctccctcggcttctcttcgtaggtcaccacggcctctgggatttcgtgccggagggtagagcac

SEQ ID NO: 323220 - DNA, 261 bp, Homo sapiens; identical to SEQ ID NO: 271277
  chr17:76501115-76501376
  hypo

SEQ ID NO: 323221 - DNA, 90 bp, Homo sapiens; identical to SEQ ID NO: 271278
  chr17:76503568-76503658
  hypo

SEQ ID NO: 323222 - DNA, 576 bp, Homo sapiens; identical to SEQ ID NO: 271279
  chr17:76522592-76523168
  hypo

SEQ ID NO: 323223 - DNA, 306 bp, Homo sapiens; identical to SEQ ID NO: 218121
  chr17:76526260-76526566
  hypo

SEQ ID NO: 323224 - DNA, 39 bp, Homo sapiens; identical to SEQ ID NO: 218122
  chr17:76526629-76526668
  hypo

SEQ ID NO: 323225 - DNA, 464 bp, Homo sapiens; identical to SEQ ID NO: 271281
  chr17:76533246-76533710
  hypo

SEQ ID NO: 323226 - DNA, 48 bp, Homo sapiens; identical to SEQ ID NO: 271282
  chr17:76556843-76556891
  hypo

SEQ ID NO: 323227 - DNA, 138 bp, Homo sapiens; identical to SEQ ID NO: 271283
  chr17:76563675-76563813
  hypo

SEQ ID NO: 323228 - DNA, 64 bp, Homo sapiens; identical to SEQ ID NO: 271284
  chr17:76566020-76566084
  hypo

SEQ ID NO: 323229 - DNA, 175 bp, Homo sapiens; identical to SEQ ID NO: 271285
  chr17:76617893-76618068
  hypo

SEQ ID NO: 323230 - DNA, 66 bp, Homo sapiens; identical to SEQ ID NO: 271286
  chr17:76618316-76618382
  hypo

SEQ ID NO: 323231 - DNA, 177 bp, Homo sapiens; identical to SEQ ID NO: 271287
  chr17:76618703-76618880
  hypo

SEQ ID NO: 323232 - DNA, 214 bp, Homo sapiens; identical to SEQ ID NO: 271288
  chr17:76669915-76670129
  hypo

SEQ ID NO: 323233 - DNA, 160 bp, Homo sapiens
  chr17:76670818-76670978
  hypo
ccacctgctctgcctggactggcatgctggccctggcggagtggcaggagctgccctgagagtccctgagagaacggcaggaaaatgctgcgtgtcacggctcccttcatactgtaatgaggaggggcagggccagctcacacagcgcctgcaggggaag

SEQ ID NO: 323234 - DNA, 241 bp, Homo sapiens; identical to SEQ ID NO: 271290
  chr17:76673414-76673655
  hypo

SEQ ID NO: 323235 - DNA, 436 bp, Homo sapiens; identical to SEQ ID NO: 271291
  chr17:76677378-76677814
  hypo

SEQ ID NO: 323236 - DNA, 197 bp, Homo sapiens; identical to SEQ ID NO: 271292
  chr17:76690199-76690396
  hypo

SEQ ID NO: 323237 - DNA, 188 bp, Homo sapiens; identical to SEQ ID NO: 218124
  chr17:76722780-76722968
  hypo

SEQ ID NO: 323238 - DNA, 44 bp, Homo sapiens; identical to SEQ ID NO: 218125
  chr17:76766753-76766797
  hypo

SEQ ID NO: 323239 - DNA, 62 bp, Homo sapiens; identical to SEQ ID NO: 271295
  chr17:76801793-76801855
  hypo

SEQ ID NO: 323240 - DNA, 461 bp, Homo sapiens; identical to SEQ ID NO: 271296
  chr17:76818618-76819079
  hypo

SEQ ID NO: 323241 - DNA, 272 bp, Homo sapiens; identical to SEQ ID NO: 218127
  chr17:76851773-76852045
  hypo

SEQ ID NO: 323242 - DNA, 206 bp, Homo sapiens; identical to SEQ ID NO: 271298
  chr17:76857916-76858122
  hypo

SEQ ID NO: 323243 - DNA, 32 bp, Homo sapiens
  chr17:76897271-76897303
  hypo
cacgcacgaggaaccgacgggcagacgtggag

SEQ ID NO: 323244 - DNA, 130 bp, Homo sapiens; identical to SEQ ID NO: 54663
  chr17:76921422-76921552
  hypo

SEQ ID NO: 323245 - DNA, 145 bp, Homo sapiens; identical to SEQ ID NO: 271300
  chr17:76933825-76933970
  hypo

SEQ ID NO: 323246 - DNA, 39 bp, Homo sapiens; identical to SEQ ID NO: 271301
  chr17:76963990-76964029
  hypo

SEQ ID NO: 323247 - DNA, 72 bp, Homo sapiens; identical to SEQ ID NO: 218129
  chr17:76977964-76978036
  hypo

SEQ ID NO: 323248 - DNA, 211 bp, Homo sapiens; identical to SEQ ID NO: 271303
  chr17:76987616-76987827
  hypo

SEQ ID NO: 323249 - DNA, 539 bp, Homo sapiens
  chr17:76990983-76991522
  hypo
agagcaagactatgtctaaaataaaaaacggttttggaggcaaatgcaggaggaagcaggttcccagcgactgggctgtggaagccacactgtgggctggggcaggcgtctcttacctggcggctggatgccggcagcagcccgcagggcgttgtagttggacacccagttctcgtggtccacgctgcccttgtagcccaccaccttcacccactccgggttctcgttcaccacatcacccgtagtggtcgtccactccttgcccaggccgcccacgtacagacgctcgtccttcactgccagccattcggccttgaagcctggccaagcagagtgtccttaggccccgcacccagctcccgccgcacccctgcacctggctcccacccggccccgcacctgtccttagaccccgcacctgactcccgcccggctccacacctgcctcccctccggcccgcacctggctcccgcccagggccggccggctgccctcccctcagctcctgaaggttcagtgaccactctcaagtctcctc

SEQ ID NO: 323250 - DNA, 651 bp, Homo sapiens; identical to SEQ ID NO: 218132
  chr17:76992707-76993358
  hypo

SEQ ID NO: 323251 - DNA, 478 bp, Homo sapiens; identical to SEQ ID NO: 218133
  chr17:76993419-76993897
  hypo

SEQ ID NO: 323252 - DNA, 152 bp, Homo sapiens; identical to SEQ ID NO: 93724
  chr17:76995121-76995273
  hypo

SEQ ID NO: 323253 - DNA, 306 bp, Homo sapiens; identical to SEQ ID NO: 218134
  chr17:76996176-76996482
  hypo

SEQ ID NO: 323254 - DNA, 412 bp, Homo sapiens; identical to SEQ ID NO: 218135
  chr17:76996567-76996979
  hypo

SEQ ID NO: 323255 - DNA, 530 bp, Homo sapiens; identical to SEQ ID NO: 218136
  chr17:76997041-76997571
  hypo

SEQ ID NO: 323256 - DNA, 38 bp, Homo sapiens; identical to SEQ ID NO: 218137
  chr17:76997601-76997639
  hypo

SEQ ID NO: 323257 - DNA, 156 bp, Homo sapiens; identical to SEQ ID NO: 271308
  chr17:76997943-76998099
  hypo

SEQ ID NO: 323258 - DNA, 289 bp, Homo sapiens; identical to SEQ ID NO: 218138
  chr17:76998488-76998777
  hypo

SEQ ID NO: 323259 - DNA, 194 bp, Homo sapiens; identical to SEQ ID NO: 218139
  chr17:76998994-76999188
  hypo

SEQ ID NO: 323260 - DNA, 145 bp, Homo sapiens; identical to SEQ ID NO: 218140
  chr17:76999462-76999607
  hypo

SEQ ID NO: 323261 - DNA, 154 bp, Homo sapiens; identical to SEQ ID NO: 271312
  chr17:77002125-77002279
  hypo

SEQ ID NO: 323262 - DNA, 60 bp, Homo sapiens; identical to SEQ ID NO: 218141
  chr17:77043872-77043932
  hypo

SEQ ID NO: 323263 - DNA, 237 bp, Homo sapiens; identical to SEQ ID NO: 271315
  chr17:77044161-77044398
  hypo

SEQ ID NO: 323264 - DNA, 90 bp, Homo sapiens; identical to SEQ ID NO: 218142
  chr17:77069647-77069737
  hypo

SEQ ID NO: 323265 - DNA, 151 bp, Homo sapiens; identical to SEQ ID NO: 218143
  chr17:77070099-77070250
  hypo

SEQ ID NO: 323266 - DNA, 80 bp, Homo sapiens; identical to SEQ ID NO: 225522
  chr17:77070949-77071029
  hypo

SEQ ID NO: 323267 - DNA, 263 bp, Homo sapiens; identical to SEQ ID NO: 204820
  chr17:77071240-77071503
  hypo

SEQ ID NO: 323268 - DNA, 405 bp, Homo sapiens; identical to SEQ ID NO: 271318
  chr17:77073674-77074079
  hypo

SEQ ID NO: 323269 - DNA, 404 bp, Homo sapiens; identical to SEQ ID NO: 271319
  chr17:77074636-77075040
  hypo

SEQ ID NO: 323270 - DNA, 383 bp, Homo sapiens; identical to SEQ ID NO: 271320
  chr17:77076344-77076727
  hypo

SEQ ID NO: 323271 - DNA, 60 bp, Homo sapiens; identical to SEQ ID NO: 271322
  chr17:77086021-77086081
  hypo

SEQ ID NO: 323272 - DNA, 304 bp, Homo sapiens; identical to SEQ ID NO: 218147
  chr17:77113252-77113556
  hypo

SEQ ID NO: 323273 - DNA, 46 bp, Homo sapiens; identical to SEQ ID NO: 271325
  chr17:77121065-77121111
  hypo

SEQ ID NO: 323274 - DNA, 60 bp, Homo sapiens
  chr17:77126790-77126850
  hypo
ggtctcacagagcccgataccgagcagtcttctgacacagtccctggaacgagtggagtg

SEQ ID NO: 323275 - DNA, 244 bp, Homo sapiens
  chr17:77126880-77127124
  hypo
atggggcctgccatgctctaagctctggcctccctgcctggaggcgggacctggcccaagcctcaaagccgaagcacaaattcctcatcagtgaagatccagagccgccgtggtgctaggacacggtgcgcgggaatcagccccgcacctgcaaggcagcgtgctctgcgtgccctgcgtgtgccccatgtgtactgtgtgccccgtgtgtgagcatgtgtgccccatgtgtgctgtgccccca

SEQ ID NO: 323276 - DNA, 294 bp, Homo sapiens; identical to SEQ ID NO: 218149
  chr17:77127177-77127471
  hypo

SEQ ID NO: 323277 - DNA, 215 bp, Homo sapiens; identical to SEQ ID NO: 218150
  chr17:77127501-77127716
  hypo

SEQ ID NO: 323278 - DNA, 272 bp, Homo sapiens; identical to SEQ ID NO: 271328
  chr17:77141618-77141890
  hypo

SEQ ID NO: 323279 - DNA, 51 bp, Homo sapiens; identical to SEQ ID NO: 271329
  chr17:77194211-77194262
  hypo

SEQ ID NO: 323280 - DNA, 172 bp, Homo sapiens
  chr17:77200443-77200615
  hypo
ggcagaatgtaagtctgaacagaggagagattactgacgtgaaagtaacttctcatgactcagggcttaatatcctggaaaggacacgcgtaccagtccagtgaacagctccttgaagcgcacacataccgacagcattcagtcaacgaggtcgacgcgctggaactacttt

SEQ ID NO: 323281 - DNA, 85 bp, Homo sapiens; identical to SEQ ID NO: 271331
  chr17:77206526-77206611
  hypo

SEQ ID NO: 323282 - DNA, 213 bp, Homo sapiens; identical to SEQ ID NO: 271332
  chr17:77224254-77224467
  hypo

SEQ ID NO: 323283 - DNA, 69 bp, Homo sapiens; identical to SEQ ID NO: 271333
  chr17:77283969-77284038
  hypo

SEQ ID NO: 323284 - DNA, 116 bp, Homo sapiens; identical to SEQ ID NO: 271334
  chr17:77294569-77294685
  hypo

SEQ ID NO: 323285 - DNA, 60 bp, Homo sapiens; identical to SEQ ID NO: 271335
  chr17:77333541-77333601
  hypo

SEQ ID NO: 323286 - DNA, 92 bp, Homo sapiens; identical to SEQ ID NO: 271336
  chr17:77345898-77345990
  hypo

SEQ ID NO: 323287 - DNA, 70 bp, Homo sapiens; identical to SEQ ID NO: 271337
  chr17:77346020-77346090
  hypo

SEQ ID NO: 323288 - DNA, 31 bp, Homo sapiens; identical to SEQ ID NO: 271338
  chr17:77385164-77385195
  hypo

SEQ ID NO: 323289 - DNA, 37 bp, Homo sapiens; identical to SEQ ID NO: 271339
  chr17:77395380-77395417
  hypo

SEQ ID NO: 323290 - DNA, 194 bp, Homo sapiens; identical to SEQ ID NO: 218151
  chr17:77769051-77769245
  hypo

SEQ ID NO: 323291 - DNA, 174 bp, Homo sapiens; identical to SEQ ID NO: 204822
  chr17:77771456-77771630
  hypo

SEQ ID NO: 323292 - DNA, 386 bp, Homo sapiens; identical to SEQ ID NO: 225527
  chr17:77774854-77775240
  hypo

SEQ ID NO: 323293 - DNA, 403 bp, Homo sapiens; identical to SEQ ID NO: 292779
  chr17:77778031-77778434
  hypo

SEQ ID NO: 323294 - DNA, 61 bp, Homo sapiens; identical to SEQ ID NO: 292782
  chr17:77788285-77788346
  hypo

SEQ ID NO: 323295 - DNA, 233 bp, Homo sapiens; identical to SEQ ID NO: 204826
  chr17:77788400-77788633
  hypo

SEQ ID NO: 323296 - DNA, 53 bp, Homo sapiens
  chr17:77808028-77808081
  hypo
tcatccaggtctgagtctagcaggatgacctcgggctgcgggagggcggcggc

SEQ ID NO: 323297 - DNA, 130 bp, Homo sapiens
  chr17:77808750-77808880
  hypo
gggggggcccttctcggagcctttgcctggagcacccgccgcaccggccaggggcttcaccgcccccaggtagcctttggcccccgcaccttgcgcccacttgtcgggcgggtggctcttggcccccagg

SEQ ID NO: 323298 - DNA, 382 bp, Homo sapiens; identical to SEQ ID NO: 292784
  chr17:77813600-77813982
  hypo

SEQ ID NO: 323299 - DNA, 211 bp, Homo sapiens; identical to SEQ ID NO: 218156
  chr17:77824717-77824928
  hypo

SEQ ID NO: 323300 - DNA, 191 bp, Homo sapiens
  chr17:77825812-77826003
  hypo
agcttgaagccagctatggctggagcttttactcaacagaaattggtaaacacgacaaatcgtgacttgattttttcttttgttgattgtctatactttagaaagtgatagaaaaaaaaaaaagaaagtgatgaaaaagtgttaatcatgcagattaaacttaaaagtgtgtcctgttggctgggcacgat

SEQ ID NO: 323301 - DNA, 98 bp, Homo sapiens
  chr17:77899566-77899664
  hypo
cagctctggtcccccggccccaggtcctggacgctggctccgcgcagcagcaggcggcctccggaggacacgatgtgactggctgccgctacgtcgca

SEQ ID NO: 323302 - DNA, 63 bp, Homo sapiens; identical to SEQ ID NO: 271346
  chr17:77900547-77900610
  hypo

SEQ ID NO: 323303 - DNA, 193 bp, Homo sapiens; identical to SEQ ID NO: 218157
  chr17:77912319-77912512
  hypo

SEQ ID NO: 323304 - DNA, 153 bp, Homo sapiens; identical to SEQ ID NO: 218158
  chr17:77913051-77913204
  hypo

SEQ ID NO: 323305 - DNA, 142 bp, Homo sapiens; identical to SEQ ID NO: 271349
  chr17:77913691-77913833
  hypo

SEQ ID NO: 323306 - DNA, 760 bp, Homo sapiens; identical to SEQ ID NO: 271350
  chr17:77914403-77915163
  hypo

SEQ ID NO: 323307 - DNA, 188 bp, Homo sapiens; identical to SEQ ID NO: 218160
  chr17:77917679-77917867
  hypo

SEQ ID NO: 323308 - DNA, 889 bp, Homo sapiens
  chr17:77918540-77919429
  hypo
gtctgaagccagccacgtgggacgggaaggcagtcgccgtatggggggctaatgtgtggctgtgggtggggggcggcgaggcggacaggggcagcaggcagggtggccacggtggttcaggggccatggtcccaacctccccagccctggcccctgccctggtcacctggtagtgggcccagcaggcctcccagatccgcagcgcttcggcctcggggaactcccgcttgaagcacagaaggagccagcggtggcagaagagcatctgcaggccgtcctcgcccagcgagaccaggtgctggtagaagcgcacgtgcgtcagccgcagcagctcgcgcaggtacagctgggggtgaggccgtcacgcgttagttagctccggtcccatgcggcctgctgcccaggaagcccactcccactggggcccttccctgggccaccccagcctggaaaagcacacccaggggcctctacctgctgcatgtgcctgcccccccaacgctccattccgccgctggaatcggctcacacctgcctctgccagttcctcccagatctgactgttccggaggctgtggtgtggtccagggtgaggcagagtgttgtgcccgggcgtggcaggacgctggcagccgctccatggccaggaaggctccccaccctcagtgcacacttgggggctgtttcccacgtccactcctcctggtgaggtgagtggatcatccagggagcccccccacccctcttcggctacgctcacccagatctatcatcttccagagctgttttagggcaggaaggggacgtatctgagccccaggatgctcgattcctgccattaaggtcatctcccaatgatgtgggacaagatcggggctatttctggcag

SEQ ID NO: 323309 - DNA, 222 bp, Homo sapiens
  chr17:77919477-77919699
  hypo
ctccagcattcagtgagtcacccagccatgcgctgccatgagccgtcagaggcgaatggcgttggacactgtaactgcctccccaagcaatgtggacacccgacgtcacacacacccgttgatgcagagtgagcaggcttggctgggttcagccccccggcccaggtggagttagatcacagctggggggatcctggggcagagctcggggccacatgcccc

SEQ ID NO: 323310 - DNA, 697 bp, Homo sapiens; identical to SEQ ID NO: 218162
  chr17:77921127-77921824
  hypo

SEQ ID NO: 323311 - DNA, 391 bp, Homo sapiens; identical to SEQ ID NO: 271354
  chr17:77923299-77923690
  hypo

SEQ ID NO: 323312 - DNA, 171 bp, Homo sapiens; identical to SEQ ID NO: 218164
  chr17:77923950-77924121
  hypo

SEQ ID NO: 323313 - DNA, 37 bp, Homo sapiens
  chr17:77926415-77926452
  hypo
acaggccaactcccaggaggcgcccagagatgcttcc

SEQ ID NO: 323314 - DNA, 203 bp, Homo sapiens
  chr17:77926558-77926761
  hypo
tctgcaggaggccgttgctgtccgggaaccgcaggccggcgtcggagctggacggggggctggtggaacaggttatgtgatgatcgccacacttctccctgcccacactacccagagggggacgggggtcatgggggagtcatttaaacctacgcaccaagcttaaacacacatacaggcacggctgaatatgccctgtaaac

SEQ ID NO: 323315 - DNA, 189 bp, Homo sapiens; identical to SEQ ID NO: 271357
  chr17:77928336-77928525
  hypo

SEQ ID NO: 323316 - DNA, 467 bp, Homo sapiens; identical to SEQ ID NO: 271358
  chr17:77928737-77929204
  hypo

SEQ ID NO: 323317 - DNA, 87 bp, Homo sapiens; identical to SEQ ID NO: 218166
  chr17:77930345-77930432
  hypo

SEQ ID NO: 323318 - DNA, 92 bp, Homo sapiens; identical to SEQ ID NO: 271360
  chr17:77937609-77937701
  hypo

SEQ ID NO: 323319 - DNA, 83 bp, Homo sapiens; identical to SEQ ID NO: 218167
  chr17:77946278-77946361
  hypo

SEQ ID NO: 323320 - DNA, 54 bp, Homo sapiens
  chr17:77948844-77948898
  hypo
ccgtcacctcctcgccatgccgtccccactgccagtgggcgcaacgttacttgc

SEQ ID NO: 323321 - DNA, 33 bp, Homo sapiens; identical to SEQ ID NO: 218168
  chr17:77951521-77951554
  hypo

SEQ ID NO: 323322 - DNA, 281 bp, Homo sapiens; identical to SEQ ID NO: 271364
  chr17:77953037-77953318
  hypo

SEQ ID NO: 323323 - DNA, 400 bp, Homo sapiens; identical to SEQ ID NO: 271365
  chr17:77953787-77954187
  hypo

SEQ ID NO: 323324 - DNA, 61 bp, Homo sapiens; identical to SEQ ID NO: 271366
  chr17:77954476-77954537
  hypo

SEQ ID NO: 323325 - DNA, 269 bp, Homo sapiens; identical to SEQ ID NO: 271367
  chr17:77955471-77955740
  hypo

SEQ ID NO: 323326 - DNA, 100 bp, Homo sapiens; identical to SEQ ID NO: 271368
  chr17:77956294-77956394
  hypo

SEQ ID NO: 323327 - DNA, 106 bp, Homo sapiens; identical to SEQ ID NO: 271369
  chr17:77975264-77975370
  hypo

SEQ ID NO: 323328 - DNA, 484 bp, Homo sapiens; identical to SEQ ID NO: 271370
  chr17:77975731-77976215
  hypo

SEQ ID NO: 323329 - DNA, 181 bp, Homo sapiens; identical to SEQ ID NO: 218169
  chr17:77976565-77976746
  hypo

SEQ ID NO: 323330 - DNA, 305 bp, Homo sapiens; identical to SEQ ID NO: 218170
  chr17:77980905-77981210
  hypo

SEQ ID NO: 323331 - DNA, 553 bp, Homo sapiens; identical to SEQ ID NO: 271373
  chr17:77983870-77984423
  hypo

SEQ ID NO: 323332 - DNA, 384 bp, Homo sapiens; identical to SEQ ID NO: 271374
  chr17:77987119-77987503
  hypo

SEQ ID NO: 323333 - DNA, 31 bp, Homo sapiens; identical to SEQ ID NO: 218173
  chr17:77991173-77991204
  hypo

SEQ ID NO: 323334 - DNA, 101 bp, Homo sapiens; identical to SEQ ID NO: 271376
  chr17:78007924-78008025
  hypo

SEQ ID NO: 323335 - DNA, 100 bp, Homo sapiens; identical to SEQ ID NO: 204832
  chr17:78009418-78009518
  hypo

SEQ ID NO: 323336 - DNA, 579 bp, Homo sapiens; identical to SEQ ID NO: 204833
  chr17:78009924-78010503
  hypo

SEQ ID NO: 323337 - DNA, 175 bp, Homo sapiens; identical to SEQ ID NO: 271377
  chr17:78022348-78022523
  hypo

SEQ ID NO: 323338 - DNA, 172 bp, Homo sapiens; identical to SEQ ID NO: 218176
  chr17:78023956-78024128
  hypo

SEQ ID NO: 323339 - DNA, 187 bp, Homo sapiens; identical to SEQ ID NO: 271379
  chr17:78024751-78024938
  hypo

SEQ ID NO: 323340 - DNA, 225 bp, Homo sapiens; identical to SEQ ID NO: 271380
  chr17:78026928-78027153
  hypo

SEQ ID NO: 323341 - DNA, 216 bp, Homo sapiens; identical to SEQ ID NO: 271381
  chr17:78032357-78032573
  hypo

SEQ ID NO: 323342 - DNA, 146 bp, Homo sapiens; identical to SEQ ID NO: 271382
  chr17:78033081-78033227
  hypo

SEQ ID NO: 323343 - DNA, 361 bp, Homo sapiens
  chr17:78041105-78041466
  hypo
cctcctcctcggcccgcagtcactagaaccccctcccaagacaagcaaaggcacctggttttctgggatcccctgcctaacttgtgtgcaattgcaagaaagcatatgcgttcacccggagtcttccttccctctcttgctccgtgggagcacaccacactcactgttctgcacctctttgctttttccatttaacagcgtgtccctagagcgcttcccaagtcaaaatataaacaccgctcgttcccgcctttctaccacatggcattccgctgggatacttctacggggaagcttcctgcccggggcatcgagggcgttcgcgtccgtctgttatggcggtgctgctgtagataaccgg

SEQ ID NO: 323344 - DNA, 214 bp, Homo sapiens
  chr17:78041496-78041710
  hypo
tatatagccttttttatattgcctatcaagcccggaatgtctgggtctagcgggtattgctaagtaggattgtgacagtcacgcccccggcagcggtgtttcaaagtcccctgacagctcagcatgttgtcacacttcaggactgtgccaatccgattgatgaagaaaatagataatcttgttttataaaacgtgcatgcgcagaatgttgagt

SEQ ID NO: 323345 - DNA, 212 bp, Homo sapiens; identical to SEQ ID NO: 271384
  chr17:78055253-78055465
  hypo

SEQ ID NO: 323346 - DNA, 157 bp, Homo sapiens; identical to SEQ ID NO: 271386
  chr17:78061502-78061659
  hypo

SEQ ID NO: 323347 - DNA, 194 bp, Homo sapiens; identical to SEQ ID NO: 271388
  chr17:78077294-78077488
  hypo

SEQ ID NO: 323348 - DNA, 194 bp, Homo sapiens
  chr17:78083553-78083747
  hypo
ggtcctgactcgcccggccctggctcctctccaggcaggcgtgtgcaggcatgtgcaggtacacaggcaggcatgctgtacacacgcatgatgtcatccccagcctcatcctctcactgtctcagttttccccgtggctggcgccagggctctgggccaccctcaccttgacaggtttccctcttcccaggatc

SEQ ID NO: 323349 - DNA, 37 bp, Homo sapiens
  chr17:78083818-78083855
  hypo
atcaccaacgagaccggccagccgctgattgggaagg

SEQ ID NO: 323350 - DNA, 112 bp, Homo sapiens; identical to SEQ ID NO: 218179
  chr17:78086406-78086518
  hypo

SEQ ID NO: 323351 - DNA, 130 bp, Homo sapiens
  chr17:78143782-78143912
  hypo
tgcttgtccactgccgttcagttcagccagagattgggccacattcagtcctcgcttccctgggagggggaaggtaagtgcgcgcagtccatccggcgaagagcaggtcagcctacggagggctcagcct

SEQ ID NO: 323352 - DNA, 200 bp, Homo sapiens; identical to SEQ ID NO: 271394
  chr17:78155302-78155502
  hypo

SEQ ID NO: 323353 - DNA, 172 bp, Homo sapiens; identical to SEQ ID NO: 218180
  chr17:78158229-78158401
  hypo

SEQ ID NO: 323354 - DNA, 40 bp, Homo sapiens; identical to SEQ ID NO: 271396
  chr17:78159115-78159155
  hypo

SEQ ID NO: 323355 - DNA, 410 bp, Homo sapiens; identical to SEQ ID NO: 218181
  chr17:78163403-78163813
  hypo

SEQ ID NO: 323356 - DNA, 200 bp, Homo sapiens; identical to SEQ ID NO: 218182
  chr17:78165107-78165307
  hypo

SEQ ID NO: 323357 - DNA, 33 bp, Homo sapiens; identical to SEQ ID NO: 271399
  chr17:78179550-78179583
  hypo

SEQ ID NO: 323358 - DNA, 84 bp, Homo sapiens; identical to SEQ ID NO: 271400
  chr17:78182032-78182116
  hypo

SEQ ID NO: 323359 - DNA, 96 bp, Homo sapiens; identical to SEQ ID NO: 271401
  chr17:78188823-78188919
  hypo

SEQ ID NO: 323360 - DNA, 257 bp, Homo sapiens; identical to SEQ ID NO: 271402
  chr17:78190741-78190998
  hypo

SEQ ID NO: 323361 - DNA, 129 bp, Homo sapiens; identical to SEQ ID NO: 218183
  chr17:78195404-78195533
  hypo

SEQ ID NO: 323362 - DNA, 83 bp, Homo sapiens; identical to SEQ ID NO: 271404
  chr17:78227883-78227966
  hypo

SEQ ID NO: 323363 - DNA, 183 bp, Homo sapiens; identical to SEQ ID NO: 271405
  chr17:78256873-78257056
  hypo

SEQ ID NO: 323364 - DNA, 561 bp, Homo sapiens; identical to SEQ ID NO: 218184
  chr17:78271717-78272278
  hypo

SEQ ID NO: 323365 - DNA, 91 bp, Homo sapiens; identical to SEQ ID NO: 218185
  chr17:78272313-78272404
  hypo

SEQ ID NO: 323366 - DNA, 31 bp, Homo sapiens; identical to SEQ ID NO: 271407
  chr17:78280676-78280707
  hypo

SEQ ID NO: 323367 - DNA, 194 bp, Homo sapiens; identical to SEQ ID NO: 218186
  chr17:78326748-78326942
  hypo

SEQ ID NO: 323368 - DNA, 59 bp, Homo sapiens; identical to SEQ ID NO: 218187
  chr17:78330433-78330492
  hypo

SEQ ID NO: 323369 - DNA, 304 bp, Homo sapiens; identical to SEQ ID NO: 271410
  chr17:78337245-78337549
  hypo

SEQ ID NO: 323370 - DNA, 54 bp, Homo sapiens; identical to SEQ ID NO: 271411
  chr17:78338098-78338152
  hypo

SEQ ID NO: 323371 - DNA, 174 bp, Homo sapiens; identical to SEQ ID NO: 271412
  chr17:78338182-78338356
  hypo

SEQ ID NO: 323372 - DNA, 277 bp, Homo sapiens; identical to SEQ ID NO: 218188
  chr17:78354368-78354645
  hypo

SEQ ID NO: 323373 - DNA, 58 bp, Homo sapiens; identical to SEQ ID NO: 271414
  chr17:78362264-78362322
  hypo

SEQ ID NO: 323374 - DNA, 105 bp, Homo sapiens; identical to SEQ ID NO: 271415
  chr17:78387298-78387403
  hypo

SEQ ID NO: 323375 - DNA, 178 bp, Homo sapiens; identical to SEQ ID NO: 204835
  chr17:78388504-78388682
  hypo

SEQ ID NO: 323376 - DNA, 90 bp, Homo sapiens; identical to SEQ ID NO: 225538
  chr17:78389461-78389551
  hypo

SEQ ID NO: 323377 - DNA, 46 bp, Homo sapiens; identical to SEQ ID NO: 271416
  chr17:78395662-78395708
  hypo

SEQ ID NO: 323378 - DNA, 379 bp, Homo sapiens; identical to SEQ ID NO: 271417
  chr17:78404956-78405335
  hypo

SEQ ID NO: 323379 - DNA, 72 bp, Homo sapiens; identical to SEQ ID NO: 271418
  chr17:78416215-78416287
  hypo

SEQ ID NO: 323380 - DNA, 496 bp, Homo sapiens; identical to SEQ ID NO: 292798
  chr17:78428377-78428873
  hypo

SEQ ID NO: 323381 - DNA, 136 bp, Homo sapiens; identical to SEQ ID NO: 271419
  chr17:78442642-78442778
  hypo

SEQ ID NO: 323382 - DNA, 343 bp, Homo sapiens; identical to SEQ ID NO: 292799
  chr17:78450959-78451302
  hypo

SEQ ID NO: 323383 - DNA, 117 bp, Homo sapiens; identical to SEQ ID NO: 271420
  chr17:78475921-78476038
  hypo

SEQ ID NO: 323384 - DNA, 155 bp, Homo sapiens; identical to SEQ ID NO: 271422
  chr17:78529319-78529474
  hypo

SEQ ID NO: 323385 - DNA, 32 bp, Homo sapiens; identical to SEQ ID NO: 271423
  chr17:78561142-78561174
  hypo

SEQ ID NO: 323386 - DNA, 127 bp, Homo sapiens; identical to SEQ ID NO: 271424
  chr17:78582535-78582662
  hypo

SEQ ID NO: 323387 - DNA, 267 bp, Homo sapiens; identical to SEQ ID NO: 218191
  chr17:78590518-78590785
  hypo

SEQ ID NO: 323388 - DNA, 338 bp, Homo sapiens; identical to SEQ ID NO: 218192
  chr17:78598706-78599044
  hypo

SEQ ID NO: 323389 - DNA, 586 bp, Homo sapiens; identical to SEQ ID NO: 271429
  chr17:78611008-78611594
  hypo

SEQ ID NO: 323390 - DNA, 34 bp, Homo sapiens; identical to SEQ ID NO: 271430
  chr17:78617731-78617765
  hypo

SEQ ID NO: 323391 - DNA, 85 bp, Homo sapiens; identical to SEQ ID NO: 271431
  chr17:78620631-78620716
  hypo

SEQ ID NO: 323392 - DNA, 47 bp, Homo sapiens; identical to SEQ ID NO: 271432
  chr17:78630808-78630855
  hypo

SEQ ID NO: 323393 - DNA, 179 bp, Homo sapiens; identical to SEQ ID NO: 271433
  chr17:78637757-78637936
  hypo

SEQ ID NO: 323394 - DNA, 409 bp, Homo sapiens; identical to SEQ ID NO: 271434
  chr17:78642231-78642640
  hypo

SEQ ID NO: 323395 - DNA, 235 bp, Homo sapiens; identical to SEQ ID NO: 271435
  chr17:78649357-78649592
  hypo

SEQ ID NO: 323396 - DNA, 250 bp, Homo sapiens; identical to SEQ ID NO: 218194
  chr17:78667554-78667804
  hypo

SEQ ID NO: 323397 - DNA, 287 bp, Homo sapiens
  chr17:78668243-78668530
  hypo
tggagtgagagtgtcttccatatgtggggccgtggtgctgaaggcttgtgcgttgagtgcctcctttcccgtgaatgtgttggttctggtgaccagggtggagcctccctgcgccccttccttccatccagcatcaggttcccagttctctgcctgccaggcaggcgtgcacatatggagtgtctgggaacctgcagctgttgatcacggctggtggtagctccgcacttaagtaaggaggagtgattttcccgaggagatgtggtattggtcggagttgctgggaa

SEQ ID NO: 323398 - DNA, 184 bp, Homo sapiens; identical to SEQ ID NO: 271438
  chr17:78691303-78691487
  hypo

SEQ ID NO: 323399 - DNA, 41 bp, Homo sapiens; identical to SEQ ID NO: 271439
  chr17:78691700-78691741
  hypo

SEQ ID NO: 323400 - DNA, 188 bp, Homo sapiens; identical to SEQ ID NO: 225542
  chr17:78720009-78720197
  hypo

SEQ ID NO: 323401 - DNA, 89 bp, Homo sapiens; identical to SEQ ID NO: 271440
  chr17:78745063-78745152
  hypo

SEQ ID NO: 323402 - DNA, 290 bp, Homo sapiens; identical to SEQ ID NO: 271441
  chr17:78747664-78747954
  hypo

SEQ ID NO: 323403 - DNA, 208 bp, Homo sapiens; identical to SEQ ID NO: 218196
  chr17:78759715-78759923
  hypo

SEQ ID NO: 323404 - DNA, 45 bp, Homo sapiens; identical to SEQ ID NO: 218197
  chr17:78760396-78760441
  hypo

SEQ ID NO: 323405 - DNA, 53 bp, Homo sapiens; identical to SEQ ID NO: 218198
  chr17:78760830-78760883
  hypo

SEQ ID NO: 323406 - DNA, 556 bp, Homo sapiens; identical to SEQ ID NO: 271446
  chr17:78775495-78776051
  hypo

SEQ ID NO: 323407 - DNA, 31 bp, Homo sapiens; identical to SEQ ID NO: 271447
  chr17:78782970-78783001
  hypo

SEQ ID NO: 323408 - DNA, 31 bp, Homo sapiens; identical to SEQ ID NO: 271448
  chr17:78783241-78783272
  hypo

SEQ ID NO: 323409 - DNA, 115 bp, Homo sapiens; identical to SEQ ID NO: 218200
  chr17:78789606-78789721
  hypo

SEQ ID NO: 323410 - DNA, 246 bp, Homo sapiens; identical to SEQ ID NO: 271450
  chr17:78791760-78792006
  hypo

SEQ ID NO: 323411 - DNA, 196 bp, Homo sapiens
  chr17:78794034-78794230
  hypo
cagcttgaaagaggcggtgtttttgcggaacagttattgacgatcttgtcagtcatttcattaaaacggttttcagcatatgtgtttctcatctgcaggtgtgggacccaagacacaagtgtgttggggctccatgtccaccccacgatgccccccgtgccccttctccgtgctgtttcctagggctgtgtcccgg

SEQ ID NO: 323412 - DNA, 36 bp, Homo sapiens; identical to SEQ ID NO: 218201
  chr17:78796145-78796181
  hypo

SEQ ID NO: 323413 - DNA, 186 bp, Homo sapiens; identical to SEQ ID NO: 271453
  chr17:78801932-78802118
  hypo

SEQ ID NO: 323414 - DNA, 192 bp, Homo sapiens; identical to SEQ ID NO: 271454
  chr17:78805984-78806176
  hypo

SEQ ID NO: 323415 - DNA, 141 bp, Homo sapiens; identical to SEQ ID NO: 218202
  chr17:78811169-78811310
  hypo

SEQ ID NO: 323416 - DNA, 281 bp, Homo sapiens; identical to SEQ ID NO: 271456
  chr17:78811561-78811842
  hypo

SEQ ID NO: 323417 - DNA, 401 bp, Homo sapiens; identical to SEQ ID NO: 271457
  chr17:78812101-78812502
  hypo

SEQ ID NO: 323418 - DNA, 233 bp, Homo sapiens; identical to SEQ ID NO: 271458
  chr17:78818427-78818660
  hypo

SEQ ID NO: 323419 - DNA, 76 bp, Homo sapiens; identical to SEQ ID NO: 271459
  chr17:78822274-78822350
  hypo

SEQ ID NO: 323420 - DNA, 93 bp, Homo sapiens; identical to SEQ ID NO: 271460
  chr17:78836325-78836418
  hypo

SEQ ID NO: 323421 - DNA, 33 bp, Homo sapiens
  chr17:78867012-78867045
  hypo
agtgcctgtgcctgtgtgtgcgccggggcgtgt

SEQ ID NO: 323422 - DNA, 53 bp, Homo sapiens
  chr17:78867110-78867163
  hypo
gccaggtgtgtgcgcgcgccaggtgtgtgtgcgccagggtgtgtgtgtgctgg

SEQ ID NO: 323423 - DNA, 38 bp, Homo sapiens; identical to SEQ ID NO: 271462
  chr17:78870124-78870162
  hypo

SEQ ID NO: 323424 - DNA, 232 bp, Homo sapiens; identical to SEQ ID NO: 271463
  chr17:78870192-78870424
  hypo

SEQ ID NO: 323425 - DNA, 52 bp, Homo sapiens; identical to SEQ ID NO: 271464
  chr17:78871406-78871458
  hypo

SEQ ID NO: 323426 - DNA, 153 bp, Homo sapiens; identical to SEQ ID NO: 218204
  chr17:78872485-78872638
  hypo

SEQ ID NO: 323427 - DNA, 282 bp, Homo sapiens
  chr17:78872734-78873016
  hypo
caccgggcaaccctgtgggtgtgctcccagccttggccagctgctgccttgagcacctctggatagaacgagtccagagcttgcaccatgccctccagggtatggagaactgaaaggttcactacacaacaacccagacacgccagcttagcccagacacgccaacttgttaattttcattgagaaataacgttgcagctttgtgcatttggctgtccactaaaatatgccaagtgcccagaaagcgcagagttgactccgtatattcgagtataaatcaag

SEQ ID NO: 323428 - DNA, 183 bp, Homo sapiens; identical to SEQ ID NO: 218206
  chr17:78873841-78874024
  hypo

SEQ ID NO: 323429 - DNA, 449 bp, Homo sapiens; identical to SEQ ID NO: 218207
  chr17:78876642-78877091
  hypo

SEQ ID NO: 323430 - DNA, 109 bp, Homo sapiens; identical to SEQ ID NO: 218208
  chr17:78877957-78878066
  hypo

SEQ ID NO: 323431 - DNA, 345 bp, Homo sapiens; identical to SEQ ID NO: 271470
  chr17:78882480-78882825
  hypo

SEQ ID NO: 323432 - DNA, 197 bp, Homo sapiens; identical to SEQ ID NO: 271472
  chr17:78894343-78894540
  hypo

SEQ ID NO: 323433 - DNA, 459 bp, Homo sapiens; identical to SEQ ID NO: 271473
  chr17:78935153-78935612
  hypo

SEQ ID NO: 323434 - DNA, 198 bp, Homo sapiens; identical to SEQ ID NO: 271474
  chr17:78936614-78936812
  hypo

SEQ ID NO: 323435 - DNA, 202 bp, Homo sapiens; identical to SEQ ID NO: 271475
  chr17:78940079-78940281
  hypo

SEQ ID NO: 323436 - DNA, 185 bp, Homo sapiens; identical to SEQ ID NO: 218210
  chr17:78968280-78968465
  hypo

SEQ ID NO: 323437 - DNA, 37 bp, Homo sapiens; identical to SEQ ID NO: 271477
  chr17:78975640-78975677
  hypo

SEQ ID NO: 323438 - DNA, 71 bp, Homo sapiens
  chr17:78999784-78999855
  hypo
gccgccatctctagccagccctggggcaactgcccccggctgcgtcccaccctgcccgcctcctagcccct

SEQ ID NO: 323439 - DNA, 37 bp, Homo sapiens
  chr17:79001617-79001654
  hypo
ggcgccacatgtgtccttcctccggccccagacccca

SEQ ID NO: 323440 - DNA, 1047 bp, Homo sapiens; identical to SEQ ID NO: 292803
  chr17:79007514-79008561
  hypo

SEQ ID NO: 323441 - DNA, 754 bp, Homo sapiens; identical to SEQ ID NO: 204838
  chr17:79008841-79009595
  hypo

SEQ ID NO: 323442 - DNA, 211 bp, Homo sapiens; identical to SEQ ID NO: 93943
  chr17:79027367-79027578
  hypo

SEQ ID NO: 323443 - DNA, 182 bp, Homo sapiens; identical to SEQ ID NO: 218214
  chr17:79042375-79042557
  hypo

SEQ ID NO: 323444 - DNA, 444 bp, Homo sapiens; identical to SEQ ID NO: 271484
  chr17:79044047-79044491
  hypo

SEQ ID NO: 323445 - DNA, 236 bp, Homo sapiens; identical to SEQ ID NO: 218215
  chr17:79045480-79045716
  hypo

SEQ ID NO: 323446 - DNA, 482 bp, Homo sapiens; identical to SEQ ID NO: 271486
  chr17:79046033-79046515
  hypo

SEQ ID NO: 323447 - DNA, 54 bp, Homo sapiens; identical to SEQ ID NO: 271487
  chr17:79047314-79047368
  hypo

SEQ ID NO: 323448 - DNA, 454 bp, Homo sapiens; identical to SEQ ID NO: 271488
  chr17:79048172-79048626
  hypo

SEQ ID NO: 323449 - DNA, 32 bp, Homo sapiens; identical to SEQ ID NO: 271489
  chr17:79050214-79050246
  hypo

SEQ ID NO: 323450 - DNA, 155 bp, Homo sapiens; identical to SEQ ID NO: 271490
  chr17:79050944-79051099
  hypo

SEQ ID NO: 323451 - DNA, 694 bp, Homo sapiens; identical to SEQ ID NO: 218216
  chr17:79051339-79052033
  hypo

SEQ ID NO: 323452 - DNA, 34 bp, Homo sapiens; identical to SEQ ID NO: 271492
  chr17:79052330-79052364
  hypo

SEQ ID NO: 323453 - DNA, 163 bp, Homo sapiens; identical to SEQ ID NO: 271493
  chr17:79052899-79053062
  hypo

SEQ ID NO: 323454 - DNA, 428 bp, Homo sapiens; identical to SEQ ID NO: 271494
  chr17:79053491-79053919
  hypo

SEQ ID NO: 323455 - DNA, 140 bp, Homo sapiens; identical to SEQ ID NO: 271495
  chr17:79059745-79059885
  hypo

SEQ ID NO: 323456 - DNA, 86 bp, Homo sapiens; identical to SEQ ID NO: 218217
  chr17:79060175-79060261
  hypo

SEQ ID NO: 323457 - DNA, 237 bp, Homo sapiens; identical to SEQ ID NO: 218218
  chr17:79060660-79060897
  hypo

SEQ ID NO: 323458 - DNA, 133 bp, Homo sapiens; identical to SEQ ID NO: 271498
  chr17:79061383-79061516
  hypo

SEQ ID NO: 323459 - DNA, 363 bp, Homo sapiens; identical to SEQ ID NO: 218219
  chr17:79062265-79062628
  hypo

SEQ ID NO: 323460 - DNA, 226 bp, Homo sapiens; identical to SEQ ID NO: 218220
  chr17:79062658-79062884
  hypo

SEQ ID NO: 323461 - DNA, 97 bp, Homo sapiens; identical to SEQ ID NO: 218221
  chr17:79065509-79065606
  hypo

SEQ ID NO: 323462 - DNA, 55 bp, Homo sapiens; identical to SEQ ID NO: 271502
  chr17:79067466-79067521
  hypo

SEQ ID NO: 323463 - DNA, 74 bp, Homo sapiens; identical to SEQ ID NO: 218222
  chr17:79072579-79072653
  hypo

SEQ ID NO: 323464 - DNA, 305 bp, Homo sapiens; identical to SEQ ID NO: 218223
  chr17:79072864-79073169
  hypo

SEQ ID NO: 323465 - DNA, 327 bp, Homo sapiens; identical to SEQ ID NO: 271505
  chr17:79073679-79074006
  hypo

SEQ ID NO: 323466 - DNA, 286 bp, Homo sapiens; identical to SEQ ID NO: 218224
  chr17:79074739-79075025
  hypo

SEQ ID NO: 323467 - DNA, 680 bp, Homo sapiens; identical to SEQ ID NO: 271507
  chr17:79077361-79078041
  hypo

SEQ ID NO: 323468 - DNA, 36 bp, Homo sapiens; identical to SEQ ID NO: 218227
  chr17:79078512-79078548
  hypo

SEQ ID NO: 323469 - DNA, 530 bp, Homo sapiens; identical to SEQ ID NO: 271509
  chr17:79079546-79080076
  hypo

SEQ ID NO: 323470 - DNA, 537 bp, Homo sapiens; identical to SEQ ID NO: 218229
  chr17:79082610-79083147
  hypo

SEQ ID NO: 323471 - DNA, 123 bp, Homo sapiens; identical to SEQ ID NO: 218230
  chr17:79083370-79083493
  hypo

SEQ ID NO: 323472 - DNA, 49 bp, Homo sapiens; identical to SEQ ID NO: 218231
  chr17:79084399-79084448
  hypo

SEQ ID NO: 323473 - DNA, 250 bp, Homo sapiens; identical to SEQ ID NO: 218232
  chr17:79084478-79084728
  hypo

SEQ ID NO: 323474 - DNA, 163 bp, Homo sapiens; identical to SEQ ID NO: 218233
  chr17:79086357-79086520
  hypo

SEQ ID NO: 323475 - DNA, 175 bp, Homo sapiens; identical to SEQ ID NO: 218234
  chr17:79086875-79087050
  hypo

SEQ ID NO: 323476 - DNA, 42 bp, Homo sapiens
  chr17:79093914-79093956
  hypo
gccgccaggagccgcggccgctcccaccccttcctgcgggag

SEQ ID NO: 323477 - DNA, 37 bp, Homo sapiens
  chr17:79094705-79094742
  hypo
gcctgaggtggcctcggcctcagcctcgaggtctgag

SEQ ID NO: 323478 - DNA, 43 bp, Homo sapiens
  chr17:79094788-79094831
  hypo
gggaggtggagagccgtgtctcgggcccggggccctcaccctc

SEQ ID NO: 323479 - DNA, 196 bp, Homo sapiens; identical to SEQ ID NO: 218235
  chr17:79097959-79098155
  hypo

SEQ ID NO: 323480 - DNA, 105 bp, Homo sapiens
  chr17:79098203-79098308
  hypo
caccccacccagaccctctccccagggacaggtactcaccaaggcccccgtctcaggacagaccccccggcatgctgaagacgggccgttggccctgtacgtatg

SEQ ID NO: 323481 - DNA, 255 bp, Homo sapiens; identical to SEQ ID NO: 218236
  chr17:79099929-79100184
  hypo

SEQ ID NO: 323482 - DNA, 93 bp, Homo sapiens; identical to SEQ ID NO: 218237
  chr17:79100259-79100352
  hypo

SEQ ID NO: 323483 - DNA, 356 bp, Homo sapiens; identical to SEQ ID NO: 218238
  chr17:79102634-79102990
  hypo

SEQ ID NO: 323484 - DNA, 39 bp, Homo sapiens; identical to SEQ ID NO: 218239
  chr17:79104768-79104807
  hypo

SEQ ID NO: 323485 - DNA, 197 bp, Homo sapiens; identical to SEQ ID NO: 218240
  chr17:79108114-79108311
  hypo

SEQ ID NO: 323486 - DNA, 54 bp, Homo sapiens; identical to SEQ ID NO: 271524
  chr17:79114515-79114569
  hypo

SEQ ID NO: 323487 - DNA, 148 bp, Homo sapiens; identical to SEQ ID NO: 271525
  chr17:79133081-79133229
  hypo

SEQ ID NO: 323488 - DNA, 184 bp, Homo sapiens; identical to SEQ ID NO: 271526
  chr17:79135399-79135583
  hypo

SEQ ID NO: 323489 - DNA, 182 bp, Homo sapiens; identical to SEQ ID NO: 271527
  chr17:79135804-79135986
  hypo

SEQ ID NO: 323490 - DNA, 264 bp, Homo sapiens; identical to SEQ ID NO: 271528
  chr17:79154928-79155192
  hypo

SEQ ID NO: 323491 - DNA, 134 bp, Homo sapiens
  chr17:79155575-79155709
  hypo
cccaccgggtccccgctggccttgcagctggcagggctgggccagaaccagctagaagcccaggaggctcagaggcccaggctcccggcccgaagtgcccttgcctacaaggtggggggcgaacggctcgtgag

SEQ ID NO: 323492 - DNA, 519 bp, Homo sapiens
  chr17:79166571-79167090
  hypo
gccacctcactgtacagccgctgccgttgctgctgcagcgcccactgctcctgctccaggtgctgctggaacctgcgggacggtcaggactggctctcgggggccgggacgggcggtcccaggacccacccaccgcaggggcacgggccgaccacaggcctgactcacagctggagagcagccctccggggccctgcccctccccctcggcagtcaaggcccctcaaagccaccgcccgggggcaggcaaggccacgaggaacttgcccatcagccaagcgcagcaattccctgagctccaggccctcgtggcactttgggaagtggctgtggagccgcgtccaggcccccttttccctcagcccgtgtgccggcctcaccctgttcagcattgccccacgggcatggagggcgggaggcaggtgcctcgtggggccttatccacctcccctgcctccggcctgagggtgccaggtgcctggctccgtgacctgagcaagctcgcgccagggcctcgtc

SEQ ID NO: 323493 - DNA, 36 bp, Homo sapiens; identical to SEQ ID NO: 271531
  chr17:79168720-79168756
  hypo

SEQ ID NO: 323494 - DNA, 278 bp, Homo sapiens; identical to SEQ ID NO: 271532
  chr17:79169406-79169684
  hypo

SEQ ID NO: 323495 - DNA, 434 bp, Homo sapiens; identical to SEQ ID NO: 271533
  chr17:79175938-79176372
  hypo

SEQ ID NO: 323496 - DNA, 33 bp, Homo sapiens; identical to SEQ ID NO: 218242
  chr17:79183372-79183405
  hypo

SEQ ID NO: 323497 - DNA, 33 bp, Homo sapiens; identical to SEQ ID NO: 292806
  chr17:79205174-79205207
  hypo

SEQ ID NO: 323498 - DNA, 340 bp, Homo sapiens; identical to SEQ ID NO: 271535
  chr17:79206046-79206386
  hypo

SEQ ID NO: 323499 - DNA, 70 bp, Homo sapiens; identical to SEQ ID NO: 218243
  chr17:79216891-79216961
  hypo

SEQ ID NO: 323500 - DNA, 478 bp, Homo sapiens; identical to SEQ ID NO: 271537
  chr17:79223889-79224367
  hypo

SEQ ID NO: 323501 - DNA, 41 bp, Homo sapiens; identical to SEQ ID NO: 218244
  chr17:79226334-79226375
  hypo

SEQ ID NO: 323502 - DNA, 125 bp, Homo sapiens; identical to SEQ ID NO: 218245
  chr17:79230308-79230433
  hypo

SEQ ID NO: 323503 - DNA, 177 bp, Homo sapiens; identical to SEQ ID NO: 218246
  chr17:79234793-79234970
  hypo

SEQ ID NO: 323504 - DNA, 185 bp, Homo sapiens; identical to SEQ ID NO: 271541
  chr17:79253771-79253956
  hypo

SEQ ID NO: 323505 - DNA, 96 bp, Homo sapiens; identical to SEQ ID NO: 218247
  chr17:79294051-79294147
  hypo

SEQ ID NO: 323506 - DNA, 336 bp, Homo sapiens; identical to SEQ ID NO: 218248
  chr17:79296202-79296538
  hypo

SEQ ID NO: 323507 - DNA, 180 bp, Homo sapiens; identical to SEQ ID NO: 204843
  chr17:79319124-79319304
  hypo

SEQ ID NO: 323508 - DNA, 59 bp, Homo sapiens; identical to SEQ ID NO: 271546
  chr17:79523604-79523663
  hypo

SEQ ID NO: 323509 - DNA, 254 bp, Homo sapiens; identical to SEQ ID NO: 271547
  chr17:79539642-79539896
  hypo

SEQ ID NO: 323510 - DNA, 435 bp, Homo sapiens; identical to SEQ ID NO: 271548
  chr17:79542407-79542842
  hypo

SEQ ID NO: 323511 - DNA, 96 bp, Homo sapiens; identical to SEQ ID NO: 271549
  chr17:79543263-79543359
  hypo

SEQ ID NO: 323512 - DNA, 98 bp, Homo sapiens; identical to SEQ ID NO: 271551
  chr17:79597564-79597662
  hypo

SEQ ID NO: 323513 - DNA, 203 bp, Homo sapiens; identical to SEQ ID NO: 218250
  chr17:79609053-79609256
  hypo

SEQ ID NO: 323514 - DNA, 418 bp, Homo sapiens; identical to SEQ ID NO: 218251
  chr17:79612346-79612764
  hypo

SEQ ID NO: 323515 - DNA, 40 bp, Homo sapiens; identical to SEQ ID NO: 218252
  chr17:79612812-79612852
  hypo

SEQ ID NO: 323516 - DNA, 38 bp, Homo sapiens; identical to SEQ ID NO: 218253
  chr17:79634636-79634674
  hypo

SEQ ID NO: 323517 - DNA, 84 bp, Homo sapiens; identical to SEQ ID NO: 218254
  chr17:79634756-79634840
  hypo

SEQ ID NO: 323518 - DNA, 124 bp, Homo sapiens; identical to SEQ ID NO: 218255
  chr17:79635130-79635254
  hypo

SEQ ID NO: 323519 - DNA, 42 bp, Homo sapiens; identical to SEQ ID NO: 271558
  chr17:79637467-79637509
  hypo

SEQ ID NO: 323520 - DNA, 342 bp, Homo sapiens; identical to SEQ ID NO: 218256
  chr17:79648940-79649282
  hypo

SEQ ID NO: 323521 - DNA, 60 bp, Homo sapiens; identical to SEQ ID NO: 218257
  chr17:79653803-79653863
  hypo

SEQ ID NO: 323522 - DNA, 1225 bp, Homo sapiens; identical to SEQ ID NO: 271561
  chr17:79655115-79656340
  hypo

SEQ ID NO: 323523 - DNA, 35 bp, Homo sapiens; identical to SEQ ID NO: 271562
  chr17:79657392-79657427
  hypo

SEQ ID NO: 323524 - DNA, 40 bp, Homo sapiens; identical to SEQ ID NO: 218259
  chr17:79658810-79658850
  hypo

SEQ ID NO: 323525 - DNA, 64 bp, Homo sapiens; identical to SEQ ID NO: 271564
  chr17:79664245-79664309
  hypo

SEQ ID NO: 323526 - DNA, 57 bp, Homo sapiens
  chr17:79668328-79668385
  hypo
cagggcagatacgcgcatccgcaagtgtagacaggaaaaaccgtgaatttacttgaa

SEQ ID NO: 323527 - DNA, 58 bp, Homo sapiens; identical to SEQ ID NO: 271566
  chr17:79674301-79674359
  hypo

SEQ ID NO: 323528 - DNA, 153 bp, Homo sapiens; identical to SEQ ID NO: 218260
  chr17:79682601-79682754
  hypo

SEQ ID NO: 323529 - DNA, 251 bp, Homo sapiens; identical to SEQ ID NO: 271568
  chr17:79687598-79687849
  hypo

SEQ ID NO: 323530 - DNA, 102 bp, Homo sapiens; identical to SEQ ID NO: 218261
  chr17:79705356-79705458
  hypo

SEQ ID NO: 323531 - DNA, 260 bp, Homo sapiens; identical to SEQ ID NO: 271571
  chr17:79772552-79772812
  hypo

SEQ ID NO: 323532 - DNA, 42 bp, Homo sapiens; identical to SEQ ID NO: 271572
  chr17:79776471-79776513
  hypo

SEQ ID NO: 323533 - DNA, 41 bp, Homo sapiens; identical to SEQ ID NO: 271573
  chr17:79776573-79776614
  hypo

SEQ ID NO: 323534 - DNA, 278 bp, Homo sapiens; identical to SEQ ID NO: 271574
  chr17:79792218-79792496
  hypo

SEQ ID NO: 323535 - DNA, 102 bp, Homo sapiens; identical to SEQ ID NO: 218262
  chr17:79803003-79803105
  hypo

SEQ ID NO: 323536 - DNA, 165 bp, Homo sapiens; identical to SEQ ID NO: 271576
  chr17:79803521-79803686
  hypo

SEQ ID NO: 323537 - DNA, 243 bp, Homo sapiens; identical to SEQ ID NO: 271577
  chr17:79804099-79804342
  hypo

SEQ ID NO: 323538 - DNA, 115 bp, Homo sapiens
  chr17:79826862-79826977
  hypo
acccttgggtgcctcctccacgggggtcaggaactcgtactcctcggcccggggcccatagctgcctaccatgtagtcagtcttgtcaactgcggcacaaggaagagggcggtca

SEQ ID NO: 323539 - DNA, 142 bp, Homo sapiens
  chr17:79827029-79827171
  hypo
tgcccggggccccactcactcttgacgcctttcctgtacgtatgctggatgtacttcatgccggacactatctctcggttaacctgcaggacccgaagcgaggatcagggaaggtcggtccggaccccagccccagccccgc

SEQ ID NO: 323540 - DNA, 177 bp, Homo sapiens; identical to SEQ ID NO: 218263
  chr17:79844241-79844418
  hypo

SEQ ID NO: 323541 - DNA, 309 bp, Homo sapiens; identical to SEQ ID NO: 218264
  chr17:79846191-79846500
  hypo

SEQ ID NO: 323542 - DNA, 120 bp, Homo sapiens; identical to SEQ ID NO: 218265
  chr17:79851770-79851890
  hypo

SEQ ID NO: 323543 - DNA, 31 bp, Homo sapiens; identical to SEQ ID NO: 218266
  chr17:79863961-79863992
  hypo

SEQ ID NO: 323544 - DNA, 191 bp, Homo sapiens; identical to SEQ ID NO: 271583
  chr17:79869958-79870149
  hypo

SEQ ID NO: 323545 - DNA, 323 bp, Homo sapiens
  chr17:79870549-79870872
  hypo
cccagctcgggaaagctgtctgcggtccctgccttcccatccccttccctcccgtgtcaactgcggcggggctctggttggcggcagcttcattgttaccaagctgcagaacggatgtgggagaggtcacctcttaggtggtgactcaaaggtcggcacccacactagctcggtctcctcaaaactccgtgtccttgtccaccactgagcggcgtgcacacacagggtggggcagcagtggccccagggctgcctccgtctccagggatgagtcactagcaactctgggccccaccttccacttgtaccgctggggcaggtgg

SEQ ID NO: 323546 - DNA, 371 bp, Homo sapiens; identical to SEQ ID NO: 271585
  chr17:79871391-79871762
  hypo

SEQ ID NO: 323547 - DNA, 439 bp, Homo sapiens; identical to SEQ ID NO: 271586
  chr17:79873416-79873855
  hypo

SEQ ID NO: 323548 - DNA, 126 bp, Homo sapiens; identical to SEQ ID NO: 271587
  chr17:79880223-79880349
  hypo

SEQ ID NO: 323549 - DNA, 187 bp, Homo sapiens; identical to SEQ ID NO: 204844
  chr17:79885890-79886077
  hypo

SEQ ID NO: 323550 - DNA, 182 bp, Homo sapiens
  chr17:79887408-79887590
  hypo
cctcacctccccagcggctcctggccagctccccacggagagcccaggacacttgtccctggacacagtggtgcagccatgcttgggccaaaccatgaggccaccagaaccgcgaaaggctactgtactgagagggatactgcgagagaggcccacaggtttccaagcatccctctcactcc

SEQ ID NO: 323551 - DNA, 59 bp, Homo sapiens; identical to SEQ ID NO: 218269
  chr17:79887849-79887908
  hypo

SEQ ID NO: 323552 - DNA, 83 bp, Homo sapiens; identical to SEQ ID NO: 218270
  chr17:79892730-79892813
  hypo

SEQ ID NO: 323553 - DNA, 412 bp, Homo sapiens
  chr17:79892890-79893302
  hypo
gctccatgagcctcccgtcctccacctgggcgtgcgtgcctgtggcatacacggtggccccctcccgcaccacgactggagtgttggtcatgcagcggatgaccctgggggctggccgaaacgctgacagcttctggaagagaaaccagcgtgtccgtctggccatggacgcagtgcctagatgcactcaccccaccaagcagtgcccgagctctcccagtgggccgggacgctgcaacccttttgcagatgaaaactgaagtactgagggcccgggctctagacagcccctctccacaccccactgggcctgcggtgctaccttctcaatggagctgatggtgacgccggccgcgcaggacaccacaatgtgtctgtcctcaatgtcggcgcctatttcatccaggatgaa

SEQ ID NO: 323554 - DNA, 232 bp, Homo sapiens
  chr17:79899061-79899293
  hypo
tgtcatggaccagcgccccgaagatgatgcaggccacgaaggcctggacgatcttgaggagccccgacaccgtggccatatagctgctcacctggccgggccgggcccgcgtcagggccacctccacagcgtaggccaggaagaggagcccggcgaagacactggctgccaggcggaagtccctggcagcacagccggcgggctcgggggaacactcccgccgggcaaagta

SEQ ID NO: 323555 - DNA, 170 bp, Homo sapiens; identical to SEQ ID NO: 271591
  chr17:79906753-79906923
  hypo

SEQ ID NO: 323556 - DNA, 274 bp, Homo sapiens; identical to SEQ ID NO: 218273
  chr17:79913170-79913444
  hypo

SEQ ID NO: 323557 - DNA, 69 bp, Homo sapiens; identical to SEQ ID NO: 218274
  chr17:79914600-79914669
  hypo

SEQ ID NO: 323558 - DNA, 80 bp, Homo sapiens; identical to SEQ ID NO: 292819
  chr17:79917289-79917369
  hypo

SEQ ID NO: 323559 - DNA, 45 bp, Homo sapiens; identical to SEQ ID NO: 292820
  chr17:79917435-79917480
  hypo

SEQ ID NO: 323560 - DNA, 208 bp, Homo sapiens; identical to SEQ ID NO: 271594
  chr17:79940109-79940317
  hypo

SEQ ID NO: 323561 - DNA, 84 bp, Homo sapiens; identical to SEQ ID NO: 218275
  chr17:79942955-79943039
  hypo

SEQ ID NO: 323562 - DNA, 77 bp, Homo sapiens; identical to SEQ ID NO: 218276
  chr17:79946358-79946435
  hypo

SEQ ID NO: 323563 - DNA, 506 bp, Homo sapiens; identical to SEQ ID NO: 271597
  chr17:79950561-79951067
  hypo

SEQ ID NO: 323564 - DNA, 382 bp, Homo sapiens; identical to SEQ ID NO: 218277
  chr17:79951969-79952351
  hypo

SEQ ID NO: 323565 - DNA, 41 bp, Homo sapiens; identical to SEQ ID NO: 218278
  chr17:79952381-79952422
  hypo

SEQ ID NO: 323566 - DNA, 378 bp, Homo sapiens; identical to SEQ ID NO: 271599
  chr17:79961365-79961743
  hypo

SEQ ID NO: 323567 - DNA, 269 bp, Homo sapiens; identical to SEQ ID NO: 271600
  chr17:79963939-79964208
  hypo

SEQ ID NO: 323568 - DNA, 158 bp, Homo sapiens; identical to SEQ ID NO: 271601
  chr17:79964538-79964696
  hypo

SEQ ID NO: 323569 - DNA, 236 bp, Homo sapiens; identical to SEQ ID NO: 271602
  chr17:79972011-79972247
  hypo

SEQ ID NO: 323570 - DNA, 280 bp, Homo sapiens
  chr17:79977136-79977416
  hypo
ccccacttgcgccccgacccacgctcacgcaccagctgcggaagcaccttctccagctggtccacgtccacacggagcgcgtcttctgcctgggcctgccgcacgccgcggactgctgcttctgcggtgagaaacgcgagaggtgggggatgctggggggatcttaaacccgagcccagtgagggcctcagcctgggccggtgccccccccaacacccacgggcagcccccagaaccaggccacagcacctgacaaacaggctcaggagacccaagttta

SEQ ID NO: 323571 - DNA, 209 bp, Homo sapiens
  chr17:79977446-79977655
  hypo
tggttttcccgctggaaaaacgcaaaattccggatgctgtgcccggagggagcgtgggccctgggctcacccacaacgaagaccttcagcaactccaccatgagctgcagcgcgtccccgctcactgcaaggcagggggaggttatgcgggaccctcacccaccgctctggctgggtgctccagacatacccccgccctcccgaggcct

SEQ ID NO: 323572 - DNA, 521 bp, Homo sapiens; identical to SEQ ID NO: 204846
  chr17:79989097-79989618
  hypo

SEQ ID NO: 323573 - DNA, 40 bp, Homo sapiens; identical to SEQ ID NO: 204847
  chr17:79989900-79989940
  hypo

SEQ ID NO: 323574 - DNA, 373 bp, Homo sapiens; identical to SEQ ID NO: 218283
  chr17:80005250-80005623
  hypo

SEQ ID NO: 323575 - DNA, 180 bp, Homo sapiens; identical to SEQ ID NO: 225553
  chr17:80009037-80009217
  hypo

SEQ ID NO: 323576 - DNA, 84 bp, Homo sapiens; identical to SEQ ID NO: 271605
  chr17:80011809-80011893
  hypo

SEQ ID NO: 323577 - DNA, 267 bp, Homo sapiens; identical to SEQ ID NO: 218284
  chr17:80018605-80018872
  hypo

SEQ ID NO: 323578 - DNA, 792 bp, Homo sapiens; identical to SEQ ID NO: 271607
  chr17:80019100-80019892
  hypo

SEQ ID NO: 323579 - DNA, 137 bp, Homo sapiens; identical to SEQ ID NO: 218287
  chr17:80030812-80030949
  hypo

SEQ ID NO: 323580 - DNA, 44 bp, Homo sapiens; identical to SEQ ID NO: 271609
  chr17:80031799-80031843
  hypo

SEQ ID NO: 323581 - DNA, 64 bp, Homo sapiens; identical to SEQ ID NO: 218288
  chr17:80038872-80038936
  hypo

SEQ ID NO: 323582 - DNA, 87 bp, Homo sapiens; identical to SEQ ID NO: 218289
  chr17:80040622-80040709
  hypo

SEQ ID NO: 323583 - DNA, 199 bp, Homo sapiens; identical to SEQ ID NO: 271612
  chr17:80041640-80041839
  hypo

SEQ ID NO: 323584 - DNA, 231 bp, Homo sapiens; identical to SEQ ID NO: 218290
  chr17:80042509-80042740
  hypo

SEQ ID NO: 323585 - DNA, 875 bp, Homo sapiens; identical to SEQ ID NO: 271614
  chr17:80045801-80046676
  hypo

SEQ ID NO: 323586 - DNA, 59 bp, Homo sapiens; identical to SEQ ID NO: 218293
  chr17:80047423-80047482
  hypo

SEQ ID NO: 323587 - DNA, 160 bp, Homo sapiens; identical to SEQ ID NO: 271616
  chr17:80049202-80049362
  hypo

SEQ ID NO: 323588 - DNA, 947 bp, Homo sapiens; identical to SEQ ID NO: 271617
  chr17:80050746-80051693
  hypo

SEQ ID NO: 323589 - DNA, 282 bp, Homo sapiens; identical to SEQ ID NO: 271618
  chr17:80062707-80062989
  hypo

SEQ ID NO: 323590 - DNA, 104 bp, Homo sapiens; identical to SEQ ID NO: 271619
  chr17:80077690-80077794
  hypo

SEQ ID NO: 323591 - DNA, 284 bp, Homo sapiens; identical to SEQ ID NO: 271620
  chr17:80084435-80084719
  hypo

SEQ ID NO: 323592 - DNA, 114 bp, Homo sapiens; identical to SEQ ID NO: 218295
  chr17:80085172-80085286
  hypo

SEQ ID NO: 323593 - DNA, 167 bp, Homo sapiens; identical to SEQ ID NO: 31053
  chr17:80085323-80085490
  hypo

SEQ ID NO: 323594 - DNA, 38 bp, Homo sapiens; identical to SEQ ID NO: 271622
  chr17:80100748-80100786
  hypo

SEQ ID NO: 323595 - DNA, 187 bp, Homo sapiens; identical to SEQ ID NO: 271623
  chr17:80135500-80135687
  hypo

SEQ ID NO: 323596 - DNA, 71 bp, Homo sapiens; identical to SEQ ID NO: 218297
  chr17:80139084-80139155
  hypo

SEQ ID NO: 323597 - DNA, 160 bp, Homo sapiens; identical to SEQ ID NO: 218298
  chr17:80144203-80144363
  hypo

SEQ ID NO: 323598 - DNA, 236 bp, Homo sapiens; identical to SEQ ID NO: 271626
  chr17:80159381-80159617
  hypo

SEQ ID NO: 323599 - DNA, 109 bp, Homo sapiens; identical to SEQ ID NO: 271627
  chr17:80176133-80176242
  hypo

SEQ ID NO: 323600 - DNA, 225 bp, Homo sapiens; identical to SEQ ID NO: 292828
  chr17:80186330-80186555
  hypo

SEQ ID NO: 323601 - DNA, 818 bp, Homo sapiens; identical to SEQ ID NO: 292829
  chr17:80186618-80187436
  hypo

SEQ ID NO: 323602 - DNA, 759 bp, Homo sapiens; identical to SEQ ID NO: 292830
  chr17:80189391-80190150
  hypo

SEQ ID NO: 323603 - DNA, 534 bp, Homo sapiens
  chr17:80201407-80201941
  hypo
tcacttctgaccaacagacacgcgcccaacagaaggtcacagcgcagactctactttctggccgtgaaggttctgggtccggttgggagagtcacctgctccttggcacctcagggtgggtccttctggcctgccggcttttctgagctagtcttggcacgtggcaaggacagccccgctcctggttttaagcacaggcattcatacagacggagtgccaatccgcacaggagcattgagtgctgagaaaatggactgagtgcaaaggcagcaaggcaacaaacactacagtaaccacctctcggttcacagtcctctcccaagggaccagaaacgcatcttccaccttgaatcctgggactcccaattgtcctgctagggtctcaaagcctctgcttccaagctctcagctgcctgcccacctcctggggaagaagcgcgcagtgctttgcctggtaacacccactgcacccctgccccgcggcagcctgcggtccctaactgctctccgagggcctcaagagttcctgacag

SEQ ID NO: 323604 - DNA, 112 bp, Homo sapiens; identical to SEQ ID NO: 218300
  chr17:80201971-80202083
  hypo

SEQ ID NO: 323605 - DNA, 176 bp, Homo sapiens; identical to SEQ ID NO: 271629
  chr17:80202410-80202586
  hypo

SEQ ID NO: 323606 - DNA, 138 bp, Homo sapiens; identical to SEQ ID NO: 271630
  chr17:80207968-80208106
  hypo

SEQ ID NO: 323607 - DNA, 481 bp, Homo sapiens
  chr17:80221651-80222132
  hypo
ccaaggccacaccccgcaccaccctgctctattggctcgtcacaccttcaaggcaatgcaggctccaggcccttgagaagccagtccaccaccaagggccgccagacaggctcccagggcggagtctctgctgagctttccctgggttggtgatgggatttttcattcctgtggcctcctctggtcacgtgaggcccgtgatgggacacactgggtgcccctctctgtaacgggttccccaggaccacaggtgctgccaaagatattttgtgtcacataaacttagaaacgtcggtttcttgtagtagcacagattacgtgcttgtgctgagaaaagatgtcaaagaatcaaatcaacagtcctccctttcccgtgacaaaagggctaacagaggccctgaacaggttttcctttggccagttgcccaaggggactcacccaaccatccacctacaaatgtgccgcggagccttctcactg

SEQ ID NO: 323608 - DNA, 59 bp, Homo sapiens
  chr17:80222162-80222221
  hypo
cttcagacaaaaagctctgttcccaaagagggctcctgccagaccgaagctctgctgtt

SEQ ID NO: 323609 - DNA, 35 bp, Homo sapiens; identical to SEQ ID NO: 271632
  chr17:80224602-80224637
  hypo

SEQ ID NO: 323610 - DNA, 47 bp, Homo sapiens; identical to SEQ ID NO: 271635
  chr17:80232301-80232348
  hypo

SEQ ID NO: 323611 - DNA, 88 bp, Homo sapiens; identical to SEQ ID NO: 218301
  chr17:80239662-80239750
  hypo

SEQ ID NO: 323612 - DNA, 74 bp, Homo sapiens
  chr17:80240741-80240815
  hypo
agccctgggcaaatcgtgtatcccctagtcagcttctccagggtgaccggcagtgactgaagtccctgttccct

SEQ ID NO: 323613 - DNA, 140 bp, Homo sapiens; identical to SEQ ID NO: 271638
  chr17:80247838-80247978
  hypo

SEQ ID NO: 323614 - DNA, 62 bp, Homo sapiens; identical to SEQ ID NO: 218302
  chr17:80252004-80252066
  hypo

SEQ ID NO: 323615 - DNA, 98 bp, Homo sapiens; identical to SEQ ID NO: 218303
  chr17:80257491-80257589
  hypo

SEQ ID NO: 323616 - DNA, 48 bp, Homo sapiens; identical to SEQ ID NO: 218304
  chr17:80260760-80260808
  hypo

SEQ ID NO: 323617 - DNA, 114 bp, Homo sapiens; identical to SEQ ID NO: 271643
  chr17:80275866-80275980
  hypo

SEQ ID NO: 323618 - DNA, 67 bp, Homo sapiens; identical to SEQ ID NO: 292831
  chr17:80277698-80277765
  hypo

SEQ ID NO: 323619 - DNA, 188 bp, Homo sapiens; identical to SEQ ID NO: 218305
  chr17:80285255-80285443
  hypo

SEQ ID NO: 323620 - DNA, 43 bp, Homo sapiens
  chr17:80289191-80289234
  hypo
gaggcttcaggctgcggaccatgcgtggccccagctctgtctg

SEQ ID NO: 323621 - DNA, 58 bp, Homo sapiens; identical to SEQ ID NO: 271646
  chr17:80290202-80290260
  hypo

SEQ ID NO: 323622 - DNA, 534 bp, Homo sapiens
  chr17:80294473-80295007
  hypo
tttgtaacttgattctctgggttcccttgcctttcatccttgcccacccacgtgactgcagcctgtggggcttcctcctaatgtcccgaagataactcgtcatccttgaccccgccgccacctcgggttctagtggaggatgtggcccgcctgccacccccacaggcaccgggtcctccaggcctccttgacccacttccaacccacctgggatgtctgcgcgttaccagcccagatgcctcttggagccttccacctgcaccccatctcctgtcccaacaggctgggcccctcctcccgggctggccaagccagtacctccgcaggggccgcaggtgcagcaccctctgtgggggagctagggggatcgctcctctgctctgcgcacttttatgaaagggcctctgaccctcccactgtcctgctcactctgcccgcgcacccccggccacctgggggccgccccccaaagccctcggcccgtggacagactcgcagcctcctgggagccgagccaaccggccccacagattt

SEQ ID NO: 323623 - DNA, 89 bp, Homo sapiens; identical to SEQ ID NO: 218306
  chr17:80303790-80303879
  hypo

SEQ ID NO: 323624 - DNA, 87 bp, Homo sapiens
  chr17:80332162-80332249
  hypo
tgtccacccagccctgagcccgtcgtgaggggtcagagatggcgctgacccccgagtccccgagcagcttccctgggctggccgcca

SEQ ID NO: 323625 - DNA, 410 bp, Homo sapiens; identical to SEQ ID NO: 292835
  chr17:80332292-80332702
  hypo

SEQ ID NO: 323626 - DNA, 152 bp, Homo sapiens; identical to SEQ ID NO: 271650
  chr17:80352181-80352333
  hypo

SEQ ID NO: 323627 - DNA, 141 bp, Homo sapiens; identical to SEQ ID NO: 271651
  chr17:80354750-80354891
  hypo

SEQ ID NO: 323628 - DNA, 323 bp, Homo sapiens; identical to SEQ ID NO: 271652
  chr17:80355877-80356200
  hypo

SEQ ID NO: 323629 - DNA, 134 bp, Homo sapiens; identical to SEQ ID NO: 271653
  chr17:80369331-80369465
  hypo

SEQ ID NO: 323630 - DNA, 118 bp, Homo sapiens; identical to SEQ ID NO: 271654
  chr17:80371142-80371260
  hypo

SEQ ID NO: 323631 - DNA, 39 bp, Homo sapiens; identical to SEQ ID NO: 271655
  chr17:80391608-80391647
  hypo

SEQ ID NO: 323632 - DNA, 118 bp, Homo sapiens; identical to SEQ ID NO: 271656
  chr17:80393112-80393230
  hypo

SEQ ID NO: 323633 - DNA, 227 bp, Homo sapiens; identical to SEQ ID NO: 218307
  chr17:80394873-80395100
  hypo

SEQ ID NO: 323634 - DNA, 103 bp, Homo sapiens; identical to SEQ ID NO: 218308
  chr17:80395146-80395249
  hypo

SEQ ID NO: 323635 - DNA, 433 bp, Homo sapiens; identical to SEQ ID NO: 271658
  chr17:80397797-80398230
  hypo

SEQ ID NO: 323636 - DNA, 540 bp, Homo sapiens; identical to SEQ ID NO: 271659
  chr17:80445732-80446272
  hypo

SEQ ID NO: 323637 - DNA, 147 bp, Homo sapiens
  chr17:80448730-80448877
  hypo
ctgaggcactgggcaccaacatgagacaccagaggtcccccgtgcctgctggtgggttatagccatggggactgtgtgcattttcttctgcacaggagaaaagtggcgagatttccttcattgtaaccggaacggtattagccgtca

SEQ ID NO: 323638 - DNA, 159 bp, Homo sapiens; identical to SEQ ID NO: 271661
  chr17:80451150-80451309
  hypo

SEQ ID NO: 323639 - DNA, 33 bp, Homo sapiens; identical to SEQ ID NO: 271662
  chr17:80451584-80451617
  hypo

SEQ ID NO: 323640 - DNA, 100 bp, Homo sapiens; identical to SEQ ID NO: 271664
  chr17:80487529-80487629
  hypo

SEQ ID NO: 323641 - DNA, 109 bp, Homo sapiens
  chr17:80491463-80491572
  hypo
catacggctgttcgcgtagtaggttcgttgacaccagcatcaccccagactcatgagtaattcattgcactatgacatcacaatggctaggaataggaatttttcagct

SEQ ID NO: 323642 - DNA, 138 bp, Homo sapiens
  chr17:80491602-80491740
  hypo
tgcggcccatcattgacttgaaacgacgtgaattttgttagccgggcatggtggtgcccagctgtaggttagccgggcgtggtgacgcacagctgtaggttagctgggcctggcacagctaggttagctgggtgtggt

SEQ ID NO: 323643 - DNA, 216 bp, Homo sapiens; identical to SEQ ID NO: 204848
  chr17:80503130-80503346
  hypo

SEQ ID NO: 323644 - DNA, 283 bp, Homo sapiens; identical to SEQ ID NO: 271667
  chr17:80517078-80517361
  hypo

SEQ ID NO: 323645 - DNA, 180 bp, Homo sapiens; identical to SEQ ID NO: 218311
  chr17:80519708-80519888
  hypo

SEQ ID NO: 323646 - DNA, 191 bp, Homo sapiens; identical to SEQ ID NO: 271669
  chr17:80524560-80524751
  hypo

SEQ ID NO: 323647 - DNA, 506 bp, Homo sapiens; identical to SEQ ID NO: 271671
  chr17:80554480-80554986
  hypo

SEQ ID NO: 323648 - DNA, 217 bp, Homo sapiens; identical to SEQ ID NO: 271672
  chr17:80562621-80562838
  hypo

SEQ ID NO: 323649 - DNA, 396 bp, Homo sapiens; identical to SEQ ID NO: 218313
  chr17:80563138-80563534
  hypo

SEQ ID NO: 323650 - DNA, 263 bp, Homo sapiens; identical to SEQ ID NO: 218314
  chr17:80571117-80571380
  hypo

SEQ ID NO: 323651 - DNA, 274 bp, Homo sapiens
  chr17:80571776-80572050
  hypo
acccagagtcagatctcaagtgttagacaagccagggtgacgccggctcacttgaagctgccacttcaacatgcagggacattgctgctgccagccaccctccacctccacaggccagcaggagcctcagacctcccagagccacacaggcctcctacagatgcatttcctccctccctcctccagaggtgcccttggggcacagggagagaggagggcaggccgccccgtcccgacacagggagagaggagggcaggccgtcccatccccgac

SEQ ID NO: 323652 - DNA, 80 bp, Homo sapiens; identical to SEQ ID NO: 271675
  chr17:80578336-80578416
  hypo

SEQ ID NO: 323653 - DNA, 120 bp, Homo sapiens; identical to SEQ ID NO: 218316
  chr17:80593584-80593704
  hypo

SEQ ID NO: 323654 - DNA, 35 bp, Homo sapiens; identical to SEQ ID NO: 271677
  chr17:80600025-80600060
  hypo

SEQ ID NO: 323655 - DNA, 120 bp, Homo sapiens; identical to SEQ ID NO: 271678
  chr17:80600120-80600240
  hypo

SEQ ID NO: 323656 - DNA, 34 bp, Homo sapiens; identical to SEQ ID NO: 271679
  chr17:80600300-80600334
  hypo

SEQ ID NO: 323657 - DNA, 86 bp, Homo sapiens; identical to SEQ ID NO: 271680
  chr17:80600935-80601021
  hypo

SEQ ID NO: 323658 - DNA, 120 bp, Homo sapiens; identical to SEQ ID NO: 271681
  chr17:80603958-80604078
  hypo

SEQ ID NO: 323659 - DNA, 139 bp, Homo sapiens; identical to SEQ ID NO: 218317
  chr17:80604378-80604517
  hypo

SEQ ID NO: 323660 - DNA, 119 bp, Homo sapiens; identical to SEQ ID NO: 271683
  chr17:80607968-80608087
  hypo

SEQ ID NO: 323661 - DNA, 111 bp, Homo sapiens; identical to SEQ ID NO: 218318
  chr17:80614273-80614384
  hypo

SEQ ID NO: 323662 - DNA, 110 bp, Homo sapiens; identical to SEQ ID NO: 271685
  chr17:80624871-80624981
  hypo

SEQ ID NO: 323663 - DNA, 80 bp, Homo sapiens; identical to SEQ ID NO: 218319
  chr17:80645605-80645685
  hypo

SEQ ID NO: 323664 - DNA, 132 bp, Homo sapiens
  chr17:80654594-80654726
  hypo
ctccagccctgtcctccaggcgctcaatctccagccctgtcctccaggcgctcaatctccagccctgtcctccaggcgctcaatctccagggcagcgctggccctcggactttgccacagcgacatccgaac

SEQ ID NO: 323665 - DNA, 1320 bp, Homo sapiens; identical to SEQ ID NO: 292838
  chr17:80655727-80657047
  hypo

SEQ ID NO: 323666 - DNA, 229 bp, Homo sapiens; identical to SEQ ID NO: 271689
  chr17:80660560-80660789
  hypo

SEQ ID NO: 323667 - DNA, 61 bp, Homo sapiens; identical to SEQ ID NO: 271690
  chr17:80661017-80661078
  hypo

SEQ ID NO: 323668 - DNA, 85 bp, Homo sapiens; identical to SEQ ID NO: 271691
  chr17:80661330-80661415
  hypo

SEQ ID NO: 323669 - DNA, 116 bp, Homo sapiens; identical to SEQ ID NO: 271692
  chr17:80671048-80671164
  hypo

SEQ ID NO: 323670 - DNA, 159 bp, Homo sapiens; identical to SEQ ID NO: 271693
  chr17:80671194-80671353
  hypo

SEQ ID NO: 323671 - DNA, 74 bp, Homo sapiens; identical to SEQ ID NO: 218323
  chr17:80678256-80678330
  hypo

SEQ ID NO: 323672 - DNA, 37 bp, Homo sapiens
  chr17:80692926-80692963
  hypo
gcacggactgggctcaggtgcgcacctgctcgtgtgc

SEQ ID NO: 323673 - DNA, 335 bp, Homo sapiens; identical to SEQ ID NO: 292840
  chr17:80692982-80693317
  hypo

SEQ ID NO: 323674 - DNA, 299 bp, Homo sapiens; identical to SEQ ID NO: 292841
  chr17:80693554-80693853
  hypo

SEQ ID NO: 323675 - DNA, 360 bp, Homo sapiens; identical to SEQ ID NO: 271697
  chr17:80712025-80712385
  hypo

SEQ ID NO: 323676 - DNA, 66 bp, Homo sapiens
  chr17:80712972-80713038
  hypo
gacatcttgggtgggagggcgtccagggcattggtggattcaaatatttcacgattggtgattggt

SEQ ID NO: 323677 - DNA, 257 bp, Homo sapiens; identical to SEQ ID NO: 271699
  chr17:80720793-80721050
  hypo

SEQ ID NO: 323678 - DNA, 162 bp, Homo sapiens; identical to SEQ ID NO: 271700
  chr17:80732519-80732681
  hypo

SEQ ID NO: 323679 - DNA, 40 bp, Homo sapiens; identical to SEQ ID NO: 271701
  chr17:80744319-80744359
  hypo

SEQ ID NO: 323680 - DNA, 251 bp, Homo sapiens; identical to SEQ ID NO: 271702
  chr17:80744601-80744852
  hypo

SEQ ID NO: 323681 - DNA, 273 bp, Homo sapiens; identical to SEQ ID NO: 271703
  chr17:80745052-80745325
  hypo

SEQ ID NO: 323682 - DNA, 72 bp, Homo sapiens; identical to SEQ ID NO: 218327
  chr17:80747254-80747326
  hypo

SEQ ID NO: 323683 - DNA, 76 bp, Homo sapiens; identical to SEQ ID NO: 218328
  chr17:80747740-80747816
  hypo

SEQ ID NO: 323684 - DNA, 109 bp, Homo sapiens; identical to SEQ ID NO: 218329
  chr17:80747890-80747999
  hypo

SEQ ID NO: 323685 - DNA, 93 bp, Homo sapiens
  chr17:80749276-80749369
  hypo
aacctcttttctagcatcttacctctgtggtggttcacttttgcgagcttttgctgggccttggaaggtgcgtgggctcgctgctcctctctt

SEQ ID NO: 323686 - DNA, 150 bp, Homo sapiens; identical to SEQ ID NO: 271707
  chr17:80749614-80749764
  hypo

SEQ ID NO: 323687 - DNA, 103 bp, Homo sapiens; identical to SEQ ID NO: 271708
  chr17:80762942-80763045
  hypo

SEQ ID NO: 323688 - DNA, 159 bp, Homo sapiens; identical to SEQ ID NO: 271709
  chr17:80763316-80763475
  hypo

SEQ ID NO: 323689 - DNA, 127 bp, Homo sapiens; identical to SEQ ID NO: 218330
  chr17:80767312-80767439
  hypo

SEQ ID NO: 323690 - DNA, 112 bp, Homo sapiens; identical to SEQ ID NO: 271711
  chr17:80771620-80771732
  hypo

SEQ ID NO: 323691 - DNA, 157 bp, Homo sapiens
  chr17:80772715-80772872
  hypo
tttccaggagactgacaaggcgtggcatgggggatgtctggcgctggcagagctgggcaggagaggcctgttgctgccgtctcgactcgtggatggtgagtagctgaggcacggtcaggggggatgtctggcgctggcggagctgggcaggagaggc

SEQ ID NO: 323692 - DNA, 527 bp, Homo sapiens
  chr17:80772941-80773468
  hypo
cgtggcaggctgcagcccttcgtctgaacccatctccgcggtgtggccctgccgcgggcacgcccagaagagcttgagaacaaggtctgtctacctttttctcgcattggcctttgtaatttcctaattgcctcttttgtctgctgtggaattttaatgccacagattaccctgtgtagctggttttggagggccacgaatccttgtaatgtctgattttcttactccccaaaaccggttttcattcttgagggacattgtcgccccttaaggacacatgcagtggcacctgcttcagttgtagaaccaggtacccctggcagcatcctgggtcacctggagtgacgtggtgctccctggagatgaggctcacgccagcgtgaaaccagggtgggaactggggtggagggccaggggagctctgcagtggccagcagtggggtggggacagagggcacagcatggcagatgcaggggcactgccccagaccagctcttgtgccgtggccacacgcagccctgtctgt

SEQ ID NO: 323693 - DNA, 165 bp, Homo sapiens; identical to SEQ ID NO: 271713
  chr17:80775961-80776126
  hypo

SEQ ID NO: 323694 - DNA, 189 bp, Homo sapiens; identical to SEQ ID NO: 271714
  chr17:80793757-80793946
  hypo

SEQ ID NO: 323695 - DNA, 74 bp, Homo sapiens; identical to SEQ ID NO: 271715
  chr17:80794410-80794484
  hypo

SEQ ID NO: 323696 - DNA, 52 bp, Homo sapiens; identical to SEQ ID NO: 218334
  chr17:80797612-80797664
  hypo

SEQ ID NO: 323697 - DNA, 119 bp, Homo sapiens; identical to SEQ ID NO: 271717
  chr17:80816746-80816865
  hypo

SEQ ID NO: 323698 - DNA, 33 bp, Homo sapiens; identical to SEQ ID NO: 271718
  chr17:80818624-80818657
  hypo

SEQ ID NO: 323699 - DNA, 217 bp, Homo sapiens; identical to SEQ ID NO: 218335
  chr17:80819087-80819304
  hypo

SEQ ID NO: 323700 - DNA, 35 bp, Homo sapiens; identical to SEQ ID NO: 271720
  chr17:80820743-80820778
  hypo

SEQ ID NO: 323701 - DNA, 34 bp, Homo sapiens; identical to SEQ ID NO: 271721
  chr17:80825506-80825540
  hypo

SEQ ID NO: 323702 - DNA, 58 bp, Homo sapiens; identical to SEQ ID NO: 271722
  chr17:80827938-80827996
  hypo

SEQ ID NO: 323703 - DNA, 84 bp, Homo sapiens; identical to SEQ ID NO: 271723
  chr17:80828571-80828655
  hypo

SEQ ID NO: 323704 - DNA, 78 bp, Homo sapiens; identical to SEQ ID NO: 218336
  chr17:80830876-80830954
  hypo

SEQ ID NO: 323705 - DNA, 154 bp, Homo sapiens; identical to SEQ ID NO: 271725
  chr17:80831395-80831549
  hypo

SEQ ID NO: 323706 - DNA, 84 bp, Homo sapiens; identical to SEQ ID NO: 218337
  chr17:80832119-80832203
  hypo

SEQ ID NO: 323707 - DNA, 87 bp, Homo sapiens; identical to SEQ ID NO: 218338
  chr17:80832796-80832883
  hypo

SEQ ID NO: 323708 - DNA, 355 bp, Homo sapiens; identical to SEQ ID NO: 271727
  chr17:80839229-80839584
  hypo

SEQ ID NO: 323709 - DNA, 401 bp, Homo sapiens
  chr17:80847894-80848295
  hypo
gcctcatcccacacagagcaggagctggctctgttgacgtcagcttgtgcctcatccagaccatagacgggcccagaagtcagctcccagaagctacggaccccatgaccccacgaccccacatcatgctggggctgcttttgctgtgccctctgaccctgacatctggtcactggtcagcttcgcctgtgaatggggggccccaggttactcatgttgtgtgtgatgacgtcacatcttgggcgtgtggttgggtcttgcaggagagtgggacagaggccggagaggggaccggggtctgggctggacctgggcggggagcaaagttcccacgagaagtcagccgagaaggctctggagttcccggacagcaaagcaaatgcagccggggtctgggctgt

SEQ ID NO: 323710 - DNA, 200 bp, Homo sapiens; identical to SEQ ID NO: 271729
  chr17:80859372-80859572
  hypo

SEQ ID NO: 323711 - DNA, 55 bp, Homo sapiens; identical to SEQ ID NO: 271731
  chr17:80859905-80859960
  hypo

SEQ ID NO: 323712 - DNA, 197 bp, Homo sapiens; identical to SEQ ID NO: 271732
  chr17:80860237-80860434
  hypo

SEQ ID NO: 323713 - DNA, 140 bp, Homo sapiens; identical to SEQ ID NO: 271733
  chr17:80867214-80867354
  hypo

SEQ ID NO: 323714 - DNA, 310 bp, Homo sapiens; identical to SEQ ID NO: 271734
  chr17:80867900-80868210
  hypo

SEQ ID NO: 323715 - DNA, 157 bp, Homo sapiens; identical to SEQ ID NO: 271735
  chr17:80873073-80873230
  hypo

SEQ ID NO: 323716 - DNA, 349 bp, Homo sapiens; identical to SEQ ID NO: 218341
  chr17:80879334-80879683
  hypo

SEQ ID NO: 323717 - DNA, 152 bp, Homo sapiens; identical to SEQ ID NO: 218342
  chr17:80882754-80882906
  hypo

SEQ ID NO: 323718 - DNA, 851 bp, Homo sapiens; identical to SEQ ID NO: 271738
  chr17:80888853-80889704
  hypo

SEQ ID NO: 323719 - DNA, 54 bp, Homo sapiens; identical to SEQ ID NO: 218343
  chr17:80894204-80894258
  hypo

SEQ ID NO: 323720 - DNA, 126 bp, Homo sapiens; identical to SEQ ID NO: 218344
  chr17:80895933-80896059
  hypo

SEQ ID NO: 323721 - DNA, 226 bp, Homo sapiens; identical to SEQ ID NO: 271741
  chr17:80897174-80897400
  hypo

SEQ ID NO: 323722 - DNA, 107 bp, Homo sapiens; identical to SEQ ID NO: 271742
  chr17:80897430-80897537
  hypo

SEQ ID NO: 323723 - DNA, 349 bp, Homo sapiens; identical to SEQ ID NO: 271743
  chr17:80898972-80899321
  hypo

SEQ ID NO: 323724 - DNA, 114 bp, Homo sapiens; identical to SEQ ID NO: 218345
  chr17:80917377-80917491
  hypo

SEQ ID NO: 323725 - DNA, 363 bp, Homo sapiens; identical to SEQ ID NO: 271745
  chr17:80918442-80918805
  hypo

SEQ ID NO: 323726 - DNA, 201 bp, Homo sapiens; identical to SEQ ID NO: 218347
  chr17:80935245-80935446
  hypo

SEQ ID NO: 323727 - DNA, 164 bp, Homo sapiens; identical to SEQ ID NO: 218348
  chr17:80964419-80964583
  hypo

SEQ ID NO: 323728 - DNA, 195 bp, Homo sapiens; identical to SEQ ID NO: 218349
  chr17:80965439-80965634
  hypo

SEQ ID NO: 323729 - DNA, 277 bp, Homo sapiens
  chr17:80965953-80966230
  hypo
gaggaggcgcagggaagaggtgcgctatgcgcttaatcctgcaccgagacgtcagattctcagggcaggagcttttgtgggcaccgcacctagcacagggcctggacccagtgagcagatgtgaatgagaggcctgtgcgctggcctgagaggctggctaactttctccaggttcctagaagaagccactttcaaggctttcgagaagtgttgtgagctaattcatttgaaagcctctgtgccaacaggcggagcagaaagcgcaggccgctggagt

SEQ ID NO: 323730 - DNA, 178 bp, Homo sapiens; identical to SEQ ID NO: 271750
  chr17:80967462-80967640
  hypo

SEQ ID NO: 323731 - DNA, 197 bp, Homo sapiens; identical to SEQ ID NO: 271751
  chr17:80968046-80968243
  hypo

SEQ ID NO: 323732 - DNA, 82 bp, Homo sapiens; identical to SEQ ID NO: 271752
  chr17:80982744-80982826
  hypo

SEQ ID NO: 323733 - DNA, 342 bp, Homo sapiens; identical to SEQ ID NO: 271753
  chr17:80995219-80995561
  hypo

SEQ ID NO: 323734 - DNA, 34 bp, Homo sapiens; identical to SEQ ID NO: 271754
  chr17:80997455-80997489
  hypo

SEQ ID NO: 323735 - DNA, 36 bp, Homo sapiens; identical to SEQ ID NO: 225566
  chr17:81009162-81009198
  hypo

SEQ ID NO: 323736 - DNA, 62 bp, Homo sapiens; identical to SEQ ID NO: 271756
  chr17:81014244-81014306
  hypo

SEQ ID NO: 323737 - DNA, 221 bp, Homo sapiens
  chr17:81015979-81016200
  hypo
gccttggcatgccagccctggtgtccacagaggcatccattcctcatggcaaagtggagtcaagtcggctgatgcaggcgagacacctggccggcctggggagccgcaccagcgctccccacattgcactgctgactgaggggtgctcggtgccgcggcttcacacggtcagtgcacagacatgaacgctggactgagaagccgccgcgtgcacctggccc

SEQ ID NO: 323738 - DNA, 127 bp, Homo sapiens; identical to SEQ ID NO: 218351
  chr17:81021377-81021504
  hypo

SEQ ID NO: 323739 - DNA, 372 bp, Homo sapiens
  chr17:81032434-81032806
  hypo
caagctgggtgtgccgacggcgctggatggcaccatacgttgtccccgttgaggggtgactcctgctcccatgattagggccaaagggtcacaacctctgcagctcccacgtggctcaggggaaatgccaaaacagaggaacagccctcggccgcagccgggggatgcgtgggtgccctgcacactggccttcaacgtttgtgagtttcaggccttcggtagttggcatatgggacactccctctccccgcaggccgtggggataccggctccttccgaggcgtttctgccgtgagcgtcctccagaacgagtgggctgaggccctcggctgacgtcctgggtgaccgcagacctgctgtgtgtggccggcc

SEQ ID NO: 323740 - DNA, 321 bp, Homo sapiens
  chr17:81032836-81033157
  hypo
cacggtcctgcccctgagcacatctgaccggccgtggtcagggtccacgcagacgtccacctctgtgtacaaatccaccgtgtactgtagatggcccctcctgacaccaccccgcggaggccgaggaccctccttccctgtggggtctgagtgcccgagatggcagagtcactacagctcaccagccctggggccatggtcggttcatggccgggcggagggtgagatgctgccatgaacagctgctacaaacaactgctaggacggtgtggggccagcgtgccacacagaactgtctctcactgccgagctggcggctgg

SEQ ID NO: 323741 - DNA, 237 bp, Homo sapiens
  chr17:81033517-81033754
  hypo
ttgggaggtggtggttgggcggggccgtgggatgaactgtgctcacgtgaacgacagactgcgacgttcttcagtatttttcaaatgctgaaagagaaaatttcatggacgcgcttggggaaaccgtgtgatgtttttctggaggaatccagctactctgggaggagctgtttctttagtgagtggattcaggtgactggtcatcttgggcagcacattggccgtcaacacacattt

SEQ ID NO: 323742 - DNA, 456 bp, Homo sapiens; identical to SEQ ID NO: 292845
  chr17:81036702-81037158
  hypo

SEQ ID NO: 323743 - DNA, 602 bp, Homo sapiens; identical to SEQ ID NO: 292846
  chr17:81038242-81038844
  hypo

SEQ ID NO: 323744 - DNA, 522 bp, Homo sapiens; identical to SEQ ID NO: 129625
  chr17:81038865-81039387
  hypo

SEQ ID NO: 323745 - DNA, 309 bp, Homo sapiens
  chr17:81042717-81043026
  hypo
tttggagcgggtatcgtcctcactgactctctgtgggtgcgggtggggtgtgtgacgggagctccgggcctggctgacagtgtctctcctctgcagcgggctgacgcacgaggcacacaggaaggaggtggagcaggtgtatctgcgctgtgcggcgggtgccgtggagtggatgtacccaacaggtgctctcatcgttaacctgcggcccaacaccttctcgcctgcccggcacctgaccgtgtgcatcaggtccttcacggactcctcgggggccaatatttatttggaaaaaactggagaactgag

SEQ ID NO: 323746 - DNA, 71 bp, Homo sapiens; identical to SEQ ID NO: 218354
  chr17:81043193-81043264
  hypo

SEQ ID NO: 323747 - DNA, 310 bp, Homo sapiens
  chr17:81048473-81048783
  hypo
caccacgcttctgtcgttgaccagctctctctcagccgaggccacctccactcacatgaggcgccctgggctgggacctctggccctgtggtacggggcaggtgctggcgtgcagtctcacctgtggaggataaaagtgctgcctgaaatttgagatcccccagtgctccctccttgttgcttccggacgtgagtggtggtctgtgctgctggcctctgtccagcacgtgcctgcatcaggcccagcatggtctgcagacccccagccggcgagtgggatgggggtccacataggtgaactaagtgtcaa

SEQ ID NO: 323748 - DNA, 222 bp, Homo sapiens
  chr17:81049034-81049256
  hypo
gctggaccgggcctcgaggcgctcagcaggctgtgcagtttctttttcctgataccttaatggaagcaaatgcaggaggaggtgggtgggccggtgagtcaggcactgagcccggctgggaggcgccctcacccctgcctggcggaaagtgctggccttgtctctgggtccctcctacctccaccctgcggggtccacaaagacctgcgcttgcccagtgca

SEQ ID NO: 323749 - DNA, 77 bp, Homo sapiens
  chr17:81049917-81049994
  hypo
gggaggccaggccccgcagggttcaggggcttcagagggggttctgtgagcagggcttggcttgaaagccatttggg

SEQ ID NO: 323750 - DNA, 98 bp, Homo sapiens
  chr17:81050555-81050653
  hypo
agcacaaagacccctccccacgaaggccctgggacatggccggactgagggtcttgctctcggacatgtgcccatcatggccgaggtgcaggtgcctt

SEQ ID NO: 323751 - DNA, 205 bp, Homo sapiens
  chr17:81050716-81050921
  hypo
tgtctcccgtgctgccggcccctccagcacgtgccgccaactcacatttgaagtggcgttggtcacaaaggtgccttgacgtggacaccctccctgacttggctttgctgagtgtgagatcctttgacggtggtgggcggcgttccagagcctgtcccgtccaggctgcttcctgactctgcctttcttctccagcgccgtgccg

SEQ ID NO: 323752 - DNA, 315 bp, Homo sapiens; identical to SEQ ID NO: 271765
  chr17:81051924-81052239
  hypo

SEQ ID NO: 323753 - DNA, 188 bp, Homo sapiens
  chr17:81062393-81062581
  hypo
gggttcaaaacagcgcgagtcacaggagacagaagggaatctgagcttgcgattgctcattcttgtcaccctcctggctctgggacacctctgccatctcctaccaagggtaccccattcctggcgagttggaaagtggcctcatgggcagaaaacgagggcaaagggagctgcgtgctgtgagagac

SEQ ID NO: 323754 - DNA, 180 bp, Homo sapiens; identical to SEQ ID NO: 271767
  chr17:81063043-81063223
  hypo

SEQ ID NO: 323755 - DNA, 113 bp, Homo sapiens; identical to SEQ ID NO: 218356
  chr17:81068540-81068653
  hypo

SEQ ID NO: 323756 - DNA, 176 bp, Homo sapiens; identical to SEQ ID NO: 218357
  chr17:81068791-81068967
  hypo

SEQ ID NO: 323757 - DNA, 141 bp, Homo sapiens; identical to SEQ ID NO: 218358
  chr17:81080731-81080872
  hypo

SEQ ID NO: 323758 - DNA, 261 bp, Homo sapiens; identical to SEQ ID NO: 271770
  chr17:81101703-81101964
  hypo

SEQ ID NO: 323759 - DNA, 192 bp, Homo sapiens; identical to SEQ ID NO: 271771
  chr17:81102241-81102433
  hypo

SEQ ID NO: 323760 - DNA, 177 bp, Homo sapiens; identical to SEQ ID NO: 271772
  chr17:81104183-81104360
  hypo

SEQ ID NO: 323761 - DNA, 44 bp, Homo sapiens; identical to SEQ ID NO: 271773
  chr18:72942-72986
  hypo

SEQ ID NO: 323762 - DNA, 92 bp, Homo sapiens; identical to SEQ ID NO: 218359
  chr18:196512-196604
  hypo

SEQ ID NO: 323763 - DNA, 250 bp, Homo sapiens; identical to SEQ ID NO: 218360
  chr18:196807-197057
  hypo

SEQ ID NO: 323764 - DNA, 91 bp, Homo sapiens; identical to SEQ ID NO: 271776
  chr18:320960-321051
  hypo

SEQ ID NO: 323765 - DNA, 137 bp, Homo sapiens; identical to SEQ ID NO: 271777
  chr18:380756-380893
  hypo

SEQ ID NO: 323766 - DNA, 42 bp, Homo sapiens; identical to SEQ ID NO: 271778
  chr18:460335-460377
  hypo

SEQ ID NO: 323767 - DNA, 793 bp, Homo sapiens; identical to SEQ ID NO: 271779
  chr18:580159-580952
  hypo

SEQ ID NO: 323768 - DNA, 97 bp, Homo sapiens; identical to SEQ ID NO: 218362
  chr18:635705-635802
  hypo

SEQ ID NO: 323769 - DNA, 37 bp, Homo sapiens; identical to SEQ ID NO: 218363
  chr18:698119-698156
  hypo

SEQ ID NO: 323770 - DNA, 422 bp, Homo sapiens; identical to SEQ ID NO: 292854
  chr18:712016-712438
  hypo

SEQ ID NO: 323771 - DNA, 1313 bp, Homo sapiens; identical to SEQ ID NO: 204857
  chr18:811503-812816
  hypo

SEQ ID NO: 323772 - DNA, 205 bp, Homo sapiens; identical to SEQ ID NO: 204858
  chr18:812869-813074
  hypo

SEQ ID NO: 323773 - DNA, 163 bp, Homo sapiens; identical to SEQ ID NO: 271782
  chr18:930036-930199
  hypo

SEQ ID NO: 323774 - DNA, 95 bp, Homo sapiens; identical to SEQ ID NO: 271783
  chr18:1098042-1098137
  hypo

SEQ ID NO: 323775 - DNA, 80 bp, Homo sapiens; identical to SEQ ID NO: 271784
  chr18:1772178-1772258
  hypo

SEQ ID NO: 323776 - DNA, 77 bp, Homo sapiens; identical to SEQ ID NO: 271785
  chr18:1798116-1798193
  hypo

SEQ ID NO: 323777 - DNA, 46 bp, Homo sapiens; identical to SEQ ID NO: 271786
  chr18:1800381-1800427
  hypo

SEQ ID NO: 323778 - DNA, 93 bp, Homo sapiens; identical to SEQ ID NO: 271787
  chr18:1847233-1847326
  hypo

SEQ ID NO: 323779 - DNA, 34 bp, Homo sapiens; identical to SEQ ID NO: 271788
  chr18:1928649-1928683
  hypo

SEQ ID NO: 323780 - DNA, 63 bp, Homo sapiens; identical to SEQ ID NO: 271789
  chr18:1955269-1955332
  hypo

SEQ ID NO: 323781 - DNA, 329 bp, Homo sapiens; identical to SEQ ID NO: 271790
  chr18:2405969-2406298
  hypo

SEQ ID NO: 323782 - DNA, 92 bp, Homo sapiens; identical to SEQ ID NO: 271791
  chr18:2565718-2565810
  hypo

SEQ ID NO: 323783 - DNA, 285 bp, Homo sapiens; identical to SEQ ID NO: 292858
  chr18:2571378-2571663
  hypo

SEQ ID NO: 323784 - DNA, 259 bp, Homo sapiens; identical to SEQ ID NO: 292859
  chr18:2848166-2848425
  hypo

SEQ ID NO: 323785 - DNA, 192 bp, Homo sapiens; identical to SEQ ID NO: 271792
  chr18:2851484-2851676
  hypo

SEQ ID NO: 323786 - DNA, 180 bp, Homo sapiens; identical to SEQ ID NO: 271793
  chr18:2876295-2876475
  hypo

SEQ ID NO: 323787 - DNA, 366 bp, Homo sapiens; identical to SEQ ID NO: 204860
  chr18:2906430-2906796
  hypo

SEQ ID NO: 323788 - DNA, 136 bp, Homo sapiens; identical to SEQ ID NO: 204861
  chr18:2907034-2907170
  hypo

SEQ ID NO: 323789 - DNA, 127 bp, Homo sapiens; identical to SEQ ID NO: 218370
  chr18:2910112-2910239
  hypo

SEQ ID NO: 323790 - DNA, 34 bp, Homo sapiens; identical to SEQ ID NO: 271795
  chr18:2910452-2910486
  hypo

SEQ ID NO: 323791 - DNA, 49 bp, Homo sapiens
  chr18:2913121-2913170
  hypo
agagagacgcctacgtggaagcagtgctgtcggtctccaacgccagcgt

SEQ ID NO: 323792 - DNA, 127 bp, Homo sapiens; identical to SEQ ID NO: 271797
  chr18:2921216-2921343
  hypo

SEQ ID NO: 323793 - DNA, 216 bp, Homo sapiens; identical to SEQ ID NO: 271798
  chr18:2921975-2922191
  hypo

SEQ ID NO: 323794 - DNA, 211 bp, Homo sapiens; identical to SEQ ID NO: 271799
  chr18:2937551-2937762
  hypo

SEQ ID NO: 323795 - DNA, 165 bp, Homo sapiens; identical to SEQ ID NO: 218371
  chr18:3011266-3011431
  hypo

SEQ ID NO: 323796 - DNA, 162 bp, Homo sapiens; identical to SEQ ID NO: 271801
  chr18:3026813-3026975
  hypo

SEQ ID NO: 323797 - DNA, 161 bp, Homo sapiens; identical to SEQ ID NO: 271802
  chr18:3051275-3051436
  hypo

SEQ ID NO: 323798 - DNA, 233 bp, Homo sapiens; identical to SEQ ID NO: 271803
  chr18:3061440-3061673
  hypo

SEQ ID NO: 323799 - DNA, 135 bp, Homo sapiens; identical to SEQ ID NO: 218373
  chr18:3119810-3119945
  hypo

SEQ ID NO: 323800 - DNA, 118 bp, Homo sapiens
  chr18:3126668-3126786
  hypo
acgccacactacagaaagtcacgtgcttaccttgtatgcctcctcactgacagccttgacattggcttctctccattttcctggtaccccatcaatgacctcgcgatagttcacataa

SEQ ID NO: 323801 - DNA, 126 bp, Homo sapiens; identical to SEQ ID NO: 271806
  chr18:3135595-3135721
  hypo

SEQ ID NO: 323802 - DNA, 188 bp, Homo sapiens; identical to SEQ ID NO: 218374
  chr18:3214253-3214441
  hypo

SEQ ID NO: 323803 - DNA, 218 bp, Homo sapiens; identical to SEQ ID NO: 218375
  chr18:3214824-3215042
  hypo

SEQ ID NO: 323804 - DNA, 168 bp, Homo sapiens; identical to SEQ ID NO: 218376
  chr18:3215256-3215424
  hypo

SEQ ID NO: 323805 - DNA, 140 bp, Homo sapiens
  chr18:3330573-3330713
  hypo
gtcacaggggaatgacggcagctgtgccaatagaaaaggaaaaggactacctgggggcggccatgtccaacatggaggctccatcttctctttttttgttatcacgtgtacagtaataaagaaatgggcaacatggtgca

SEQ ID NO: 323806 - DNA, 329 bp, Homo sapiens; identical to SEQ ID NO: 218377
  chr18:3360375-3360704
  hypo

SEQ ID NO: 323807 - DNA, 36 bp, Homo sapiens; identical to SEQ ID NO: 271811
  chr18:3412987-3413023
  hypo

SEQ ID NO: 323808 - DNA, 238 bp, Homo sapiens; identical to SEQ ID NO: 271812
  chr18:3415134-3415372
  hypo

SEQ ID NO: 323809 - DNA, 35 bp, Homo sapiens; identical to SEQ ID NO: 271813
  chr18:3417143-3417178
  hypo

SEQ ID NO: 323810 - DNA, 90 bp, Homo sapiens; identical to SEQ ID NO: 271814
  chr18:3421739-3421829
  hypo

SEQ ID NO: 323811 - DNA, 89 bp, Homo sapiens; identical to SEQ ID NO: 271815
  chr18:3439668-3439757
  hypo

SEQ ID NO: 323812 - DNA, 86 bp, Homo sapiens; identical to SEQ ID NO: 218378
  chr18:3443525-3443611
  hypo

SEQ ID NO: 323813 - DNA, 120 bp, Homo sapiens; identical to SEQ ID NO: 218379
  chr18:3443851-3443971
  hypo

SEQ ID NO: 323814 - DNA, 94 bp, Homo sapiens; identical to SEQ ID NO: 218380
  chr18:3445349-3445443
  hypo

SEQ ID NO: 323815 - DNA, 631 bp, Homo sapiens; identical to SEQ ID NO: 204865
  chr18:3447898-3448529
  hypo

SEQ ID NO: 323816 - DNA, 35 bp, Homo sapiens; identical to SEQ ID NO: 225577
  chr18:3448760-3448795
  hypo

SEQ ID NO: 323817 - DNA, 3099 bp, Homo sapiens; identical to SEQ ID NO: 292870
  chr18:3449165-3452264
  hypo

SEQ ID NO: 323818 - DNA, 42 bp, Homo sapiens; identical to SEQ ID NO: 218384
  chr18:3534580-3534622
  hypo

SEQ ID NO: 323819 - DNA, 38 bp, Homo sapiens; identical to SEQ ID NO: 218385
  chr18:3535411-3535449
  hypo

SEQ ID NO: 323820 - DNA, 32 bp, Homo sapiens; identical to SEQ ID NO: 271821
  chr18:3570505-3570537
  hypo

SEQ ID NO: 323821 - DNA, 97 bp, Homo sapiens; identical to SEQ ID NO: 271822
  chr18:3580250-3580347
  hypo

SEQ ID NO: 323822 - DNA, 213 bp, Homo sapiens; identical to SEQ ID NO: 271823
  chr18:3580780-3580993
  hypo

SEQ ID NO: 323823 - DNA, 262 bp, Homo sapiens; identical to SEQ ID NO: 218386
  chr18:3581880-3582142
  hypo

SEQ ID NO: 323824 - DNA, 62 bp, Homo sapiens; identical to SEQ ID NO: 271825
  chr18:3592367-3592429
  hypo

SEQ ID NO: 323825 - DNA, 36 bp, Homo sapiens; identical to SEQ ID NO: 218387
  chr18:3600255-3600291
  hypo

SEQ ID NO: 323826 - DNA, 35 bp, Homo sapiens; identical to SEQ ID NO: 218388
  chr18:3600531-3600566
  hypo

SEQ ID NO: 323827 - DNA, 92 bp, Homo sapiens; identical to SEQ ID NO: 271828
  chr18:3602008-3602100
  hypo

SEQ ID NO: 323828 - DNA, 76 bp, Homo sapiens; identical to SEQ ID NO: 271829
  chr18:3608039-3608115
  hypo

SEQ ID NO: 323829 - DNA, 93 bp, Homo sapiens; identical to SEQ ID NO: 271830
  chr18:3610054-3610147
  hypo

SEQ ID NO: 323830 - DNA, 35 bp, Homo sapiens; identical to SEQ ID NO: 271831
  chr18:3628499-3628534
  hypo

SEQ ID NO: 323831 - DNA, 154 bp, Homo sapiens; identical to SEQ ID NO: 218389
  chr18:3637284-3637438
  hypo

SEQ ID NO: 323832 - DNA, 37 bp, Homo sapiens; identical to SEQ ID NO: 271833
  chr18:3640025-3640062
  hypo

SEQ ID NO: 323833 - DNA, 139 bp, Homo sapiens; identical to SEQ ID NO: 271834
  chr18:3648338-3648477
  hypo

SEQ ID NO: 323834 - DNA, 99 bp, Homo sapiens; identical to SEQ ID NO: 271835
  chr18:3668966-3669065
  hypo

SEQ ID NO: 323835 - DNA, 79 bp, Homo sapiens; identical to SEQ ID NO: 218390
  chr18:3669445-3669524
  hypo

SEQ ID NO: 323836 - DNA, 286 bp, Homo sapiens; identical to SEQ ID NO: 271837
  chr18:3729121-3729407
  hypo

SEQ ID NO: 323837 - DNA, 1036 bp, Homo sapiens; identical to SEQ ID NO: 204869
  chr18:3879110-3880146
  hypo

SEQ ID NO: 323838 - DNA, 64 bp, Homo sapiens; identical to SEQ ID NO: 271839
  chr18:3920623-3920687
  hypo

SEQ ID NO: 323839 - DNA, 169 bp, Homo sapiens; identical to SEQ ID NO: 271840
  chr18:3931025-3931194
  hypo

SEQ ID NO: 323840 - DNA, 195 bp, Homo sapiens; identical to SEQ ID NO: 271841
  chr18:3986862-3987057
  hypo

SEQ ID NO: 323841 - DNA, 76 bp, Homo sapiens; identical to SEQ ID NO: 218393
  chr18:4009176-4009252
  hypo

SEQ ID NO: 323842 - DNA, 37 bp, Homo sapiens; identical to SEQ ID NO: 271843
  chr18:4042775-4042812
  hypo

SEQ ID NO: 323843 - DNA, 254 bp, Homo sapiens; identical to SEQ ID NO: 292874
  chr18:4454777-4455031
  hypo

SEQ ID NO: 323844 - DNA, 90 bp, Homo sapiens; identical to SEQ ID NO: 292875
  chr18:4455561-4455651
  hypo

SEQ ID NO: 323845 - DNA, 111 bp, Homo sapiens
  chr18:5133034-5133145
  hypo
tcagctttccgcctcgggttttggtaagctggtttggtgtccatgggggcctggctcttgagctgctccaggctgagagcagcgagctgcgggttcccgggaggcagcgag

SEQ ID NO: 323846 - DNA, 154 bp, Homo sapiens; identical to SEQ ID NO: 271845
  chr18:5149403-5149557
  hypo

SEQ ID NO: 323847 - DNA, 35 bp, Homo sapiens; identical to SEQ ID NO: 271846
  chr18:5388296-5388331
  hypo

SEQ ID NO: 323848 - DNA, 221 bp, Homo sapiens; identical to SEQ ID NO: 271847
  chr18:5469572-5469793
  hypo

SEQ ID NO: 323849 - DNA, 40 bp, Homo sapiens; identical to SEQ ID NO: 271848
  chr18:5533864-5533904
  hypo

SEQ ID NO: 323850 - DNA, 198 bp, Homo sapiens; identical to SEQ ID NO: 271849
  chr18:6284881-6285079
  hypo

SEQ ID NO: 323851 - DNA, 242 bp, Homo sapiens; identical to SEQ ID NO: 292883
  chr18:6414203-6414445
  hypo

SEQ ID NO: 323852 - DNA, 165 bp, Homo sapiens; identical to SEQ ID NO: 271850
  chr18:6444200-6444365
  hypo

SEQ ID NO: 323853 - DNA, 383 bp, Homo sapiens; identical to SEQ ID NO: 218395
  chr18:6929367-6929750
  hypo

SEQ ID NO: 323854 - DNA, 257 bp, Homo sapiens
  chr18:6929787-6930044
  hypo
ctcgggctggacttactgcttccaaaagcgctgggcacagccttatatgactgaccccgcccccgagtcccaggccgccccatgcaaccgcccaaccgcccaaccgccactccaaaggtcaccaaccactgctccaggccacgggctgcctctccccacggctctagggcccttcccctccaccgcaggctgaccccgcccacctcaccaacagacacgccaactgcgtctggccccgcccccgccgttctctcttc

SEQ ID NO: 323855 - DNA, 69 bp, Homo sapiens; identical to SEQ ID NO: 218397
  chr18:6953009-6953078
  hypo

SEQ ID NO: 323856 - DNA, 134 bp, Homo sapiens; identical to SEQ ID NO: 204879
  chr18:7116637-7116771
  hypo

SEQ ID NO: 323857 - DNA, 80 bp, Homo sapiens; identical to SEQ ID NO: 218399
  chr18:7351750-7351830
  hypo

SEQ ID NO: 323858 - DNA, 38 bp, Homo sapiens; identical to SEQ ID NO: 292891
  chr18:7566544-7566582
  hypo

SEQ ID NO: 323859 - DNA, 216 bp, Homo sapiens; identical to SEQ ID NO: 292892
  chr18:7566793-7567009
  hypo

SEQ ID NO: 323860 - DNA, 415 bp, Homo sapiens; identical to SEQ ID NO: 204882
  chr18:7567335-7567750
  hypo

SEQ ID NO: 323861 - DNA, 50 bp, Homo sapiens; identical to SEQ ID NO: 225593
  chr18:8016761-8016811
  hypo

SEQ ID NO: 323862 - DNA, 409 bp, Homo sapiens; identical to SEQ ID NO: 271854
  chr18:8348210-8348619
  hypo

SEQ ID NO: 323863 - DNA, 200 bp, Homo sapiens; identical to SEQ ID NO: 292896
  chr18:8367259-8367459
  hypo

SEQ ID NO: 323864 - DNA, 81 bp, Homo sapiens; identical to SEQ ID NO: 129727
  chr18:8367503-8367584
  hypo

SEQ ID NO: 323865 - DNA, 33 bp, Homo sapiens; identical to SEQ ID NO: 271855
  chr18:8400564-8400597
  hypo

SEQ ID NO: 323866 - DNA, 167 bp, Homo sapiens; identical to SEQ ID NO: 218403
  chr18:8612037-8612204
  hypo

SEQ ID NO: 323867 - DNA, 51 bp, Homo sapiens; identical to SEQ ID NO: 218404
  chr18:8612504-8612555
  hypo

SEQ ID NO: 323868 - DNA, 524 bp, Homo sapiens; identical to SEQ ID NO: 271858
  chr18:8625460-8625984
  hypo

SEQ ID NO: 323869 - DNA, 792 bp, Homo sapiens
  chr18:8659297-8660089
  hypo
cgcgcagaacgcccgtgcctgggaagaggcctgcactccagcagacttccatgttcgctggaagcctcccttcctgactgtgaattgggacaatgcgcagacttccatgttcgttggaagcctcccttcctgactgtgaattgggacgatgcgcgggattttctgaaacctcagttcctccgtctgtaagatgagattgtggggaggagggcggacctgtaagtgcccagccacgagggctgagagattcgaactcctttgctgccgcgaagaagggcctgttccccggaggccaggtgggctccaggccaagctcgcagaggggccaggtgtgctctggcggtgagagggccgcgcgtcccggcacacaccccgcccatttcagcaccctctccaccctcctcagatgaccagagaaatccaagcaggcccttggctttcaagattcagcttcagccatgcataagtccttcactgaagtggcagaggaaggacgagcggctttgttggattggggctggagccccgtgcccggctgtgggtgctcgtgggagagcctcgcccggccctgcgcttcccgagagttcgccgggagcacaagccctggagagcccatgggcagagctcaccagccccacctcacagagagggaaactccgaagtggccgtggatttgcccagggtcacccagtgacagacagctcagactcctttcccagctccggccaccgaagcttgcaggcgcgtccgttccagctcagataagcacctccgccacgctttcctcacgcc

SEQ ID NO: 323870 - DNA, 63 bp, Homo sapiens; identical to SEQ ID NO: 218407
  chr18:8662986-8663049
  hypo

SEQ ID NO: 323871 - DNA, 217 bp, Homo sapiens; identical to SEQ ID NO: 271861
  chr18:8708639-8708856
  hypo

SEQ ID NO: 323872 - DNA, 56 bp, Homo sapiens; identical to SEQ ID NO: 271862
  chr18:8711911-8711967
  hypo

SEQ ID NO: 323873 - DNA, 183 bp, Homo sapiens; identical to SEQ ID NO: 271863
  chr18:8732473-8732656
  hypo

SEQ ID NO: 323874 - DNA, 145 bp, Homo sapiens; identical to SEQ ID NO: 218408
  chr18:8733060-8733205
  hypo

SEQ ID NO: 323875 - DNA, 65 bp, Homo sapiens; identical to SEQ ID NO: 271865
  chr18:8733742-8733807
  hypo

SEQ ID NO: 323876 - DNA, 43 bp, Homo sapiens; identical to SEQ ID NO: 204885
  chr18:8748272-8748315
  hypo

SEQ ID NO: 323877 - DNA, 99 bp, Homo sapiens
  chr18:8778934-8779033
  hypo
ctgctccttgggcgcgtgtcagaaaccctggtacctgggatgcgttgagccgcccacccagccggtgggattattgaggaaggagtttctgttcagcag

SEQ ID NO: 323878 - DNA, 215 bp, Homo sapiens; identical to SEQ ID NO: 271867
  chr18:8783992-8784207
  hypo

SEQ ID NO: 323879 - DNA, 62 bp, Homo sapiens; identical to SEQ ID NO: 271868
  chr18:8787325-8787387
  hypo

SEQ ID NO: 323880 - DNA, 124 bp, Homo sapiens; identical to SEQ ID NO: 271869
  chr18:8794467-8794591
  hypo

SEQ ID NO: 323881 - DNA, 564 bp, Homo sapiens; identical to SEQ ID NO: 218411
  chr18:8799966-8800530
  hypo

SEQ ID NO: 323882 - DNA, 149 bp, Homo sapiens; identical to SEQ ID NO: 218412
  chr18:8800560-8800709
  hypo

SEQ ID NO: 323883 - DNA, 154 bp, Homo sapiens; identical to SEQ ID NO: 271872
  chr18:8814259-8814413
  hypo

SEQ ID NO: 323884 - DNA, 71 bp, Homo sapiens
  chr18:8823065-8823136
  hypo
tccaaagtggaaactggatgcgccctccccactgtccccatgtcctctgattctgactgcccggtatgttt

SEQ ID NO: 323885 - DNA, 33 bp, Homo sapiens
  chr18:8823181-8823214
  hypo
cagatgtatcccgggttttctcatcatggtttt

SEQ ID NO: 323886 - DNA, 89 bp, Homo sapiens; identical to SEQ ID NO: 271874
  chr18:8826027-8826116
  hypo

SEQ ID NO: 323887 - DNA, 177 bp, Homo sapiens; identical to SEQ ID NO: 218413
  chr18:8829963-8830140
  hypo

SEQ ID NO: 323888 - DNA, 140 bp, Homo sapiens; identical to SEQ ID NO: 271876
  chr18:8856547-8856687
  hypo

SEQ ID NO: 323889 - DNA, 188 bp, Homo sapiens; identical to SEQ ID NO: 271877
  chr18:8937278-8937466
  hypo

SEQ ID NO: 323890 - DNA, 31 bp, Homo sapiens; identical to SEQ ID NO: 218414
  chr18:9101197-9101228
  hypo

SEQ ID NO: 323891 - DNA, 31 bp, Homo sapiens; identical to SEQ ID NO: 218415
  chr18:9101468-9101499
  hypo

SEQ ID NO: 323892 - DNA, 141 bp, Homo sapiens; identical to SEQ ID NO: 271880
  chr18:9196882-9197023
  hypo

SEQ ID NO: 323893 - DNA, 93 bp, Homo sapiens; identical to SEQ ID NO: 218416
  chr18:9285997-9286090
  hypo

SEQ ID NO: 323894 - DNA, 156 bp, Homo sapiens; identical to SEQ ID NO: 271882
  chr18:9288473-9288629
  hypo

SEQ ID NO: 323895 - DNA, 388 bp, Homo sapiens; identical to SEQ ID NO: 271885
  chr18:9417389-9417777
  hypo

SEQ ID NO: 323896 - DNA, 224 bp, Homo sapiens; identical to SEQ ID NO: 271886
  chr18:9428291-9428515
  hypo

SEQ ID NO: 323897 - DNA, 491 bp, Homo sapiens; identical to SEQ ID NO: 271887
  chr18:9478438-9478929
  hypo

SEQ ID NO: 323898 - DNA, 42 bp, Homo sapiens; identical to SEQ ID NO: 271888
  chr18:9514021-9514063
  hypo

SEQ ID NO: 323899 - DNA, 101 bp, Homo sapiens; identical to SEQ ID NO: 271889
  chr18:9514123-9514224
  hypo

SEQ ID NO: 323900 - DNA, 78 bp, Homo sapiens; identical to SEQ ID NO: 31213
  chr18:9535962-9536040
  hypo

SEQ ID NO: 323901 - DNA, 251 bp, Homo sapiens; identical to SEQ ID NO: 271891
  chr18:9539461-9539712
  hypo

SEQ ID NO: 323902 - DNA, 79 bp, Homo sapiens; identical to SEQ ID NO: 218420
  chr18:9547707-9547786
  hypo

SEQ ID NO: 323903 - DNA, 190 bp, Homo sapiens
  chr18:9547816-9548006
  hypo
atcttcggagattttggtactggcagggtggatgcttgcaaaatacttgacatcgctgtcacggtccatctgaagagccatgatggtctgctccacagcctcctggtggcagctggcagaggccaagaaatagtctggaaatgacatgtgcataggacagatgaaaccagtccaacggaacacttcagag

SEQ ID NO: 323904 - DNA, 223 bp, Homo sapiens; identical to SEQ ID NO: 271893
  chr18:9569203-9569426
  hypo

SEQ ID NO: 323905 - DNA, 173 bp, Homo sapiens; identical to SEQ ID NO: 218422
  chr18:9615460-9615633
  hypo

SEQ ID NO: 323906 - DNA, 159 bp, Homo sapiens; identical to SEQ ID NO: 218423
  chr18:9688382-9688541
  hypo

SEQ ID NO: 323907 - DNA, 275 bp, Homo sapiens; identical to SEQ ID NO: 292905
  chr18:9708063-9708338
  hypo

SEQ ID NO: 323908 - DNA, 79 bp, Homo sapiens; identical to SEQ ID NO: 271896
  chr18:9758085-9758164
  hypo

SEQ ID NO: 323909 - DNA, 162 bp, Homo sapiens; identical to SEQ ID NO: 218424
  chr18:9797400-9797562
  hypo

SEQ ID NO: 323910 - DNA, 153 bp, Homo sapiens; identical to SEQ ID NO: 271898
  chr18:9800802-9800955
  hypo

SEQ ID NO: 323911 - DNA, 128 bp, Homo sapiens; identical to SEQ ID NO: 271899
  chr18:9833346-9833474
  hypo

SEQ ID NO: 323912 - DNA, 156 bp, Homo sapiens
  chr18:9835951-9836107
  hypo
ctgctgtgagaacgcgtcagagcacacacagccctgcagccctcctctgcttgattttgatgagatgttgtgaatgatttcccttgcttttggctgcaataccttaaacatgtgggatggttttgacagaaaataattccaccacacagttaacag

SEQ ID NO: 323913 - DNA, 269 bp, Homo sapiens; identical to SEQ ID NO: 271901
  chr18:9838068-9838337
  hypo

SEQ ID NO: 323914 - DNA, 89 bp, Homo sapiens; identical to SEQ ID NO: 271902
  chr18:9883100-9883189
  hypo

SEQ ID NO: 323915 - DNA, 215 bp, Homo sapiens; identical to SEQ ID NO: 271903
  chr18:9887794-9888009
  hypo

SEQ ID NO: 323916 - DNA, 138 bp, Homo sapiens; identical to SEQ ID NO: 271905
  chr18:9917587-9917725
  hypo

SEQ ID NO: 323917 - DNA, 136 bp, Homo sapiens; identical to SEQ ID NO: 271906
  chr18:9962327-9962463
  hypo

SEQ ID NO: 323918 - DNA, 285 bp, Homo sapiens; identical to SEQ ID NO: 271907
  chr18:10031148-10031433
  hypo

SEQ ID NO: 323919 - DNA, 83 bp, Homo sapiens; identical to SEQ ID NO: 271908
  chr18:10047642-10047725
  hypo

SEQ ID NO: 323920 - DNA, 103 bp, Homo sapiens; identical to SEQ ID NO: 271909
  chr18:10069172-10069275
  hypo

SEQ ID NO: 323921 - DNA, 249 bp, Homo sapiens; identical to SEQ ID NO: 271910
  chr18:10150712-10150961
  hypo

SEQ ID NO: 323922 - DNA, 484 bp, Homo sapiens; identical to SEQ ID NO: 271911
  chr18:10165791-10166275
  hypo

SEQ ID NO: 323923 - DNA, 46 bp, Homo sapiens; identical to SEQ ID NO: 271912
  chr18:10166509-10166555
  hypo

SEQ ID NO: 323924 - DNA, 98 bp, Homo sapiens; identical to SEQ ID NO: 271913
  chr18:10336858-10336956
  hypo

SEQ ID NO: 323925 - DNA, 61 bp, Homo sapiens
  chr18:10414334-10414395
  hypo
gcaggcagaatgccaccactcggccaagaaggcgtgtttggctacgacagcccagagtcca

SEQ ID NO: 323926 - DNA, 187 bp, Homo sapiens
  chr18:10414425-10414612
  hypo
cggcttctgctggtactcagccaccacgcccaccagagccaccgcacttccggttgctgtccaggcggcttctgctggtactcgcccaccacgcccaccagagccaccgcacttccggttgctgtccaggcggcttctgctggtactcgcccaccacgcccaccacgtggagtctagcagctctccc

SEQ ID NO: 323927 - DNA, 146 bp, Homo sapiens; identical to SEQ ID NO: 271915
  chr18:10460167-10460313
  hypo

SEQ ID NO: 323928 - DNA, 191 bp, Homo sapiens; identical to SEQ ID NO: 218425
  chr18:10474225-10474416
  hypo

SEQ ID NO: 323929 - DNA, 259 bp, Homo sapiens
  chr18:10474462-10474721
  hypo
gaggcaggtgcggctggggaacttgctgggcgggcgtgggccgggctgtgggctccgaacccgaccttggactagtcctttgcacccactcaggttctggttccttttcctcaccttcatgcgcctgcacgggctctgatctcttctgctctttttagtactgggggaaaaattaaccatcatcacgtttattttcttacctgcctctctaccccgttgcactcctgggtgtggctccgcagatggagtctgaaagccc

SEQ ID NO: 323930 - DNA, 265 bp, Homo sapiens; identical to SEQ ID NO: 218427
  chr18:10485483-10485748
  hypo

SEQ ID NO: 323931 - DNA, 64 bp, Homo sapiens; identical to SEQ ID NO: 271918
  chr18:10538267-10538331
  hypo

SEQ ID NO: 323932 - DNA, 32 bp, Homo sapiens; identical to SEQ ID NO: 271919
  chr18:10578689-10578721
  hypo

SEQ ID NO: 323933 - DNA, 526 bp, Homo sapiens; identical to SEQ ID NO: 271921
  chr18:10725371-10725897
  hypo

SEQ ID NO: 323934 - DNA, 81 bp, Homo sapiens; identical to SEQ ID NO: 271922
  chr18:11024138-11024219
  hypo

SEQ ID NO: 323935 - DNA, 38 bp, Homo sapiens; identical to SEQ ID NO: 271923
  chr18:11116413-11116451
  hypo

SEQ ID NO: 323936 - DNA, 234 bp, Homo sapiens
  chr18:11533023-11533257
  hypo
agtgggatactgcttaggggcgctgtcaggggccacactgcccgcggtggggtgcaggttgggtgcactaactggggcgtcattccccacggttagggaaaggttggggttgctatccgctatccggggctgctccccatcgtggggagcggattgggggccttaaggatccgtggctgcactattcactgtggggagcaggctgtagcgctctctgagacgtcactgctgggg

SEQ ID NO: 323937 - DNA, 40 bp, Homo sapiens; identical to SEQ ID NO: 271925
  chr18:11534215-11534255
  hypo

SEQ ID NO: 323938 - DNA, 59 bp, Homo sapiens
  chr18:11571325-11571384
  hypo
actgggaaccttaggatgcgctaaaatacggagcttcttgaaatcgaggcatttaacag

SEQ ID NO: 323939 - DNA, 45 bp, Homo sapiens; identical to SEQ ID NO: 271927
  chr18:11589694-11589739
  hypo

SEQ ID NO: 323940 - DNA, 389 bp, Homo sapiens; identical to SEQ ID NO: 271928
  chr18:11821762-11822151
  hypo

SEQ ID NO: 323941 - DNA, 87 bp, Homo sapiens; identical to SEQ ID NO: 218428
  chr18:11877623-11877710
  hypo

SEQ ID NO: 323942 - DNA, 42 bp, Homo sapiens; identical to SEQ ID NO: 218429
  chr18:11877747-11877789
  hypo

SEQ ID NO: 323943 - DNA, 175 bp, Homo sapiens; identical to SEQ ID NO: 271930
  chr18:11881075-11881250
  hypo

SEQ ID NO: 323944 - DNA, 36 bp, Homo sapiens; identical to SEQ ID NO: 271931
  chr18:11929334-11929370
  hypo

SEQ ID NO: 323945 - DNA, 44 bp, Homo sapiens; identical to SEQ ID NO: 271932
  chr18:11946060-11946104
  hypo

SEQ ID NO: 323946 - DNA, 220 bp, Homo sapiens; identical to SEQ ID NO: 218430
  chr18:11992149-11992369
  hypo

SEQ ID NO: 323947 - DNA, 194 bp, Homo sapiens; identical to SEQ ID NO: 218431
  chr18:11992751-11992945
  hypo

SEQ ID NO: 323948 - DNA, 45 bp, Homo sapiens; identical to SEQ ID NO: 271936
  chr18:11999660-11999705
  hypo

SEQ ID NO: 323949 - DNA, 64 bp, Homo sapiens; identical to SEQ ID NO: 271937
  chr18:12059558-12059622
  hypo

SEQ ID NO: 323950 - DNA, 213 bp, Homo sapiens; identical to SEQ ID NO: 218432
  chr18:12093611-12093824
  hypo

SEQ ID NO: 323951 - DNA, 212 bp, Homo sapiens; identical to SEQ ID NO: 292919
  chr18:12253892-12254104
  hypo

SEQ ID NO: 323952 - DNA, 60 bp, Homo sapiens
  chr18:12277183-12277243
  hypo
gcacatacatgctccgggtgctggatgacaaggaagagcggccatccctccggtcacaag

SEQ ID NO: 323953 - DNA, 126 bp, Homo sapiens
  chr18:12277273-12277399
  hypo
gcaggctgtcgccggctcttgagccaaacactgtgtttcgtttggctcaatgacgaatgttgaagatgcttttatgttctgagccacatgcacttggaggccgctggtcacgctgctcaggagtgg

SEQ ID NO: 323954 - DNA, 696 bp, Homo sapiens; identical to SEQ ID NO: 218434
  chr18:12279587-12280283
  hypo

SEQ ID NO: 323955 - DNA, 138 bp, Homo sapiens; identical to SEQ ID NO: 271942
  chr18:12291804-12291942
  hypo

SEQ ID NO: 323956 - DNA, 688 bp, Homo sapiens; identical to SEQ ID NO: 204895
  chr18:12308209-12308897
  hypo

SEQ ID NO: 323957 - DNA, 129 bp, Homo sapiens; identical to SEQ ID NO: 204896
  chr18:12308927-12309056
  hypo

SEQ ID NO: 323958 - DNA, 210 bp, Homo sapiens; identical to SEQ ID NO: 218437
  chr18:12375057-12375267
  hypo

SEQ ID NO: 323959 - DNA, 60 bp, Homo sapiens; identical to SEQ ID NO: 218438
  chr18:12375294-12375354
  hypo

SEQ ID NO: 323960 - DNA, 120 bp, Homo sapiens; identical to SEQ ID NO: 218439
  chr18:12375777-12375897
  hypo

SEQ ID NO: 323961 - DNA, 268 bp, Homo sapiens; identical to SEQ ID NO: 271945
  chr18:12396677-12396945
  hypo

SEQ ID NO: 323962 - DNA, 313 bp, Homo sapiens; identical to SEQ ID NO: 204897
  chr18:12407708-12408021
  hypo

SEQ ID NO: 323963 - DNA, 206 bp, Homo sapiens; identical to SEQ ID NO: 204898
  chr18:12408117-12408323
  hypo

SEQ ID NO: 323964 - DNA, 42 bp, Homo sapiens; identical to SEQ ID NO: 11652
  chr18:12408339-12408381
  hypo

SEQ ID NO: 323965 - DNA, 98 bp, Homo sapiens; identical to SEQ ID NO: 218443
  chr18:12431471-12431569
  hypo

SEQ ID NO: 323966 - DNA, 317 bp, Homo sapiens; identical to SEQ ID NO: 218444
  chr18:12432919-12433236
  hypo

SEQ ID NO: 323967 - DNA, 452 bp, Homo sapiens; identical to SEQ ID NO: 271948
  chr18:12433981-12434433
  hypo

SEQ ID NO: 323968 - DNA, 161 bp, Homo sapiens; identical to SEQ ID NO: 271949
  chr18:12460294-12460455
  hypo

SEQ ID NO: 323969 - DNA, 38 bp, Homo sapiens; identical to SEQ ID NO: 271950
  chr18:12699046-12699084
  hypo

SEQ ID NO: 323970 - DNA, 33 bp, Homo sapiens; identical to SEQ ID NO: 271951
  chr18:12701659-12701692
  hypo

SEQ ID NO: 323971 - DNA, 86 bp, Homo sapiens; identical to SEQ ID NO: 271952
  chr18:12741269-12741355
  hypo

SEQ ID NO: 323972 - DNA, 35 bp, Homo sapiens; identical to SEQ ID NO: 218445
  chr18:12849993-12850028
  hypo

SEQ ID NO: 323973 - DNA, 76 bp, Homo sapiens; identical to SEQ ID NO: 271954
  chr18:12854822-12854898
  hypo

SEQ ID NO: 323974 - DNA, 39 bp, Homo sapiens; identical to SEQ ID NO: 271955
  chr18:12856102-12856141
  hypo

SEQ ID NO: 323975 - DNA, 37 bp, Homo sapiens; identical to SEQ ID NO: 218446
  chr18:12949141-12949178
  hypo

SEQ ID NO: 323976 - DNA, 193 bp, Homo sapiens; identical to SEQ ID NO: 218447
  chr18:13033466-13033659
  hypo

SEQ ID NO: 323977 - DNA, 46 bp, Homo sapiens
  chr18:13036732-13036778
  hypo
agggctgaggtgctcggcagcagccttgagggcagacattagggga

SEQ ID NO: 323978 - DNA, 344 bp, Homo sapiens; identical to SEQ ID NO: 218448
  chr18:13131736-13132080
  hypo

SEQ ID NO: 323979 - DNA, 124 bp, Homo sapiens; identical to SEQ ID NO: 218449
  chr18:13135194-13135318
  hypo

SEQ ID NO: 323980 - DNA, 135 bp, Homo sapiens; identical to SEQ ID NO: 271961
  chr18:13162994-13163129
  hypo

SEQ ID NO: 323981 - DNA, 90 bp, Homo sapiens; identical to SEQ ID NO: 271962
  chr18:13165627-13165717
  hypo

SEQ ID NO: 323982 - DNA, 101 bp, Homo sapiens; identical to SEQ ID NO: 271963
  chr18:13181960-13182061
  hypo

SEQ ID NO: 323983 - DNA, 144 bp, Homo sapiens
  chr18:13195846-13195990
  hypo
tagacatttttaaaaagagataagaggaaaaagataagcagacatgggagacacacggctcctacgtgtacagagaatcaggctgtttgtttacttcacctccgttggtctttggggctccacgctgcccgcctttcctaccct

SEQ ID NO: 323984 - DNA, 221 bp, Homo sapiens; identical to SEQ ID NO: 218450
  chr18:13212918-13213139
  hypo

SEQ ID NO: 323985 - DNA, 1037 bp, Homo sapiens; identical to SEQ ID NO: 292932
  chr18:13217136-13218173
  hypo

SEQ ID NO: 323986 - DNA, 201 bp, Homo sapiens
  chr18:13231318-13231519
  hypo
ggcttttgggagcgggagtgaacctgggcacggggcgctgctcttggtgagcatgtcgggtggcccttgccctttgggtcaccattcctcctgattgcggcctgcccgagatcgcgtgagtctggttctggtgtggagcgtttcctcccatctttgtcgaaaaccaaatcaaccagccacgaatggtaaagaaaaacaagc

SEQ ID NO: 323987 - DNA, 102 bp, Homo sapiens; identical to SEQ ID NO: 218453
  chr18:13233040-13233142
  hypo

SEQ ID NO: 323988 - DNA, 79 bp, Homo sapiens; identical to SEQ ID NO: 218454
  chr18:13233182-13233261
  hypo

SEQ ID NO: 323989 - DNA, 299 bp, Homo sapiens; identical to SEQ ID NO: 271968
  chr18:13252607-13252906
  hypo

SEQ ID NO: 323990 - DNA, 182 bp, Homo sapiens; identical to SEQ ID NO: 271969
  chr18:13254436-13254618
  hypo

SEQ ID NO: 323991 - DNA, 89 bp, Homo sapiens; identical to SEQ ID NO: 271970
  chr18:13257121-13257210
  hypo

SEQ ID NO: 323992 - DNA, 236 bp, Homo sapiens; identical to SEQ ID NO: 218455
  chr18:13292802-13293038
  hypo

SEQ ID NO: 323993 - DNA, 148 bp, Homo sapiens; identical to SEQ ID NO: 271972
  chr18:13296052-13296200
  hypo

SEQ ID NO: 323994 - DNA, 140 bp, Homo sapiens; identical to SEQ ID NO: 271973
  chr18:13311612-13311752
  hypo

SEQ ID NO: 323995 - DNA, 54 bp, Homo sapiens; identical to SEQ ID NO: 271974
  chr18:13381476-13381530
  hypo

SEQ ID NO: 323996 - DNA, 310 bp, Homo sapiens; identical to SEQ ID NO: 271975
  chr18:13387328-13387638
  hypo

SEQ ID NO: 323997 - DNA, 130 bp, Homo sapiens; identical to SEQ ID NO: 271976
  chr18:13393100-13393230
  hypo

SEQ ID NO: 323998 - DNA, 128 bp, Homo sapiens; identical to SEQ ID NO: 271977
  chr18:13400464-13400592
  hypo

SEQ ID NO: 323999 - DNA, 279 bp, Homo sapiens; identical to SEQ ID NO: 271978
  chr18:13404255-13404534
  hypo

SEQ ID NO: 324000 - DNA, 38 bp, Homo sapiens; identical to SEQ ID NO: 271979
  chr18:13404774-13404812
  hypo

SEQ ID NO: 324001 - DNA, 77 bp, Homo sapiens; identical to SEQ ID NO: 271980
  chr18:13412928-13413005
  hypo

SEQ ID NO: 324002 - DNA, 55 bp, Homo sapiens; identical to SEQ ID NO: 218456
  chr18:13425935-13425990
  hypo

SEQ ID NO: 324003 - DNA, 40 bp, Homo sapiens; identical to SEQ ID NO: 271982
  chr18:13426842-13426882
  hypo

SEQ ID NO: 324004 - DNA, 364 bp, Homo sapiens; identical to SEQ ID NO: 218457
  chr18:13442501-13442865
  hypo

SEQ ID NO: 324005 - DNA, 202 bp, Homo sapiens; identical to SEQ ID NO: 271985
  chr18:13458111-13458313
  hypo

SEQ ID NO: 324006 - DNA, 125 bp, Homo sapiens
  chr18:13460975-13461100
  hypo
gccgtctgcatggccggggcccttctgcagcccccactgcaccaacctttgtccgcctttattgttggtgaacacagtgcccacctcaccatgctggggtggcctggcttgctgtctcttgagta

SEQ ID NO: 324007 - DNA, 98 bp, Homo sapiens
  chr18:13461383-13461481
  hypo
aaaatggattctaggaacacaaacgtcattgaagaaggagagtgtgtgttactggttgagggtgtcctggtccttggcatcttgaacaaataatcaga

SEQ ID NO: 324008 - DNA, 86 bp, Homo sapiens; identical to SEQ ID NO: 271987
  chr18:13461541-13461627
  hypo

SEQ ID NO: 324009 - DNA, 42 bp, Homo sapiens; identical to SEQ ID NO: 271988
  chr18:13462966-13463008
  hypo

SEQ ID NO: 324010 - DNA, 43 bp, Homo sapiens
  chr18:13477929-13477972
  hypo
ggataatgcatctcagatcaacgaaggataccaaaggcaggtg

SEQ ID NO: 324011 - DNA, 38 bp, Homo sapiens; identical to SEQ ID NO: 271990
  chr18:13481383-13481421
  hypo

SEQ ID NO: 324012 - DNA, 99 bp, Homo sapiens; identical to SEQ ID NO: 271991
  chr18:13481451-13481550
  hypo

SEQ ID NO: 324013 - DNA, 240 bp, Homo sapiens; identical to SEQ ID NO: 218458
  chr18:13491221-13491461
  hypo

SEQ ID NO: 324014 - DNA, 120 bp, Homo sapiens; identical to SEQ ID NO: 218459
  chr18:13498452-13498572
  hypo

SEQ ID NO: 324015 - DNA, 84 bp, Homo sapiens; identical to SEQ ID NO: 218460
  chr18:13498973-13499057
  hypo

SEQ ID NO: 324016 - DNA, 240 bp, Homo sapiens; identical to SEQ ID NO: 218461
  chr18:13499117-13499357
  hypo

SEQ ID NO: 324017 - DNA, 83 bp, Homo sapiens; identical to SEQ ID NO: 218462
  chr18:13499657-13499740
  hypo

SEQ ID NO: 324018 - DNA, 60 bp, Homo sapiens; identical to SEQ ID NO: 271997
  chr18:13503353-13503413
  hypo

SEQ ID NO: 324019 - DNA, 44 bp, Homo sapiens; identical to SEQ ID NO: 271998
  chr18:13505525-13505569
  hypo

SEQ ID NO: 324020 - DNA, 119 bp, Homo sapiens; identical to SEQ ID NO: 271999
  chr18:13514461-13514580
  hypo

SEQ ID NO: 324021 - DNA, 150 bp, Homo sapiens; identical to SEQ ID NO: 272000
  chr18:13518870-13519020
  hypo

SEQ ID NO: 324022 - DNA, 147 bp, Homo sapiens; identical to SEQ ID NO: 272001
  chr18:13519311-13519458
  hypo

SEQ ID NO: 324023 - DNA, 202 bp, Homo sapiens; identical to SEQ ID NO: 218463
  chr18:13525325-13525527
  hypo

SEQ ID NO: 324024 - DNA, 74 bp, Homo sapiens; identical to SEQ ID NO: 272003
  chr18:13528924-13528998
  hypo

SEQ ID NO: 324025 - DNA, 269 bp, Homo sapiens; identical to SEQ ID NO: 218464
  chr18:13532099-13532368
  hypo

SEQ ID NO: 324026 - DNA, 226 bp, Homo sapiens; identical to SEQ ID NO: 272005
  chr18:13550420-13550646
  hypo

SEQ ID NO: 324027 - DNA, 35 bp, Homo sapiens; identical to SEQ ID NO: 272006
  chr18:13571915-13571950
  hypo

SEQ ID NO: 324028 - DNA, 254 bp, Homo sapiens
  chr18:13583825-13584079
  hypo
agttctggcatggcagggcttaatgaatgtcaggctcagagggaagagaatggaacctgcgagcactttctgccactcacagagcggggtcacctcgccctgctcccccagctgcctacaggcctgccgtgcccttcccatctccgcagcctcagcctggcttcccttgaggaccaccaccgcccttagcccatctcccacacccatcttgctgagagtgcaggtgagcccggcccacccgaagccacgttgcc

SEQ ID NO: 324029 - DNA, 57 bp, Homo sapiens; identical to SEQ ID NO: 272008
  chr18:13590480-13590537
  hypo

SEQ ID NO: 324030 - DNA, 182 bp, Homo sapiens
  chr18:13621726-13621908
  hypo
gccatgagctggaggacgcctggagcttaaggcctcgggagcttcctggggatcggcggtggggttgttggcggtgggcttgtcagcggtgggcttgtcggcggtagggttgtcggcggtgggttgtggagggtggggttgtggagggtggggttgtcggcggtggaccctcaagccaaact

SEQ ID NO: 324031 - DNA, 117 bp, Homo sapiens; identical to SEQ ID NO: 272010
  chr18:13654304-13654421
  hypo

SEQ ID NO: 324032 - DNA, 90 bp, Homo sapiens; identical to SEQ ID NO: 292933
  chr18:13823935-13824025
  hypo

SEQ ID NO: 324033 - DNA, 112 bp, Homo sapiens; identical to SEQ ID NO: 292934
  chr18:13824102-13824214
  hypo

SEQ ID NO: 324034 - DNA, 61 bp, Homo sapiens
  chr18:13826242-13826303
  hypo
gggccatcatcgccggcatctgggctttctgcacgggctgcggcattgtcttcatcctgta

SEQ ID NO: 324035 - DNA, 78 bp, Homo sapiens
  chr18:13826592-13826670
  hypo
ttcaatatgtacctcatactcatcatgtgtaattccgtgatggaccctctcatatatgccttccgcagccaagagatg

SEQ ID NO: 324036 - DNA, 145 bp, Homo sapiens; identical to SEQ ID NO: 272013
  chr18:14221785-14221930
  hypo

SEQ ID NO: 324037 - DNA, 33 bp, Homo sapiens; identical to SEQ ID NO: 272014
  chr18:18700054-18700087
  hypo

SEQ ID NO: 324038 - DNA, 88 bp, Homo sapiens; identical to SEQ ID NO: 272015
  chr18:18997462-18997550
  hypo

SEQ ID NO: 324039 - DNA, 120 bp, Homo sapiens; identical to SEQ ID NO: 218465
  chr18:19064405-19064525
  hypo

SEQ ID NO: 324040 - DNA, 180 bp, Homo sapiens; identical to SEQ ID NO: 272017
  chr18:19216811-19216991
  hypo

SEQ ID NO: 324041 - DNA, 204 bp, Homo sapiens
  chr18:19243757-19243961
  hypo
ggctgggagtgcgtcaggaatcagaaggtcaacatggcagccggtgagtgatgcaatcgacttcatgggcttcagacaaaccttcaggctcacaaaatccgcagtcacagagacccgtagttaagaaaaatattaaaattcacctgaattaattctttccttccttcgttcattcaatcaaccgcatttaataaaatatgataa

SEQ ID NO: 324042 - DNA, 32 bp, Homo sapiens; identical to SEQ ID NO: 218466
  chr18:19253263-19253295
  hypo

SEQ ID NO: 324043 - DNA, 38 bp, Homo sapiens; identical to SEQ ID NO: 272020
  chr18:19395658-19395696
  hypo

SEQ ID NO: 324044 - DNA, 460 bp, Homo sapiens; identical to SEQ ID NO: 204912
  chr18:19750806-19751266
  hypo

SEQ ID NO: 324045 - DNA, 62 bp, Homo sapiens; identical to SEQ ID NO: 292951
  chr18:19751774-19751836
  hypo

SEQ ID NO: 324046 - DNA, 168 bp, Homo sapiens; identical to SEQ ID NO: 129825
  chr18:19751869-19752037
  hypo

SEQ ID NO: 324047 - DNA, 59 bp, Homo sapiens; identical to SEQ ID NO: 272021
  chr18:19769948-19770007
  hypo

SEQ ID NO: 324048 - DNA, 34 bp, Homo sapiens; identical to SEQ ID NO: 218468
  chr18:19778302-19778336
  hypo

SEQ ID NO: 324049 - DNA, 132 bp, Homo sapiens; identical to SEQ ID NO: 272024
  chr18:20380480-20380612
  hypo

SEQ ID NO: 324050 - DNA, 210 bp, Homo sapiens; identical to SEQ ID NO: 204913
  chr18:20512628-20512838
  hypo

SEQ ID NO: 324051 - DNA, 1246 bp, Homo sapiens; identical to SEQ ID NO: 11673
  chr18:20512902-20514148
  hypo

SEQ ID NO: 324052 - DNA, 217 bp, Homo sapiens; identical to SEQ ID NO: 272025
  chr18:20696270-20696487
  hypo

SEQ ID NO: 324053 - DNA, 242 bp, Homo sapiens; identical to SEQ ID NO: 292957
  chr18:20715395-20715637
  hypo

SEQ ID NO: 324054 - DNA, 721 bp, Homo sapiens; identical to SEQ ID NO: 292958
  chr18:20715851-20716572
  hypo

SEQ ID NO: 324055 - DNA, 200 bp, Homo sapiens; identical to SEQ ID NO: 292959
  chr18:20716690-20716890
  hypo

SEQ ID NO: 324056 - DNA, 163 bp, Homo sapiens; identical to SEQ ID NO: 272026
  chr18:20770343-20770506
  hypo

SEQ ID NO: 324057 - DNA, 219 bp, Homo sapiens; identical to SEQ ID NO: 218475
  chr18:20790547-20790766
  hypo

SEQ ID NO: 324058 - DNA, 260 bp, Homo sapiens; identical to SEQ ID NO: 218476
  chr18:20800425-20800685
  hypo

SEQ ID NO: 324059 - DNA, 329 bp, Homo sapiens; identical to SEQ ID NO: 272029
  chr18:20829538-20829867
  hypo

SEQ ID NO: 324060 - DNA, 193 bp, Homo sapiens; identical to SEQ ID NO: 218477
  chr18:20846712-20846905
  hypo

SEQ ID NO: 324061 - DNA, 256 bp, Homo sapiens; identical to SEQ ID NO: 272031
  chr18:20853662-20853918
  hypo

SEQ ID NO: 324062 - DNA, 47 bp, Homo sapiens; identical to SEQ ID NO: 272032
  chr18:20882093-20882140
  hypo

SEQ ID NO: 324063 - DNA, 42 bp, Homo sapiens; identical to SEQ ID NO: 218478
  chr18:20910923-20910965
  hypo

SEQ ID NO: 324064 - DNA, 319 bp, Homo sapiens; identical to SEQ ID NO: 218479
  chr18:20911025-20911344
  hypo

SEQ ID NO: 324065 - DNA, 43 bp, Homo sapiens; identical to SEQ ID NO: 272035
  chr18:21042374-21042417
  hypo

SEQ ID NO: 324066 - DNA, 155 bp, Homo sapiens; identical to SEQ ID NO: 272036
  chr18:21104196-21104351
  hypo

SEQ ID NO: 324067 - DNA, 48 bp, Homo sapiens; identical to SEQ ID NO: 218480
  chr18:21164538-21164586
  hypo

SEQ ID NO: 324068 - DNA, 575 bp, Homo sapiens; identical to SEQ ID NO: 204919
  chr18:21242241-21242816
  hypo

SEQ ID NO: 324069 - DNA, 44 bp, Homo sapiens; identical to SEQ ID NO: 272038
  chr18:21306854-21306898
  hypo

SEQ ID NO: 324070 - DNA, 203 bp, Homo sapiens; identical to SEQ ID NO: 272039
  chr18:21388620-21388823
  hypo

SEQ ID NO: 324071 - DNA, 73 bp, Homo sapiens; identical to SEQ ID NO: 272040
  chr18:21422659-21422732
  hypo

SEQ ID NO: 324072 - DNA, 42 bp, Homo sapiens; identical to SEQ ID NO: 272041
  chr18:21426405-21426447
  hypo

SEQ ID NO: 324073 - DNA, 78 bp, Homo sapiens; identical to SEQ ID NO: 272042
  chr18:21461950-21462028
  hypo

SEQ ID NO: 324074 - DNA, 154 bp, Homo sapiens; identical to SEQ ID NO: 272043
  chr18:21508086-21508240
  hypo

SEQ ID NO: 324075 - DNA, 247 bp, Homo sapiens; identical to SEQ ID NO: 225613
  chr18:21594467-21594714
  hypo

SEQ ID NO: 324076 - DNA, 120 bp, Homo sapiens; identical to SEQ ID NO: 272044
  chr18:21608975-21609095
  hypo

SEQ ID NO: 324077 - DNA, 192 bp, Homo sapiens; identical to SEQ ID NO: 272045
  chr18:21656908-21657100
  hypo

SEQ ID NO: 324078 - DNA, 165 bp, Homo sapiens; identical to SEQ ID NO: 272046
  chr18:21702069-21702234
  hypo

SEQ ID NO: 324079 - DNA, 116 bp, Homo sapiens; identical to SEQ ID NO: 218482
  chr18:21849311-21849427
  hypo

SEQ ID NO: 324080 - DNA, 204 bp, Homo sapiens; identical to SEQ ID NO: 272048
  chr18:22098635-22098839
  hypo

SEQ ID NO: 324081 - DNA, 32 bp, Homo sapiens; identical to SEQ ID NO: 272049
  chr18:22552213-22552245
  hypo

SEQ ID NO: 324082 - DNA, 186 bp, Homo sapiens; identical to SEQ ID NO: 272050
  chr18:22597055-22597241
  hypo

SEQ ID NO: 324083 - DNA, 69 bp, Homo sapiens; identical to SEQ ID NO: 272051
  chr18:22636372-22636441
  hypo

SEQ ID NO: 324084 - DNA, 147 bp, Homo sapiens; identical to SEQ ID NO: 204928
  chr18:22653839-22653986
  hypo

SEQ ID NO: 324085 - DNA, 44 bp, Homo sapiens; identical to SEQ ID NO: 218484
  chr18:22658458-22658502
  hypo

SEQ ID NO: 324086 - DNA, 70 bp, Homo sapiens; identical to SEQ ID NO: 272054
  chr18:22721843-22721913
  hypo

SEQ ID NO: 324087 - DNA, 260 bp, Homo sapiens; identical to SEQ ID NO: 218485
  chr18:22756673-22756933
  hypo

SEQ ID NO: 324088 - DNA, 74 bp, Homo sapiens; identical to SEQ ID NO: 272056
  chr18:22787366-22787440
  hypo

SEQ ID NO: 324089 - DNA, 170 bp, Homo sapiens; identical to SEQ ID NO: 272057
  chr18:22804889-22805059
  hypo

SEQ ID NO: 324090 - DNA, 418 bp, Homo sapiens; identical to SEQ ID NO: 272058
  chr18:22806990-22807408
  hypo

SEQ ID NO: 324091 - DNA, 154 bp, Homo sapiens; identical to SEQ ID NO: 218486
  chr18:23652341-23652495
  hypo

SEQ ID NO: 324092 - DNA, 1124 bp, Homo sapiens; identical to SEQ ID NO: 292979
  chr18:23806175-23807299
  hypo

SEQ ID NO: 324093 - DNA, 130 bp, Homo sapiens; identical to SEQ ID NO: 218487
  chr18:23988507-23988637
  hypo

SEQ ID NO: 324094 - DNA, 227 bp, Homo sapiens; identical to SEQ ID NO: 272061
  chr18:24059431-24059658
  hypo

SEQ ID NO: 324095 - DNA, 32 bp, Homo sapiens; identical to SEQ ID NO: 272062
  chr18:24409812-24409844
  hypo

SEQ ID NO: 324096 - DNA, 201 bp, Homo sapiens; identical to SEQ ID NO: 292989
  chr18:25756986-25757187
  hypo

SEQ ID NO: 324097 - DNA, 37 bp, Homo sapiens; identical to SEQ ID NO: 272063
  chr18:26202689-26202726
  hypo

SEQ ID NO: 324098 - DNA, 139 bp, Homo sapiens; identical to SEQ ID NO: 272064
  chr18:27755725-27755864
  hypo

SEQ ID NO: 324099 - DNA, 99 bp, Homo sapiens; identical to SEQ ID NO: 272065
  chr18:27932659-27932758
  hypo

SEQ ID NO: 324100 - DNA, 150 bp, Homo sapiens; identical to SEQ ID NO: 218489
  chr18:28934936-28935086
  hypo

SEQ ID NO: 324101 - DNA, 120 bp, Homo sapiens; identical to SEQ ID NO: 272067
  chr18:29026532-29026652
  hypo

SEQ ID NO: 324102 - DNA, 172 bp, Homo sapiens; identical to SEQ ID NO: 218490
  chr18:29199777-29199949
  hypo

SEQ ID NO: 324103 - DNA, 43 bp, Homo sapiens; identical to SEQ ID NO: 272069
  chr18:29200381-29200424
  hypo

SEQ ID NO: 324104 - DNA, 36 bp, Homo sapiens; identical to SEQ ID NO: 204939
  chr18:29265160-29265196
  hypo

SEQ ID NO: 324105 - DNA, 45 bp, Homo sapiens; identical to SEQ ID NO: 218492
  chr18:29269413-29269458
  hypo

SEQ ID NO: 324106 - DNA, 54 bp, Homo sapiens; identical to SEQ ID NO: 218493
  chr18:29293795-29293849
  hypo

SEQ ID NO: 324107 - DNA, 99 bp, Homo sapiens; identical to SEQ ID NO: 272072
  chr18:29325111-29325210
  hypo

SEQ ID NO: 324108 - DNA, 61 bp, Homo sapiens; identical to SEQ ID NO: 272073
  chr18:29366854-29366915
  hypo

SEQ ID NO: 324109 - DNA, 39 bp, Homo sapiens; identical to SEQ ID NO: 272074
  chr18:29520730-29520769
  hypo

SEQ ID NO: 324110 - DNA, 170 bp, Homo sapiens; identical to SEQ ID NO: 204940
  chr18:29598282-29598452
  hypo

SEQ ID NO: 324111 - DNA, 51 bp, Homo sapiens; identical to SEQ ID NO: 225622
  chr18:29598683-29598734
  hypo

SEQ ID NO: 324112 - DNA, 157 bp, Homo sapiens; identical to SEQ ID NO: 272076
  chr18:29610273-29610430
  hypo

SEQ ID NO: 324113 - DNA, 80 bp, Homo sapiens; identical to SEQ ID NO: 272077
  chr18:29670904-29670984
  hypo

SEQ ID NO: 324114 - DNA, 1425 bp, Homo sapiens; identical to SEQ ID NO: 293003
  chr18:30050221-30051646
  hypo

SEQ ID NO: 324115 - DNA, 281 bp, Homo sapiens; identical to SEQ ID NO: 293004
  chr18:30349781-30350062
  hypo

SEQ ID NO: 324116 - DNA, 200 bp, Homo sapiens; identical to SEQ ID NO: 204951
  chr18:31803102-31803302
  hypo

SEQ ID NO: 324117 - DNA, 178 bp, Homo sapiens; identical to SEQ ID NO: 55008
  chr18:31803673-31803851
  hypo

SEQ ID NO: 324118 - DNA, 1227 bp, Homo sapiens; identical to SEQ ID NO: 204954
  chr18:32556605-32557832
  hypo

SEQ ID NO: 324119 - DNA, 45 bp, Homo sapiens; identical to SEQ ID NO: 204955
  chr18:32557883-32557928
  hypo

SEQ ID NO: 324120 - DNA, 72 bp, Homo sapiens; identical to SEQ ID NO: 272078
  chr18:32702565-32702637
  hypo

SEQ ID NO: 324121 - DNA, 80 bp, Homo sapiens; identical to SEQ ID NO: 272080
  chr18:32989494-32989574
  hypo

SEQ ID NO: 324122 - DNA, 127 bp, Homo sapiens; identical to SEQ ID NO: 272081
  chr18:32991120-32991247
  hypo

SEQ ID NO: 324123 - DNA, 118 bp, Homo sapiens; identical to SEQ ID NO: 272082
  chr18:33041505-33041623
  hypo

SEQ ID NO: 324124 - DNA, 78 bp, Homo sapiens; identical to SEQ ID NO: 225628
  chr18:33077970-33078048
  hypo

SEQ ID NO: 324125 - DNA, 72 bp, Homo sapiens; identical to SEQ ID NO: 218500
  chr18:33078662-33078734
  hypo

SEQ ID NO: 324126 - DNA, 94 bp, Homo sapiens; identical to SEQ ID NO: 272084
  chr18:33485572-33485666
  hypo

SEQ ID NO: 324127 - DNA, 440 bp, Homo sapiens; identical to SEQ ID NO: 293026
  chr18:33530135-33530575
  hypo

SEQ ID NO: 324128 - DNA, 38 bp, Homo sapiens; identical to SEQ ID NO: 272085
  chr18:33550615-33550653
  hypo

SEQ ID NO: 324129 - DNA, 656 bp, Homo sapiens; identical to SEQ ID NO: 293028
  chr18:33766769-33767425
  hypo

SEQ ID NO: 324130 - DNA, 131 bp, Homo sapiens; identical to SEQ ID NO: 272086
  chr18:34297789-34297920
  hypo

SEQ ID NO: 324131 - DNA, 35 bp, Homo sapiens; identical to SEQ ID NO: 272087
  chr18:34366183-34366218
  hypo

SEQ ID NO: 324132 - DNA, 51 bp, Homo sapiens; identical to SEQ ID NO: 293039
  chr18:35145809-35145860
  hypo

SEQ ID NO: 324133 - DNA, 411 bp, Homo sapiens; identical to SEQ ID NO: 204961
  chr18:35146241-35146652
  hypo

SEQ ID NO: 324134 - DNA, 436 bp, Homo sapiens; identical to SEQ ID NO: 218503
  chr18:35249614-35250050
  hypo

SEQ ID NO: 324135 - DNA, 120 bp, Homo sapiens; identical to SEQ ID NO: 218504
  chr18:36298627-36298747
  hypo

SEQ ID NO: 324136 - DNA, 120 bp, Homo sapiens; identical to SEQ ID NO: 218505
  chr18:36889351-36889471
  hypo

SEQ ID NO: 324137 - DNA, 120 bp, Homo sapiens; identical to SEQ ID NO: 218506
  chr18:36939330-36939450
  hypo

SEQ ID NO: 324138 - DNA, 82 bp, Homo sapiens; identical to SEQ ID NO: 272093
  chr18:37109505-37109587
  hypo

SEQ ID NO: 324139 - DNA, 100 bp, Homo sapiens; identical to SEQ ID NO: 218507
  chr18:37198432-37198532
  hypo

SEQ ID NO: 324140 - DNA, 759 bp, Homo sapiens; identical to SEQ ID NO: 204966
  chr18:42258979-42259738
  hypo

SEQ ID NO: 324141 - DNA, 120 bp, Homo sapiens; identical to SEQ ID NO: 204967
  chr18:42259821-42259941
  hypo

SEQ ID NO: 324142 - DNA, 1178 bp, Homo sapiens; identical to SEQ ID NO: 293048
  chr18:42260083-42261261
  hypo

SEQ ID NO: 324143 - DNA, 47 bp, Homo sapiens; identical to SEQ ID NO: 272095
  chr18:42295260-42295307
  hypo

SEQ ID NO: 324144 - DNA, 67 bp, Homo sapiens; identical to SEQ ID NO: 204969
  chr18:42531892-42531959
  hypo

SEQ ID NO: 324145 - DNA, 139 bp, Homo sapiens; identical to SEQ ID NO: 272097
  chr18:43299705-43299844
  hypo

SEQ ID NO: 324146 - DNA, 192 bp, Homo sapiens; identical to SEQ ID NO: 272098
  chr18:43307167-43307359
  hypo

SEQ ID NO: 324147 - DNA, 66 bp, Homo sapiens; identical to SEQ ID NO: 272099
  chr18:43410024-43410090
  hypo

SEQ ID NO: 324148 - DNA, 180 bp, Homo sapiens; identical to SEQ ID NO: 272100
  chr18:43450342-43450522
  hypo

SEQ ID NO: 324149 - DNA, 32 bp, Homo sapiens; identical to SEQ ID NO: 218512
  chr18:43599472-43599504
  hypo

SEQ ID NO: 324150 - DNA, 193 bp, Homo sapiens; identical to SEQ ID NO: 272102
  chr18:43613983-43614176
  hypo

SEQ ID NO: 324151 - DNA, 120 bp, Homo sapiens; identical to SEQ ID NO: 218513
  chr18:43767225-43767345
  hypo

SEQ ID NO: 324152 - DNA, 67 bp, Homo sapiens; identical to SEQ ID NO: 272104
  chr18:43779976-43780043
  hypo

SEQ ID NO: 324153 - DNA, 97 bp, Homo sapiens; identical to SEQ ID NO: 272105
  chr18:43906113-43906210
  hypo

SEQ ID NO: 324154 - DNA, 336 bp, Homo sapiens; identical to SEQ ID NO: 272106
  chr18:43906510-43906846
  hypo

SEQ ID NO: 324155 - DNA, 274 bp, Homo sapiens; identical to SEQ ID NO: 293054
  chr18:43914608-43914882
  hypo

SEQ ID NO: 324156 - DNA, 33 bp, Homo sapiens; identical to SEQ ID NO: 225641
  chr18:43924114-43924147
  hypo

SEQ ID NO: 324157 - DNA, 44 bp, Homo sapiens; identical to SEQ ID NO: 218515
  chr18:44010836-44010880
  hypo

SEQ ID NO: 324158 - DNA, 122 bp, Homo sapiens; identical to SEQ ID NO: 218516
  chr18:44260343-44260465
  hypo

SEQ ID NO: 324159 - DNA, 44 bp, Homo sapiens; identical to SEQ ID NO: 218517
  chr18:44700791-44700835
  hypo

SEQ ID NO: 324160 - DNA, 104 bp, Homo sapiens; identical to SEQ ID NO: 218518
  chr18:44701015-44701119
  hypo

SEQ ID NO: 324161 - DNA, 290 bp, Homo sapiens; identical to SEQ ID NO: 272112
  chr18:45121093-45121383
  hypo

SEQ ID NO: 324162 - DNA, 34 bp, Homo sapiens; identical to SEQ ID NO: 272113
  chr18:45186646-45186680
  hypo

SEQ ID NO: 324163 - DNA, 78 bp, Homo sapiens; identical to SEQ ID NO: 218519
  chr18:45353784-45353862
  hypo

SEQ ID NO: 324164 - DNA, 200 bp, Homo sapiens; identical to SEQ ID NO: 272115
  chr18:45554569-45554769
  hypo

SEQ ID NO: 324165 - DNA, 322 bp, Homo sapiens; identical to SEQ ID NO: 272116
  chr18:45567034-45567356
  hypo

SEQ ID NO: 324166 - DNA, 189 bp, Homo sapiens; identical to SEQ ID NO: 272117
  chr18:45579501-45579690
  hypo

SEQ ID NO: 324167 - DNA, 86 bp, Homo sapiens; identical to SEQ ID NO: 272118
  chr18:45594043-45594129
  hypo

SEQ ID NO: 324168 - DNA, 812 bp, Homo sapiens; identical to SEQ ID NO: 293074
  chr18:45687757-45688569
  hypo

SEQ ID NO: 324169 - DNA, 194 bp, Homo sapiens; identical to SEQ ID NO: 272119
  chr18:45820419-45820613
  hypo

SEQ ID NO: 324170 - DNA, 154 bp, Homo sapiens; identical to SEQ ID NO: 218521
  chr18:45917050-45917204
  hypo

SEQ ID NO: 324171 - DNA, 164 bp, Homo sapiens; identical to SEQ ID NO: 204977
  chr18:45934609-45934773
  hypo

SEQ ID NO: 324172 - DNA, 221 bp, Homo sapiens; identical to SEQ ID NO: 204978
  chr18:45934810-45935031
  hypo

SEQ ID NO: 324173 - DNA, 1885 bp, Homo sapiens; identical to SEQ ID NO: 204979
  chr18:45935196-45937081
  hypo

SEQ ID NO: 324174 - DNA, 86 bp, Homo sapiens; identical to SEQ ID NO: 272121
  chr18:46041295-46041381
  hypo

SEQ ID NO: 324175 - DNA, 2253 bp, Homo sapiens; identical to SEQ ID NO: 293081
  chr18:46065664-46067917
  hypo

SEQ ID NO: 324176 - DNA, 291 bp, Homo sapiens; identical to SEQ ID NO: 272122
  chr18:46142031-46142322
  hypo

SEQ ID NO: 324177 - DNA, 46 bp, Homo sapiens
  chr18:46142352-46142398
  hypo
gtttggggtgatgaccatgcccaggctccctcatgggaccctgaca

SEQ ID NO: 324178 - DNA, 51 bp, Homo sapiens
  chr18:46142611-46142662
  hypo
tgacttctcctgcaggtggctccttttcagccctctctggacatcggcggt

SEQ ID NO: 324179 - DNA, 135 bp, Homo sapiens; identical to SEQ ID NO: 272124
  chr18:46189304-46189439
  hypo

SEQ ID NO: 324180 - DNA, 340 bp, Homo sapiens; identical to SEQ ID NO: 272125
  chr18:46287802-46288142
  hypo

SEQ ID NO: 324181 - DNA, 228 bp, Homo sapiens; identical to SEQ ID NO: 272126
  chr18:46385808-46386036
  hypo

SEQ ID NO: 324182 - DNA, 49 bp, Homo sapiens; identical to SEQ ID NO: 186561
  chr18:46386611-46386660
  hypo

SEQ ID NO: 324183 - DNA, 305 bp, Homo sapiens; identical to SEQ ID NO: 272128
  chr18:46418913-46419218
  hypo

SEQ ID NO: 324184 - DNA, 139 bp, Homo sapiens; identical to SEQ ID NO: 272129
  chr18:46481278-46481417
  hypo

SEQ ID NO: 324185 - DNA, 81 bp, Homo sapiens; identical to SEQ ID NO: 272130
  chr18:46486896-46486977
  hypo

SEQ ID NO: 324186 - DNA, 104 bp, Homo sapiens; identical to SEQ ID NO: 204986
  chr18:46501913-46502017
  hypo

SEQ ID NO: 324187 - DNA, 583 bp, Homo sapiens; identical to SEQ ID NO: 293084
  chr18:46502487-46503070
  hypo

SEQ ID NO: 324188 - DNA, 84 bp, Homo sapiens; identical to SEQ ID NO: 272131
  chr18:46524824-46524908
  hypo

SEQ ID NO: 324189 - DNA, 255 bp, Homo sapiens; identical to SEQ ID NO: 272132
  chr18:46547227-46547482
  hypo

SEQ ID NO: 324190 - DNA, 231 bp, Homo sapiens; identical to SEQ ID NO: 218528
  chr18:46578116-46578347
  hypo

SEQ ID NO: 324191 - DNA, 151 bp, Homo sapiens; identical to SEQ ID NO: 218529
  chr18:47285297-47285448
  hypo

SEQ ID NO: 324192 - DNA, 828 bp, Homo sapiens; identical to SEQ ID NO: 293093
  chr18:47720908-47721736
  hypo

SEQ ID NO: 324193 - DNA, 88 bp, Homo sapiens; identical to SEQ ID NO: 218531
  chr18:47812104-47812192
  hypo

SEQ ID NO: 324194 - DNA, 221 bp, Homo sapiens; identical to SEQ ID NO: 225654
  chr18:47813482-47813703
  hypo

SEQ ID NO: 324195 - DNA, 270 bp, Homo sapiens; identical to SEQ ID NO: 218532
  chr18:48190331-48190601
  hypo

SEQ ID NO: 324196 - DNA, 228 bp, Homo sapiens; identical to SEQ ID NO: 204993
  chr18:48494204-48494432
  hypo

SEQ ID NO: 324197 - DNA, 158 bp, Homo sapiens; identical to SEQ ID NO: 272140
  chr18:48661656-48661814
  hypo

SEQ ID NO: 324198 - DNA, 85 bp, Homo sapiens; identical to SEQ ID NO: 218534
  chr18:48664888-48664973
  hypo

SEQ ID NO: 324199 - DNA, 120 bp, Homo sapiens; identical to SEQ ID NO: 218535
  chr18:48725413-48725533
  hypo

SEQ ID NO: 324200 - DNA, 95 bp, Homo sapiens; identical to SEQ ID NO: 272143
  chr18:48725593-48725688
  hypo

SEQ ID NO: 324201 - DNA, 223 bp, Homo sapiens; identical to SEQ ID NO: 272144
  chr18:52576694-52576917
  hypo

SEQ ID NO: 324202 - DNA, 195 bp, Homo sapiens; identical to SEQ ID NO: 186617
  chr18:53074508-53074703
  hypo

SEQ ID NO: 324203 - DNA, 31 bp, Homo sapiens; identical to SEQ ID NO: 218536
  chr18:53106926-53106957
  hypo

SEQ ID NO: 324204 - DNA, 159 bp, Homo sapiens; identical to SEQ ID NO: 272148
  chr18:53126065-53126224
  hypo

SEQ ID NO: 324205 - DNA, 74 bp, Homo sapiens; identical to SEQ ID NO: 205003
  chr18:53257322-53257396
  hypo

SEQ ID NO: 324206 - DNA, 40 bp, Homo sapiens; identical to SEQ ID NO: 205004
  chr18:53257761-53257801
  hypo

SEQ ID NO: 324207 - DNA, 32 bp, Homo sapiens; identical to SEQ ID NO: 272149
  chr18:53333160-53333192
  hypo

SEQ ID NO: 324208 - DNA, 163 bp, Homo sapiens; identical to SEQ ID NO: 218539
  chr18:54398593-54398756
  hypo

SEQ ID NO: 324209 - DNA, 105 bp, Homo sapiens; identical to SEQ ID NO: 218540
  chr18:54483312-54483417
  hypo

SEQ ID NO: 324210 - DNA, 290 bp, Homo sapiens; identical to SEQ ID NO: 272152
  chr18:54694221-54694511
  hypo

SEQ ID NO: 324211 - DNA, 53 bp, Homo sapiens; identical to SEQ ID NO: 218541
  chr18:55315834-55315887
  hypo

SEQ ID NO: 324212 - DNA, 133 bp, Homo sapiens; identical to SEQ ID NO: 218542
  chr18:55329689-55329822
  hypo

SEQ ID NO: 324213 - DNA, 110 bp, Homo sapiens; identical to SEQ ID NO: 272155
  chr18:55398780-55398890
  hypo

SEQ ID NO: 324214 - DNA, 45 bp, Homo sapiens; identical to SEQ ID NO: 272156
  chr18:55426742-55426787
  hypo

SEQ ID NO: 324215 - DNA, 44 bp, Homo sapiens; identical to SEQ ID NO: 218543
  chr18:55427027-55427071
  hypo

SEQ ID NO: 324216 - DNA, 187 bp, Homo sapiens; identical to SEQ ID NO: 272158
  chr18:55760789-55760976
  hypo

SEQ ID NO: 324217 - DNA, 180 bp, Homo sapiens; identical to SEQ ID NO: 272159
  chr18:55784750-55784930
  hypo

SEQ ID NO: 324218 - DNA, 33 bp, Homo sapiens; identical to SEQ ID NO: 272160
  chr18:55817734-55817767
  hypo

SEQ ID NO: 324219 - DNA, 39 bp, Homo sapiens; identical to SEQ ID NO: 272161
  chr18:55821161-55821200
  hypo

SEQ ID NO: 324220 - DNA, 55 bp, Homo sapiens; identical to SEQ ID NO: 272162
  chr18:55847725-55847780
  hypo

SEQ ID NO: 324221 - DNA, 129 bp, Homo sapiens; identical to SEQ ID NO: 218544
  chr18:55850987-55851116
  hypo

SEQ ID NO: 324222 - DNA, 117 bp, Homo sapiens; identical to SEQ ID NO: 272166
  chr18:55922278-55922395
  hypo

SEQ ID NO: 324223 - DNA, 192 bp, Homo sapiens; identical to SEQ ID NO: 272167
  chr18:55923975-55924167
  hypo

SEQ ID NO: 324224 - DNA, 184 bp, Homo sapiens; identical to SEQ ID NO: 272168
  chr18:55945680-55945864
  hypo

SEQ ID NO: 324225 - DNA, 42 bp, Homo sapiens; identical to SEQ ID NO: 272169
  chr18:55947809-55947851
  hypo

SEQ ID NO: 324226 - DNA, 173 bp, Homo sapiens; identical to SEQ ID NO: 272170
  chr18:55977131-55977304
  hypo

SEQ ID NO: 324227 - DNA, 183 bp, Homo sapiens
  chr18:55992342-55992525
  hypo
actatgtcaaccacaacaaccggaccactcagtggcacagaccaagcctgatgtgagtaccgtgtgatggtcaggaacacgtgcacgtgcactgcacagctagggacaaatatggcggccctttgggacaaggctgggaaataaatcatatgtctataagagcagatggtggtgtggtacgag

SEQ ID NO: 324228 - DNA, 47 bp, Homo sapiens; identical to SEQ ID NO: 272172
  chr18:56002735-56002782
  hypo

SEQ ID NO: 324229 - DNA, 169 bp, Homo sapiens; identical to SEQ ID NO: 272173
  chr18:56008830-56008999
  hypo

SEQ ID NO: 324230 - DNA, 38 bp, Homo sapiens; identical to SEQ ID NO: 272174
  chr18:56036807-56036845
  hypo

SEQ ID NO: 324231 - DNA, 136 bp, Homo sapiens; identical to SEQ ID NO: 272175
  chr18:56062044-56062180
  hypo

SEQ ID NO: 324232 - DNA, 115 bp, Homo sapiens; identical to SEQ ID NO: 272176
  chr18:56063563-56063678
  hypo

SEQ ID NO: 324233 - DNA, 141 bp, Homo sapiens; identical to SEQ ID NO: 272177
  chr18:56359260-56359401
  hypo

SEQ ID NO: 324234 - DNA, 136 bp, Homo sapiens; identical to SEQ ID NO: 218545
  chr18:56483782-56483918
  hypo

SEQ ID NO: 324235 - DNA, 61 bp, Homo sapiens; identical to SEQ ID NO: 272180
  chr18:56814249-56814310
  hypo

SEQ ID NO: 324236 - DNA, 43 bp, Homo sapiens; identical to SEQ ID NO: 293133
  chr18:56888694-56888737
  hypo

SEQ ID NO: 324237 - DNA, 132 bp, Homo sapiens
  chr18:57684742-57684874
  hypo
gagacgccgagccagcaaataagaatgctccctggtggatttgttggtaaataagacatctcgcgtcgggggcagctcgccggggcgagggcgaggacagcaggaggtgaaccgcgtcgctggccgccgcct

SEQ ID NO: 324238 - DNA, 498 bp, Homo sapiens; identical to SEQ ID NO: 218546
  chr18:59483204-59483702
  hypo

SEQ ID NO: 324239 - DNA, 202 bp, Homo sapiens; identical to SEQ ID NO: 272184
  chr18:59533473-59533675
  hypo

SEQ ID NO: 324240 - DNA, 35 bp, Homo sapiens; identical to SEQ ID NO: 272185
  chr18:59589239-59589274
  hypo

SEQ ID NO: 324241 - DNA, 208 bp, Homo sapiens; identical to SEQ ID NO: 272186
  chr18:59728760-59728968
  hypo

SEQ ID NO: 324242 - DNA, 83 bp, Homo sapiens; identical to SEQ ID NO: 272187
  chr18:59834319-59834402
  hypo

SEQ ID NO: 324243 - DNA, 39 bp, Homo sapiens; identical to SEQ ID NO: 218547
  chr18:59975663-59975702
  hypo

SEQ ID NO: 324244 - DNA, 86 bp, Homo sapiens; identical to SEQ ID NO: 272189
  chr18:59987232-59987318
  hypo

SEQ ID NO: 324245 - DNA, 39 bp, Homo sapiens; identical to SEQ ID NO: 205026
  chr18:59992691-59992730
  hypo

SEQ ID NO: 324246 - DNA, 164 bp, Homo sapiens; identical to SEQ ID NO: 272190
  chr18:60004628-60004792
  hypo

SEQ ID NO: 324247 - DNA, 188 bp, Homo sapiens; identical to SEQ ID NO: 272191
  chr18:60077430-60077618
  hypo

SEQ ID NO: 324248 - DNA, 120 bp, Homo sapiens; identical to SEQ ID NO: 218549
  chr18:60110134-60110254
  hypo

SEQ ID NO: 324249 - DNA, 41 bp, Homo sapiens; identical to SEQ ID NO: 218550
  chr18:60110314-60110355
  hypo

SEQ ID NO: 324250 - DNA, 180 bp, Homo sapiens; identical to SEQ ID NO: 272194
  chr18:60111709-60111889
  hypo

SEQ ID NO: 324251 - DNA, 164 bp, Homo sapiens; identical to SEQ ID NO: 218551
  chr18:60117014-60117178
  hypo

SEQ ID NO: 324252 - DNA, 193 bp, Homo sapiens; identical to SEQ ID NO: 218552
  chr18:60120642-60120835
  hypo

SEQ ID NO: 324253 - DNA, 157 bp, Homo sapiens; identical to SEQ ID NO: 272197
  chr18:60154518-60154675
  hypo

SEQ ID NO: 324254 - DNA, 501 bp, Homo sapiens; identical to SEQ ID NO: 293150
  chr18:60189547-60190048
  hypo

SEQ ID NO: 324255 - DNA, 1612 bp, Homo sapiens; identical to SEQ ID NO: 55170
  chr18:60190084-60191696
  hypo

SEQ ID NO: 324256 - DNA, 95 bp, Homo sapiens; identical to SEQ ID NO: 225665
  chr18:60191979-60192074
  hypo

SEQ ID NO: 324257 - DNA, 97 bp, Homo sapiens; identical to SEQ ID NO: 205029
  chr18:60194122-60194219
  hypo

SEQ ID NO: 324258 - DNA, 146 bp, Homo sapiens; identical to SEQ ID NO: 272198
  chr18:60210294-60210440
  hypo

SEQ ID NO: 324259 - DNA, 83 bp, Homo sapiens; identical to SEQ ID NO: 218556
  chr18:60216459-60216542
  hypo

SEQ ID NO: 324260 - DNA, 165 bp, Homo sapiens; identical to SEQ ID NO: 272200
  chr18:60217646-60217811
  hypo

SEQ ID NO: 324261 - DNA, 87 bp, Homo sapiens; identical to SEQ ID NO: 218557
  chr18:60229135-60229222
  hypo

SEQ ID NO: 324262 - DNA, 136 bp, Homo sapiens; identical to SEQ ID NO: 218558
  chr18:60234752-60234888
  hypo

SEQ ID NO: 324263 - DNA, 34 bp, Homo sapiens; identical to SEQ ID NO: 272203
  chr18:60242135-60242169
  hypo

SEQ ID NO: 324264 - DNA, 70 bp, Homo sapiens; identical to SEQ ID NO: 218559
  chr18:60273154-60273224
  hypo

SEQ ID NO: 324265 - DNA, 90 bp, Homo sapiens; identical to SEQ ID NO: 272205
  chr18:60377413-60377503
  hypo

SEQ ID NO: 324266 - DNA, 1435 bp, Homo sapiens; identical to SEQ ID NO: 205030
  chr18:60382939-60384374
  hypo

SEQ ID NO: 324267 - DNA, 80 bp, Homo sapiens; identical to SEQ ID NO: 272206
  chr18:60430703-60430783
  hypo

SEQ ID NO: 324268 - DNA, 186 bp, Homo sapiens; identical to SEQ ID NO: 218561
  chr18:60523278-60523464
  hypo

SEQ ID NO: 324269 - DNA, 33 bp, Homo sapiens; identical to SEQ ID NO: 272208
  chr18:60534964-60534997
  hypo

SEQ ID NO: 324270 - DNA, 37 bp, Homo sapiens; identical to SEQ ID NO: 218562
  chr18:60549764-60549801
  hypo

SEQ ID NO: 324271 - DNA, 169 bp, Homo sapiens; identical to SEQ ID NO: 218563
  chr18:60609801-60609970
  hypo

SEQ ID NO: 324272 - DNA, 97 bp, Homo sapiens; identical to SEQ ID NO: 272211
  chr18:60614284-60614381
  hypo

SEQ ID NO: 324273 - DNA, 202 bp, Homo sapiens; identical to SEQ ID NO: 218564
  chr18:60645390-60645592
  hypo

SEQ ID NO: 324274 - DNA, 210 bp, Homo sapiens; identical to SEQ ID NO: 218565
  chr18:60645979-60646189
  hypo

SEQ ID NO: 324275 - DNA, 43 bp, Homo sapiens; identical to SEQ ID NO: 272214
  chr18:60654359-60654402
  hypo

SEQ ID NO: 324276 - DNA, 226 bp, Homo sapiens; identical to SEQ ID NO: 272215
  chr18:60813471-60813697
  hypo

SEQ ID NO: 324277 - DNA, 191 bp, Homo sapiens; identical to SEQ ID NO: 272216
  chr18:60878883-60879074
  hypo

SEQ ID NO: 324278 - DNA, 88 bp, Homo sapiens; identical to SEQ ID NO: 272217
  chr18:60935229-60935317
  hypo

SEQ ID NO: 324279 - DNA, 111 bp, Homo sapiens; identical to SEQ ID NO: 272218
  chr18:60959765-60959876
  hypo

SEQ ID NO: 324280 - DNA, 165 bp, Homo sapiens; identical to SEQ ID NO: 272219
  chr18:60973501-60973666
  hypo

SEQ ID NO: 324281 - DNA, 169 bp, Homo sapiens; identical to SEQ ID NO: 272220
  chr18:60992577-60992746
  hypo

SEQ ID NO: 324282 - DNA, 39 bp, Homo sapiens; identical to SEQ ID NO: 272222
  chr18:61450038-61450077
  hypo

SEQ ID NO: 324283 - DNA, 366 bp, Homo sapiens; identical to SEQ ID NO: 293164
  chr18:63417370-63417736
  hypo

SEQ ID NO: 324284 - DNA, 111 bp, Homo sapiens; identical to SEQ ID NO: 218567
  chr18:66360549-66360660
  hypo

SEQ ID NO: 324285 - DNA, 42 bp, Homo sapiens; identical to SEQ ID NO: 272224
  chr18:67073950-67073992
  hypo

SEQ ID NO: 324286 - DNA, 149 bp, Homo sapiens; identical to SEQ ID NO: 293168
  chr18:67955797-67955946
  hypo

SEQ ID NO: 324287 - DNA, 353 bp, Homo sapiens; identical to SEQ ID NO: 205037
  chr18:67956670-67957023
  hypo

SEQ ID NO: 324288 - DNA, 36 bp, Homo sapiens; identical to SEQ ID NO: 272225
  chr18:67957153-67957189
  hypo

SEQ ID NO: 324289 - DNA, 90 bp, Homo sapiens; identical to SEQ ID NO: 272226
  chr18:67985374-67985464
  hypo

SEQ ID NO: 324290 - DNA, 266 bp, Homo sapiens; identical to SEQ ID NO: 218569
  chr18:67991029-67991295
  hypo

SEQ ID NO: 324291 - DNA, 370 bp, Homo sapiens; identical to SEQ ID NO: 218570
  chr18:67991980-67992350
  hypo

SEQ ID NO: 324292 - DNA, 361 bp, Homo sapiens; identical to SEQ ID NO: 272229
  chr18:67992600-67992961
  hypo

SEQ ID NO: 324293 - DNA, 40 bp, Homo sapiens; identical to SEQ ID NO: 218572
  chr18:68042712-68042752
  hypo

SEQ ID NO: 324294 - DNA, 45 bp, Homo sapiens; identical to SEQ ID NO: 218573
  chr18:68053094-68053139
  hypo

SEQ ID NO: 324295 - DNA, 52 bp, Homo sapiens; identical to SEQ ID NO: 218574
  chr18:71844279-71844331
  hypo

SEQ ID NO: 324296 - DNA, 99 bp, Homo sapiens; identical to SEQ ID NO: 218575
  chr18:71844361-71844460
  hypo

SEQ ID NO: 324297 - DNA, 83 bp, Homo sapiens; identical to SEQ ID NO: 272233
  chr18:71847878-71847961
  hypo

SEQ ID NO: 324298 - DNA, 172 bp, Homo sapiens; identical to SEQ ID NO: 272234
  chr18:71867254-71867426
  hypo

SEQ ID NO: 324299 - DNA, 33 bp, Homo sapiens; identical to SEQ ID NO: 272235
  chr18:71874053-71874086
  hypo

SEQ ID NO: 324300 - DNA, 99 bp, Homo sapiens; identical to SEQ ID NO: 218576
  chr18:71879693-71879792
  hypo

SEQ ID NO: 324301 - DNA, 171 bp, Homo sapiens; identical to SEQ ID NO: 218577
  chr18:71889077-71889248
  hypo

SEQ ID NO: 324302 - DNA, 48 bp, Homo sapiens; identical to SEQ ID NO: 218578
  chr18:71904650-71904698
  hypo

SEQ ID NO: 324303 - DNA, 222 bp, Homo sapiens; identical to SEQ ID NO: 293176
  chr18:71958562-71958784
  hypo

SEQ ID NO: 324304 - DNA, 61 bp, Homo sapiens; identical to SEQ ID NO: 218579
  chr18:71983206-71983267
  hypo

SEQ ID NO: 324305 - DNA, 460 bp, Homo sapiens; identical to SEQ ID NO: 272240
  chr18:72177631-72178091
  hypo

SEQ ID NO: 324306 - DNA, 336 bp, Homo sapiens; identical to SEQ ID NO: 272241
  chr18:72189898-72190234
  hypo

SEQ ID NO: 324307 - DNA, 252 bp, Homo sapiens; identical to SEQ ID NO: 218581
  chr18:72226538-72226790
  hypo

SEQ ID NO: 324308 - DNA, 51 bp, Homo sapiens; identical to SEQ ID NO: 272243
  chr18:72239212-72239263
  hypo

SEQ ID NO: 324309 - DNA, 33 bp, Homo sapiens
  chr18:72335127-72335160
  hypo
tgtgaatgtgaatccgtgtgtgtctgtatgtct

SEQ ID NO: 324310 - DNA, 195 bp, Homo sapiens
  chr18:72335202-72335397
  hypo
gtgcatgtgagtgtgtgtgtgcatgagtgtgagactgcgtgtttgagtgcaagtgtgagtgcgtgagggtaagtgcatgtgtgaaactgcattgtgagtgtgagtgcgcgtgtgcgtctgtgactttgggtgtgtgcacatgagggcggcagagcgagagctgcagctcgcttcgtagatactctttaggaggga

SEQ ID NO: 324311 - DNA, 56 bp, Homo sapiens; identical to SEQ ID NO: 272245
  chr18:72342003-72342059
  hypo

SEQ ID NO: 324312 - DNA, 62 bp, Homo sapiens; identical to SEQ ID NO: 218582
  chr18:72344372-72344434
  hypo

SEQ ID NO: 324313 - DNA, 141 bp, Homo sapiens; identical to SEQ ID NO: 218583
  chr18:72347358-72347499
  hypo

SEQ ID NO: 324314 - DNA, 88 bp, Homo sapiens
  chr18:72347576-72347664
  hypo
ccagggaaacgtctgcaagtattgtgggaagatgtgtcgaagcagcaactcgatggccttcctggcacacattcgcactcacacaggt

SEQ ID NO: 324315 - DNA, 136 bp, Homo sapiens; identical to SEQ ID NO: 272248
  chr18:72378034-72378170
  hypo

SEQ ID NO: 324316 - DNA, 215 bp, Homo sapiens; identical to SEQ ID NO: 272249
  chr18:72543641-72543856
  hypo

SEQ ID NO: 324317 - DNA, 170 bp, Homo sapiens; identical to SEQ ID NO: 272250
  chr18:72568950-72569120
  hypo

SEQ ID NO: 324318 - DNA, 158 bp, Homo sapiens; identical to SEQ ID NO: 272251
  chr18:72604260-72604418
  hypo

SEQ ID NO: 324319 - DNA, 245 bp, Homo sapiens; identical to SEQ ID NO: 272252
  chr18:72611942-72612187
  hypo

SEQ ID NO: 324320 - DNA, 137 bp, Homo sapiens; identical to SEQ ID NO: 272253
  chr18:72617315-72617452
  hypo

SEQ ID NO: 324321 - DNA, 114 bp, Homo sapiens; identical to SEQ ID NO: 272254
  chr18:72632539-72632653
  hypo

SEQ ID NO: 324322 - DNA, 224 bp, Homo sapiens; identical to SEQ ID NO: 272255
  chr18:72670002-72670226
  hypo

SEQ ID NO: 324323 - DNA, 32 bp, Homo sapiens; identical to SEQ ID NO: 272256
  chr18:72670449-72670481
  hypo

SEQ ID NO: 324324 - DNA, 126 bp, Homo sapiens; identical to SEQ ID NO: 218584
  chr18:72741505-72741631
  hypo

SEQ ID NO: 324325 - DNA, 262 bp, Homo sapiens; identical to SEQ ID NO: 218585
  chr18:72764593-72764855
  hypo

SEQ ID NO: 324326 - DNA, 244 bp, Homo sapiens; identical to SEQ ID NO: 272259
  chr18:72777722-72777966
  hypo

SEQ ID NO: 324327 - DNA, 75 bp, Homo sapiens; identical to SEQ ID NO: 272260
  chr18:72778315-72778390
  hypo

SEQ ID NO: 324328 - DNA, 166 bp, Homo sapiens; identical to SEQ ID NO: 272261
  chr18:72819560-72819726
  hypo

SEQ ID NO: 324329 - DNA, 511 bp, Homo sapiens
  chr18:72844252-72844763
  hypo
ccacgtgggcaccccgcgcacaggcagtgcggcgtcctgctaggtgcacagctttataccacttacaggttgcaagtagcaacgagaaaaatgctagattttacaggaaaataatattcataaatctcccgctgtgaattacagtataactcagagctgtctttgttttgctgctgcgatgaagtcaattctgtttcgggtggaaatgatacacacagagcccaaggtggaagccagtcccctcgcatttggtgaggtttgtagccagtcccagctggagcgcggaacagctgaacccactcgacgccggcaattcctggagttttcttttctcttcttgagagcagagctgcggaggacgtgaggggactttcttgggtgctgtgccctgaggtgaggcccctttatccttttcaccaggcggtattgcctcacaccggttccccagagggaaatggtcccaaaggtacctctcccgggctggccctggggaccgcggctggtcactctt

SEQ ID NO: 324330 - DNA, 138 bp, Homo sapiens
  chr18:72844808-72844946
  hypo
gagagcaagtacacatgctcatattccacacatcttttgatccatccaaactatacggagacatgcaattttgttcatgttttattgtccctagaagagttcattttccccaaaagatccccgcggctcagtggtaga

SEQ ID NO: 324331 - DNA, 273 bp, Homo sapiens
  chr18:72895946-72896219
  hypo
acttgctcgcttgacgtgtacagttggtgggacagagaccatgttttgcagacttttcatcctcactttagtacagtaggtgcccagtgaatgagagctgaacgagttaaagcacgagcaaagtcacacagaacggtcgccatgtgagtgctcatggcgcgatgcccagctctgccgcagaagcaggtctagcggttctgggccattggcttctcctggggctgccctccccatcgtcactggaaggctggaggactctccattatggagccc

SEQ ID NO: 324332 - DNA, 165 bp, Homo sapiens; identical to SEQ ID NO: 272264
  chr18:72914982-72915147
  hypo

SEQ ID NO: 324333 - DNA, 237 bp, Homo sapiens; identical to SEQ ID NO: 293181
  chr18:72921091-72921328
  hypo

SEQ ID NO: 324334 - DNA, 295 bp, Homo sapiens; identical to SEQ ID NO: 272265
  chr18:72956539-72956834
  hypo

SEQ ID NO: 324335 - DNA, 485 bp, Homo sapiens; identical to SEQ ID NO: 272266
  chr18:72960668-72961153
  hypo

SEQ ID NO: 324336 - DNA, 76 bp, Homo sapiens; identical to SEQ ID NO: 272267
  chr18:72972083-72972159
  hypo

SEQ ID NO: 324337 - DNA, 34 bp, Homo sapiens; identical to SEQ ID NO: 272268
  chr18:73282767-73282801
  hypo

SEQ ID NO: 324338 - DNA, 224 bp, Homo sapiens; identical to SEQ ID NO: 218589
  chr18:74062315-74062539
  hypo

SEQ ID NO: 324339 - DNA, 153 bp, Homo sapiens
  chr18:74062578-74062731
  hypo
tgttgtggtcgggccgcagagcaggccccttgacggggggatccggagccgcctggtgccggcacagcctcagggagcagcccctaagctgccccgtgacagtcaatcgcccgctttccccccgtgggaagtctgtgccgtgaccagagcctc

SEQ ID NO: 324340 - DNA, 96 bp, Homo sapiens; identical to SEQ ID NO: 272270
  chr18:74065277-74065373
  hypo

SEQ ID NO: 324341 - DNA, 132 bp, Homo sapiens; identical to SEQ ID NO: 272271
  chr18:74068650-74068782
  hypo

SEQ ID NO: 324342 - DNA, 180 bp, Homo sapiens; identical to SEQ ID NO: 218590
  chr18:74069254-74069434
  hypo

SEQ ID NO: 324343 - DNA, 111 bp, Homo sapiens; identical to SEQ ID NO: 272273
  chr18:74069464-74069575
  hypo

SEQ ID NO: 324344 - DNA, 177 bp, Homo sapiens; identical to SEQ ID NO: 272274
  chr18:74073695-74073872
  hypo

SEQ ID NO: 324345 - DNA, 89 bp, Homo sapiens; identical to SEQ ID NO: 272275
  chr18:74074287-74074376
  hypo

SEQ ID NO: 324346 - DNA, 389 bp, Homo sapiens; identical to SEQ ID NO: 272276
  chr18:74082314-74082703
  hypo

SEQ ID NO: 324347 - DNA, 33 bp, Homo sapiens; identical to SEQ ID NO: 272277
  chr18:74082939-74082972
  hypo

SEQ ID NO: 324348 - DNA, 719 bp, Homo sapiens; identical to SEQ ID NO: 272278
  chr18:74083288-74084007
  hypo

SEQ ID NO: 324349 - DNA, 162 bp, Homo sapiens; identical to SEQ ID NO: 272279
  chr18:74089153-74089315
  hypo

SEQ ID NO: 324350 - DNA, 1433 bp, Homo sapiens; identical to SEQ ID NO: 272280
  chr18:74090916-74092349
  hypo

SEQ ID NO: 324351 - DNA, 154 bp, Homo sapiens; identical to SEQ ID NO: 272281
  chr18:74093649-74093803
  hypo

SEQ ID NO: 324352 - DNA, 52 bp, Homo sapiens; identical to SEQ ID NO: 218595
  chr18:74094279-74094331
  hypo

SEQ ID NO: 324353 - DNA, 894 bp, Homo sapiens; identical to SEQ ID NO: 218596
  chr18:74096593-74097487
  hypo

SEQ ID NO: 324354 - DNA, 34 bp, Homo sapiens; identical to SEQ ID NO: 218597
  chr18:74113520-74113554
  hypo

SEQ ID NO: 324355 - DNA, 145 bp, Homo sapiens; identical to SEQ ID NO: 218598
  chr18:74113767-74113912
  hypo

SEQ ID NO: 324356 - DNA, 60 bp, Homo sapiens; identical to SEQ ID NO: 218599
  chr18:74113942-74114002
  hypo

SEQ ID NO: 324357 - DNA, 63 bp, Homo sapiens; identical to SEQ ID NO: 272286
  chr18:74116224-74116287
  hypo

SEQ ID NO: 324358 - DNA, 117 bp, Homo sapiens; identical to SEQ ID NO: 272287
  chr18:74118864-74118981
  hypo

SEQ ID NO: 324359 - DNA, 60 bp, Homo sapiens; identical to SEQ ID NO: 272288
  chr18:74119406-74119466
  hypo

SEQ ID NO: 324360 - DNA, 485 bp, Homo sapiens; identical to SEQ ID NO: 272289
  chr18:74120285-74120770
  hypo

SEQ ID NO: 324361 - DNA, 137 bp, Homo sapiens; identical to SEQ ID NO: 272290
  chr18:74128214-74128351
  hypo

SEQ ID NO: 324362 - DNA, 259 bp, Homo sapiens; identical to SEQ ID NO: 218601
  chr18:74133243-74133502
  hypo

SEQ ID NO: 324363 - DNA, 182 bp, Homo sapiens; identical to SEQ ID NO: 272292
  chr18:74134219-74134401
  hypo

SEQ ID NO: 324364 - DNA, 186 bp, Homo sapiens; identical to SEQ ID NO: 272293
  chr18:74134941-74135127
  hypo

SEQ ID NO: 324365 - DNA, 161 bp, Homo sapiens; identical to SEQ ID NO: 272294
  chr18:74135457-74135618
  hypo

SEQ ID NO: 324366 - DNA, 45 bp, Homo sapiens; identical to SEQ ID NO: 272295
  chr18:74136486-74136531
  hypo

SEQ ID NO: 324367 - DNA, 239 bp, Homo sapiens; identical to SEQ ID NO: 272296
  chr18:74141719-74141958
  hypo

SEQ ID NO: 324368 - DNA, 93 bp, Homo sapiens; identical to SEQ ID NO: 272297
  chr18:74143480-74143573
  hypo

SEQ ID NO: 324369 - DNA, 465 bp, Homo sapiens; identical to SEQ ID NO: 272298
  chr18:74143894-74144359
  hypo

SEQ ID NO: 324370 - DNA, 1196 bp, Homo sapiens; identical to SEQ ID NO: 272299
  chr18:74144938-74146134
  hypo

SEQ ID NO: 324371 - DNA, 51 bp, Homo sapiens; identical to SEQ ID NO: 272300
  chr18:74147444-74147495
  hypo

SEQ ID NO: 324372 - DNA, 281 bp, Homo sapiens; identical to SEQ ID NO: 218604
  chr18:74148372-74148653
  hypo

SEQ ID NO: 324373 - DNA, 283 bp, Homo sapiens; identical to SEQ ID NO: 272302
  chr18:74149035-74149318
  hypo

SEQ ID NO: 324374 - DNA, 171 bp, Homo sapiens; identical to SEQ ID NO: 272303
  chr18:74149887-74150058
  hypo

SEQ ID NO: 324375 - DNA, 1790 bp, Homo sapiens; identical to SEQ ID NO: 272304
  chr18:74153253-74155043
  hypo

SEQ ID NO: 324376 - DNA, 65 bp, Homo sapiens; identical to SEQ ID NO: 272305
  chr18:74156516-74156581
  hypo

SEQ ID NO: 324377 - DNA, 483 bp, Homo sapiens; identical to SEQ ID NO: 218606
  chr18:74159158-74159641
  hypo

SEQ ID NO: 324378 - DNA, 320 bp, Homo sapiens; identical to SEQ ID NO: 272307
  chr18:74170468-74170788
  hypo

SEQ ID NO: 324379 - DNA, 366 bp, Homo sapiens
  chr18:74171117-74171483
  hypo
cgctgcagcagtaacggggcgccgggcccacctgctgcccctctcctgtgcatagggcgctctctccctgccccgagcttcggcttctcctccatgcacggtcactgctggaggcacactggacccagtgccagctcgggaaatcctgggccggtgacagccctgacccgtggccaccatccactcaacatcattgagccctcccacaggcacccaagctctctgaggacagccgtcctagcttccttcgtgggagaaaactctggccctccactgccggccagggaggcctcgcgtgccaagctggccctgagctcagcccaggatttgtgccattcaggacgtggcggccgtgtgcaccccatc

SEQ ID NO: 324380 - DNA, 143 bp, Homo sapiens; identical to SEQ ID NO: 95125
  chr18:74171505-74171648
  hypo

SEQ ID NO: 324381 - DNA, 52 bp, Homo sapiens; identical to SEQ ID NO: 95126
  chr18:74172240-74172292
  hypo

SEQ ID NO: 324382 - DNA, 192 bp, Homo sapiens; identical to SEQ ID NO: 218610
  chr18:74175494-74175686
  hypo

SEQ ID NO: 324383 - DNA, 134 bp, Homo sapiens; identical to SEQ ID NO: 272311
  chr18:74176911-74177045
  hypo

SEQ ID NO: 324384 - DNA, 188 bp, Homo sapiens; identical to SEQ ID NO: 218611
  chr18:74183548-74183736
  hypo

SEQ ID NO: 324385 - DNA, 441 bp, Homo sapiens; identical to SEQ ID NO: 272313
  chr18:74194233-74194674
  hypo

SEQ ID NO: 324386 - DNA, 202 bp, Homo sapiens; identical to SEQ ID NO: 218612
  chr18:74195359-74195561
  hypo

SEQ ID NO: 324387 - DNA, 35 bp, Homo sapiens; identical to SEQ ID NO: 218613
  chr18:74195591-74195626
  hypo

SEQ ID NO: 324388 - DNA, 74 bp, Homo sapiens; identical to SEQ ID NO: 272315
  chr18:74196405-74196479
  hypo

SEQ ID NO: 324389 - DNA, 150 bp, Homo sapiens; identical to SEQ ID NO: 272316
  chr18:74260505-74260655
  hypo

SEQ ID NO: 324390 - DNA, 203 bp, Homo sapiens; identical to SEQ ID NO: 272317
  chr18:74275176-74275379
  hypo

SEQ ID NO: 324391 - DNA, 34 bp, Homo sapiens; identical to SEQ ID NO: 272318
  chr18:74299118-74299152
  hypo

SEQ ID NO: 324392 - DNA, 312 bp, Homo sapiens; identical to SEQ ID NO: 272319
  chr18:74301965-74302277
  hypo

SEQ ID NO: 324393 - DNA, 642 bp, Homo sapiens; identical to SEQ ID NO: 272320
  chr18:74323520-74324162
  hypo

SEQ ID NO: 324394 - DNA, 242 bp, Homo sapiens; identical to SEQ ID NO: 218615
  chr18:74325506-74325748
  hypo

SEQ ID NO: 324395 - DNA, 194 bp, Homo sapiens; identical to SEQ ID NO: 218616
  chr18:74325938-74326132
  hypo

SEQ ID NO: 324396 - DNA, 259 bp, Homo sapiens
  chr18:74396240-74396499
  hypo
aagaggccacgagtcgattctgtgcccagctcagactgtggctgatgcgcagaggcacgtgggctcttggagggtggggatgagctgggcagccccacggctcctcctggcagggcccccatgctgcgcgtctgtgggctcttggagggtggggatgagctgggcagccgcacggctcctcctggcagatcccccatgctgcgcgtctgtgggttccacggcagccagttccaggcacagggcattcttggtgcacttg

SEQ ID NO: 324397 - DNA, 140 bp, Homo sapiens
  chr18:74399785-74399925
  hypo
ttcgcacagctctccggggctgtctccaggaggccctattttattggccattgatgccatgtctgctcagagatacaatcagaaaatatgattggtgttcccgcatgacacacaggaggaggcacggatggcattacaca

SEQ ID NO: 324398 - DNA, 113 bp, Homo sapiens; identical to SEQ ID NO: 272324
  chr18:74419745-74419858
  hypo

SEQ ID NO: 324399 - DNA, 280 bp, Homo sapiens; identical to SEQ ID NO: 272325
  chr18:74420127-74420407
  hypo

SEQ ID NO: 324400 - DNA, 35 bp, Homo sapiens; identical to SEQ ID NO: 272326
  chr18:74420789-74420824
  hypo

SEQ ID NO: 324401 - DNA, 44 bp, Homo sapiens; identical to SEQ ID NO: 272327
  chr18:74424292-74424336
  hypo

SEQ ID NO: 324402 - DNA, 205 bp, Homo sapiens; identical to SEQ ID NO: 272328
  chr18:74426497-74426702
  hypo

SEQ ID NO: 324403 - DNA, 120 bp, Homo sapiens; identical to SEQ ID NO: 272329
  chr18:74443717-74443837
  hypo

SEQ ID NO: 324404 - DNA, 38 bp, Homo sapiens; identical to SEQ ID NO: 272330
  chr18:74471098-74471136
  hypo

SEQ ID NO: 324405 - DNA, 47 bp, Homo sapiens; identical to SEQ ID NO: 218617
  chr18:74500998-74501045
  hypo

SEQ ID NO: 324406 - DNA, 31 bp, Homo sapiens; identical to SEQ ID NO: 218618
  chr18:74501267-74501298
  hypo

SEQ ID NO: 324407 - DNA, 95 bp, Homo sapiens; identical to SEQ ID NO: 272333
  chr18:74518708-74518803
  hypo

SEQ ID NO: 324408 - DNA, 325 bp, Homo sapiens; identical to SEQ ID NO: 272334
  chr18:74569872-74570197
  hypo

SEQ ID NO: 324409 - DNA, 171 bp, Homo sapiens; identical to SEQ ID NO: 272335
  chr18:74586687-74586858
  hypo

SEQ ID NO: 324410 - DNA, 187 bp, Homo sapiens; identical to SEQ ID NO: 218620
  chr18:74592528-74592715
  hypo

SEQ ID NO: 324411 - DNA, 209 bp, Homo sapiens; identical to SEQ ID NO: 218621
  chr18:74625650-74625859
  hypo

SEQ ID NO: 324412 - DNA, 62 bp, Homo sapiens; identical to SEQ ID NO: 272338
  chr18:74627687-74627749
  hypo

SEQ ID NO: 324413 - DNA, 361 bp, Homo sapiens; identical to SEQ ID NO: 272339
  chr18:74631683-74632044
  hypo

SEQ ID NO: 324414 - DNA, 79 bp, Homo sapiens; identical to SEQ ID NO: 218623
  chr18:74633615-74633694
  hypo

SEQ ID NO: 324415 - DNA, 39 bp, Homo sapiens; identical to SEQ ID NO: 272341
  chr18:74680273-74680312
  hypo

SEQ ID NO: 324416 - DNA, 230 bp, Homo sapiens; identical to SEQ ID NO: 272342
  chr18:74691007-74691237
  hypo

SEQ ID NO: 324417 - DNA, 458 bp, Homo sapiens; identical to SEQ ID NO: 272343
  chr18:74696510-74696968
  hypo

SEQ ID NO: 324418 - DNA, 34 bp, Homo sapiens; identical to SEQ ID NO: 272344
  chr18:74697571-74697605
  hypo

SEQ ID NO: 324419 - DNA, 196 bp, Homo sapiens; identical to SEQ ID NO: 272345
  chr18:74720163-74720359
  hypo

SEQ ID NO: 324420 - DNA, 134 bp, Homo sapiens; identical to SEQ ID NO: 272346
  chr18:74720707-74720841
  hypo

SEQ ID NO: 324421 - DNA, 151 bp, Homo sapiens
  chr18:74721790-74721941
  hypo
cgccggcgtcttaccttgtacatgttgcacagcccaggctggctgcgggcatgagagggcagagggctccggcccggctttagccagggtacctgccgggggacacagagtgggctgcgtgagtccgggtgggcgccgccggcaatgcccc

SEQ ID NO: 324422 - DNA, 136 bp, Homo sapiens; identical to SEQ ID NO: 272348
  chr18:74723211-74723347
  hypo

SEQ ID NO: 324423 - DNA, 155 bp, Homo sapiens; identical to SEQ ID NO: 272349
  chr18:74726189-74726344
  hypo

SEQ ID NO: 324424 - DNA, 66 bp, Homo sapiens; identical to SEQ ID NO: 272350
  chr18:74726374-74726440
  hypo

SEQ ID NO: 324425 - DNA, 732 bp, Homo sapiens; identical to SEQ ID NO: 218624
  chr18:74728303-74729035
  hypo

SEQ ID NO: 324426 - DNA, 99 bp, Homo sapiens; identical to SEQ ID NO: 218625
  chr18:74729467-74729566
  hypo

SEQ ID NO: 324427 - DNA, 237 bp, Homo sapiens; identical to SEQ ID NO: 272353
  chr18:74731842-74732079
  hypo

SEQ ID NO: 324428 - DNA, 146 bp, Homo sapiens; identical to SEQ ID NO: 218626
  chr18:74733725-74733871
  hypo

SEQ ID NO: 324429 - DNA, 284 bp, Homo sapiens; identical to SEQ ID NO: 272355
  chr18:74734080-74734364
  hypo

SEQ ID NO: 324430 - DNA, 1803 bp, Homo sapiens; identical to SEQ ID NO: 218627
  chr18:74736587-74738390
  hypo

SEQ ID NO: 324431 - DNA, 67 bp, Homo sapiens; identical to SEQ ID NO: 218628
  chr18:74755405-74755472
  hypo

SEQ ID NO: 324432 - DNA, 389 bp, Homo sapiens; identical to SEQ ID NO: 218629
  chr18:74755590-74755979
  hypo

SEQ ID NO: 324433 - DNA, 356 bp, Homo sapiens; identical to SEQ ID NO: 272358
  chr18:74759063-74759419
  hypo

SEQ ID NO: 324434 - DNA, 83 bp, Homo sapiens; identical to SEQ ID NO: 272359
  chr18:74761164-74761247
  hypo

SEQ ID NO: 324435 - DNA, 185 bp, Homo sapiens; identical to SEQ ID NO: 218630
  chr18:74763242-74763427
  hypo

SEQ ID NO: 324436 - DNA, 648 bp, Homo sapiens; identical to SEQ ID NO: 272361
  chr18:74763720-74764368
  hypo

SEQ ID NO: 324437 - DNA, 456 bp, Homo sapiens; identical to SEQ ID NO: 218632
  chr18:74770085-74770541
  hypo

SEQ ID NO: 324438 - DNA, 232 bp, Homo sapiens; identical to SEQ ID NO: 218633
  chr18:74782716-74782948
  hypo

SEQ ID NO: 324439 - DNA, 141 bp, Homo sapiens; identical to SEQ ID NO: 272364
  chr18:74794117-74794258
  hypo

SEQ ID NO: 324440 - DNA, 100 bp, Homo sapiens; identical to SEQ ID NO: 218634
  chr18:74805146-74805246
  hypo

SEQ ID NO: 324441 - DNA, 78 bp, Homo sapiens; identical to SEQ ID NO: 272366
  chr18:74806378-74806456
  hypo

SEQ ID NO: 324442 - DNA, 117 bp, Homo sapiens; identical to SEQ ID NO: 218635
  chr18:74806769-74806886
  hypo

SEQ ID NO: 324443 - DNA, 244 bp, Homo sapiens; identical to SEQ ID NO: 272368
  chr18:74815191-74815435
  hypo

SEQ ID NO: 324444 - DNA, 178 bp, Homo sapiens; identical to SEQ ID NO: 272369
  chr18:74822939-74823117
  hypo

SEQ ID NO: 324445 - DNA, 429 bp, Homo sapiens; identical to SEQ ID NO: 218636
  chr18:74832019-74832448
  hypo

SEQ ID NO: 324446 - DNA, 37 bp, Homo sapiens; identical to SEQ ID NO: 218637
  chr18:74841696-74841733
  hypo

SEQ ID NO: 324447 - DNA, 828 bp, Homo sapiens; identical to SEQ ID NO: 225683
  chr18:74844288-74845116
  hypo

SEQ ID NO: 324448 - DNA, 40 bp, Homo sapiens; identical to SEQ ID NO: 218638
  chr18:74847361-74847401
  hypo

SEQ ID NO: 324449 - DNA, 76 bp, Homo sapiens
  chr18:74867171-74867247
  hypo
gggagcggtgcagccgcaagccaaggagcaccggcgactgccgggagacactgaggccggggaggcagggaacgga

SEQ ID NO: 324450 - DNA, 134 bp, Homo sapiens
  chr18:74877216-74877350
  hypo
gggccgacagaaccacgcctccttcagggttgcgtgtccaagtacttgtggaataagttaacctgcccagtgaacactgtgaccacttctcaggtgacatccactggtgcagcgaggttctggccctcaagggg

SEQ ID NO: 324451 - DNA, 136 bp, Homo sapiens; identical to SEQ ID NO: 272375
  chr18:75087208-75087344
  hypo

SEQ ID NO: 324452 - DNA, 287 bp, Homo sapiens
  chr18:75088254-75088541
  hypo
agcttggaatggtgcccggaacacagcagcgctcgaagaacaaacaccgtggggtctcttctgaggtgccattggcatggtacagagaacaatcaactggcgacactccggtgaatttttgtttacaatgtttattttattttacaatacgtttttattttacaactttattcacaattttctgttgtgtgtagtctaaccccgtagaagttttgtgtggacgagtcttcacttgtcctgtgcacacctgagagtggcgttgctgggtcgtgcggtggttttctgtt

SEQ ID NO: 324453 - DNA, 208 bp, Homo sapiens; identical to SEQ ID NO: 272377
  chr18:75120506-75120714
  hypo

SEQ ID NO: 324454 - DNA, 100 bp, Homo sapiens; identical to SEQ ID NO: 272378
  chr18:75214587-75214687
  hypo

SEQ ID NO: 324455 - DNA, 156 bp, Homo sapiens; identical to SEQ ID NO: 218639
  chr18:75339359-75339515
  hypo

SEQ ID NO: 324456 - DNA, 37 bp, Homo sapiens; identical to SEQ ID NO: 272382
  chr18:75361204-75361241
  hypo

SEQ ID NO: 324457 - DNA, 62 bp, Homo sapiens; identical to SEQ ID NO: 272383
  chr18:75571260-75571322
  hypo

SEQ ID NO: 324458 - DNA, 42 bp, Homo sapiens; identical to SEQ ID NO: 272384
  chr18:75845223-75845265
  hypo

SEQ ID NO: 324459 - DNA, 282 bp, Homo sapiens; identical to SEQ ID NO: 218640
  chr18:75873524-75873806
  hypo

SEQ ID NO: 324460 - DNA, 71 bp, Homo sapiens; identical to SEQ ID NO: 272386
  chr18:75957356-75957427
  hypo

SEQ ID NO: 324461 - DNA, 250 bp, Homo sapiens; identical to SEQ ID NO: 218641
  chr18:75999434-75999684
  hypo

SEQ ID NO: 324462 - DNA, 126 bp, Homo sapiens; identical to SEQ ID NO: 218642
  chr18:76123568-76123694
  hypo

SEQ ID NO: 324463 - DNA, 52 bp, Homo sapiens; identical to SEQ ID NO: 218643
  chr18:76123894-76123946
  hypo

SEQ ID NO: 324464 - DNA, 163 bp, Homo sapiens; identical to SEQ ID NO: 218644
  chr18:76129257-76129420
  hypo

SEQ ID NO: 324465 - DNA, 184 bp, Homo sapiens; identical to SEQ ID NO: 218645
  chr18:76129450-76129634
  hypo

SEQ ID NO: 324466 - DNA, 463 bp, Homo sapiens; identical to SEQ ID NO: 218646
  chr18:76151088-76151551
  hypo

SEQ ID NO: 324467 - DNA, 134 bp, Homo sapiens; identical to SEQ ID NO: 218647
  chr18:76189659-76189793
  hypo

SEQ ID NO: 324468 - DNA, 294 bp, Homo sapiens; identical to SEQ ID NO: 218648
  chr18:76189872-76190166
  hypo

SEQ ID NO: 324469 - DNA, 155 bp, Homo sapiens; identical to SEQ ID NO: 272393
  chr18:76252107-76252262
  hypo

SEQ ID NO: 324470 - DNA, 462 bp, Homo sapiens
  chr18:76435961-76436423
  hypo
gttcactcaggaagccgaagcccagaagagtgaggtctcaaagttcacagcacgtggcctagaattcaggggtgcagagctcctgcttggtaactcatcccctgtgcggtgatgcttctgatcccacagcaatgcctgcttctgcgaggctggtccagggctggaacggagccctgtgccgtgatgcttccgatcccacagcaatgccacgctcctccagagctggagcagattccgatcccacagcaatgccacgctcctccagggctggagcagattctgatcccacagcaaggccgcgcttctccaaggctggagcagattctgatcccaccgcaatgccgcgcttctccaagactggagcacattctgatcccaccgcaatgccgcatttctccaaggctggagcagattccgatcccaccgcaatgccgcatttctccagggctggagcagattcca

SEQ ID NO: 324471 - DNA, 50 bp, Homo sapiens; identical to SEQ ID NO: 218650
  chr18:76436455-76436505
  hypo

SEQ ID NO: 324472 - DNA, 61 bp, Homo sapiens; identical to SEQ ID NO: 272396
  chr18:76437856-76437917
  hypo

SEQ ID NO: 324473 - DNA, 165 bp, Homo sapiens; identical to SEQ ID NO: 218651
  chr18:76477630-76477795
  hypo

SEQ ID NO: 324474 - DNA, 167 bp, Homo sapiens; identical to SEQ ID NO: 272398
  chr18:76480514-76480681
  hypo

SEQ ID NO: 324475 - DNA, 506 bp, Homo sapiens; identical to SEQ ID NO: 218652
  chr18:76486293-76486799
  hypo

SEQ ID NO: 324476 - DNA, 47 bp, Homo sapiens; identical to SEQ ID NO: 218653
  chr18:76486873-76486920
  hypo

SEQ ID NO: 324477 - DNA, 65 bp, Homo sapiens; identical to SEQ ID NO: 272400
  chr18:76491137-76491202
  hypo

SEQ ID NO: 324478 - DNA, 128 bp, Homo sapiens; identical to SEQ ID NO: 272401
  chr18:76491232-76491360
  hypo

SEQ ID NO: 324479 - DNA, 473 bp, Homo sapiens; identical to SEQ ID NO: 272402
  chr18:76495818-76496291
  hypo

SEQ ID NO: 324480 - DNA, 114 bp, Homo sapiens; identical to SEQ ID NO: 272403
  chr18:76531049-76531163
  hypo

SEQ ID NO: 324481 - DNA, 325 bp, Homo sapiens; identical to SEQ ID NO: 272404
  chr18:76534698-76535023
  hypo

SEQ ID NO: 324482 - DNA, 210 bp, Homo sapiens; identical to SEQ ID NO: 272405
  chr18:76546830-76547040
  hypo

SEQ ID NO: 324483 - DNA, 212 bp, Homo sapiens; identical to SEQ ID NO: 218654
  chr18:76552755-76552967
  hypo

SEQ ID NO: 324484 - DNA, 84 bp, Homo sapiens
  chr18:76626405-76626489
  hypo
ggctagagggagggtgacagccgcagccgaacctcagagctggctagagggagggtgacagccgcagttgaacctgcagtgctg

SEQ ID NO: 324485 - DNA, 75 bp, Homo sapiens; identical to SEQ ID NO: 218655
  chr18:76653367-76653442
  hypo

SEQ ID NO: 324486 - DNA, 212 bp, Homo sapiens; identical to SEQ ID NO: 272409
  chr18:76660960-76661172
  hypo

SEQ ID NO: 324487 - DNA, 157 bp, Homo sapiens; identical to SEQ ID NO: 218656
  chr18:76685333-76685490
  hypo

SEQ ID NO: 324488 - DNA, 298 bp, Homo sapiens; identical to SEQ ID NO: 218657
  chr18:76685836-76686134
  hypo

SEQ ID NO: 324489 - DNA, 105 bp, Homo sapiens
  chr18:76686279-76686384
  hypo
gccatgagaaggttctagaattagatggtggcgatggttgctccacgctgccatgggggcagctgagggaaaggaggtgggatcggggctcggccagctctcgcc

SEQ ID NO: 324490 - DNA, 96 bp, Homo sapiens; identical to SEQ ID NO: 272411
  chr18:76689833-76689929
  hypo

SEQ ID NO: 324491 - DNA, 312 bp, Homo sapiens; identical to SEQ ID NO: 218659
  chr18:76999756-77000068
  hypo

SEQ ID NO: 324492 - DNA, 161 bp, Homo sapiens; identical to SEQ ID NO: 218660
  chr18:77050733-77050894
  hypo

SEQ ID NO: 324493 - DNA, 188 bp, Homo sapiens; identical to SEQ ID NO: 218661
  chr18:77076163-77076351
  hypo

SEQ ID NO: 324494 - DNA, 256 bp, Homo sapiens; identical to SEQ ID NO: 272415
  chr18:77083046-77083302
  hypo

SEQ ID NO: 324495 - DNA, 202 bp, Homo sapiens; identical to SEQ ID NO: 272416
  chr18:77089862-77090064
  hypo

SEQ ID NO: 324496 - DNA, 313 bp, Homo sapiens; identical to SEQ ID NO: 272417
  chr18:77126100-77126413
  hypo

SEQ ID NO: 324497 - DNA, 171 bp, Homo sapiens; identical to SEQ ID NO: 272418
  chr18:77127871-77128042
  hypo

SEQ ID NO: 324498 - DNA, 163 bp, Homo sapiens; identical to SEQ ID NO: 272419
  chr18:77138794-77138957
  hypo

SEQ ID NO: 324499 - DNA, 45 bp, Homo sapiens; identical to SEQ ID NO: 272420
  chr18:77143641-77143686
  hypo

SEQ ID NO: 324500 - DNA, 58 bp, Homo sapiens; identical to SEQ ID NO: 272421
  chr18:77145392-77145450
  hypo

SEQ ID NO: 324501 - DNA, 583 bp, Homo sapiens; identical to SEQ ID NO: 293194
  chr18:77160022-77160605
  hypo

SEQ ID NO: 324502 - DNA, 87 bp, Homo sapiens; identical to SEQ ID NO: 272422
  chr18:77161630-77161717
  hypo

SEQ ID NO: 324503 - DNA, 379 bp, Homo sapiens; identical to SEQ ID NO: 218663
  chr18:77166684-77167063
  hypo

SEQ ID NO: 324504 - DNA, 358 bp, Homo sapiens; identical to SEQ ID NO: 218664
  chr18:77174745-77175103
  hypo

SEQ ID NO: 324505 - DNA, 353 bp, Homo sapiens
  chr18:77181426-77181779
  hypo
tgctttcgcctggagccctggctgcaaggggcggtgccgggcaagggccaccccaggggtctgggagtgcagtgtcgggcctgtggaggtggagagcagggatcagcctctttttgtggatgaggaaatggagacacgtggaaacttctggtaagaagctgtcaagcctccaggtttcggttctggacaggtgcggggcaggtattggagcactttgggctctgaggtccacgtggcccagcggcctccaggagtcagctgcaaggcggagtccctgtccacaagctgcgttgcaggcacagagaccaggagagggctgtgaagcaactctgtgtttactgggctgaagcagc

SEQ ID NO: 324506 - DNA, 273 bp, Homo sapiens; identical to SEQ ID NO: 272426
  chr18:77183185-77183458
  hypo

SEQ ID NO: 324507 - DNA, 268 bp, Homo sapiens; identical to SEQ ID NO: 272427
  chr18:77185306-77185574
  hypo

SEQ ID NO: 324508 - DNA, 56 bp, Homo sapiens
  chr18:77186375-77186431
  hypo
aggactgtgtggccggctccccaggccacgggggccactgtcctccatgccacgtc

SEQ ID NO: 324509 - DNA, 53 bp, Homo sapiens
  chr18:77186466-77186519
  hypo
acctgagccacgagccacactgctgtgggacccgtgtcgggactcgcagggcc

SEQ ID NO: 324510 - DNA, 200 bp, Homo sapiens; identical to SEQ ID NO: 272429
  chr18:77192931-77193131
  hypo

SEQ ID NO: 324511 - DNA, 356 bp, Homo sapiens; identical to SEQ ID NO: 293196
  chr18:77193428-77193784
  hypo

SEQ ID NO: 324512 - DNA, 441 bp, Homo sapiens; identical to SEQ ID NO: 272430
  chr18:77194172-77194613
  hypo

SEQ ID NO: 324513 - DNA, 116 bp, Homo sapiens; identical to SEQ ID NO: 218667
  chr18:77194820-77194936
  hypo

SEQ ID NO: 324514 - DNA, 169 bp, Homo sapiens; identical to SEQ ID NO: 218668
  chr18:77194978-77195147
  hypo

SEQ ID NO: 324515 - DNA, 1761 bp, Homo sapiens; identical to SEQ ID NO: 218669
  chr18:77196527-77198288
  hypo

SEQ ID NO: 324516 - DNA, 171 bp, Homo sapiens; identical to SEQ ID NO: 272433
  chr18:77198659-77198830
  hypo

SEQ ID NO: 324517 - DNA, 1042 bp, Homo sapiens; identical to SEQ ID NO: 218670
  chr18:77199644-77200686
  hypo

SEQ ID NO: 324518 - DNA, 36 bp, Homo sapiens; identical to SEQ ID NO: 272435
  chr18:77201348-77201384
  hypo

SEQ ID NO: 324519 - DNA, 158 bp, Homo sapiens
  chr18:77201765-77201923
  hypo
tggccctggggtcacggggttgcggcgtttcccacttgcctgtttcaggagttgcattctagatgattctctctccatagaaggtcgaggtttctcagcatggattaattgattagatttaattaaatctaaacgtggtgtttccgggcagaatcttc

SEQ ID NO: 324520 - DNA, 1262 bp, Homo sapiens; identical to SEQ ID NO: 218671
  chr18:77204185-77205447
  hypo

SEQ ID NO: 324521 - DNA, 157 bp, Homo sapiens; identical to SEQ ID NO: 272438
  chr18:77208090-77208247
  hypo

SEQ ID NO: 324522 - DNA, 139 bp, Homo sapiens; identical to SEQ ID NO: 272439
  chr18:77208867-77209006
  hypo

SEQ ID NO: 324523 - DNA, 42 bp, Homo sapiens; identical to SEQ ID NO: 272440
  chr18:77209431-77209473
  hypo

SEQ ID NO: 324524 - DNA, 927 bp, Homo sapiens; identical to SEQ ID NO: 218672
  chr18:77210976-77211903
  hypo

SEQ ID NO: 324525 - DNA, 451 bp, Homo sapiens; identical to SEQ ID NO: 272442
  chr18:77212145-77212596
  hypo

SEQ ID NO: 324526 - DNA, 458 bp, Homo sapiens; identical to SEQ ID NO: 218674
  chr18:77212957-77213415
  hypo

SEQ ID NO: 324527 - DNA, 45 bp, Homo sapiens; identical to SEQ ID NO: 272444
  chr18:77213652-77213697
  hypo

SEQ ID NO: 324528 - DNA, 175 bp, Homo sapiens; identical to SEQ ID NO: 218675
  chr18:77215331-77215506
  hypo

SEQ ID NO: 324529 - DNA, 253 bp, Homo sapiens
  chr18:77235786-77236039
  hypo
cacccccagcaagacgccaggcatcctagccacccgacgctcaggccgtgcgtgtcctcagagcgtgttttaaagcaggagggatttggggtggaagattgctcctgcagaaatcagagatgaggggagtaaattagggaaccagcgtcaggatccagacttctgtgaaagagccacagggctcagcatccgacgggcgcacctggggctgggcgagtctggctccagaaggggggtggggccgggagcctga

SEQ ID NO: 324530 - DNA, 358 bp, Homo sapiens
  chr18:77246872-77247230
  hypo
ggcccctattcctgtaacggtcaagcgagagcctgaagagttggaccagttgtacctggatgacggtgagtgcccgcagccatgcaggtgtgtgccccgcctggcgccatggcgtgagctcatggaggggccgtgtgcgtgctgcgtgtgtggcacgtgtggaagtgcaccgaggcaccgggcagggtgtggggtgcgtcctcctgatataaagtgcccgtgcggtgccacggcgtcagcgccacctggggcgctcgccgtgagatctgctccggtggtcgcagtgtggggcccttggcgggtcctgggctgcagatcctcctgcgagacctgtcccggggtctaaggctcacattgg

SEQ ID NO: 324531 - DNA, 506 bp, Homo sapiens; identical to SEQ ID NO: 272448
  chr18:77251269-77251775
  hypo

SEQ ID NO: 324532 - DNA, 88 bp, Homo sapiens; identical to SEQ ID NO: 218677
  chr18:77255660-77255748
  hypo

SEQ ID NO: 324533 - DNA, 322 bp, Homo sapiens; identical to SEQ ID NO: 218678
  chr18:77255784-77256106
  hypo

SEQ ID NO: 324534 - DNA, 108 bp, Homo sapiens; identical to SEQ ID NO: 272450
  chr18:77263494-77263602
  hypo

SEQ ID NO: 324535 - DNA, 60 bp, Homo sapiens; identical to SEQ ID NO: 272451
  chr18:77269734-77269794
  hypo

SEQ ID NO: 324536 - DNA, 148 bp, Homo sapiens
  chr18:77270852-77271000
  hypo
ggggcatcctctgccggggcatcttccgccggggcatcctccgccgggacatcctccaccgggggctcctccgccggggcatcctgctccggggcatcgttcgccggtcttgtcgctgcggtggaagtgtcgtgttcccagccaggct

SEQ ID NO: 324537 - DNA, 352 bp, Homo sapiens
  chr18:77271089-77271441
  hypo
gagagtccaccaacggcaattacaggaacctaatggccttcctgccgcaccgctccgtggcacccggctcgctgtgatgaattgctcattatgtgcagtgttggaatagcctccacaagattaataattggataatcaatacagaaattcaatcttggggtgtttttttcactccggggtcaatatgtcctgaagattacaaggcccgactctgcctcccccctccccgctgcttccgcgttgggagtttggccagcacctcgccacacgatgggtcatggtgcgttgtctccgtacctccgtgacttttctattctttgcaaacagcaggttctgccgggggtcagtgctg

SEQ ID NO: 324538 - DNA, 249 bp, Homo sapiens; identical to SEQ ID NO: 272454
  chr18:77276519-77276768
  hypo

SEQ ID NO: 324539 - DNA, 172 bp, Homo sapiens; identical to SEQ ID NO: 272455
  chr18:77284566-77284738
  hypo

SEQ ID NO: 324540 - DNA, 123 bp, Homo sapiens
  chr18:77288114-77288237
  hypo
ttcctgggctgtcacgtacactcctgctgccttacacagtgcattttagaatcttccagtctgtcatctcagctcttttgtaacatgcttcccttgtctgcgcggttgaaaccgtaggcttgt

SEQ ID NO: 324541 - DNA, 139 bp, Homo sapiens; identical to SEQ ID NO: 218681
  chr18:77288439-77288578
  hypo

SEQ ID NO: 324542 - DNA, 189 bp, Homo sapiens; identical to SEQ ID NO: 272457
  chr18:77304066-77304255
  hypo

SEQ ID NO: 324543 - DNA, 517 bp, Homo sapiens
  chr18:77307810-77308327
  hypo
tggtgtggctgcagctgtgtttggagcatgcaggagaagcccctccagatgcccacgagcccccaccactttggtgcccgtcctgccagccgtgctgcgggcgccctgggctcgctcttgtcaccccatcccccgaaggcctccagggccctctgttggctgctgacccagggccttctctagagcacctgactcgggcacacggaggctgctggaggagtgagagagtgagtggggggaggaattgcaaccaaattcagaatccgcccggccctgaggccgccccttgcctgccacccacccgggtgggggctttatttcgactcaggcacaggcgcacctgccggacccccggtgtctctgcgactccttctccgcactggcctgggcccgggctcccagccctccgctctgtctcgctggggcaaggcgtccctcactggccagttctgacattggtcccgggggagccgccttccacctgctggccctgctggccctgagtgtgactcagccg

SEQ ID NO: 324544 - DNA, 186 bp, Homo sapiens
  chr18:77308568-77308754
  hypo
cctcaacgcaacaaaaaggtgatttcagaattgtaattactaaagaaaacattaccaagaacgactctgcagcacccctcgttcacgtccccactcagcatctccacgcgggggccacgcgtccgtgtttgctgccggcagccatcagcatccgcaggggtcccccgtctccgcgcacagctcaca

SEQ ID NO: 324545 - DNA, 216 bp, Homo sapiens
  chr18:77309734-77309950
  hypo
ctcgcggggatggggagttgggggctctgaacccgtgtgtgtggagcagaaggagtgtcacctcatcccccgggggcccttcacatcccaggccccactggactgtgacgggcagtgggaagggaggacgtgtgtggggccgagagggagctcccaggagaccccgtcgttgtcctggggtggccgagacaaagcctcacagacccccagacaggg

SEQ ID NO: 324546 - DNA, 577 bp, Homo sapiens
  chr18:77312927-77313504
  hypo
ggacttgacttggccgtcaggcgtcgcgggagcccctgctgcgggctgagaagagcagccatcctggtcacacccctcggagcagcttctcaaggcttttggagggaggagctttcacagccttaatgccaccgtgggaaccgggagagagagtcccacggaaattcatggaaagctctgctgaagaccatttaggcttctgtctcctgaacttaaacctgggtaaggcgagtgtaaaggaaacgcctgcgtttggcggggctgggtttcagcagctcacacccagggagacacatttggcagccgaggccaccgccgtcctcaggcgtgggttccgtgactcagggaggacccgcccactgattcaccggcgcacctgccccgtcccgagaaacctggttctcctggggctgacccagcctaacccaggctccccagggagactcggaaagcacttccaagaggcttctgctcacccgggccctccacgtccacggctggatgtctcatcaacagtcacctgtcactgagtgccggataaagaaggcggtgaatgaactagcggtgggtgaatggc

SEQ ID NO: 324547 - DNA, 66 bp, Homo sapiens; identical to SEQ ID NO: 218684
  chr18:77313806-77313872
  hypo

SEQ ID NO: 324548 - DNA, 99 bp, Homo sapiens; identical to SEQ ID NO: 218685
  chr18:77314021-77314120
  hypo

SEQ ID NO: 324549 - DNA, 331 bp, Homo sapiens; identical to SEQ ID NO: 272462
  chr18:77314336-77314667
  hypo

SEQ ID NO: 324550 - DNA, 213 bp, Homo sapiens; identical to SEQ ID NO: 218686
  chr18:77315293-77315506
  hypo

SEQ ID NO: 324551 - DNA, 89 bp, Homo sapiens; identical to SEQ ID NO: 218687
  chr18:77315538-77315627
  hypo

SEQ ID NO: 324552 - DNA, 41 bp, Homo sapiens; identical to SEQ ID NO: 218688
  chr18:77315948-77315989
  hypo

SEQ ID NO: 324553 - DNA, 697 bp, Homo sapiens; identical to SEQ ID NO: 272465
  chr18:77317749-77318446
  hypo

SEQ ID NO: 324554 - DNA, 136 bp, Homo sapiens; identical to SEQ ID NO: 272466
  chr18:77319168-77319304
  hypo

SEQ ID NO: 324555 - DNA, 61 bp, Homo sapiens; identical to SEQ ID NO: 218689
  chr18:77320767-77320828
  hypo

SEQ ID NO: 324556 - DNA, 141 bp, Homo sapiens; identical to SEQ ID NO: 272469
  chr18:77334279-77334420
  hypo

SEQ ID NO: 324557 - DNA, 216 bp, Homo sapiens; identical to SEQ ID NO: 218690
  chr18:77336014-77336230
  hypo

SEQ ID NO: 324558 - DNA, 126 bp, Homo sapiens
  chr18:77338965-77339091
  hypo
tcccaagacagccgcgccgagtgtcctaacacagttgccacacggctccatgtcctgtgcacaggccaggggttcgagtgggcatcagcaatgctcacttcagagcccctccgccacgacgtggcc

SEQ ID NO: 324559 - DNA, 280 bp, Homo sapiens; identical to SEQ ID NO: 218692
  chr18:77339121-77339401
  hypo

SEQ ID NO: 324560 - DNA, 591 bp, Homo sapiens; identical to SEQ ID NO: 272472
  chr18:77340201-77340792
  hypo

SEQ ID NO: 324561 - DNA, 150 bp, Homo sapiens; identical to SEQ ID NO: 272473
  chr18:77347862-77348012
  hypo

SEQ ID NO: 324562 - DNA, 84 bp, Homo sapiens; identical to SEQ ID NO: 218693
  chr18:77356569-77356653
  hypo

SEQ ID NO: 324563 - DNA, 74 bp, Homo sapiens; identical to SEQ ID NO: 218694
  chr18:77356683-77356757
  hypo

SEQ ID NO: 324564 - DNA, 791 bp, Homo sapiens; identical to SEQ ID NO: 272476
  chr18:77358203-77358994
  hypo

SEQ ID NO: 324565 - DNA, 63 bp, Homo sapiens
  chr18:77365607-77365670
  hypo
gctccttctctgcatttgcccgtggcccggagcccaccctgctctgctcatccagcacctgga

SEQ ID NO: 324566 - DNA, 89 bp, Homo sapiens; identical to SEQ ID NO: 272479
  chr18:77366225-77366314
  hypo

SEQ ID NO: 324567 - DNA, 67 bp, Homo sapiens; identical to SEQ ID NO: 272480
  chr18:77368583-77368650
  hypo

SEQ ID NO: 324568 - DNA, 65 bp, Homo sapiens; identical to SEQ ID NO: 272481
  chr18:77375217-77375282
  hypo

SEQ ID NO: 324569 - DNA, 159 bp, Homo sapiens; identical to SEQ ID NO: 272482
  chr18:77382549-77382708
  hypo

SEQ ID NO: 324570 - DNA, 103 bp, Homo sapiens; identical to SEQ ID NO: 272483
  chr18:77390502-77390605
  hypo

SEQ ID NO: 324571 - DNA, 204 bp, Homo sapiens
  chr18:77410198-77410402
  hypo
gggagcggccttctcctagacagcacacgagccatctacgttttcccggttgtctttttcattccaaagtccacatgtgcgctaccacctcctttaaaacataaaaacagaaaagcaaaacgacgaaaaaggtagcagttccctttagccacagtgcagcgcatttgttttcattattcctccgttttactgagagtaatgtgc

SEQ ID NO: 324572 - DNA, 246 bp, Homo sapiens; identical to SEQ ID NO: 272485
  chr18:77438002-77438248
  hypo

SEQ ID NO: 324573 - DNA, 59 bp, Homo sapiens; identical to SEQ ID NO: 218696
  chr18:77456032-77456091
  hypo

SEQ ID NO: 324574 - DNA, 83 bp, Homo sapiens; identical to SEQ ID NO: 218697
  chr18:77457661-77457744
  hypo

SEQ ID NO: 324575 - DNA, 316 bp, Homo sapiens; identical to SEQ ID NO: 218698
  chr18:77463264-77463580
  hypo

SEQ ID NO: 324576 - DNA, 738 bp, Homo sapiens; identical to SEQ ID NO: 272489
  chr18:77474487-77475225
  hypo

SEQ ID NO: 324577 - DNA, 81 bp, Homo sapiens; identical to SEQ ID NO: 272490
  chr18:77479162-77479243
  hypo

SEQ ID NO: 324578 - DNA, 260 bp, Homo sapiens; identical to SEQ ID NO: 272491
  chr18:77485494-77485754
  hypo

SEQ ID NO: 324579 - DNA, 39 bp, Homo sapiens; identical to SEQ ID NO: 272492
  chr18:77493027-77493066
  hypo

SEQ ID NO: 324580 - DNA, 441 bp, Homo sapiens; identical to SEQ ID NO: 272493
  chr18:77493433-77493874
  hypo

SEQ ID NO: 324581 - DNA, 422 bp, Homo sapiens; identical to SEQ ID NO: 218700
  chr18:77497994-77498416
  hypo

SEQ ID NO: 324582 - DNA, 212 bp, Homo sapiens; identical to SEQ ID NO: 272495
  chr18:77503023-77503235
  hypo

SEQ ID NO: 324583 - DNA, 96 bp, Homo sapiens; identical to SEQ ID NO: 272496
  chr18:77503529-77503625
  hypo

SEQ ID NO: 324584 - DNA, 174 bp, Homo sapiens
  chr18:77508725-77508899
  hypo
atctcacacaacagcgacagagtcatgatcagaggcctttagagtcatcattatcatgtctgtgtgtgagccgtgactgcctgggagccgtgtctgcctgggagccgtgactgcacatgagccgtgtctgtgtgtgagccgttctgtgtgtttgccgtgtctgtgtgtttgccg

SEQ ID NO: 324585 - DNA, 398 bp, Homo sapiens
  chr18:77508946-77509344
  hypo
gcacagggctctccagcgggagctgaggtggtcccttccgtgggctcggttcaggtcctgtggcaccctgccaagttatgctggcgtttctgaaggtgtgtcctgctgtcaacagcactctgggtgtttttgtcggccttgtgaggggaacatatttctaaacctcaaacagagagtcacagctggcatttcccattctttgccatcctcttgctgccattagaactctgccacggatggcttcctcgcttgattttagaaagaaaagaattgttggaactggttcttgcacctctcgccctccccctcctctccctgcttgccccagggtcccgcctggctctcgtctgccccgtcttcactttcggtcggggcccctgcccctgcccctgctctgc

SEQ ID NO: 324586 - DNA, 130 bp, Homo sapiens; identical to SEQ ID NO: 218702
  chr18:77509679-77509809
  hypo

SEQ ID NO: 324587 - DNA, 79 bp, Homo sapiens; identical to SEQ ID NO: 272498
  chr18:77510422-77510501
  hypo

SEQ ID NO: 324588 - DNA, 245 bp, Homo sapiens; identical to SEQ ID NO: 272499
  chr18:77511471-77511716
  hypo

SEQ ID NO: 324589 - DNA, 202 bp, Homo sapiens; identical to SEQ ID NO: 272500
  chr18:77512014-77512216
  hypo

SEQ ID NO: 324590 - DNA, 282 bp, Homo sapiens; identical to SEQ ID NO: 272501
  chr18:77535504-77535786
  hypo

SEQ ID NO: 324591 - DNA, 263 bp, Homo sapiens; identical to SEQ ID NO: 218704
  chr18:77542642-77542905
  hypo

SEQ ID NO: 324592 - DNA, 270 bp, Homo sapiens; identical to SEQ ID NO: 218705
  chr18:77542951-77543221
  hypo

SEQ ID NO: 324593 - DNA, 31 bp, Homo sapiens; identical to SEQ ID NO: 293197
  chr18:77557777-77557808
  hypo

SEQ ID NO: 324594 - DNA, 151 bp, Homo sapiens; identical to SEQ ID NO: 272506
  chr18:77561347-77561498
  hypo

SEQ ID NO: 324595 - DNA, 254 bp, Homo sapiens; identical to SEQ ID NO: 272507
  chr18:77562267-77562521
  hypo

SEQ ID NO: 324596 - DNA, 604 bp, Homo sapiens; identical to SEQ ID NO: 272508
  chr18:77608083-77608687
  hypo

SEQ ID NO: 324597 - DNA, 155 bp, Homo sapiens; identical to SEQ ID NO: 218706
  chr18:77609431-77609586
  hypo

SEQ ID NO: 324598 - DNA, 495 bp, Homo sapiens; identical to SEQ ID NO: 218707
  chr18:77609678-77610173
  hypo

SEQ ID NO: 324599 - DNA, 39 bp, Homo sapiens; identical to SEQ ID NO: 272510
  chr18:77615733-77615772
  hypo

SEQ ID NO: 324600 - DNA, 148 bp, Homo sapiens; identical to SEQ ID NO: 218708
  chr18:77616284-77616432
  hypo

SEQ ID NO: 324601 - DNA, 142 bp, Homo sapiens; identical to SEQ ID NO: 218709
  chr18:77627461-77627603
  hypo

SEQ ID NO: 324602 - DNA, 376 bp, Homo sapiens
  chr18:77627958-77628334
  hypo
acaggtttggaagtcggctgctgcctgcagtctgggtgtctggcggccaggctgccttcccccgtcgtccccatgaggtccaggtcctgatcgtgcttccaaaaggtgctggagtgtttggctgtcctcggtcgaatatccaggagggaaaattcatttgtgtcacgttagagaataggagaagtttgggctgccccagctacagaagtcaccccaggaacaccagccctaacccttactgtggaccccaaaaccccagatcctctcagggacaaccctgggctccgtggcacccagcccttcacactcctggcacgcacccctaaattgcttgtccagttaagaagcagtcgccctccgcgtggggcctggtgac

SEQ ID NO: 324603 - DNA, 125 bp, Homo sapiens; identical to SEQ ID NO: 218711
  chr18:77628470-77628595
  hypo

SEQ ID NO: 324604 - DNA, 324 bp, Homo sapiens
  chr18:77629025-77629349
  hypo
ttcccgcacgcactgtgctgtcccaggtgcaggggtggggatgcaggagccgtgagcacccctacacacagccctgcagacactggggagaccccgagccagagtccagctgggacagcctcccgggtctcctggatacctcggagaatgagggaagcccagggtgctggttgctttcagtgcccgccccgcgctgagtctcctgcccctgggctgcgacctgcacaggggcagtagctccctgtggggagggctcggctcagggaccacggaaacgcctggtctgctgcacacggcgggtgcggaagaaataggaagcctcag

SEQ ID NO: 324605 - DNA, 133 bp, Homo sapiens; identical to SEQ ID NO: 272515
  chr18:77631595-77631728
  hypo

SEQ ID NO: 324606 - DNA, 196 bp, Homo sapiens
  chr18:77635954-77636150
  hypo
actgcaccgatgtccggcacgcagtccccaggcgggcacactgcccagcagcccagtggcaggagctcagagctgacttgcttcttgcccaggtctggggttggtgcagcgcccgcagctcacgggccacagcagcggaaggtctgcggcattttggaccttgctgttgccggggcagtgggtgttggcgccacat

SEQ ID NO: 324607 - DNA, 344 bp, Homo sapiens
  chr18:77636190-77636534
  hypo
gaagctggactgaaacccacagacaggtccagccctgccgggcaggcgtgatcaggctgacactgcggaaaagccccactaggcaggtatgattgagctggcgtctccgaagggccccagccaggcagggatgatcgggctggcgctgtggaaagttgcaagcacactgtgtgggcacttggtggggctgggctgggtgcagagcacctaatggagaggagtcacctgcggcgtggccactgctgtgggctgcagttcccgggaaacagcagtggaaaccagcggcccagggacaggacaggggctgcaggtgctgagccgttgttcgacccagttgaattcta

SEQ ID NO: 324608 - DNA, 367 bp, Homo sapiens; identical to SEQ ID NO: 218712
  chr18:77638243-77638610
  hypo

SEQ ID NO: 324609 - DNA, 254 bp, Homo sapiens; identical to SEQ ID NO: 272518
  chr18:77642672-77642926
  hypo

SEQ ID NO: 324610 - DNA, 230 bp, Homo sapiens; identical to SEQ ID NO: 272519
  chr18:77643802-77644032
  hypo

SEQ ID NO: 324611 - DNA, 155 bp, Homo sapiens
  chr18:77644509-77644664
  hypo
ctgtgatgtcccgatgcagtggaggagcagggctgggtctgggcctgggcctgggcgtggcagctccccaggcccacggggcaggaattctagattctgggattcctttcatcgttgctttttgtgttttctacctagagcggagaaatgtttgt

SEQ ID NO: 324612 - DNA, 60 bp, Homo sapiens; identical to SEQ ID NO: 218713
  chr18:77644881-77644941
  hypo

SEQ ID NO: 324613 - DNA, 536 bp, Homo sapiens
  chr18:77664461-77664997
  hypo
tgacttctctgtggccgcaagagctgccgcctggctggggctctgcaagcccaagaacagtgagaccagctcgaggctacaggggacagcagggcgagcagctgacgtcagggcccctggtgcgcggtggcaattctgggaggggccgggcctgggagggtgctgaggacgcagatctgtgcccccaggcacacagccaagtggagcagagcagctgcttttgggtctctgccggcctccctccctggtgatagatgcaaaccttcctttcctggagtgaacagggagcagccgccacccaccatcccagtccgaacacgcttcccccaccgctgtgttcatgccctggcttgcctagcagtgaacatgagtgctgctgcactttcccgtgtgaaatgtttaaatcagcggccgctgacccttccacagctcctgaagccagaggcagagcctgggtggggagcgctgcctggacagaaaggacaggacacagccctcccccaccctggggcgtccgtcccgctcataagccaggg

SEQ ID NO: 324614 - DNA, 65 bp, Homo sapiens
  chr18:77665033-77665098
  hypo
tcttcaggcacagccatggccgggtgtgttcagggctggagctaggaacccgcaggagacagccg

SEQ ID NO: 324615 - DNA, 278 bp, Homo sapiens; identical to SEQ ID NO: 272522
  chr18:77675215-77675493
  hypo

SEQ ID NO: 324616 - DNA, 130 bp, Homo sapiens; identical to SEQ ID NO: 272523
  chr18:77685460-77685590
  hypo

SEQ ID NO: 324617 - DNA, 158 bp, Homo sapiens; identical to SEQ ID NO: 205049
  chr18:77710773-77710931
  hypo

SEQ ID NO: 324618 - DNA, 35 bp, Homo sapiens; identical to SEQ ID NO: 225692
  chr18:77712073-77712108
  hypo

SEQ ID NO: 324619 - DNA, 46 bp, Homo sapiens; identical to SEQ ID NO: 272525
  chr18:77729387-77729433
  hypo

SEQ ID NO: 324620 - DNA, 61 bp, Homo sapiens; identical to SEQ ID NO: 272526
  chr18:77729463-77729524
  hypo

SEQ ID NO: 324621 - DNA, 55 bp, Homo sapiens; identical to SEQ ID NO: 272527
  chr18:77740912-77740967
  hypo

SEQ ID NO: 324622 - DNA, 175 bp, Homo sapiens; identical to SEQ ID NO: 272528
  chr18:77753637-77753812
  hypo

SEQ ID NO: 324623 - DNA, 92 bp, Homo sapiens; identical to SEQ ID NO: 272529
  chr18:77772123-77772215
  hypo

SEQ ID NO: 324624 - DNA, 135 bp, Homo sapiens; identical to SEQ ID NO: 225693
  chr18:77794468-77794603
  hypo

SEQ ID NO: 324625 - DNA, 165 bp, Homo sapiens; identical to SEQ ID NO: 272530
  chr18:77804217-77804382
  hypo

SEQ ID NO: 324626 - DNA, 381 bp, Homo sapiens; identical to SEQ ID NO: 272531
  chr18:77804875-77805256
  hypo

SEQ ID NO: 324627 - DNA, 93 bp, Homo sapiens; identical to SEQ ID NO: 272532
  chr18:77805635-77805728
  hypo

SEQ ID NO: 324628 - DNA, 288 bp, Homo sapiens
  chr18:77808868-77809156
  hypo
atccaaccaggcgtcggctcagtgcctcctagaaagtggagtgtgggcacgtttgcaggggatccaaccaggcgtctgctcagtgcctcctagaaagtggagtgtgggcacgtttgtaggggatcccaccaggcatcagctcagtgcctcctagaaagaggagtgtgggcacgtttcagagaaaactggcttaggcctccctgtttctggcgtggccttccctgggagcgagttagggacacggaagctcacccgcttctgaatgggtccactcctggggatttccgc

SEQ ID NO: 324629 - DNA, 382 bp, Homo sapiens
  chr18:77809186-77809568
  hypo
gaagctcacccccttctgaatgggtccactcctggggatttccgcggccttccctgggagcgggttagggacatggaagctcaccctcttctgaatgggtccactcctggggatttccacggcctttcctgggagcaggttagggacatggaagctcacgcccttctgaatgggtccactcccggggatttccatggccttccctggatgatccactcctggggattttccgcagctctccagatgacgtgcacgcacactaaacacccagaagttagggaggcactgatccagtgaagtcctcagatcaaccttgtgagctttttacaagtacctgtcactgttaaactgctgatgaaatgtgaaacgacttcacaggttt

SEQ ID NO: 324630 - DNA, 73 bp, Homo sapiens; identical to SEQ ID NO: 272534
  chr18:77828030-77828103
  hypo

SEQ ID NO: 324631 - DNA, 31 bp, Homo sapiens; identical to SEQ ID NO: 205051
  chr18:77867028-77867059
  hypo

SEQ ID NO: 324632 - DNA, 38 bp, Homo sapiens; identical to SEQ ID NO: 272535
  chr18:77913923-77913961
  hypo

SEQ ID NO: 324633 - DNA, 168 bp, Homo sapiens; identical to SEQ ID NO: 218717
  chr18:77939058-77939226
  hypo

SEQ ID NO: 324634 - DNA, 193 bp, Homo sapiens; identical to SEQ ID NO: 218718
  chr18:77942205-77942398
  hypo

SEQ ID NO: 324635 - DNA, 946 bp, Homo sapiens; identical to SEQ ID NO: 272538
  chr18:77943589-77944535
  hypo

SEQ ID NO: 324636 - DNA, 88 bp, Homo sapiens; identical to SEQ ID NO: 272539
  chr18:77957216-77957304
  hypo

SEQ ID NO: 324637 - DNA, 185 bp, Homo sapiens; identical to SEQ ID NO: 272540
  chr18:77988259-77988444
  hypo

SEQ ID NO: 324638 - DNA, 167 bp, Homo sapiens; identical to SEQ ID NO: 272542
  chr19:327875-328042
  hypo

SEQ ID NO: 324639 - DNA, 34 bp, Homo sapiens; identical to SEQ ID NO: 272543
  chr19:369328-369362
  hypo

SEQ ID NO: 324640 - DNA, 269 bp, Homo sapiens; identical to SEQ ID NO: 272544
  chr19:370622-370891
  hypo

SEQ ID NO: 324641 - DNA, 160 bp, Homo sapiens; identical to SEQ ID NO: 272545
  chr19:379972-380132
  hypo

SEQ ID NO: 324642 - DNA, 386 bp, Homo sapiens
  chr19:401090-401476
  hypo
agcacatgaggcagcgtcccggagaagccccgtggtcctgtccggggaagccgggaactgctcactcacagggcgcacggaccaccaggaaagggcacggcagcctaggcgcccagagctctgcgagggatccctcgtgggggcttgattgactgattgcttgccacggggttgccctcgaactccaagggtgtctgacgctgtgagacccaaggcgctcccaagtcccacggttggtcttgctggtgtgaccctccctaccccagaccaagacgctcccctcaggcagggcagaaatcacctcccaaagccaaggcaaagcccagacctcaccccgcacgagaggattcctcaccccacgggggaaggtgcgggtctcatccgtg

SEQ ID NO: 324643 - DNA, 159 bp, Homo sapiens; identical to SEQ ID NO: 272547
  chr19:401847-402006
  hypo

SEQ ID NO: 324644 - DNA, 75 bp, Homo sapiens; identical to SEQ ID NO: 218720
  chr19:403809-403884
  hypo

SEQ ID NO: 324645 - DNA, 322 bp, Homo sapiens
  chr19:407832-408154
  hypo
ccacctgggccagagccccgtgctcactgtggaacagagactccttgcgcctcgtgtgggggctctcagccagcatggcgaagccgtaggacgtctgggccttgggcaccgagggcagggacatggcaccctgggcctgggggtcggcgtcagtggcctcctcggacagccagtcctcggcactctcgatctggatcacgtgccgggtggctgccttcagcaggctcttgctctcggctgccagcttggcaggcagccgggggctccgtggggtctggcggggggccgcagaggccaggttctgttccgacgtggaggggcc

SEQ ID NO: 324646 - DNA, 294 bp, Homo sapiens; identical to SEQ ID NO: 272550
  chr19:416971-417265
  hypo

SEQ ID NO: 324647 - DNA, 266 bp, Homo sapiens; identical to SEQ ID NO: 272551
  chr19:417295-417561
  hypo

SEQ ID NO: 324648 - DNA, 811 bp, Homo sapiens
  chr19:418255-419066
  hypo
ctcctctgggaaggaggcctggacacccagcacgccgcaggggtccacaaagaccaggtgacgcccaccacagccgaccgcagtgtcacggtcatggctgcacgctgccaccctcgggcacatatccacccacgggcagtgacgcgtgtccacacacaacctgcacacaaaggctcacggcggccaaaaggcggaagcagccccagcgtccatcagcggatgaacacacaaaacgtggtcccctcacacagcgggacattatccagccgagaacaggagccaggctctggcccgggccacggcgcaatgcccctggaggacgtcacgctcagtgagagacgccagacacagaaggacacacagcgtggaatcccattgctatgaaatgtccaggacaggcccatccacagagacaggaggcggatgtgtggggttggagctggggaggggacagggagtgacggctggtggggacagggcttctttcggggctgacagaatgttctggaattcgacagagatggttgcacggctcggatgctgaacacccctgagtcgtgccctctagagggaaaggcacggcacgtgaaccgggtctcaattttcaaatcagaaaagaatctggcaaaggaggcaaggccagcgacccacggcggcagccacacacctggctcagggctcccgtgagaccacgccacgcaggtgcagctcactctcggcggccacgatgggctgcccgttctgcaggtggtggtcgatcaggtggctgatgctctcaaacagcacgtccttcgtccgtacctgcgggaca

SEQ ID NO: 324649 - DNA, 876 bp, Homo sapiens; identical to SEQ ID NO: 272553
  chr19:424489-425365
  hypo

SEQ ID NO: 324650 - DNA, 37 bp, Homo sapiens; identical to SEQ ID NO: 218723
  chr19:434176-434213
  hypo

SEQ ID NO: 324651 - DNA, 36 bp, Homo sapiens; identical to SEQ ID NO: 272555
  chr19:434753-434789
  hypo

SEQ ID NO: 324652 - DNA, 278 bp, Homo sapiens; identical to SEQ ID NO: 272556
  chr19:435182-435460
  hypo

SEQ ID NO: 324653 - DNA, 89 bp, Homo sapiens
  chr19:436223-436312
  hypo
gaaagcttggcccacggtgctgatgatgctctgtgccaggccctcacagcactccaggatgtggcaggctgcgggcacgttggtcatgc

SEQ ID NO: 324654 - DNA, 268 bp, Homo sapiens
  chr19:436346-436614
  hypo
caggacccccaccggcctccccgggggcctcacctctctggttgatggggtccttggcgacgtaggccacgtaatccgtcatgtcctgggggcggggaggggccagctggacctgcctgggccccccaccgggattcccagctgcccaccccagcaatgcagagagatggggcagtggatgtgggcacagggtacgttaggcgggctctggggaaggatgagagggtctcgcggccggaggggggcggcagggctgcaggtccacccc

SEQ ID NO: 324655 - DNA, 48 bp, Homo sapiens
  chr19:436644-436692
  hypo
cgcgaaggagatggacggcatgtggtggttggcgatgacctgtggcgg

SEQ ID NO: 324656 - DNA, 34 bp, Homo sapiens; identical to SEQ ID NO: 272558
  chr19:449972-450006
  hypo

SEQ ID NO: 324657 - DNA, 220 bp, Homo sapiens; identical to SEQ ID NO: 272559
  chr19:450886-451106
  hypo

SEQ ID NO: 324658 - DNA, 509 bp, Homo sapiens; identical to SEQ ID NO: 218724
  chr19:453563-454072
  hypo

SEQ ID NO: 324659 - DNA, 355 bp, Homo sapiens; identical to SEQ ID NO: 272561
  chr19:455241-455596
  hypo

SEQ ID NO: 324660 - DNA, 120 bp, Homo sapiens; identical to SEQ ID NO: 272562
  chr19:477567-477687
  hypo

SEQ ID NO: 324661 - DNA, 33 bp, Homo sapiens; identical to SEQ ID NO: 272563
  chr19:477807-477840
  hypo

SEQ ID NO: 324662 - DNA, 34 bp, Homo sapiens; identical to SEQ ID NO: 272564
  chr19:484683-484717
  hypo

SEQ ID NO: 324663 - DNA, 116 bp, Homo sapiens; identical to SEQ ID NO: 272566
  chr19:487188-487304
  hypo

SEQ ID NO: 324664 - DNA, 77 bp, Homo sapiens; identical to SEQ ID NO: 218725
  chr19:491540-491617
  hypo

SEQ ID NO: 324665 - DNA, 41 bp, Homo sapiens; identical to SEQ ID NO: 205062
  chr19:507106-507147
  hypo

SEQ ID NO: 324666 - DNA, 217 bp, Homo sapiens; identical to SEQ ID NO: 272568
  chr19:529761-529978
  hypo

SEQ ID NO: 324667 - DNA, 75 bp, Homo sapiens
  chr19:530480-530555
  hypo
tcaagactcaggtgggctgggcgcggtggctcatgcctataatcccagcatttgggaggccgacgcagacggatc

SEQ ID NO: 324668 - DNA, 81 bp, Homo sapiens; identical to SEQ ID NO: 218727
  chr19:536230-536311
  hypo

SEQ ID NO: 324669 - DNA, 82 bp, Homo sapiens; identical to SEQ ID NO: 272571
  chr19:540964-541046
  hypo

SEQ ID NO: 324670 - DNA, 344 bp, Homo sapiens; identical to SEQ ID NO: 272572
  chr19:541697-542041
  hypo

SEQ ID NO: 324671 - DNA, 387 bp, Homo sapiens; identical to SEQ ID NO: 272573
  chr19:542336-542723
  hypo

SEQ ID NO: 324672 - DNA, 39 bp, Homo sapiens; identical to SEQ ID NO: 272574
  chr19:546049-546088
  hypo

SEQ ID NO: 324673 - DNA, 112 bp, Homo sapiens
  chr19:549179-549291
  hypo
tgcaaggtgaggggcgcccgggtggggctgggggaatgaggctggcgggagggccggggccagggcagccgccgggcaggttcctggctctcccgttctctggggagtcctg

SEQ ID NO: 324674 - DNA, 103 bp, Homo sapiens
  chr19:557934-558037
  hypo
attacaggcgtgagccaccacgcctggccccttattgaacttgatggtttctccttcgtatctcagaagtcacaagctggaggatttaggtttgaagaatcac

SEQ ID NO: 324675 - DNA, 45 bp, Homo sapiens; identical to SEQ ID NO: 272577
  chr19:559344-559389
  hypo

SEQ ID NO: 324676 - DNA, 102 bp, Homo sapiens
  chr19:559629-559731
  hypo
gtgctgggatgacaggcgtgagtcaccgcgcctcatcccctcctcagccccccagcacccacacgtcccctccctgtctctgtggatgggcctgtcctggac

SEQ ID NO: 324677 - DNA, 121 bp, Homo sapiens
  chr19:559808-559929
  hypo
gcatccgcgccgtgggctgcgtccgagcctcgctcctgttcacggctgagtcgtgtcccattgcgtggatgggccatgctgtgtctgtccattcattctctgtttttgtttgtttgtttgt

SEQ ID NO: 324678 - DNA, 37 bp, Homo sapiens; identical to SEQ ID NO: 272579
  chr19:561123-561160
  hypo

SEQ ID NO: 324679 - DNA, 59 bp, Homo sapiens; identical to SEQ ID NO: 272580
  chr19:562309-562368
  hypo

SEQ ID NO: 324680 - DNA, 861 bp, Homo sapiens; identical to SEQ ID NO: 272581
  chr19:581312-582173
  hypo

SEQ ID NO: 324681 - DNA, 126 bp, Homo sapiens; identical to SEQ ID NO: 272582
  chr19:585310-585436
  hypo

SEQ ID NO: 324682 - DNA, 180 bp, Homo sapiens
  chr19:592198-592378
  hypo
agggagctgtagaacgtgcccactcccctccgtcccctccagcatgaccttcgacagagatgggtgcaccgcagcgtgggggctggcaggtggaggcccacaccagccactccctcccctgggcagctccagcgaccccctggctgcagaggggcggtcggtggcctggggggcaggtgg

SEQ ID NO: 324683 - DNA, 145 bp, Homo sapiens; identical to SEQ ID NO: 272584
  chr19:600909-601054
  hypo

SEQ ID NO: 324684 - DNA, 220 bp, Homo sapiens; identical to SEQ ID NO: 272585
  chr19:601332-601552
  hypo

SEQ ID NO: 324685 - DNA, 408 bp, Homo sapiens; identical to SEQ ID NO: 205064
  chr19:603408-603816
  hypo

SEQ ID NO: 324686 - DNA, 173 bp, Homo sapiens; identical to SEQ ID NO: 205065
  chr19:603846-604019
  hypo

SEQ ID NO: 324687 - DNA, 76 bp, Homo sapiens
  chr19:617541-617617
  hypo
aggtagttggggtcagggagcgccttactcagagcagaaccgcttgaccaggaatctggacaggtcctgcaggatg

SEQ ID NO: 324688 - DNA, 1215 bp, Homo sapiens
  chr19:617647-618862
  hypo
cggcacacctgggcaggagtcagaggatccccaggggtgatcaggcaggctctgggcaccacccctacccaacgccccagtgtgggggccccacccatgggtggactgaggctcagactacgggggcacctggttcatgacggagacatcagctgcgtgagtccagtaacagtcgtgcacagagacgaaggtcaggcccttcctgtggcagagcggaggactcctgaagggaggggagctcacagggccacccagtgaccagcatcctggccctgcgctcagccccctccacttgaggtccagggaagcccaccctcctgcaggcctcgccccacccctcgccccgcccctccccaaacatcctgggttaggtatcagtacagggggaggaaatgttcccagaagcctcctcgccccacccctgccgccccccacgctgctgtgggagcctcagctccgagggcggctacgaggtcccctcctgccagggccaccaccccgcatcctgagcattcccagctcccgtggccggtagattctgctggaacgacctccacgtgctccagatctaaccacacatcgcggtgccaagaaatgcccagcaggaaggggcagcgcccatgctcggctctccctgtcgggccacaggaggggagctgccaggaccacctacattcggggcacacagcctcagggcctctacacaggccccacagacacagcagatccactctgcccagtccctgcccccagctagacccagccttgccagctgtgccctgctagccagaagacgcccctgggaggcgagcggcacccacgccgtccggagacgcccacctgtagcagtgcagggcggtgagcatcatgtgggaggagtccagcgagtggatgaagttgggcgggaagccgttcttctgcttacgtgtgttgggctttctgaggacggaacaggtgccggtgggggcggcccagggacacccctaactggccgctgtctccaccgtggctgctctccagacccccggccaggccccagcccgggccccccactcaccggctgatgtctccgttgtgggtgtaggtgatgctctgaattccacctcctatttgctaaaaaggggaaggggccggtgagtcccacccgaggcccagcacggtggtggtacattgaggtggtggtacactggggtagtggcacgctaggatggtggc

SEQ ID NO: 324689 - DNA, 620 bp, Homo sapiens; identical to SEQ ID NO: 218734
  chr19:619067-619687
  hypo

SEQ ID NO: 324690 - DNA, 63 bp, Homo sapiens; identical to SEQ ID NO: 218735
  chr19:623406-623469
  hypo

SEQ ID NO: 324691 - DNA, 218 bp, Homo sapiens
  chr19:624025-624243
  hypo
ttgtacacaaacgttcacagctgcatgactcgcagtcgataagtagaaacagcccaacgtcccataaacggacgaacagacgggcacggcgcggccatccacgcaccggagcatgactcagccctgacccaggtcgcctcccggaggcaccatgaggacgtcacgctcagtgggagatgccaaacacaaaaggtctcgcagtgtgtggtcccatttct

SEQ ID NO: 324692 - DNA, 228 bp, Homo sapiens
  chr19:629609-629837
  hypo
ccgtggtggacgaccagcaggtggtgggcgaggggcagctggtcagtgagcaggcagcacttgaagaaggccaggagcctctgctgctgacctgagagctgggcctgcgagtgctgccccgacggggcctgctccacatcgaggctcagcttcccaggggcctcctgcagcagccgggccagctgctcctcccaggggctctcgggggcctggcgcgtgcagtcctcc

SEQ ID NO: 324693 - DNA, 76 bp, Homo sapiens
  chr19:634388-634464
  hypo
ggaacctggaaggtgtgcccacctgtgtcgttcagccggggcagcaggccagaggcgggagcgcctgctgtggggc

SEQ ID NO: 324694 - DNA, 73 bp, Homo sapiens
  chr19:635380-635453
  hypo
agggcctggcagcctccttacagcacattccagacgctgctgccgacgcctgcgtgagcgcactgatgccacc

SEQ ID NO: 324695 - DNA, 105 bp, Homo sapiens
  chr19:638277-638382
  hypo
taataataaaataaaatcactgaactgtacagtgtaagtgggtgaattgtgtggtatatgagtgatgtttccgaggtgtcattaaagaaactcagacgcctgggg

SEQ ID NO: 324696 - DNA, 127 bp, Homo sapiens; identical to SEQ ID NO: 218736
  chr19:638476-638603
  hypo

SEQ ID NO: 324697 - DNA, 237 bp, Homo sapiens; identical to SEQ ID NO: 293222
  chr19:639660-639897
  hypo

SEQ ID NO: 324698 - DNA, 31 bp, Homo sapiens; identical to SEQ ID NO: 293223
  chr19:640138-640169
  hypo

SEQ ID NO: 324699 - DNA, 128 bp, Homo sapiens; identical to SEQ ID NO: 218737
  chr19:640785-640913
  hypo

SEQ ID NO: 324700 - DNA, 100 bp, Homo sapiens; identical to SEQ ID NO: 218738
  chr19:641007-641107
  hypo

SEQ ID NO: 324701 - DNA, 298 bp, Homo sapiens; identical to SEQ ID NO: 95427
  chr19:647140-647438
  hypo

SEQ ID NO: 324702 - DNA, 52 bp, Homo sapiens; identical to SEQ ID NO: 218740
  chr19:647728-647780
  hypo

SEQ ID NO: 324703 - DNA, 130 bp, Homo sapiens; identical to SEQ ID NO: 218741
  chr19:651271-651401
  hypo

SEQ ID NO: 324704 - DNA, 132 bp, Homo sapiens; identical to SEQ ID NO: 293228
  chr19:680400-680532
  hypo

SEQ ID NO: 324705 - DNA, 458 bp, Homo sapiens
  chr19:688902-689360
  hypo
acagggactttaagcgtctcctccacacagggcaggggcccgagaggcacattcattccatttcagcataaactttgagcgcctgctgtgtgccataaatggccataaaggtgataaaaaatccctgcccgttaggttcagaggaagcgggaatgaggaagcgggtggtccaggggttagcaggtgacaagcaggtgacgacggggccggaagggtggtccaggggttagcaggtgacgacggtgctagaagggtggtccaggggttagcaggtgacgacggggctggaagggtggtccacaggttagcaggtgacgacggggtggtccaggggttagcaggagatgacggggccggaagggtggtccaggggttagcaggtgatgacggggctggaacagggttgcagggagggggtatgtggtccagggcggcctcctgggaaggtaacatttgag

SEQ ID NO: 324706 - DNA, 172 bp, Homo sapiens; identical to SEQ ID NO: 218742
  chr19:731146-731318
  hypo

SEQ ID NO: 324707 - DNA, 758 bp, Homo sapiens; identical to SEQ ID NO: 272602
  chr19:736034-736792
  hypo

SEQ ID NO: 324708 - DNA, 37 bp, Homo sapiens; identical to SEQ ID NO: 218744
  chr19:737032-737069
  hypo

SEQ ID NO: 324709 - DNA, 206 bp, Homo sapiens; identical to SEQ ID NO: 272604
  chr19:739215-739421
  hypo

SEQ ID NO: 324710 - DNA, 41 bp, Homo sapiens; identical to SEQ ID NO: 272605
  chr19:741879-741920
  hypo

SEQ ID NO: 324711 - DNA, 41 bp, Homo sapiens; identical to SEQ ID NO: 272606
  chr19:741980-742021
  hypo

SEQ ID NO: 324712 - DNA, 277 bp, Homo sapiens; identical to SEQ ID NO: 272607
  chr19:746555-746832
  hypo

SEQ ID NO: 324713 - DNA, 90 bp, Homo sapiens; identical to SEQ ID NO: 218745
  chr19:748210-748300
  hypo

SEQ ID NO: 324714 - DNA, 33 bp, Homo sapiens; identical to SEQ ID NO: 272610
  chr19:754570-754603
  hypo

SEQ ID NO: 324715 - DNA, 94 bp, Homo sapiens; identical to SEQ ID NO: 218746
  chr19:758091-758185
  hypo

SEQ ID NO: 324716 - DNA, 56 bp, Homo sapiens; identical to SEQ ID NO: 272612
  chr19:762948-763004
  hypo

SEQ ID NO: 324717 - DNA, 85 bp, Homo sapiens; identical to SEQ ID NO: 272613
  chr19:776817-776902
  hypo

SEQ ID NO: 324718 - DNA, 359 bp, Homo sapiens; identical to SEQ ID NO: 272614
  chr19:804894-805253
  hypo

SEQ ID NO: 324719 - DNA, 62 bp, Homo sapiens; identical to SEQ ID NO: 272615
  chr19:807308-807370
  hypo

SEQ ID NO: 324720 - DNA, 319 bp, Homo sapiens; identical to SEQ ID NO: 272616
  chr19:813011-813330
  hypo

SEQ ID NO: 324721 - DNA, 287 bp, Homo sapiens; identical to SEQ ID NO: 293229
  chr19:813409-813696
  hypo

SEQ ID NO: 324722 - DNA, 336 bp, Homo sapiens; identical to SEQ ID NO: 293230
  chr19:813830-814166
  hypo

SEQ ID NO: 324723 - DNA, 38 bp, Homo sapiens; identical to SEQ ID NO: 205069
  chr19:814391-814429
  hypo

SEQ ID NO: 324724 - DNA, 123 bp, Homo sapiens
  chr19:814741-814864
  hypo
aggtcttcctgtaagaggcgtccagcgtgagccccgcccacctggggaccccagctccagtggcctctctgtgtctctgtttccccgcatgttcaccggggcggaagaaggctcccagtcagg

SEQ ID NO: 324725 - DNA, 311 bp, Homo sapiens
  chr19:868909-869220
  hypo
cctccgcaggtggtcgatcttgggctggcctggggccctggcgggagaggggagaacgtgagggaggcctgggcaccacgaggccaggttccggcaggggcatctgtccacaggcgggggtggagggaatggccggcctcacaccatctgccaggtgggcccagatgtctgtgaacagtgaggtgggaggtgcgggaccacctgagacaggcccagtaaagggggcgggaccccccacacggaggagggttggtctcccaggtgcctggggagcttgaggcttagagacccagtaaaggggacggggccca

SEQ ID NO: 324726 - DNA, 71 bp, Homo sapiens; identical to SEQ ID NO: 218751
  chr19:869266-869337
  hypo

SEQ ID NO: 324727 - DNA, 96 bp, Homo sapiens; identical to SEQ ID NO: 272620
  chr19:869627-869723
  hypo

SEQ ID NO: 324728 - DNA, 419 bp, Homo sapiens
  chr19:871003-871422
  hypo
tgtgtttggggaccaatgcagggacacacgcacctggcgaggccgtcgagctgcagggtggcagcactgccaggcagcgtgggcgcccggccaaactgcagacgaaggggctgcttgggctgcaggcggctaaccaggccgtcgctggctggcagccagtccaggctggggataagcagctggctgggcagcaggcagcattcatccaccagcgcctcgtccggctcgctcgctgggccctcatcgcgacctgcggagagaggtggcggaagtctcagcacccctgactggggcaccgcccggccacccgggacgtgctgggagcccctccagttcaggagcaccaggtcagggccccagctctgtctgcctggctgggtgaccccggggttctctcaccaggtcggggccccggctct

SEQ ID NO: 324729 - DNA, 180 bp, Homo sapiens; identical to SEQ ID NO: 218752
  chr19:874508-874688
  hypo

SEQ ID NO: 324730 - DNA, 120 bp, Homo sapiens; identical to SEQ ID NO: 218753
  chr19:874808-874928
  hypo

SEQ ID NO: 324731 - DNA, 92 bp, Homo sapiens; identical to SEQ ID NO: 272624
  chr19:882615-882707
  hypo

SEQ ID NO: 324732 - DNA, 159 bp, Homo sapiens
  chr19:883423-883582
  hypo
acgtggggcggtgcgtgaagagctgggcatggcggggaccaaagcctggcatggtgggcacgtggggcggtagggggagagatgggggagagatgggtgcggtggggactgtcccagtgacccccagctgccagggatgtgagacctgagaaaggctgt

SEQ ID NO: 324733 - DNA, 741 bp, Homo sapiens
  chr19:884311-885052
  hypo
attttgtgccggaggtggggatgacgggcttggctccgtgggtgcggggggcccatcgggcggatagagatgggaatgggggccccagaagaggctgctggagaggtggggtggggtggggggcgtgttctcagcagcctcagctgacccgctgagccttggcttcctctccctgaaccaggttccggaggattccgtgcaccgcccctgcccggtctggcctgtcccctgctgcccgacggccccacccacagacccacgctccacagccgcccacacgcctgcagcccctcacggtgtccccgctggctgagcaacgacacctctcagcctcggcctcgcacagaatggtggcagccgccgcagcgggcgtggaaggatggaggagtctatacgcctaacacactcagaatgctggcaggcgcgcggtcacacccgagatcctagcactactggagatcgaggcgagacgatcgcttagggccggggttcaggaccaccctgggtgacacagcaagacctgcctccaaaataaaaaccaaccgcccccgagggcaggcccagggcctccgcagccggcgggagactcacccacgggggagatctgctggaagatgttgttcacggggagtccctccttgcgcagggaccagcactccacgatgctgctggtctggctggacgcgcacaaaagcacctgcgggggaggtgggggtgagggctgacccggcactgctgtgg

SEQ ID NO: 324734 - DNA, 1199 bp, Homo sapiens
  chr19:885112-886311
  hypo
gtctcttcagccacgcctgcccctcgggccctcctggattccagcccaggcctgtccccagagcccaacatccactcacaggaacgcaaatgtccccggatggtgccctcccacagggacagcaaagggacacagggaaccaagtcaggggcttcaaggagtttggggcgttactgattcctaattacaacaggaatccaggcgacctggtgtggtcggctcaacagtggcccccagaacatcccatcctcagccctaggaccggtggctgggccgcctctcacagagaagggacctgcgggtgggattcggttcgggacactgagacgggagagcacgttggggggggtccgggggccccagtgtcctcacagggtcctcaggagagaatgtgggaggttgagattcagagacaggaagaggctgcgctgtggccacgaagcgggaggaaggcgccccgaaccgagggattgggcgcctccagatgctgggaaaggcagaaaatgggttctcccctggagcccccgggagggaccggccctgcccacaccacggtttagcccgtggaggcccgcgcgggtctccacccccaggaccctgagaagcagtgcttcattccaagcctgccagcccacgtgatggcctgcgcccgttcacctgctccgacatgtcccgggccaggaacttgaggtgggtgatggcgggaaacttgtccttgcggttgaggtcggtggtgcagcgcatgaacagggagggcaggatctccgtgtcgatacggcacttctcgctcaccacgctcacgcacaccttgtagaactgcacgggcgacgcgctgctgccgtccgccgtggccaccacgatgttgccgccgccggtgaaggcgatgtcggccagggccacgcggccgcgcagccggcacaggctctcggtggacgtcagcacctgcccgctgggcttcagcagggacacggtgaccaggccgctgaccgtcaccgcgatccagccctccatgggcttgccgccgaacagcgtgagcgacggtgagaacttgactcgggagaacttctccccgaagctggaggcgcccgactgtggagaagggagggagggaggaggggccgctcaggctcatgggggctgccccatgacccccagaaacacgcgcacagaagaaccacgcagaagccaggagtgtgtgc

SEQ ID NO: 324735 - DNA, 69 bp, Homo sapiens
  chr19:891447-891516
  hypo
ggcacagccgggagacgcagcggagggtctgcgctggcccaggtgagtgatgatgggggcagcaagtgg

SEQ ID NO: 324736 - DNA, 508 bp, Homo sapiens; identical to SEQ ID NO: 272627
  chr19:898612-899120
  hypo

SEQ ID NO: 324737 - DNA, 532 bp, Homo sapiens; identical to SEQ ID NO: 272628
  chr19:899627-900159
  hypo

SEQ ID NO: 324738 - DNA, 188 bp, Homo sapiens; identical to SEQ ID NO: 218759
  chr19:901066-901254
  hypo

SEQ ID NO: 324739 - DNA, 33 bp, Homo sapiens; identical to SEQ ID NO: 272630
  chr19:927379-927412
  hypo

SEQ ID NO: 324740 - DNA, 50 bp, Homo sapiens; identical to SEQ ID NO: 272631
  chr19:927524-927574
  hypo

SEQ ID NO: 324741 - DNA, 329 bp, Homo sapiens; identical to SEQ ID NO: 218760
  chr19:932112-932441
  hypo

SEQ ID NO: 324742 - DNA, 71 bp, Homo sapiens; identical to SEQ ID NO: 218761
  chr19:932471-932542
  hypo

SEQ ID NO: 324743 - DNA, 587 bp, Homo sapiens; identical to SEQ ID NO: 272634
  chr19:938279-938866
  hypo

SEQ ID NO: 324744 - DNA, 246 bp, Homo sapiens
  chr19:939434-939680
  hypo
tccagaagtaacacttgacactcttcttgcagagaggaagaaaatggaacgtttacagggagccccgagtccctcccttgacctctagggcatgagccgcatgttctccaggcctttctctgcccactcacacccaggaatgtgacctgggaggtatctaacgtgtgatcttccgggcaggtcgggaggttcctcccgccgctgccttcgaggagctgtttatcttgggtgcgttcgcgtcgtaat

SEQ ID NO: 324745 - DNA, 777 bp, Homo sapiens; identical to SEQ ID NO: 205070
  chr19:941804-942581
  hypo

SEQ ID NO: 324746 - DNA, 228 bp, Homo sapiens; identical to SEQ ID NO: 293236
  chr19:942807-943035
  hypo

SEQ ID NO: 324747 - DNA, 197 bp, Homo sapiens; identical to SEQ ID NO: 218765
  chr19:944444-944641
  hypo

SEQ ID NO: 324748 - DNA, 77 bp, Homo sapiens; identical to SEQ ID NO: 218766
  chr19:944821-944898
  hypo

SEQ ID NO: 324749 - DNA, 132 bp, Homo sapiens; identical to SEQ ID NO: 272640
  chr19:945357-945489
  hypo

SEQ ID NO: 324750 - DNA, 262 bp, Homo sapiens
  chr19:945737-945999
  hypo
tgtggggacggcgtcgacatggccggggcaggcgtgttctggccccttgcactgcccggctcctgctgctggtgctgggctgcgtttctgttcagagaacctgggctgggagtgatgggaccgcagtctcccaccaggtgcctctttccaaatggacactcctgctgggcatgacacttctgaggctttctgggaccgtccaggtcccgtctgcagggaaccccaggacggagttaattgctgagtgcccagctctgggcaa

SEQ ID NO: 324751 - DNA, 135 bp, Homo sapiens
  chr19:946112-946247
  hypo
ctggccggtctggggggcggggaccctgtacagaacgccccggccgcgtggagtggcaggttcgtcactgcctgggggaggagaacactgggtatttcatttttatttttttgttttttttacttttactttttc

SEQ ID NO: 324752 - DNA, 89 bp, Homo sapiens; identical to SEQ ID NO: 218767
  chr19:956638-956727
  hypo

SEQ ID NO: 324753 - DNA, 60 bp, Homo sapiens
  chr19:957401-957461
  hypo
tcctcacctgcaaagcagagccagttctcggaacaaatgcgctcccgtccgaccctcagg

SEQ ID NO: 324754 - DNA, 85 bp, Homo sapiens; identical to SEQ ID NO: 272645
  chr19:959193-959278
  hypo

SEQ ID NO: 324755 - DNA, 69 bp, Homo sapiens
  chr19:959518-959587
  hypo
cacccgcctcccaaggtgctgggattacaggtgtgagccgccaccctgaagagaagttggttttggact

SEQ ID NO: 324756 - DNA, 41 bp, Homo sapiens
  chr19:959802-959843
  hypo
ggttcccgggcccctggaccgggagaggacactgtcttgtc

SEQ ID NO: 324757 - DNA, 48 bp, Homo sapiens; identical to SEQ ID NO: 272647
  chr19:962810-962858
  hypo

SEQ ID NO: 324758 - DNA, 313 bp, Homo sapiens; identical to SEQ ID NO: 272648
  chr19:962888-963201
  hypo

SEQ ID NO: 324759 - DNA, 219 bp, Homo sapiens; identical to SEQ ID NO: 272649
  chr19:966707-966926
  hypo

SEQ ID NO: 324760 - DNA, 257 bp, Homo sapiens; identical to SEQ ID NO: 272650
  chr19:968535-968792
  hypo

SEQ ID NO: 324761 - DNA, 81 bp, Homo sapiens; identical to SEQ ID NO: 218768
  chr19:994442-994523
  hypo

SEQ ID NO: 324762 - DNA, 160 bp, Homo sapiens; identical to SEQ ID NO: 293239
  chr19:1000337-1000497
  hypo

SEQ ID NO: 324763 - DNA, 370 bp, Homo sapiens; identical to SEQ ID NO: 293240
  chr19:1000630-1001000
  hypo

SEQ ID NO: 324764 - DNA, 52 bp, Homo sapiens; identical to SEQ ID NO: 272653
  chr19:1004379-1004431
  hypo

SEQ ID NO: 324765 - DNA, 57 bp, Homo sapiens; identical to SEQ ID NO: 272654
  chr19:1004461-1004518
  hypo

SEQ ID NO: 324766 - DNA, 227 bp, Homo sapiens
  chr19:1004548-1004775
  hypo
gcacgggccccgtgtgggtgacaggcagctcccaggtacacatgtctcggcactttaaggtgtggagccttcgccgggacccacggggcgccccggcctgggccacggtgggcagctggcgggacggccagctggacttggaaccgggaggtgcctctgcacggcccccgcccccacagggtgcccaggtctggcccaagctgcgtgtggtaacgctgttggaacac

SEQ ID NO: 324767 - DNA, 279 bp, Homo sapiens; identical to SEQ ID NO: 218770
  chr19:1005441-1005720
  hypo

SEQ ID NO: 324768 - DNA, 401 bp, Homo sapiens
  chr19:1007203-1007604
  hypo
gacagagctgcctccgcctggggtgggaagagcgagtgggggcagatcaggagtggggtcatggacatgttagagtggggctcccgtgggacccccaggggagaggcagaggaggtggtgggataggcgtccagcccagggcgaggtccaggtggagatggacttgccggcgtttagaacagagggtctccacccggggtgatcctgccccccgccccaggggaccctggacagtgtgtgtctagagacagctgtggtggtcacgcctggggtgtgctctgggcatggagtgggtggaggccaggaatgcagcctcggcgccctgcagtgcccaggacggccccaccccggagaacggcgcgcccctcaatggtcaggggtcctgaggggcaggcagaggc

SEQ ID NO: 324769 - DNA, 243 bp, Homo sapiens
  chr19:1007665-1007908
  hypo
tgggagagcagcgccgaggcgtacatcaagaagagcttccccgacatgcacgcacacatgcggcgccacagcgcgcccaccacgccccgcggcgtcgccatgctcacgtgagcccgggcgcggggtgaggcgggggcggggcgtggggtgggcggggcgatggctgacccccgcccccggccccagcaggagcgacccccccaagctcaacgccttcatcatggacaagtcgctcctggacta

SEQ ID NO: 324770 - DNA, 360 bp, Homo sapiens
  chr19:1007941-1008301
  hypo
gaccgtgggaaagcccttcgccattgagggtgagaggcacctgggcgaggcggggcgccggggtctctggggacctcctgggggcagtggggagccacggagggttcgaggtgggaaggggcgaaatcccacgtgtgcgggcagagttcccctggggctgtcccacctggccccaccgcctggccccgcgcccccaggctatgggatcggactgccccagaactcgccgctcacctccaacctgtccgagttcatcagccgctacaagtcctccggcttcatcgacctgctccacgacaagtggtacaagatggtgccttgcggcaagcgggtctttgcggttacagaggtggggcaggg

SEQ ID NO: 324771 - DNA, 370 bp, Homo sapiens; identical to SEQ ID NO: 272657
  chr19:1009749-1010119
  hypo

SEQ ID NO: 324772 - DNA, 173 bp, Homo sapiens; identical to SEQ ID NO: 272658
  chr19:1010992-1011165
  hypo

SEQ ID NO: 324773 - DNA, 143 bp, Homo sapiens; identical to SEQ ID NO: 218772
  chr19:1030225-1030368
  hypo

SEQ ID NO: 324774 - DNA, 123 bp, Homo sapiens; identical to SEQ ID NO: 218773
  chr19:1032230-1032353
  hypo

SEQ ID NO: 324775 - DNA, 113 bp, Homo sapiens; identical to SEQ ID NO: 218774
  chr19:1032383-1032496
  hypo

SEQ ID NO: 324776 - DNA, 78 bp, Homo sapiens; identical to SEQ ID NO: 272662
  chr19:1033554-1033632
  hypo

SEQ ID NO: 324777 - DNA, 35 bp, Homo sapiens; identical to SEQ ID NO: 218775
  chr19:1035214-1035249
  hypo

SEQ ID NO: 324778 - DNA, 257 bp, Homo sapiens; identical to SEQ ID NO: 218776
  chr19:1047460-1047717
  hypo

SEQ ID NO: 324779 - DNA, 89 bp, Homo sapiens; identical to SEQ ID NO: 218777
  chr19:1047747-1047836
  hypo

SEQ ID NO: 324780 - DNA, 181 bp, Homo sapiens; identical to SEQ ID NO: 218778
  chr19:1048856-1049037
  hypo

SEQ ID NO: 324781 - DNA, 212 bp, Homo sapiens; identical to SEQ ID NO: 272667
  chr19:1050963-1051175
  hypo

SEQ ID NO: 324782 - DNA, 261 bp, Homo sapiens; identical to SEQ ID NO: 272669
  chr19:1055085-1055346
  hypo

SEQ ID NO: 324783 - DNA, 162 bp, Homo sapiens; identical to SEQ ID NO: 225704
  chr19:1071620-1071782
  hypo

SEQ ID NO: 324784 - DNA, 480 bp, Homo sapiens; identical to SEQ ID NO: 272670
  chr19:1077669-1078149
  hypo

SEQ ID NO: 324785 - DNA, 982 bp, Homo sapiens
  chr19:1079728-1080710
  hypo
acctgcgtggccgacgcgaagacgcagaagcaggagctggaggataccaaggtgacggcgctgcggcagatccaggaggtcatccggcagagcgaccaaaccatcaagtcggtgcgtggggtgctccggccgcccgggcggggatggtggaccgggcggcctcctcctgacccctccgctctccggtgccgcccgcaggccacgatctcctactaccagatgatgcatatgcagacggcgccgctgcccgtgcacttccagatgctgtgtgagagcagcaagctgtatgacccaggccagcagtacgcctcccacgtgcgccagctgcagcgggaccaggagcccgatgtgcactacgactttgagccccacgtctccgccaacgcctggtaccgccacccagctgccctgtccccggcgcacaaggccctgcctgggagccgggcttccctctgtcgggggcatgaagatgaagctgtcttgccccccatcacctcccctccttttcccggtttcttccactaggtcccccgtcatgcgtgcccggaagagcagcttcaacgtgagtgatgtggcgcggccggaggctgccgggagccccccagaagaaggcgggtgcactgagggcacacctgccaaggaccacaggggtgagtgtccggcggggcccaggggcggacgctggctccctgcgacccaccctggcccttcaccagagacgcctctttctccagccgggcgaggacaccaggttcacaagtcatggccgctctcgatctcagactcggacagtgggctggaccccggccctggcgcaggtgagggaggctctctggcgggctggggtgtggagctgcctcctctcctgagcctcagggtttcatcacccaccggggtgatggagggggcccccctggctgggggagtctgaacagtcctgattcccgcccaggggactttaagaagttcgagcggacgtcat

SEQ ID NO: 324786 - DNA, 31 bp, Homo sapiens
  chr19:1080746-1080777
  hypo
acccagacggtggagccggggcttcagcctt

SEQ ID NO: 324787 - DNA, 35 bp, Homo sapiens
  chr19:1082938-1082973
  hypo
gccggcaggacggctcggagagcgaggcagtggcg

SEQ ID NO: 324788 - DNA, 305 bp, Homo sapiens
  chr19:1083009-1083314
  hypo
gacctgccgcctgagaaccgggcctcgctgcagtacctgctgcgtcacctacgcaggtgagtcccggcatatggagtggagggcgcggggtcccgggagccgctcagcacctggcccctgcccaccccgcaggatcgtggaggtggagcaggacaacaagatgacccccgggaacctgggcatcgtgttcgggcccacgctgcttcggccacggcccaccgaggccaccgtgtccctctcctccctggtggattatccccatcaggcccgcgtcatcgagactctcatcgtccactacggcctgg

SEQ ID NO: 324789 - DNA, 67 bp, Homo sapiens; identical to SEQ ID NO: 272673
  chr19:1084544-1084611
  hypo

SEQ ID NO: 324790 - DNA, 43 bp, Homo sapiens; identical to SEQ ID NO: 272674
  chr19:1089505-1089548
  hypo

SEQ ID NO: 324791 - DNA, 244 bp, Homo sapiens; identical to SEQ ID NO: 272675
  chr19:1090868-1091112
  hypo

SEQ ID NO: 324792 - DNA, 126 bp, Homo sapiens
  chr19:1105727-1105853
  hypo
gatctgcgtgaacggggacgacgcccacccgctgtggaagtggatgaagatccaacccaagggcaagggcatcctgggaaagtgcgtgacctctggggacagtacggctgctggggtgggggtggg

SEQ ID NO: 324793 - DNA, 1522 bp, Homo sapiens; identical to SEQ ID NO: 272677
  chr19:1108138-1109660
  hypo

SEQ ID NO: 324794 - DNA, 184 bp, Homo sapiens; identical to SEQ ID NO: 272678
  chr19:1110422-1110606
  hypo

SEQ ID NO: 324795 - DNA, 304 bp, Homo sapiens
  chr19:1111949-1112253
  hypo
cccctgcccctgccccgccccccaaccctgccttccctgcagtaccttgttctcaaagttgtacttgctgaggtcacgggactccgtggcgcggcggtctccgtgggtcagggccccctgccaggggtggggaggccatcagttggtcacctggggtctggcctctagcaccccacaaagctttggagagccttcctgggcctgtccctggttctcagccccacccccacctgctcaccagactctccaggcgcttggccacgatggaggcgaaccggcgctccccggccagctccgagatgag

SEQ ID NO: 324796 - DNA, 311 bp, Homo sapiens; identical to SEQ ID NO: 218785
  chr19:1117275-1117586
  hypo

SEQ ID NO: 324797 - DNA, 335 bp, Homo sapiens; identical to SEQ ID NO: 218786
  chr19:1128101-1128436
  hypo

SEQ ID NO: 324798 - DNA, 221 bp, Homo sapiens; identical to SEQ ID NO: 272683
  chr19:1133596-1133817
  hypo

SEQ ID NO: 324799 - DNA, 35 bp, Homo sapiens; identical to SEQ ID NO: 272684
  chr19:1133847-1133882
  hypo

SEQ ID NO: 324800 - DNA, 91 bp, Homo sapiens
  chr19:1156123-1156214
  hypo
agcagcaggggccctgagctcgcctgtgtccgagtcccctaggccagcacggtgctcctggcagctcctccctccctacggtctctgagcc

SEQ ID NO: 324801 - DNA, 241 bp, Homo sapiens
  chr19:1156283-1156524
  hypo
gagggcttcacacatggcatgtgacctggagtccatgccttggggacctggcagggtgtggagacctggaccgggaggggatgggggcaggagaacaatgcggacaccaggcacaaccaaccaagagtcagggcccaaaaccaggaggcggaggcggaggcggatcctcacacacggctgcttggcagtctgggattcctcaagaggctaacgctggagtcaccacaccaccgagcaattc

SEQ ID NO: 324802 - DNA, 131 bp, Homo sapiens; identical to SEQ ID NO: 218788
  chr19:1156628-1156759
  hypo

SEQ ID NO: 324803 - DNA, 358 bp, Homo sapiens; identical to SEQ ID NO: 218789
  chr19:1166850-1167208
  hypo

SEQ ID NO: 324804 - DNA, 50 bp, Homo sapiens; identical to SEQ ID NO: 272687
  chr19:1167628-1167678
  hypo

SEQ ID NO: 324805 - DNA, 670 bp, Homo sapiens
  chr19:1169515-1170185
  hypo
tgcagcattccctgcccctccgaagcagtgagtggttcaggggcagagctgggcctgggcgaggggcccccggggggtggggtgatgccatcactgttgccgtcctacgggttgagacaggacagctgcccatcaccccttgatgcaagctggctgcaggctgcctgaccagttcccggggacaccgtgctcaaccctgtggtgacaactggggattccgaaggacagggaggtcttactttctgttaaacacttttattttccctgagatacaatccacaccaggaggggcacctgtccggagcatatgactcaacggtttcaacgtattctaaggcagaccaccacagcttctaattccaaaacattccgctcccccaaaacacagccgtgtccccaacagcagtcactcccccgcctctacagcccctgcaaccacacgcccacttctcttctgtggactggcctgctctggacacgtgaccacacgtctaccccccatctgtggactgccctgctctgcacacgtcacatgaacggagtcacgtgccgtggccttttgcgtctggcgtctctccgcaagcacgtctccgcagagcatccatgccgggcgcacagacgacagatctaatctccgcctcctcacggggcccaggaggcccagggcgag

SEQ ID NO: 324806 - DNA, 33 bp, Homo sapiens; identical to SEQ ID NO: 218791
  chr19:1170230-1170263
  hypo

SEQ ID NO: 324807 - DNA, 103 bp, Homo sapiens; identical to SEQ ID NO: 218792
  chr19:1170965-1171068
  hypo

SEQ ID NO: 324808 - DNA, 442 bp, Homo sapiens; identical to SEQ ID NO: 218793
  chr19:1171422-1171864
  hypo

SEQ ID NO: 324809 - DNA, 225 bp, Homo sapiens; identical to SEQ ID NO: 272691
  chr19:1172305-1172530
  hypo

SEQ ID NO: 324810 - DNA, 365 bp, Homo sapiens; identical to SEQ ID NO: 225705
  chr19:1173036-1173401
  hypo

SEQ ID NO: 324811 - DNA, 33 bp, Homo sapiens; identical to SEQ ID NO: 225706
  chr19:1173617-1173650
  hypo

SEQ ID NO: 324812 - DNA, 267 bp, Homo sapiens; identical to SEQ ID NO: 218795
  chr19:1178810-1179077
  hypo

SEQ ID NO: 324813 - DNA, 103 bp, Homo sapiens; identical to SEQ ID NO: 218796
  chr19:1179315-1179418
  hypo

SEQ ID NO: 324814 - DNA, 95 bp, Homo sapiens; identical to SEQ ID NO: 272694
  chr19:1182347-1182442
  hypo

SEQ ID NO: 324815 - DNA, 968 bp, Homo sapiens; identical to SEQ ID NO: 293247
  chr19:1206691-1207659
  hypo

SEQ ID NO: 324816 - DNA, 76 bp, Homo sapiens; identical to SEQ ID NO: 218797
  chr19:1213519-1213595
  hypo

SEQ ID NO: 324817 - DNA, 309 bp, Homo sapiens; identical to SEQ ID NO: 272697
  chr19:1223561-1223870
  hypo

SEQ ID NO: 324818 - DNA, 217 bp, Homo sapiens; identical to SEQ ID NO: 218798
  chr19:1226470-1226687
  hypo

SEQ ID NO: 324819 - DNA, 328 bp, Homo sapiens; identical to SEQ ID NO: 218799
  chr19:1226828-1227156
  hypo

SEQ ID NO: 324820 - DNA, 232 bp, Homo sapiens; identical to SEQ ID NO: 218800
  chr19:1227659-1227891
  hypo

SEQ ID NO: 324821 - DNA, 1660 bp, Homo sapiens
  chr19:1228172-1229832
  hypo
tgcgctctcgggtcaccctgctttggcggcccggccggagggcaggaccctcacctctcccccaaggccactgcgctcttgggaccccagagaaaacccggagcaagcaggagtgtgcggtcaatatttatatcatccagaaaagaaaaacacgagaaacgccatcgcgggatggtgcagacgcggcggggactcggagggtgccgtgcgggcgaggccgcccaaatttggcaataaataaagcttgggaagcttggacctggccgtctgggttttgttcgcgtctcaacgtggatggggcggcagcggggcgggcgccgttgacatgcggagggcagtggggactcggggcgcgggagggccggggccggctccctcagggccggcggcagcagcggtggcggcgcggttattgctcggaggcggcgcgggctgccgccagcacacgccgcagtgaggtaaacggtctcggaggtcggcagtcacggtgttgagccgcctcccggcccagggcggcgaactcgtctgcgaccgttagcgccccgcggcccccgcccgggcgagctcgcgcacgcgcccggcacgcggcggctccatcgggcccagtgggctgcgcgaccctcgggtggcgggccctgcgactaagcggccgccccgtccgggactgagggcgagtgatcgttgtcctcaggagcccgaagctgagagccgttcacgccccttccttcccgcccagccggggtctccgcggcccgcgcctcacgacgcccagcacccggcaagcaccggaaagagcagtgcacacttcggcggcgcgagggcggccggggctctgcgcctgcgccctgaagcggcgagcgcgcctccgtcgcccggcgcgtgcgcgaagggcccgcggtccccgcgcattcgcgtcggggcgtcgcgcccccacgtctctcccgccgccgaggccccgtgcggcgccggagaagctgccagagagatgggcccaggacgcgggacttaggccgggctgtggtcgggggacgtgggggcggcggcgaccaacgcgggagtcgccacgacgggctcggcgaggcgcggcggaaagagtctctcgtcgaggccagccgccagcttgtccagcaccgacccggatggtaggacgcacaggcccgagccggggcaccccccgccgcccggctcctcctcgatgacggggatggcggggtcgtcgccggcgccgcccagggtgcgaccgtcgggcgggccgtccacgctgtcgccgcgccgcaagggcgcacgcgcgggtcgggccgcgccggcaggcggtgccggggttccggccagggccggggccgcgcgggcgccggggtcgctgtgctgccggccacgctgccactgtttgcgggcgtgcgggtgcgcgcgggcgcggtgtcgcgcggcagccggcgtgtcgtcgaagtgcgggtcgtggcgcaggaactcgtggaacagcgcgtccgtcttctcgtcgatgctgtagtcgcggcgcgggcggcggggccaggcgcgcgggctgcggggccgggcgggcgcggcaggtggctcggtgtcgtcgcctgcgccgcggccctcgatgctggcgtagccactgtccatctgcagcagccggcgcgcctcgccgtccttgggccgc

SEQ ID NO: 324822 - DNA, 389 bp, Homo sapiens
  chr19:1234516-1234905
  hypo
ccggggctgcctcccgtcccccgaggaaccggggctgctgcccataggctcacctggaagatggccagagtggccttgggagaggtggccgggtggggcgtggtggctgagctggcctcgcctgagtcacactcgtggatggtgacaatcttgaggggcggcaggtgcaggtgcgtgagccgggcattcttcaggtggtggaagtccccctccgtcagtgtgtacctgcgacagcatctggccatcagagcccgcccacctcccatgcccgatgccccagctgccgtgctctgccatccaccctgccggcctgggcaggggcaggcgaaaggggggcaactggccaaggccgccccaccccacggtcccagtccaggagcctctgcctt

SEQ ID NO: 324823 - DNA, 104 bp, Homo sapiens; identical to SEQ ID NO: 218803
  chr19:1235389-1235493
  hypo

SEQ ID NO: 324824 - DNA, 824 bp, Homo sapiens; identical to SEQ ID NO: 272703
  chr19:1254899-1255723
  hypo

SEQ ID NO: 324825 - DNA, 90 bp, Homo sapiens; identical to SEQ ID NO: 272704
  chr19:1256137-1256227
  hypo

SEQ ID NO: 324826 - DNA, 36 bp, Homo sapiens; identical to SEQ ID NO: 272706
  chr19:1277515-1277551
  hypo

SEQ ID NO: 324827 - DNA, 42 bp, Homo sapiens; identical to SEQ ID NO: 272707
  chr19:1280525-1280567
  hypo

SEQ ID NO: 324828 - DNA, 291 bp, Homo sapiens; identical to SEQ ID NO: 272708
  chr19:1288527-1288818
  hypo

SEQ ID NO: 324829 - DNA, 85 bp, Homo sapiens
  chr19:1289082-1289167
  hypo
cctggagtcgcatccggctgcaggttacatgtgtctgtgtgtggcaggaggctgcgtgaatccacagggcacagctctggcgtgt

SEQ ID NO: 324830 - DNA, 51 bp, Homo sapiens; identical to SEQ ID NO: 218805
  chr19:1296939-1296990
  hypo

SEQ ID NO: 324831 - DNA, 218 bp, Homo sapiens; identical to SEQ ID NO: 218806
  chr19:1297597-1297815
  hypo

SEQ ID NO: 324832 - DNA, 180 bp, Homo sapiens; identical to SEQ ID NO: 272712
  chr19:1304765-1304945
  hypo

SEQ ID NO: 324833 - DNA, 64 bp, Homo sapiens; identical to SEQ ID NO: 218807
  chr19:1308081-1308145
  hypo

SEQ ID NO: 324834 - DNA, 188 bp, Homo sapiens; identical to SEQ ID NO: 272714
  chr19:1310928-1311116
  hypo

SEQ ID NO: 324835 - DNA, 414 bp, Homo sapiens; identical to SEQ ID NO: 218808
  chr19:1312701-1313115
  hypo

SEQ ID NO: 324836 - DNA, 600 bp, Homo sapiens; identical to SEQ ID NO: 272718
  chr19:1333757-1334357
  hypo

SEQ ID NO: 324837 - DNA, 105 bp, Homo sapiens; identical to SEQ ID NO: 272719
  chr19:1334648-1334753
  hypo

SEQ ID NO: 324838 - DNA, 131 bp, Homo sapiens
  chr19:1340766-1340897
  hypo
gtctcaaaaacaaaaacaaggaaaacactccagcccccacaccagcacggggactgcagcgcccgcgagacttgggtcacggtgactcctggaggctttgcacgttaagccgccgcctgcccagggacact

SEQ ID NO: 324839 - DNA, 54 bp, Homo sapiens
  chr19:1340982-1341036
  hypo
cctgggttgtcctgcagaataggacaccctccttcattacgatagaggatgcag

SEQ ID NO: 324840 - DNA, 268 bp, Homo sapiens; identical to SEQ ID NO: 218809
  chr19:1360025-1360293
  hypo

SEQ ID NO: 324841 - DNA, 730 bp, Homo sapiens; identical to SEQ ID NO: 218810
  chr19:1370778-1371508
  hypo

SEQ ID NO: 324842 - DNA, 180 bp, Homo sapiens; identical to SEQ ID NO: 272724
  chr19:1373035-1373215
  hypo

SEQ ID NO: 324843 - DNA, 453 bp, Homo sapiens; identical to SEQ ID NO: 272725
  chr19:1386825-1387278
  hypo

SEQ ID NO: 324844 - DNA, 358 bp, Homo sapiens; identical to SEQ ID NO: 272726
  chr19:1388331-1388689
  hypo

SEQ ID NO: 324845 - DNA, 331 bp, Homo sapiens; identical to SEQ ID NO: 272727
  chr19:1393938-1394269
  hypo

SEQ ID NO: 324846 - DNA, 47 bp, Homo sapiens; identical to SEQ ID NO: 293254
  chr19:1401653-1401700
  hypo

SEQ ID NO: 324847 - DNA, 141 bp, Homo sapiens; identical to SEQ ID NO: 272728
  chr19:1403846-1403987
  hypo

SEQ ID NO: 324848 - DNA, 161 bp, Homo sapiens; identical to SEQ ID NO: 272729
  chr19:1416664-1416825
  hypo

SEQ ID NO: 324849 - DNA, 195 bp, Homo sapiens; identical to SEQ ID NO: 272730
  chr19:1423006-1423201
  hypo

SEQ ID NO: 324850 - DNA, 250 bp, Homo sapiens; identical to SEQ ID NO: 272731
  chr19:1423980-1424230
  hypo

SEQ ID NO: 324851 - DNA, 327 bp, Homo sapiens; identical to SEQ ID NO: 272732
  chr19:1424660-1424987
  hypo

SEQ ID NO: 324852 - DNA, 413 bp, Homo sapiens; identical to SEQ ID NO: 272733
  chr19:1425396-1425809
  hypo

SEQ ID NO: 324853 - DNA, 151 bp, Homo sapiens; identical to SEQ ID NO: 272734
  chr19:1430408-1430559
  hypo

SEQ ID NO: 324854 - DNA, 215 bp, Homo sapiens; identical to SEQ ID NO: 272735
  chr19:1432575-1432790
  hypo

SEQ ID NO: 324855 - DNA, 97 bp, Homo sapiens; identical to SEQ ID NO: 293257
  chr19:1446334-1446431
  hypo

SEQ ID NO: 324856 - DNA, 40 bp, Homo sapiens; identical to SEQ ID NO: 293258
  chr19:1447079-1447119
  hypo

SEQ ID NO: 324857 - DNA, 133 bp, Homo sapiens; identical to SEQ ID NO: 205075
  chr19:1449908-1450041
  hypo

SEQ ID NO: 324858 - DNA, 180 bp, Homo sapiens
  chr19:1461033-1461213
  hypo
aggtggtgtccagcatccttcggaacttgtcctggagggccgacatcaacagcaagaaggtgctgagggaggcgggcagcgtgactgccctggtgcagtgtgtcctgcgggccaccaaggtgggcacccggtgggcggcagggatgcttcttcagtcactggaaggagactgctggcggc

SEQ ID NO: 324859 - DNA, 117 bp, Homo sapiens
  chr19:1461243-1461360
  hypo
tcaagttgaacagctcactgcttagcgggtggtccagcctcagaccggctggggctcactcctcatgtcactgctctttgaaagcaaatgtgggctgggcgccgtggctcacttgag

SEQ ID NO: 324860 - DNA, 54 bp, Homo sapiens
  chr19:1482826-1482880
  hypo
gctccagagcccctggggggaggttggagagccaagccccgcccaccacagccc

SEQ ID NO: 324861 - DNA, 668 bp, Homo sapiens; identical to SEQ ID NO: 272738
  chr19:1482910-1483578
  hypo

SEQ ID NO: 324862 - DNA, 264 bp, Homo sapiens; identical to SEQ ID NO: 205080
  chr19:1491116-1491380
  hypo

SEQ ID NO: 324863 - DNA, 47 bp, Homo sapiens
  chr19:1494954-1495001
  hypo
ttacaggtgtgagccaccgcgcccggctgcaaacacttcactgggca

SEQ ID NO: 324864 - DNA, 178 bp, Homo sapiens
  chr19:1495400-1495578
  hypo
ggctgcccacgcggggggttctgggggctccctggcagcccctgaccctgctgcaccctccctgcagaatcaaagctatcgagagcccaagcaaggacgacgacactgtgtggctcacctactgggtggtgtacgccctgtttgggctggccgagttcttcagcgatctactcctgtc

SEQ ID NO: 324865 - DNA, 58 bp, Homo sapiens; identical to SEQ ID NO: 218817
  chr19:1496674-1496732
  hypo

SEQ ID NO: 324866 - DNA, 243 bp, Homo sapiens; identical to SEQ ID NO: 272741
  chr19:1506027-1506270
  hypo

SEQ ID NO: 324867 - DNA, 183 bp, Homo sapiens; identical to SEQ ID NO: 205082
  chr19:1546217-1546400
  hypo

SEQ ID NO: 324868 - DNA, 57 bp, Homo sapiens; identical to SEQ ID NO: 272743
  chr19:1546766-1546823
  hypo

SEQ ID NO: 324869 - DNA, 33 bp, Homo sapiens; identical to SEQ ID NO: 218819
  chr19:1555127-1555160
  hypo

SEQ ID NO: 324870 - DNA, 42 bp, Homo sapiens
  chr19:1565849-1565891
  hypo
tctagaagctctcagcctgacgctgattcctgccagctcccc

SEQ ID NO: 324871 - DNA, 135 bp, Homo sapiens
  chr19:1565953-1566088
  hypo
cagccacagcctccaccacctggaggctcaggctcgtgcctttggtcacttggtccccaggcctcggcttggacgcctgtctccacaggctcccagacactccgcacagggcagctgtcccgttctaggccctgg

SEQ ID NO: 324872 - DNA, 104 bp, Homo sapiens; identical to SEQ ID NO: 225714
  chr19:1568463-1568567
  hypo

SEQ ID NO: 324873 - DNA, 227 bp, Homo sapiens
  chr19:1577427-1577654
  hypo
cgaggcaggggggccggctggcagtggagcattctggcagcgccgggcgaccaagtcccgactggcagcggctggagtttggttttcagaagcgaaggctggcgttggcacacagggaaggctgcccgatgacgtgcctcgactgtgttacatttactgaaggagagcggcctcctgggcatgccactcaggcacggtgaggctctgtggcaccaccagccgcatgg

SEQ ID NO: 324874 - DNA, 547 bp, Homo sapiens
  chr19:1577687-1578234
  hypo
ccacagcagaccagagtcccgtcctcacgctgcacagtgggtgatgtgagtttcaaaactacgcctccagaccgagaaaccctcccagctgtcagcaagccgtggcgccgagctgccgggcacctgctggctgctctccagtctcaaggagctgggacagcgggcatggggaggagctggcctcgagcccaaaggtcgtagggagccaggcagggcccaggagcacccggcacttcccgaagccggactctgtagaggacgagcgtggagggtctttcgggtgggggcagccccagctgtgtgccccgaggccccgggaagtggggacgggccgaggagggagccaggagcacggccttcctcctgggtgtctccaaggctgggcttcgccgccgagcctggttcacgtggggccgaggaccgcgtctgcaggcggctccagcaggcagcacgggctctcggcagggcctctggaaaggacagggagggctggctttagcgactccacgggacggggacgcttgggctcttctagggagatgggaag

SEQ ID NO: 324875 - DNA, 342 bp, Homo sapiens
  chr19:1578503-1578845
  hypo
cttccgcacctgctgcaccagctcttcctgcttcctggggacacatggaccttgcgttacaccaaggtgagcggccagcaggacatggacacaggatgaacgtggggacctcagctgggaggggaggcccgagggatccacaggcacccccccaggaccagccctggcccgtgccacccctcccttcacaatccacgcagagaatgaccggctgccgctggccatcgccagcgtccgccaccctcccagatggcccccctgccacctctactgggaccaagggaggggcctgacccttcagtccccagacttggccctgagcctccccggggctcagctgtg

SEQ ID NO: 324876 - DNA, 68 bp, Homo sapiens; identical to SEQ ID NO: 218821
  chr19:1579338-1579406
  hypo

SEQ ID NO: 324877 - DNA, 51 bp, Homo sapiens; identical to SEQ ID NO: 272748
  chr19:1579659-1579710
  hypo

SEQ ID NO: 324878 - DNA, 165 bp, Homo sapiens; identical to SEQ ID NO: 272749
  chr19:1612194-1612359
  hypo

SEQ ID NO: 324879 - DNA, 170 bp, Homo sapiens; identical to SEQ ID NO: 218822
  chr19:1612624-1612794
  hypo

SEQ ID NO: 324880 - DNA, 262 bp, Homo sapiens; identical to SEQ ID NO: 218823
  chr19:1617230-1617492
  hypo

SEQ ID NO: 324881 - DNA, 391 bp, Homo sapiens; identical to SEQ ID NO: 272752
  chr19:1638548-1638939
  hypo

SEQ ID NO: 324882 - DNA, 90 bp, Homo sapiens; identical to SEQ ID NO: 272753
  chr19:1665100-1665190
  hypo

SEQ ID NO: 324883 - DNA, 44 bp, Homo sapiens
  chr19:1673103-1673147
  hypo
agaggctgtgacatgttcgctcgttgccacgagctcaggtgtgt

SEQ ID NO: 324884 - DNA, 141 bp, Homo sapiens
  chr19:1729049-1729190
  hypo
tgtgtgcgcctgtgcgtgttcgtgtgtgtttgtgtgtgtgcatgcgtgtgagagggtgcactcagcggctgtgcctttgtacacgtgtgaatgtgggtgtgagtgtgtaagtgctttgtgtgagcatgtggggggaaggac

SEQ ID NO: 324885 - DNA, 556 bp, Homo sapiens
  chr19:1729276-1729832
  hypo
gggatacacgcgtgttgtgtgtatatgtgtatgtgcatgtgtgtgtgcaggtgtgtacatattagtatgtgcagatcagtgcatacctacgtgtgtgttcctgtgtgcagatgtgcggccatttgagggtggcagtgcgcctgtgtgagtaggtacctaggacagcgtgcctgtgcatttgtatgtgagtgtgtgtgctgtttttgcacgcatgcaccggtgtgagggtgtgtgtgtatcggtgcacatctatgagcatgtcagtgtgtgtgagtggcagaaggtacacgggtgtgtacgtgcgtgtgtatacctgttcgtgtacctggcagtgtgtgggcatgtgcgggtgtgagggtgtgtgtgccggtgcacaccagtgtctgcacctgcgaccaccccgaccccgtgcccagccccctgaccctctcctgctgttctcactgcggggaaacgggtccaaccccaccactgaccccagctcatctcaggcctcccgtccacagccacttcctcaggagccctcctggacccgccagcccgggtctgaccccgg

SEQ ID NO: 324886 - DNA, 280 bp, Homo sapiens; identical to SEQ ID NO: 205085
  chr19:1748599-1748879
  hypo

SEQ ID NO: 324887 - DNA, 349 bp, Homo sapiens; identical to SEQ ID NO: 293279
  chr19:1748939-1749288
  hypo

SEQ ID NO: 324888 - DNA, 200 bp, Homo sapiens; identical to SEQ ID NO: 293280
  chr19:1749318-1749518
  hypo

SEQ ID NO: 324889 - DNA, 220 bp, Homo sapiens; identical to SEQ ID NO: 293281
  chr19:1749556-1749776
  hypo

SEQ ID NO: 324890 - DNA, 227 bp, Homo sapiens; identical to SEQ ID NO: 205087
  chr19:1754950-1755177
  hypo

SEQ ID NO: 324891 - DNA, 378 bp, Homo sapiens; identical to SEQ ID NO: 293287
  chr19:1755227-1755605
  hypo

SEQ ID NO: 324892 - DNA, 385 bp, Homo sapiens; identical to SEQ ID NO: 272756
  chr19:1785294-1785679
  hypo

SEQ ID NO: 324893 - DNA, 143 bp, Homo sapiens
  chr19:1805820-1805963
  hypo
gaagggggctcctccgggccatgctccccaccccccagggtccccagcgatgccacagctcctcacccgtcaatgtccaccgtctccacatagcacaggctgctgggctccgtgctggccagcaagagcatgtcggcctggtg

SEQ ID NO: 324894 - DNA, 265 bp, Homo sapiens
  chr19:1806028-1806293
  hypo
ccctgggaggggtgctctcggtgagggggcgcgtggttctgggacctcggggtcaaccccagctcactgggacgatgttgtccttgcggagacagaccacatcccccacgcacagatcctgccatttcttctgcttgaagctgcggggagagggggttgtgaaggaggcccctccctctgcaaaccctccccacaccgggagaccagaggcacgggatgacggggggcccgcagctgcagtccccacctccgggcctttgccccc

SEQ ID NO: 324895 - DNA, 66 bp, Homo sapiens
  chr19:1806323-1806389
  hypo
ctccccgcgggtccacgctcccacccagtgacctccagggtcctgcacccacgtcctcttcagact

SEQ ID NO: 324896 - DNA, 101 bp, Homo sapiens
  chr19:1807804-1807905
  hypo
gaccacccaggtaccgggaagtggctccacaggtcctgagaacatgctctgggctcctccttccccctcgcctctgaggtcagctgggagggcgggggcca

SEQ ID NO: 324897 - DNA, 64 bp, Homo sapiens; identical to SEQ ID NO: 272762
  chr19:1810965-1811029
  hypo

SEQ ID NO: 324898 - DNA, 517 bp, Homo sapiens; identical to SEQ ID NO: 272763
  chr19:1815903-1816420
  hypo

SEQ ID NO: 324899 - DNA, 363 bp, Homo sapiens; identical to SEQ ID NO: 218830
  chr19:1818538-1818901
  hypo

SEQ ID NO: 324900 - DNA, 175 bp, Homo sapiens; identical to SEQ ID NO: 218831
  chr19:1822372-1822547
  hypo

SEQ ID NO: 324901 - DNA, 238 bp, Homo sapiens; identical to SEQ ID NO: 272766
  chr19:1827067-1827305
  hypo

SEQ ID NO: 324902 - DNA, 530 bp, Homo sapiens; identical to SEQ ID NO: 272767
  chr19:1827338-1827868
  hypo

SEQ ID NO: 324903 - DNA, 170 bp, Homo sapiens; identical to SEQ ID NO: 293307
  chr19:1876315-1876485
  hypo

SEQ ID NO: 324904 - DNA, 156 bp, Homo sapiens; identical to SEQ ID NO: 130373
  chr19:1876538-1876694
  hypo

SEQ ID NO: 324905 - DNA, 57 bp, Homo sapiens; identical to SEQ ID NO: 218833
  chr19:1882112-1882169
  hypo

SEQ ID NO: 324906 - DNA, 205 bp, Homo sapiens; identical to SEQ ID NO: 218834
  chr19:1907661-1907866
  hypo

SEQ ID NO: 324907 - DNA, 262 bp, Homo sapiens
  chr19:1911825-1912087
  hypo
tggtaggtgaattatatcttcgtttttaaaaaccaatggctgtttaaactctgtgcacaccaggggttagcaggacatgagggagtgtagctctgatgcggtgacctgggccggagccctcggactagcctcagctttggtggcagcacgccctgccttgtggagccacggcctcccgggacggactccccggctctcccccagccgcccgcagccgccggatgatcctctgctcccgtctctgtctcccacagtcggcctc

SEQ ID NO: 324908 - DNA, 980 bp, Homo sapiens
  chr19:1912446-1913426
  hypo
gcggcctggggcaacccttcctggtgcccgtgcccgcccggccgcctctgaccaggggccagttcgaggaggcccgggcccactggcccacgtccttccacgaggacaagcaggtgaccagcgccctggctgggcggctcttctccacgcaggagcgcgccgccatgcagagccacatggagcgggcggtgtgggcggcccggcgggcagcagcgcggggcttgcgggccgtgggggccgtggtagtggacccggcctcggaccgcgtgctggccaccggccacgactgcagctgcgcggacaaccccctcctgcacgccgtcatggtgtgcgtggacctcgtggcgcgcggccagggccgcggcacctacgacttcagacccttccccgcctgctccttcgccccggccgctgccccccaggccgtccgcgcaggcgccgtgcgtaaactggacgcagacgaggacggcctcccctacctgtgcactggctacgacctgtacgtgacccgcgagccctgcgccatgtgcgccatggccctggtgcacgcacgcatcctgcgcgtcttctacggtgcgccctcgcccgacggcgccctgggcacccgcttccgcatccacgcacggcccgacctcaaccaccgcttccaggtgttccgcggggtgctggaggagcagtgccgctggctggaccccgacacgtaggcgccgccctcctgcctccggacccttcccgctcccggccgtggggcgcccctcctggacttccgggcctcgatttcttccgcacaagcctgaccgtggatttcagggacacataccgcctccagcggggagcacgggtgctgccttccgtgcggatcgagctttcctggactcggtcattggggccaccccgtgccagcggtgcccttctgcggccgcccttgctgcgtttgtgtcccctctgtctcgcgggccgggaaactgctctgatgggaa

SEQ ID NO: 324909 - DNA, 609 bp, Homo sapiens; identical to SEQ ID NO: 218836
  chr19:1913964-1914573
  hypo

SEQ ID NO: 324910 - DNA, 176 bp, Homo sapiens
  chr19:1914603-1914779
  hypo
gcggatgcgatggggtcttaggccctgcagcgttcaccttgtggcgcccaccccttgtgggctgaagccgggatttgggggacgcaggggcctaggacagcggggaaggggcatcctggctggggcggtgggtgggaggggctgcggccagccctgcccgttttgccagcatgggt

SEQ ID NO: 324911 - DNA, 305 bp, Homo sapiens; identical to SEQ ID NO: 272772
  chr19:1914809-1915114
  hypo

SEQ ID NO: 324912 - DNA, 88 bp, Homo sapiens; identical to SEQ ID NO: 218838
  chr19:1918818-1918906
  hypo

SEQ ID NO: 324913 - DNA, 92 bp, Homo sapiens; identical to SEQ ID NO: 218839
  chr19:1920122-1920214
  hypo

SEQ ID NO: 324914 - DNA, 799 bp, Homo sapiens; identical to SEQ ID NO: 272775
  chr19:1920872-1921671
  hypo

SEQ ID NO: 324915 - DNA, 221 bp, Homo sapiens; identical to SEQ ID NO: 272776
  chr19:1955298-1955519
  hypo

SEQ ID NO: 324916 - DNA, 748 bp, Homo sapiens; identical to SEQ ID NO: 272777
  chr19:1960885-1961633
  hypo

SEQ ID NO: 324917 - DNA, 259 bp, Homo sapiens
  chr19:1969652-1969911
  hypo
cccgcccaccggccgcagtgatgttctagccacagaggagccaagacctcaggtttccagagacttgggatttgcacggcagcagagtcaccgtggagaggccagggtatcacaaacttatggattttgacaagaaaggagggaaaggggagacggaggagggccggagaatgtccaaggccggcgggggccggagcagccacggcatccggagctcggggaccagctcgggggtcctgatggtgggccccaacttccg

SEQ ID NO: 324918 - DNA, 319 bp, Homo sapiens
  chr19:1970106-1970425
  hypo
ccgtcgtggtgcgagtgccacttcccttcgaggaggttctgtggggagagtgggtttctggccctgtcaccttttcgggaaacagttctgttgggaggcaggtggcccagagcaggccaggccacgccgcaaggagcccgatgttaagttgtgaatgactttcatggcccatgtgcacgctgggcgaagccccggctttaacggcaggtgcctgcccggcactcagctcgtgggaggtcttggccagcccggagctggcgtcaggtggctggagtgactgttctgtggtgatgatactgctgtgtgccactcccagctt

SEQ ID NO: 324919 - DNA, 182 bp, Homo sapiens; identical to SEQ ID NO: 272779
  chr19:1970824-1971006
  hypo

SEQ ID NO: 324920 - DNA, 318 bp, Homo sapiens; identical to SEQ ID NO: 218842
  chr19:1977028-1977346
  hypo

SEQ ID NO: 324921 - DNA, 246 bp, Homo sapiens; identical to SEQ ID NO: 218843
  chr19:1978009-1978255
  hypo

SEQ ID NO: 324922 - DNA, 119 bp, Homo sapiens; identical to SEQ ID NO: 205097
  chr19:1979018-1979137
  hypo

SEQ ID NO: 324923 - DNA, 283 bp, Homo sapiens; identical to SEQ ID NO: 272782
  chr19:1979736-1980019
  hypo

SEQ ID NO: 324924 - DNA, 152 bp, Homo sapiens; identical to SEQ ID NO: 272783
  chr19:1980883-1981035
  hypo

SEQ ID NO: 324925 - DNA, 329 bp, Homo sapiens; identical to SEQ ID NO: 218845
  chr19:1985877-1986206
  hypo

SEQ ID NO: 324926 - DNA, 202 bp, Homo sapiens
  chr19:1993286-1993488
  hypo
caggacccaaacacccacatcaggttccccgaggaaccttccagaattagcccctgtccgttgccctctgacatagggacacgacttggcaaggtggtcacccatgaaaacgagcaagaggctgaacccatctacacagcacacacccggaagcgtctatatggcctgtcttgttctgcccgggatgccccaggagagggca

SEQ ID NO: 324927 - DNA, 268 bp, Homo sapiens; identical to SEQ ID NO: 218846
  chr19:1999991-2000259
  hypo

SEQ ID NO: 324928 - DNA, 374 bp, Homo sapiens; identical to SEQ ID NO: 218847
  chr19:2000538-2000912
  hypo

SEQ ID NO: 324929 - DNA, 99 bp, Homo sapiens; identical to SEQ ID NO: 272789
  chr19:2005108-2005207
  hypo

SEQ ID NO: 324930 - DNA, 90 bp, Homo sapiens; identical to SEQ ID NO: 218848
  chr19:2038525-2038615
  hypo

SEQ ID NO: 324931 - DNA, 175 bp, Homo sapiens; identical to SEQ ID NO: 272791
  chr19:2041006-2041181
  hypo

SEQ ID NO: 324932 - DNA, 247 bp, Homo sapiens; identical to SEQ ID NO: 272792
  chr19:2046071-2046318
  hypo

SEQ ID NO: 324933 - DNA, 516 bp, Homo sapiens; identical to SEQ ID NO: 272793
  chr19:2079596-2080112
  hypo

SEQ ID NO: 324934 - DNA, 42 bp, Homo sapiens; identical to SEQ ID NO: 272794
  chr19:2080626-2080668
  hypo

SEQ ID NO: 324935 - DNA, 40 bp, Homo sapiens; identical to SEQ ID NO: 218850
  chr19:2088265-2088305
  hypo

SEQ ID NO: 324936 - DNA, 272 bp, Homo sapiens; identical to SEQ ID NO: 272796
  chr19:2097985-2098257
  hypo

SEQ ID NO: 324937 - DNA, 107 bp, Homo sapiens; identical to SEQ ID NO: 272797
  chr19:2113981-2114088
  hypo

SEQ ID NO: 324938 - DNA, 114 bp, Homo sapiens; identical to SEQ ID NO: 272798
  chr19:2115182-2115296
  hypo

SEQ ID NO: 324939 - DNA, 264 bp, Homo sapiens; identical to SEQ ID NO: 272799
  chr19:2116558-2116822
  hypo

SEQ ID NO: 324940 - DNA, 49 bp, Homo sapiens; identical to SEQ ID NO: 218851
  chr19:2120004-2120053
  hypo

SEQ ID NO: 324941 - DNA, 47 bp, Homo sapiens; identical to SEQ ID NO: 272801
  chr19:2122386-2122433
  hypo

SEQ ID NO: 324942 - DNA, 31 bp, Homo sapiens; identical to SEQ ID NO: 218852
  chr19:2136920-2136951
  hypo

SEQ ID NO: 324943 - DNA, 333 bp, Homo sapiens; identical to SEQ ID NO: 272803
  chr19:2140169-2140502
  hypo

SEQ ID NO: 324944 - DNA, 200 bp, Homo sapiens; identical to SEQ ID NO: 218854
  chr19:2148550-2148750
  hypo

SEQ ID NO: 324945 - DNA, 31 bp, Homo sapiens; identical to SEQ ID NO: 218855
  chr19:2160536-2160567
  hypo

SEQ ID NO: 324946 - DNA, 755 bp, Homo sapiens; identical to SEQ ID NO: 293312
  chr19:2164918-2165673
  hypo

SEQ ID NO: 324947 - DNA, 443 bp, Homo sapiens; identical to SEQ ID NO: 205099
  chr19:2168903-2169346
  hypo

SEQ ID NO: 324948 - DNA, 315 bp, Homo sapiens; identical to SEQ ID NO: 272806
  chr19:2176355-2176670
  hypo

SEQ ID NO: 324949 - DNA, 405 bp, Homo sapiens; identical to SEQ ID NO: 218858
  chr19:2182517-2182922
  hypo

SEQ ID NO: 324950 - DNA, 58 bp, Homo sapiens
  chr19:2191533-2191591
  hypo
cctgtgcaccctctactgctcgctcccagaagctgccactcgctagcctgggccccag

SEQ ID NO: 324951 - DNA, 95 bp, Homo sapiens
  chr19:2191691-2191786
  hypo
ggtccctgggctcccggaggccctcgcgccctccctgcatccccagtctccctcggcacccctgcgtctgggccgtgccctgcccctcccaggtt

SEQ ID NO: 324952 - DNA, 117 bp, Homo sapiens; identical to SEQ ID NO: 272809
  chr19:2204158-2204275
  hypo

SEQ ID NO: 324953 - DNA, 230 bp, Homo sapiens; identical to SEQ ID NO: 218859
  chr19:2213811-2214041
  hypo

SEQ ID NO: 324954 - DNA, 210 bp, Homo sapiens
  chr19:2214155-2214365
  hypo
gcctgggcccctcggctggatggtttctcagcggccctgggtgtcatggagccacactctggcaggctcgaggtgtggggtcatgcgagcatcccaccatcgtggtgtgggtgctggagctgcctcatctgtccgtggggggccccagtctccgcgtgttccgcatcctcagcctgctattccagaaacggggtctgtgccctaagcaca

SEQ ID NO: 324955 - DNA, 139 bp, Homo sapiens; identical to SEQ ID NO: 218860
  chr19:2215593-2215732
  hypo

SEQ ID NO: 324956 - DNA, 576 bp, Homo sapiens; identical to SEQ ID NO: 218861
  chr19:2216069-2216645
  hypo

SEQ ID NO: 324957 - DNA, 283 bp, Homo sapiens; identical to SEQ ID NO: 272814
  chr19:2219731-2220014
  hypo

SEQ ID NO: 324958 - DNA, 44 bp, Homo sapiens; identical to SEQ ID NO: 31774
  chr19:2222843-2222887
  hypo

SEQ ID NO: 324959 - DNA, 144 bp, Homo sapiens; identical to SEQ ID NO: 218863
  chr19:2224700-2224844
  hypo

SEQ ID NO: 324960 - DNA, 192 bp, Homo sapiens; identical to SEQ ID NO: 272817
  chr19:2229560-2229752
  hypo

SEQ ID NO: 324961 - DNA, 132 bp, Homo sapiens; identical to SEQ ID NO: 272818
  chr19:2232597-2232729
  hypo

SEQ ID NO: 324962 - DNA, 80 bp, Homo sapiens; identical to SEQ ID NO: 218864
  chr19:2243435-2243515
  hypo

SEQ ID NO: 324963 - DNA, 484 bp, Homo sapiens; identical to SEQ ID NO: 218865
  chr19:2243571-2244055
  hypo

SEQ ID NO: 324964 - DNA, 121 bp, Homo sapiens; identical to SEQ ID NO: 218866
  chr19:2244085-2244206
  hypo

SEQ ID NO: 324965 - DNA, 624 bp, Homo sapiens; identical to SEQ ID NO: 218867
  chr19:2244236-2244860
  hypo

SEQ ID NO: 324966 - DNA, 297 bp, Homo sapiens; identical to SEQ ID NO: 272821
  chr19:2247479-2247776
  hypo

SEQ ID NO: 324967 - DNA, 268 bp, Homo sapiens; identical to SEQ ID NO: 272822
  chr19:2255405-2255673
  hypo

SEQ ID NO: 324968 - DNA, 217 bp, Homo sapiens; identical to SEQ ID NO: 293318
  chr19:2273764-2273981
  hypo

SEQ ID NO: 324969 - DNA, 83 bp, Homo sapiens; identical to SEQ ID NO: 218869
  chr19:2275595-2275678
  hypo

SEQ ID NO: 324970 - DNA, 397 bp, Homo sapiens; identical to SEQ ID NO: 218870
  chr19:2275940-2276337
  hypo

SEQ ID NO: 324971 - DNA, 205 bp, Homo sapiens; identical to SEQ ID NO: 272824
  chr19:2278466-2278671
  hypo

SEQ ID NO: 324972 - DNA, 157 bp, Homo sapiens; identical to SEQ ID NO: 218871
  chr19:2321612-2321769
  hypo

SEQ ID NO: 324973 - DNA, 276 bp, Homo sapiens; identical to SEQ ID NO: 293321
  chr19:2328966-2329242
  hypo

SEQ ID NO: 324974 - DNA, 63 bp, Homo sapiens; identical to SEQ ID NO: 218873
  chr19:2330407-2330470
  hypo

SEQ ID NO: 324975 - DNA, 112 bp, Homo sapiens
  chr19:2331161-2331273
  hypo
gccctggctggacccggcccggctcctggaactcctcagtcttcccagaagggaggctctccccgcctggactcactggcctgtttcaaaggcccttgatgtggatgctttc

SEQ ID NO: 324976 - DNA, 62 bp, Homo sapiens
  chr19:2331443-2331505
  hypo
gaactcagggccctcttagagctgtggcctttggaagaattgttccccgttcctttaactca

SEQ ID NO: 324977 - DNA, 175 bp, Homo sapiens; identical to SEQ ID NO: 272828
  chr19:2334601-2334776
  hypo

SEQ ID NO: 324978 - DNA, 161 bp, Homo sapiens; identical to SEQ ID NO: 218874
  chr19:2339592-2339753
  hypo

SEQ ID NO: 324979 - DNA, 270 bp, Homo sapiens
  chr19:2358667-2358937
  hypo
ggcgactggggaaacgtggacccaggagctggatcctccaggactgctctccctccagcaccaggcgtggctccccgggacttgcggcacttctcaaaagcaaatcaccaacaaagacgctctgccaaaggtaataaaatggggctggtctctaaaggcagttccaaaaaaaatttccgcaaagtctcttgagataagagaggagacagtggttctaacgaagtgcaccgtctccttcgacggcacggaggaacgtgaacaacctggtga

SEQ ID NO: 324980 - DNA, 69 bp, Homo sapiens
  chr19:2360642-2360711
  hypo
tgtggacgcaggtgcggcgtgtagatgcggcaggggttgtgtggacgcaggtgtggtgtgtagatgcgg

SEQ ID NO: 324981 - DNA, 85 bp, Homo sapiens; identical to SEQ ID NO: 272834
  chr19:2399106-2399191
  hypo

SEQ ID NO: 324982 - DNA, 189 bp, Homo sapiens; identical to SEQ ID NO: 272835
  chr19:2408350-2408539
  hypo

SEQ ID NO: 324983 - DNA, 329 bp, Homo sapiens; identical to SEQ ID NO: 272836
  chr19:2413709-2414038
  hypo

SEQ ID NO: 324984 - DNA, 92 bp, Homo sapiens; identical to SEQ ID NO: 218875
  chr19:2434913-2435005
  hypo

SEQ ID NO: 324985 - DNA, 173 bp, Homo sapiens; identical to SEQ ID NO: 218876
  chr19:2441909-2442082
  hypo

SEQ ID NO: 324986 - DNA, 196 bp, Homo sapiens; identical to SEQ ID NO: 272839
  chr19:2449202-2449398
  hypo

SEQ ID NO: 324987 - DNA, 432 bp, Homo sapiens; identical to SEQ ID NO: 293326
  chr19:2488689-2489121
  hypo

SEQ ID NO: 324988 - DNA, 40 bp, Homo sapiens; identical to SEQ ID NO: 272840
  chr19:2509906-2509946
  hypo

SEQ ID NO: 324989 - DNA, 241 bp, Homo sapiens; identical to SEQ ID NO: 272841
  chr19:2511249-2511490
  hypo

SEQ ID NO: 324990 - DNA, 400 bp, Homo sapiens
  chr19:2513506-2513906
  hypo
gaagcctccccccgaccccatgacatcttcgatttccacttgccgctgggaggagtggcccatcctgcgtctaaggcatctcccggcctcagacagccgtcctgggttgcacgggggtggaaaagcaaaaagatcgggttcgagcgacagggtaacgttttgagcggacgttttgatctccgggacaacgtctcacctcccagagtccttcagagtcactccaagatcatggaacaattttgtacacacagcagcacagggtagccccacccgccctgccgcggctccccagcctgcattttctgtttgaaaaacgtctatggtggatgccagagggtaggacaacctggaagagccaaggatggtcaaagcctctcccagccacgcggatgcctcatgc

SEQ ID NO: 324991 - DNA, 54 bp, Homo sapiens; identical to SEQ ID NO: 218880
  chr19:2518575-2518629
  hypo

SEQ ID NO: 324992 - DNA, 111 bp, Homo sapiens; identical to SEQ ID NO: 218881
  chr19:2524628-2524739
  hypo

SEQ ID NO: 324993 - DNA, 135 bp, Homo sapiens
  chr19:2573860-2573995
  hypo
aagtgggattggcatttccctcccgtggtcatatgcgaacgggtgaattaaattctttctggaagaggctggaaaggcactgcatgaatgggacataccgtgggtgccacggaccagctgctgcgaggtacggcc

SEQ ID NO: 324994 - DNA, 152 bp, Homo sapiens
  chr19:2574044-2574196
  hypo
tgccttctcaccttgggtgcctgggtctggcccagagcccgtcacacctgggctggtgcagtccaggtgaaacccgccctgccagccacccccaccatctcccggggtgtccctgctgggcctgcattctgacatcacgccttcaaactcaa

SEQ ID NO: 324995 - DNA, 154 bp, Homo sapiens; identical to SEQ ID NO: 272846
  chr19:2672826-2672980
  hypo

SEQ ID NO: 324996 - DNA, 34 bp, Homo sapiens; identical to SEQ ID NO: 218882
  chr19:2682927-2682961
  hypo

SEQ ID NO: 324997 - DNA, 58 bp, Homo sapiens; identical to SEQ ID NO: 218883
  chr19:2683833-2683891
  hypo

SEQ ID NO: 324998 - DNA, 74 bp, Homo sapiens; identical to SEQ ID NO: 293329
  chr19:2702443-2702517
  hypo

SEQ ID NO: 324999 - DNA, 467 bp, Homo sapiens; identical to SEQ ID NO: 293330
  chr19:2702553-2703020
  hypo

SEQ ID NO: 325000 - DNA, 76 bp, Homo sapiens; identical to SEQ ID NO: 272849
  chr19:2733948-2734024
  hypo

SEQ ID NO: 325001 - DNA, 275 bp, Homo sapiens; identical to SEQ ID NO: 272850
  chr19:2753323-2753598
  hypo

SEQ ID NO: 325002 - DNA, 583 bp, Homo sapiens; identical to SEQ ID NO: 272851
  chr19:2754375-2754958
  hypo

SEQ ID NO: 325003 - DNA, 181 bp, Homo sapiens; identical to SEQ ID NO: 272852
  chr19:2761827-2762008
  hypo

SEQ ID NO: 325004 - DNA, 164 bp, Homo sapiens; identical to SEQ ID NO: 272853
  chr19:2789345-2789509
  hypo

SEQ ID NO: 325005 - DNA, 386 bp, Homo sapiens; identical to SEQ ID NO: 272854
  chr19:2795261-2795647
  hypo

SEQ ID NO: 325006 - DNA, 599 bp, Homo sapiens; identical to SEQ ID NO: 218887
  chr19:2796368-2796967
  hypo

SEQ ID NO: 325007 - DNA, 187 bp, Homo sapiens; identical to SEQ ID NO: 218888
  chr19:2812073-2812260
  hypo

SEQ ID NO: 325008 - DNA, 87 bp, Homo sapiens; identical to SEQ ID NO: 272857
  chr19:2881140-2881227
  hypo

SEQ ID NO: 325009 - DNA, 159 bp, Homo sapiens
  chr19:2899803-2899962
  hypo
caatgtccaacaaaaaaacaaatccagcgaggccagacaggataggggctccctggggtccgcccattttcgggatcaggtgactcgaggtttggtccttattttagtgcaggctcagatgtcgggggcgagccaaagtgcaggggcctgtgggaagga

SEQ ID NO: 325010 - DNA, 37 bp, Homo sapiens; identical to SEQ ID NO: 218889
  chr19:2908411-2908448
  hypo

SEQ ID NO: 325011 - DNA, 97 bp, Homo sapiens; identical to SEQ ID NO: 272860
  chr19:2908688-2908785
  hypo

SEQ ID NO: 325012 - DNA, 146 bp, Homo sapiens; identical to SEQ ID NO: 218890
  chr19:2919931-2920077
  hypo

SEQ ID NO: 325013 - DNA, 33 bp, Homo sapiens; identical to SEQ ID NO: 272862
  chr19:2927484-2927517
  hypo

SEQ ID NO: 325014 - DNA, 88 bp, Homo sapiens; identical to SEQ ID NO: 218891
  chr19:2934502-2934590
  hypo

SEQ ID NO: 325015 - DNA, 37 bp, Homo sapiens; identical to SEQ ID NO: 218892
  chr19:2938054-2938091
  hypo

SEQ ID NO: 325016 - DNA, 77 bp, Homo sapiens; identical to SEQ ID NO: 218893
  chr19:2938994-2939071
  hypo

SEQ ID NO: 325017 - DNA, 69 bp, Homo sapiens; identical to SEQ ID NO: 218894
  chr19:2941878-2941947
  hypo

SEQ ID NO: 325018 - DNA, 835 bp, Homo sapiens; identical to SEQ ID NO: 205108
  chr19:2944614-2945449
  hypo

SEQ ID NO: 325019 - DNA, 632 bp, Homo sapiens; identical to SEQ ID NO: 205109
  chr19:2950418-2951050
  hypo

SEQ ID NO: 325020 - DNA, 208 bp, Homo sapiens; identical to SEQ ID NO: 272867
  chr19:2956972-2957180
  hypo

SEQ ID NO: 325021 - DNA, 141 bp, Homo sapiens; identical to SEQ ID NO: 205110
  chr19:2977372-2977513
  hypo

SEQ ID NO: 325022 - DNA, 92 bp, Homo sapiens; identical to SEQ ID NO: 272868
  chr19:2995961-2996053
  hypo

SEQ ID NO: 325023 - DNA, 61 bp, Homo sapiens; identical to SEQ ID NO: 218898
  chr19:2996848-2996909
  hypo

SEQ ID NO: 325024 - DNA, 224 bp, Homo sapiens; identical to SEQ ID NO: 272870
  chr19:2997566-2997790
  hypo

SEQ ID NO: 325025 - DNA, 92 bp, Homo sapiens; identical to SEQ ID NO: 272871
  chr19:3006699-3006791
  hypo

SEQ ID NO: 325026 - DNA, 143 bp, Homo sapiens; identical to SEQ ID NO: 272872
  chr19:3053351-3053494
  hypo

SEQ ID NO: 325027 - DNA, 114 bp, Homo sapiens; identical to SEQ ID NO: 272873
  chr19:3055115-3055229
  hypo

SEQ ID NO: 325028 - DNA, 672 bp, Homo sapiens; identical to SEQ ID NO: 272874
  chr19:3055432-3056104
  hypo

SEQ ID NO: 325029 - DNA, 289 bp, Homo sapiens; identical to SEQ ID NO: 272875
  chr19:3056309-3056598
  hypo

SEQ ID NO: 325030 - DNA, 87 bp, Homo sapiens; identical to SEQ ID NO: 205112
  chr19:3094304-3094391
  hypo

SEQ ID NO: 325031 - DNA, 174 bp, Homo sapiens; identical to SEQ ID NO: 205113
  chr19:3094777-3094951
  hypo

SEQ ID NO: 325032 - DNA, 814 bp, Homo sapiens; identical to SEQ ID NO: 218902
  chr19:3105564-3106378
  hypo

SEQ ID NO: 325033 - DNA, 111 bp, Homo sapiens; identical to SEQ ID NO: 218903
  chr19:3109616-3109727
  hypo

SEQ ID NO: 325034 - DNA, 340 bp, Homo sapiens; identical to SEQ ID NO: 218904
  chr19:3113301-3113641
  hypo

SEQ ID NO: 325035 - DNA, 252 bp, Homo sapiens; identical to SEQ ID NO: 218905
  chr19:3114746-3114998
  hypo

SEQ ID NO: 325036 - DNA, 66 bp, Homo sapiens
  chr19:3115027-3115093
  hypo
gcatcatcgagtaccctttcgacctggagaacatcatcttccggtaccgcccgggccacagcaggc

SEQ ID NO: 325037 - DNA, 80 bp, Homo sapiens; identical to SEQ ID NO: 272880
  chr19:3117184-3117264
  hypo

SEQ ID NO: 325038 - DNA, 37 bp, Homo sapiens; identical to SEQ ID NO: 218906
  chr19:3118890-3118927
  hypo

SEQ ID NO: 325039 - DNA, 146 bp, Homo sapiens; identical to SEQ ID NO: 218907
  chr19:3118956-3119102
  hypo

SEQ ID NO: 325040 - DNA, 140 bp, Homo sapiens; identical to SEQ ID NO: 272882
  chr19:3135020-3135160
  hypo

SEQ ID NO: 325041 - DNA, 670 bp, Homo sapiens; identical to SEQ ID NO: 272883
  chr19:3148406-3149076
  hypo

SEQ ID NO: 325042 - DNA, 52 bp, Homo sapiens; identical to SEQ ID NO: 272884
  chr19:3151442-3151494
  hypo

SEQ ID NO: 325043 - DNA, 117 bp, Homo sapiens; identical to SEQ ID NO: 272885
  chr19:3151729-3151846
  hypo

SEQ ID NO: 325044 - DNA, 210 bp, Homo sapiens; identical to SEQ ID NO: 218909
  chr19:3155758-3155968
  hypo

SEQ ID NO: 325045 - DNA, 39 bp, Homo sapiens; identical to SEQ ID NO: 272887
  chr19:3170964-3171003
  hypo

SEQ ID NO: 325046 - DNA, 565 bp, Homo sapiens; identical to SEQ ID NO: 272888
  chr19:3196028-3196593
  hypo

SEQ ID NO: 325047 - DNA, 360 bp, Homo sapiens; identical to SEQ ID NO: 272889
  chr19:3214890-3215250
  hypo

SEQ ID NO: 325048 - DNA, 86 bp, Homo sapiens; identical to SEQ ID NO: 218911
  chr19:3219654-3219740
  hypo

SEQ ID NO: 325049 - DNA, 103 bp, Homo sapiens; identical to SEQ ID NO: 218912
  chr19:3296495-3296598
  hypo

SEQ ID NO: 325050 - DNA, 141 bp, Homo sapiens
  chr19:3296765-3296906
  hypo
tttgtacaatgtactttatttctgctacgagtaatttcatgaagtttcaacttgcaaactgacttttgggacaaaccaacacacacacagaagagaaagcaaagaacttggaactttgggttgactcggtttgagttttgt

SEQ ID NO: 325051 - DNA, 34 bp, Homo sapiens; identical to SEQ ID NO: 272892
  chr19:3308018-3308052
  hypo

SEQ ID NO: 325052 - DNA, 481 bp, Homo sapiens; identical to SEQ ID NO: 225733
  chr19:3367271-3367752
  hypo

SEQ ID NO: 325053 - DNA, 90 bp, Homo sapiens; identical to SEQ ID NO: 272893
  chr19:3381003-3381093
  hypo

SEQ ID NO: 325054 - DNA, 749 bp, Homo sapiens; identical to SEQ ID NO: 272894
  chr19:3381393-3382142
  hypo

SEQ ID NO: 325055 - DNA, 53 bp, Homo sapiens; identical to SEQ ID NO: 272895
  chr19:3410578-3410631
  hypo

SEQ ID NO: 325056 - DNA, 120 bp, Homo sapiens; identical to SEQ ID NO: 272896
  chr19:3422335-3422455
  hypo

SEQ ID NO: 325057 - DNA, 146 bp, Homo sapiens; identical to SEQ ID NO: 272897
  chr19:3424687-3424833
  hypo

SEQ ID NO: 325058 - DNA, 90 bp, Homo sapiens; identical to SEQ ID NO: 218916
  chr19:3449010-3449100
  hypo

SEQ ID NO: 325059 - DNA, 32 bp, Homo sapiens; identical to SEQ ID NO: 272899
  chr19:3453421-3453453
  hypo

SEQ ID NO: 325060 - DNA, 137 bp, Homo sapiens; identical to SEQ ID NO: 272900
  chr19:3453941-3454078
  hypo

SEQ ID NO: 325061 - DNA, 157 bp, Homo sapiens; identical to SEQ ID NO: 218917
  chr19:3456283-3456440
  hypo

SEQ ID NO: 325062 - DNA, 139 bp, Homo sapiens; identical to SEQ ID NO: 218918
  chr19:3464751-3464890
  hypo

SEQ ID NO: 325063 - DNA, 34 bp, Homo sapiens; identical to SEQ ID NO: 218919
  chr19:3465695-3465729
  hypo

SEQ ID NO: 325064 - DNA, 1050 bp, Homo sapiens; identical to SEQ ID NO: 272904
  chr19:3490842-3491892
  hypo

SEQ ID NO: 325065 - DNA, 83 bp, Homo sapiens; identical to SEQ ID NO: 272905
  chr19:3494337-3494420
  hypo

SEQ ID NO: 325066 - DNA, 83 bp, Homo sapiens; identical to SEQ ID NO: 272906
  chr19:3494540-3494623
  hypo

SEQ ID NO: 325067 - DNA, 104 bp, Homo sapiens; identical to SEQ ID NO: 272907
  chr19:3494900-3495004
  hypo

SEQ ID NO: 325068 - DNA, 69 bp, Homo sapiens; identical to SEQ ID NO: 272908
  chr19:3509503-3509572
  hypo

SEQ ID NO: 325069 - DNA, 92 bp, Homo sapiens; identical to SEQ ID NO: 272909
  chr19:3522932-3523024
  hypo

SEQ ID NO: 325070 - DNA, 381 bp, Homo sapiens; identical to SEQ ID NO: 218921
  chr19:3531590-3531971
  hypo

SEQ ID NO: 325071 - DNA, 210 bp, Homo sapiens; identical to SEQ ID NO: 272911
  chr19:3548039-3548249
  hypo

SEQ ID NO: 325072 - DNA, 214 bp, Homo sapiens
  chr19:3565326-3565540
  hypo
actcagtctttgccaggaccctcctggcctcaggtcctgttcagtatctggtctaccattgccagaaggagcgcattctgtgagtcttgtgatttacgttttaacgttgatgctggtcagtccttgcgctgagagcaaaacggggaggagctgtaacgaagcgcggtgacctcctggcacggcagggcctggaactcggagctttttgttgttg

SEQ ID NO: 325073 - DNA, 42 bp, Homo sapiens; identical to SEQ ID NO: 272915
  chr19:3568766-3568808
  hypo

SEQ ID NO: 325074 - DNA, 142 bp, Homo sapiens; identical to SEQ ID NO: 218922
  chr19:3571351-3571493
  hypo

SEQ ID NO: 325075 - DNA, 57 bp, Homo sapiens; identical to SEQ ID NO: 225734
  chr19:3573237-3573294
  hypo

SEQ ID NO: 325076 - DNA, 395 bp, Homo sapiens
  chr19:3576162-3576557
  hypo
gggagctggagccggctgagcagcgctgacctagggtgcagggcgtggtccctggaggcctgggaggctgaccctgcccttcccctcccccgccagaagactcgagctctgggctcatgaacactctcctgaatggacacaaggtaagcgaccttcttcctctcaaagcacctgggggagaaaggtctggaggcttctagaaccctgagtcagagccagtgctcgcccagatgtgtgcaagcaggggcggtgccactgcaccgtgggatcgctgttgattgtactcccaccggggtgtcccaggagaccctcctaggcttggggcacacccagagagcgtggctgcctcctaccaccagtaaattgccaccttgtcccttcgtcttagggtgggg

SEQ ID NO: 325077 - DNA, 209 bp, Homo sapiens; identical to SEQ ID NO: 218923
  chr19:3577496-3577705
  hypo

SEQ ID NO: 325078 - DNA, 313 bp, Homo sapiens
  chr19:3577811-3578124
  hypo
cctgccccggcttaccttagcccaccctgcgccgctcctgcgctggcggtgtccggacctctgagcgcccgcgcgacccgccctgagtcaccccctaccgctgcccctggagcccccgccccgcgactccccggcaccctcgcctgaccttcccgcctgtcccccaggcacgggcgaaacgcccacgctgggcactctggacttctacatggcccggcttcacggagccatcgagcgcgaccccgcccagcacgagaagctcatcgtccgcatcaaggaaatcctggcccaggtcgccaggtgtgtgccgggc

SEQ ID NO: 325079 - DNA, 275 bp, Homo sapiens
  chr19:3578223-3578498
  hypo
atcacctcccggaggggcctacctgcggtcgcccctgatgcaccagtgctaggatggccatggagaaccccgggccggcgggacccactcgggggcaccagaacttccctaaagcttctcagggtggatcccagcgcccgggttagataggttcaacgcctgtcccccaaccctggcatctgttggagcagctgatgggccatggtctctggggttccccagggccggggtgggggccagagatgatgagggcctcatcccgggccctcctctct

SEQ ID NO: 325080 - DNA, 269 bp, Homo sapiens; identical to SEQ ID NO: 293353
  chr19:3585428-3585697
  hypo

SEQ ID NO: 325081 - DNA, 82 bp, Homo sapiens; identical to SEQ ID NO: 218926
  chr19:3600528-3600610
  hypo

SEQ ID NO: 325082 - DNA, 118 bp, Homo sapiens; identical to SEQ ID NO: 293354
  chr19:3606360-3606478
  hypo

SEQ ID NO: 325083 - DNA, 489 bp, Homo sapiens; identical to SEQ ID NO: 225737
  chr19:3606743-3607232
  hypo

SEQ ID NO: 325084 - DNA, 123 bp, Homo sapiens; identical to SEQ ID NO: 272920
  chr19:3624529-3624652
  hypo

SEQ ID NO: 325085 - DNA, 122 bp, Homo sapiens; identical to SEQ ID NO: 272921
  chr19:3630283-3630405
  hypo

SEQ ID NO: 325086 - DNA, 163 bp, Homo sapiens; identical to SEQ ID NO: 218927
  chr19:3638707-3638870
  hypo

SEQ ID NO: 325087 - DNA, 133 bp, Homo sapiens; identical to SEQ ID NO: 272923
  chr19:3642943-3643076
  hypo

SEQ ID NO: 325088 - DNA, 427 bp, Homo sapiens; identical to SEQ ID NO: 272924
  chr19:3643106-3643533
  hypo

SEQ ID NO: 325089 - DNA, 160 bp, Homo sapiens; identical to SEQ ID NO: 218928
  chr19:3648545-3648705
  hypo

SEQ ID NO: 325090 - DNA, 231 bp, Homo sapiens; identical to SEQ ID NO: 272926
  chr19:3651844-3652075
  hypo

SEQ ID NO: 325091 - DNA, 222 bp, Homo sapiens; identical to SEQ ID NO: 272927
  chr19:3669699-3669921
  hypo

SEQ ID NO: 325092 - DNA, 139 bp, Homo sapiens; identical to SEQ ID NO: 293356
  chr19:3670990-3671129
  hypo

SEQ ID NO: 325093 - DNA, 72 bp, Homo sapiens; identical to SEQ ID NO: 293357
  chr19:3671894-3671966
  hypo

SEQ ID NO: 325094 - DNA, 56 bp, Homo sapiens; identical to SEQ ID NO: 130472
  chr19:3672066-3672122
  hypo

SEQ ID NO: 325095 - DNA, 192 bp, Homo sapiens; identical to SEQ ID NO: 272928
  chr19:3676226-3676418
  hypo

SEQ ID NO: 325096 - DNA, 34 bp, Homo sapiens; identical to SEQ ID NO: 272929
  chr19:3680259-3680293
  hypo

SEQ ID NO: 325097 - DNA, 44 bp, Homo sapiens; identical to SEQ ID NO: 218929
  chr19:3691224-3691268
  hypo

SEQ ID NO: 325098 - DNA, 87 bp, Homo sapiens; identical to SEQ ID NO: 218930
  chr19:3694859-3694946
  hypo

SEQ ID NO: 325099 - DNA, 395 bp, Homo sapiens; identical to SEQ ID NO: 272932
  chr19:3709474-3709869
  hypo

SEQ ID NO: 325100 - DNA, 160 bp, Homo sapiens; identical to SEQ ID NO: 272933
  chr19:3728587-3728747
  hypo

SEQ ID NO: 325101 - DNA, 212 bp, Homo sapiens; identical to SEQ ID NO: 272934
  chr19:3730410-3730622
  hypo

SEQ ID NO: 325102 - DNA, 95 bp, Homo sapiens; identical to SEQ ID NO: 218932
  chr19:3739005-3739100
  hypo

SEQ ID NO: 325103 - DNA, 398 bp, Homo sapiens; identical to SEQ ID NO: 218933
  chr19:3740455-3740853
  hypo

SEQ ID NO: 325104 - DNA, 80 bp, Homo sapiens; identical to SEQ ID NO: 218934
  chr19:3747812-3747892
  hypo

SEQ ID NO: 325105 - DNA, 119 bp, Homo sapiens; identical to SEQ ID NO: 218935
  chr19:3748020-3748139
  hypo

SEQ ID NO: 325106 - DNA, 42 bp, Homo sapiens; identical to SEQ ID NO: 218936
  chr19:3754228-3754270
  hypo

SEQ ID NO: 325107 - DNA, 307 bp, Homo sapiens; identical to SEQ ID NO: 218937
  chr19:3767181-3767488
  hypo

SEQ ID NO: 325108 - DNA, 401 bp, Homo sapiens; identical to SEQ ID NO: 272940
  chr19:3770613-3771014
  hypo

SEQ ID NO: 325109 - DNA, 141 bp, Homo sapiens; identical to SEQ ID NO: 272941
  chr19:3771587-3771728
  hypo

SEQ ID NO: 325110 - DNA, 106 bp, Homo sapiens; identical to SEQ ID NO: 218939
  chr19:3777968-3778074
  hypo

SEQ ID NO: 325111 - DNA, 116 bp, Homo sapiens
  chr19:3778417-3778533
  hypo
tgactgcggacagcaggcgtgggcaggggtcagggccacagcctctggacctgcccggaacccagtgcctccctgggacccccgctcaccattttagggtacggagcccgtccata

SEQ ID NO: 325112 - DNA, 66 bp, Homo sapiens; identical to SEQ ID NO: 205117
  chr19:3785491-3785557
  hypo

SEQ ID NO: 325113 - DNA, 385 bp, Homo sapiens; identical to SEQ ID NO: 218941
  chr19:3792900-3793285
  hypo

SEQ ID NO: 325114 - DNA, 39 bp, Homo sapiens; identical to SEQ ID NO: 272945
  chr19:3807698-3807737
  hypo

SEQ ID NO: 325115 - DNA, 303 bp, Homo sapiens; identical to SEQ ID NO: 272946
  chr19:3816598-3816901
  hypo

SEQ ID NO: 325116 - DNA, 135 bp, Homo sapiens; identical to SEQ ID NO: 272947
  chr19:3823138-3823273
  hypo

SEQ ID NO: 325117 - DNA, 229 bp, Homo sapiens
  chr19:3827530-3827759
  hypo
cgcacaggtcgcaatgcagctgcgcctgcaccccgcgcgggctcccgttgggctgcacgcctgtcttctgggccgcctccttctttctgtgcttctgccctcccagatgttcccggtaggtctgcggcaaggggtgagaggcagcctgggcgggggtttgcacactggccactgtcccctcccctgcaggcccccggcttagcgcgagggaactcggtggtaacagagg

SEQ ID NO: 325118 - DNA, 480 bp, Homo sapiens
  chr19:3855704-3856184
  hypo
aggaggagggtgaagacacaaagttggggaaacagggcagcgcatttgagcagagggaattgcatgggaagggcctgagggtgaagtgcccggaacctggattggtccagaaggcagcgtgactagagcggaaggaatgaggggagatggggtcagagaataaagggtgtggaacagggggcagaggacaccatgatggatgtcacaggccatcgtaggggctccagcttgtcccctgagaccccacgggggtttccagcggaggagggacatgggctacgttgtgatggggcctctttggcgctgtgcgcggatggaaatgggggcgagagcagaaggaagcgtgaaggtccaaaatacagacgaggcaggctggtgcgcggtggaggcggtgcgcgtgcaggggcgtgcgctcaaggtcagaagaaggaaaggaggccagcctggcttcccattttgggatctgcacgaaggactgcc

SEQ ID NO: 325119 - DNA, 36 bp, Homo sapiens
  chr19:3856216-3856252
  hypo
gatgaaggggttttggagaagcgtgcaggcgcttgg

SEQ ID NO: 325120 - DNA, 31 bp, Homo sapiens; identical to SEQ ID NO: 272950
  chr19:3885951-3885982
  hypo

SEQ ID NO: 325121 - DNA, 48 bp, Homo sapiens; identical to SEQ ID NO: 218944
  chr19:3907669-3907717
  hypo

SEQ ID NO: 325122 - DNA, 323 bp, Homo sapiens; identical to SEQ ID NO: 218945
  chr19:3907947-3908270
  hypo

SEQ ID NO: 325123 - DNA, 431 bp, Homo sapiens; identical to SEQ ID NO: 272953
  chr19:3966072-3966503
  hypo

SEQ ID NO: 325124 - DNA, 153 bp, Homo sapiens; identical to SEQ ID NO: 218947
  chr19:3966533-3966686
  hypo

SEQ ID NO: 325125 - DNA, 197 bp, Homo sapiens; identical to SEQ ID NO: 218948
  chr19:3966755-3966952
  hypo

SEQ ID NO: 325126 - DNA, 149 bp, Homo sapiens; identical to SEQ ID NO: 218949
  chr19:3978025-3978174
  hypo

SEQ ID NO: 325127 - DNA, 76 bp, Homo sapiens; identical to SEQ ID NO: 272956
  chr19:3979328-3979404
  hypo

SEQ ID NO: 325128 - DNA, 107 bp, Homo sapiens; identical to SEQ ID NO: 218950
  chr19:3979896-3980003
  hypo

SEQ ID NO: 325129 - DNA, 459 bp, Homo sapiens
  chr19:3982274-3982733
  hypo
ctactttcttggcccgctcggcaggccccaactggccctcccccttggcggcgaacttggccacatacatctcggcaaactgcttcagggtgaaggcccacccgtggaggccagacccaaagcccacggtaccgaggacaggatcgatctggaagtgtgagaaacgagaagcagccgtgagggcccctgcgcagagcctgaagctacgggctgggcgccttgggcatgggcctcagacgcaggctttcttcagtagacatctggtcaaagtgaagaaatgatcagtcatcacgaataggggggccagcccctccaccacccagggcagcgttccctgagctcgtctcttccagctgcccaaagatcaagggctgggtcaagtcggatgaaaacattccagcccccttctctgtcacccaacattcctggcaaaaacacacttccagtccccctcagctc

SEQ ID NO: 325130 - DNA, 99 bp, Homo sapiens
  chr19:3983095-3983194
  hypo
cccactgcttacctgacacgcagtccaccaccaccaatgcgccatcggtgactcggagggcagcagtcacctccgaggagaagtcgacatgcccggggg

SEQ ID NO: 325131 - DNA, 39 bp, Homo sapiens; identical to SEQ ID NO: 272960
  chr19:3994890-3994929
  hypo

SEQ ID NO: 325132 - DNA, 33 bp, Homo sapiens; identical to SEQ ID NO: 272961
  chr19:3997224-3997257
  hypo

SEQ ID NO: 325133 - DNA, 675 bp, Homo sapiens; identical to SEQ ID NO: 272962
  chr19:4032609-4033284
  hypo

SEQ ID NO: 325134 - DNA, 283 bp, Homo sapiens; identical to SEQ ID NO: 272963
  chr19:4033314-4033597
  hypo

SEQ ID NO: 325135 - DNA, 33 bp, Homo sapiens; identical to SEQ ID NO: 95909
  chr19:4033631-4033664
  hypo

SEQ ID NO: 325136 - DNA, 369 bp, Homo sapiens; identical to SEQ ID NO: 272965
  chr19:4037867-4038236
  hypo

SEQ ID NO: 325137 - DNA, 61 bp, Homo sapiens; identical to SEQ ID NO: 272966
  chr19:4042780-4042841
  hypo

SEQ ID NO: 325138 - DNA, 351 bp, Homo sapiens
  chr19:4042871-4043222
  hypo
gctgcccctctggccttatcctgtgccagctgcctgcccgcgccaggggctatgggtcaccttccccgcaagaggggcctctggacctgggtactcctcggacactcacccccaccccggtgctctgggtcaccatccacacccagcctctctgccacgcgacagacggaccccagagagatgggcctggcttccaaggccgggcaggaagagcaggaagggtcggggacctggggcttctctccttgggacccaggatccggtcaccctgggcccaaaggtgtggtgtggacgaggtgctcaacccacccagtctcttcagggccaaaaggggaaaagggggaccccccc

SEQ ID NO: 325139 - DNA, 358 bp, Homo sapiens
  chr19:4043330-4043688
  hypo
tttttttttttatgtacaagaaaaatgaatttttttgttttttcatcttttgtgtttttgtttgttttttattacttttaaagcttctccctccccactcccaaaaagtgcatttttatcagttttttttttttttaaatctcccacactttataaagactctcaatacagtctctggaatgtctatctgtctgtgctctgtaccctgagggcgccgccccgccccccattcaccaggcctggcccctccaaagtccaaggcacctcgattctgggcctggggtggggtggggggcgggacctgggcatcggatcctggtccacagcctccaggcagccccggcgagggatgggggtc

SEQ ID NO: 325140 - DNA, 87 bp, Homo sapiens
  chr19:4044504-4044591
  hypo
gcagacgggggctccggcccggccacctccccggcccccgggcgcccccgcctgaagccccccaaccccagcctggacctcactccc

SEQ ID NO: 325141 - DNA, 39 bp, Homo sapiens
  chr19:4044933-4044972
  hypo
acagtatgtgattgcgcggagtctggggagggcggggct

SEQ ID NO: 325142 - DNA, 63 bp, Homo sapiens
  chr19:4045002-4045065
  hypo
gcagaggctgtggcccccaggacgggcgggtagttaaggcaaagtgggcgggcaggacaggcg

SEQ ID NO: 325143 - DNA, 188 bp, Homo sapiens; identical to SEQ ID NO: 272970
  chr19:4046238-4046426
  hypo

SEQ ID NO: 325144 - DNA, 47 bp, Homo sapiens; identical to SEQ ID NO: 218954
  chr19:4047771-4047818
  hypo

SEQ ID NO: 325145 - DNA, 45 bp, Homo sapiens
  chr19:4050362-4050407
  hypo
tctcttgtttctgttgatttccttgtttctcctctgtctccctga

SEQ ID NO: 325146 - DNA, 40 bp, Homo sapiens; identical to SEQ ID NO: 293370
  chr19:4053794-4053834
  hypo

SEQ ID NO: 325147 - DNA, 265 bp, Homo sapiens; identical to SEQ ID NO: 205120
  chr19:4054040-4054305
  hypo

SEQ ID NO: 325148 - DNA, 55 bp, Homo sapiens; identical to SEQ ID NO: 205121
  chr19:4054380-4054435
  hypo

SEQ ID NO: 325149 - DNA, 170 bp, Homo sapiens; identical to SEQ ID NO: 205122
  chr19:4054471-4054641
  hypo

SEQ ID NO: 325150 - DNA, 541 bp, Homo sapiens; identical to SEQ ID NO: 205123
  chr19:4054917-4055458
  hypo

SEQ ID NO: 325151 - DNA, 236 bp, Homo sapiens; identical to SEQ ID NO: 272975
  chr19:4062303-4062539
  hypo

SEQ ID NO: 325152 - DNA, 97 bp, Homo sapiens; identical to SEQ ID NO: 205124
  chr19:4064872-4064969
  hypo

SEQ ID NO: 325153 - DNA, 39 bp, Homo sapiens; identical to SEQ ID NO: 218961
  chr19:4093667-4093706
  hypo

SEQ ID NO: 325154 - DNA, 599 bp, Homo sapiens; identical to SEQ ID NO: 272977
  chr19:4094512-4095111
  hypo

SEQ ID NO: 325155 - DNA, 351 bp, Homo sapiens
  chr19:4096065-4096416
  hypo
cccggccaaactgggtccacagttttaagcccaagcactggggagcctggcctgacacacgtccccggagcgggagtggccgtgtaagcggtgccagcagggcaggggcaggcctttcccgcgcaggggcaggggcgggaagaggcgggggagaggtcgggggatgtgctcactgggcatgggtgtggctgctaggtgcagggagagctgggtcaccagggccaccccacctggctccgtcatcatctcgccacccaaccccaggcctagcccagtctgcaggcagctcaaatgcccgtttctctgccccagctccaaagggccaccaaagacacagaaacccacagaagg

SEQ ID NO: 325156 - DNA, 171 bp, Homo sapiens
  chr19:4096525-4096696
  hypo
cttgttttactcatctgggcggtggaaaccctcatactgtggctcactgggttgttatggggactgacggagcaggagccaccccgggacctacaggtccttctaggctctctgggcctccttccaagaggcaagggccattcctgtacctttctccgtggaagcggggtg

SEQ ID NO: 325157 - DNA, 240 bp, Homo sapiens; identical to SEQ ID NO: 272979
  chr19:4116487-4116727
  hypo

SEQ ID NO: 325158 - DNA, 189 bp, Homo sapiens; identical to SEQ ID NO: 272980
  chr19:4116974-4117163
  hypo

SEQ ID NO: 325159 - DNA, 143 bp, Homo sapiens; identical to SEQ ID NO: 272981
  chr19:4168249-4168392
  hypo

SEQ ID NO: 325160 - DNA, 377 bp, Homo sapiens; identical to SEQ ID NO: 272982
  chr19:4175003-4175380
  hypo

SEQ ID NO: 325161 - DNA, 173 bp, Homo sapiens; identical to SEQ ID NO: 272983
  chr19:4236966-4237139
  hypo

SEQ ID NO: 325162 - DNA, 176 bp, Homo sapiens; identical to SEQ ID NO: 293381
  chr19:4278909-4279085
  hypo

SEQ ID NO: 325163 - DNA, 352 bp, Homo sapiens; identical to SEQ ID NO: 293382
  chr19:4279785-4280137
  hypo

SEQ ID NO: 325164 - DNA, 83 bp, Homo sapiens
  chr19:4290463-4290546
  hypo
atctgaagttcgcgcggacccgtgagaaccaggtggtgctgggccaacacagcgggcccttccccagcgtgcccgagctcgtc

SEQ ID NO: 325165 - DNA, 102 bp, Homo sapiens; identical to SEQ ID NO: 272985
  chr19:4292187-4292289
  hypo

SEQ ID NO: 325166 - DNA, 34 bp, Homo sapiens; identical to SEQ ID NO: 205126
  chr19:4304684-4304718
  hypo

SEQ ID NO: 325167 - DNA, 331 bp, Homo sapiens; identical to SEQ ID NO: 272986
  chr19:4311899-4312230
  hypo

SEQ ID NO: 325168 - DNA, 114 bp, Homo sapiens; identical to SEQ ID NO: 272987
  chr19:4322986-4323100
  hypo

SEQ ID NO: 325169 - DNA, 42 bp, Homo sapiens; identical to SEQ ID NO: 272988
  chr19:4360669-4360711
  hypo

SEQ ID NO: 325170 - DNA, 289 bp, Homo sapiens; identical to SEQ ID NO: 218965
  chr19:4361250-4361539
  hypo

SEQ ID NO: 325171 - DNA, 200 bp, Homo sapiens; identical to SEQ ID NO: 218966
  chr19:4361700-4361900
  hypo

SEQ ID NO: 325172 - DNA, 393 bp, Homo sapiens; identical to SEQ ID NO: 218967
  chr19:4371567-4371960
  hypo

SEQ ID NO: 325173 - DNA, 48 bp, Homo sapiens; identical to SEQ ID NO: 272991
  chr19:4419788-4419836
  hypo

SEQ ID NO: 325174 - DNA, 61 bp, Homo sapiens; identical to SEQ ID NO: 218968
  chr19:4429586-4429647
  hypo

SEQ ID NO: 325175 - DNA, 148 bp, Homo sapiens; identical to SEQ ID NO: 205127
  chr19:4432845-4432993
  hypo

SEQ ID NO: 325176 - DNA, 185 bp, Homo sapiens; identical to SEQ ID NO: 218970
  chr19:4442913-4443098
  hypo

SEQ ID NO: 325177 - DNA, 415 bp, Homo sapiens; identical to SEQ ID NO: 218971
  chr19:4446322-4446737
  hypo

SEQ ID NO: 325178 - DNA, 237 bp, Homo sapiens; identical to SEQ ID NO: 218972
  chr19:4483097-4483334
  hypo

SEQ ID NO: 325179 - DNA, 248 bp, Homo sapiens; identical to SEQ ID NO: 225751
  chr19:4523781-4524029
  hypo

SEQ ID NO: 325180 - DNA, 37 bp, Homo sapiens; identical to SEQ ID NO: 218973
  chr19:4544028-4544065
  hypo

SEQ ID NO: 325181 - DNA, 46 bp, Homo sapiens
  chr19:4550330-4550376
  hypo
aaaggggcctgattcaccagaggtacccattgctttgcccaacgac

SEQ ID NO: 325182 - DNA, 152 bp, Homo sapiens; identical to SEQ ID NO: 218974
  chr19:4550712-4550864
  hypo

SEQ ID NO: 325183 - DNA, 38 bp, Homo sapiens; identical to SEQ ID NO: 218975
  chr19:4554410-4554448
  hypo

SEQ ID NO: 325184 - DNA, 207 bp, Homo sapiens; identical to SEQ ID NO: 273004
  chr19:4566461-4566668
  hypo

SEQ ID NO: 325185 - DNA, 35 bp, Homo sapiens; identical to SEQ ID NO: 273005
  chr19:4578035-4578070
  hypo

SEQ ID NO: 325186 - DNA, 452 bp, Homo sapiens; identical to SEQ ID NO: 293390
  chr19:4580776-4581228
  hypo

SEQ ID NO: 325187 - DNA, 78 bp, Homo sapiens; identical to SEQ ID NO: 273006
  chr19:4627183-4627261
  hypo

SEQ ID NO: 325188 - DNA, 80 bp, Homo sapiens
  chr19:4672904-4672984
  hypo
ttcagttgtgagctgttgggagtctgctacggaacccaggcaggttgtgcgtatgcgtgtgcatgcgtgtgtgtgttctt

SEQ ID NO: 325189 - DNA, 158 bp, Homo sapiens; identical to SEQ ID NO: 218976
  chr19:4675504-4675662
  hypo

SEQ ID NO: 325190 - DNA, 641 bp, Homo sapiens; identical to SEQ ID NO: 218977
  chr19:4676079-4676720
  hypo

SEQ ID NO: 325191 - DNA, 207 bp, Homo sapiens; identical to SEQ ID NO: 273011
  chr19:4678845-4679052
  hypo

SEQ ID NO: 325192 - DNA, 128 bp, Homo sapiens
  chr19:4679434-4679562
  hypo
cagggaatgcttggccccagcgccttaggaaggagcctgctagggccttcagcactcagcggtttcttctacgcaatttctcagtttcaaataaagcccgtctgcggggcaatttcggtaagggttcc

SEQ ID NO: 325193 - DNA, 37 bp, Homo sapiens
  chr19:4679619-4679656
  hypo
agcaccgaaggcaggcggaaccctgagctgtcaagac

SEQ ID NO: 325194 - DNA, 74 bp, Homo sapiens; identical to SEQ ID NO: 218978
  chr19:4683997-4684071
  hypo

SEQ ID NO: 325195 - DNA, 141 bp, Homo sapiens; identical to SEQ ID NO: 273014
  chr19:4687368-4687509
  hypo

SEQ ID NO: 325196 - DNA, 121 bp, Homo sapiens; identical to SEQ ID NO: 273015
  chr19:4697634-4697755
  hypo

SEQ ID NO: 325197 - DNA, 254 bp, Homo sapiens
  chr19:4714229-4714483
  hypo
gagtgcttctgcacctggaagcgggcggccgggtcatctgtggcggctgcgtcgcctcggtcggccgttggggtcccggtggtggccatcctctcagccccctcggaattcagcgagaagctgcggggaggaagcaaagactatgagaaaggagaactgttttacctacgagctgccccaatgctgccccttgcgaggcactcaggttcttccagacgagccccacccctgccgctttccccactccctaaaca

SEQ ID NO: 325198 - DNA, 32 bp, Homo sapiens; identical to SEQ ID NO: 273017
  chr19:4755951-4755983
  hypo

SEQ ID NO: 325199 - DNA, 300 bp, Homo sapiens; identical to SEQ ID NO: 273018
  chr19:4789386-4789686
  hypo

SEQ ID NO: 325200 - DNA, 75 bp, Homo sapiens
  chr19:4795048-4795123
  hypo
gtacagtcttaatgcgataaatccactagctaagacgtcgagtgccaagaccagccttccagccgaggtttggac

SEQ ID NO: 325201 - DNA, 202 bp, Homo sapiens
  chr19:4795324-4795526
  hypo
gaggagcagtgaccgggggtgtccagaaatatcctgtccctggatggaaactaggtctcgtttggatttttttttttttttgccgtgttaggaaattatttattaatttacaagacaggttttaactcagccgaggtgggaaatggtgtccctgtccctcccaaagcacagagcacagaaatgaggccgtttacatggcgag

SEQ ID NO: 325202 - DNA, 120 bp, Homo sapiens; identical to SEQ ID NO: 218979
  chr19:4798239-4798359
  hypo

SEQ ID NO: 325203 - DNA, 31 bp, Homo sapiens
  chr19:4816440-4816471
  hypo
gctgctggctgtggggagggcggtggggggg

SEQ ID NO: 325204 - DNA, 616 bp, Homo sapiens
  chr19:4816550-4817166
  hypo
cacctggcccccaaagggcattcgagccccatagggcgccccagtcccaaatgacatgtggctcccaaaagccacctggagctgctccatctgtgcctggtaggacaagtagctctggaggtaggctgagtaggctgcgttcagtgccgccgcctgcatccgctcaccgtccaggtgttggctctgttcccgcagggctcgggtgtcctgttccttcctccacatggcctttcgggcctgaagcctgtggggcttgaaggtgttggccaccttcctggcgaagatctgggagtgttcgtccagccgcaccagcccggagagcaggctggccgtgtcggagctgagctgggccggggagctctccaggggcaggaaggggatgacacagtctggcgacccctgtcgcgtgaggttgctcatcatggcttggttcacctggtgcaggctcaggcgacagtcgaagttggaggtgagaagtaggatgatgaaagctgagtggtctatggcgtcctgcaggcagctcagctccccgcgccccggcacctggaaatcctcgcagaaggtggccccgtcgggcacgccaagggcctccagcttctcccgaacccgcagggcg

SEQ ID NO: 325205 - DNA, 605 bp, Homo sapiens; identical to SEQ ID NO: 273023
  chr19:4817458-4818063
  hypo

SEQ ID NO: 325206 - DNA, 145 bp, Homo sapiens; identical to SEQ ID NO: 218982
  chr19:4851495-4851640
  hypo

SEQ ID NO: 325207 - DNA, 166 bp, Homo sapiens; identical to SEQ ID NO: 273026
  chr19:4851997-4852163
  hypo

SEQ ID NO: 325208 - DNA, 34 bp, Homo sapiens; identical to SEQ ID NO: 273027
  chr19:4902800-4902834
  hypo

SEQ ID NO: 325209 - DNA, 219 bp, Homo sapiens; identical to SEQ ID NO: 273028
  chr19:4914580-4914799
  hypo

SEQ ID NO: 325210 - DNA, 68 bp, Homo sapiens; identical to SEQ ID NO: 273029
  chr19:4930783-4930851
  hypo

SEQ ID NO: 325211 - DNA, 150 bp, Homo sapiens; identical to SEQ ID NO: 273030
  chr19:4934647-4934797
  hypo

SEQ ID NO: 325212 - DNA, 191 bp, Homo sapiens; identical to SEQ ID NO: 218983
  chr19:4941804-4941995
  hypo

SEQ ID NO: 325213 - DNA, 129 bp, Homo sapiens; identical to SEQ ID NO: 218984
  chr19:4944359-4944488
  hypo

SEQ ID NO: 325214 - DNA, 59 bp, Homo sapiens; identical to SEQ ID NO: 218985
  chr19:4962295-4962354
  hypo

SEQ ID NO: 325215 - DNA, 116 bp, Homo sapiens; identical to SEQ ID NO: 218986
  chr19:4962384-4962500
  hypo

SEQ ID NO: 325216 - DNA, 81 bp, Homo sapiens; identical to SEQ ID NO: 273034
  chr19:4973466-4973547
  hypo

SEQ ID NO: 325217 - DNA, 149 bp, Homo sapiens; identical to SEQ ID NO: 218987
  chr19:4986364-4986513
  hypo

SEQ ID NO: 325218 - DNA, 200 bp, Homo sapiens; identical to SEQ ID NO: 218988
  chr19:4986633-4986833
  hypo

SEQ ID NO: 325219 - DNA, 81 bp, Homo sapiens; identical to SEQ ID NO: 273036
  chr19:4988235-4988316
  hypo

SEQ ID NO: 325220 - DNA, 282 bp, Homo sapiens; identical to SEQ ID NO: 218989
  chr19:4990572-4990854
  hypo

SEQ ID NO: 325221 - DNA, 42 bp, Homo sapiens; identical to SEQ ID NO: 218990
  chr19:4991094-4991136
  hypo

SEQ ID NO: 325222 - DNA, 221 bp, Homo sapiens; identical to SEQ ID NO: 273039
  chr19:5013968-5014189
  hypo

SEQ ID NO: 325223 - DNA, 151 bp, Homo sapiens; identical to SEQ ID NO: 273040
  chr19:5022644-5022795
  hypo

SEQ ID NO: 325224 - DNA, 180 bp, Homo sapiens
  chr19:5023035-5023215
  hypo
aaagggacttttcgcgggtgggactgagtgaaggaccctgagctgggagatgaccctggatgatctggggagcccgatgtcctcaccgggtcctcatgagaggaggcaggagggtgagagtcagagagaggctggaagaggctgtgctgtggctgcggaggtggaggaagggccttgagc

SEQ ID NO: 325225 - DNA, 464 bp, Homo sapiens; identical to SEQ ID NO: 218992
  chr19:5023245-5023709
  hypo

SEQ ID NO: 325226 - DNA, 134 bp, Homo sapiens; identical to SEQ ID NO: 273042
  chr19:5031056-5031190
  hypo

SEQ ID NO: 325227 - DNA, 523 bp, Homo sapiens; identical to SEQ ID NO: 273043
  chr19:5035321-5035844
  hypo

SEQ ID NO: 325228 - DNA, 385 bp, Homo sapiens; identical to SEQ ID NO: 218993
  chr19:5037624-5038009
  hypo

SEQ ID NO: 325229 - DNA, 162 bp, Homo sapiens; identical to SEQ ID NO: 218994
  chr19:5038229-5038391
  hypo

SEQ ID NO: 325230 - DNA, 143 bp, Homo sapiens
  chr19:5038421-5038564
  hypo
cctcagctcctggatgtctccagaaagagccggcgctaacctggactgtcctttccttgggaccagccttgtctcggtttaactctaaattagtgaaggcaccgggttccggctgcagtgccgcctctgacaggtgctggtcc

SEQ ID NO: 325231 - DNA, 40 bp, Homo sapiens; identical to SEQ ID NO: 273046
  chr19:5049196-5049236
  hypo

SEQ ID NO: 325232 - DNA, 311 bp, Homo sapiens
  chr19:5058359-5058670
  hypo
gagcagtgccaggcccgggagcccttgggatggaggcagggagaatggggggctctgaggactgagggaggaggggagcccggtgaggggaggatgggtgaccagctcaggagcaggggcgggaagggggcatagaagcttcctaagcaggggagctactactcttggccatgttccaggaggatggagtggctgtaggagcaggctttcgggccagggcctgggtgtggtgggagccggggctggctctggaccctgcaggggctgccttagcctcacgctgtctgaccagcccctgcctcacgtcgtgt

SEQ ID NO: 325233 - DNA, 77 bp, Homo sapiens
  chr19:5058700-5058777
  hypo
ccgctggcttggtctggcaggagcagatggccttcattttggagtcttttgttcaaagcgggcgcttcgggttggag

SEQ ID NO: 325234 - DNA, 268 bp, Homo sapiens; identical to SEQ ID NO: 218996
  chr19:5060971-5061239
  hypo

SEQ ID NO: 325235 - DNA, 297 bp, Homo sapiens
  chr19:5064005-5064302
  hypo
cccaccctgtagccggcttgctctccttcccggcctgtgccagccacagggcagtgcgccagagccatcttgctgggtcacaggccggggccaccatagggctttgttgcgagggtggcggtcaccatggcttttccgttctgtttgcaacttggggtcccgggggcgccactggcgtttggatctgccgtggccctcctgggcttgcgtgggtggctcactctgccaggtggcctctgtccaacctgacacctggtctcgggtacttccagcgtgacgtgcacgggctctgcctcc

SEQ ID NO: 325236 - DNA, 217 bp, Homo sapiens
  chr19:5064332-5064549
  hypo
aaatggcgaaggcccgtctgcccaggcctgtgcagacactgtgaaattaactttctcaccctccagcacgcattgggctgtgccgacatctctgaagggctcttggtcggacctctgctcttggcacacattcctcggcggcgggggtggggggtagggaggagagcgttttcatccctggcacctaattgccgagagcttccgctggcaggagctg

SEQ ID NO: 325237 - DNA, 517 bp, Homo sapiens; identical to SEQ ID NO: 273050
  chr19:5068442-5068959
  hypo

SEQ ID NO: 325238 - DNA, 100 bp, Homo sapiens; identical to SEQ ID NO: 273051
  chr19:5079967-5080067
  hypo

SEQ ID NO: 325239 - DNA, 657 bp, Homo sapiens; identical to SEQ ID NO: 273052
  chr19:5080389-5081046
  hypo

SEQ ID NO: 325240 - DNA, 157 bp, Homo sapiens; identical to SEQ ID NO: 273053
  chr19:5083118-5083275
  hypo

SEQ ID NO: 325241 - DNA, 148 bp, Homo sapiens; identical to SEQ ID NO: 273054
  chr19:5087015-5087163
  hypo

SEQ ID NO: 325242 - DNA, 96 bp, Homo sapiens; identical to SEQ ID NO: 273055
  chr19:5092021-5092117
  hypo

SEQ ID NO: 325243 - DNA, 173 bp, Homo sapiens; identical to SEQ ID NO: 218998
  chr19:5102567-5102740
  hypo

SEQ ID NO: 325244 - DNA, 113 bp, Homo sapiens
  chr19:5102770-5102883
  hypo
cctggtccactgtggcctgtggatgccgcccctgacgtcagcatctctctctggcctccctgggagcagtctcagagcagtgaagagctcttcacgtccggtgctgtggcgat

SEQ ID NO: 325245 - DNA, 79 bp, Homo sapiens; identical to SEQ ID NO: 273057
  chr19:5110734-5110813
  hypo

SEQ ID NO: 325246 - DNA, 331 bp, Homo sapiens; identical to SEQ ID NO: 273058
  chr19:5132561-5132892
  hypo

SEQ ID NO: 325247 - DNA, 203 bp, Homo sapiens; identical to SEQ ID NO: 273059
  chr19:5144146-5144349
  hypo

SEQ ID NO: 325248 - DNA, 382 bp, Homo sapiens; identical to SEQ ID NO: 273060
  chr19:5148669-5149051
  hypo

SEQ ID NO: 325249 - DNA, 36 bp, Homo sapiens; identical to SEQ ID NO: 273061
  chr19:5154721-5154757
  hypo

SEQ ID NO: 325250 - DNA, 95 bp, Homo sapiens
  chr19:5155022-5155117
  hypo
ctgctgcgatttcccgacaaagactgtgtccctcttttctccatctcgaaagccttccctgtgtgcggggacagacacagcctgaaaccaaagcc

SEQ ID NO: 325251 - DNA, 173 bp, Homo sapiens; identical to SEQ ID NO: 273063
  chr19:5210689-5210862
  hypo

SEQ ID NO: 325252 - DNA, 175 bp, Homo sapiens; identical to SEQ ID NO: 273064
  chr19:5218522-5218697
  hypo

SEQ ID NO: 325253 - DNA, 73 bp, Homo sapiens; identical to SEQ ID NO: 273065
  chr19:5223285-5223358
  hypo

SEQ ID NO: 325254 - DNA, 364 bp, Homo sapiens; identical to SEQ ID NO: 273066
  chr19:5231254-5231618
  hypo

SEQ ID NO: 325255 - DNA, 988 bp, Homo sapiens; identical to SEQ ID NO: 273067
  chr19:5237605-5238593
  hypo

SEQ ID NO: 325256 - DNA, 419 bp, Homo sapiens; identical to SEQ ID NO: 219000
  chr19:5245671-5246090
  hypo

SEQ ID NO: 325257 - DNA, 69 bp, Homo sapiens; identical to SEQ ID NO: 273069
  chr19:5251285-5251354
  hypo

SEQ ID NO: 325258 - DNA, 426 bp, Homo sapiens; identical to SEQ ID NO: 273070
  chr19:5269159-5269585
  hypo

SEQ ID NO: 325259 - DNA, 100 bp, Homo sapiens; identical to SEQ ID NO: 219001
  chr19:5274368-5274468
  hypo

SEQ ID NO: 325260 - DNA, 410 bp, Homo sapiens; identical to SEQ ID NO: 273072
  chr19:5307584-5307994
  hypo

SEQ ID NO: 325261 - DNA, 184 bp, Homo sapiens; identical to SEQ ID NO: 273073
  chr19:5312165-5312349
  hypo

SEQ ID NO: 325262 - DNA, 409 bp, Homo sapiens; identical to SEQ ID NO: 273074
  chr19:5334919-5335328
  hypo

SEQ ID NO: 325263 - DNA, 223 bp, Homo sapiens; identical to SEQ ID NO: 273075
  chr19:5455292-5455515
  hypo

SEQ ID NO: 325264 - DNA, 35 bp, Homo sapiens; identical to SEQ ID NO: 273077
  chr19:5577528-5577563
  hypo

SEQ ID NO: 325265 - DNA, 111 bp, Homo sapiens; identical to SEQ ID NO: 273078
  chr19:5582381-5582492
  hypo

SEQ ID NO: 325266 - DNA, 139 bp, Homo sapiens; identical to SEQ ID NO: 219004
  chr19:5587166-5587305
  hypo

SEQ ID NO: 325267 - DNA, 453 bp, Homo sapiens; identical to SEQ ID NO: 205135
  chr19:5608066-5608519
  hypo

SEQ ID NO: 325268 - DNA, 236 bp, Homo sapiens; identical to SEQ ID NO: 219006
  chr19:5608569-5608805
  hypo

SEQ ID NO: 325269 - DNA, 35 bp, Homo sapiens; identical to SEQ ID NO: 219007
  chr19:5609545-5609580
  hypo

SEQ ID NO: 325270 - DNA, 98 bp, Homo sapiens; identical to SEQ ID NO: 273082
  chr19:5630434-5630532
  hypo

SEQ ID NO: 325271 - DNA, 41 bp, Homo sapiens; identical to SEQ ID NO: 273083
  chr19:5641156-5641197
  hypo

SEQ ID NO: 325272 - DNA, 275 bp, Homo sapiens; identical to SEQ ID NO: 273084
  chr19:5661522-5661797
  hypo

SEQ ID NO: 325273 - DNA, 103 bp, Homo sapiens; identical to SEQ ID NO: 273085
  chr19:5667770-5667873
  hypo

SEQ ID NO: 325274 - DNA, 139 bp, Homo sapiens
  chr19:5668103-5668242
  hypo
ctgtgcaggctgggatgggccggggagcaggaggacttcgcagtcaaaccaatgtgaatttgttcctaggcgcggcagctttgccccaggcggggcctcccggggccaccccatcccacacggtggcatgcagggcggg

SEQ ID NO: 325275 - DNA, 77 bp, Homo sapiens
  chr19:5668272-5668349
  hypo
agcgatgcccgcttcactcgccgctactgagtacttggaatcctgtgtcctgtctcgtggcaacaaggctatgttct

SEQ ID NO: 325276 - DNA, 92 bp, Homo sapiens
  chr19:5676242-5676334
  hypo
acctccatttctgctgcacccaccattccttgggatggcgagttagcactcactccaggccagggccgggcaaagtgcgctcaaggctggag

SEQ ID NO: 325277 - DNA, 238 bp, Homo sapiens; identical to SEQ ID NO: 273088
  chr19:5694369-5694607
  hypo

SEQ ID NO: 325278 - DNA, 366 bp, Homo sapiens; identical to SEQ ID NO: 219010
  chr19:5695870-5696236
  hypo

SEQ ID NO: 325279 - DNA, 57 bp, Homo sapiens; identical to SEQ ID NO: 273090
  chr19:5703577-5703634
  hypo

SEQ ID NO: 325280 - DNA, 222 bp, Homo sapiens; identical to SEQ ID NO: 273091
  chr19:5711861-5712083
  hypo

SEQ ID NO: 325281 - DNA, 44 bp, Homo sapiens; identical to SEQ ID NO: 273092
  chr19:5722397-5722441
  hypo

SEQ ID NO: 325282 - DNA, 70 bp, Homo sapiens
  chr19:5759561-5759631
  hypo
atgaaactccagctccaaaaaaaaaaaaaaaaaaagcaaaaataagccaagtgtagtggcgggcgcctat

SEQ ID NO: 325283 - DNA, 37 bp, Homo sapiens; identical to SEQ ID NO: 273094
  chr19:5776294-5776331
  hypo

SEQ ID NO: 325284 - DNA, 94 bp, Homo sapiens; identical to SEQ ID NO: 273095
  chr19:5784778-5784872
  hypo

SEQ ID NO: 325285 - DNA, 40 bp, Homo sapiens; identical to SEQ ID NO: 219012
  chr19:5785227-5785267
  hypo

SEQ ID NO: 325286 - DNA, 198 bp, Homo sapiens; identical to SEQ ID NO: 219013
  chr19:5785480-5785678
  hypo

SEQ ID NO: 325287 - DNA, 446 bp, Homo sapiens; identical to SEQ ID NO: 219014
  chr19:5789244-5789690
  hypo

SEQ ID NO: 325288 - DNA, 241 bp, Homo sapiens; identical to SEQ ID NO: 219015
  chr19:5789927-5790168
  hypo

SEQ ID NO: 325289 - DNA, 152 bp, Homo sapiens; identical to SEQ ID NO: 219016
  chr19:5790213-5790365
  hypo

SEQ ID NO: 325290 - DNA, 226 bp, Homo sapiens
  chr19:5792486-5792712
  hypo
aacataatactcctcggaattttggagattggttccaagaccgcatataccaaaatccgcgtatactcgtcccccagttgcccaacagaatccctgtataggaaaaatccgccctttgtatccgcaggtttcccatcctgcctccgcatttggtaggggttaaagaacccgcggatacggatggccaactgtattttatttttcgaaggccacttataagtggatg

SEQ ID NO: 325291 - DNA, 36 bp, Homo sapiens
  chr19:5792782-5792818
  hypo
aataaagcagtaaggtggattgggaatgccaccctt

SEQ ID NO: 325292 - DNA, 159 bp, Homo sapiens; identical to SEQ ID NO: 273100
  chr19:5797827-5797986
  hypo

SEQ ID NO: 325293 - DNA, 141 bp, Homo sapiens; identical to SEQ ID NO: 205137
  chr19:5804852-5804993
  hypo

SEQ ID NO: 325294 - DNA, 46 bp, Homo sapiens; identical to SEQ ID NO: 273101
  chr19:5824983-5825029
  hypo

SEQ ID NO: 325295 - DNA, 50 bp, Homo sapiens; identical to SEQ ID NO: 219018
  chr19:5825264-5825314
  hypo

SEQ ID NO: 325296 - DNA, 522 bp, Homo sapiens; identical to SEQ ID NO: 219019
  chr19:5825362-5825884
  hypo

SEQ ID NO: 325297 - DNA, 50 bp, Homo sapiens; identical to SEQ ID NO: 219020
  chr19:5826124-5826174
  hypo

SEQ ID NO: 325298 - DNA, 114 bp, Homo sapiens
  chr19:5826209-5826323
  hypo
tatcgggcaagcccacaaatgtctgcttcgatgcacccctctggggttgggtgtgccccctaaccccccagcacagtcctggccactccagtcctgctccggggcttaaagaac

SEQ ID NO: 325299 - DNA, 38 bp, Homo sapiens; identical to SEQ ID NO: 219022
  chr19:5834509-5834547
  hypo

SEQ ID NO: 325300 - DNA, 358 bp, Homo sapiens; identical to SEQ ID NO: 219023
  chr19:5844274-5844632
  hypo

SEQ ID NO: 325301 - DNA, 106 bp, Homo sapiens; identical to SEQ ID NO: 219024
  chr19:5844662-5844768
  hypo

SEQ ID NO: 325302 - DNA, 117 bp, Homo sapiens; identical to SEQ ID NO: 273107
  chr19:5846506-5846623
  hypo

SEQ ID NO: 325303 - DNA, 75 bp, Homo sapiens; identical to SEQ ID NO: 273108
  chr19:5858550-5858625
  hypo

SEQ ID NO: 325304 - DNA, 390 bp, Homo sapiens; identical to SEQ ID NO: 273109
  chr19:5867192-5867582
  hypo

SEQ ID NO: 325305 - DNA, 120 bp, Homo sapiens; identical to SEQ ID NO: 273110
  chr19:5878604-5878724
  hypo

SEQ ID NO: 325306 - DNA, 345 bp, Homo sapiens
  chr19:5896607-5896952
  hypo
caagggcctcgagacgggcacagcaggagcctcttgggcgctcactgccagtgtctggatggagagagatgccacgagtcggctgctcgctgtgcatggcagcctcctggccccagtcctggagctgttctcctgggcctccccaccctacatgtattcctgataaaggaacaccccactttctccggatggccagcactgtggacacgggctggggagtcagagagaagaggcagccgtcaaatgtgctctgagagctggggctgtgccaggagagggcccagccatgcccagcccagcgtgctcacctgcagtgaacgtgtattgtccaaccttagccactcc

SEQ ID NO: 325307 - DNA, 261 bp, Homo sapiens
  chr19:5897316-5897577
  hypo
caccggccggcagacggagactcatccacgtggtggacacaagaacaggcctgagacctcagttctgcggctgcttccagcctcacaccgccagctcagcggcgccccccacgggccctggcaccagggccccagctccaggttcccatcaatggctctattctcctgtggggcccggggctcctgggcctaatcccccttggcagtggctctgcttccctgcctggctgccaacgcctcctccttgccactctcgacccc

SEQ ID NO: 325308 - DNA, 545 bp, Homo sapiens
  chr19:5909794-5910339
  hypo
ccggccctagcctagcttttgtagcatgcaactgtctcctttttatacgccctaaagaatatatttttgaactccttgtttctgcgctgtccttcttagcccaggacattcagggtgctttgcttgttgtcaaaccagggaaaggagaaaactcctgtgcctttctgggccagcctgtcaccctggcctggtcggcagccattcccctacctcctcactcaggaactgtcacaccaggaaccggcgaggggcacagcctgtttcagaccagaaaggtcggaggccacccacggccttcaggatggcgcccgcctgcctgcctggcaacagtgacccctcagtgcagtaacaatgggcccattttctcctctggatgaacaaggaggggggttgtttgtacaaaggaaaggcaggctggggcctgtctgtgctcaagaataaaccggatgatttcctggcctgggggcaagagggaggccctctgtgttatttgtgcctcctggtagggtcctgctgggccaggtagaatctagggagtgtaggcc

SEQ ID NO: 325309 - DNA, 159 bp, Homo sapiens; identical to SEQ ID NO: 219026
  chr19:5914411-5914570
  hypo

SEQ ID NO: 325310 - DNA, 291 bp, Homo sapiens; identical to SEQ ID NO: 219027
  chr19:5915130-5915421
  hypo

SEQ ID NO: 325311 - DNA, 405 bp, Homo sapiens
  chr19:5915520-5915925
  hypo
ggtcctaacaggagtcactggctcaggaccccagggagaaacgctctccccacccacgccatgctgaccagagatcttgcagcccctgtggatgcccccgccgaggtcccccgatccccgcacccggactgctgctccctgcccctcccttgcgggtcccccaggaagccaggtgaccccaggtgggaggctgtgtgtggaggccatcctggaaggaagtttagacctgcccaggtgtggagcgaggggcacaggggcatcctaacctcagaaactgaaataaagcctttgaaaaaaaaatctgtaaaacatcaacccccaatcagaagatggcaaatggggaataaaaatagcaggtaacatgtccagcgggcccagtatctacattctggtgagcggcccgag

SEQ ID NO: 325312 - DNA, 338 bp, Homo sapiens
  chr19:5915969-5916307
  hypo
ggggtgggggtaaagtgcgggtggtggtggagagaacagggctgtggctggaccccagcactggtgacacgctgggtgggagcatgaggccccaggctgctggaggtcctcgcccggggaggtggaggccgttcctggtcaggggcttcctgaggcccctggggcatgcagaggccagggttttagttaaaagtttaatgtagttcccaaatacatttcatatgacaatcttacataaatgttccaaaacacatgggcgttatctcgttgtactcgtcactagctggctaaggcttaaagcagagacgtgtgactgggtctctcgggagggcctctgg

SEQ ID NO: 325313 - DNA, 225 bp, Homo sapiens; identical to SEQ ID NO: 219029
  chr19:5925831-5926056
  hypo

SEQ ID NO: 325314 - DNA, 150 bp, Homo sapiens; identical to SEQ ID NO: 219030
  chr19:5927750-5927900
  hypo

SEQ ID NO: 325315 - DNA, 326 bp, Homo sapiens; identical to SEQ ID NO: 219031
  chr19:5938101-5938427
  hypo

SEQ ID NO: 325316 - DNA, 158 bp, Homo sapiens; identical to SEQ ID NO: 273119
  chr19:5957316-5957474
  hypo

SEQ ID NO: 325317 - DNA, 157 bp, Homo sapiens; identical to SEQ ID NO: 273120
  chr19:5957770-5957927
  hypo

SEQ ID NO: 325318 - DNA, 162 bp, Homo sapiens; identical to SEQ ID NO: 219032
  chr19:5985339-5985501
  hypo

SEQ ID NO: 325319 - DNA, 956 bp, Homo sapiens; identical to SEQ ID NO: 219033
  chr19:5994753-5995709
  hypo

SEQ ID NO: 325320 - DNA, 519 bp, Homo sapiens; identical to SEQ ID NO: 273124
  chr19:5995925-5996444
  hypo

SEQ ID NO: 325321 - DNA, 53 bp, Homo sapiens; identical to SEQ ID NO: 219034
  chr19:5996649-5996702
  hypo

SEQ ID NO: 325322 - DNA, 522 bp, Homo sapiens; identical to SEQ ID NO: 273126
  chr19:5997028-5997550
  hypo

SEQ ID NO: 325323 - DNA, 571 bp, Homo sapiens; identical to SEQ ID NO: 273127
  chr19:5998429-5999000
  hypo

SEQ ID NO: 325324 - DNA, 450 bp, Homo sapiens; identical to SEQ ID NO: 273128
  chr19:5999240-5999690
  hypo

SEQ ID NO: 325325 - DNA, 515 bp, Homo sapiens; identical to SEQ ID NO: 219036
  chr19:6001733-6002248
  hypo

SEQ ID NO: 325326 - DNA, 654 bp, Homo sapiens; identical to SEQ ID NO: 273130
  chr19:6002450-6003104
  hypo

SEQ ID NO: 325327 - DNA, 99 bp, Homo sapiens; identical to SEQ ID NO: 273131
  chr19:6003433-6003532
  hypo

SEQ ID NO: 325328 - DNA, 225 bp, Homo sapiens; identical to SEQ ID NO: 219037
  chr19:6003832-6004057
  hypo

SEQ ID NO: 325329 - DNA, 470 bp, Homo sapiens; identical to SEQ ID NO: 96127
  chr19:6004120-6004590
  hypo

SEQ ID NO: 325330 - DNA, 403 bp, Homo sapiens; identical to SEQ ID NO: 273134
  chr19:6005135-6005538
  hypo

SEQ ID NO: 325331 - DNA, 199 bp, Homo sapiens; identical to SEQ ID NO: 219040
  chr19:6005978-6006177
  hypo

SEQ ID NO: 325332 - DNA, 482 bp, Homo sapiens; identical to SEQ ID NO: 219041
  chr19:6006879-6007361
  hypo

SEQ ID NO: 325333 - DNA, 482 bp, Homo sapiens; identical to SEQ ID NO: 219042
  chr19:6007912-6008394
  hypo

SEQ ID NO: 325334 - DNA, 94 bp, Homo sapiens; identical to SEQ ID NO: 273138
  chr19:6010177-6010271
  hypo

SEQ ID NO: 325335 - DNA, 92 bp, Homo sapiens; identical to SEQ ID NO: 219043
  chr19:6012586-6012678
  hypo

SEQ ID NO: 325336 - DNA, 46 bp, Homo sapiens; identical to SEQ ID NO: 219044
  chr19:6013009-6013055
  hypo

SEQ ID NO: 325337 - DNA, 278 bp, Homo sapiens; identical to SEQ ID NO: 273141
  chr19:6015901-6016179
  hypo

SEQ ID NO: 325338 - DNA, 398 bp, Homo sapiens; identical to SEQ ID NO: 219045
  chr19:6017220-6017618
  hypo

SEQ ID NO: 325339 - DNA, 76 bp, Homo sapiens; identical to SEQ ID NO: 219046
  chr19:6018261-6018337
  hypo

SEQ ID NO: 325340 - DNA, 135 bp, Homo sapiens; identical to SEQ ID NO: 273144
  chr19:6019758-6019893
  hypo

SEQ ID NO: 325341 - DNA, 141 bp, Homo sapiens; identical to SEQ ID NO: 273145
  chr19:6020514-6020655
  hypo

SEQ ID NO: 325342 - DNA, 390 bp, Homo sapiens; identical to SEQ ID NO: 273146
  chr19:6021709-6022099
  hypo

SEQ ID NO: 325343 - DNA, 136 bp, Homo sapiens; identical to SEQ ID NO: 273147
  chr19:6024058-6024194
  hypo

SEQ ID NO: 325344 - DNA, 521 bp, Homo sapiens; identical to SEQ ID NO: 219047
  chr19:6024682-6025203
  hypo

SEQ ID NO: 325345 - DNA, 685 bp, Homo sapiens; identical to SEQ ID NO: 273149
  chr19:6026055-6026740
  hypo

SEQ ID NO: 325346 - DNA, 580 bp, Homo sapiens; identical to SEQ ID NO: 273150
  chr19:6026959-6027539
  hypo

SEQ ID NO: 325347 - DNA, 149 bp, Homo sapiens; identical to SEQ ID NO: 273151
  chr19:6033077-6033226
  hypo

SEQ ID NO: 325348 - DNA, 164 bp, Homo sapiens; identical to SEQ ID NO: 219050
  chr19:6040234-6040398
  hypo

SEQ ID NO: 325349 - DNA, 342 bp, Homo sapiens; identical to SEQ ID NO: 219051
  chr19:6044407-6044749
  hypo

SEQ ID NO: 325350 - DNA, 686 bp, Homo sapiens; identical to SEQ ID NO: 219052
  chr19:6044993-6045679
  hypo

SEQ ID NO: 325351 - DNA, 137 bp, Homo sapiens; identical to SEQ ID NO: 219053
  chr19:6046169-6046306
  hypo

SEQ ID NO: 325352 - DNA, 181 bp, Homo sapiens; identical to SEQ ID NO: 219054
  chr19:6062926-6063107
  hypo

SEQ ID NO: 325353 - DNA, 153 bp, Homo sapiens; identical to SEQ ID NO: 219055
  chr19:6064108-6064261
  hypo

SEQ ID NO: 325354 - DNA, 36 bp, Homo sapiens; identical to SEQ ID NO: 273158
  chr19:6076061-6076097
  hypo

SEQ ID NO: 325355 - DNA, 96 bp, Homo sapiens; identical to SEQ ID NO: 273159
  chr19:6076337-6076433
  hypo

SEQ ID NO: 325356 - DNA, 32 bp, Homo sapiens; identical to SEQ ID NO: 273160
  chr19:6083195-6083227
  hypo

SEQ ID NO: 325357 - DNA, 286 bp, Homo sapiens; identical to SEQ ID NO: 219056
  chr19:6105444-6105730
  hypo

SEQ ID NO: 325358 - DNA, 38 bp, Homo sapiens; identical to SEQ ID NO: 219057
  chr19:6107003-6107041
  hypo

SEQ ID NO: 325359 - DNA, 776 bp, Homo sapiens; identical to SEQ ID NO: 205141
  chr19:6110226-6111002
  hypo

SEQ ID NO: 325360 - DNA, 267 bp, Homo sapiens; identical to SEQ ID NO: 273163
  chr19:6215002-6215269
  hypo

SEQ ID NO: 325361 - DNA, 213 bp, Homo sapiens; identical to SEQ ID NO: 273164
  chr19:6226063-6226276
  hypo

SEQ ID NO: 325362 - DNA, 235 bp, Homo sapiens; identical to SEQ ID NO: 273165
  chr19:6230445-6230680
  hypo

SEQ ID NO: 325363 - DNA, 113 bp, Homo sapiens; identical to SEQ ID NO: 273166
  chr19:6236570-6236683
  hypo

SEQ ID NO: 325364 - DNA, 219 bp, Homo sapiens; identical to SEQ ID NO: 273167
  chr19:6241968-6242187
  hypo

SEQ ID NO: 325365 - DNA, 164 bp, Homo sapiens; identical to SEQ ID NO: 273168
  chr19:6249578-6249742
  hypo

SEQ ID NO: 325366 - DNA, 141 bp, Homo sapiens; identical to SEQ ID NO: 273170
  chr19:6345241-6345382
  hypo

SEQ ID NO: 325367 - DNA, 423 bp, Homo sapiens; identical to SEQ ID NO: 273171
  chr19:6374177-6374600
  hypo

SEQ ID NO: 325368 - DNA, 143 bp, Homo sapiens; identical to SEQ ID NO: 219061
  chr19:6414854-6414997
  hypo

SEQ ID NO: 325369 - DNA, 100 bp, Homo sapiens; identical to SEQ ID NO: 273173
  chr19:6417746-6417846
  hypo

SEQ ID NO: 325370 - DNA, 148 bp, Homo sapiens; identical to SEQ ID NO: 273174
  chr19:6425751-6425899
  hypo

SEQ ID NO: 325371 - DNA, 118 bp, Homo sapiens; identical to SEQ ID NO: 273175
  chr19:6433456-6433574
  hypo

SEQ ID NO: 325372 - DNA, 120 bp, Homo sapiens; identical to SEQ ID NO: 273176
  chr19:6461712-6461832
  hypo

SEQ ID NO: 325373 - DNA, 141 bp, Homo sapiens; identical to SEQ ID NO: 273177
  chr19:6541535-6541676
  hypo

SEQ ID NO: 325374 - DNA, 337 bp, Homo sapiens; identical to SEQ ID NO: 205145
  chr19:6590881-6591218
  hypo

SEQ ID NO: 325375 - DNA, 102 bp, Homo sapiens
  chr19:6664836-6664938
  hypo
caccacgcccagcctctgcttcgtgagttttctttcccctgaggcaccctctgagttctccacgtgtcagacccatgtccaatgcaccacgctccttccttc

SEQ ID NO: 325376 - DNA, 191 bp, Homo sapiens
  chr19:6664968-6665159
  hypo
taccatcacgcagtcgaaccaggcgttcatccagcacacggacgaccaccttctccccagcctccaggtgtaccacaccacccaggaagctgctgtcccaccagacccgggagctgctggtggcccgtccgcagggtgactgctggctgaccaacagctccagctcctcggggtagcggggtgtgcgcttg

SEQ ID NO: 325377 - DNA, 378 bp, Homo sapiens; identical to SEQ ID NO: 273179
  chr19:6744347-6744725
  hypo

SEQ ID NO: 325378 - DNA, 236 bp, Homo sapiens; identical to SEQ ID NO: 273180
  chr19:6750239-6750475
  hypo

SEQ ID NO: 325379 - DNA, 270 bp, Homo sapiens; identical to SEQ ID NO: 273181
  chr19:6829821-6830091
  hypo

SEQ ID NO: 325380 - DNA, 120 bp, Homo sapiens; identical to SEQ ID NO: 219063
  chr19:7100509-7100629
  hypo

SEQ ID NO: 325381 - DNA, 38 bp, Homo sapiens; identical to SEQ ID NO: 273183
  chr19:7103100-7103138
  hypo

SEQ ID NO: 325382 - DNA, 82 bp, Homo sapiens; identical to SEQ ID NO: 219064
  chr19:7116309-7116391
  hypo

SEQ ID NO: 325383 - DNA, 180 bp, Homo sapiens; identical to SEQ ID NO: 273185
  chr19:7135548-7135728
  hypo

SEQ ID NO: 325384 - DNA, 89 bp, Homo sapiens; identical to SEQ ID NO: 273186
  chr19:7141680-7141769
  hypo

SEQ ID NO: 325385 - DNA, 38 bp, Homo sapiens
  chr19:7157628-7157666
  hypo
gggttcttgtgacccacggtgcaagcacagttatgcct

SEQ ID NO: 325386 - DNA, 43 bp, Homo sapiens; identical to SEQ ID NO: 273188
  chr19:7158216-7158259
  hypo

SEQ ID NO: 325387 - DNA, 103 bp, Homo sapiens; identical to SEQ ID NO: 273189
  chr19:7169226-7169329
  hypo

SEQ ID NO: 325388 - DNA, 96 bp, Homo sapiens; identical to SEQ ID NO: 219066
  chr19:7194737-7194833
  hypo

SEQ ID NO: 325389 - DNA, 34 bp, Homo sapiens; identical to SEQ ID NO: 273191
  chr19:7196503-7196537
  hypo

SEQ ID NO: 325390 - DNA, 81 bp, Homo sapiens; identical to SEQ ID NO: 273192
  chr19:7236595-7236676
  hypo

SEQ ID NO: 325391 - DNA, 42 bp, Homo sapiens; identical to SEQ ID NO: 273193
  chr19:7245761-7245803
  hypo

SEQ ID NO: 325392 - DNA, 42 bp, Homo sapiens; identical to SEQ ID NO: 273194
  chr19:7256901-7256943
  hypo

SEQ ID NO: 325393 - DNA, 84 bp, Homo sapiens; identical to SEQ ID NO: 273195
  chr19:7265367-7265451
  hypo

SEQ ID NO: 325394 - DNA, 404 bp, Homo sapiens
  chr19:7267299-7267703
  hypo
aagctttctagaacaaggcacgagacactgcttagaaccctgtatccccggcgtacctttctggcagtgactatgagtccaacatcgttcgacaaactgcccgttgatgacggtggcggggcagttggtcttgcccttcgcggtacccggacagatgtctccacactcctcgttgtcatctttgttcaacacgatgtaattatcctccacggaatccaggatacgggaccagtcgatagtggccaagtaacagagctcattgttcttctcgatgcggacagaaccccgggtgatgttcatcaggttgtagaggccgagttccttgaggtgaaccatctcgaagatgaccagcgcgtagttaaagaacagtcgtgatccccggatgaccgtgaggttggggaaca

SEQ ID NO: 325395 - DNA, 220 bp, Homo sapiens
  chr19:7267747-7267967
  hypo
taatcagtgatcatgatgagtttggggaaactgaggtctcggaaatcttcgggcctcgttttgaacatcaagagtatctgcaagtgtccttcgatgacagagcaattctccagctcatgcaacctagtgaggttgttccggatatccatgccgggacacactacaagagaaaatgaacagaaagcaagacaggtgagcagacgcacggtggatgcatcag

SEQ ID NO: 325396 - DNA, 120 bp, Homo sapiens; identical to SEQ ID NO: 273197
  chr19:7274391-7274511
  hypo

SEQ ID NO: 325397 - DNA, 1375 bp, Homo sapiens; identical to SEQ ID NO: 293433
  chr19:7293746-7295121
  hypo

SEQ ID NO: 325398 - DNA, 1066 bp, Homo sapiens; identical to SEQ ID NO: 293434
  chr19:7459630-7460696
  hypo

SEQ ID NO: 325399 - DNA, 188 bp, Homo sapiens; identical to SEQ ID NO: 219070
  chr19:7484059-7484247
  hypo

SEQ ID NO: 325400 - DNA, 179 bp, Homo sapiens; identical to SEQ ID NO: 219071
  chr19:7484791-7484970
  hypo

SEQ ID NO: 325401 - DNA, 96 bp, Homo sapiens; identical to SEQ ID NO: 273200
  chr19:7487170-7487266
  hypo

SEQ ID NO: 325402 - DNA, 100 bp, Homo sapiens; identical to SEQ ID NO: 273201
  chr19:7489520-7489620
  hypo

SEQ ID NO: 325403 - DNA, 39 bp, Homo sapiens; identical to SEQ ID NO: 273202
  chr19:7489860-7489899
  hypo

SEQ ID NO: 325404 - DNA, 273 bp, Homo sapiens; identical to SEQ ID NO: 219072
  chr19:7493740-7494013
  hypo

SEQ ID NO: 325405 - DNA, 42 bp, Homo sapiens; identical to SEQ ID NO: 273204
  chr19:7524840-7524882
  hypo

SEQ ID NO: 325406 - DNA, 201 bp, Homo sapiens; identical to SEQ ID NO: 273205
  chr19:7525505-7525706
  hypo

SEQ ID NO: 325407 - DNA, 220 bp, Homo sapiens; identical to SEQ ID NO: 273206
  chr19:7531952-7532172
  hypo

SEQ ID NO: 325408 - DNA, 316 bp, Homo sapiens; identical to SEQ ID NO: 219073
  chr19:7535298-7535614
  hypo

SEQ ID NO: 325409 - DNA, 154 bp, Homo sapiens
  chr19:7543311-7543465
  hypo
ttagctccacaacgctggccccggacatacagtctgggacaggtgctgcatctcggataaacggcctgccctctccctgcccccacagtcccacaccctcctggctgtgcctcatgctcccggggactcatctctaacacggccccgtcccacc

SEQ ID NO: 325410 - DNA, 242 bp, Homo sapiens; identical to SEQ ID NO: 293435
  chr19:7553842-7554084
  hypo

SEQ ID NO: 325411 - DNA, 180 bp, Homo sapiens; identical to SEQ ID NO: 273209
  chr19:7555031-7555211
  hypo

SEQ ID NO: 325412 - DNA, 663 bp, Homo sapiens; identical to SEQ ID NO: 273210
  chr19:7619582-7620245
  hypo

SEQ ID NO: 325413 - DNA, 232 bp, Homo sapiens; identical to SEQ ID NO: 273211
  chr19:7621735-7621967
  hypo

SEQ ID NO: 325414 - DNA, 172 bp, Homo sapiens; identical to SEQ ID NO: 273212
  chr19:7626304-7626476
  hypo

SEQ ID NO: 325415 - DNA, 92 bp, Homo sapiens; identical to SEQ ID NO: 273213
  chr19:7646040-7646132
  hypo

SEQ ID NO: 325416 - DNA, 159 bp, Homo sapiens; identical to SEQ ID NO: 273214
  chr19:7655856-7656015
  hypo

SEQ ID NO: 325417 - DNA, 83 bp, Homo sapiens; identical to SEQ ID NO: 205151
  chr19:7660603-7660686
  hypo

SEQ ID NO: 325418 - DNA, 278 bp, Homo sapiens; identical to SEQ ID NO: 55532
  chr19:7660714-7660992
  hypo

SEQ ID NO: 325419 - DNA, 1166 bp, Homo sapiens; identical to SEQ ID NO: 205153
  chr19:7676864-7678030
  hypo

SEQ ID NO: 325420 - DNA, 613 bp, Homo sapiens; identical to SEQ ID NO: 273216
  chr19:7680032-7680645
  hypo

SEQ ID NO: 325421 - DNA, 99 bp, Homo sapiens; identical to SEQ ID NO: 273217
  chr19:7681577-7681676
  hypo

SEQ ID NO: 325422 - DNA, 121 bp, Homo sapiens; identical to SEQ ID NO: 219078
  chr19:7682207-7682328
  hypo

SEQ ID NO: 325423 - DNA, 90 bp, Homo sapiens; identical to SEQ ID NO: 219079
  chr19:7682911-7683001
  hypo

SEQ ID NO: 325424 - DNA, 284 bp, Homo sapiens; identical to SEQ ID NO: 273220
  chr19:7685294-7685578
  hypo

SEQ ID NO: 325425 - DNA, 109 bp, Homo sapiens; identical to SEQ ID NO: 219081
  chr19:7701077-7701186
  hypo

SEQ ID NO: 325426 - DNA, 259 bp, Homo sapiens; identical to SEQ ID NO: 219082
  chr19:7711957-7712216
  hypo

SEQ ID NO: 325427 - DNA, 61 bp, Homo sapiens; identical to SEQ ID NO: 273223
  chr19:7747699-7747760
  hypo

SEQ ID NO: 325428 - DNA, 100 bp, Homo sapiens; identical to SEQ ID NO: 219083
  chr19:7838387-7838487
  hypo

SEQ ID NO: 325429 - DNA, 44 bp, Homo sapiens; identical to SEQ ID NO: 273225
  chr19:7862879-7862923
  hypo

SEQ ID NO: 325430 - DNA, 146 bp, Homo sapiens
  chr19:7914804-7914950
  hypo
cccagggccctgatgagcagcgagatgcccctccccgctgcgctgccctgagcccccccacctgcccgtcccccctagatgcctgaggaggaggccttctgtgtgttcgtgcggctgatgcaggagtaccggctgcgggagctctt

SEQ ID NO: 325431 - DNA, 196 bp, Homo sapiens; identical to SEQ ID NO: 273227
  chr19:7917147-7917343
  hypo

SEQ ID NO: 325432 - DNA, 312 bp, Homo sapiens; identical to SEQ ID NO: 273228
  chr19:7920730-7921042
  hypo

SEQ ID NO: 325433 - DNA, 372 bp, Homo sapiens; identical to SEQ ID NO: 219084
  chr19:7972036-7972408
  hypo

SEQ ID NO: 325434 - DNA, 50 bp, Homo sapiens; identical to SEQ ID NO: 219085
  chr19:7989496-7989546
  hypo

SEQ ID NO: 325435 - DNA, 170 bp, Homo sapiens; identical to SEQ ID NO: 205157
  chr19:7990126-7990296
  hypo

SEQ ID NO: 325436 - DNA, 300 bp, Homo sapiens; identical to SEQ ID NO: 205158
  chr19:7990894-7991194
  hypo

SEQ ID NO: 325437 - DNA, 389 bp, Homo sapiens; identical to SEQ ID NO: 219088
  chr19:7991810-7992199
  hypo

SEQ ID NO: 325438 - DNA, 145 bp, Homo sapiens; identical to SEQ ID NO: 273232
  chr19:7992972-7993117
  hypo

SEQ ID NO: 325439 - DNA, 58 bp, Homo sapiens; identical to SEQ ID NO: 273233
  chr19:7993373-7993431
  hypo

SEQ ID NO: 325440 - DNA, 439 bp, Homo sapiens; identical to SEQ ID NO: 273234
  chr19:7993744-7994183
  hypo

SEQ ID NO: 325441 - DNA, 133 bp, Homo sapiens; identical to SEQ ID NO: 273235
  chr19:7997639-7997772
  hypo

SEQ ID NO: 325442 - DNA, 486 bp, Homo sapiens; identical to SEQ ID NO: 273236
  chr19:7998974-7999460
  hypo

SEQ ID NO: 325443 - DNA, 97 bp, Homo sapiens; identical to SEQ ID NO: 219090
  chr19:8004778-8004875
  hypo

SEQ ID NO: 325444 - DNA, 206 bp, Homo sapiens; identical to SEQ ID NO: 273238
  chr19:8028628-8028834
  hypo

SEQ ID NO: 325445 - DNA, 235 bp, Homo sapiens; identical to SEQ ID NO: 273239
  chr19:8052094-8052329
  hypo

SEQ ID NO: 325446 - DNA, 89 bp, Homo sapiens; identical to SEQ ID NO: 273240
  chr19:8052777-8052866
  hypo

SEQ ID NO: 325447 - DNA, 49 bp, Homo sapiens
  chr19:8082469-8082518
  hypo
attaatccatgaggaagggtcggctaggcagagaagagaggtggggagt

SEQ ID NO: 325448 - DNA, 56 bp, Homo sapiens
  chr19:8082560-8082616
  hypo
agggaggatcattcagggagcaggggtgccggttcggaggggagatcacagtgagg

SEQ ID NO: 325449 - DNA, 80 bp, Homo sapiens; identical to SEQ ID NO: 205159
  chr19:8115155-8115235
  hypo

SEQ ID NO: 325450 - DNA, 175 bp, Homo sapiens; identical to SEQ ID NO: 273243
  chr19:8127043-8127218
  hypo

SEQ ID NO: 325451 - DNA, 145 bp, Homo sapiens; identical to SEQ ID NO: 219092
  chr19:8148323-8148468
  hypo

SEQ ID NO: 325452 - DNA, 604 bp, Homo sapiens; identical to SEQ ID NO: 273245
  chr19:8191121-8191725
  hypo

SEQ ID NO: 325453 - DNA, 99 bp, Homo sapiens; identical to SEQ ID NO: 273246
  chr19:8201335-8201434
  hypo

SEQ ID NO: 325454 - DNA, 37 bp, Homo sapiens; identical to SEQ ID NO: 273247
  chr19:8203390-8203427
  hypo

SEQ ID NO: 325455 - DNA, 52 bp, Homo sapiens
  chr19:8253593-8253645
  hypo
tgggattacaggcgtgagccaccacgtctagtcgactgggtggtgatcttat

SEQ ID NO: 325456 - DNA, 706 bp, Homo sapiens; identical to SEQ ID NO: 225771
  chr19:8274271-8274977
  hypo

SEQ ID NO: 325457 - DNA, 45 bp, Homo sapiens; identical to SEQ ID NO: 273249
  chr19:8440196-8440241
  hypo

SEQ ID NO: 325458 - DNA, 76 bp, Homo sapiens; identical to SEQ ID NO: 273250
  chr19:8463148-8463224
  hypo

SEQ ID NO: 325459 - DNA, 253 bp, Homo sapiens; identical to SEQ ID NO: 273251
  chr19:8468435-8468688
  hypo

SEQ ID NO: 325460 - DNA, 120 bp, Homo sapiens; identical to SEQ ID NO: 273252
  chr19:8472051-8472171
  hypo

SEQ ID NO: 325461 - DNA, 120 bp, Homo sapiens; identical to SEQ ID NO: 273253
  chr19:8474998-8475118
  hypo

SEQ ID NO: 325462 - DNA, 40 bp, Homo sapiens
  chr19:8475525-8475565
  hypo
aggctatttaattactttcgaagtatctccccagaaagca

SEQ ID NO: 325463 - DNA, 228 bp, Homo sapiens; identical to SEQ ID NO: 273255
  chr19:8495657-8495885
  hypo

SEQ ID NO: 325464 - DNA, 159 bp, Homo sapiens; identical to SEQ ID NO: 219095
  chr19:8526868-8527027
  hypo

SEQ ID NO: 325465 - DNA, 156 bp, Homo sapiens; identical to SEQ ID NO: 219096
  chr19:8528411-8528567
  hypo

SEQ ID NO: 325466 - DNA, 97 bp, Homo sapiens; identical to SEQ ID NO: 273258
  chr19:8535012-8535109
  hypo

SEQ ID NO: 325467 - DNA, 38 bp, Homo sapiens; identical to SEQ ID NO: 219097
  chr19:8539870-8539908
  hypo

SEQ ID NO: 325468 - DNA, 118 bp, Homo sapiens; identical to SEQ ID NO: 273260
  chr19:8546611-8546729
  hypo

SEQ ID NO: 325469 - DNA, 37 bp, Homo sapiens; identical to SEQ ID NO: 273261
  chr19:8547111-8547148
  hypo

SEQ ID NO: 325470 - DNA, 164 bp, Homo sapiens; identical to SEQ ID NO: 273262
  chr19:8554605-8554769
  hypo

SEQ ID NO: 325471 - DNA, 293 bp, Homo sapiens; identical to SEQ ID NO: 219098
  chr19:8554978-8555271
  hypo

SEQ ID NO: 325472 - DNA, 188 bp, Homo sapiens; identical to SEQ ID NO: 273264
  chr19:8575552-8575740
  hypo

SEQ ID NO: 325473 - DNA, 772 bp, Homo sapiens; identical to SEQ ID NO: 219099
  chr19:8576017-8576789
  hypo

SEQ ID NO: 325474 - DNA, 65 bp, Homo sapiens; identical to SEQ ID NO: 219100
  chr19:8577130-8577195
  hypo

SEQ ID NO: 325475 - DNA, 227 bp, Homo sapiens; identical to SEQ ID NO: 225772
  chr19:8579005-8579232
  hypo

SEQ ID NO: 325476 - DNA, 204 bp, Homo sapiens; identical to SEQ ID NO: 219101
  chr19:8587385-8587589
  hypo

SEQ ID NO: 325477 - DNA, 179 bp, Homo sapiens; identical to SEQ ID NO: 273268
  chr19:8604833-8605012
  hypo

SEQ ID NO: 325478 - DNA, 209 bp, Homo sapiens; identical to SEQ ID NO: 219102
  chr19:8606638-8606847
  hypo

SEQ ID NO: 325479 - DNA, 228 bp, Homo sapiens; identical to SEQ ID NO: 273270
  chr19:8618012-8618240
  hypo

SEQ ID NO: 325480 - DNA, 55 bp, Homo sapiens; identical to SEQ ID NO: 273271
  chr19:8934836-8934891
  hypo

SEQ ID NO: 325481 - DNA, 126 bp, Homo sapiens
  chr19:9128987-9129113
  hypo
accctcctccagttcccctccgcccgcccagccaacagagtgacctttcaaaaatgcaacaccggccatgccccgccccggtccgaattcttcagtgccttctcaccgccctcgggaccaagtcca

SEQ ID NO: 325482 - DNA, 113 bp, Homo sapiens
  chr19:9129229-9129342
  hypo
aattaccctccttccctttacctgattctgtgtcccctaattctctccaggcctcccctacctccctccccagacagaaagcagagctccccgccctgttcccaaagcacctt

SEQ ID NO: 325483 - DNA, 157 bp, Homo sapiens; identical to SEQ ID NO: 273273
  chr19:9130022-9130179
  hypo

SEQ ID NO: 325484 - DNA, 223 bp, Homo sapiens; identical to SEQ ID NO: 273274
  chr19:9204274-9204497
  hypo

SEQ ID NO: 325485 - DNA, 86 bp, Homo sapiens; identical to SEQ ID NO: 219103
  chr19:9343354-9343440
  hypo

SEQ ID NO: 325486 - DNA, 44 bp, Homo sapiens; identical to SEQ ID NO: 219104
  chr19:9371593-9371637
  hypo

SEQ ID NO: 325487 - DNA, 37 bp, Homo sapiens; identical to SEQ ID NO: 273277
  chr19:9459898-9459935
  hypo

SEQ ID NO: 325488 - DNA, 217 bp, Homo sapiens; identical to SEQ ID NO: 205164
  chr19:9648914-9649131
  hypo

SEQ ID NO: 325489 - DNA, 101 bp, Homo sapiens; identical to SEQ ID NO: 293476
  chr19:9649390-9649491
  hypo

SEQ ID NO: 325490 - DNA, 91 bp, Homo sapiens; identical to SEQ ID NO: 273278
  chr19:9845537-9845628
  hypo

SEQ ID NO: 325491 - DNA, 105 bp, Homo sapiens; identical to SEQ ID NO: 273279
  chr19:9894646-9894751
  hypo

SEQ ID NO: 325492 - DNA, 38 bp, Homo sapiens; identical to SEQ ID NO: 273280
  chr19:9921966-9922004
  hypo

SEQ ID NO: 325493 - DNA, 38 bp, Homo sapiens
  chr19:9937315-9937353
  hypo
ataaataaataaataaataaataaataaaattaaaaaa

SEQ ID NO: 325494 - DNA, 249 bp, Homo sapiens; identical to SEQ ID NO: 219107
  chr19:9960939-9961188
  hypo

SEQ ID NO: 325495 - DNA, 86 bp, Homo sapiens; identical to SEQ ID NO: 273283
  chr19:9961443-9961529
  hypo

SEQ ID NO: 325496 - DNA, 135 bp, Homo sapiens; identical to SEQ ID NO: 273284
  chr19:9961559-9961694
  hypo

SEQ ID NO: 325497 - DNA, 226 bp, Homo sapiens; identical to SEQ ID NO: 273285
  chr19:9965157-9965383
  hypo

SEQ ID NO: 325498 - DNA, 91 bp, Homo sapiens; identical to SEQ ID NO: 273286
  chr19:9967993-9968084
  hypo

SEQ ID NO: 325499 - DNA, 170 bp, Homo sapiens; identical to SEQ ID NO: 273287
  chr19:10016590-10016760
  hypo

SEQ ID NO: 325500 - DNA, 274 bp, Homo sapiens
  chr19:10142052-10142326
  hypo
ggagctccggcagtggcgataagagtccgacagtccgacttccagtgagggcccgcacagaccgggcatggcttggaaggaatgccgggctgcgggcattccttggcccatggccaggttttcaacccttgaagcaaggtcctggagcggggatttggacgtcttgaggttcttacacgtaggcggtgcagctggggtttgtcttagggcagaggcaagcctctgcagttctgaaatacgccgctgccaggcagcctcttccctgttattgaac

SEQ ID NO: 325501 - DNA, 33 bp, Homo sapiens; identical to SEQ ID NO: 273289
  chr19:10171191-10171224
  hypo

SEQ ID NO: 325502 - DNA, 226 bp, Homo sapiens; identical to SEQ ID NO: 205168
  chr19:10197446-10197672
  hypo

SEQ ID NO: 325503 - DNA, 42 bp, Homo sapiens; identical to SEQ ID NO: 273290
  chr19:10204397-10204439
  hypo

SEQ ID NO: 325504 - DNA, 114 bp, Homo sapiens; identical to SEQ ID NO: 273291
  chr19:10220395-10220509
  hypo

SEQ ID NO: 325505 - DNA, 143 bp, Homo sapiens; identical to SEQ ID NO: 219110
  chr19:10231242-10231385
  hypo

SEQ ID NO: 325506 - DNA, 115 bp, Homo sapiens; identical to SEQ ID NO: 219111
  chr19:10246096-10246211
  hypo

SEQ ID NO: 325507 - DNA, 253 bp, Homo sapiens; identical to SEQ ID NO: 219112
  chr19:10246253-10246506
  hypo

SEQ ID NO: 325508 - DNA, 416 bp, Homo sapiens; identical to SEQ ID NO: 219113
  chr19:10246566-10246982
  hypo

SEQ ID NO: 325509 - DNA, 262 bp, Homo sapiens; identical to SEQ ID NO: 225775
  chr19:10252656-10252918
  hypo

SEQ ID NO: 325510 - DNA, 210 bp, Homo sapiens; identical to SEQ ID NO: 293487
  chr19:10253329-10253539
  hypo

SEQ ID NO: 325511 - DNA, 90 bp, Homo sapiens; identical to SEQ ID NO: 219114
  chr19:10253815-10253905
  hypo

SEQ ID NO: 325512 - DNA, 32 bp, Homo sapiens; identical to SEQ ID NO: 273296
  chr19:10295209-10295241
  hypo

SEQ ID NO: 325513 - DNA, 31 bp, Homo sapiens; identical to SEQ ID NO: 273297
  chr19:10295301-10295332
  hypo

SEQ ID NO: 325514 - DNA, 145 bp, Homo sapiens; identical to SEQ ID NO: 219115
  chr19:10295674-10295819
  hypo

SEQ ID NO: 325515 - DNA, 114 bp, Homo sapiens; identical to SEQ ID NO: 273299
  chr19:10338378-10338492
  hypo

SEQ ID NO: 325516 - DNA, 146 bp, Homo sapiens; identical to SEQ ID NO: 273300
  chr19:10350517-10350663
  hypo

SEQ ID NO: 325517 - DNA, 184 bp, Homo sapiens; identical to SEQ ID NO: 225777
  chr19:10363159-10363343
  hypo

SEQ ID NO: 325518 - DNA, 58 bp, Homo sapiens; identical to SEQ ID NO: 219116
  chr19:10370252-10370310
  hypo

SEQ ID NO: 325519 - DNA, 109 bp, Homo sapiens; identical to SEQ ID NO: 219117
  chr19:10370575-10370684
  hypo

SEQ ID NO: 325520 - DNA, 1014 bp, Homo sapiens; identical to SEQ ID NO: 293495
  chr19:10381049-10382063
  hypo

SEQ ID NO: 325521 - DNA, 42 bp, Homo sapiens; identical to SEQ ID NO: 273302
  chr19:10385884-10385926
  hypo

SEQ ID NO: 325522 - DNA, 42 bp, Homo sapiens; identical to SEQ ID NO: 273303
  chr19:10394496-10394538
  hypo

SEQ ID NO: 325523 - DNA, 499 bp, Homo sapiens; identical to SEQ ID NO: 273304
  chr19:10395580-10396079
  hypo

SEQ ID NO: 325524 - DNA, 284 bp, Homo sapiens; identical to SEQ ID NO: 293497
  chr19:10399791-10400075
  hypo

SEQ ID NO: 325525 - DNA, 214 bp, Homo sapiens; identical to SEQ ID NO: 205174
  chr19:10400761-10400975
  hypo

SEQ ID NO: 325526 - DNA, 306 bp, Homo sapiens; identical to SEQ ID NO: 273305
  chr19:10420150-10420456
  hypo

SEQ ID NO: 325527 - DNA, 329 bp, Homo sapiens; identical to SEQ ID NO: 273306
  chr19:10432996-10433325
  hypo

SEQ ID NO: 325528 - DNA, 100 bp, Homo sapiens; identical to SEQ ID NO: 219120
  chr19:10464757-10464857
  hypo

SEQ ID NO: 325529 - DNA, 497 bp, Homo sapiens; identical to SEQ ID NO: 293505
  chr19:10529636-10530133
  hypo

SEQ ID NO: 325530 - DNA, 758 bp, Homo sapiens; identical to SEQ ID NO: 205178
  chr19:10530526-10531284
  hypo

SEQ ID NO: 325531 - DNA, 145 bp, Homo sapiens; identical to SEQ ID NO: 225785
  chr19:10589794-10589939
  hypo

SEQ ID NO: 325532 - DNA, 35 bp, Homo sapiens; identical to SEQ ID NO: 293509
  chr19:10616223-10616258
  hypo

SEQ ID NO: 325533 - DNA, 139 bp, Homo sapiens; identical to SEQ ID NO: 219124
  chr19:10665638-10665777
  hypo

SEQ ID NO: 325534 - DNA, 157 bp, Homo sapiens; identical to SEQ ID NO: 219125
  chr19:10665807-10665964
  hypo

SEQ ID NO: 325535 - DNA, 116 bp, Homo sapiens; identical to SEQ ID NO: 219126
  chr19:10685492-10685608
  hypo

SEQ ID NO: 325536 - DNA, 120 bp, Homo sapiens; identical to SEQ ID NO: 219127
  chr19:10687540-10687660
  hypo

SEQ ID NO: 325537 - DNA, 207 bp, Homo sapiens; identical to SEQ ID NO: 273312
  chr19:10687720-10687927
  hypo

SEQ ID NO: 325538 - DNA, 42 bp, Homo sapiens; identical to SEQ ID NO: 273313
  chr19:10689002-10689044
  hypo

SEQ ID NO: 325539 - DNA, 130 bp, Homo sapiens; identical to SEQ ID NO: 205179
  chr19:10691749-10691879
  hypo

SEQ ID NO: 325540 - DNA, 145 bp, Homo sapiens; identical to SEQ ID NO: 273314
  chr19:10732739-10732884
  hypo

SEQ ID NO: 325541 - DNA, 104 bp, Homo sapiens; identical to SEQ ID NO: 273315
  chr19:10742231-10742335
  hypo

SEQ ID NO: 325542 - DNA, 108 bp, Homo sapiens; identical to SEQ ID NO: 219130
  chr19:10747314-10747422
  hypo

SEQ ID NO: 325543 - DNA, 544 bp, Homo sapiens; identical to SEQ ID NO: 273318
  chr19:10792601-10793145
  hypo

SEQ ID NO: 325544 - DNA, 36 bp, Homo sapiens; identical to SEQ ID NO: 219132
  chr19:10794362-10794398
  hypo

SEQ ID NO: 325545 - DNA, 83 bp, Homo sapiens; identical to SEQ ID NO: 273320
  chr19:10817621-10817704
  hypo

SEQ ID NO: 325546 - DNA, 317 bp, Homo sapiens; identical to SEQ ID NO: 273321
  chr19:10818162-10818479
  hypo

SEQ ID NO: 325547 - DNA, 147 bp, Homo sapiens; identical to SEQ ID NO: 273322
  chr19:10822778-10822925
  hypo

SEQ ID NO: 325548 - DNA, 335 bp, Homo sapiens; identical to SEQ ID NO: 219133
  chr19:10823268-10823603
  hypo

SEQ ID NO: 325549 - DNA, 45 bp, Homo sapiens; identical to SEQ ID NO: 219134
  chr19:10823633-10823678
  hypo

SEQ ID NO: 325550 - DNA, 213 bp, Homo sapiens; identical to SEQ ID NO: 219135
  chr19:10823721-10823934
  hypo

SEQ ID NO: 325551 - DNA, 31 bp, Homo sapiens; identical to SEQ ID NO: 219136
  chr19:10824430-10824461
  hypo

SEQ ID NO: 325552 - DNA, 164 bp, Homo sapiens; identical to SEQ ID NO: 273325
  chr19:10848455-10848619
  hypo

SEQ ID NO: 325553 - DNA, 204 bp, Homo sapiens
  chr19:10859009-10859213
  hypo
aaaccagcaggactcgcggctggacaaggcgggtgggtgagggccaggggagccccaggtctgcagcctcgtgaggggtttctcccctccctgccctttggggtgaccacagggatgcagtggcacctacctgcggacactgtgtgggccgagcactgtaaggcttgggcgtccttgctgggtgaccaatggctattgttggaa

SEQ ID NO: 325554 - DNA, 142 bp, Homo sapiens
  chr19:10872393-10872535
  hypo
ccaggcagatctgacctcaacgccagctctcagcttggcctcccaagactcctcactttcgtcctctggccccgcccaacctggcaagaaggcgtgtctccagtgagagacagcagccgatgggcccaccacctcttcttta

SEQ ID NO: 325555 - DNA, 400 bp, Homo sapiens; identical to SEQ ID NO: 273328
  chr19:10874561-10874961
  hypo

SEQ ID NO: 325556 - DNA, 155 bp, Homo sapiens; identical to SEQ ID NO: 219138
  chr19:10875504-10875659
  hypo

SEQ ID NO: 325557 - DNA, 207 bp, Homo sapiens; identical to SEQ ID NO: 273331
  chr19:10881732-10881939
  hypo

SEQ ID NO: 325558 - DNA, 298 bp, Homo sapiens; identical to SEQ ID NO: 273332
  chr19:10907904-10908202
  hypo

SEQ ID NO: 325559 - DNA, 90 bp, Homo sapiens; identical to SEQ ID NO: 273333
  chr19:10927555-10927645
  hypo

SEQ ID NO: 325560 - DNA, 57 bp, Homo sapiens; identical to SEQ ID NO: 273334
  chr19:10928043-10928100
  hypo

SEQ ID NO: 325561 - DNA, 129 bp, Homo sapiens; identical to SEQ ID NO: 273335
  chr19:10928842-10928971
  hypo

SEQ ID NO: 325562 - DNA, 74 bp, Homo sapiens; identical to SEQ ID NO: 219139
  chr19:10941838-10941912
  hypo

SEQ ID NO: 325563 - DNA, 117 bp, Homo sapiens; identical to SEQ ID NO: 219140
  chr19:10949225-10949342
  hypo

SEQ ID NO: 325564 - DNA, 550 bp, Homo sapiens; identical to SEQ ID NO: 273338
  chr19:11001589-11002139
  hypo

SEQ ID NO: 325565 - DNA, 151 bp, Homo sapiens
  chr19:11002590-11002741
  hypo
gattgaaaagtatgacttgcttcccggaggcagcactgaagtcactttattgtgtttccagacaagccccatgaatgcagtgtgcactgcccctcctccctctgtcccttccccgcccatctgtacacctgtggtgcgtaggttttacacc

SEQ ID NO: 325566 - DNA, 191 bp, Homo sapiens; identical to SEQ ID NO: 219141
  chr19:11003087-11003278
  hypo

SEQ ID NO: 325567 - DNA, 446 bp, Homo sapiens; identical to SEQ ID NO: 219142
  chr19:11004769-11005215
  hypo

SEQ ID NO: 325568 - DNA, 173 bp, Homo sapiens; identical to SEQ ID NO: 219143
  chr19:11008196-11008369
  hypo

SEQ ID NO: 325569 - DNA, 45 bp, Homo sapiens; identical to SEQ ID NO: 219144
  chr19:11017077-11017122
  hypo

SEQ ID NO: 325570 - DNA, 263 bp, Homo sapiens; identical to SEQ ID NO: 273344
  chr19:11026626-11026889
  hypo

SEQ ID NO: 325571 - DNA, 387 bp, Homo sapiens; identical to SEQ ID NO: 219145
  chr19:11030249-11030636
  hypo

SEQ ID NO: 325572 - DNA, 196 bp, Homo sapiens; identical to SEQ ID NO: 273346
  chr19:11031991-11032187
  hypo

SEQ ID NO: 325573 - DNA, 180 bp, Homo sapiens; identical to SEQ ID NO: 273347
  chr19:11068308-11068488
  hypo

SEQ ID NO: 325574 - DNA, 39 bp, Homo sapiens; identical to SEQ ID NO: 273348
  chr19:11077567-11077606
  hypo

SEQ ID NO: 325575 - DNA, 101 bp, Homo sapiens; identical to SEQ ID NO: 273349
  chr19:11084520-11084621
  hypo

SEQ ID NO: 325576 - DNA, 36 bp, Homo sapiens; identical to SEQ ID NO: 219146
  chr19:11117137-11117173
  hypo

SEQ ID NO: 325577 - DNA, 367 bp, Homo sapiens
  chr19:11128616-11128983
  hypo
agggcaaaaggcagcagaagcgcaaggctgctgagcctctgctccccacgcttcttcaggaactctccccagccttcaccacagccatgcgtccttctgtctattggctgtgccgcctggttggctgtggcttccagcggggctggagatgggttcatggtggacacagcacctccctcgtggagctgcttgggggcaaaccacgagtagtccctgggactccagcttcgagccctgtctttacggaccaccccgtctagactttctgagtggcttccctcccccactgaaaactccctgccccagagttcctcccagagcccgtcccctttgggactcagctttattaccgcctccaccctctcct

SEQ ID NO: 325578 - DNA, 274 bp, Homo sapiens
  chr19:11129445-11129719
  hypo
gcccttcacgtcctcgccagtctctcttcctccctccctccctcagctgccctaaacacagtttctctgcccactcggagggctgtggccatgttggcctcgcccctgacagccagtggctatgggtttgcacagtgagccattgatgagagaccggcacttgactctcatttccttgttccatcagaacgctgtccaactgggcgtacgagtttgacaagtgggccccctccgtggtgaaggtgtcttacaaggtaggtcacagccactgagg

SEQ ID NO: 325579 - DNA, 45 bp, Homo sapiens
  chr19:11129826-11129871
  hypo
ggacagcctggaactccagtcacatggatccgggagtttggactg

SEQ ID NO: 325580 - DNA, 528 bp, Homo sapiens; identical to SEQ ID NO: 293519
  chr19:11144003-11144531
  hypo

SEQ ID NO: 325581 - DNA, 183 bp, Homo sapiens; identical to SEQ ID NO: 219148
  chr19:11145621-11145804
  hypo

SEQ ID NO: 325582 - DNA, 248 bp, Homo sapiens; identical to SEQ ID NO: 273355
  chr19:11151830-11152078
  hypo

SEQ ID NO: 325583 - DNA, 184 bp, Homo sapiens; identical to SEQ ID NO: 219150
  chr19:11152797-11152981
  hypo

SEQ ID NO: 325584 - DNA, 330 bp, Homo sapiens; identical to SEQ ID NO: 273357
  chr19:11154843-11155173
  hypo

SEQ ID NO: 325585 - DNA, 164 bp, Homo sapiens; identical to SEQ ID NO: 273358
  chr19:11172377-11172541
  hypo

SEQ ID NO: 325586 - DNA, 150 bp, Homo sapiens; identical to SEQ ID NO: 273359
  chr19:11172753-11172903
  hypo

SEQ ID NO: 325587 - DNA, 274 bp, Homo sapiens; identical to SEQ ID NO: 293520
  chr19:11199837-11200111
  hypo

SEQ ID NO: 325588 - DNA, 460 bp, Homo sapiens; identical to SEQ ID NO: 205181
  chr19:11200842-11201302
  hypo

SEQ ID NO: 325589 - DNA, 270 bp, Homo sapiens; identical to SEQ ID NO: 273361
  chr19:11213902-11214172
  hypo

SEQ ID NO: 325590 - DNA, 233 bp, Homo sapiens; identical to SEQ ID NO: 219153
  chr19:11215985-11216218
  hypo

SEQ ID NO: 325591 - DNA, 74 bp, Homo sapiens
  chr19:11285272-11285346
  hypo
gaacgtgaccaggtgccgccgcaccagctcggggtgtgcgtcgctgcggcaggccaggcgcagccactcctgca

SEQ ID NO: 325592 - DNA, 153 bp, Homo sapiens; identical to SEQ ID NO: 219154
  chr19:11289073-11289226
  hypo

SEQ ID NO: 325593 - DNA, 1146 bp, Homo sapiens; identical to SEQ ID NO: 273366
  chr19:11303546-11304692
  hypo

SEQ ID NO: 325594 - DNA, 330 bp, Homo sapiens; identical to SEQ ID NO: 205183
  chr19:11308102-11308432
  hypo

SEQ ID NO: 325595 - DNA, 59 bp, Homo sapiens; identical to SEQ ID NO: 273367
  chr19:11319674-11319733
  hypo

SEQ ID NO: 325596 - DNA, 176 bp, Homo sapiens; identical to SEQ ID NO: 273368
  chr19:11327510-11327686
  hypo

SEQ ID NO: 325597 - DNA, 63 bp, Homo sapiens; identical to SEQ ID NO: 273369
  chr19:11333607-11333670
  hypo

SEQ ID NO: 325598 - DNA, 150 bp, Homo sapiens; identical to SEQ ID NO: 219157
  chr19:11339623-11339773
  hypo

SEQ ID NO: 325599 - DNA, 42 bp, Homo sapiens; identical to SEQ ID NO: 225794
  chr19:11373072-11373114
  hypo

SEQ ID NO: 325600 - DNA, 174 bp, Homo sapiens; identical to SEQ ID NO: 293527
  chr19:11465993-11466167
  hypo

SEQ ID NO: 325601 - DNA, 300 bp, Homo sapiens; identical to SEQ ID NO: 219159
  chr19:11473074-11473374
  hypo

SEQ ID NO: 325602 - DNA, 134 bp, Homo sapiens; identical to SEQ ID NO: 273372
  chr19:11510383-11510517
  hypo

SEQ ID NO: 325603 - DNA, 40 bp, Homo sapiens; identical to SEQ ID NO: 219160
  chr19:11549272-11549312
  hypo

SEQ ID NO: 325604 - DNA, 184 bp, Homo sapiens; identical to SEQ ID NO: 219161
  chr19:11559278-11559462
  hypo

SEQ ID NO: 325605 - DNA, 401 bp, Homo sapiens; identical to SEQ ID NO: 273375
  chr19:11559905-11560306
  hypo

SEQ ID NO: 325606 - DNA, 155 bp, Homo sapiens; identical to SEQ ID NO: 219163
  chr19:11565669-11565824
  hypo

SEQ ID NO: 325607 - DNA, 297 bp, Homo sapiens; identical to SEQ ID NO: 293537
  chr19:11590395-11590692
  hypo

SEQ ID NO: 325608 - DNA, 96 bp, Homo sapiens; identical to SEQ ID NO: 293538
  chr19:11591204-11591300
  hypo

SEQ ID NO: 325609 - DNA, 184 bp, Homo sapiens; identical to SEQ ID NO: 293539
  chr19:11591353-11591537
  hypo

SEQ ID NO: 325610 - DNA, 87 bp, Homo sapiens; identical to SEQ ID NO: 293540
  chr19:11592584-11592671
  hypo

SEQ ID NO: 325611 - DNA, 203 bp, Homo sapiens; identical to SEQ ID NO: 293541
  chr19:11593453-11593656
  hypo

SEQ ID NO: 325612 - DNA, 528 bp, Homo sapiens; identical to SEQ ID NO: 273378
  chr19:11598119-11598647
  hypo

SEQ ID NO: 325613 - DNA, 370 bp, Homo sapiens; identical to SEQ ID NO: 219165
  chr19:11605729-11606099
  hypo

SEQ ID NO: 325614 - DNA, 446 bp, Homo sapiens; identical to SEQ ID NO: 219166
  chr19:11662234-11662680
  hypo

SEQ ID NO: 325615 - DNA, 96 bp, Homo sapiens; identical to SEQ ID NO: 273382
  chr19:11699967-11700063
  hypo

SEQ ID NO: 325616 - DNA, 39 bp, Homo sapiens
  chr19:11788684-11788723
  hypo
gtgggagacgagggagaggctcagcatcagagggagacc

SEQ ID NO: 325617 - DNA, 156 bp, Homo sapiens; identical to SEQ ID NO: 273384
  chr19:11794320-11794476
  hypo

SEQ ID NO: 325618 - DNA, 148 bp, Homo sapiens; identical to SEQ ID NO: 273385
  chr19:11820662-11820810
  hypo

SEQ ID NO: 325619 - DNA, 44 bp, Homo sapiens
  chr19:11926785-11926829
  hypo
tatgtaaaataaagaagtttattaggagccgaataggagagccg

SEQ ID NO: 325620 - DNA, 89 bp, Homo sapiens; identical to SEQ ID NO: 273388
  chr19:11961501-11961590
  hypo

SEQ ID NO: 325621 - DNA, 523 bp, Homo sapiens; identical to SEQ ID NO: 293557
  chr19:12146021-12146544
  hypo

SEQ ID NO: 325622 - DNA, 42 bp, Homo sapiens; identical to SEQ ID NO: 273389
  chr19:12177042-12177084
  hypo

SEQ ID NO: 325623 - DNA, 37 bp, Homo sapiens; identical to SEQ ID NO: 273390
  chr19:12177363-12177400
  hypo

SEQ ID NO: 325624 - DNA, 37 bp, Homo sapiens; identical to SEQ ID NO: 205203
  chr19:12203656-12203693
  hypo

SEQ ID NO: 325625 - DNA, 33 bp, Homo sapiens; identical to SEQ ID NO: 205204
  chr19:12204551-12204584
  hypo

SEQ ID NO: 325626 - DNA, 360 bp, Homo sapiens; identical to SEQ ID NO: 273391
  chr19:12205465-12205825
  hypo

SEQ ID NO: 325627 - DNA, 89 bp, Homo sapiens; identical to SEQ ID NO: 273392
  chr19:12260460-12260549
  hypo

SEQ ID NO: 325628 - DNA, 43 bp, Homo sapiens; identical to SEQ ID NO: 273393
  chr19:12416132-12416175
  hypo

SEQ ID NO: 325629 - DNA, 111 bp, Homo sapiens; identical to SEQ ID NO: 219170
  chr19:12418638-12418749
  hypo

SEQ ID NO: 325630 - DNA, 145 bp, Homo sapiens; identical to SEQ ID NO: 273395
  chr19:12461696-12461841
  hypo

SEQ ID NO: 325631 - DNA, 538 bp, Homo sapiens; identical to SEQ ID NO: 205207
  chr19:12595307-12595845
  hypo

SEQ ID NO: 325632 - DNA, 216 bp, Homo sapiens; identical to SEQ ID NO: 293573
  chr19:12595896-12596112
  hypo

SEQ ID NO: 325633 - DNA, 251 bp, Homo sapiens; identical to SEQ ID NO: 273396
  chr19:12691091-12691342
  hypo

SEQ ID NO: 325634 - DNA, 40 bp, Homo sapiens; identical to SEQ ID NO: 273397
  chr19:12701915-12701955
  hypo

SEQ ID NO: 325635 - DNA, 132 bp, Homo sapiens; identical to SEQ ID NO: 225804
  chr19:12707774-12707906
  hypo

SEQ ID NO: 325636 - DNA, 120 bp, Homo sapiens; identical to SEQ ID NO: 219173
  chr19:12710770-12710890
  hypo

SEQ ID NO: 325637 - DNA, 95 bp, Homo sapiens; identical to SEQ ID NO: 219174
  chr19:12729967-12730062
  hypo

SEQ ID NO: 325638 - DNA, 120 bp, Homo sapiens; identical to SEQ ID NO: 219175
  chr19:12746886-12747006
  hypo

SEQ ID NO: 325639 - DNA, 70 bp, Homo sapiens; identical to SEQ ID NO: 273402
  chr19:12748932-12749002
  hypo

SEQ ID NO: 325640 - DNA, 99 bp, Homo sapiens; identical to SEQ ID NO: 273403
  chr19:12749482-12749581
  hypo

SEQ ID NO: 325641 - DNA, 78 bp, Homo sapiens; identical to SEQ ID NO: 273404
  chr19:12755553-12755631
  hypo

SEQ ID NO: 325642 - DNA, 186 bp, Homo sapiens; identical to SEQ ID NO: 273405
  chr19:12757981-12758167
  hypo

SEQ ID NO: 325643 - DNA, 197 bp, Homo sapiens; identical to SEQ ID NO: 219176
  chr19:12794668-12794865
  hypo

SEQ ID NO: 325644 - DNA, 33 bp, Homo sapiens; identical to SEQ ID NO: 273407
  chr19:12795863-12795896
  hypo

SEQ ID NO: 325645 - DNA, 280 bp, Homo sapiens; identical to SEQ ID NO: 293581
  chr19:12806992-12807272
  hypo

SEQ ID NO: 325646 - DNA, 51 bp, Homo sapiens; identical to SEQ ID NO: 219178
  chr19:12811290-12811341
  hypo

SEQ ID NO: 325647 - DNA, 204 bp, Homo sapiens; identical to SEQ ID NO: 219179
  chr19:12817328-12817532
  hypo

SEQ ID NO: 325648 - DNA, 190 bp, Homo sapiens; identical to SEQ ID NO: 273410
  chr19:12885520-12885710
  hypo

SEQ ID NO: 325649 - DNA, 638 bp, Homo sapiens; identical to SEQ ID NO: 205213
  chr19:12900114-12900752
  hypo

SEQ ID NO: 325650 - DNA, 101 bp, Homo sapiens; identical to SEQ ID NO: 273412
  chr19:12928674-12928775
  hypo

SEQ ID NO: 325651 - DNA, 149 bp, Homo sapiens; identical to SEQ ID NO: 273413
  chr19:12953398-12953547
  hypo

SEQ ID NO: 325652 - DNA, 218 bp, Homo sapiens
  chr19:12969190-12969408
  hypo
gccaagaaaccgccgggggagaatgacttcgataccatcaagctcataagcaacggtgcctacgggtgagccacccggggctctggcggggggagggtggcggaggccgggtgtctcggaggtgacggccggtcctcgctctctccccctgcagcgctgtctacctggtgcggcaccgcgacacgcggcagcgctttgccatgaaaaagatcaacaag

SEQ ID NO: 325653 - DNA, 156 bp, Homo sapiens
  chr19:12969470-12969626
  hypo
cgccgagaacccgtttgtggtcggcatgttctgctcctttgagactcggcgccacctctgcatggtcatggaatatgtggaaggtgtggctgcctgcggggctgcagggaagatggggccgtgctcactggtcagggctgcggggtggcctgcctg

SEQ ID NO: 325654 - DNA, 210 bp, Homo sapiens
  chr19:12977263-12977473
  hypo
gaggcggggctagacggtgccactgagaatggggcaaggaccttgcctgggagcggagcctaaattaaatacactaatgaggcaggggcgtggcctgacctgaagacttgtaaacccgtcttgaaccaggactgggctcctgtggggatgtgatatgaggaggaaccccgtaccctcagtcacagcccatacccgctccccagcccgctc

SEQ ID NO: 325655 - DNA, 88 bp, Homo sapiens
  chr19:12985226-12985314
  hypo
agacaggccggcgcagcagctctggcgaggcgggcacacccctggtacccattgtcgtagagcctgcgcggcccggggctaaggctgt

SEQ ID NO: 325656 - DNA, 295 bp, Homo sapiens; identical to SEQ ID NO: 273417
  chr19:12985537-12985832
  hypo

SEQ ID NO: 325657 - DNA, 73 bp, Homo sapiens; identical to SEQ ID NO: 273418
  chr19:12986930-12987003
  hypo

SEQ ID NO: 325658 - DNA, 220 bp, Homo sapiens; identical to SEQ ID NO: 293597
  chr19:12995851-12996071
  hypo

SEQ ID NO: 325659 - DNA, 45 bp, Homo sapiens; identical to SEQ ID NO: 273419
  chr19:13007716-13007761
  hypo

SEQ ID NO: 325660 - DNA, 89 bp, Homo sapiens; identical to SEQ ID NO: 219181
  chr19:13010440-13010529
  hypo

SEQ ID NO: 325661 - DNA, 75 bp, Homo sapiens; identical to SEQ ID NO: 273421
  chr19:13017983-13018058
  hypo

SEQ ID NO: 325662 - DNA, 146 bp, Homo sapiens; identical to SEQ ID NO: 273422
  chr19:13023066-13023212
  hypo

SEQ ID NO: 325663 - DNA, 36 bp, Homo sapiens; identical to SEQ ID NO: 226559
  chr19:13029431-13029467
  hypo

SEQ ID NO: 325664 - DNA, 106 bp, Homo sapiens; identical to SEQ ID NO: 293600
  chr19:13029767-13029873
  hypo

SEQ ID NO: 325665 - DNA, 77 bp, Homo sapiens; identical to SEQ ID NO: 205218
  chr19:13030316-13030393
  hypo

SEQ ID NO: 325666 - DNA, 513 bp, Homo sapiens; identical to SEQ ID NO: 205219
  chr19:13049935-13050448
  hypo

SEQ ID NO: 325667 - DNA, 828 bp, Homo sapiens; identical to SEQ ID NO: 205220
  chr19:13050858-13051686
  hypo

SEQ ID NO: 325668 - DNA, 931 bp, Homo sapiens; identical to SEQ ID NO: 205221
  chr19:13054373-13055304
  hypo

SEQ ID NO: 325669 - DNA, 49 bp, Homo sapiens
  chr19:13071906-13071955
  hypo
ccccagtttccctttcgcccagtccctggcagtcactattccttttttt

SEQ ID NO: 325670 - DNA, 131 bp, Homo sapiens; identical to SEQ ID NO: 205222
  chr19:13094456-13094587
  hypo

SEQ ID NO: 325671 - DNA, 983 bp, Homo sapiens; identical to SEQ ID NO: 293609
  chr19:13106028-13107011
  hypo

SEQ ID NO: 325672 - DNA, 354 bp, Homo sapiens; identical to SEQ ID NO: 293610
  chr19:13107035-13107389
  hypo

SEQ ID NO: 325673 - DNA, 672 bp, Homo sapiens; identical to SEQ ID NO: 219191
  chr19:13108002-13108674
  hypo

SEQ ID NO: 325674 - DNA, 750 bp, Homo sapiens; identical to SEQ ID NO: 219192
  chr19:13109259-13110009
  hypo

SEQ ID NO: 325675 - DNA, 210 bp, Homo sapiens; identical to SEQ ID NO: 219193
  chr19:13110309-13110519
  hypo

SEQ ID NO: 325676 - DNA, 199 bp, Homo sapiens; identical to SEQ ID NO: 219194
  chr19:13110780-13110979
  hypo

SEQ ID NO: 325677 - DNA, 147 bp, Homo sapiens; identical to SEQ ID NO: 273429
  chr19:13111557-13111704
  hypo

SEQ ID NO: 325678 - DNA, 45 bp, Homo sapiens; identical to SEQ ID NO: 219195
  chr19:13112075-13112120
  hypo

SEQ ID NO: 325679 - DNA, 156 bp, Homo sapiens; identical to SEQ ID NO: 219196
  chr19:13112293-13112449
  hypo

SEQ ID NO: 325680 - DNA, 210 bp, Homo sapiens; identical to SEQ ID NO: 273431
  chr19:13114026-13114236
  hypo

SEQ ID NO: 325681 - DNA, 93 bp, Homo sapiens; identical to SEQ ID NO: 219197
  chr19:13115952-13116045
  hypo

SEQ ID NO: 325682 - DNA, 337 bp, Homo sapiens; identical to SEQ ID NO: 273433
  chr19:13117705-13118042
  hypo

SEQ ID NO: 325683 - DNA, 36 bp, Homo sapiens; identical to SEQ ID NO: 273434
  chr19:13119308-13119344
  hypo

SEQ ID NO: 325684 - DNA, 167 bp, Homo sapiens
  chr19:13119763-13119930
  hypo
agcctccccatcctcgctgtagccaggtcctcaccgaggtagatttgcgggggtctcccagtcccagtcccacacactgcctcatccccactcacagtcaacgcccgcaacaccccgccacccgcagtctgtcgcgcagtgacagcctgtcacaagcaccgccgcac

SEQ ID NO: 325685 - DNA, 173 bp, Homo sapiens; identical to SEQ ID NO: 273436
  chr19:13150456-13150629
  hypo

SEQ ID NO: 325686 - DNA, 228 bp, Homo sapiens; identical to SEQ ID NO: 273437
  chr19:13151483-13151711
  hypo

SEQ ID NO: 325687 - DNA, 37 bp, Homo sapiens; identical to SEQ ID NO: 273438
  chr19:13154726-13154763
  hypo

SEQ ID NO: 325688 - DNA, 258 bp, Homo sapiens; identical to SEQ ID NO: 219198
  chr19:13156412-13156670
  hypo

SEQ ID NO: 325689 - DNA, 98 bp, Homo sapiens; identical to SEQ ID NO: 219199
  chr19:13160324-13160422
  hypo

SEQ ID NO: 325690 - DNA, 178 bp, Homo sapiens; identical to SEQ ID NO: 273441
  chr19:13177633-13177811
  hypo

SEQ ID NO: 325691 - DNA, 39 bp, Homo sapiens; identical to SEQ ID NO: 219200
  chr19:13179793-13179832
  hypo

SEQ ID NO: 325692 - DNA, 75 bp, Homo sapiens; identical to SEQ ID NO: 273443
  chr19:13181440-13181515
  hypo

SEQ ID NO: 325693 - DNA, 449 bp, Homo sapiens; identical to SEQ ID NO: 273444
  chr19:13186060-13186509
  hypo

SEQ ID NO: 325694 - DNA, 143 bp, Homo sapiens; identical to SEQ ID NO: 273445
  chr19:13194583-13194726
  hypo

SEQ ID NO: 325695 - DNA, 80 bp, Homo sapiens; identical to SEQ ID NO: 219201
  chr19:13196307-13196387
  hypo

SEQ ID NO: 325696 - DNA, 211 bp, Homo sapiens; identical to SEQ ID NO: 273447
  chr19:13197662-13197873
  hypo

SEQ ID NO: 325697 - DNA, 53 bp, Homo sapiens; identical to SEQ ID NO: 219202
  chr19:13199713-13199766
  hypo

SEQ ID NO: 325698 - DNA, 43 bp, Homo sapiens
  chr19:13201107-13201150
  hypo
cacagcattcgcaacgacaggcgcctcctctgccaaccggttt

SEQ ID NO: 325699 - DNA, 202 bp, Homo sapiens; identical to SEQ ID NO: 205229
  chr19:13213414-13213616
  hypo

SEQ ID NO: 325700 - DNA, 126 bp, Homo sapiens; identical to SEQ ID NO: 293616
  chr19:13213834-13213960
  hypo

SEQ ID NO: 325701 - DNA, 89 bp, Homo sapiens; identical to SEQ ID NO: 219205
  chr19:13218631-13218720
  hypo

SEQ ID NO: 325702 - DNA, 107 bp, Homo sapiens; identical to SEQ ID NO: 273451
  chr19:13249109-13249216
  hypo

SEQ ID NO: 325703 - DNA, 112 bp, Homo sapiens; identical to SEQ ID NO: 273452
  chr19:13252910-13253022
  hypo

SEQ ID NO: 325704 - DNA, 119 bp, Homo sapiens; identical to SEQ ID NO: 225817
  chr19:13263755-13263874
  hypo

SEQ ID NO: 325705 - DNA, 817 bp, Homo sapiens; identical to SEQ ID NO: 293620
  chr19:13264169-13264986
  hypo

SEQ ID NO: 325706 - DNA, 1275 bp, Homo sapiens; identical to SEQ ID NO: 205231
  chr19:13265775-13267050
  hypo

SEQ ID NO: 325707 - DNA, 62 bp, Homo sapiens; identical to SEQ ID NO: 205232
  chr19:13274019-13274081
  hypo

SEQ ID NO: 325708 - DNA, 42 bp, Homo sapiens; identical to SEQ ID NO: 273453
  chr19:13287254-13287296
  hypo

SEQ ID NO: 325709 - DNA, 131 bp, Homo sapiens; identical to SEQ ID NO: 273454
  chr19:13309845-13309976
  hypo

SEQ ID NO: 325710 - DNA, 55 bp, Homo sapiens; identical to SEQ ID NO: 219208
  chr19:13332535-13332590
  hypo

SEQ ID NO: 325711 - DNA, 205 bp, Homo sapiens; identical to SEQ ID NO: 273456
  chr19:13346307-13346512
  hypo

SEQ ID NO: 325712 - DNA, 69 bp, Homo sapiens; identical to SEQ ID NO: 273457
  chr19:13347071-13347140
  hypo

SEQ ID NO: 325713 - DNA, 130 bp, Homo sapiens; identical to SEQ ID NO: 219209
  chr19:13397529-13397659
  hypo

SEQ ID NO: 325714 - DNA, 139 bp, Homo sapiens; identical to SEQ ID NO: 273459
  chr19:13458299-13458438
  hypo

SEQ ID NO: 325715 - DNA, 105 bp, Homo sapiens; identical to SEQ ID NO: 273460
  chr19:13490331-13490436
  hypo

SEQ ID NO: 325716 - DNA, 38 bp, Homo sapiens; identical to SEQ ID NO: 273461
  chr19:13580551-13580589
  hypo

SEQ ID NO: 325717 - DNA, 159 bp, Homo sapiens; identical to SEQ ID NO: 219210
  chr19:13873457-13873616
  hypo

SEQ ID NO: 325718 - DNA, 231 bp, Homo sapiens; identical to SEQ ID NO: 273463
  chr19:13879630-13879861
  hypo

SEQ ID NO: 325719 - DNA, 199 bp, Homo sapiens; identical to SEQ ID NO: 273464
  chr19:13919891-13920090
  hypo

SEQ ID NO: 325720 - DNA, 49 bp, Homo sapiens
  chr19:13936528-13936577
  hypo
tgagggctgccaggtggatgcgggagggcgatggtggctcggggccagg

SEQ ID NO: 325721 - DNA, 71 bp, Homo sapiens
  chr19:13936712-13936783
  hypo
agacacacctctgggggcgtggcctgagtgtgggccacttccttgggggcgtggcatgagtgagccactcc

SEQ ID NO: 325722 - DNA, 136 bp, Homo sapiens; identical to SEQ ID NO: 273466
  chr19:13941061-13941197
  hypo

SEQ ID NO: 325723 - DNA, 117 bp, Homo sapiens
  chr19:13943491-13943608
  hypo
agggaacacagggctgaatgcgttaccgctgtcatttaatcgtcaccacagccctatgagttggtaggattatcttttccattttacagatgagaaaactgaggttgcaaagtggaa

SEQ ID NO: 325724 - DNA, 418 bp, Homo sapiens; identical to SEQ ID NO: 205234
  chr19:13961290-13961708
  hypo

SEQ ID NO: 325725 - DNA, 38 bp, Homo sapiens; identical to SEQ ID NO: 273469
  chr19:13969423-13969461
  hypo

SEQ ID NO: 325726 - DNA, 221 bp, Homo sapiens; identical to SEQ ID NO: 225824
  chr19:13975797-13976018
  hypo

SEQ ID NO: 325727 - DNA, 97 bp, Homo sapiens; identical to SEQ ID NO: 273470
  chr19:13987350-13987447
  hypo

SEQ ID NO: 325728 - DNA, 292 bp, Homo sapiens; identical to SEQ ID NO: 273471
  chr19:14000115-14000407
  hypo

SEQ ID NO: 325729 - DNA, 209 bp, Homo sapiens; identical to SEQ ID NO: 219213
  chr19:14000962-14001171
  hypo

SEQ ID NO: 325730 - DNA, 41 bp, Homo sapiens
  chr19:14029922-14029963
  hypo
aacacctgtggccctcgcagcaataccaagatgccatccga

SEQ ID NO: 325731 - DNA, 55 bp, Homo sapiens
  chr19:14029998-14030053
  hypo
attgcccgtgcccccaggtaggccttgcccctgtaggcctcgccccagtaggccc

SEQ ID NO: 325732 - DNA, 408 bp, Homo sapiens
  chr19:14043632-14044040
  hypo
caggtgcctggcccgatgtcgccgacccggagccggttgtgcgccaggctgagctcccgcagttggtccaggccggccagaggctcgggctcgagcatccgcagctggttgcgttgcagctgcagggtgcgcaggccagtgggcaggcccatgggcagccgggttagctgattccctgccaggtcgaggctgcgcagggcacgcaaccggcggaaggcccggtggtgcacacgggcgctggccaggcggttataggccaggttaagctccgtcaggcccggtgtggcgaccaggtcacgggcacccagcgcggccacgtggttgtggggcagcaccagggcacgcaggcggcggggcagggctggaggcacgcggtccagcccattgccatagaggtgcagcgtgtgc

SEQ ID NO: 325733 - DNA, 88 bp, Homo sapiens; identical to SEQ ID NO: 273475
  chr19:14066988-14067076
  hypo

SEQ ID NO: 325734 - DNA, 273 bp, Homo sapiens; identical to SEQ ID NO: 273476
  chr19:14072645-14072918
  hypo

SEQ ID NO: 325735 - DNA, 162 bp, Homo sapiens; identical to SEQ ID NO: 273477
  chr19:14073132-14073294
  hypo

SEQ ID NO: 325736 - DNA, 1343 bp, Homo sapiens; identical to SEQ ID NO: 205235
  chr19:14073501-14074844
  hypo

SEQ ID NO: 325737 - DNA, 35 bp, Homo sapiens; identical to SEQ ID NO: 273480
  chr19:14084906-14084941
  hypo

SEQ ID NO: 325738 - DNA, 50 bp, Homo sapiens; identical to SEQ ID NO: 273481
  chr19:14084971-14085021
  hypo

SEQ ID NO: 325739 - DNA, 131 bp, Homo sapiens; identical to SEQ ID NO: 273482
  chr19:14085051-14085182
  hypo

SEQ ID NO: 325740 - DNA, 234 bp, Homo sapiens; identical to SEQ ID NO: 293630
  chr19:14089418-14089652
  hypo

SEQ ID NO: 325741 - DNA, 57 bp, Homo sapiens; identical to SEQ ID NO: 293631
  chr19:14089812-14089869
  hypo

SEQ ID NO: 325742 - DNA, 162 bp, Homo sapiens; identical to SEQ ID NO: 219215
  chr19:14181143-14181305
  hypo

SEQ ID NO: 325743 - DNA, 181 bp, Homo sapiens; identical to SEQ ID NO: 219216
  chr19:14181846-14182027
  hypo

SEQ ID NO: 325744 - DNA, 40 bp, Homo sapiens; identical to SEQ ID NO: 219217
  chr19:14225013-14225053
  hypo

SEQ ID NO: 325745 - DNA, 469 bp, Homo sapiens; identical to SEQ ID NO: 273486
  chr19:14263406-14263875
  hypo

SEQ ID NO: 325746 - DNA, 48 bp, Homo sapiens; identical to SEQ ID NO: 225827
  chr19:14316561-14316609
  hypo

SEQ ID NO: 325747 - DNA, 33 bp, Homo sapiens; identical to SEQ ID NO: 273487
  chr19:14352486-14352519
  hypo

SEQ ID NO: 325748 - DNA, 43 bp, Homo sapiens; identical to SEQ ID NO: 273488
  chr19:14447097-14447140
  hypo

SEQ ID NO: 325749 - DNA, 142 bp, Homo sapiens; identical to SEQ ID NO: 219218
  chr19:14509047-14509189
  hypo

SEQ ID NO: 325750 - DNA, 443 bp, Homo sapiens; identical to SEQ ID NO: 225828
  chr19:14516821-14517264
  hypo

SEQ ID NO: 325751 - DNA, 179 bp, Homo sapiens; identical to SEQ ID NO: 273490
  chr19:14522734-14522913
  hypo

SEQ ID NO: 325752 - DNA, 101 bp, Homo sapiens; identical to SEQ ID NO: 219219
  chr19:14532585-14532686
  hypo

SEQ ID NO: 325753 - DNA, 373 bp, Homo sapiens; identical to SEQ ID NO: 219220
  chr19:14551929-14552302
  hypo

SEQ ID NO: 325754 - DNA, 245 bp, Homo sapiens; identical to SEQ ID NO: 273493
  chr19:14591231-14591476
  hypo

SEQ ID NO: 325755 - DNA, 143 bp, Homo sapiens; identical to SEQ ID NO: 205239
  chr19:14607038-14607181
  hypo

SEQ ID NO: 325756 - DNA, 290 bp, Homo sapiens; identical to SEQ ID NO: 273494
  chr19:14616946-14617236
  hypo

SEQ ID NO: 325757 - DNA, 44 bp, Homo sapiens
  chr19:14630485-14630529
  hypo
tgggtccccagtgcctggaacgcagtgagaacctcataaatatt

SEQ ID NO: 325758 - DNA, 107 bp, Homo sapiens; identical to SEQ ID NO: 273496
  chr19:14636954-14637061
  hypo

SEQ ID NO: 325759 - DNA, 34 bp, Homo sapiens; identical to SEQ ID NO: 273497
  chr19:14648832-14648866
  hypo

SEQ ID NO: 325760 - DNA, 152 bp, Homo sapiens; identical to SEQ ID NO: 273498
  chr19:14660736-14660888
  hypo

SEQ ID NO: 325761 - DNA, 179 bp, Homo sapiens
  chr19:14663746-14663925
  hypo
acgggcgagatcagcgtcgctctgggtgggccagtgctcctcggaggccctgagggcacaaccgcagggatgggtgtaggctgtgggtaccactgagaatggggggcaggcccagggctgagacccaggttctccaacttcccactgtgtttgtcttgtgccatattcatcctctatga

SEQ ID NO: 325762 - DNA, 47 bp, Homo sapiens; identical to SEQ ID NO: 219223
  chr19:14664432-14664479
  hypo

SEQ ID NO: 325763 - DNA, 281 bp, Homo sapiens; identical to SEQ ID NO: 219224
  chr19:14664561-14664842
  hypo

SEQ ID NO: 325764 - DNA, 143 bp, Homo sapiens; identical to SEQ ID NO: 273501
  chr19:14676333-14676476
  hypo

SEQ ID NO: 325765 - DNA, 141 bp, Homo sapiens; identical to SEQ ID NO: 273502
  chr19:14815854-14815995
  hypo

SEQ ID NO: 325766 - DNA, 122 bp, Homo sapiens; identical to SEQ ID NO: 219225
  chr19:14863011-14863133
  hypo

SEQ ID NO: 325767 - DNA, 59 bp, Homo sapiens; identical to SEQ ID NO: 219226
  chr19:14863163-14863222
  hypo

SEQ ID NO: 325768 - DNA, 46 bp, Homo sapiens; identical to SEQ ID NO: 205241
  chr19:14887561-14887607
  hypo

SEQ ID NO: 325769 - DNA, 96 bp, Homo sapiens; identical to SEQ ID NO: 219228
  chr19:14912989-14913085
  hypo

SEQ ID NO: 325770 - DNA, 85 bp, Homo sapiens; identical to SEQ ID NO: 273505
  chr19:15033674-15033759
  hypo

SEQ ID NO: 325771 - DNA, 43 bp, Homo sapiens; identical to SEQ ID NO: 273506
  chr19:15044831-15044874
  hypo

SEQ ID NO: 325772 - DNA, 386 bp, Homo sapiens; identical to SEQ ID NO: 273507
  chr19:15073003-15073389
  hypo

SEQ ID NO: 325773 - DNA, 36 bp, Homo sapiens; identical to SEQ ID NO: 293646
  chr19:15091053-15091089
  hypo

SEQ ID NO: 325774 - DNA, 133 bp, Homo sapiens; identical to SEQ ID NO: 273508
  chr19:15209505-15209638
  hypo

SEQ ID NO: 325775 - DNA, 159 bp, Homo sapiens; identical to SEQ ID NO: 219229
  chr19:15224770-15224929
  hypo

SEQ ID NO: 325776 - DNA, 353 bp, Homo sapiens; identical to SEQ ID NO: 293648
  chr19:15235615-15235968
  hypo

SEQ ID NO: 325777 - DNA, 417 bp, Homo sapiens; identical to SEQ ID NO: 219230
  chr19:15252000-15252417
  hypo

SEQ ID NO: 325778 - DNA, 41 bp, Homo sapiens; identical to SEQ ID NO: 219231
  chr19:15252900-15252941
  hypo

SEQ ID NO: 325779 - DNA, 445 bp, Homo sapiens
  chr19:15271804-15272249
  hypo
ggtaaggcgggggccgctcctgcggggagacgggggtccctgggttgagcagctggggtcccggcgccagtggcagcaggaacgaggggcctggaggggcaggtgggggcagccgggcccaatcgaggggcacagccacagggttcagcaggcccaggctgagtacacatcctccagggggctggcgccctagacccgcccggcctgggccaccaagctgtgccagagacactgcagtggcagtggcagctgcatagggcccctcaagggggaagccaccaggggaagcagggggcccaccgaaaggccgcggggagtccagcgagtccacgggcgacagcgtgaccgagctgtcagccagggggcccgggcaggccagcgtcagcttcttgccccgcccccggggcccctgcggccccagccccgccttcccggggggcctcct

SEQ ID NO: 325780 - DNA, 71 bp, Homo sapiens; identical to SEQ ID NO: 273513
  chr19:15276698-15276769
  hypo

SEQ ID NO: 325781 - DNA, 77 bp, Homo sapiens; identical to SEQ ID NO: 219232
  chr19:15281186-15281263
  hypo

SEQ ID NO: 325782 - DNA, 232 bp, Homo sapiens; identical to SEQ ID NO: 273515
  chr19:15281503-15281735
  hypo

SEQ ID NO: 325783 - DNA, 167 bp, Homo sapiens; identical to SEQ ID NO: 273516
  chr19:15284956-15285123
  hypo

SEQ ID NO: 325784 - DNA, 40 bp, Homo sapiens; identical to SEQ ID NO: 219233
  chr19:15292612-15292652
  hypo

SEQ ID NO: 325785 - DNA, 391 bp, Homo sapiens; identical to SEQ ID NO: 273518
  chr19:15302331-15302722
  hypo

SEQ ID NO: 325786 - DNA, 81 bp, Homo sapiens; identical to SEQ ID NO: 273519
  chr19:15346126-15346207
  hypo

SEQ ID NO: 325787 - DNA, 188 bp, Homo sapiens; identical to SEQ ID NO: 219234
  chr19:15352349-15352537
  hypo

SEQ ID NO: 325788 - DNA, 172 bp, Homo sapiens; identical to SEQ ID NO: 189115
  chr19:15360255-15360427
  hypo

SEQ ID NO: 325789 - DNA, 142 bp, Homo sapiens; identical to SEQ ID NO: 273522
  chr19:15364850-15364992
  hypo

SEQ ID NO: 325790 - DNA, 396 bp, Homo sapiens; identical to SEQ ID NO: 219235
  chr19:15375241-15375637
  hypo

SEQ ID NO: 325791 - DNA, 112 bp, Homo sapiens; identical to SEQ ID NO: 273524
  chr19:15382514-15382626
  hypo

SEQ ID NO: 325792 - DNA, 128 bp, Homo sapiens; identical to SEQ ID NO: 273525
  chr19:15401109-15401237
  hypo

SEQ ID NO: 325793 - DNA, 141 bp, Homo sapiens; identical to SEQ ID NO: 219236
  chr19:15421598-15421739
  hypo

SEQ ID NO: 325794 - DNA, 105 bp, Homo sapiens; identical to SEQ ID NO: 219237
  chr19:15422154-15422259
  hypo

SEQ ID NO: 325795 - DNA, 240 bp, Homo sapiens; identical to SEQ ID NO: 273528
  chr19:15426970-15427210
  hypo

SEQ ID NO: 325796 - DNA, 87 bp, Homo sapiens; identical to SEQ ID NO: 293653
  chr19:15479821-15479908
  hypo

SEQ ID NO: 325797 - DNA, 206 bp, Homo sapiens; identical to SEQ ID NO: 273529
  chr19:15487800-15488006
  hypo

SEQ ID NO: 325798 - DNA, 120 bp, Homo sapiens; identical to SEQ ID NO: 219238
  chr19:15506075-15506195
  hypo

SEQ ID NO: 325799 - DNA, 250 bp, Homo sapiens; identical to SEQ ID NO: 273531
  chr19:15512030-15512280
  hypo

SEQ ID NO: 325800 - DNA, 140 bp, Homo sapiens; identical to SEQ ID NO: 273532
  chr19:15531276-15531416
  hypo

SEQ ID NO: 325801 - DNA, 340 bp, Homo sapiens; identical to SEQ ID NO: 219239
  chr19:15538869-15539209
  hypo

SEQ ID NO: 325802 - DNA, 121 bp, Homo sapiens; identical to SEQ ID NO: 273534
  chr19:15551195-15551316
  hypo

SEQ ID NO: 325803 - DNA, 36 bp, Homo sapiens; identical to SEQ ID NO: 226560
  chr19:15694860-15694896
  hypo

SEQ ID NO: 325804 - DNA, 120 bp, Homo sapiens; identical to SEQ ID NO: 205247
  chr19:15695669-15695789
  hypo

SEQ ID NO: 325805 - DNA, 77 bp, Homo sapiens; identical to SEQ ID NO: 273537
  chr19:15937637-15937714
  hypo

SEQ ID NO: 325806 - DNA, 187 bp, Homo sapiens; identical to SEQ ID NO: 219241
  chr19:16025606-16025793
  hypo

SEQ ID NO: 325807 - DNA, 53 bp, Homo sapiens; identical to SEQ ID NO: 273539
  chr19:16147950-16148003
  hypo

SEQ ID NO: 325808 - DNA, 102 bp, Homo sapiens; identical to SEQ ID NO: 205249
  chr19:16187000-16187102
  hypo

SEQ ID NO: 325809 - DNA, 517 bp, Homo sapiens; identical to SEQ ID NO: 205250
  chr19:16187103-16187620
  hypo

SEQ ID NO: 325810 - DNA, 655 bp, Homo sapiens; identical to SEQ ID NO: 55781
  chr19:16187640-16188295
  hypo

SEQ ID NO: 325811 - DNA, 153 bp, Homo sapiens; identical to SEQ ID NO: 273540
  chr19:16198711-16198864
  hypo

SEQ ID NO: 325812 - DNA, 43 bp, Homo sapiens; identical to SEQ ID NO: 273541
  chr19:16218036-16218079
  hypo

SEQ ID NO: 325813 - DNA, 38 bp, Homo sapiens; identical to SEQ ID NO: 273542
  chr19:16221419-16221457
  hypo

SEQ ID NO: 325814 - DNA, 214 bp, Homo sapiens; identical to SEQ ID NO: 131000
  chr19:16222493-16222707
  hypo

SEQ ID NO: 325815 - DNA, 231 bp, Homo sapiens; identical to SEQ ID NO: 273543
  chr19:16226302-16226533
  hypo

SEQ ID NO: 325816 - DNA, 860 bp, Homo sapiens; identical to SEQ ID NO: 219246
  chr19:16232495-16233355
  hypo

SEQ ID NO: 325817 - DNA, 94 bp, Homo sapiens; identical to SEQ ID NO: 219247
  chr19:16235972-16236066
  hypo

SEQ ID NO: 325818 - DNA, 618 bp, Homo sapiens; identical to SEQ ID NO: 273546
  chr19:16238412-16239030
  hypo

SEQ ID NO: 325819 - DNA, 295 bp, Homo sapiens; identical to SEQ ID NO: 273547
  chr19:16240097-16240392
  hypo

SEQ ID NO: 325820 - DNA, 239 bp, Homo sapiens; identical to SEQ ID NO: 219248
  chr19:16243047-16243286
  hypo

SEQ ID NO: 325821 - DNA, 270 bp, Homo sapiens; identical to SEQ ID NO: 273549
  chr19:16318743-16319013
  hypo

SEQ ID NO: 325822 - DNA, 170 bp, Homo sapiens; identical to SEQ ID NO: 219249
  chr19:16320831-16321001
  hypo

SEQ ID NO: 325823 - DNA, 162 bp, Homo sapiens; identical to SEQ ID NO: 219250
  chr19:16328981-16329143
  hypo

SEQ ID NO: 325824 - DNA, 128 bp, Homo sapiens; identical to SEQ ID NO: 273552
  chr19:16337602-16337730
  hypo

SEQ ID NO: 325825 - DNA, 291 bp, Homo sapiens; identical to SEQ ID NO: 273553
  chr19:16337760-16338051
  hypo

SEQ ID NO: 325826 - DNA, 52 bp, Homo sapiens; identical to SEQ ID NO: 219252
  chr19:16343122-16343174
  hypo

SEQ ID NO: 325827 - DNA, 42 bp, Homo sapiens; identical to SEQ ID NO: 273555
  chr19:16469773-16469815
  hypo

SEQ ID NO: 325828 - DNA, 132 bp, Homo sapiens
  chr19:16472526-16472658
  hypo
aatcccagggaagctgcaagcggaagggagtggggtggcccggaggcggaggactcaacttacagaggtgaagtctgcaaagcccgaggcagaggccttagaaggtttagctgcagaggaggggacaaatgg

SEQ ID NO: 325829 - DNA, 126 bp, Homo sapiens
  chr19:16472777-16472903
  hypo
ttacaggtgtacttttacctggaaagtttaggagaaaaaaaaaaggagaaagaaagaaatatgagttactcacccggacagagcagaatgctggtgggcacaagcccggggcgcttctctgagaaa

SEQ ID NO: 325830 - DNA, 284 bp, Homo sapiens; identical to SEQ ID NO: 219253
  chr19:16485430-16485714
  hypo

SEQ ID NO: 325831 - DNA, 263 bp, Homo sapiens; identical to SEQ ID NO: 273558
  chr19:16495386-16495649
  hypo

SEQ ID NO: 325832 - DNA, 139 bp, Homo sapiens; identical to SEQ ID NO: 273559
  chr19:16511197-16511336
  hypo

SEQ ID NO: 325833 - DNA, 626 bp, Homo sapiens; identical to SEQ ID NO: 273560
  chr19:16511801-16512427
  hypo

SEQ ID NO: 325834 - DNA, 54 bp, Homo sapiens; identical to SEQ ID NO: 219255
  chr19:16513151-16513205
  hypo

SEQ ID NO: 325835 - DNA, 155 bp, Homo sapiens; identical to SEQ ID NO: 273562
  chr19:16528334-16528489
  hypo

SEQ ID NO: 325836 - DNA, 35 bp, Homo sapiens; identical to SEQ ID NO: 219256
  chr19:16550467-16550502
  hypo

SEQ ID NO: 325837 - DNA, 132 bp, Homo sapiens; identical to SEQ ID NO: 273564
  chr19:16552745-16552877
  hypo

SEQ ID NO: 325838 - DNA, 85 bp, Homo sapiens; identical to SEQ ID NO: 273565
  chr19:16620061-16620146
  hypo

SEQ ID NO: 325839 - DNA, 458 bp, Homo sapiens
  chr19:16620440-16620898
  hypo
ggatgagagcgaggtctcggagcatctcagtgccagctcggcttctgccatccagcaggacagcacttccagcatgcagccaccatctgaagcccccatggtgaacacagtcagctcagcttattcggaggattttgaaaactctccaagtctgacagcatctgagccaaccgcccattccaaggagtctcttgacagaacactggacgctttgtctgaatcctcttcaagtgtgaagacagaccttccacaaacagccgagtctaggaaaaagtcgggcaggcacgtgacaagagtgcttgtgaaggacacagctgtgcagacgccagatcctgccttcacctacgagtggaccaagggtaagccttggggcccgtgggggccggggcagccgggacaggagctcagcgtgtggtttacagcatcctgggagacacgtgggagagctcaggttcctg

SEQ ID NO: 325840 - DNA, 43 bp, Homo sapiens; identical to SEQ ID NO: 219258
  chr19:16631183-16631226
  hypo

SEQ ID NO: 325841 - DNA, 120 bp, Homo sapiens; identical to SEQ ID NO: 205254
  chr19:16638141-16638261
  hypo

SEQ ID NO: 325842 - DNA, 81 bp, Homo sapiens
  chr19:16638587-16638668
  hypo
aacagaacaccctgccgtgccttgcagcgttaaactcccctgcactcgcaggacaatggtgatctatactacagagaagcc

SEQ ID NO: 325843 - DNA, 187 bp, Homo sapiens; identical to SEQ ID NO: 273570
  chr19:16643385-16643572
  hypo

SEQ ID NO: 325844 - DNA, 172 bp, Homo sapiens; identical to SEQ ID NO: 273571
  chr19:16661966-16662138
  hypo

SEQ ID NO: 325845 - DNA, 83 bp, Homo sapiens; identical to SEQ ID NO: 219260
  chr19:16680107-16680190
  hypo

SEQ ID NO: 325846 - DNA, 390 bp, Homo sapiens; identical to SEQ ID NO: 273573
  chr19:16680657-16681047
  hypo

SEQ ID NO: 325847 - DNA, 317 bp, Homo sapiens; identical to SEQ ID NO: 273574
  chr19:16681299-16681616
  hypo

SEQ ID NO: 325848 - DNA, 117 bp, Homo sapiens; identical to SEQ ID NO: 273575
  chr19:16735189-16735306
  hypo

SEQ ID NO: 325849 - DNA, 190 bp, Homo sapiens; identical to SEQ ID NO: 273576
  chr19:16735778-16735968
  hypo

SEQ ID NO: 325850 - DNA, 129 bp, Homo sapiens; identical to SEQ ID NO: 219263
  chr19:16756122-16756251
  hypo

SEQ ID NO: 325851 - DNA, 165 bp, Homo sapiens; identical to SEQ ID NO: 273578
  chr19:16757897-16758062
  hypo

SEQ ID NO: 325852 - DNA, 200 bp, Homo sapiens; identical to SEQ ID NO: 273579
  chr19:16763517-16763717
  hypo

SEQ ID NO: 325853 - DNA, 111 bp, Homo sapiens; identical to SEQ ID NO: 273580
  chr19:16763932-16764043
  hypo

SEQ ID NO: 325854 - DNA, 194 bp, Homo sapiens; identical to SEQ ID NO: 219264
  chr19:16766708-16766902
  hypo

SEQ ID NO: 325855 - DNA, 140 bp, Homo sapiens; identical to SEQ ID NO: 273582
  chr19:16781235-16781375
  hypo

SEQ ID NO: 325856 - DNA, 97 bp, Homo sapiens; identical to SEQ ID NO: 273583
  chr19:16835422-16835519
  hypo

SEQ ID NO: 325857 - DNA, 551 bp, Homo sapiens; identical to SEQ ID NO: 273584
  chr19:17000717-17001268
  hypo

SEQ ID NO: 325858 - DNA, 36 bp, Homo sapiens; identical to SEQ ID NO: 273585
  chr19:17009182-17009218
  hypo

SEQ ID NO: 325859 - DNA, 169 bp, Homo sapiens; identical to SEQ ID NO: 273586
  chr19:17091354-17091523
  hypo

SEQ ID NO: 325860 - DNA, 76 bp, Homo sapiens; identical to SEQ ID NO: 225842
  chr19:17137592-17137668
  hypo

SEQ ID NO: 325861 - DNA, 36 bp, Homo sapiens; identical to SEQ ID NO: 219266
  chr19:17160653-17160689
  hypo

SEQ ID NO: 325862 - DNA, 371 bp, Homo sapiens; identical to SEQ ID NO: 273588
  chr19:17160719-17161090
  hypo

SEQ ID NO: 325863 - DNA, 392 bp, Homo sapiens; identical to SEQ ID NO: 219268
  chr19:17172563-17172955
  hypo

SEQ ID NO: 325864 - DNA, 137 bp, Homo sapiens; identical to SEQ ID NO: 219269
  chr19:17220150-17220287
  hypo

SEQ ID NO: 325865 - DNA, 342 bp, Homo sapiens; identical to SEQ ID NO: 219270
  chr19:17240193-17240535
  hypo

SEQ ID NO: 325866 - DNA, 120 bp, Homo sapiens; identical to SEQ ID NO: 219271
  chr19:17255382-17255502
  hypo

SEQ ID NO: 325867 - DNA, 260 bp, Homo sapiens; identical to SEQ ID NO: 219272
  chr19:17264700-17264960
  hypo

SEQ ID NO: 325868 - DNA, 160 bp, Homo sapiens; identical to SEQ ID NO: 273594
  chr19:17283464-17283624
  hypo

SEQ ID NO: 325869 - DNA, 147 bp, Homo sapiens; identical to SEQ ID NO: 273595
  chr19:17303675-17303822
  hypo

SEQ ID NO: 325870 - DNA, 138 bp, Homo sapiens; identical to SEQ ID NO: 273596
  chr19:17311458-17311596
  hypo

SEQ ID NO: 325871 - DNA, 222 bp, Homo sapiens; identical to SEQ ID NO: 273597
  chr19:17312745-17312967
  hypo

SEQ ID NO: 325872 - DNA, 611 bp, Homo sapiens; identical to SEQ ID NO: 293676
  chr19:17355714-17356325
  hypo

SEQ ID NO: 325873 - DNA, 265 bp, Homo sapiens; identical to SEQ ID NO: 225844
  chr19:17357470-17357735
  hypo

SEQ ID NO: 325874 - DNA, 173 bp, Homo sapiens; identical to SEQ ID NO: 273598
  chr19:17362463-17362636
  hypo

SEQ ID NO: 325875 - DNA, 56 bp, Homo sapiens; identical to SEQ ID NO: 273599
  chr19:17369111-17369167
  hypo

SEQ ID NO: 325876 - DNA, 120 bp, Homo sapiens; identical to SEQ ID NO: 273600
  chr19:17376563-17376683
  hypo

SEQ ID NO: 325877 - DNA, 54 bp, Homo sapiens; identical to SEQ ID NO: 273601
  chr19:17376962-17377016
  hypo

SEQ ID NO: 325878 - DNA, 103 bp, Homo sapiens; identical to SEQ ID NO: 293679
  chr19:17392399-17392502
  hypo

SEQ ID NO: 325879 - DNA, 92 bp, Homo sapiens; identical to SEQ ID NO: 273602
  chr19:17397245-17397337
  hypo

SEQ ID NO: 325880 - DNA, 44 bp, Homo sapiens; identical to SEQ ID NO: 273603
  chr19:17397664-17397708
  hypo

SEQ ID NO: 325881 - DNA, 95 bp, Homo sapiens; identical to SEQ ID NO: 273604
  chr19:17404192-17404287
  hypo

SEQ ID NO: 325882 - DNA, 306 bp, Homo sapiens
  chr19:17405411-17405717
  hypo
tcccatccaactcgagcagatgcctgggttcgccagggccaggatcacggtctttggggtggggacactcacttgaggaagctccaggccaggcagggcgacaagcagtgcaggacgcaggtgggcatgttgaagattgagcagaagctgggctccagcgccgtagggcccccgccattgatcatgatcaccttgtgcactaggtctgggtactcatgtgccaggaatgtgcagaaagagacactgcccggaacgggtggggtgataggaggattgaagggaggcggtcagcaggatacaagcagt

SEQ ID NO: 325883 - DNA, 507 bp, Homo sapiens; identical to SEQ ID NO: 273607
  chr19:17411813-17412320
  hypo

SEQ ID NO: 325884 - DNA, 140 bp, Homo sapiens; identical to SEQ ID NO: 219276
  chr19:17415104-17415244
  hypo

SEQ ID NO: 325885 - DNA, 797 bp, Homo sapiens; identical to SEQ ID NO: 273609
  chr19:17422760-17423557
  hypo

SEQ ID NO: 325886 - DNA, 119 bp, Homo sapiens; identical to SEQ ID NO: 219278
  chr19:17435942-17436061
  hypo

SEQ ID NO: 325887 - DNA, 62 bp, Homo sapiens; identical to SEQ ID NO: 219279
  chr19:17436203-17436265
  hypo

SEQ ID NO: 325888 - DNA, 866 bp, Homo sapiens; identical to SEQ ID NO: 273612
  chr19:17443706-17444572
  hypo

SEQ ID NO: 325889 - DNA, 98 bp, Homo sapiens
  chr19:17449458-17449556
  hypo
cggaaacagaggcgcagcggcggcaggccctcaggcagctggacggagagctgggccacctctgccgtggctgggccgagaccctcaccaaagcaagt

SEQ ID NO: 325890 - DNA, 42 bp, Homo sapiens; identical to SEQ ID NO: 273614
  chr19:17536626-17536668
  hypo

SEQ ID NO: 325891 - DNA, 372 bp, Homo sapiens; identical to SEQ ID NO: 273615
  chr19:17597312-17597684
  hypo

SEQ ID NO: 325892 - DNA, 62 bp, Homo sapiens; identical to SEQ ID NO: 273616
  chr19:17631822-17631884
  hypo

SEQ ID NO: 325893 - DNA, 392 bp, Homo sapiens; identical to SEQ ID NO: 225848
  chr19:17649952-17650344
  hypo

SEQ ID NO: 325894 - DNA, 258 bp, Homo sapiens; identical to SEQ ID NO: 273617
  chr19:17657447-17657705
  hypo

SEQ ID NO: 325895 - DNA, 59 bp, Homo sapiens
  chr19:17687902-17687961
  hypo
agccagtctgactgggagccatggagtgggtggggaaagcgtgttggagagaggctgga

SEQ ID NO: 325896 - DNA, 338 bp, Homo sapiens; identical to SEQ ID NO: 219282
  chr19:17688091-17688429
  hypo

SEQ ID NO: 325897 - DNA, 432 bp, Homo sapiens; identical to SEQ ID NO: 96847
  chr19:17691243-17691675
  hypo

SEQ ID NO: 325898 - DNA, 239 bp, Homo sapiens; identical to SEQ ID NO: 205266
  chr19:17716539-17716778
  hypo

SEQ ID NO: 325899 - DNA, 152 bp, Homo sapiens
  chr19:17757924-17758076
  hypo
tatgcgtgcacacacggagatgagatggaatgcacccgaccgagtgagtgcgcgctgcaaaggagagggaccaggccatgggacagggcatgagacaggtctcagagggtggagaaggaggggccctatggcggcccacgccccctcaccgg

SEQ ID NO: 325900 - DNA, 111 bp, Homo sapiens
  chr19:17758133-17758244
  hypo
ccttcatctgctgcgtgtgcgccgtcttggtcaccgcgaagatctcctggatgagctcgaagatctcgggcttgttgcgctcccggatcttcatgcggtccttgagcacca

SEQ ID NO: 325901 - DNA, 330 bp, Homo sapiens; identical to SEQ ID NO: 293692
  chr19:17799069-17799399
  hypo

SEQ ID NO: 325902 - DNA, 1218 bp, Homo sapiens; identical to SEQ ID NO: 273622
  chr19:17837840-17839058
  hypo

SEQ ID NO: 325903 - DNA, 38 bp, Homo sapiens; identical to SEQ ID NO: 273623
  chr19:17848807-17848845
  hypo

SEQ ID NO: 325904 - DNA, 392 bp, Homo sapiens; identical to SEQ ID NO: 273624
  chr19:17881296-17881688
  hypo

SEQ ID NO: 325905 - DNA, 120 bp, Homo sapiens; identical to SEQ ID NO: 273625
  chr19:17882045-17882165
  hypo

SEQ ID NO: 325906 - DNA, 60 bp, Homo sapiens; identical to SEQ ID NO: 219288
  chr19:17994750-17994810
  hypo

SEQ ID NO: 325907 - DNA, 779 bp, Homo sapiens; identical to SEQ ID NO: 273628
  chr19:18052911-18053690
  hypo

SEQ ID NO: 325908 - DNA, 41 bp, Homo sapiens; identical to SEQ ID NO: 219290
  chr19:18054174-18054215
  hypo

SEQ ID NO: 325909 - DNA, 84 bp, Homo sapiens; identical to SEQ ID NO: 273631
  chr19:18080377-18080461
  hypo

SEQ ID NO: 325910 - DNA, 429 bp, Homo sapiens; identical to SEQ ID NO: 219291
  chr19:18084483-18084912
  hypo

SEQ ID NO: 325911 - DNA, 108 bp, Homo sapiens; identical to SEQ ID NO: 219292
  chr19:18085018-18085126
  hypo

SEQ ID NO: 325912 - DNA, 85 bp, Homo sapiens; identical to SEQ ID NO: 219293
  chr19:18092405-18092490
  hypo

SEQ ID NO: 325913 - DNA, 83 bp, Homo sapiens
  chr19:18092885-18092968
  hypo
cagcatctcctcctggatcatcgcagcctggaccgtgcgcgtctgcgagaggtgcgaccgccgcccctggagcccccccagcc

SEQ ID NO: 325914 - DNA, 108 bp, Homo sapiens
  chr19:18103592-18103700
  hypo
tcaggagatggtgtcggcatagttttctgaatgaaacaccgcctccggtggtggtgagaggacaggtgtgcccctgaggggctggcacagaaccctcagaggctgggc

SEQ ID NO: 325915 - DNA, 64 bp, Homo sapiens
  chr19:18103924-18103988
  hypo
gtcacagacagggggtacacccggggcatgccaaccccagcctcagaggcgggcagggttcaca

SEQ ID NO: 325916 - DNA, 355 bp, Homo sapiens; identical to SEQ ID NO: 293702
  chr19:18117802-18118157
  hypo

SEQ ID NO: 325917 - DNA, 50 bp, Homo sapiens; identical to SEQ ID NO: 205274
  chr19:18118523-18118573
  hypo

SEQ ID NO: 325918 - DNA, 99 bp, Homo sapiens; identical to SEQ ID NO: 205275
  chr19:18119043-18119142
  hypo

SEQ ID NO: 325919 - DNA, 47 bp, Homo sapiens; identical to SEQ ID NO: 273635
  chr19:18120713-18120760
  hypo

SEQ ID NO: 325920 - DNA, 189 bp, Homo sapiens; identical to SEQ ID NO: 273636
  chr19:18121351-18121540
  hypo

SEQ ID NO: 325921 - DNA, 316 bp, Homo sapiens; identical to SEQ ID NO: 219297
  chr19:18123645-18123961
  hypo

SEQ ID NO: 325922 - DNA, 59 bp, Homo sapiens
  chr19:18126517-18126576
  hypo
tagccattcatccgcggatggacatctgggttgtttccacggcttggctatagtgaatc

SEQ ID NO: 325923 - DNA, 55 bp, Homo sapiens
  chr19:18126606-18126661
  hypo
tactttgaaaacccacggagctgttaggtggccctagtggcgtggggctgttatt

SEQ ID NO: 325924 - DNA, 83 bp, Homo sapiens; identical to SEQ ID NO: 273639
  chr19:18159860-18159943
  hypo

SEQ ID NO: 325925 - DNA, 60 bp, Homo sapiens; identical to SEQ ID NO: 219298
  chr19:18241244-18241304
  hypo

SEQ ID NO: 325926 - DNA, 138 bp, Homo sapiens; identical to SEQ ID NO: 219299
  chr19:18241355-18241493
  hypo

SEQ ID NO: 325927 - DNA, 54 bp, Homo sapiens; identical to SEQ ID NO: 273642
  chr19:18242605-18242659
  hypo

SEQ ID NO: 325928 - DNA, 135 bp, Homo sapiens; identical to SEQ ID NO: 273643
  chr19:18242689-18242824
  hypo

SEQ ID NO: 325929 - DNA, 110 bp, Homo sapiens; identical to SEQ ID NO: 273644
  chr19:18255885-18255995
  hypo

SEQ ID NO: 325930 - DNA, 124 bp, Homo sapiens; identical to SEQ ID NO: 293705
  chr19:18271975-18272099
  hypo

SEQ ID NO: 325931 - DNA, 172 bp, Homo sapiens
  chr19:18272536-18272708
  hypo
gctcgtcgcagctccggtactggtctctcgctcgcctttgtgtgagaatctatggagcacttactgcatacagctatgagggagctggcctcgcacatgtgcctgtatcatctcctcctccgccctgcacatactgtctcgtatatacccccaggcgtgcaagcgcacgcac

SEQ ID NO: 325932 - DNA, 36 bp, Homo sapiens
  chr19:18272907-18272943
  hypo
atactgatccctgagtgctgccggcatcagcaggct

SEQ ID NO: 325933 - DNA, 64 bp, Homo sapiens; identical to SEQ ID NO: 219300
  chr19:18273254-18273318
  hypo

SEQ ID NO: 325934 - DNA, 145 bp, Homo sapiens; identical to SEQ ID NO: 273647
  chr19:18277902-18278047
  hypo

SEQ ID NO: 325935 - DNA, 136 bp, Homo sapiens; identical to SEQ ID NO: 205278
  chr19:18343303-18343439
  hypo

SEQ ID NO: 325936 - DNA, 199 bp, Homo sapiens; identical to SEQ ID NO: 293713
  chr19:18344017-18344216
  hypo

SEQ ID NO: 325937 - DNA, 627 bp, Homo sapiens; identical to SEQ ID NO: 219302
  chr19:18368469-18369096
  hypo

SEQ ID NO: 325938 - DNA, 157 bp, Homo sapiens; identical to SEQ ID NO: 273650
  chr19:18416995-18417152
  hypo

SEQ ID NO: 325939 - DNA, 330 bp, Homo sapiens; identical to SEQ ID NO: 205279
  chr19:18420497-18420827
  hypo

SEQ ID NO: 325940 - DNA, 101 bp, Homo sapiens; identical to SEQ ID NO: 273651
  chr19:18435014-18435115
  hypo

SEQ ID NO: 325941 - DNA, 76 bp, Homo sapiens; identical to SEQ ID NO: 273652
  chr19:18441765-18441841
  hypo

SEQ ID NO: 325942 - DNA, 98 bp, Homo sapiens
  chr19:18459066-18459164
  hypo
gggtgaggaggacccgggtcacagaacttggtaacatcacgggacaattgctgccacagtgagtctagacagacctgctaaggatattaccagggaac

SEQ ID NO: 325943 - DNA, 66 bp, Homo sapiens
  chr19:18459219-18459285
  hypo
gggtcctgtcaggtagatggggtgtagacaatggggcgtctgcccgagccccgtcctttcacggtg

SEQ ID NO: 325944 - DNA, 79 bp, Homo sapiens; identical to SEQ ID NO: 219304
  chr19:18496195-18496274
  hypo

SEQ ID NO: 325945 - DNA, 251 bp, Homo sapiens; identical to SEQ ID NO: 273655
  chr19:18546489-18546740
  hypo

SEQ ID NO: 325946 - DNA, 91 bp, Homo sapiens; identical to SEQ ID NO: 273656
  chr19:18547000-18547091
  hypo

SEQ ID NO: 325947 - DNA, 571 bp, Homo sapiens; identical to SEQ ID NO: 205281
  chr19:18548568-18549139
  hypo

SEQ ID NO: 325948 - DNA, 49 bp, Homo sapiens; identical to SEQ ID NO: 273657
  chr19:18556529-18556578
  hypo

SEQ ID NO: 325949 - DNA, 67 bp, Homo sapiens; identical to SEQ ID NO: 219306
  chr19:18557168-18557235
  hypo

SEQ ID NO: 325950 - DNA, 142 bp, Homo sapiens; identical to SEQ ID NO: 273659
  chr19:18591739-18591881
  hypo

SEQ ID NO: 325951 - DNA, 84 bp, Homo sapiens; identical to SEQ ID NO: 219307
  chr19:18600813-18600897
  hypo

SEQ ID NO: 325952 - DNA, 407 bp, Homo sapiens; identical to SEQ ID NO: 273661
  chr19:18637199-18637606
  hypo

SEQ ID NO: 325953 - DNA, 81 bp, Homo sapiens; identical to SEQ ID NO: 219308
  chr19:18675984-18676065
  hypo

SEQ ID NO: 325954 - DNA, 87 bp, Homo sapiens; identical to SEQ ID NO: 273663
  chr19:18688221-18688308
  hypo

SEQ ID NO: 325955 - DNA, 446 bp, Homo sapiens; identical to SEQ ID NO: 273664
  chr19:18688368-18688814
  hypo

SEQ ID NO: 325956 - DNA, 747 bp, Homo sapiens; identical to SEQ ID NO: 293730
  chr19:18721516-18722263
  hypo

SEQ ID NO: 325957 - DNA, 64 bp, Homo sapiens; identical to SEQ ID NO: 293731
  chr19:18722425-18722489
  hypo

SEQ ID NO: 325958 - DNA, 154 bp, Homo sapiens; identical to SEQ ID NO: 293732
  chr19:18722521-18722675
  hypo

SEQ ID NO: 325959 - DNA, 209 bp, Homo sapiens; identical to SEQ ID NO: 293733
  chr19:18722768-18722977
  hypo

SEQ ID NO: 325960 - DNA, 31 bp, Homo sapiens; identical to SEQ ID NO: 293734
  chr19:18723960-18723991
  hypo

SEQ ID NO: 325961 - DNA, 36 bp, Homo sapiens; identical to SEQ ID NO: 219310
  chr19:18757684-18757720
  hypo

SEQ ID NO: 325962 - DNA, 235 bp, Homo sapiens; identical to SEQ ID NO: 219311
  chr19:18757927-18758162
  hypo

SEQ ID NO: 325963 - DNA, 76 bp, Homo sapiens; identical to SEQ ID NO: 219312
  chr19:18771033-18771109
  hypo

SEQ ID NO: 325964 - DNA, 67 bp, Homo sapiens
  chr19:18783006-18783073
  hypo
acttctggggcctctcagcaagtgagggccaagggggcctctggggagccgtgtgaggtgggaatcc

SEQ ID NO: 325965 - DNA, 34 bp, Homo sapiens
  chr19:18783151-18783185
  hypo
ggccctggagattcactttgcacggtgcagcctc

SEQ ID NO: 325966 - DNA, 140 bp, Homo sapiens; identical to SEQ ID NO: 189390
  chr19:18783216-18783356
  hypo

SEQ ID NO: 325967 - DNA, 148 bp, Homo sapiens; identical to SEQ ID NO: 219313
  chr19:18798371-18798519
  hypo

SEQ ID NO: 325968 - DNA, 171 bp, Homo sapiens
  chr19:18808024-18808195
  hypo
ggggttcttgcacggagggattcagaagcacttggcaccggggggagcagcctcatcggtgtccagccagggccacacagtcagcctcagcccccacctcgcttccttctgggcgagcttagacctgggaggcctctttttttttggagtgccgtggtgcgatctcagctc

SEQ ID NO: 325969 - DNA, 196 bp, Homo sapiens; identical to SEQ ID NO: 273672
  chr19:18809609-18809805
  hypo

SEQ ID NO: 325970 - DNA, 226 bp, Homo sapiens; identical to SEQ ID NO: 273673
  chr19:18830681-18830907
  hypo

SEQ ID NO: 325971 - DNA, 305 bp, Homo sapiens; identical to SEQ ID NO: 273674
  chr19:18836821-18837126
  hypo

SEQ ID NO: 325972 - DNA, 375 bp, Homo sapiens; identical to SEQ ID NO: 219315
  chr19:18856004-18856379
  hypo

SEQ ID NO: 325973 - DNA, 327 bp, Homo sapiens; identical to SEQ ID NO: 219316
  chr19:18856409-18856736
  hypo

SEQ ID NO: 325974 - DNA, 294 bp, Homo sapiens; identical to SEQ ID NO: 273676
  chr19:18867539-18867833
  hypo

SEQ ID NO: 325975 - DNA, 65 bp, Homo sapiens; identical to SEQ ID NO: 219317
  chr19:18871011-18871076
  hypo

SEQ ID NO: 325976 - DNA, 165 bp, Homo sapiens; identical to SEQ ID NO: 219318
  chr19:18872660-18872825
  hypo

SEQ ID NO: 325977 - DNA, 134 bp, Homo sapiens; identical to SEQ ID NO: 219319
  chr19:18872900-18873034
  hypo

SEQ ID NO: 325978 - DNA, 457 bp, Homo sapiens; identical to SEQ ID NO: 273679
  chr19:18874215-18874672
  hypo

SEQ ID NO: 325979 - DNA, 322 bp, Homo sapiens
  chr19:18879409-18879731
  hypo
cgtcccagcagccaccacccccgccacccccacaggcgcccgtccgcctgccccctggtggccccctgttgcccagcgccagcctgactcgtgggccacagccgcccccgcttgcagtcacggtaccgtcctctctcccccagtcccccccagagaaccctggccagccatcgatggggatcgacatcgcctcggtaagcccagggtggggtccctcggggcctgactgggggtcttgtagaggacagcccgggggctgcagaacagtcgggttacctgctgcatgggccaggggtcagaaccccagcgaacgctgcctggg

SEQ ID NO: 325980 - DNA, 35 bp, Homo sapiens; identical to SEQ ID NO: 219320
  chr19:18957753-18957788
  hypo

SEQ ID NO: 325981 - DNA, 193 bp, Homo sapiens; identical to SEQ ID NO: 273684
  chr19:18963590-18963783
  hypo

SEQ ID NO: 325982 - DNA, 151 bp, Homo sapiens; identical to SEQ ID NO: 219321
  chr19:18963997-18964148
  hypo

SEQ ID NO: 325983 - DNA, 210 bp, Homo sapiens
  chr19:18988692-18988902
  hypo
agtcaataccagctcgagccaaaagtcttgagtcgtctttgattcttttatttctgtttcatctacacccaaggcgaatctgatgggttctcccttccaaacagggtggggggtctgacgctcctctgcctggctacagccccggatgtgttaaatgtctgcatctcgcacctcccgttccaaaaaacgtcacggagctctgagccactg

SEQ ID NO: 325984 - DNA, 153 bp, Homo sapiens; identical to SEQ ID NO: 273689
  chr19:18996626-18996779
  hypo

SEQ ID NO: 325985 - DNA, 220 bp, Homo sapiens; identical to SEQ ID NO: 273690
  chr19:19040159-19040379
  hypo

SEQ ID NO: 325986 - DNA, 34 bp, Homo sapiens; identical to SEQ ID NO: 273692
  chr19:19087049-19087083
  hypo

SEQ ID NO: 325987 - DNA, 64 bp, Homo sapiens; identical to SEQ ID NO: 273693
  chr19:19100287-19100351
  hypo

SEQ ID NO: 325988 - DNA, 136 bp, Homo sapiens; identical to SEQ ID NO: 273694
  chr19:19104043-19104179
  hypo

SEQ ID NO: 325989 - DNA, 266 bp, Homo sapiens; identical to SEQ ID NO: 219323
  chr19:19109239-19109505
  hypo

SEQ ID NO: 325990 - DNA, 281 bp, Homo sapiens; identical to SEQ ID NO: 219324
  chr19:19114950-19115231
  hypo

SEQ ID NO: 325991 - DNA, 272 bp, Homo sapiens; identical to SEQ ID NO: 273697
  chr19:19135284-19135556
  hypo

SEQ ID NO: 325992 - DNA, 198 bp, Homo sapiens; identical to SEQ ID NO: 273698
  chr19:19136747-19136945
  hypo

SEQ ID NO: 325993 - DNA, 98 bp, Homo sapiens; identical to SEQ ID NO: 273699
  chr19:19147972-19148070
  hypo

SEQ ID NO: 325994 - DNA, 240 bp, Homo sapiens; identical to SEQ ID NO: 219325
  chr19:19156742-19156982
  hypo

SEQ ID NO: 325995 - DNA, 135 bp, Homo sapiens; identical to SEQ ID NO: 273701
  chr19:19165034-19165169
  hypo

SEQ ID NO: 325996 - DNA, 36 bp, Homo sapiens
  chr19:19218819-19218855
  hypo
cttcacctatgagacgctcaagagcttgcacagagg

SEQ ID NO: 325997 - DNA, 44 bp, Homo sapiens; identical to SEQ ID NO: 273703
  chr19:19226768-19226812
  hypo

SEQ ID NO: 325998 - DNA, 216 bp, Homo sapiens; identical to SEQ ID NO: 273704
  chr19:19230753-19230969
  hypo

SEQ ID NO: 325999 - DNA, 275 bp, Homo sapiens; identical to SEQ ID NO: 273705
  chr19:19231766-19232041
  hypo

SEQ ID NO: 326000 - DNA, 328 bp, Homo sapiens; identical to SEQ ID NO: 273707
  chr19:19389261-19389589
  hypo

SEQ ID NO: 326001 - DNA, 321 bp, Homo sapiens
  chr19:19391586-19391907
  hypo
cttcaggggaggcagccaaccatcctcagagcagctgacatttaatttggcatcagctgtggaacttggcaggctccagtaacactgacacatagaaagatgctgcaacagccccatccgggtggcagaaaccaccacccctcgggcggtgcggtgcttcccgggggagaaggtgagcaaaggggtgcagcgggccctctgggaagggaaaagatttgggtccttccagctcatcaacactcgggctttgccgctaagaatggcccacatttgcactcttagtccttccttggtttacagggcactgagggatgtggggga

SEQ ID NO: 326002 - DNA, 194 bp, Homo sapiens; identical to SEQ ID NO: 219326
  chr19:19416790-19416984
  hypo

SEQ ID NO: 326003 - DNA, 690 bp, Homo sapiens; identical to SEQ ID NO: 219327
  chr19:19446448-19447138
  hypo

SEQ ID NO: 326004 - DNA, 90 bp, Homo sapiens; identical to SEQ ID NO: 273711
  chr19:19447258-19447348
  hypo

SEQ ID NO: 326005 - DNA, 38 bp, Homo sapiens
  chr19:19447906-19447944
  hypo
aaggaatccagcttgattgccgccttgttttttttttt

SEQ ID NO: 326006 - DNA, 97 bp, Homo sapiens
  chr19:19448030-19448127
  hypo
agcagaccccatattggcactgccgcctgctcttccagctcgctgtgagtaccgcggcccgggaacgagggtgcccggcagggaccatgaccctggg

SEQ ID NO: 326007 - DNA, 180 bp, Homo sapiens; identical to SEQ ID NO: 219328
  chr19:19494668-19494848
  hypo

SEQ ID NO: 326008 - DNA, 40 bp, Homo sapiens
  chr19:19540205-19540245
  hypo
aggaggccaggtggttggagcgggagcatggaacgtgtat

SEQ ID NO: 326009 - DNA, 70 bp, Homo sapiens
  chr19:19540302-19540372
  hypo
gtggtgaggtgctctgacgctgggtggacctgggaaattaaggagggccgtctggtttattatggggagt

SEQ ID NO: 326010 - DNA, 292 bp, Homo sapiens; identical to SEQ ID NO: 219329
  chr19:19576164-19576456
  hypo

SEQ ID NO: 326011 - DNA, 513 bp, Homo sapiens; identical to SEQ ID NO: 273716
  chr19:19604056-19604569
  hypo

SEQ ID NO: 326012 - DNA, 194 bp, Homo sapiens; identical to SEQ ID NO: 273717
  chr19:19611820-19612014
  hypo

SEQ ID NO: 326013 - DNA, 132 bp, Homo sapiens; identical to SEQ ID NO: 273718
  chr19:19612753-19612885
  hypo

SEQ ID NO: 326014 - DNA, 731 bp, Homo sapiens; identical to SEQ ID NO: 273719
  chr19:19616882-19617613
  hypo

SEQ ID NO: 326015 - DNA, 150 bp, Homo sapiens; identical to SEQ ID NO: 273720
  chr19:19623134-19623284
  hypo

SEQ ID NO: 326016 - DNA, 98 bp, Homo sapiens; identical to SEQ ID NO: 273721
  chr19:19624553-19624651
  hypo

SEQ ID NO: 326017 - DNA, 595 bp, Homo sapiens; identical to SEQ ID NO: 273722
  chr19:19625551-19626146
  hypo

SEQ ID NO: 326018 - DNA, 280 bp, Homo sapiens; identical to SEQ ID NO: 219331
  chr19:19636907-19637187
  hypo

SEQ ID NO: 326019 - DNA, 65 bp, Homo sapiens; identical to SEQ ID NO: 273724
  chr19:19674354-19674419
  hypo

SEQ ID NO: 326020 - DNA, 128 bp, Homo sapiens; identical to SEQ ID NO: 273725
  chr19:19680293-19680421
  hypo

SEQ ID NO: 326021 - DNA, 38 bp, Homo sapiens; identical to SEQ ID NO: 273726
  chr19:19710043-19710081
  hypo

SEQ ID NO: 326022 - DNA, 177 bp, Homo sapiens; identical to SEQ ID NO: 273727
  chr19:19719311-19719488
  hypo

SEQ ID NO: 326023 - DNA, 99 bp, Homo sapiens; identical to SEQ ID NO: 205290
  chr19:19729152-19729251
  hypo

SEQ ID NO: 326024 - DNA, 135 bp, Homo sapiens; identical to SEQ ID NO: 205291
  chr19:19729395-19729530
  hypo

SEQ ID NO: 326025 - DNA, 162 bp, Homo sapiens; identical to SEQ ID NO: 12178
  chr19:19729585-19729747
  hypo

SEQ ID NO: 326026 - DNA, 50 bp, Homo sapiens; identical to SEQ ID NO: 273728
  chr19:19735078-19735128
  hypo

SEQ ID NO: 326027 - DNA, 168 bp, Homo sapiens
  chr19:19737450-19737618
  hypo
cgtagaagaaaatgcgggtgtacacagccaccatgagcaggaagacaagcaggctcgacagagcccagacggccaaataggagcggctgagcaggggtgccatgcgtgagcagcggtccagggcacagaggcagtgccaggagtgggcaggcagcagccccaggccca

SEQ ID NO: 326028 - DNA, 178 bp, Homo sapiens; identical to SEQ ID NO: 219336
  chr19:19737702-19737880
  hypo

SEQ ID NO: 326029 - DNA, 50 bp, Homo sapiens; identical to SEQ ID NO: 205293
  chr19:19738572-19738622
  hypo

SEQ ID NO: 326030 - DNA, 504 bp, Homo sapiens; identical to SEQ ID NO: 293751
  chr19:19738668-19739172
  hypo

SEQ ID NO: 326031 - DNA, 247 bp, Homo sapiens; identical to SEQ ID NO: 205295
  chr19:19739428-19739675
  hypo

SEQ ID NO: 326032 - DNA, 54 bp, Homo sapiens; identical to SEQ ID NO: 273730
  chr19:19766967-19767021
  hypo

SEQ ID NO: 326033 - DNA, 173 bp, Homo sapiens; identical to SEQ ID NO: 273731
  chr19:19769452-19769625
  hypo

SEQ ID NO: 326034 - DNA, 120 bp, Homo sapiens; identical to SEQ ID NO: 273732
  chr19:19775583-19775703
  hypo

SEQ ID NO: 326035 - DNA, 84 bp, Homo sapiens; identical to SEQ ID NO: 273733
  chr19:19819260-19819344
  hypo

SEQ ID NO: 326036 - DNA, 225 bp, Homo sapiens; identical to SEQ ID NO: 273734
  chr19:19822261-19822486
  hypo

SEQ ID NO: 326037 - DNA, 261 bp, Homo sapiens; identical to SEQ ID NO: 205296
  chr19:19843330-19843591
  hypo

SEQ ID NO: 326038 - DNA, 68 bp, Homo sapiens; identical to SEQ ID NO: 205297
  chr19:19844044-19844112
  hypo

SEQ ID NO: 326039 - DNA, 783 bp, Homo sapiens; identical to SEQ ID NO: 273735
  chr19:19861401-19862184
  hypo

SEQ ID NO: 326040 - DNA, 139 bp, Homo sapiens; identical to SEQ ID NO: 273736
  chr19:19974478-19974617
  hypo

SEQ ID NO: 326041 - DNA, 76 bp, Homo sapiens; identical to SEQ ID NO: 273737
  chr19:20013812-20013888
  hypo

SEQ ID NO: 326042 - DNA, 37 bp, Homo sapiens; identical to SEQ ID NO: 273738
  chr19:20095094-20095131
  hypo

SEQ ID NO: 326043 - DNA, 86 bp, Homo sapiens; identical to SEQ ID NO: 273739
  chr19:20103785-20103871
  hypo

SEQ ID NO: 326044 - DNA, 41 bp, Homo sapiens; identical to SEQ ID NO: 273740
  chr19:20115867-20115908
  hypo

SEQ ID NO: 326045 - DNA, 73 bp, Homo sapiens; identical to SEQ ID NO: 205308
  chr19:20162581-20162654
  hypo

SEQ ID NO: 326046 - DNA, 120 bp, Homo sapiens; identical to SEQ ID NO: 273741
  chr19:20187137-20187257
  hypo

SEQ ID NO: 326047 - DNA, 90 bp, Homo sapiens; identical to SEQ ID NO: 273742
  chr19:21235804-21235894
  hypo

SEQ ID NO: 326048 - DNA, 32 bp, Homo sapiens; identical to SEQ ID NO: 273743
  chr19:21254339-21254371
  hypo

SEQ ID NO: 326049 - DNA, 120 bp, Homo sapiens; identical to SEQ ID NO: 219343
  chr19:21261376-21261496
  hypo

SEQ ID NO: 326050 - DNA, 89 bp, Homo sapiens; identical to SEQ ID NO: 219344
  chr19:21305621-21305710
  hypo

SEQ ID NO: 326051 - DNA, 257 bp, Homo sapiens; identical to SEQ ID NO: 273746
  chr19:21513407-21513664
  hypo

SEQ ID NO: 326052 - DNA, 349 bp, Homo sapiens; identical to SEQ ID NO: 219346
  chr19:21623090-21623439
  hypo

SEQ ID NO: 326053 - DNA, 92 bp, Homo sapiens; identical to SEQ ID NO: 219347
  chr19:21627223-21627315
  hypo

SEQ ID NO: 326054 - DNA, 35 bp, Homo sapiens; identical to SEQ ID NO: 273749
  chr19:21642233-21642268
  hypo

SEQ ID NO: 326055 - DNA, 105 bp, Homo sapiens; identical to SEQ ID NO: 219348
  chr19:21645410-21645515
  hypo

SEQ ID NO: 326056 - DNA, 180 bp, Homo sapiens; identical to SEQ ID NO: 273751
  chr19:21648186-21648366
  hypo

SEQ ID NO: 326057 - DNA, 96 bp, Homo sapiens; identical to SEQ ID NO: 219349
  chr19:21654951-21655047
  hypo

SEQ ID NO: 326058 - DNA, 40 bp, Homo sapiens; identical to SEQ ID NO: 273753
  chr19:21717590-21717630
  hypo

SEQ ID NO: 326059 - DNA, 139 bp, Homo sapiens; identical to SEQ ID NO: 219350
  chr19:21760988-21761127
  hypo

SEQ ID NO: 326060 - DNA, 90 bp, Homo sapiens; identical to SEQ ID NO: 273755
  chr19:21767646-21767736
  hypo

SEQ ID NO: 326061 - DNA, 33 bp, Homo sapiens; identical to SEQ ID NO: 219351
  chr19:21792703-21792736
  hypo

SEQ ID NO: 326062 - DNA, 180 bp, Homo sapiens; identical to SEQ ID NO: 273757
  chr19:21798902-21799082
  hypo

SEQ ID NO: 326063 - DNA, 42 bp, Homo sapiens; identical to SEQ ID NO: 273758
  chr19:21799322-21799364
  hypo

SEQ ID NO: 326064 - DNA, 43 bp, Homo sapiens; identical to SEQ ID NO: 273759
  chr19:22239550-22239593
  hypo

SEQ ID NO: 326065 - DNA, 42 bp, Homo sapiens; identical to SEQ ID NO: 273761
  chr19:22768073-22768115
  hypo

SEQ ID NO: 326066 - DNA, 237 bp, Homo sapiens; identical to SEQ ID NO: 273762
  chr19:22799548-22799785
  hypo

SEQ ID NO: 326067 - DNA, 180 bp, Homo sapiens; identical to SEQ ID NO: 219352
  chr19:22815034-22815214
  hypo

SEQ ID NO: 326068 - DNA, 39 bp, Homo sapiens; identical to SEQ ID NO: 219353
  chr19:22815454-22815493
  hypo

SEQ ID NO: 326069 - DNA, 31 bp, Homo sapiens; identical to SEQ ID NO: 219354
  chr19:22815523-22815554
  hypo

SEQ ID NO: 326070 - DNA, 36 bp, Homo sapiens; identical to SEQ ID NO: 219355
  chr19:22824862-22824898
  hypo

SEQ ID NO: 326071 - DNA, 32 bp, Homo sapiens; identical to SEQ ID NO: 219356
  chr19:22825458-22825490
  hypo

SEQ ID NO: 326072 - DNA, 89 bp, Homo sapiens; identical to SEQ ID NO: 273767
  chr19:23083835-23083924
  hypo

SEQ ID NO: 326073 - DNA, 688 bp, Homo sapiens; identical to SEQ ID NO: 273768
  chr19:23084164-23084852
  hypo

SEQ ID NO: 326074 - DNA, 120 bp, Homo sapiens; identical to SEQ ID NO: 273769
  chr19:23271955-23272075
  hypo

SEQ ID NO: 326075 - DNA, 39 bp, Homo sapiens; identical to SEQ ID NO: 273770
  chr19:23297430-23297469
  hypo

SEQ ID NO: 326076 - DNA, 42 bp, Homo sapiens; identical to SEQ ID NO: 273771
  chr19:23378285-23378327
  hypo

SEQ ID NO: 326077 - DNA, 180 bp, Homo sapiens; identical to SEQ ID NO: 273772
  chr19:23435643-23435823
  hypo

SEQ ID NO: 326078 - DNA, 37 bp, Homo sapiens; identical to SEQ ID NO: 273773
  chr19:23453188-23453225
  hypo

SEQ ID NO: 326079 - DNA, 39 bp, Homo sapiens; identical to SEQ ID NO: 273774
  chr19:23917853-23917892
  hypo

SEQ ID NO: 326080 - DNA, 296 bp, Homo sapiens; identical to SEQ ID NO: 273775
  chr19:24140474-24140770
  hypo

SEQ ID NO: 326081 - DNA, 46 bp, Homo sapiens; identical to SEQ ID NO: 273776
  chr19:24178252-24178298
  hypo

SEQ ID NO: 326082 - DNA, 120 bp, Homo sapiens; identical to SEQ ID NO: 273777
  chr19:24269010-24269130
  hypo

SEQ ID NO: 326083 - DNA, 119 bp, Homo sapiens; identical to SEQ ID NO: 219358
  chr19:28296830-28296949
  hypo

SEQ ID NO: 326084 - DNA, 408 bp, Homo sapiens
  chr19:28341878-28342286
  hypo
taccctccaccctcagcatccggcctgctggccgctcctctgtcaggtctccgggtcaactagatgtcggccacgaacgccagacttagcctccggctcgccatgtttgaggtcgaccagcaggccctctcaccggagtgagctgtaaggagggatgctcagtgaaccaatcaagacgtgggccacggaggtcagcagggctctgggcaattcatggtcctgacctggcaagcaccactctgggacctgagcgttgcaaacccatctacacccgtccaacctgtgttggccggcgctcctcgctcgctcaggcctccgggttgacaagagttcagccgtgagcgcctggtttagccgccagcttacagtgtcggaggtcaaacagcaagccctcccccggagtaagca

SEQ ID NO: 326085 - DNA, 42 bp, Homo sapiens; identical to SEQ ID NO: 273780
  chr19:28663020-28663062
  hypo

SEQ ID NO: 326086 - DNA, 37 bp, Homo sapiens; identical to SEQ ID NO: 273781
  chr19:29208561-29208598
  hypo

SEQ ID NO: 326087 - DNA, 35 bp, Homo sapiens; identical to SEQ ID NO: 219359
  chr19:29930745-29930780
  hypo

SEQ ID NO: 326088 - DNA, 237 bp, Homo sapiens; identical to SEQ ID NO: 273784
  chr19:29993079-29993316
  hypo

SEQ ID NO: 326089 - DNA, 79 bp, Homo sapiens; identical to SEQ ID NO: 219360
  chr19:30102075-30102154
  hypo

SEQ ID NO: 326090 - DNA, 305 bp, Homo sapiens; identical to SEQ ID NO: 273786
  chr19:30129854-30130159
  hypo

SEQ ID NO: 326091 - DNA, 204 bp, Homo sapiens; identical to SEQ ID NO: 273787
  chr19:30155053-30155257
  hypo

SEQ ID NO: 326092 - DNA, 268 bp, Homo sapiens; identical to SEQ ID NO: 225875
  chr19:30165119-30165387
  hypo

SEQ ID NO: 326093 - DNA, 145 bp, Homo sapiens; identical to SEQ ID NO: 219361
  chr19:30185996-30186141
  hypo

SEQ ID NO: 326094 - DNA, 96 bp, Homo sapiens; identical to SEQ ID NO: 219362
  chr19:30186240-30186336
  hypo

SEQ ID NO: 326095 - DNA, 39 bp, Homo sapiens; identical to SEQ ID NO: 293813
  chr19:30215474-30215513
  hypo

SEQ ID NO: 326096 - DNA, 37 bp, Homo sapiens; identical to SEQ ID NO: 273790
  chr19:30298274-30298311
  hypo

SEQ ID NO: 326097 - DNA, 196 bp, Homo sapiens; identical to SEQ ID NO: 219363
  chr19:30314899-30315095
  hypo

SEQ ID NO: 326098 - DNA, 89 bp, Homo sapiens; identical to SEQ ID NO: 273792
  chr19:30324369-30324458
  hypo

SEQ ID NO: 326099 - DNA, 240 bp, Homo sapiens; identical to SEQ ID NO: 273793
  chr19:30495018-30495258
  hypo

SEQ ID NO: 326100 - DNA, 90 bp, Homo sapiens; identical to SEQ ID NO: 273794
  chr19:30502049-30502139
  hypo

SEQ ID NO: 326101 - DNA, 162 bp, Homo sapiens; identical to SEQ ID NO: 219364
  chr19:30535945-30536107
  hypo

SEQ ID NO: 326102 - DNA, 129 bp, Homo sapiens; identical to SEQ ID NO: 273796
  chr19:30561933-30562062
  hypo

SEQ ID NO: 326103 - DNA, 279 bp, Homo sapiens
  chr19:30562447-30562726
  hypo
gcccgcaccgcctccgcgtcctcccgggctccccgtggaggggcaccaatttgtcctcgcctgcgcctgctcgggccagatggtgggtatttccaggccacaaagtcctctgacctttgaacagttgccgccgaatttcaataatgaaagggccttttttgaatatgtacaaatgagacgttatatttccatacattttatttccagcctcatctgcgaatctaatattgacccggagttatctgtgatggggaagttattaattctgacagatataag

SEQ ID NO: 326104 - DNA, 42 bp, Homo sapiens; identical to SEQ ID NO: 273798
  chr19:30583764-30583806
  hypo

SEQ ID NO: 326105 - DNA, 292 bp, Homo sapiens; identical to SEQ ID NO: 273799
  chr19:30602305-30602597
  hypo

SEQ ID NO: 326106 - DNA, 132 bp, Homo sapiens; identical to SEQ ID NO: 273800
  chr19:30635829-30635961
  hypo

SEQ ID NO: 326107 - DNA, 31 bp, Homo sapiens; identical to SEQ ID NO: 219365
  chr19:30637463-30637494
  hypo

SEQ ID NO: 326108 - DNA, 60 bp, Homo sapiens; identical to SEQ ID NO: 205342
  chr19:30718934-30718994
  hypo

SEQ ID NO: 326109 - DNA, 395 bp, Homo sapiens; identical to SEQ ID NO: 219367
  chr19:30935128-30935523
  hypo

SEQ ID NO: 326110 - DNA, 164 bp, Homo sapiens; identical to SEQ ID NO: 219368
  chr19:30935877-30936041
  hypo

SEQ ID NO: 326111 - DNA, 337 bp, Homo sapiens; identical to SEQ ID NO: 219369
  chr19:30936341-30936678
  hypo

SEQ ID NO: 326112 - DNA, 42 bp, Homo sapiens; identical to SEQ ID NO: 273804
  chr19:31126107-31126149
  hypo

SEQ ID NO: 326113 - DNA, 95 bp, Homo sapiens; identical to SEQ ID NO: 273805
  chr19:31197039-31197134
  hypo

SEQ ID NO: 326114 - DNA, 33 bp, Homo sapiens; identical to SEQ ID NO: 293816
  chr19:31210819-31210852
  hypo

SEQ ID NO: 326115 - DNA, 85 bp, Homo sapiens; identical to SEQ ID NO: 219370
  chr19:31217750-31217835
  hypo

SEQ ID NO: 326116 - DNA, 96 bp, Homo sapiens; identical to SEQ ID NO: 219371
  chr19:31217914-31218010
  hypo

SEQ ID NO: 326117 - DNA, 51 bp, Homo sapiens; identical to SEQ ID NO: 273807
  chr19:31275152-31275203
  hypo

SEQ ID NO: 326118 - DNA, 42 bp, Homo sapiens; identical to SEQ ID NO: 273808
  chr19:31388754-31388796
  hypo

SEQ ID NO: 326119 - DNA, 56 bp, Homo sapiens; identical to SEQ ID NO: 273809
  chr19:31493091-31493147
  hypo

SEQ ID NO: 326120 - DNA, 199 bp, Homo sapiens; identical to SEQ ID NO: 273810
  chr19:31640396-31640595
  hypo

SEQ ID NO: 326121 - DNA, 431 bp, Homo sapiens
  chr19:31767644-31768075
  hypo
tatctgactgttaatctgttcggtggacagtttggataagtcccgtagccggaagcctaagtgtgactctaggtgactgatgtacgtggaaggagtcctgatttgggacgcacaatcgttacaaaagaagacggggtggccagtgtccaagtttttgaggaactttgttccacctgtccttcgaagctggtatttcacgttggccagccagtggctgatggtggtcatggacagcccggtgaacctggagatatgcatccgctcctgggggctcaggtctgacatgatgtacttcccttctgaggtctgccggaggctggcggcaaactgggcctggaggatcaggaggtgctgggggttccagtttgactggcggcccttcctcttctgggcgggcgtcgactcctcagcctcctccagagtggccccgt

SEQ ID NO: 326122 - DNA, 722 bp, Homo sapiens
  chr19:31768105-31768827
  hypo
gagtggaggattttgacgtgtggctctctgtcaagttcttcagcatatcggatatatctgacaaggcattctcgcgtagcggcgagtttgacatgaatgatacgacggcagatgtctttgccgttgtcaccgtggatgaggaggttgccggggctgtggacgtgggtgacagaagcactgaacccaaggagcagcctttgtcactcttcccttttgtcaagtctatgggctggtcgttgttgacgtggtagaaatagcggtcgaggtggtctgccttcttggactgcaggggcggcggggtggccacagcagccttctccgccaggctgttgctcatcttgaaaagcatgctcatggggtccagggcaggcagggagggcttggcggccttgcccaggtgaatgttcatgactgactgcagggcgctcaaagggttaacaaaaggctgttcaggcgggtggtcggtgatgatggccgtgctgccactcaaactgctggctaggggcttcaccagctccttgccattctccaccggctcagcgagggggctcccatccttgcacccatcccgcggggggctggggctgttctcctggctgcggaagcccccatcgctggatgcctccatcttgatgggttccccgacttcgctgctacatggggagggagtggcccgcttgggcggggaaagcttcccatccggctccttcatcttctcctcc

SEQ ID NO: 326123 - DNA, 593 bp, Homo sapiens
  chr19:31769867-31770460
  hypo
gcacttcagcaccttctgggcgtcttccttcccttccatttccagcaaggagcgtttgcgaggcttggaccagcgcttggggttgttgttatcggtctcatggttgtcgtcgcggtaatgccccgtctcgttcatgtgcaccgtcaactccaccagggtgtcgtaggcagcgctgcagtccttacagcggaacttgctggcccccgtgaagatggagccatagagcttgctgctctgccggtacagctgcacggtgctgaagaggctgggctccgggagcatgcggctctgtgacacctgctgcagcgtcttagccatggcgctctggtgccagtcgaagctcccgctgccacagctgctgctgctgctactgctgctgctgctgctgccgttgttcttctccgaggagggctggtgcaggttgaggttgaggttggaccagtaggagttggagaggaagttgttgtacacggccttcatctgctccaggctatccgacacagtcgtgtcttccagtgggaccgtgacctccttggtctcctcttcgttcttgatggagccgctttcaaagtcagccattcggtcactggtct

SEQ ID NO: 326124 - DNA, 178 bp, Homo sapiens; identical to SEQ ID NO: 219375
  chr19:31770490-31770668
  hypo

SEQ ID NO: 326125 - DNA, 98 bp, Homo sapiens; identical to SEQ ID NO: 273813
  chr19:31790090-31790188
  hypo

SEQ ID NO: 326126 - DNA, 107 bp, Homo sapiens; identical to SEQ ID NO: 273814
  chr19:31792447-31792554
  hypo

SEQ ID NO: 326127 - DNA, 239 bp, Homo sapiens; identical to SEQ ID NO: 219376
  chr19:31794098-31794337
  hypo

SEQ ID NO: 326128 - DNA, 128 bp, Homo sapiens; identical to SEQ ID NO: 273816
  chr19:31827455-31827583
  hypo

SEQ ID NO: 326129 - DNA, 72 bp, Homo sapiens; identical to SEQ ID NO: 205343
  chr19:31839494-31839566
  hypo

SEQ ID NO: 326130 - DNA, 233 bp, Homo sapiens; identical to SEQ ID NO: 293818
  chr19:31841177-31841410
  hypo

SEQ ID NO: 326131 - DNA, 325 bp, Homo sapiens; identical to SEQ ID NO: 293819
  chr19:31841583-31841908
  hypo

SEQ ID NO: 326132 - DNA, 42 bp, Homo sapiens; identical to SEQ ID NO: 273817
  chr19:32063825-32063867
  hypo

SEQ ID NO: 326133 - DNA, 42 bp, Homo sapiens; identical to SEQ ID NO: 273818
  chr19:32064208-32064250
  hypo

SEQ ID NO: 326134 - DNA, 156 bp, Homo sapiens
  chr19:32083443-32083599
  hypo
aagggaatggtgacagcttgcgcttgccggggagtcctgctgccttccgaggtgtgaagggaaggcatgcactgtgcatatgctgtaccatacagttttgcctacaactgcttgtagcttcattgtagctgtgaatgctccgttcctctccttttc

SEQ ID NO: 326135 - DNA, 53 bp, Homo sapiens
  chr19:32083759-32083812
  hypo
catgtccatgcagccctcccgctggctgtgtcgacattttgggtgtcactgaa

SEQ ID NO: 326136 - DNA, 42 bp, Homo sapiens; identical to SEQ ID NO: 273821
  chr19:32087789-32087831
  hypo

SEQ ID NO: 326137 - DNA, 189 bp, Homo sapiens; identical to SEQ ID NO: 273822
  chr19:32088784-32088973
  hypo

SEQ ID NO: 326138 - DNA, 121 bp, Homo sapiens; identical to SEQ ID NO: 273823
  chr19:32198252-32198373
  hypo

SEQ ID NO: 326139 - DNA, 113 bp, Homo sapiens
  chr19:32366624-32366737
  hypo
ccccgacggtgacgctgacgacggcgacagggaggtgtgcgaagccgggcgcgagctgtgccagctctcgctaatcctctgcagtatggttcgctgctaatttgtcatggcac

SEQ ID NO: 326140 - DNA, 205 bp, Homo sapiens; identical to SEQ ID NO: 273825
  chr19:32374296-32374501
  hypo

SEQ ID NO: 326141 - DNA, 137 bp, Homo sapiens; identical to SEQ ID NO: 273827
  chr19:32438836-32438973
  hypo

SEQ ID NO: 326142 - DNA, 249 bp, Homo sapiens; identical to SEQ ID NO: 273828
  chr19:32521093-32521342
  hypo

SEQ ID NO: 326143 - DNA, 118 bp, Homo sapiens; identical to SEQ ID NO: 273829
  chr19:32537990-32538108
  hypo

SEQ ID NO: 326144 - DNA, 74 bp, Homo sapiens; identical to SEQ ID NO: 219380
  chr19:32672523-32672597
  hypo

SEQ ID NO: 326145 - DNA, 345 bp, Homo sapiens; identical to SEQ ID NO: 273831
  chr19:32718520-32718865
  hypo

SEQ ID NO: 326146 - DNA, 290 bp, Homo sapiens; identical to SEQ ID NO: 219381
  chr19:32845482-32845772
  hypo

SEQ ID NO: 326147 - DNA, 66 bp, Homo sapiens; identical to SEQ ID NO: 273834
  chr19:32849470-32849536
  hypo

SEQ ID NO: 326148 - DNA, 192 bp, Homo sapiens; identical to SEQ ID NO: 219382
  chr19:32850567-32850759
  hypo

SEQ ID NO: 326149 - DNA, 163 bp, Homo sapiens; identical to SEQ ID NO: 219383
  chr19:32898172-32898335
  hypo

SEQ ID NO: 326150 - DNA, 258 bp, Homo sapiens; identical to SEQ ID NO: 219384
  chr19:32898490-32898748
  hypo

SEQ ID NO: 326151 - DNA, 124 bp, Homo sapiens; identical to SEQ ID NO: 205346
  chr19:33166794-33166918
  hypo

SEQ ID NO: 326152 - DNA, 320 bp, Homo sapiens; identical to SEQ ID NO: 205347
  chr19:33167523-33167843
  hypo

SEQ ID NO: 326153 - DNA, 107 bp, Homo sapiens; identical to SEQ ID NO: 205348
  chr19:33167907-33168014
  hypo

SEQ ID NO: 326154 - DNA, 96 bp, Homo sapiens; identical to SEQ ID NO: 273838
  chr19:33209600-33209696
  hypo

SEQ ID NO: 326155 - DNA, 213 bp, Homo sapiens; identical to SEQ ID NO: 273839
  chr19:33211877-33212090
  hypo

SEQ ID NO: 326156 - DNA, 189 bp, Homo sapiens; identical to SEQ ID NO: 273840
  chr19:33304762-33304951
  hypo

SEQ ID NO: 326157 - DNA, 507 bp, Homo sapiens; identical to SEQ ID NO: 273841
  chr19:33355051-33355558
  hypo

SEQ ID NO: 326158 - DNA, 150 bp, Homo sapiens; identical to SEQ ID NO: 273842
  chr19:33365575-33365725
  hypo

SEQ ID NO: 326159 - DNA, 145 bp, Homo sapiens; identical to SEQ ID NO: 273843
  chr19:33367850-33367995
  hypo

SEQ ID NO: 326160 - DNA, 47 bp, Homo sapiens; identical to SEQ ID NO: 219388
  chr19:33415226-33415273
  hypo

SEQ ID NO: 326161 - DNA, 59 bp, Homo sapiens
  chr19:33467959-33468018
  hypo
aaaaaaaaaaaaaaagaaaaaggattttctccagcagcaaccagtgaaagatgaggcga

SEQ ID NO: 326162 - DNA, 120 bp, Homo sapiens; identical to SEQ ID NO: 273846
  chr19:33539243-33539363
  hypo

SEQ ID NO: 326163 - DNA, 111 bp, Homo sapiens; identical to SEQ ID NO: 273847
  chr19:33540577-33540688
  hypo

SEQ ID NO: 326164 - DNA, 138 bp, Homo sapiens; identical to SEQ ID NO: 273848
  chr19:33549077-33549215
  hypo

SEQ ID NO: 326165 - DNA, 584 bp, Homo sapiens; identical to SEQ ID NO: 293829
  chr19:33555491-33556075
  hypo

SEQ ID NO: 326166 - DNA, 180 bp, Homo sapiens; identical to SEQ ID NO: 273849
  chr19:33556899-33557079
  hypo

SEQ ID NO: 326167 - DNA, 98 bp, Homo sapiens; identical to SEQ ID NO: 273851
  chr19:33557645-33557743
  hypo

SEQ ID NO: 326168 - DNA, 94 bp, Homo sapiens; identical to SEQ ID NO: 219390
  chr19:33585139-33585233
  hypo

SEQ ID NO: 326169 - DNA, 119 bp, Homo sapiens; identical to SEQ ID NO: 219391
  chr19:33693687-33693806
  hypo

SEQ ID NO: 326170 - DNA, 94 bp, Homo sapiens; identical to SEQ ID NO: 273854
  chr19:33696620-33696714
  hypo

SEQ ID NO: 326171 - DNA, 37 bp, Homo sapiens; identical to SEQ ID NO: 273855
  chr19:33697260-33697297
  hypo

SEQ ID NO: 326172 - DNA, 217 bp, Homo sapiens; identical to SEQ ID NO: 273856
  chr19:33697590-33697807
  hypo

SEQ ID NO: 326173 - DNA, 94 bp, Homo sapiens; identical to SEQ ID NO: 219392
  chr19:33698374-33698468
  hypo

SEQ ID NO: 326174 - DNA, 383 bp, Homo sapiens; identical to SEQ ID NO: 219393
  chr19:33701377-33701760
  hypo

SEQ ID NO: 326175 - DNA, 165 bp, Homo sapiens; identical to SEQ ID NO: 273859
  chr19:33702314-33702479
  hypo

SEQ ID NO: 326176 - DNA, 130 bp, Homo sapiens; identical to SEQ ID NO: 273860
  chr19:33703396-33703526
  hypo

SEQ ID NO: 326177 - DNA, 152 bp, Homo sapiens; identical to SEQ ID NO: 273861
  chr19:33710896-33711048
  hypo

SEQ ID NO: 326178 - DNA, 339 bp, Homo sapiens; identical to SEQ ID NO: 273862
  chr19:33726762-33727101
  hypo

SEQ ID NO: 326179 - DNA, 656 bp, Homo sapiens; identical to SEQ ID NO: 273863
  chr19:33772442-33773098
  hypo

SEQ ID NO: 326180 - DNA, 1320 bp, Homo sapiens; identical to SEQ ID NO: 205355
  chr19:33790839-33792159
  hypo

SEQ ID NO: 326181 - DNA, 1246 bp, Homo sapiens; identical to SEQ ID NO: 205356
  chr19:33792630-33793876
  hypo

SEQ ID NO: 326182 - DNA, 51 bp, Homo sapiens; identical to SEQ ID NO: 273864
  chr19:33869570-33869621
  hypo

SEQ ID NO: 326183 - DNA, 81 bp, Homo sapiens; identical to SEQ ID NO: 219396
  chr19:33882202-33882283
  hypo

SEQ ID NO: 326184 - DNA, 52 bp, Homo sapiens; identical to SEQ ID NO: 273867
  chr19:33917859-33917911
  hypo

SEQ ID NO: 326185 - DNA, 178 bp, Homo sapiens; identical to SEQ ID NO: 219397
  chr19:33926621-33926799
  hypo

SEQ ID NO: 326186 - DNA, 183 bp, Homo sapiens; identical to SEQ ID NO: 219398
  chr19:33939089-33939272
  hypo

SEQ ID NO: 326187 - DNA, 32 bp, Homo sapiens; identical to SEQ ID NO: 273870
  chr19:33953394-33953426
  hypo

SEQ ID NO: 326188 - DNA, 118 bp, Homo sapiens; identical to SEQ ID NO: 273871
  chr19:33953632-33953750
  hypo

SEQ ID NO: 326189 - DNA, 38 bp, Homo sapiens
  chr19:33996089-33996127
  hypo
caccatccatttcccgcggcccggcctgccttcagcta

SEQ ID NO: 326190 - DNA, 251 bp, Homo sapiens
  chr19:33996157-33996408
  hypo
tgctctccacagaaggcagcggcatttgctctgcggtggaagccggcagccatctgaggatgttagctggtcagagacaaaagcagacctcgccacagtgacgcaggtgcctatgcccaaagaccactcccggagcaagcttcctcacaggggccacagagggaacagcgctgcccgggaggctggagaccaggtccagtgaccaggcctgcccagggtcagtgcctcaaaccacccgggcagcagccgaa

SEQ ID NO: 326191 - DNA, 116 bp, Homo sapiens; identical to SEQ ID NO: 273873
  chr19:33997989-33998105
  hypo

SEQ ID NO: 326192 - DNA, 450 bp, Homo sapiens; identical to SEQ ID NO: 273874
  chr19:34000696-34001146
  hypo

SEQ ID NO: 326193 - DNA, 70 bp, Homo sapiens; identical to SEQ ID NO: 205358
  chr19:34114303-34114373
  hypo

SEQ ID NO: 326194 - DNA, 63 bp, Homo sapiens; identical to SEQ ID NO: 273875
  chr19:34158695-34158758
  hypo

SEQ ID NO: 326195 - DNA, 288 bp, Homo sapiens; identical to SEQ ID NO: 219400
  chr19:34177591-34177879
  hypo

SEQ ID NO: 326196 - DNA, 89 bp, Homo sapiens; identical to SEQ ID NO: 293839
  chr19:34262994-34263083
  hypo

SEQ ID NO: 326197 - DNA, 566 bp, Homo sapiens; identical to SEQ ID NO: 293840
  chr19:34263272-34263838
  hypo

SEQ ID NO: 326198 - DNA, 217 bp, Homo sapiens; identical to SEQ ID NO: 225894
  chr19:34269016-34269233
  hypo

SEQ ID NO: 326199 - DNA, 40 bp, Homo sapiens
  chr19:34272708-34272748
  hypo
ggctctcaggacatgaatcgggaccagaaggaggagtggg

SEQ ID NO: 326200 - DNA, 997 bp, Homo sapiens; identical to SEQ ID NO: 225895
  chr19:34286493-34287490
  hypo

SEQ ID NO: 326201 - DNA, 279 bp, Homo sapiens; identical to SEQ ID NO: 293843
  chr19:34287808-34288087
  hypo

SEQ ID NO: 326202 - DNA, 169 bp, Homo sapiens; identical to SEQ ID NO: 273879
  chr19:34302228-34302397
  hypo

SEQ ID NO: 326203 - DNA, 511 bp, Homo sapiens; identical to SEQ ID NO: 273880
  chr19:34303757-34304268
  hypo

SEQ ID NO: 326204 - DNA, 88 bp, Homo sapiens; identical to SEQ ID NO: 219403
  chr19:34421531-34421619
  hypo

SEQ ID NO: 326205 - DNA, 32 bp, Homo sapiens; identical to SEQ ID NO: 273882
  chr19:34537937-34537969
  hypo

SEQ ID NO: 326206 - DNA, 31 bp, Homo sapiens; identical to SEQ ID NO: 67308
  chr19:34538209-34538240
  hypo

SEQ ID NO: 326207 - DNA, 34 bp, Homo sapiens; identical to SEQ ID NO: 273884
  chr19:34538665-34538699
  hypo

SEQ ID NO: 326208 - DNA, 34 bp, Homo sapiens; identical to SEQ ID NO: 273885
  chr19:34538939-34538973
  hypo

SEQ ID NO: 326209 - DNA, 34 bp, Homo sapiens; identical to SEQ ID NO: 273886
  chr19:34603234-34603268
  hypo

SEQ ID NO: 326210 - DNA, 37 bp, Homo sapiens; identical to SEQ ID NO: 273887
  chr19:34630392-34630429
  hypo

SEQ ID NO: 326211 - DNA, 190 bp, Homo sapiens; identical to SEQ ID NO: 273888
  chr19:34846160-34846350
  hypo

SEQ ID NO: 326212 - DNA, 89 bp, Homo sapiens; identical to SEQ ID NO: 219404
  chr19:34949546-34949635
  hypo

SEQ ID NO: 326213 - DNA, 93 bp, Homo sapiens; identical to SEQ ID NO: 219405
  chr19:34963041-34963134
  hypo

SEQ ID NO: 326214 - DNA, 49 bp, Homo sapiens; identical to SEQ ID NO: 273891
  chr19:34988798-34988847
  hypo

SEQ ID NO: 326215 - DNA, 42 bp, Homo sapiens; identical to SEQ ID NO: 273892
  chr19:34989429-34989471
  hypo

SEQ ID NO: 326216 - DNA, 309 bp, Homo sapiens; identical to SEQ ID NO: 273893
  chr19:35050089-35050398
  hypo

SEQ ID NO: 326217 - DNA, 61 bp, Homo sapiens; identical to SEQ ID NO: 273894
  chr19:35082486-35082547
  hypo

SEQ ID NO: 326218 - DNA, 39 bp, Homo sapiens; identical to SEQ ID NO: 205365
  chr19:35168868-35168907
  hypo

SEQ ID NO: 326219 - DNA, 94 bp, Homo sapiens; identical to SEQ ID NO: 205366
  chr19:35168992-35169086
  hypo

SEQ ID NO: 326220 - DNA, 103 bp, Homo sapiens; identical to SEQ ID NO: 205367
  chr19:35169517-35169620
  hypo

SEQ ID NO: 326221 - DNA, 38 bp, Homo sapiens; identical to SEQ ID NO: 273895
  chr19:35178755-35178793
  hypo

SEQ ID NO: 326222 - DNA, 207 bp, Homo sapiens; identical to SEQ ID NO: 273896
  chr19:35298169-35298376
  hypo

SEQ ID NO: 326223 - DNA, 45 bp, Homo sapiens; identical to SEQ ID NO: 273898
  chr19:35324046-35324091
  hypo

SEQ ID NO: 326224 - DNA, 46 bp, Homo sapiens
  chr19:35367988-35368034
  hypo
gtccttgggtttggtgcacacgaacaaatgacagttaacaatttaa

SEQ ID NO: 326225 - DNA, 120 bp, Homo sapiens; identical to SEQ ID NO: 273900
  chr19:35416319-35416439
  hypo

SEQ ID NO: 326226 - DNA, 489 bp, Homo sapiens; identical to SEQ ID NO: 293857
  chr19:35454533-35455022
  hypo

SEQ ID NO: 326227 - DNA, 139 bp, Homo sapiens; identical to SEQ ID NO: 219409
  chr19:35497760-35497899
  hypo

SEQ ID NO: 326228 - DNA, 35 bp, Homo sapiens; identical to SEQ ID NO: 273903
  chr19:35512756-35512791
  hypo

SEQ ID NO: 326229 - DNA, 88 bp, Homo sapiens; identical to SEQ ID NO: 273904
  chr19:35523454-35523542
  hypo

SEQ ID NO: 326230 - DNA, 462 bp, Homo sapiens; identical to SEQ ID NO: 273905
  chr19:35551108-35551570
  hypo

SEQ ID NO: 326231 - DNA, 81 bp, Homo sapiens; identical to SEQ ID NO: 219411
  chr19:35589857-35589938
  hypo

SEQ ID NO: 326232 - DNA, 32 bp, Homo sapiens; identical to SEQ ID NO: 219412
  chr19:35591100-35591132
  hypo

SEQ ID NO: 326233 - DNA, 250 bp, Homo sapiens; identical to SEQ ID NO: 273908
  chr19:35597196-35597446
  hypo

SEQ ID NO: 326234 - DNA, 35 bp, Homo sapiens; identical to SEQ ID NO: 273909
  chr19:35599309-35599344
  hypo

SEQ ID NO: 326235 - DNA, 97 bp, Homo sapiens; identical to SEQ ID NO: 273910
  chr19:35599789-35599886
  hypo

SEQ ID NO: 326236 - DNA, 60 bp, Homo sapiens
  chr19:35608882-35608942
  hypo
ctggggggttaagtgagtgagaacacggcaaggtcagtgtgcactccagggcaaggtgga

SEQ ID NO: 326237 - DNA, 87 bp, Homo sapiens; identical to SEQ ID NO: 273912
  chr19:35613703-35613790
  hypo

SEQ ID NO: 326238 - DNA, 422 bp, Homo sapiens; identical to SEQ ID NO: 219413
  chr19:35617132-35617554
  hypo

SEQ ID NO: 326239 - DNA, 115 bp, Homo sapiens; identical to SEQ ID NO: 273916
  chr19:35619189-35619304
  hypo

SEQ ID NO: 326240 - DNA, 61 bp, Homo sapiens; identical to SEQ ID NO: 273917
  chr19:35621941-35622002
  hypo

SEQ ID NO: 326241 - DNA, 41 bp, Homo sapiens; identical to SEQ ID NO: 273918
  chr19:35677474-35677515
  hypo

SEQ ID NO: 326242 - DNA, 261 bp, Homo sapiens; identical to SEQ ID NO: 293862
  chr19:35738724-35738985
  hypo

SEQ ID NO: 326243 - DNA, 137 bp, Homo sapiens; identical to SEQ ID NO: 273919
  chr19:35793376-35793513
  hypo

SEQ ID NO: 326244 - DNA, 36 bp, Homo sapiens; identical to SEQ ID NO: 273921
  chr19:35835485-35835521
  hypo

SEQ ID NO: 326245 - DNA, 58 bp, Homo sapiens; identical to SEQ ID NO: 273922
  chr19:35835740-35835798
  hypo

SEQ ID NO: 326246 - DNA, 184 bp, Homo sapiens; identical to SEQ ID NO: 219415
  chr19:35842417-35842601
  hypo

SEQ ID NO: 326247 - DNA, 71 bp, Homo sapiens; identical to SEQ ID NO: 273924
  chr19:35843099-35843170
  hypo

SEQ ID NO: 326248 - DNA, 253 bp, Homo sapiens; identical to SEQ ID NO: 273925
  chr19:35843200-35843453
  hypo

SEQ ID NO: 326249 - DNA, 217 bp, Homo sapiens
  chr19:35941137-35941354
  hypo
cgtggtgctgcccgtgcggctggagctgtgcctggtgctcttcttcatccccatggcagtcaccatcttctgctactggcgttttgtgtggatcatgctctcccagccccttgtgggggcccagaggcggcgccgagccgtggggctggctgtggtgacgctgctcaatttcctggtgtgcttcggaccttacaacgtgtcccacctggtggggtat

SEQ ID NO: 326250 - DNA, 96 bp, Homo sapiens; identical to SEQ ID NO: 219416
  chr19:35983448-35983544
  hypo

SEQ ID NO: 326251 - DNA, 80 bp, Homo sapiens; identical to SEQ ID NO: 273928
  chr19:35991456-35991536
  hypo

SEQ ID NO: 326252 - DNA, 185 bp, Homo sapiens; identical to SEQ ID NO: 219417
  chr19:36041161-36041346
  hypo

SEQ ID NO: 326253 - DNA, 512 bp, Homo sapiens; identical to SEQ ID NO: 273930
  chr19:36042035-36042547
  hypo

SEQ ID NO: 326254 - DNA, 34 bp, Homo sapiens; identical to SEQ ID NO: 273931
  chr19:36115285-36115319
  hypo

SEQ ID NO: 326255 - DNA, 116 bp, Homo sapiens; identical to SEQ ID NO: 205371
  chr19:36123862-36123978
  hypo

SEQ ID NO: 326256 - DNA, 193 bp, Homo sapiens; identical to SEQ ID NO: 273932
  chr19:36156235-36156428
  hypo

SEQ ID NO: 326257 - DNA, 76 bp, Homo sapiens; identical to SEQ ID NO: 273933
  chr19:36157074-36157150
  hypo

SEQ ID NO: 326258 - DNA, 229 bp, Homo sapiens; identical to SEQ ID NO: 273934
  chr19:36157519-36157748
  hypo

SEQ ID NO: 326259 - DNA, 120 bp, Homo sapiens; identical to SEQ ID NO: 219420
  chr19:36167374-36167494
  hypo

SEQ ID NO: 326260 - DNA, 78 bp, Homo sapiens; identical to SEQ ID NO: 273936
  chr19:36172746-36172824
  hypo

SEQ ID NO: 326261 - DNA, 88 bp, Homo sapiens; identical to SEQ ID NO: 273937
  chr19:36199997-36200085
  hypo

SEQ ID NO: 326262 - DNA, 131 bp, Homo sapiens; identical to SEQ ID NO: 273938
  chr19:36210797-36210928
  hypo

SEQ ID NO: 326263 - DNA, 46 bp, Homo sapiens
  chr19:36220151-36220197
  hypo
ctccctcaagaatgtgcatgctgctgtggcccgagggaggcagatg

SEQ ID NO: 326264 - DNA, 35 bp, Homo sapiens
  chr19:36221989-36222024
  hypo
gtggggtactggcttttggacgactgcagggagta

SEQ ID NO: 326265 - DNA, 72 bp, Homo sapiens; identical to SEQ ID NO: 219421
  chr19:36222534-36222606
  hypo

SEQ ID NO: 326266 - DNA, 139 bp, Homo sapiens; identical to SEQ ID NO: 273942
  chr19:36229127-36229266
  hypo

SEQ ID NO: 326267 - DNA, 33 bp, Homo sapiens; identical to SEQ ID NO: 273943
  chr19:36260605-36260638
  hypo

SEQ ID NO: 326268 - DNA, 77 bp, Homo sapiens; identical to SEQ ID NO: 273944
  chr19:36262374-36262451
  hypo

SEQ ID NO: 326269 - DNA, 40 bp, Homo sapiens; identical to SEQ ID NO: 273945
  chr19:36275619-36275659
  hypo

SEQ ID NO: 326270 - DNA, 220 bp, Homo sapiens; identical to SEQ ID NO: 293871
  chr19:36336769-36336989
  hypo

SEQ ID NO: 326271 - DNA, 125 bp, Homo sapiens; identical to SEQ ID NO: 293872
  chr19:36347684-36347809
  hypo

SEQ ID NO: 326272 - DNA, 49 bp, Homo sapiens; identical to SEQ ID NO: 293873
  chr19:36348065-36348114
  hypo

SEQ ID NO: 326273 - DNA, 79 bp, Homo sapiens; identical to SEQ ID NO: 219423
  chr19:36388611-36388690
  hypo

SEQ ID NO: 326274 - DNA, 215 bp, Homo sapiens; identical to SEQ ID NO: 219424
  chr19:36435529-36435744
  hypo

SEQ ID NO: 326275 - DNA, 77 bp, Homo sapiens; identical to SEQ ID NO: 293881
  chr19:36478303-36478380
  hypo

SEQ ID NO: 326276 - DNA, 82 bp, Homo sapiens; identical to SEQ ID NO: 273948
  chr19:36500940-36501022
  hypo

SEQ ID NO: 326277 - DNA, 320 bp, Homo sapiens; identical to SEQ ID NO: 273949
  chr19:36510004-36510324
  hypo

SEQ ID NO: 326278 - DNA, 36 bp, Homo sapiens; identical to SEQ ID NO: 273950
  chr19:36562069-36562105
  hypo

SEQ ID NO: 326279 - DNA, 636 bp, Homo sapiens; identical to SEQ ID NO: 273951
  chr19:36592529-36593165
  hypo

SEQ ID NO: 326280 - DNA, 80 bp, Homo sapiens; identical to SEQ ID NO: 219425
  chr19:36632702-36632782
  hypo

SEQ ID NO: 326281 - DNA, 246 bp, Homo sapiens; identical to SEQ ID NO: 219426
  chr19:36641157-36641403
  hypo

SEQ ID NO: 326282 - DNA, 35 bp, Homo sapiens; identical to SEQ ID NO: 273955
  chr19:36645415-36645450
  hypo

SEQ ID NO: 326283 - DNA, 32 bp, Homo sapiens; identical to SEQ ID NO: 273956
  chr19:36707255-36707287
  hypo

SEQ ID NO: 326284 - DNA, 31 bp, Homo sapiens; identical to SEQ ID NO: 273957
  chr19:36707527-36707558
  hypo

SEQ ID NO: 326285 - DNA, 175 bp, Homo sapiens; identical to SEQ ID NO: 273958
  chr19:36746788-36746963
  hypo

SEQ ID NO: 326286 - DNA, 44 bp, Homo sapiens; identical to SEQ ID NO: 273959
  chr19:36750231-36750275
  hypo

SEQ ID NO: 326287 - DNA, 186 bp, Homo sapiens; identical to SEQ ID NO: 273960
  chr19:36853754-36853940
  hypo

SEQ ID NO: 326288 - DNA, 32 bp, Homo sapiens; identical to SEQ ID NO: 219427
  chr19:36870583-36870615
  hypo

SEQ ID NO: 326289 - DNA, 93 bp, Homo sapiens; identical to SEQ ID NO: 273962
  chr19:36928986-36929079
  hypo

SEQ ID NO: 326290 - DNA, 77 bp, Homo sapiens; identical to SEQ ID NO: 273963
  chr19:37103348-37103425
  hypo

SEQ ID NO: 326291 - DNA, 146 bp, Homo sapiens; identical to SEQ ID NO: 273964
  chr19:37114162-37114308
  hypo

SEQ ID NO: 326292 - DNA, 285 bp, Homo sapiens; identical to SEQ ID NO: 219428
  chr19:37159168-37159453
  hypo

SEQ ID NO: 326293 - DNA, 162 bp, Homo sapiens; identical to SEQ ID NO: 293896
  chr19:37262838-37263000
  hypo

SEQ ID NO: 326294 - DNA, 155 bp, Homo sapiens; identical to SEQ ID NO: 225914
  chr19:37266863-37267018
  hypo

SEQ ID NO: 326295 - DNA, 38 bp, Homo sapiens; identical to SEQ ID NO: 273967
  chr19:37272529-37272567
  hypo

SEQ ID NO: 326296 - DNA, 99 bp, Homo sapiens; identical to SEQ ID NO: 273968
  chr19:37293601-37293700
  hypo

SEQ ID NO: 326297 - DNA, 621 bp, Homo sapiens; identical to SEQ ID NO: 273969
  chr19:37501127-37501748
  hypo

SEQ ID NO: 326298 - DNA, 120 bp, Homo sapiens; identical to SEQ ID NO: 273970
  chr19:37503359-37503479
  hypo

SEQ ID NO: 326299 - DNA, 190 bp, Homo sapiens; identical to SEQ ID NO: 219429
  chr19:37504006-37504196
  hypo

SEQ ID NO: 326300 - DNA, 284 bp, Homo sapiens; identical to SEQ ID NO: 219430
  chr19:37504226-37504510
  hypo

SEQ ID NO: 326301 - DNA, 327 bp, Homo sapiens; identical to SEQ ID NO: 219431
  chr19:37505284-37505611
  hypo

SEQ ID NO: 326302 - DNA, 682 bp, Homo sapiens; identical to SEQ ID NO: 273973
  chr19:37546262-37546944
  hypo

SEQ ID NO: 326303 - DNA, 340 bp, Homo sapiens; identical to SEQ ID NO: 273974
  chr19:37547634-37547974
  hypo

SEQ ID NO: 326304 - DNA, 160 bp, Homo sapiens; identical to SEQ ID NO: 273975
  chr19:37548034-37548194
  hypo

SEQ ID NO: 326305 - DNA, 216 bp, Homo sapiens; identical to SEQ ID NO: 273976
  chr19:37550817-37551033
  hypo

SEQ ID NO: 326306 - DNA, 214 bp, Homo sapiens; identical to SEQ ID NO: 273978
  chr19:37551901-37552115
  hypo

SEQ ID NO: 326307 - DNA, 292 bp, Homo sapiens; identical to SEQ ID NO: 293904
  chr19:37568997-37569289
  hypo

SEQ ID NO: 326308 - DNA, 197 bp, Homo sapiens; identical to SEQ ID NO: 293905
  chr19:37569554-37569751
  hypo

SEQ ID NO: 326309 - DNA, 40 bp, Homo sapiens; identical to SEQ ID NO: 273979
  chr19:37633553-37633593
  hypo

SEQ ID NO: 326310 - DNA, 97 bp, Homo sapiens; identical to SEQ ID NO: 273980
  chr19:37666951-37667048
  hypo

SEQ ID NO: 326311 - DNA, 36 bp, Homo sapiens; identical to SEQ ID NO: 273981
  chr19:37674960-37674996
  hypo

SEQ ID NO: 326312 - DNA, 36 bp, Homo sapiens; identical to SEQ ID NO: 273982
  chr19:37682220-37682256
  hypo

SEQ ID NO: 326313 - DNA, 43 bp, Homo sapiens; identical to SEQ ID NO: 219432
  chr19:37702591-37702634
  hypo

SEQ ID NO: 326314 - DNA, 42 bp, Homo sapiens; identical to SEQ ID NO: 273985
  chr19:37741708-37741750
  hypo

SEQ ID NO: 326315 - DNA, 37 bp, Homo sapiens; identical to SEQ ID NO: 273986
  chr19:37831817-37831854
  hypo

SEQ ID NO: 326316 - DNA, 241 bp, Homo sapiens; identical to SEQ ID NO: 273987
  chr19:37853603-37853844
  hypo

SEQ ID NO: 326317 - DNA, 35 bp, Homo sapiens
  chr19:37995775-37995810
  hypo
aatggggttgggcgcggtggctcacacctgtagtc

SEQ ID NO: 326318 - DNA, 141 bp, Homo sapiens; identical to SEQ ID NO: 273989
  chr19:38069705-38069846
  hypo

SEQ ID NO: 326319 - DNA, 32 bp, Homo sapiens; identical to SEQ ID NO: 273990
  chr19:38172706-38172738
  hypo

SEQ ID NO: 326320 - DNA, 35 bp, Homo sapiens; identical to SEQ ID NO: 273991
  chr19:38185144-38185179
  hypo

SEQ ID NO: 326321 - DNA, 508 bp, Homo sapiens; identical to SEQ ID NO: 273992
  chr19:38187527-38188035
  hypo

SEQ ID NO: 326322 - DNA, 382 bp, Homo sapiens; identical to SEQ ID NO: 273993
  chr19:38221768-38222150
  hypo

SEQ ID NO: 326323 - DNA, 82 bp, Homo sapiens; identical to SEQ ID NO: 273994
  chr19:38273674-38273756
  hypo

SEQ ID NO: 326324 - DNA, 39 bp, Homo sapiens; identical to SEQ ID NO: 219433
  chr19:38287060-38287099
  hypo

SEQ ID NO: 326325 - DNA, 95 bp, Homo sapiens; identical to SEQ ID NO: 273996
  chr19:38299439-38299534
  hypo

SEQ ID NO: 326326 - DNA, 74 bp, Homo sapiens; identical to SEQ ID NO: 219434
  chr19:38309039-38309113
  hypo

SEQ ID NO: 326327 - DNA, 276 bp, Homo sapiens; identical to SEQ ID NO: 273998
  chr19:38345148-38345424
  hypo

SEQ ID NO: 326328 - DNA, 114 bp, Homo sapiens; identical to SEQ ID NO: 219435
  chr19:38347218-38347332
  hypo

SEQ ID NO: 326329 - DNA, 34 bp, Homo sapiens; identical to SEQ ID NO: 274000
  chr19:38348720-38348754
  hypo

SEQ ID NO: 326330 - DNA, 97 bp, Homo sapiens; identical to SEQ ID NO: 274001
  chr19:38383008-38383105
  hypo

SEQ ID NO: 326331 - DNA, 57 bp, Homo sapiens; identical to SEQ ID NO: 225920
  chr19:38398221-38398278
  hypo

SEQ ID NO: 326332 - DNA, 194 bp, Homo sapiens; identical to SEQ ID NO: 219436
  chr19:38446271-38446465
  hypo

SEQ ID NO: 326333 - DNA, 79 bp, Homo sapiens; identical to SEQ ID NO: 274003
  chr19:38472268-38472347
  hypo

SEQ ID NO: 326334 - DNA, 78 bp, Homo sapiens; identical to SEQ ID NO: 274004
  chr19:38480528-38480606
  hypo

SEQ ID NO: 326335 - DNA, 155 bp, Homo sapiens; identical to SEQ ID NO: 219437
  chr19:38481217-38481372
  hypo

SEQ ID NO: 326336 - DNA, 196 bp, Homo sapiens; identical to SEQ ID NO: 219438
  chr19:38500327-38500523
  hypo

SEQ ID NO: 326337 - DNA, 431 bp, Homo sapiens; identical to SEQ ID NO: 219439
  chr19:38564442-38564873
  hypo

SEQ ID NO: 326338 - DNA, 42 bp, Homo sapiens; identical to SEQ ID NO: 274008
  chr19:38568581-38568623
  hypo

SEQ ID NO: 326339 - DNA, 42 bp, Homo sapiens; identical to SEQ ID NO: 219440
  chr19:38572016-38572058
  hypo

SEQ ID NO: 326340 - DNA, 142 bp, Homo sapiens; identical to SEQ ID NO: 219441
  chr19:38572720-38572862
  hypo

SEQ ID NO: 326341 - DNA, 140 bp, Homo sapiens; identical to SEQ ID NO: 274011
  chr19:38582275-38582415
  hypo

SEQ ID NO: 326342 - DNA, 51 bp, Homo sapiens; identical to SEQ ID NO: 219442
  chr19:38625643-38625694
  hypo

SEQ ID NO: 326343 - DNA, 221 bp, Homo sapiens; identical to SEQ ID NO: 274013
  chr19:38625953-38626174
  hypo

SEQ ID NO: 326344 - DNA, 127 bp, Homo sapiens; identical to SEQ ID NO: 274014
  chr19:38626519-38626646
  hypo

SEQ ID NO: 326345 - DNA, 198 bp, Homo sapiens; identical to SEQ ID NO: 274015
  chr19:38636781-38636979
  hypo

SEQ ID NO: 326346 - DNA, 92 bp, Homo sapiens; identical to SEQ ID NO: 219444
  chr19:38639131-38639223
  hypo

SEQ ID NO: 326347 - DNA, 180 bp, Homo sapiens; identical to SEQ ID NO: 219445
  chr19:38679125-38679305
  hypo

SEQ ID NO: 326348 - DNA, 31 bp, Homo sapiens; identical to SEQ ID NO: 219446
  chr19:38679545-38679576
  hypo

SEQ ID NO: 326349 - DNA, 179 bp, Homo sapiens
  chr19:38684215-38684394
  hypo
gagagcctgtgcagcgggcgccgggagcccagcttcgccagccccgctggcctagagccagggctgcccagcgacgtgctcttcaccagcacctgcgccttcccgtccagcacgctgcctgcacgccgccagcaccagcacccccacccgcccgtcggccccggtgccacccctgccgc

SEQ ID NO: 326350 - DNA, 38 bp, Homo sapiens
  chr19:38684424-38684462
  hypo
gcctgggccccctgggactggcgcggtagttaccccaa

SEQ ID NO: 326351 - DNA, 48 bp, Homo sapiens; identical to SEQ ID NO: 219447
  chr19:38689956-38690004
  hypo

SEQ ID NO: 326352 - DNA, 91 bp, Homo sapiens; identical to SEQ ID NO: 219448
  chr19:38691720-38691811
  hypo

SEQ ID NO: 326353 - DNA, 275 bp, Homo sapiens; identical to SEQ ID NO: 274022
  chr19:38704117-38704392
  hypo

SEQ ID NO: 326354 - DNA, 430 bp, Homo sapiens; identical to SEQ ID NO: 274023
  chr19:38706579-38707009
  hypo

SEQ ID NO: 326355 - DNA, 440 bp, Homo sapiens; identical to SEQ ID NO: 274024
  chr19:38711296-38711736
  hypo

SEQ ID NO: 326356 - DNA, 263 bp, Homo sapiens; identical to SEQ ID NO: 293927
  chr19:38719956-38720219
  hypo

SEQ ID NO: 326357 - DNA, 208 bp, Homo sapiens; identical to SEQ ID NO: 293928
  chr19:38720439-38720647
  hypo

SEQ ID NO: 326358 - DNA, 42 bp, Homo sapiens; identical to SEQ ID NO: 274025
  chr19:38747775-38747817
  hypo

SEQ ID NO: 326359 - DNA, 401 bp, Homo sapiens; identical to SEQ ID NO: 205395
  chr19:38754871-38755272
  hypo

SEQ ID NO: 326360 - DNA, 184 bp, Homo sapiens; identical to SEQ ID NO: 205396
  chr19:38755344-38755528
  hypo

SEQ ID NO: 326361 - DNA, 36 bp, Homo sapiens; identical to SEQ ID NO: 274026
  chr19:38756647-38756683
  hypo

SEQ ID NO: 326362 - DNA, 87 bp, Homo sapiens; identical to SEQ ID NO: 274027
  chr19:38764530-38764617
  hypo

SEQ ID NO: 326363 - DNA, 211 bp, Homo sapiens; identical to SEQ ID NO: 274028
  chr19:38774186-38774397
  hypo

SEQ ID NO: 326364 - DNA, 183 bp, Homo sapiens; identical to SEQ ID NO: 274029
  chr19:38780287-38780470
  hypo

SEQ ID NO: 326365 - DNA, 75 bp, Homo sapiens; identical to SEQ ID NO: 274030
  chr19:38781556-38781631
  hypo

SEQ ID NO: 326366 - DNA, 341 bp, Homo sapiens; identical to SEQ ID NO: 219451
  chr19:38781916-38782257
  hypo

SEQ ID NO: 326367 - DNA, 58 bp, Homo sapiens
  chr19:38782477-38782535
  hypo
agtggtggttctggcggggctgttcgtgatggtgttgatcctcttcctgggagcctcc

SEQ ID NO: 326368 - DNA, 73 bp, Homo sapiens
  chr19:38782670-38782743
  hypo
ggaagggaggggagactatgtgtgagctttttttaaatagagggattgactcggatttgagtgatcattaggg

SEQ ID NO: 326369 - DNA, 235 bp, Homo sapiens; identical to SEQ ID NO: 274033
  chr19:38784873-38785108
  hypo

SEQ ID NO: 326370 - DNA, 74 bp, Homo sapiens; identical to SEQ ID NO: 274034
  chr19:38786544-38786618
  hypo

SEQ ID NO: 326371 - DNA, 45 bp, Homo sapiens; identical to SEQ ID NO: 274035
  chr19:38817274-38817319
  hypo

SEQ ID NO: 326372 - DNA, 71 bp, Homo sapiens; identical to SEQ ID NO: 219452
  chr19:38828045-38828116
  hypo

SEQ ID NO: 326373 - DNA, 44 bp, Homo sapiens; identical to SEQ ID NO: 219453
  chr19:38828333-38828377
  hypo

SEQ ID NO: 326374 - DNA, 152 bp, Homo sapiens; identical to SEQ ID NO: 274038
  chr19:38838188-38838340
  hypo

SEQ ID NO: 326375 - DNA, 79 bp, Homo sapiens; identical to SEQ ID NO: 274039
  chr19:38841908-38841987
  hypo

SEQ ID NO: 326376 - DNA, 138 bp, Homo sapiens; identical to SEQ ID NO: 219454
  chr19:38851300-38851438
  hypo

SEQ ID NO: 326377 - DNA, 232 bp, Homo sapiens; identical to SEQ ID NO: 293932
  chr19:38852095-38852327
  hypo

SEQ ID NO: 326378 - DNA, 141 bp, Homo sapiens; identical to SEQ ID NO: 293933
  chr19:38852387-38852528
  hypo

SEQ ID NO: 326379 - DNA, 201 bp, Homo sapiens; identical to SEQ ID NO: 205397
  chr19:38852766-38852967
  hypo

SEQ ID NO: 326380 - DNA, 312 bp, Homo sapiens; identical to SEQ ID NO: 205398
  chr19:38853193-38853505
  hypo

SEQ ID NO: 326381 - DNA, 92 bp, Homo sapiens; identical to SEQ ID NO: 274041
  chr19:38855368-38855460
  hypo

SEQ ID NO: 326382 - DNA, 120 bp, Homo sapiens; identical to SEQ ID NO: 274042
  chr19:38868585-38868705
  hypo

SEQ ID NO: 326383 - DNA, 188 bp, Homo sapiens
  chr19:38873747-38873935
  hypo
tgaagttacttgtcaagggtcgttgggcagagtacgattggtgagaaaagagagcataggacacgtgggcaagtgctggccccatagggtggggatggagcctttgtgatcactctactcgtctctaatccctcctttcctgcagcgagggtgggtcctgggccccaacaactactacagttttgcca

SEQ ID NO: 326384 - DNA, 453 bp, Homo sapiens; identical to SEQ ID NO: 274044
  chr19:38875946-38876399
  hypo

SEQ ID NO: 326385 - DNA, 33 bp, Homo sapiens; identical to SEQ ID NO: 274045
  chr19:38900084-38900117
  hypo

SEQ ID NO: 326386 - DNA, 131 bp, Homo sapiens
  chr19:38901797-38901928
  hypo
ggggggtcctgcatcgcccttggcccctggcctcttcttacattctaccttcacctggtctctgcagtgtttgtggcaacacagcccgcactctgggggaaggcagcggcaggggtccgatctgtgtcatc

SEQ ID NO: 326387 - DNA, 42 bp, Homo sapiens; identical to SEQ ID NO: 274048
  chr19:38921075-38921117
  hypo

SEQ ID NO: 326388 - DNA, 170 bp, Homo sapiens; identical to SEQ ID NO: 274049
  chr19:38934252-38934422
  hypo

SEQ ID NO: 326389 - DNA, 38 bp, Homo sapiens; identical to SEQ ID NO: 274050
  chr19:38951826-38951864
  hypo

SEQ ID NO: 326390 - DNA, 335 bp, Homo sapiens
  chr19:38964045-38964380
  hypo
gcccccctgcctgcgcctgacccaccgcacctggggctcccagaacagcctggtggagatgcttttcctgcggctgagcctcccagtccagttccaccagcacttccgctgcactgcaggggccaccccgctggcacctcctggcctgcagccccccgccgaggacgaggcccgggcggcggaacccgaccctgactacgaaaacctgcgccgctcagctgggggctggagcgaggcagagaacggcaaagaagggactgcgaaggagggcgcccccgggggcaccccgcaggcggggggagaggcgcagcccgccagggcggagaatgagaagg

SEQ ID NO: 326391 - DNA, 219 bp, Homo sapiens
  chr19:38974013-38974232
  hypo
atgctgatgccagtgtcctggagccgcatgcccaaccacttcctgcaggtggagacgaggcgtgccggcgagcggctgggctgggccgtgcagtgccaggagccgctgaccatgatggcgctgcacatccccgaggagaaccggtcagggccagcccagctatgcaggggtgggcaggtgttgcaagccctctggggtctgggtcccactcagtgcccc

SEQ ID NO: 326392 - DNA, 82 bp, Homo sapiens; identical to SEQ ID NO: 205399
  chr19:38976232-38976314
  hypo

SEQ ID NO: 326393 - DNA, 58 bp, Homo sapiens; identical to SEQ ID NO: 205400
  chr19:38976790-38976848
  hypo

SEQ ID NO: 326394 - DNA, 164 bp, Homo sapiens; identical to SEQ ID NO: 274055
  chr19:38985044-38985208
  hypo

SEQ ID NO: 326395 - DNA, 42 bp, Homo sapiens; identical to SEQ ID NO: 274056
  chr19:38991673-38991715
  hypo

SEQ ID NO: 326396 - DNA, 59 bp, Homo sapiens; identical to SEQ ID NO: 219460
  chr19:38993225-38993284
  hypo

SEQ ID NO: 326397 - DNA, 283 bp, Homo sapiens; identical to SEQ ID NO: 274060
  chr19:39015895-39016178
  hypo

SEQ ID NO: 326398 - DNA, 122 bp, Homo sapiens; identical to SEQ ID NO: 219461
  chr19:39027005-39027127
  hypo

SEQ ID NO: 326399 - DNA, 595 bp, Homo sapiens; identical to SEQ ID NO: 219462
  chr19:39051723-39052318
  hypo

SEQ ID NO: 326400 - DNA, 416 bp, Homo sapiens; identical to SEQ ID NO: 274063
  chr19:39087585-39088001
  hypo

SEQ ID NO: 326401 - DNA, 125 bp, Homo sapiens; identical to SEQ ID NO: 274064
  chr19:39092089-39092214
  hypo

SEQ ID NO: 326402 - DNA, 103 bp, Homo sapiens; identical to SEQ ID NO: 219464
  chr19:39094630-39094733
  hypo

SEQ ID NO: 326403 - DNA, 94 bp, Homo sapiens; identical to SEQ ID NO: 274066
  chr19:39097473-39097567
  hypo

SEQ ID NO: 326404 - DNA, 232 bp, Homo sapiens; identical to SEQ ID NO: 274067
  chr19:39125643-39125875
  hypo

SEQ ID NO: 326405 - DNA, 31 bp, Homo sapiens; identical to SEQ ID NO: 274068
  chr19:39128243-39128274
  hypo

SEQ ID NO: 326406 - DNA, 79 bp, Homo sapiens; identical to SEQ ID NO: 219465
  chr19:39144877-39144956
  hypo

SEQ ID NO: 326407 - DNA, 40 bp, Homo sapiens; identical to SEQ ID NO: 274070
  chr19:39149969-39150009
  hypo

SEQ ID NO: 326408 - DNA, 209 bp, Homo sapiens
  chr19:39151297-39151506
  hypo
agtgctgggattacaggcgcgagccaccatgcccgacccatggactcacttgtataatcttgtgaagcaggtgttgttacccttacatgcagaaatggatccatgggcctttaagccacttgcccctgtgacagtgccaggatttgaatgtagaagttgaggctttcaagtttatgctgttatttctacactacactgaagtctagtga

SEQ ID NO: 326409 - DNA, 243 bp, Homo sapiens
  chr19:39151540-39151783
  hypo
ggagtgtgcagtgcaggtacttcagatggagaggaaggtctcaaagaggtggcatttcagctgttccttaacggatgagaaagagagaaccaagagagcaccagaggaacgcgcttccaacagagaaaaccaagcaagggggcccccgaggagcagaaaggcccgagtggtcagagcggagcccgtggaagagatgggcacagccagattgcttagagctgtgttgttagaagtgctgatgag

SEQ ID NO: 326410 - DNA, 34 bp, Homo sapiens; identical to SEQ ID NO: 219466
  chr19:39159904-39159938
  hypo

SEQ ID NO: 326411 - DNA, 154 bp, Homo sapiens; identical to SEQ ID NO: 274074
  chr19:39189493-39189647
  hypo

SEQ ID NO: 326412 - DNA, 196 bp, Homo sapiens; identical to SEQ ID NO: 274075
  chr19:39190982-39191178
  hypo

SEQ ID NO: 326413 - DNA, 165 bp, Homo sapiens; identical to SEQ ID NO: 274076
  chr19:39201702-39201867
  hypo

SEQ ID NO: 326414 - DNA, 128 bp, Homo sapiens; identical to SEQ ID NO: 274077
  chr19:39210537-39210665
  hypo

SEQ ID NO: 326415 - DNA, 86 bp, Homo sapiens; identical to SEQ ID NO: 274078
  chr19:39211068-39211154
  hypo

SEQ ID NO: 326416 - DNA, 299 bp, Homo sapiens; identical to SEQ ID NO: 274079
  chr19:39211597-39211896
  hypo

SEQ ID NO: 326417 - DNA, 212 bp, Homo sapiens; identical to SEQ ID NO: 274080
  chr19:39212194-39212406
  hypo

SEQ ID NO: 326418 - DNA, 110 bp, Homo sapiens
  chr19:39221969-39222079
  hypo
accccaactctgccccatcccggcagggtgagtacaggctgatcccttcaatcctctgggcctgtttcctcatccatcaaacggactaagacagccccgaccccataggg

SEQ ID NO: 326419 - DNA, 153 bp, Homo sapiens; identical to SEQ ID NO: 219468
  chr19:39222121-39222274
  hypo

SEQ ID NO: 326420 - DNA, 32 bp, Homo sapiens; identical to SEQ ID NO: 219469
  chr19:39238369-39238401
  hypo

SEQ ID NO: 326421 - DNA, 143 bp, Homo sapiens; identical to SEQ ID NO: 274083
  chr19:39259868-39260011
  hypo

SEQ ID NO: 326422 - DNA, 137 bp, Homo sapiens; identical to SEQ ID NO: 274084
  chr19:39270478-39270615
  hypo

SEQ ID NO: 326423 - DNA, 287 bp, Homo sapiens; identical to SEQ ID NO: 219470
  chr19:39277439-39277726
  hypo

SEQ ID NO: 326424 - DNA, 178 bp, Homo sapiens; identical to SEQ ID NO: 219471
  chr19:39279303-39279481
  hypo

SEQ ID NO: 326425 - DNA, 104 bp, Homo sapiens; identical to SEQ ID NO: 219472
  chr19:39289871-39289975
  hypo

SEQ ID NO: 326426 - DNA, 77 bp, Homo sapiens; identical to SEQ ID NO: 274088
  chr19:39302318-39302395
  hypo

SEQ ID NO: 326427 - DNA, 87 bp, Homo sapiens; identical to SEQ ID NO: 219473
  chr19:39305780-39305867
  hypo

SEQ ID NO: 326428 - DNA, 206 bp, Homo sapiens; identical to SEQ ID NO: 219474
  chr19:39306227-39306433
  hypo

SEQ ID NO: 326429 - DNA, 114 bp, Homo sapiens; identical to SEQ ID NO: 219475
  chr19:39306545-39306659
  hypo

SEQ ID NO: 326430 - DNA, 36 bp, Homo sapiens; identical to SEQ ID NO: 219476
  chr19:39310980-39311016
  hypo

SEQ ID NO: 326431 - DNA, 233 bp, Homo sapiens; identical to SEQ ID NO: 274092
  chr19:39327431-39327664
  hypo

SEQ ID NO: 326432 - DNA, 71 bp, Homo sapiens
  chr19:39329501-39329572
  hypo
cctctgctgccctcccgagcctgagcacctaccagacattcagcttctgcccaaacatgaagttgttgttg

SEQ ID NO: 326433 - DNA, 33 bp, Homo sapiens; identical to SEQ ID NO: 274095
  chr19:39330892-39330925
  hypo

SEQ ID NO: 326434 - DNA, 433 bp, Homo sapiens; identical to SEQ ID NO: 274096
  chr19:39332929-39333362
  hypo

SEQ ID NO: 326435 - DNA, 783 bp, Homo sapiens; identical to SEQ ID NO: 274097
  chr19:39406262-39407045
  hypo

SEQ ID NO: 326436 - DNA, 90 bp, Homo sapiens; identical to SEQ ID NO: 274098
  chr19:39408601-39408691
  hypo

SEQ ID NO: 326437 - DNA, 176 bp, Homo sapiens; identical to SEQ ID NO: 274099
  chr19:39415993-39416169
  hypo

SEQ ID NO: 326438 - DNA, 410 bp, Homo sapiens; identical to SEQ ID NO: 274100
  chr19:39435417-39435827
  hypo

SEQ ID NO: 326439 - DNA, 147 bp, Homo sapiens; identical to SEQ ID NO: 274101
  chr19:39439160-39439307
  hypo

SEQ ID NO: 326440 - DNA, 62 bp, Homo sapiens; identical to SEQ ID NO: 274102
  chr19:39544160-39544222
  hypo

SEQ ID NO: 326441 - DNA, 98 bp, Homo sapiens; identical to SEQ ID NO: 274103
  chr19:39553665-39553763
  hypo

SEQ ID NO: 326442 - DNA, 42 bp, Homo sapiens; identical to SEQ ID NO: 274104
  chr19:39568094-39568136
  hypo

SEQ ID NO: 326443 - DNA, 682 bp, Homo sapiens; identical to SEQ ID NO: 293949
  chr19:39574108-39574790
  hypo

SEQ ID NO: 326444 - DNA, 54 bp, Homo sapiens; identical to SEQ ID NO: 293950
  chr19:39575044-39575098
  hypo

SEQ ID NO: 326445 - DNA, 90 bp, Homo sapiens; identical to SEQ ID NO: 219479
  chr19:39595965-39596055
  hypo

SEQ ID NO: 326446 - DNA, 124 bp, Homo sapiens; identical to SEQ ID NO: 219480
  chr19:39597518-39597642
  hypo

SEQ ID NO: 326447 - DNA, 157 bp, Homo sapiens; identical to SEQ ID NO: 274107
  chr19:39642874-39643031
  hypo

SEQ ID NO: 326448 - DNA, 220 bp, Homo sapiens; identical to SEQ ID NO: 274108
  chr19:39644535-39644755
  hypo

SEQ ID NO: 326449 - DNA, 155 bp, Homo sapiens
  chr19:39645707-39645862
  hypo
ggaaggacccaggtgcgtctgtctgctgtgtgccggggcgcttgctcactgttgtccctggattcaccatggcctgggtgcccatcctgggtccgggcacccagcagccttggtccctaccgcctaccagactggagtccctggtagagcccctc

SEQ ID NO: 326450 - DNA, 499 bp, Homo sapiens
  chr19:39646243-39646742
  hypo
actggaggtgggatttgaaggggagggaggggtgctgtggagcatctttttcttctgttcctgaacgggggttctgatcacatcagcctcatgcttggagcagctggttaagggcacagacaccgggacagacatccagcctgggagtcccagcgcctgacctcccctcgggcatcaagtcactccgcctctccgcgcctcagtttcctccatgatgaaaggggcctgctgaaggacctgtctcatttagggcagcagtgaggcaaagccccggagcccatgcctgtgccaagagcagggcctggcccagaatatggccttgtcacgttgagctgccttttttcagcagggttagtttcatcctggtgaggcggcgccagcatggcgttccaccttcttggcctcctctccctcctccctttcctgccatccacacctcccggccctattctcacacctcaggatggcgatatgggggcttcaccgtggtctcccctga

SEQ ID NO: 326451 - DNA, 44 bp, Homo sapiens; identical to SEQ ID NO: 219481
  chr19:39650967-39651011
  hypo

SEQ ID NO: 326452 - DNA, 59 bp, Homo sapiens; identical to SEQ ID NO: 219482
  chr19:39653250-39653309
  hypo

SEQ ID NO: 326453 - DNA, 274 bp, Homo sapiens; identical to SEQ ID NO: 274113
  chr19:39663617-39663891
  hypo

SEQ ID NO: 326454 - DNA, 270 bp, Homo sapiens; identical to SEQ ID NO: 219484
  chr19:39664416-39664686
  hypo

SEQ ID NO: 326455 - DNA, 85 bp, Homo sapiens; identical to SEQ ID NO: 219485
  chr19:39670670-39670755
  hypo

SEQ ID NO: 326456 - DNA, 196 bp, Homo sapiens; identical to SEQ ID NO: 219486
  chr19:39671859-39672055
  hypo

SEQ ID NO: 326457 - DNA, 133 bp, Homo sapiens
  chr19:39672255-39672388
  hypo
cagacccttcctgaccccaccggcccggggggtctacagatccatgtttcaggcgtccgcctggagcggaacaggggagtgcttaggacaagggtggtgccagaggatccactctgcccacatttagttgacc

SEQ ID NO: 326458 - DNA, 429 bp, Homo sapiens; identical to SEQ ID NO: 219487
  chr19:39672463-39672892
  hypo

SEQ ID NO: 326459 - DNA, 201 bp, Homo sapiens
  chr19:39691027-39691228
  hypo
tgtctggctgctggcggccgaccgccgcacggtcattgctcagcaccacgtggccccccgaacttctgggagaggaccccctggccgctgggtccaggtgagactctccgcgccggggccctcaaccccagacgtgtgttcttgtcccaagacctcacagagggaggagaacaggtccgcgggtcctcaaaaagggctcct

SEQ ID NO: 326460 - DNA, 923 bp, Homo sapiens; identical to SEQ ID NO: 274119
  chr19:39804541-39805464
  hypo

SEQ ID NO: 326461 - DNA, 90 bp, Homo sapiens; identical to SEQ ID NO: 274120
  chr19:39816484-39816574
  hypo

SEQ ID NO: 326462 - DNA, 247 bp, Homo sapiens; identical to SEQ ID NO: 274122
  chr19:39818151-39818398
  hypo

SEQ ID NO: 326463 - DNA, 300 bp, Homo sapiens; identical to SEQ ID NO: 274123
  chr19:39913957-39914257
  hypo

SEQ ID NO: 326464 - DNA, 174 bp, Homo sapiens; identical to SEQ ID NO: 274124
  chr19:39924224-39924398
  hypo

SEQ ID NO: 326465 - DNA, 40 bp, Homo sapiens; identical to SEQ ID NO: 219488
  chr19:39934201-39934241
  hypo

SEQ ID NO: 326466 - DNA, 53 bp, Homo sapiens; identical to SEQ ID NO: 219489
  chr19:39964614-39964667
  hypo

SEQ ID NO: 326467 - DNA, 98 bp, Homo sapiens; identical to SEQ ID NO: 293965
  chr19:39992838-39992936
  hypo

SEQ ID NO: 326468 - DNA, 64 bp, Homo sapiens; identical to SEQ ID NO: 293966
  chr19:39997624-39997688
  hypo

SEQ ID NO: 326469 - DNA, 165 bp, Homo sapiens; identical to SEQ ID NO: 219490
  chr19:40015704-40015869
  hypo

SEQ ID NO: 326470 - DNA, 34 bp, Homo sapiens; identical to SEQ ID NO: 274129
  chr19:40016259-40016293
  hypo

SEQ ID NO: 326471 - DNA, 34 bp, Homo sapiens; identical to SEQ ID NO: 274130
  chr19:40016713-40016747
  hypo

SEQ ID NO: 326472 - DNA, 120 bp, Homo sapiens; identical to SEQ ID NO: 219491
  chr19:40019820-40019940
  hypo

SEQ ID NO: 326473 - DNA, 420 bp, Homo sapiens; identical to SEQ ID NO: 219492
  chr19:40020180-40020600
  hypo

SEQ ID NO: 326474 - DNA, 31 bp, Homo sapiens; identical to SEQ ID NO: 274133
  chr19:40026202-40026233
  hypo

SEQ ID NO: 326475 - DNA, 148 bp, Homo sapiens; identical to SEQ ID NO: 274134
  chr19:40038357-40038505
  hypo

SEQ ID NO: 326476 - DNA, 105 bp, Homo sapiens; identical to SEQ ID NO: 274135
  chr19:40269170-40269275
  hypo

SEQ ID NO: 326477 - DNA, 175 bp, Homo sapiens; identical to SEQ ID NO: 219493
  chr19:40316373-40316548
  hypo

SEQ ID NO: 326478 - DNA, 136 bp, Homo sapiens; identical to SEQ ID NO: 274137
  chr19:40318907-40319043
  hypo

SEQ ID NO: 326479 - DNA, 76 bp, Homo sapiens; identical to SEQ ID NO: 219494
  chr19:40322485-40322561
  hypo

SEQ ID NO: 326480 - DNA, 151 bp, Homo sapiens; identical to SEQ ID NO: 274139
  chr19:40329690-40329841
  hypo

SEQ ID NO: 326481 - DNA, 95 bp, Homo sapiens; identical to SEQ ID NO: 274140
  chr19:40343350-40343445
  hypo

SEQ ID NO: 326482 - DNA, 483 bp, Homo sapiens; identical to SEQ ID NO: 274141
  chr19:40362759-40363242
  hypo

SEQ ID NO: 326483 - DNA, 41 bp, Homo sapiens; identical to SEQ ID NO: 274142
  chr19:40386023-40386064
  hypo

SEQ ID NO: 326484 - DNA, 103 bp, Homo sapiens; identical to SEQ ID NO: 274143
  chr19:40405622-40405725
  hypo

SEQ ID NO: 326485 - DNA, 119 bp, Homo sapiens; identical to SEQ ID NO: 274144
  chr19:40408775-40408894
  hypo

SEQ ID NO: 326486 - DNA, 65 bp, Homo sapiens; identical to SEQ ID NO: 219496
  chr19:40441597-40441662
  hypo

SEQ ID NO: 326487 - DNA, 70 bp, Homo sapiens; identical to SEQ ID NO: 274146
  chr19:40449596-40449666
  hypo

SEQ ID NO: 326488 - DNA, 120 bp, Homo sapiens; identical to SEQ ID NO: 219497
  chr19:40474758-40474878
  hypo

SEQ ID NO: 326489 - DNA, 86 bp, Homo sapiens; identical to SEQ ID NO: 274148
  chr19:40660160-40660246
  hypo

SEQ ID NO: 326490 - DNA, 77 bp, Homo sapiens; identical to SEQ ID NO: 219498
  chr19:40660698-40660775
  hypo

SEQ ID NO: 326491 - DNA, 42 bp, Homo sapiens; identical to SEQ ID NO: 274150
  chr19:40706865-40706907
  hypo

SEQ ID NO: 326492 - DNA, 175 bp, Homo sapiens; identical to SEQ ID NO: 219499
  chr19:40711781-40711956
  hypo

SEQ ID NO: 326493 - DNA, 42 bp, Homo sapiens; identical to SEQ ID NO: 274152
  chr19:40720419-40720461
  hypo

SEQ ID NO: 326494 - DNA, 34 bp, Homo sapiens; identical to SEQ ID NO: 274153
  chr19:40727176-40727210
  hypo

SEQ ID NO: 326495 - DNA, 135 bp, Homo sapiens; identical to SEQ ID NO: 274154
  chr19:40738249-40738384
  hypo

SEQ ID NO: 326496 - DNA, 150 bp, Homo sapiens; identical to SEQ ID NO: 274155
  chr19:40739501-40739651
  hypo

SEQ ID NO: 326497 - DNA, 125 bp, Homo sapiens; identical to SEQ ID NO: 274156
  chr19:40741217-40741342
  hypo

SEQ ID NO: 326498 - DNA, 367 bp, Homo sapiens; identical to SEQ ID NO: 274157
  chr19:40741640-40742007
  hypo

SEQ ID NO: 326499 - DNA, 137 bp, Homo sapiens; identical to SEQ ID NO: 274158
  chr19:40743496-40743633
  hypo

SEQ ID NO: 326500 - DNA, 233 bp, Homo sapiens; identical to SEQ ID NO: 274159
  chr19:40744255-40744488
  hypo

SEQ ID NO: 326501 - DNA, 165 bp, Homo sapiens; identical to SEQ ID NO: 274160
  chr19:40744734-40744899
  hypo

SEQ ID NO: 326502 - DNA, 161 bp, Homo sapiens; identical to SEQ ID NO: 219502
  chr19:40745940-40746101
  hypo

SEQ ID NO: 326503 - DNA, 260 bp, Homo sapiens; identical to SEQ ID NO: 274162
  chr19:40748512-40748772
  hypo

SEQ ID NO: 326504 - DNA, 105 bp, Homo sapiens; identical to SEQ ID NO: 274163
  chr19:40752791-40752896
  hypo

SEQ ID NO: 326505 - DNA, 335 bp, Homo sapiens; identical to SEQ ID NO: 274164
  chr19:40753397-40753732
  hypo

SEQ ID NO: 326506 - DNA, 72 bp, Homo sapiens; identical to SEQ ID NO: 274165
  chr19:40757959-40758031
  hypo

SEQ ID NO: 326507 - DNA, 196 bp, Homo sapiens; identical to SEQ ID NO: 274166
  chr19:40771905-40772101
  hypo

SEQ ID NO: 326508 - DNA, 229 bp, Homo sapiens; identical to SEQ ID NO: 274167
  chr19:40773001-40773230
  hypo

SEQ ID NO: 326509 - DNA, 207 bp, Homo sapiens; identical to SEQ ID NO: 274168
  chr19:40778365-40778572
  hypo

SEQ ID NO: 326510 - DNA, 169 bp, Homo sapiens; identical to SEQ ID NO: 219504
  chr19:40828672-40828841
  hypo

SEQ ID NO: 326511 - DNA, 308 bp, Homo sapiens; identical to SEQ ID NO: 219505
  chr19:40829211-40829519
  hypo

SEQ ID NO: 326512 - DNA, 44 bp, Homo sapiens; identical to SEQ ID NO: 219506
  chr19:40829749-40829793
  hypo

SEQ ID NO: 326513 - DNA, 109 bp, Homo sapiens; identical to SEQ ID NO: 219507
  chr19:40873917-40874026
  hypo

SEQ ID NO: 326514 - DNA, 207 bp, Homo sapiens; identical to SEQ ID NO: 274174
  chr19:40895455-40895662
  hypo

SEQ ID NO: 326515 - DNA, 43 bp, Homo sapiens; identical to SEQ ID NO: 274175
  chr19:40900557-40900600
  hypo

SEQ ID NO: 326516 - DNA, 51 bp, Homo sapiens; identical to SEQ ID NO: 219508
  chr19:40900951-40901002
  hypo

SEQ ID NO: 326517 - DNA, 314 bp, Homo sapiens
  chr19:40901949-40902263
  hypo
ttcggaagatgcacgtcgggaaccttcggcacttgcatttccggcagccgaatctctgacactttcggcagctgcacctcggggaggtgcacatcgggcacagccatctcaggcaccttggggagttttatctctgggagcttcatgtcagggactttcatttcacagactttgggcagctgcacctctgggaggtgcacatcgggcacggccatttcaggcaccttggggagtttcatctctgagacttttggcagctgcacctcggggagtcgaacctctggcacagccatctcaggcattttagggagttt

SEQ ID NO: 326518 - DNA, 113 bp, Homo sapiens; identical to SEQ ID NO: 219509
  chr19:40928722-40928835
  hypo

SEQ ID NO: 326519 - DNA, 150 bp, Homo sapiens; identical to SEQ ID NO: 205417
  chr19:40939939-40940089
  hypo

SEQ ID NO: 326520 - DNA, 115 bp, Homo sapiens
  chr19:40951499-40951614
  hypo
ttggttttgaactcctggcctcaagcaatcttctcgcctctggatatttaaacttgtttcctcatcctcaaaatataccctcaattcccaggctgcttctcagaacacatttcaa

SEQ ID NO: 326521 - DNA, 170 bp, Homo sapiens; identical to SEQ ID NO: 274180
  chr19:40952304-40952474
  hypo

SEQ ID NO: 326522 - DNA, 31 bp, Homo sapiens; identical to SEQ ID NO: 274181
  chr19:40955776-40955807
  hypo

SEQ ID NO: 326523 - DNA, 120 bp, Homo sapiens; identical to SEQ ID NO: 293983
  chr19:40972622-40972742
  hypo

SEQ ID NO: 326524 - DNA, 66 bp, Homo sapiens; identical to SEQ ID NO: 274182
  chr19:41008064-41008130
  hypo

SEQ ID NO: 326525 - DNA, 85 bp, Homo sapiens; identical to SEQ ID NO: 205419
  chr19:41025294-41025379
  hypo

SEQ ID NO: 326526 - DNA, 247 bp, Homo sapiens; identical to SEQ ID NO: 274183
  chr19:41133575-41133822
  hypo

SEQ ID NO: 326527 - DNA, 93 bp, Homo sapiens; identical to SEQ ID NO: 274184
  chr19:41168076-41168169
  hypo

SEQ ID NO: 326528 - DNA, 266 bp, Homo sapiens; identical to SEQ ID NO: 274185
  chr19:41168199-41168465
  hypo

SEQ ID NO: 326529 - DNA, 389 bp, Homo sapiens; identical to SEQ ID NO: 294000
  chr19:41190146-41190535
  hypo

SEQ ID NO: 326530 - DNA, 566 bp, Homo sapiens; identical to SEQ ID NO: 274186
  chr19:41281362-41281928
  hypo

SEQ ID NO: 326531 - DNA, 230 bp, Homo sapiens; identical to SEQ ID NO: 219514
  chr19:41292578-41292808
  hypo

SEQ ID NO: 326532 - DNA, 33 bp, Homo sapiens; identical to SEQ ID NO: 225936
  chr19:41304119-41304152
  hypo

SEQ ID NO: 326533 - DNA, 61 bp, Homo sapiens; identical to SEQ ID NO: 274188
  chr19:41602157-41602218
  hypo

SEQ ID NO: 326534 - DNA, 41 bp, Homo sapiens; identical to SEQ ID NO: 219515
  chr19:41616326-41616367
  hypo

SEQ ID NO: 326535 - DNA, 174 bp, Homo sapiens; identical to SEQ ID NO: 274190
  chr19:41643141-41643315
  hypo

SEQ ID NO: 326536 - DNA, 98 bp, Homo sapiens; identical to SEQ ID NO: 219516
  chr19:41665355-41665453
  hypo

SEQ ID NO: 326537 - DNA, 223 bp, Homo sapiens
  chr19:41673657-41673880
  hypo
ccagcagaacgcacagtccgagacactctaggttgtggtagtaactgctgtaaaataactcctttattattgcacgtcagaataggcaagagagtgtaacacagaaaacatcagctactcttcagggtggtgactgctccttagtctaggtatgtacacctggaagggtccgtgaacattttccatgggagagatggatacagagataagttaaaggaaattg

SEQ ID NO: 326538 - DNA, 342 bp, Homo sapiens; identical to SEQ ID NO: 219517
  chr19:41675691-41676033
  hypo

SEQ ID NO: 326539 - DNA, 350 bp, Homo sapiens; identical to SEQ ID NO: 274194
  chr19:41680150-41680500
  hypo

SEQ ID NO: 326540 - DNA, 446 bp, Homo sapiens; identical to SEQ ID NO: 274195
  chr19:41809773-41810219
  hypo

SEQ ID NO: 326541 - DNA, 52 bp, Homo sapiens
  chr19:41854263-41854315
  hypo
gagagcaacacgggttcaggtaccgcttctcggagctctgatgtgttgaaga

SEQ ID NO: 326542 - DNA, 458 bp, Homo sapiens; identical to SEQ ID NO: 294013
  chr19:41859852-41860310
  hypo

SEQ ID NO: 326543 - DNA, 124 bp, Homo sapiens
  chr19:41919971-41920095
  hypo
atgaccaactatggtgaggagggcacgcacgtggggagtgccgccgccctggacaacacggacctggtgtttggccagtaccgggaggcaggtacgtctgtccgtggtttggccctgtggtccc

SEQ ID NO: 326544 - DNA, 241 bp, Homo sapiens; identical to SEQ ID NO: 274199
  chr19:41921080-41921321
  hypo

SEQ ID NO: 326545 - DNA, 91 bp, Homo sapiens
  chr19:41932289-41932380
  hypo
gcagccactgtgggaagctccggcaggctgctgacagcaagaagcggcggaggtccttggggtaggaggcgaagtcagggatctcggtggc

SEQ ID NO: 326546 - DNA, 136 bp, Homo sapiens; identical to SEQ ID NO: 97636
  chr19:41932387-41932523
  hypo

SEQ ID NO: 326547 - DNA, 259 bp, Homo sapiens
  chr19:42349033-42349292
  hypo
atgcttgaagttcattggtctttgtgagacagggtaagaaaagcagcgcgagcttggcggttcctctggccactttctcacagtgtctttgggcgtcttcttgactgaatctgactccattggaggctgtggtaaccgtgaactagctgcacgaacacggtccctcctgcctttccgtcctcctccctcttagccggactccctaacccaggcatcccctctcctccccctcgcgcccctcccgccctcgcgccccctc

SEQ ID NO: 326548 - DNA, 134 bp, Homo sapiens; identical to SEQ ID NO: 274202
  chr19:42373112-42373246
  hypo

SEQ ID NO: 326549 - DNA, 161 bp, Homo sapiens; identical to SEQ ID NO: 274203
  chr19:42383169-42383330
  hypo

SEQ ID NO: 326550 - DNA, 241 bp, Homo sapiens; identical to SEQ ID NO: 219519
  chr19:42398490-42398731
  hypo

SEQ ID NO: 326551 - DNA, 308 bp, Homo sapiens; identical to SEQ ID NO: 219520
  chr19:42400292-42400600
  hypo

SEQ ID NO: 326552 - DNA, 172 bp, Homo sapiens; identical to SEQ ID NO: 219521
  chr19:42408960-42409132
  hypo

SEQ ID NO: 326553 - DNA, 48 bp, Homo sapiens
  chr19:42409333-42409381
  hypo
gctctcatcactgagactgccggatccctgaaagtccctgcccctgcc

SEQ ID NO: 326554 - DNA, 595 bp, Homo sapiens; identical to SEQ ID NO: 274209
  chr19:42424087-42424682
  hypo

SEQ ID NO: 326555 - DNA, 108 bp, Homo sapiens; identical to SEQ ID NO: 219522
  chr19:42460853-42460961
  hypo

SEQ ID NO: 326556 - DNA, 285 bp, Homo sapiens; identical to SEQ ID NO: 219523
  chr19:42461113-42461398
  hypo

SEQ ID NO: 326557 - DNA, 55 bp, Homo sapiens; identical to SEQ ID NO: 274211
  chr19:42638977-42639032
  hypo

SEQ ID NO: 326558 - DNA, 56 bp, Homo sapiens; identical to SEQ ID NO: 274212
  chr19:42657375-42657431
  hypo

SEQ ID NO: 326559 - DNA, 185 bp, Homo sapiens; identical to SEQ ID NO: 274213
  chr19:42700691-42700876
  hypo

SEQ ID NO: 326560 - DNA, 88 bp, Homo sapiens; identical to SEQ ID NO: 274214
  chr19:42712732-42712820
  hypo

SEQ ID NO: 326561 - DNA, 130 bp, Homo sapiens; identical to SEQ ID NO: 219524
  chr19:42722466-42722596
  hypo

SEQ ID NO: 326562 - DNA, 159 bp, Homo sapiens; identical to SEQ ID NO: 219525
  chr19:42722739-42722898
  hypo

SEQ ID NO: 326563 - DNA, 31 bp, Homo sapiens; identical to SEQ ID NO: 219526
  chr19:42723738-42723769
  hypo

SEQ ID NO: 326564 - DNA, 46 bp, Homo sapiens; identical to SEQ ID NO: 274217
  chr19:42729404-42729450
  hypo

SEQ ID NO: 326565 - DNA, 111 bp, Homo sapiens; identical to SEQ ID NO: 225940
  chr19:42749161-42749272
  hypo

SEQ ID NO: 326566 - DNA, 375 bp, Homo sapiens; identical to SEQ ID NO: 219527
  chr19:42791226-42791601
  hypo

SEQ ID NO: 326567 - DNA, 94 bp, Homo sapiens; identical to SEQ ID NO: 274219
  chr19:42796467-42796561
  hypo

SEQ ID NO: 326568 - DNA, 182 bp, Homo sapiens; identical to SEQ ID NO: 274220
  chr19:42813635-42813817
  hypo

SEQ ID NO: 326569 - DNA, 99 bp, Homo sapiens
  chr19:42856483-42856582
  hypo
gatgagtgtcgcctgggcctggcccggtgccacccgcgggcgacctgcctgaacacgcccctcagctacgagtgtcactgccagcggggctaccagggt

SEQ ID NO: 326570 - DNA, 236 bp, Homo sapiens; identical to SEQ ID NO: 219528
  chr19:42873732-42873968
  hypo

SEQ ID NO: 326571 - DNA, 91 bp, Homo sapiens
  chr19:42906776-42906867
  hypo
caggctcttgagcatgctgtcgggtgccagcagcggcgacatgaaggggttcttgactatgggtgaggagtagaggggcatctgtgtggca

SEQ ID NO: 326572 - DNA, 178 bp, Homo sapiens; identical to SEQ ID NO: 219530
  chr19:42906913-42907091
  hypo

SEQ ID NO: 326573 - DNA, 70 bp, Homo sapiens; identical to SEQ ID NO: 274224
  chr19:42914487-42914557
  hypo

SEQ ID NO: 326574 - DNA, 73 bp, Homo sapiens; identical to SEQ ID NO: 294037
  chr19:42927304-42927377
  hypo

SEQ ID NO: 326575 - DNA, 247 bp, Homo sapiens; identical to SEQ ID NO: 294038
  chr19:42927478-42927725
  hypo

SEQ ID NO: 326576 - DNA, 84 bp, Homo sapiens; identical to SEQ ID NO: 274225
  chr19:43181320-43181404
  hypo

SEQ ID NO: 326577 - DNA, 150 bp, Homo sapiens; identical to SEQ ID NO: 274226
  chr19:43918868-43919018
  hypo

SEQ ID NO: 326578 - DNA, 327 bp, Homo sapiens; identical to SEQ ID NO: 274227
  chr19:43919347-43919674
  hypo

SEQ ID NO: 326579 - DNA, 243 bp, Homo sapiens; identical to SEQ ID NO: 225942
  chr19:43967267-43967510
  hypo

SEQ ID NO: 326580 - DNA, 441 bp, Homo sapiens; identical to SEQ ID NO: 294041
  chr19:43967734-43968175
  hypo

SEQ ID NO: 326581 - DNA, 36 bp, Homo sapiens; identical to SEQ ID NO: 274228
  chr19:43975086-43975122
  hypo

SEQ ID NO: 326582 - DNA, 127 bp, Homo sapiens; identical to SEQ ID NO: 219531
  chr19:44005794-44005921
  hypo

SEQ ID NO: 326583 - DNA, 122 bp, Homo sapiens; identical to SEQ ID NO: 274230
  chr19:44096724-44096846
  hypo

SEQ ID NO: 326584 - DNA, 93 bp, Homo sapiens; identical to SEQ ID NO: 274231
  chr19:44128766-44128859
  hypo

SEQ ID NO: 326585 - DNA, 778 bp, Homo sapiens; identical to SEQ ID NO: 294049
  chr19:44143630-44144408
  hypo

SEQ ID NO: 326586 - DNA, 90 bp, Homo sapiens; identical to SEQ ID NO: 274232
  chr19:44207878-44207968
  hypo

SEQ ID NO: 326587 - DNA, 350 bp, Homo sapiens; identical to SEQ ID NO: 219533
  chr19:44222771-44223121
  hypo

SEQ ID NO: 326588 - DNA, 344 bp, Homo sapiens; identical to SEQ ID NO: 219534
  chr19:44223175-44223519
  hypo

SEQ ID NO: 326589 - DNA, 167 bp, Homo sapiens; identical to SEQ ID NO: 274234
  chr19:44243554-44243721
  hypo

SEQ ID NO: 326590 - DNA, 266 bp, Homo sapiens; identical to SEQ ID NO: 274235
  chr19:44273509-44273775
  hypo

SEQ ID NO: 326591 - DNA, 39 bp, Homo sapiens; identical to SEQ ID NO: 274236
  chr19:44502274-44502313
  hypo

SEQ ID NO: 326592 - DNA, 34 bp, Homo sapiens; identical to SEQ ID NO: 274237
  chr19:44530714-44530748
  hypo

SEQ ID NO: 326593 - DNA, 34 bp, Homo sapiens; identical to SEQ ID NO: 274238
  chr19:44530808-44530842
  hypo

SEQ ID NO: 326594 - DNA, 44 bp, Homo sapiens; identical to SEQ ID NO: 219535
  chr19:44564104-44564148
  hypo

SEQ ID NO: 326595 - DNA, 37 bp, Homo sapiens; identical to SEQ ID NO: 219536
  chr19:44575624-44575661
  hypo

SEQ ID NO: 326596 - DNA, 56 bp, Homo sapiens; identical to SEQ ID NO: 219537
  chr19:44578499-44578555
  hypo

SEQ ID NO: 326597 - DNA, 322 bp, Homo sapiens; identical to SEQ ID NO: 274242
  chr19:44932984-44933306
  hypo

SEQ ID NO: 326598 - DNA, 31 bp, Homo sapiens; identical to SEQ ID NO: 219538
  chr19:44988475-44988506
  hypo

SEQ ID NO: 326599 - DNA, 796 bp, Homo sapiens; identical to SEQ ID NO: 225945
  chr19:45004125-45004921
  hypo

SEQ ID NO: 326600 - DNA, 93 bp, Homo sapiens; identical to SEQ ID NO: 219540
  chr19:45108543-45108636
  hypo

SEQ ID NO: 326601 - DNA, 150 bp, Homo sapiens; identical to SEQ ID NO: 219541
  chr19:45149597-45149747
  hypo

SEQ ID NO: 326602 - DNA, 41 bp, Homo sapiens; identical to SEQ ID NO: 219542
  chr19:45150351-45150392
  hypo

SEQ ID NO: 326603 - DNA, 432 bp, Homo sapiens; identical to SEQ ID NO: 219543
  chr19:45150422-45150854
  hypo

SEQ ID NO: 326604 - DNA, 35 bp, Homo sapiens; identical to SEQ ID NO: 274248
  chr19:45162026-45162061
  hypo

SEQ ID NO: 326605 - DNA, 206 bp, Homo sapiens; identical to SEQ ID NO: 219544
  chr19:45164648-45164854
  hypo

SEQ ID NO: 326606 - DNA, 147 bp, Homo sapiens; identical to SEQ ID NO: 219545
  chr19:45186851-45186998
  hypo

SEQ ID NO: 326607 - DNA, 104 bp, Homo sapiens; identical to SEQ ID NO: 274251
  chr19:45193693-45193797
  hypo

SEQ ID NO: 326608 - DNA, 204 bp, Homo sapiens; identical to SEQ ID NO: 274252
  chr19:45206658-45206862
  hypo

SEQ ID NO: 326609 - DNA, 175 bp, Homo sapiens; identical to SEQ ID NO: 294080
  chr19:45207399-45207574
  hypo

SEQ ID NO: 326610 - DNA, 122 bp, Homo sapiens; identical to SEQ ID NO: 219547
  chr19:45211220-45211342
  hypo

SEQ ID NO: 326611 - DNA, 90 bp, Homo sapiens; identical to SEQ ID NO: 274255
  chr19:45268259-45268349
  hypo

SEQ ID NO: 326612 - DNA, 162 bp, Homo sapiens
  chr19:45279714-45279876
  hypo
cctaggatggggcgcggccagaatgccttgcttaggggcgaggcccacagcgccccgatggctgcccagcgagcaactgagcaaccaggctgatgttacaggttctacaggttgggtgaaagccacgcccggccacccctacacaaatgagttgctccccgc

SEQ ID NO: 326613 - DNA, 81 bp, Homo sapiens; identical to SEQ ID NO: 274257
  chr19:45280161-45280242
  hypo

SEQ ID NO: 326614 - DNA, 198 bp, Homo sapiens; identical to SEQ ID NO: 205472
  chr19:45312126-45312324
  hypo

SEQ ID NO: 326615 - DNA, 377 bp, Homo sapiens; identical to SEQ ID NO: 219549
  chr19:45314500-45314877
  hypo

SEQ ID NO: 326616 - DNA, 321 bp, Homo sapiens; identical to SEQ ID NO: 219550
  chr19:45315415-45315736
  hypo

SEQ ID NO: 326617 - DNA, 304 bp, Homo sapiens; identical to SEQ ID NO: 274260
  chr19:45322433-45322737
  hypo

SEQ ID NO: 326618 - DNA, 38 bp, Homo sapiens; identical to SEQ ID NO: 274261
  chr19:45328104-45328142
  hypo

SEQ ID NO: 326619 - DNA, 368 bp, Homo sapiens; identical to SEQ ID NO: 294084
  chr19:45347906-45348274
  hypo

SEQ ID NO: 326620 - DNA, 264 bp, Homo sapiens; identical to SEQ ID NO: 294085
  chr19:45348808-45349072
  hypo

SEQ ID NO: 326621 - DNA, 1013 bp, Homo sapiens; identical to SEQ ID NO: 294086
  chr19:45349505-45350518
  hypo

SEQ ID NO: 326622 - DNA, 295 bp, Homo sapiens; identical to SEQ ID NO: 274262
  chr19:45368653-45368948
  hypo

SEQ ID NO: 326623 - DNA, 272 bp, Homo sapiens; identical to SEQ ID NO: 274263
  chr19:45377062-45377334
  hypo

SEQ ID NO: 326624 - DNA, 451 bp, Homo sapiens; identical to SEQ ID NO: 274264
  chr19:45377394-45377845
  hypo

SEQ ID NO: 326625 - DNA, 44 bp, Homo sapiens; identical to SEQ ID NO: 274265
  chr19:45382930-45382974
  hypo

SEQ ID NO: 326626 - DNA, 40 bp, Homo sapiens; identical to SEQ ID NO: 274266
  chr19:45385981-45386021
  hypo

SEQ ID NO: 326627 - DNA, 72 bp, Homo sapiens; identical to SEQ ID NO: 219555
  chr19:45390079-45390151
  hypo

SEQ ID NO: 326628 - DNA, 353 bp, Homo sapiens; identical to SEQ ID NO: 274268
  chr19:45465023-45465376
  hypo

SEQ ID NO: 326629 - DNA, 65 bp, Homo sapiens; identical to SEQ ID NO: 274269
  chr19:45493681-45493746
  hypo

SEQ ID NO: 326630 - DNA, 261 bp, Homo sapiens; identical to SEQ ID NO: 274270
  chr19:45515279-45515540
  hypo

SEQ ID NO: 326631 - DNA, 101 bp, Homo sapiens; identical to SEQ ID NO: 219557
  chr19:45546675-45546776
  hypo

SEQ ID NO: 326632 - DNA, 239 bp, Homo sapiens; identical to SEQ ID NO: 274272
  chr19:45567166-45567405
  hypo

SEQ ID NO: 326633 - DNA, 212 bp, Homo sapiens; identical to SEQ ID NO: 219558
  chr19:45567707-45567919
  hypo

SEQ ID NO: 326634 - DNA, 39 bp, Homo sapiens; identical to SEQ ID NO: 219559
  chr19:45569129-45569168
  hypo

SEQ ID NO: 326635 - DNA, 97 bp, Homo sapiens
  chr19:45570289-45570386
  hypo
cagagctcacctcccgggaagttagcaagcgggtgtctagtgagggagaggtgacgtgggccaggcagggctcatgatggcaggactgcccttaggc

SEQ ID NO: 326636 - DNA, 222 bp, Homo sapiens
  chr19:45570493-45570715
  hypo
gggccttgcaggaaggaggactgtggatccggacccagggtggggtgcggttggggtccctggagcctcacagtcctcctcccgccctgctgcatccccaggagccgctcccactcaggggaccgctacaggcggggcggccggggcctcaggcaccacagcagtagccgcagccgcagcagctggtccctcagcccgtcccgcagtcgcagcctgactcgc

SEQ ID NO: 326637 - DNA, 92 bp, Homo sapiens; identical to SEQ ID NO: 274276
  chr19:45572264-45572356
  hypo

SEQ ID NO: 326638 - DNA, 73 bp, Homo sapiens; identical to SEQ ID NO: 219560
  chr19:45574700-45574773
  hypo

SEQ ID NO: 326639 - DNA, 47 bp, Homo sapiens; identical to SEQ ID NO: 219561
  chr19:45574888-45574935
  hypo

SEQ ID NO: 326640 - DNA, 472 bp, Homo sapiens; identical to SEQ ID NO: 219562
  chr19:45575156-45575628
  hypo

SEQ ID NO: 326641 - DNA, 54 bp, Homo sapiens; identical to SEQ ID NO: 274278
  chr19:45601008-45601062
  hypo

SEQ ID NO: 326642 - DNA, 41 bp, Homo sapiens; identical to SEQ ID NO: 219563
  chr19:45603142-45603183
  hypo

SEQ ID NO: 326643 - DNA, 220 bp, Homo sapiens; identical to SEQ ID NO: 219564
  chr19:45603213-45603433
  hypo

SEQ ID NO: 326644 - DNA, 147 bp, Homo sapiens; identical to SEQ ID NO: 219565
  chr19:45603730-45603877
  hypo

SEQ ID NO: 326645 - DNA, 348 bp, Homo sapiens; identical to SEQ ID NO: 219566
  chr19:45603910-45604258
  hypo

SEQ ID NO: 326646 - DNA, 94 bp, Homo sapiens
  chr19:45627047-45627141
  hypo
gagtagcttcttgcagctttgaggccctggcatccctctcccctgcctgcaggcttccttgttcactgggccaagtccccgcagtaatcttcct

SEQ ID NO: 326647 - DNA, 259 bp, Homo sapiens; identical to SEQ ID NO: 274282
  chr19:45627566-45627825
  hypo

SEQ ID NO: 326648 - DNA, 198 bp, Homo sapiens; identical to SEQ ID NO: 274283
  chr19:45629665-45629863
  hypo

SEQ ID NO: 326649 - DNA, 145 bp, Homo sapiens; identical to SEQ ID NO: 274284
  chr19:45631784-45631929
  hypo

SEQ ID NO: 326650 - DNA, 1119 bp, Homo sapiens; identical to SEQ ID NO: 294089
  chr19:45647692-45648811
  hypo

SEQ ID NO: 326651 - DNA, 56 bp, Homo sapiens; identical to SEQ ID NO: 294090
  chr19:45655081-45655137
  hypo

SEQ ID NO: 326652 - DNA, 157 bp, Homo sapiens; identical to SEQ ID NO: 274286
  chr19:45660340-45660497
  hypo

SEQ ID NO: 326653 - DNA, 136 bp, Homo sapiens; identical to SEQ ID NO: 219567
  chr19:45678712-45678848
  hypo

SEQ ID NO: 326654 - DNA, 35 bp, Homo sapiens; identical to SEQ ID NO: 274288
  chr19:45694664-45694699
  hypo

SEQ ID NO: 326655 - DNA, 119 bp, Homo sapiens; identical to SEQ ID NO: 274289
  chr19:45737164-45737283
  hypo

SEQ ID NO: 326656 - DNA, 63 bp, Homo sapiens
  chr19:45753597-45753660
  hypo
ctctctggtctcagcctgcccgcatggggagtggctgtgccctgcaggcgaatacctgcacag

SEQ ID NO: 326657 - DNA, 166 bp, Homo sapiens; identical to SEQ ID NO: 274291
  chr19:45767999-45768165
  hypo

SEQ ID NO: 326658 - DNA, 100 bp, Homo sapiens; identical to SEQ ID NO: 274292
  chr19:45768393-45768493
  hypo

SEQ ID NO: 326659 - DNA, 134 bp, Homo sapiens; identical to SEQ ID NO: 274293
  chr19:45769021-45769155
  hypo

SEQ ID NO: 326660 - DNA, 109 bp, Homo sapiens; identical to SEQ ID NO: 274294
  chr19:45805727-45805836
  hypo

SEQ ID NO: 326661 - DNA, 79 bp, Homo sapiens
  chr19:45810267-45810346
  hypo
agccgcatgtagtgagtgcctactgtgtaacaggttacctgcacacaggtaatgcctgttcattcgtgagctcacgagt

SEQ ID NO: 326662 - DNA, 31 bp, Homo sapiens; identical to SEQ ID NO: 274296
  chr19:45813962-45813993
  hypo

SEQ ID NO: 326663 - DNA, 118 bp, Homo sapiens; identical to SEQ ID NO: 274298
  chr19:45856038-45856156
  hypo

SEQ ID NO: 326664 - DNA, 86 bp, Homo sapiens; identical to SEQ ID NO: 219569
  chr19:45866860-45866946
  hypo

SEQ ID NO: 326665 - DNA, 186 bp, Homo sapiens; identical to SEQ ID NO: 274300
  chr19:45867290-45867476
  hypo

SEQ ID NO: 326666 - DNA, 207 bp, Homo sapiens; identical to SEQ ID NO: 274301
  chr19:45895251-45895458
  hypo

SEQ ID NO: 326667 - DNA, 125 bp, Homo sapiens; identical to SEQ ID NO: 274302
  chr19:45903693-45903818
  hypo

SEQ ID NO: 326668 - DNA, 46 bp, Homo sapiens; identical to SEQ ID NO: 225953
  chr19:45908810-45908856
  hypo

SEQ ID NO: 326669 - DNA, 230 bp, Homo sapiens; identical to SEQ ID NO: 225954
  chr19:45947821-45948051
  hypo

SEQ ID NO: 326670 - DNA, 82 bp, Homo sapiens; identical to SEQ ID NO: 274303
  chr19:45949940-45950022
  hypo

SEQ ID NO: 326671 - DNA, 262 bp, Homo sapiens; identical to SEQ ID NO: 205479
  chr19:45959073-45959335
  hypo

SEQ ID NO: 326672 - DNA, 596 bp, Homo sapiens
  chr19:45997680-45998276
  hypo
gatacggtagagagaggaggccgtgagctttcttcttggaggtgccccaaggagaaaccacccacccctcttggctttggtcccagcacctcggacatctcaccttccccagcttctcctgtctccaatctgttgggttcttggggttcttcgtcttccagcggggtggagctgctggtggaagagtcctccccggatcccgttccccgggccacccagcccagatggtccaaccgaagcctcaggtcttccagagggcgctcggatggaggcgcggtgtcaggatcaccccgtcgtccaggctccggggattggctcaggctggggatgctctccaagctgtcgcccaggctgggctgagggtgctggtctcgtggttccgagactgagcggccctgggggcgggggcggcgggcagttgaatccctgcggcccccggagcccactacaccatcaaaggcgatgtaggagaaggtcagctcccggggggtgccccagtcctgcgacgtggtctcctcctcgtcctcctctgagaattcccgggctgtgtgcagctctcgaaaatcagagtcgtcgttccctcctgcagtgggtga

SEQ ID NO: 326673 - DNA, 90 bp, Homo sapiens; identical to SEQ ID NO: 274305
  chr19:46021493-46021583
  hypo

SEQ ID NO: 326674 - DNA, 307 bp, Homo sapiens; identical to SEQ ID NO: 274306
  chr19:46056763-46057070
  hypo

SEQ ID NO: 326675 - DNA, 44 bp, Homo sapiens; identical to SEQ ID NO: 274307
  chr19:46136077-46136121
  hypo

SEQ ID NO: 326676 - DNA, 41 bp, Homo sapiens; identical to SEQ ID NO: 274308
  chr19:46208926-46208967
  hypo

SEQ ID NO: 326677 - DNA, 161 bp, Homo sapiens; identical to SEQ ID NO: 274309
  chr19:46211661-46211822
  hypo

SEQ ID NO: 326678 - DNA, 225 bp, Homo sapiens; identical to SEQ ID NO: 274311
  chr19:46236680-46236905
  hypo

SEQ ID NO: 326679 - DNA, 348 bp, Homo sapiens; identical to SEQ ID NO: 294118
  chr19:46271267-46271615
  hypo

SEQ ID NO: 326680 - DNA, 33 bp, Homo sapiens; identical to SEQ ID NO: 225958
  chr19:46273813-46273846
  hypo

SEQ ID NO: 326681 - DNA, 243 bp, Homo sapiens
  chr19:46286504-46286747
  hypo
actccctgcggctccgagagccaagaggaatctgagctcttctttccagggtggacggttctccagagtggaagtcggggcctccaaccggcctggggtgcctgggccttgagagggccaggcctgagaaactaggaggcaaggaccgaggagtcccagctgggcagggcctgggaaacgtggtcctgggcagttctgataatttaaaaaacaccgaggactttgatgaggggccctggctgc

SEQ ID NO: 326682 - DNA, 108 bp, Homo sapiens; identical to SEQ ID NO: 190577
  chr19:46286876-46286984
  hypo

SEQ ID NO: 326683 - DNA, 60 bp, Homo sapiens; identical to SEQ ID NO: 219575
  chr19:46307536-46307596
  hypo

SEQ ID NO: 326684 - DNA, 60 bp, Homo sapiens; identical to SEQ ID NO: 32688
  chr19:46308096-46308156
  hypo

SEQ ID NO: 326685 - DNA, 62 bp, Homo sapiens; identical to SEQ ID NO: 219577
  chr19:46321116-46321178
  hypo

SEQ ID NO: 326686 - DNA, 124 bp, Homo sapiens; identical to SEQ ID NO: 219578
  chr19:46321422-46321546
  hypo

SEQ ID NO: 326687 - DNA, 316 bp, Homo sapiens; identical to SEQ ID NO: 274315
  chr19:46326464-46326780
  hypo

SEQ ID NO: 326688 - DNA, 538 bp, Homo sapiens; identical to SEQ ID NO: 274317
  chr19:46330380-46330918
  hypo

SEQ ID NO: 326689 - DNA, 153 bp, Homo sapiens; identical to SEQ ID NO: 274318
  chr19:46338327-46338480
  hypo

SEQ ID NO: 326690 - DNA, 105 bp, Homo sapiens; identical to SEQ ID NO: 274319
  chr19:46345643-46345748
  hypo

SEQ ID NO: 326691 - DNA, 93 bp, Homo sapiens; identical to SEQ ID NO: 219580
  chr19:46356447-46356540
  hypo

SEQ ID NO: 326692 - DNA, 38 bp, Homo sapiens; identical to SEQ ID NO: 219581
  chr19:46404484-46404522
  hypo

SEQ ID NO: 326693 - DNA, 345 bp, Homo sapiens; identical to SEQ ID NO: 205489
  chr19:46404950-46405295
  hypo

SEQ ID NO: 326694 - DNA, 108 bp, Homo sapiens; identical to SEQ ID NO: 205491
  chr19:46519147-46519255
  hypo

SEQ ID NO: 326695 - DNA, 420 bp, Homo sapiens; identical to SEQ ID NO: 294128
  chr19:46519582-46520002
  hypo

SEQ ID NO: 326696 - DNA, 32 bp, Homo sapiens; identical to SEQ ID NO: 274323
  chr19:46835962-46835994
  hypo

SEQ ID NO: 326697 - DNA, 38 bp, Homo sapiens; identical to SEQ ID NO: 274324
  chr19:46851845-46851883
  hypo

SEQ ID NO: 326698 - DNA, 147 bp, Homo sapiens; identical to SEQ ID NO: 274325
  chr19:46875776-46875923
  hypo

SEQ ID NO: 326699 - DNA, 397 bp, Homo sapiens; identical to SEQ ID NO: 274326
  chr19:46885287-46885684
  hypo

SEQ ID NO: 326700 - DNA, 144 bp, Homo sapiens; identical to SEQ ID NO: 294135
  chr19:46931909-46932053
  hypo

SEQ ID NO: 326701 - DNA, 475 bp, Homo sapiens; identical to SEQ ID NO: 274327
  chr19:47113154-47113629
  hypo

SEQ ID NO: 326702 - DNA, 31 bp, Homo sapiens
  chr19:47116867-47116898
  hypo
cgtgagccaccgcgcccggccgtgccaaact

SEQ ID NO: 326703 - DNA, 241 bp, Homo sapiens; identical to SEQ ID NO: 274329
  chr19:47127006-47127247
  hypo

SEQ ID NO: 326704 - DNA, 474 bp, Homo sapiens; identical to SEQ ID NO: 274331
  chr19:47223627-47224101
  hypo

SEQ ID NO: 326705 - DNA, 751 bp, Homo sapiens; identical to SEQ ID NO: 294146
  chr19:47258852-47259603
  hypo

SEQ ID NO: 326706 - DNA, 42 bp, Homo sapiens; identical to SEQ ID NO: 274333
  chr19:47261178-47261220
  hypo

SEQ ID NO: 326707 - DNA, 50 bp, Homo sapiens; identical to SEQ ID NO: 274336
  chr19:47305320-47305370
  hypo

SEQ ID NO: 326708 - DNA, 99 bp, Homo sapiens; identical to SEQ ID NO: 274337
  chr19:47334737-47334836
  hypo

SEQ ID NO: 326709 - DNA, 180 bp, Homo sapiens; identical to SEQ ID NO: 274338
  chr19:47335874-47336054
  hypo

SEQ ID NO: 326710 - DNA, 270 bp, Homo sapiens; identical to SEQ ID NO: 225965
  chr19:47359761-47360031
  hypo

SEQ ID NO: 326711 - DNA, 117 bp, Homo sapiens; identical to SEQ ID NO: 205503
  chr19:47363286-47363403
  hypo

SEQ ID NO: 326712 - DNA, 193 bp, Homo sapiens; identical to SEQ ID NO: 274339
  chr19:47368883-47369076
  hypo

SEQ ID NO: 326713 - DNA, 49 bp, Homo sapiens; identical to SEQ ID NO: 274340
  chr19:47406253-47406302
  hypo

SEQ ID NO: 326714 - DNA, 169 bp, Homo sapiens; identical to SEQ ID NO: 274341
  chr19:47429562-47429731
  hypo

SEQ ID NO: 326715 - DNA, 186 bp, Homo sapiens; identical to SEQ ID NO: 274342
  chr19:47482458-47482644
  hypo

SEQ ID NO: 326716 - DNA, 38 bp, Homo sapiens; identical to SEQ ID NO: 274343
  chr19:47498024-47498062
  hypo

SEQ ID NO: 326717 - DNA, 38 bp, Homo sapiens; identical to SEQ ID NO: 274344
  chr19:47500121-47500159
  hypo

SEQ ID NO: 326718 - DNA, 105 bp, Homo sapiens; identical to SEQ ID NO: 274345
  chr19:47501403-47501508
  hypo

SEQ ID NO: 326719 - DNA, 391 bp, Homo sapiens; identical to SEQ ID NO: 274346
  chr19:47501971-47502362
  hypo

SEQ ID NO: 326720 - DNA, 69 bp, Homo sapiens; identical to SEQ ID NO: 294152
  chr19:47522920-47522989
  hypo

SEQ ID NO: 326721 - DNA, 264 bp, Homo sapiens; identical to SEQ ID NO: 294153
  chr19:47523724-47523988
  hypo

SEQ ID NO: 326722 - DNA, 56 bp, Homo sapiens
  chr19:47540628-47540684
  hypo
gcattagatcctaagcgcaggcccacaatgcaagaagtgttatctccattttacat

SEQ ID NO: 326723 - DNA, 79 bp, Homo sapiens
  chr19:47540719-47540798
  hypo
aattgcccccaggtcacacagctataagtgattgagttggattctagcccaggtctgtctgttccggggtcagcacgcc

SEQ ID NO: 326724 - DNA, 41 bp, Homo sapiens; identical to SEQ ID NO: 274348
  chr19:47579554-47579595
  hypo

SEQ ID NO: 326725 - DNA, 77 bp, Homo sapiens; identical to SEQ ID NO: 274349
  chr19:47592709-47592786
  hypo

SEQ ID NO: 326726 - DNA, 137 bp, Homo sapiens
  chr19:47593033-47593170
  hypo
ccaccccaaccacagcccagcgggtgatctctccggtctcctgtgccatgcacatgcagagcctggcccttctttgtacacttatcccaaccctaagtgaccaaacttgaggttctgtgagaccaggccaccggggt

SEQ ID NO: 326727 - DNA, 134 bp, Homo sapiens
  chr19:47593246-47593380
  hypo
ttggcacgccggtactggttcagctctttggtgaagtcgtcatagtcctccttgcccatgtcctcctcctcgtcgccctcatattccccatactgctcattctcgtagtcctcgtacatgccataactcttgct

SEQ ID NO: 326728 - DNA, 33 bp, Homo sapiens
  chr19:47633342-47633375
  hypo
agattacaggtgcgagtcaccgtgcctggccta

SEQ ID NO: 326729 - DNA, 202 bp, Homo sapiens; identical to SEQ ID NO: 219590
  chr19:47646678-47646880
  hypo

SEQ ID NO: 326730 - DNA, 141 bp, Homo sapiens; identical to SEQ ID NO: 294156
  chr19:47675972-47676113
  hypo

SEQ ID NO: 326731 - DNA, 693 bp, Homo sapiens; identical to SEQ ID NO: 131848
  chr19:47729850-47730543
  hypo

SEQ ID NO: 326732 - DNA, 152 bp, Homo sapiens; identical to SEQ ID NO: 225972
  chr19:47730760-47730912
  hypo

SEQ ID NO: 326733 - DNA, 293 bp, Homo sapiens; identical to SEQ ID NO: 205506
  chr19:47731298-47731591
  hypo

SEQ ID NO: 326734 - DNA, 42 bp, Homo sapiens; identical to SEQ ID NO: 274353
  chr19:47779445-47779487
  hypo

SEQ ID NO: 326735 - DNA, 52 bp, Homo sapiens; identical to SEQ ID NO: 274354
  chr19:47817584-47817636
  hypo

SEQ ID NO: 326736 - DNA, 137 bp, Homo sapiens; identical to SEQ ID NO: 219593
  chr19:47868801-47868938
  hypo

SEQ ID NO: 326737 - DNA, 225 bp, Homo sapiens; identical to SEQ ID NO: 274356
  chr19:47881070-47881295
  hypo

SEQ ID NO: 326738 - DNA, 74 bp, Homo sapiens; identical to SEQ ID NO: 274357
  chr19:47881715-47881789
  hypo

SEQ ID NO: 326739 - DNA, 58 bp, Homo sapiens; identical to SEQ ID NO: 56409
  chr19:47910679-47910737
  hypo

SEQ ID NO: 326740 - DNA, 165 bp, Homo sapiens; identical to SEQ ID NO: 294172
  chr19:47951123-47951288
  hypo

SEQ ID NO: 326741 - DNA, 175 bp, Homo sapiens; identical to SEQ ID NO: 294173
  chr19:47951318-47951493
  hypo

SEQ ID NO: 326742 - DNA, 224 bp, Homo sapiens; identical to SEQ ID NO: 219595
  chr19:47976135-47976359
  hypo

SEQ ID NO: 326743 - DNA, 193 bp, Homo sapiens; identical to SEQ ID NO: 274359
  chr19:47989043-47989236
  hypo

SEQ ID NO: 326744 - DNA, 102 bp, Homo sapiens; identical to SEQ ID NO: 219596
  chr19:47995719-47995821
  hypo

SEQ ID NO: 326745 - DNA, 214 bp, Homo sapiens; identical to SEQ ID NO: 219597
  chr19:48003714-48003928
  hypo

SEQ ID NO: 326746 - DNA, 238 bp, Homo sapiens; identical to SEQ ID NO: 219598
  chr19:48012650-48012888
  hypo

SEQ ID NO: 326747 - DNA, 44 bp, Homo sapiens; identical to SEQ ID NO: 274363
  chr19:48052287-48052331
  hypo

SEQ ID NO: 326748 - DNA, 99 bp, Homo sapiens; identical to SEQ ID NO: 294177
  chr19:48076347-48076446
  hypo

SEQ ID NO: 326749 - DNA, 88 bp, Homo sapiens; identical to SEQ ID NO: 274364
  chr19:48077258-48077346
  hypo

SEQ ID NO: 326750 - DNA, 94 bp, Homo sapiens; identical to SEQ ID NO: 274365
  chr19:48082925-48083019
  hypo

SEQ ID NO: 326751 - DNA, 134 bp, Homo sapiens
  chr19:48137351-48137485
  hypo
agccttgtgttttattgtatttaccactcagctctccagtccttgccagacgagtgagaatgagcagtggcgtcaggccttgacgggctctgcagggtgggcgggaggagtgggcagtgcggcttctggaaccc

SEQ ID NO: 326752 - DNA, 39 bp, Homo sapiens; identical to SEQ ID NO: 219600
  chr19:48145667-48145706
  hypo

SEQ ID NO: 326753 - DNA, 358 bp, Homo sapiens
  chr19:48150907-48151265
  hypo
agaatcctccttcccgggtgaggattggaagccatgatcgcctgcctctgttgctggttttagtctttaacccttgctctgtggacttgagaaatgtgcttttccatggtgcctgtgaccaagatgtccgcatcgttagtgaagaccctgctatgtccttgaccacactgcacggggatcctgtccacgatggggggtgtcctgttgggcttgagtgtctagatatggagaccgtagttcgcggggggagtggggggccgtttggcatatttgccctggcatttggggttgtttattgggggtgggagtgctcctggcatttcctgggcgggaactactggtgtagacctactggatt

SEQ ID NO: 326754 - DNA, 210 bp, Homo sapiens; identical to SEQ ID NO: 274369
  chr19:48161876-48162086
  hypo

SEQ ID NO: 326755 - DNA, 43 bp, Homo sapiens; identical to SEQ ID NO: 274370
  chr19:48166308-48166351
  hypo

SEQ ID NO: 326756 - DNA, 399 bp, Homo sapiens; identical to SEQ ID NO: 274371
  chr19:48202212-48202611
  hypo

SEQ ID NO: 326757 - DNA, 271 bp, Homo sapiens; identical to SEQ ID NO: 225978
  chr19:48229020-48229291
  hypo

SEQ ID NO: 326758 - DNA, 87 bp, Homo sapiens; identical to SEQ ID NO: 274372
  chr19:48244447-48244534
  hypo

SEQ ID NO: 326759 - DNA, 45 bp, Homo sapiens; identical to SEQ ID NO: 274373
  chr19:48251493-48251538
  hypo

SEQ ID NO: 326760 - DNA, 39 bp, Homo sapiens; identical to SEQ ID NO: 274374
  chr19:48259084-48259123
  hypo

SEQ ID NO: 326761 - DNA, 42 bp, Homo sapiens; identical to SEQ ID NO: 274375
  chr19:48305538-48305580
  hypo

SEQ ID NO: 326762 - DNA, 141 bp, Homo sapiens; identical to SEQ ID NO: 274376
  chr19:48375656-48375797
  hypo

SEQ ID NO: 326763 - DNA, 38 bp, Homo sapiens; identical to SEQ ID NO: 219603
  chr19:48393224-48393262
  hypo

SEQ ID NO: 326764 - DNA, 44 bp, Homo sapiens; identical to SEQ ID NO: 274378
  chr19:48479211-48479255
  hypo

SEQ ID NO: 326765 - DNA, 193 bp, Homo sapiens; identical to SEQ ID NO: 274379
  chr19:48640705-48640898
  hypo

SEQ ID NO: 326766 - DNA, 39 bp, Homo sapiens; identical to SEQ ID NO: 274380
  chr19:48668228-48668267
  hypo

SEQ ID NO: 326767 - DNA, 181 bp, Homo sapiens; identical to SEQ ID NO: 219604
  chr19:48675139-48675320
  hypo

SEQ ID NO: 326768 - DNA, 330 bp, Homo sapiens; identical to SEQ ID NO: 219605
  chr19:48685675-48686005
  hypo

SEQ ID NO: 326769 - DNA, 42 bp, Homo sapiens; identical to SEQ ID NO: 274383
  chr19:48704700-48704742
  hypo

SEQ ID NO: 326770 - DNA, 228 bp, Homo sapiens; identical to SEQ ID NO: 274384
  chr19:48798924-48799152
  hypo

SEQ ID NO: 326771 - DNA, 110 bp, Homo sapiens; identical to SEQ ID NO: 205512
  chr19:48823626-48823736
  hypo

SEQ ID NO: 326772 - DNA, 112 bp, Homo sapiens; identical to SEQ ID NO: 219607
  chr19:48844372-48844484
  hypo

SEQ ID NO: 326773 - DNA, 53 bp, Homo sapiens; identical to SEQ ID NO: 274387
  chr19:48846609-48846662
  hypo

SEQ ID NO: 326774 - DNA, 340 bp, Homo sapiens; identical to SEQ ID NO: 219608
  chr19:48857831-48858171
  hypo

SEQ ID NO: 326775 - DNA, 144 bp, Homo sapiens; identical to SEQ ID NO: 219609
  chr19:48889258-48889402
  hypo

SEQ ID NO: 326776 - DNA, 322 bp, Homo sapiens; identical to SEQ ID NO: 205513
  chr19:48901493-48901815
  hypo

SEQ ID NO: 326777 - DNA, 287 bp, Homo sapiens; identical to SEQ ID NO: 219611
  chr19:48908063-48908350
  hypo

SEQ ID NO: 326778 - DNA, 180 bp, Homo sapiens; identical to SEQ ID NO: 274392
  chr19:48925877-48926057
  hypo

SEQ ID NO: 326779 - DNA, 93 bp, Homo sapiens; identical to SEQ ID NO: 274393
  chr19:48926477-48926570
  hypo

SEQ ID NO: 326780 - DNA, 34 bp, Homo sapiens; identical to SEQ ID NO: 219612
  chr19:48953831-48953865
  hypo

SEQ ID NO: 326781 - DNA, 124 bp, Homo sapiens; identical to SEQ ID NO: 274395
  chr19:48964897-48965021
  hypo

SEQ ID NO: 326782 - DNA, 153 bp, Homo sapiens; identical to SEQ ID NO: 274396
  chr19:48979074-48979227
  hypo

SEQ ID NO: 326783 - DNA, 183 bp, Homo sapiens; identical to SEQ ID NO: 294193
  chr19:48994398-48994581
  hypo

SEQ ID NO: 326784 - DNA, 114 bp, Homo sapiens; identical to SEQ ID NO: 219613
  chr19:49012370-49012484
  hypo

SEQ ID NO: 326785 - DNA, 204 bp, Homo sapiens; identical to SEQ ID NO: 225982
  chr19:49014628-49014832
  hypo

SEQ ID NO: 326786 - DNA, 51 bp, Homo sapiens
  chr19:49043366-49043417
  hypo
cactccagcctggatgaaagagcgagactccatcccaaacaattaacaaaa

SEQ ID NO: 326787 - DNA, 40 bp, Homo sapiens; identical to SEQ ID NO: 274400
  chr19:49068459-49068499
  hypo

SEQ ID NO: 326788 - DNA, 174 bp, Homo sapiens; identical to SEQ ID NO: 274401
  chr19:49076590-49076764
  hypo

SEQ ID NO: 326789 - DNA, 269 bp, Homo sapiens; identical to SEQ ID NO: 274402
  chr19:49102442-49102711
  hypo

SEQ ID NO: 326790 - DNA, 78 bp, Homo sapiens; identical to SEQ ID NO: 274404
  chr19:49130357-49130435
  hypo

SEQ ID NO: 326791 - DNA, 389 bp, Homo sapiens; identical to SEQ ID NO: 274405
  chr19:49132563-49132952
  hypo

SEQ ID NO: 326792 - DNA, 112 bp, Homo sapiens; identical to SEQ ID NO: 219615
  chr19:49173707-49173819
  hypo

SEQ ID NO: 326793 - DNA, 316 bp, Homo sapiens; identical to SEQ ID NO: 274408
  chr19:49179993-49180309
  hypo

SEQ ID NO: 326794 - DNA, 33 bp, Homo sapiens
  chr19:49180429-49180462
  hypo
aggcgtgaggctgtgacacgtgctatagtgtgg

SEQ ID NO: 326795 - DNA, 558 bp, Homo sapiens; identical to SEQ ID NO: 274410
  chr19:49183432-49183990
  hypo

SEQ ID NO: 326796 - DNA, 45 bp, Homo sapiens; identical to SEQ ID NO: 219618
  chr19:49207344-49207389
  hypo

SEQ ID NO: 326797 - DNA, 273 bp, Homo sapiens; identical to SEQ ID NO: 274412
  chr19:49218942-49219215
  hypo

SEQ ID NO: 326798 - DNA, 138 bp, Homo sapiens; identical to SEQ ID NO: 219619
  chr19:49221485-49221623
  hypo

SEQ ID NO: 326799 - DNA, 127 bp, Homo sapiens; identical to SEQ ID NO: 274414
  chr19:49227955-49228082
  hypo

SEQ ID NO: 326800 - DNA, 225 bp, Homo sapiens; identical to SEQ ID NO: 274415
  chr19:49232014-49232239
  hypo

SEQ ID NO: 326801 - DNA, 98 bp, Homo sapiens; identical to SEQ ID NO: 274416
  chr19:49237047-49237145
  hypo

SEQ ID NO: 326802 - DNA, 141 bp, Homo sapiens; identical to SEQ ID NO: 294203
  chr19:49242393-49242534
  hypo

SEQ ID NO: 326803 - DNA, 35 bp, Homo sapiens; identical to SEQ ID NO: 294204
  chr19:49242773-49242808
  hypo

SEQ ID NO: 326804 - DNA, 33 bp, Homo sapiens; identical to SEQ ID NO: 131935
  chr19:49242911-49242944
  hypo

SEQ ID NO: 326805 - DNA, 76 bp, Homo sapiens; identical to SEQ ID NO: 219621
  chr19:49246879-49246955
  hypo

SEQ ID NO: 326806 - DNA, 136 bp, Homo sapiens; identical to SEQ ID NO: 274418
  chr19:49274076-49274212
  hypo

SEQ ID NO: 326807 - DNA, 90 bp, Homo sapiens; identical to SEQ ID NO: 274419
  chr19:49280159-49280249
  hypo

SEQ ID NO: 326808 - DNA, 88 bp, Homo sapiens; identical to SEQ ID NO: 219622
  chr19:49281057-49281145
  hypo

SEQ ID NO: 326809 - DNA, 78 bp, Homo sapiens; identical to SEQ ID NO: 219623
  chr19:49287699-49287777
  hypo

SEQ ID NO: 326810 - DNA, 99 bp, Homo sapiens; identical to SEQ ID NO: 274422
  chr19:49305614-49305713
  hypo

SEQ ID NO: 326811 - DNA, 182 bp, Homo sapiens; identical to SEQ ID NO: 274423
  chr19:49348663-49348845
  hypo

SEQ ID NO: 326812 - DNA, 93 bp, Homo sapiens; identical to SEQ ID NO: 219624
  chr19:49419216-49419309
  hypo

SEQ ID NO: 326813 - DNA, 41 bp, Homo sapiens; identical to SEQ ID NO: 274427
  chr19:49464192-49464233
  hypo

SEQ ID NO: 326814 - DNA, 585 bp, Homo sapiens; identical to SEQ ID NO: 56462
  chr19:49467050-49467635
  hypo

SEQ ID NO: 326815 - DNA, 64 bp, Homo sapiens
  chr19:49482062-49482126
  hypo
attacaggcatgagctgccgcgcccagctacccttaggtttctaggatagcaaggaaactgagg

SEQ ID NO: 326816 - DNA, 152 bp, Homo sapiens; identical to SEQ ID NO: 274429
  chr19:49490480-49490632
  hypo

SEQ ID NO: 326817 - DNA, 48 bp, Homo sapiens; identical to SEQ ID NO: 274430
  chr19:49509361-49509409
  hypo

SEQ ID NO: 326818 - DNA, 33 bp, Homo sapiens; identical to SEQ ID NO: 219626
  chr19:49525578-49525611
  hypo

SEQ ID NO: 326819 - DNA, 96 bp, Homo sapiens; identical to SEQ ID NO: 274432
  chr19:49540857-49540953
  hypo

SEQ ID NO: 326820 - DNA, 59 bp, Homo sapiens
  chr19:49545493-49545552
  hypo
ctgcctaggggtgccgctgccgggccccctctggtcttcctgctggagactggggcctt

SEQ ID NO: 326821 - DNA, 300 bp, Homo sapiens; identical to SEQ ID NO: 274434
  chr19:49600408-49600708
  hypo

SEQ ID NO: 326822 - DNA, 140 bp, Homo sapiens; identical to SEQ ID NO: 274435
  chr19:49600768-49600908
  hypo

SEQ ID NO: 326823 - DNA, 163 bp, Homo sapiens; identical to SEQ ID NO: 219627
  chr19:49606743-49606906
  hypo

SEQ ID NO: 326824 - DNA, 446 bp, Homo sapiens; identical to SEQ ID NO: 205528
  chr19:49660928-49661374
  hypo

SEQ ID NO: 326825 - DNA, 86 bp, Homo sapiens
  chr19:49703657-49703743
  hypo
tggggcccaagatcgtcatcgtgagcaagatggtgaggcaggggcggggccaaagtgggcggggacatagggaaaggggtggggcc

SEQ ID NO: 326826 - DNA, 87 bp, Homo sapiens; identical to SEQ ID NO: 274438
  chr19:49703773-49703860
  hypo

SEQ ID NO: 326827 - DNA, 141 bp, Homo sapiens; identical to SEQ ID NO: 274439
  chr19:49703914-49704055
  hypo

SEQ ID NO: 326828 - DNA, 205 bp, Homo sapiens; identical to SEQ ID NO: 274440
  chr19:49705148-49705353
  hypo

SEQ ID NO: 326829 - DNA, 34 bp, Homo sapiens; identical to SEQ ID NO: 205529
  chr19:49925606-49925640
  hypo

SEQ ID NO: 326830 - DNA, 463 bp, Homo sapiens; identical to SEQ ID NO: 219630
  chr19:49971403-49971866
  hypo

SEQ ID NO: 326831 - DNA, 131 bp, Homo sapiens; identical to SEQ ID NO: 219631
  chr19:49978920-49979051
  hypo

SEQ ID NO: 326832 - DNA, 490 bp, Homo sapiens; identical to SEQ ID NO: 274444
  chr19:49993764-49994254
  hypo

SEQ ID NO: 326833 - DNA, 148 bp, Homo sapiens
  chr19:49997398-49997546
  hypo
ttttttttattaagatgttctatagctgcactaactgatacacaatacacaagccactaaccccacttgtggctcctgagcacttaaatatgaatagagtgaggctgggtgcagtctcacctgttcccggaactttgggaggccgagg

SEQ ID NO: 326834 - DNA, 34 bp, Homo sapiens; identical to SEQ ID NO: 274446
  chr19:50001236-50001270
  hypo

SEQ ID NO: 326835 - DNA, 44 bp, Homo sapiens; identical to SEQ ID NO: 274450
  chr19:50056051-50056095
  hypo

SEQ ID NO: 326836 - DNA, 273 bp, Homo sapiens; identical to SEQ ID NO: 225987
  chr19:50058957-50059230
  hypo

SEQ ID NO: 326837 - DNA, 879 bp, Homo sapiens; identical to SEQ ID NO: 274451
  chr19:50059648-50060527
  hypo

SEQ ID NO: 326838 - DNA, 172 bp, Homo sapiens; identical to SEQ ID NO: 219633
  chr19:50060912-50061084
  hypo

SEQ ID NO: 326839 - DNA, 163 bp, Homo sapiens; identical to SEQ ID NO: 219634
  chr19:50061336-50061499
  hypo

SEQ ID NO: 326840 - DNA, 190 bp, Homo sapiens; identical to SEQ ID NO: 219635
  chr19:50063175-50063365
  hypo

SEQ ID NO: 326841 - DNA, 123 bp, Homo sapiens; identical to SEQ ID NO: 219636
  chr19:50129559-50129682
  hypo

SEQ ID NO: 326842 - DNA, 51 bp, Homo sapiens; identical to SEQ ID NO: 219637
  chr19:50129741-50129792
  hypo

SEQ ID NO: 326843 - DNA, 38 bp, Homo sapiens; identical to SEQ ID NO: 219638
  chr19:50130457-50130495
  hypo

SEQ ID NO: 326844 - DNA, 80 bp, Homo sapiens; identical to SEQ ID NO: 219639
  chr19:50130728-50130808
  hypo

SEQ ID NO: 326845 - DNA, 35 bp, Homo sapiens; identical to SEQ ID NO: 274458
  chr19:50203510-50203545
  hypo

SEQ ID NO: 326846 - DNA, 199 bp, Homo sapiens; identical to SEQ ID NO: 219640
  chr19:50208442-50208641
  hypo

SEQ ID NO: 326847 - DNA, 43 bp, Homo sapiens; identical to SEQ ID NO: 274460
  chr19:50215612-50215655
  hypo

SEQ ID NO: 326848 - DNA, 101 bp, Homo sapiens; identical to SEQ ID NO: 274461
  chr19:50218146-50218247
  hypo

SEQ ID NO: 326849 - DNA, 120 bp, Homo sapiens; identical to SEQ ID NO: 274462
  chr19:50240192-50240312
  hypo

SEQ ID NO: 326850 - DNA, 98 bp, Homo sapiens; identical to SEQ ID NO: 274463
  chr19:50249077-50249175
  hypo

SEQ ID NO: 326851 - DNA, 87 bp, Homo sapiens; identical to SEQ ID NO: 219641
  chr19:50274628-50274715
  hypo

SEQ ID NO: 326852 - DNA, 135 bp, Homo sapiens; identical to SEQ ID NO: 274465
  chr19:50289573-50289708
  hypo

SEQ ID NO: 326853 - DNA, 203 bp, Homo sapiens; identical to SEQ ID NO: 274466
  chr19:50291871-50292074
  hypo

SEQ ID NO: 326854 - DNA, 109 bp, Homo sapiens
  chr19:50297054-50297163
  hypo
gacttagaatacacatgcgcatctcctgggcagtcaggaagaggcctggattcgcaggcaaagagaagaacacaccagctcgtgcatccactcattgtttctttttttt

SEQ ID NO: 326855 - DNA, 39 bp, Homo sapiens; identical to SEQ ID NO: 219642
  chr19:50303027-50303066
  hypo

SEQ ID NO: 326856 - DNA, 278 bp, Homo sapiens; identical to SEQ ID NO: 219643
  chr19:50303126-50303404
  hypo

SEQ ID NO: 326857 - DNA, 101 bp, Homo sapiens; identical to SEQ ID NO: 274471
  chr19:50304785-50304886
  hypo

SEQ ID NO: 326858 - DNA, 34 bp, Homo sapiens; identical to SEQ ID NO: 219644
  chr19:50305176-50305210
  hypo

SEQ ID NO: 326859 - DNA, 162 bp, Homo sapiens; identical to SEQ ID NO: 219645
  chr19:50305240-50305402
  hypo

SEQ ID NO: 326860 - DNA, 294 bp, Homo sapiens; identical to SEQ ID NO: 274473
  chr19:50306203-50306497
  hypo

SEQ ID NO: 326861 - DNA, 220 bp, Homo sapiens
  chr19:50308635-50308855
  hypo
gctctggggttcctgacccagacctcccgggggcccacctcctctgtctggcttccttgactcctggcgggcacagctggctgtgcagaccaagcgcgtggcggcgcaggtggacggcggcgcgcaggtgcagcaggtgctcaatatcgagtgcctgcgggacttcctgacgcccccgctgctgtccgtgcgcttccggtgagtcaggtacggcgcggcc

SEQ ID NO: 326862 - DNA, 218 bp, Homo sapiens
  chr19:50308885-50309103
  hypo
ggcctaatggagcctccctttcacctcatcaggtacggtggcgccccccaggccctcaccctgaagctcccagtgaccatcaacaagttcttccagcccaccgagatggcggcccaggatttcttccagcgctggaagcagctgagcctgtgaggggtggggagggggcggagccaaagccgcgcctctgggtgggcgggtcgggccgtccaggtccc

SEQ ID NO: 326863 - DNA, 111 bp, Homo sapiens
  chr19:50309133-50309244
  hypo
aacaggaggcgcagaaaatcttcaaagccaaccaccccatggacgcagaagttactaaggccaaggtgagagaccgcgggcgtgtttgccggcctatggctgctttgcttc

SEQ ID NO: 326864 - DNA, 302 bp, Homo sapiens; identical to SEQ ID NO: 294233
  chr19:50312465-50312767
  hypo

SEQ ID NO: 326865 - DNA, 90 bp, Homo sapiens; identical to SEQ ID NO: 219646
  chr19:50320125-50320215
  hypo

SEQ ID NO: 326866 - DNA, 89 bp, Homo sapiens; identical to SEQ ID NO: 274479
  chr19:50326703-50326792
  hypo

SEQ ID NO: 326867 - DNA, 57 bp, Homo sapiens; identical to SEQ ID NO: 219647
  chr19:50331699-50331756
  hypo

SEQ ID NO: 326868 - DNA, 216 bp, Homo sapiens; identical to SEQ ID NO: 274481
  chr19:50341934-50342150
  hypo

SEQ ID NO: 326869 - DNA, 171 bp, Homo sapiens
  chr19:50352981-50353152
  hypo
tccagtcagccctcgggagcccctgggcaggaaaacatggacaggcctacgggttcttctgccatttcactggccactcctccgtgtcctttgctggttgcttctcattgtcgtgactgctaaagggatgagtgtcccagtctctttgtgagctcatccagtctccattca

SEQ ID NO: 326870 - DNA, 186 bp, Homo sapiens; identical to SEQ ID NO: 294236
  chr19:50353784-50353970
  hypo

SEQ ID NO: 326871 - DNA, 48 bp, Homo sapiens; identical to SEQ ID NO: 274484
  chr19:50361410-50361458
  hypo

SEQ ID NO: 326872 - DNA, 82 bp, Homo sapiens
  chr19:50365162-50365244
  hypo
agatcggcagacccagggggagagaagaccccgagcggggacggggaggcaatgatggaggaaagccgccccaaaccagttg

SEQ ID NO: 326873 - DNA, 204 bp, Homo sapiens; identical to SEQ ID NO: 219648
  chr19:50406382-50406586
  hypo

SEQ ID NO: 326874 - DNA, 173 bp, Homo sapiens; identical to SEQ ID NO: 274487
  chr19:50412838-50413011
  hypo

SEQ ID NO: 326875 - DNA, 39 bp, Homo sapiens; identical to SEQ ID NO: 274488
  chr19:50422097-50422136
  hypo

SEQ ID NO: 326876 - DNA, 347 bp, Homo sapiens; identical to SEQ ID NO: 219649
  chr19:50423833-50424180
  hypo

SEQ ID NO: 326877 - DNA, 325 bp, Homo sapiens; identical to SEQ ID NO: 274490
  chr19:50424485-50424810
  hypo

SEQ ID NO: 326878 - DNA, 166 bp, Homo sapiens
  chr19:50477639-50477805
  hypo
gtcgtgtgagcatccttgaatgtgcttacacagtcataaatggtacagcctaccacacgccgaggctatacggtatagcccattgctcctagactatacacctgcacggcatgttcctgtagtgaaagctgtaggcaattataacgcaatggataggttaaagaca

SEQ ID NO: 326879 - DNA, 232 bp, Homo sapiens; identical to SEQ ID NO: 294239
  chr19:50553765-50553997
  hypo

SEQ ID NO: 326880 - DNA, 148 bp, Homo sapiens; identical to SEQ ID NO: 274492
  chr19:50654426-50654574
  hypo

SEQ ID NO: 326881 - DNA, 37 bp, Homo sapiens; identical to SEQ ID NO: 219651
  chr19:50705041-50705078
  hypo

SEQ ID NO: 326882 - DNA, 53 bp, Homo sapiens; identical to SEQ ID NO: 274494
  chr19:50756058-50756111
  hypo

SEQ ID NO: 326883 - DNA, 592 bp, Homo sapiens; identical to SEQ ID NO: 274495
  chr19:50764723-50765315
  hypo

SEQ ID NO: 326884 - DNA, 123 bp, Homo sapiens; identical to SEQ ID NO: 274496
  chr19:50774468-50774591
  hypo

SEQ ID NO: 326885 - DNA, 323 bp, Homo sapiens; identical to SEQ ID NO: 274497
  chr19:50782874-50783197
  hypo

SEQ ID NO: 326886 - DNA, 266 bp, Homo sapiens; identical to SEQ ID NO: 219652
  chr19:50784840-50785106
  hypo

SEQ ID NO: 326887 - DNA, 59 bp, Homo sapiens
  chr19:50789748-50789807
  hypo
aggagaaggcagctgtacttcgggcagtggaggaacgtgagcgggccgaggcagagggc

SEQ ID NO: 326888 - DNA, 47 bp, Homo sapiens; identical to SEQ ID NO: 98072
  chr19:50789973-50790020
  hypo

SEQ ID NO: 326889 - DNA, 946 bp, Homo sapiens; identical to SEQ ID NO: 274500
  chr19:50826194-50827140
  hypo

SEQ ID NO: 326890 - DNA, 351 bp, Homo sapiens; identical to SEQ ID NO: 294252
  chr19:50828891-50829242
  hypo

SEQ ID NO: 326891 - DNA, 60 bp, Homo sapiens; identical to SEQ ID NO: 294253
  chr19:50832039-50832099
  hypo

SEQ ID NO: 326892 - DNA, 35 bp, Homo sapiens; identical to SEQ ID NO: 294256
  chr19:50833793-50833828
  hypo

SEQ ID NO: 326893 - DNA, 467 bp, Homo sapiens; identical to SEQ ID NO: 294257
  chr19:50833970-50834437
  hypo

SEQ ID NO: 326894 - DNA, 90 bp, Homo sapiens; identical to SEQ ID NO: 219654
  chr19:50871401-50871491
  hypo

SEQ ID NO: 326895 - DNA, 76 bp, Homo sapiens; identical to SEQ ID NO: 219655
  chr19:50898815-50898891
  hypo

SEQ ID NO: 326896 - DNA, 196 bp, Homo sapiens; identical to SEQ ID NO: 219656
  chr19:50919573-50919769
  hypo

SEQ ID NO: 326897 - DNA, 43 bp, Homo sapiens
  chr19:50938504-50938547
  hypo
aaggtgaggaggtgctccctcgggctcaaccgacctggcttct

SEQ ID NO: 326898 - DNA, 154 bp, Homo sapiens; identical to SEQ ID NO: 225995
  chr19:50979534-50979688
  hypo

SEQ ID NO: 326899 - DNA, 83 bp, Homo sapiens; identical to SEQ ID NO: 274505
  chr19:50983972-50984055
  hypo

SEQ ID NO: 326900 - DNA, 1577 bp, Homo sapiens; identical to SEQ ID NO: 274506
  chr19:51020736-51022313
  hypo

SEQ ID NO: 326901 - DNA, 44 bp, Homo sapiens; identical to SEQ ID NO: 219657
  chr19:51098421-51098465
  hypo

SEQ ID NO: 326902 - DNA, 83 bp, Homo sapiens; identical to SEQ ID NO: 225997
  chr19:51111319-51111402
  hypo

SEQ ID NO: 326903 - DNA, 204 bp, Homo sapiens
  chr19:51128562-51128766
  hypo
ggtcagtgaggaccgtggagggtggtgggagggcctgtccccaccccagccctcctgcctgacccccgcccgggccgcgcccctcaccagtcgtagtctaccacggcgatgctgagccccacgttctccacgctctcgggggccacgtcgaacaccagcgcctcattataggtggggttcagcgtgttcttcttgatggaggtt

SEQ ID NO: 326904 - DNA, 35 bp, Homo sapiens
  chr19:51128799-51128834
  hypo
agggaggccttcacgtaggggtctgggaacagcaa

SEQ ID NO: 326905 - DNA, 118 bp, Homo sapiens; identical to SEQ ID NO: 294268
  chr19:51170581-51170699
  hypo

SEQ ID NO: 326906 - DNA, 94 bp, Homo sapiens; identical to SEQ ID NO: 205545
  chr19:51228809-51228903
  hypo

SEQ ID NO: 326907 - DNA, 136 bp, Homo sapiens; identical to SEQ ID NO: 219659
  chr19:51293556-51293692
  hypo

SEQ ID NO: 326908 - DNA, 215 bp, Homo sapiens
  chr19:51295158-51295373
  hypo
tcctcgagctggtctgtccagaccagggtgagccccggcccacgctgctctcctggatctgggagaaactgcgacaaagacgcaggggccgagagcccgggttcccccgacccgctgtgagacccaaggcaaggcacacggctgtcctctctgagactcagttttccccagctgctgaggttccccatgcgcagctgtccccgataccacgagct

SEQ ID NO: 326909 - DNA, 105 bp, Homo sapiens; identical to SEQ ID NO: 219660
  chr19:51302699-51302804
  hypo

SEQ ID NO: 326910 - DNA, 695 bp, Homo sapiens; identical to SEQ ID NO: 219661
  chr19:51303006-51303701
  hypo

SEQ ID NO: 326911 - DNA, 117 bp, Homo sapiens; identical to SEQ ID NO: 205552
  chr19:51527588-51527705
  hypo

SEQ ID NO: 326912 - DNA, 88 bp, Homo sapiens; identical to SEQ ID NO: 219663
  chr19:51535217-51535305
  hypo

SEQ ID NO: 326913 - DNA, 106 bp, Homo sapiens; identical to SEQ ID NO: 274516
  chr19:51589548-51589654
  hypo

SEQ ID NO: 326914 - DNA, 327 bp, Homo sapiens; identical to SEQ ID NO: 274517
  chr19:51597216-51597543
  hypo

SEQ ID NO: 326915 - DNA, 253 bp, Homo sapiens; identical to SEQ ID NO: 274518
  chr19:51607194-51607447
  hypo

SEQ ID NO: 326916 - DNA, 178 bp, Homo sapiens; identical to SEQ ID NO: 219665
  chr19:51607825-51608003
  hypo

SEQ ID NO: 326917 - DNA, 54 bp, Homo sapiens; identical to SEQ ID NO: 274521
  chr19:51753980-51754034
  hypo

SEQ ID NO: 326918 - DNA, 251 bp, Homo sapiens; identical to SEQ ID NO: 219666
  chr19:51754291-51754542
  hypo

SEQ ID NO: 326919 - DNA, 192 bp, Homo sapiens; identical to SEQ ID NO: 274523
  chr19:51840539-51840731
  hypo

SEQ ID NO: 326920 - DNA, 165 bp, Homo sapiens; identical to SEQ ID NO: 274524
  chr19:51893083-51893248
  hypo

SEQ ID NO: 326921 - DNA, 205 bp, Homo sapiens; identical to SEQ ID NO: 274525
  chr19:51906688-51906893
  hypo

SEQ ID NO: 326922 - DNA, 41 bp, Homo sapiens; identical to SEQ ID NO: 219667
  chr19:52026931-52026972
  hypo

SEQ ID NO: 326923 - DNA, 57 bp, Homo sapiens; identical to SEQ ID NO: 219668
  chr19:52058332-52058389
  hypo

SEQ ID NO: 326924 - DNA, 406 bp, Homo sapiens
  chr19:52101647-52102053
  hypo
catttataacccacgtatataagagcagcagccacagctgcccctggtctattccaggcaggggcactatctagggaactcctcaaaggcaatgaaacatgtgtaacccgcctcctctcccggtctaggagaagctgtcccttcttgcaatgcccgccccgtcatgtgcctcctgccacgtggcatgcgcctccctccgccgtccatgctcgggccaagtgctgtgcggttcctgcttctgcaccgccttcgaggcggaggtgcagcacatggtgcttgtgggctacctgctgccgccaggcgcagtggtggccctgggcacctcgggcggcaaggattccacggtgctggcacacgtgctgcgcacgctggcaccgggcctgggcatcttactgcagctcatggc

SEQ ID NO: 326925 - DNA, 42 bp, Homo sapiens
  chr19:52102087-52102129
  hypo
ggatcccagtaaggagctggggaaatacgcatgtgcctattt

SEQ ID NO: 326926 - DNA, 38 bp, Homo sapiens; identical to SEQ ID NO: 219670
  chr19:52289294-52289332
  hypo

SEQ ID NO: 326927 - DNA, 607 bp, Homo sapiens; identical to SEQ ID NO: 274530
  chr19:52342886-52343493
  hypo

SEQ ID NO: 326928 - DNA, 82 bp, Homo sapiens; identical to SEQ ID NO: 274531
  chr19:52350892-52350974
  hypo

SEQ ID NO: 326929 - DNA, 41 bp, Homo sapiens; identical to SEQ ID NO: 274532
  chr19:52368627-52368668
  hypo

SEQ ID NO: 326930 - DNA, 47 bp, Homo sapiens; identical to SEQ ID NO: 219672
  chr19:52405665-52405712
  hypo

SEQ ID NO: 326931 - DNA, 93 bp, Homo sapiens; identical to SEQ ID NO: 219673
  chr19:52405954-52406047
  hypo

SEQ ID NO: 326932 - DNA, 152 bp, Homo sapiens; identical to SEQ ID NO: 219674
  chr19:52406167-52406319
  hypo

SEQ ID NO: 326933 - DNA, 120 bp, Homo sapiens; identical to SEQ ID NO: 219675
  chr19:52479228-52479348
  hypo

SEQ ID NO: 326934 - DNA, 82 bp, Homo sapiens; identical to SEQ ID NO: 219676
  chr19:52479588-52479670
  hypo

SEQ ID NO: 326935 - DNA, 77 bp, Homo sapiens; identical to SEQ ID NO: 274538
  chr19:52484729-52484806
  hypo

SEQ ID NO: 326936 - DNA, 320 bp, Homo sapiens; identical to SEQ ID NO: 274539
  chr19:52488648-52488968
  hypo

SEQ ID NO: 326937 - DNA, 65 bp, Homo sapiens; identical to SEQ ID NO: 219677
  chr19:52530500-52530565
  hypo

SEQ ID NO: 326938 - DNA, 74 bp, Homo sapiens; identical to SEQ ID NO: 205557
  chr19:52531285-52531359
  hypo

SEQ ID NO: 326939 - DNA, 222 bp, Homo sapiens; identical to SEQ ID NO: 205558
  chr19:52531884-52532106
  hypo

SEQ ID NO: 326940 - DNA, 218 bp, Homo sapiens; identical to SEQ ID NO: 219680
  chr19:52569174-52569392
  hypo

SEQ ID NO: 326941 - DNA, 114 bp, Homo sapiens; identical to SEQ ID NO: 205561
  chr19:52643387-52643501
  hypo

SEQ ID NO: 326942 - DNA, 35 bp, Homo sapiens; identical to SEQ ID NO: 226008
  chr19:52674677-52674712
  hypo

SEQ ID NO: 326943 - DNA, 160 bp, Homo sapiens; identical to SEQ ID NO: 205562
  chr19:52715132-52715292
  hypo

SEQ ID NO: 326944 - DNA, 36 bp, Homo sapiens; identical to SEQ ID NO: 219683
  chr19:52718578-52718614
  hypo

SEQ ID NO: 326945 - DNA, 120 bp, Homo sapiens; identical to SEQ ID NO: 219684
  chr19:52780745-52780865
  hypo

SEQ ID NO: 326946 - DNA, 35 bp, Homo sapiens; identical to SEQ ID NO: 219685
  chr19:52801591-52801626
  hypo

SEQ ID NO: 326947 - DNA, 34 bp, Homo sapiens; identical to SEQ ID NO: 274546
  chr19:52801866-52801900
  hypo

SEQ ID NO: 326948 - DNA, 110 bp, Homo sapiens; identical to SEQ ID NO: 274547
  chr19:52838576-52838686
  hypo

SEQ ID NO: 326949 - DNA, 96 bp, Homo sapiens; identical to SEQ ID NO: 274548
  chr19:52843261-52843357
  hypo

SEQ ID NO: 326950 - DNA, 42 bp, Homo sapiens; identical to SEQ ID NO: 274549
  chr19:52851166-52851208
  hypo

SEQ ID NO: 326951 - DNA, 41 bp, Homo sapiens; identical to SEQ ID NO: 219686
  chr19:52860523-52860564
  hypo

SEQ ID NO: 326952 - DNA, 31 bp, Homo sapiens; identical to SEQ ID NO: 219687
  chr19:52861439-52861470
  hypo

SEQ ID NO: 326953 - DNA, 182 bp, Homo sapiens; identical to SEQ ID NO: 219688
  chr19:52917256-52917438
  hypo

SEQ ID NO: 326954 - DNA, 101 bp, Homo sapiens; identical to SEQ ID NO: 219689
  chr19:52927832-52927933
  hypo

SEQ ID NO: 326955 - DNA, 180 bp, Homo sapiens; identical to SEQ ID NO: 274555
  chr19:52931619-52931799
  hypo

SEQ ID NO: 326956 - DNA, 41 bp, Homo sapiens; identical to SEQ ID NO: 274556
  chr19:52978881-52978922
  hypo

SEQ ID NO: 326957 - DNA, 76 bp, Homo sapiens; identical to SEQ ID NO: 219690
  chr19:53027352-53027428
  hypo

SEQ ID NO: 326958 - DNA, 201 bp, Homo sapiens; identical to SEQ ID NO: 274558
  chr19:53029365-53029566
  hypo

SEQ ID NO: 326959 - DNA, 39 bp, Homo sapiens; identical to SEQ ID NO: 294318
  chr19:53030696-53030735
  hypo

SEQ ID NO: 326960 - DNA, 395 bp, Homo sapiens; identical to SEQ ID NO: 294319
  chr19:53030790-53031185
  hypo

SEQ ID NO: 326961 - DNA, 36 bp, Homo sapiens; identical to SEQ ID NO: 274559
  chr19:53045476-53045512
  hypo

SEQ ID NO: 326962 - DNA, 38 bp, Homo sapiens; identical to SEQ ID NO: 274560
  chr19:53055548-53055586
  hypo

SEQ ID NO: 326963 - DNA, 79 bp, Homo sapiens; identical to SEQ ID NO: 274561
  chr19:53058376-53058455
  hypo

SEQ ID NO: 326964 - DNA, 46 bp, Homo sapiens
  chr19:53071335-53071381
  hypo
ttttcctggccaggcatgcaggctcaggcctgtaatcccagcactc

SEQ ID NO: 326965 - DNA, 103 bp, Homo sapiens; identical to SEQ ID NO: 274563
  chr19:53074698-53074801
  hypo

SEQ ID NO: 326966 - DNA, 331 bp, Homo sapiens; identical to SEQ ID NO: 274564
  chr19:53077051-53077382
  hypo

SEQ ID NO: 326967 - DNA, 33 bp, Homo sapiens; identical to SEQ ID NO: 274565
  chr19:53078219-53078252
  hypo

SEQ ID NO: 326968 - DNA, 158 bp, Homo sapiens; identical to SEQ ID NO: 219692
  chr19:53089793-53089951
  hypo

SEQ ID NO: 326969 - DNA, 47 bp, Homo sapiens; identical to SEQ ID NO: 274567
  chr19:53090167-53090214
  hypo

SEQ ID NO: 326970 - DNA, 64 bp, Homo sapiens; identical to SEQ ID NO: 274568
  chr19:53090869-53090933
  hypo

SEQ ID NO: 326971 - DNA, 257 bp, Homo sapiens; identical to SEQ ID NO: 274569
  chr19:53100993-53101250
  hypo

SEQ ID NO: 326972 - DNA, 257 bp, Homo sapiens; identical to SEQ ID NO: 274570
  chr19:53101490-53101747
  hypo

SEQ ID NO: 326973 - DNA, 40 bp, Homo sapiens; identical to SEQ ID NO: 274571
  chr19:53102422-53102462
  hypo

SEQ ID NO: 326974 - DNA, 44 bp, Homo sapiens; identical to SEQ ID NO: 274572
  chr19:53108414-53108458
  hypo

SEQ ID NO: 326975 - DNA, 45 bp, Homo sapiens; identical to SEQ ID NO: 274573
  chr19:53114551-53114596
  hypo

SEQ ID NO: 326976 - DNA, 31 bp, Homo sapiens; identical to SEQ ID NO: 274574
  chr19:53163140-53163171
  hypo

SEQ ID NO: 326977 - DNA, 43 bp, Homo sapiens; identical to SEQ ID NO: 274575
  chr19:53213086-53213129
  hypo

SEQ ID NO: 326978 - DNA, 515 bp, Homo sapiens; identical to SEQ ID NO: 274576
  chr19:53228720-53229235
  hypo

SEQ ID NO: 326979 - DNA, 136 bp, Homo sapiens; identical to SEQ ID NO: 274577
  chr19:53233231-53233367
  hypo

SEQ ID NO: 326980 - DNA, 824 bp, Homo sapiens; identical to SEQ ID NO: 294326
  chr19:53237619-53238443
  hypo

SEQ ID NO: 326981 - DNA, 78 bp, Homo sapiens; identical to SEQ ID NO: 219694
  chr19:53241622-53241700
  hypo

SEQ ID NO: 326982 - DNA, 148 bp, Homo sapiens; identical to SEQ ID NO: 274579
  chr19:53242766-53242914
  hypo

SEQ ID NO: 326983 - DNA, 42 bp, Homo sapiens; identical to SEQ ID NO: 274580
  chr19:53247899-53247941
  hypo

SEQ ID NO: 326984 - DNA, 99 bp, Homo sapiens; identical to SEQ ID NO: 274581
  chr19:53297749-53297848
  hypo

SEQ ID NO: 326985 - DNA, 153 bp, Homo sapiens; identical to SEQ ID NO: 274582
  chr19:53316598-53316751
  hypo

SEQ ID NO: 326986 - DNA, 41 bp, Homo sapiens; identical to SEQ ID NO: 274583
  chr19:53317558-53317599
  hypo

SEQ ID NO: 326987 - DNA, 35 bp, Homo sapiens; identical to SEQ ID NO: 274584
  chr19:53398428-53398463
  hypo

SEQ ID NO: 326988 - DNA, 150 bp, Homo sapiens; identical to SEQ ID NO: 274585
  chr19:53401587-53401737
  hypo

SEQ ID NO: 326989 - DNA, 94 bp, Homo sapiens; identical to SEQ ID NO: 219695
  chr19:53412364-53412458
  hypo

SEQ ID NO: 326990 - DNA, 37 bp, Homo sapiens; identical to SEQ ID NO: 219696
  chr19:53438070-53438107
  hypo

SEQ ID NO: 326991 - DNA, 348 bp, Homo sapiens; identical to SEQ ID NO: 205573
  chr19:53445362-53445710
  hypo

SEQ ID NO: 326992 - DNA, 245 bp, Homo sapiens; identical to SEQ ID NO: 205574
  chr19:53445822-53446067
  hypo

SEQ ID NO: 326993 - DNA, 104 bp, Homo sapiens; identical to SEQ ID NO: 294333
  chr19:53446326-53446430
  hypo

SEQ ID NO: 326994 - DNA, 98 bp, Homo sapiens; identical to SEQ ID NO: 274589
  chr19:53460885-53460983
  hypo

SEQ ID NO: 326995 - DNA, 90 bp, Homo sapiens; identical to SEQ ID NO: 219699
  chr19:53463666-53463756
  hypo

SEQ ID NO: 326996 - DNA, 153 bp, Homo sapiens; identical to SEQ ID NO: 219700
  chr19:53477544-53477697
  hypo

SEQ ID NO: 326997 - DNA, 78 bp, Homo sapiens; identical to SEQ ID NO: 274592
  chr19:53490184-53490262
  hypo

SEQ ID NO: 326998 - DNA, 31 bp, Homo sapiens; identical to SEQ ID NO: 274593
  chr19:53506512-53506543
  hypo

SEQ ID NO: 326999 - DNA, 247 bp, Homo sapiens; identical to SEQ ID NO: 219701
  chr19:53507269-53507516
  hypo

SEQ ID NO: 327000 - DNA, 232 bp, Homo sapiens; identical to SEQ ID NO: 274595
  chr19:53507956-53508188
  hypo

SEQ ID NO: 327001 - DNA, 120 bp, Homo sapiens; identical to SEQ ID NO: 274596
  chr19:53509014-53509134
  hypo

SEQ ID NO: 327002 - DNA, 160 bp, Homo sapiens; identical to SEQ ID NO: 274597
  chr19:53589028-53589188
  hypo

SEQ ID NO: 327003 - DNA, 99 bp, Homo sapiens; identical to SEQ ID NO: 274598
  chr19:53589308-53589407
  hypo

SEQ ID NO: 327004 - DNA, 142 bp, Homo sapiens; identical to SEQ ID NO: 274599
  chr19:53601968-53602110
  hypo

SEQ ID NO: 327005 - DNA, 146 bp, Homo sapiens; identical to SEQ ID NO: 294341
  chr19:53606066-53606212
  hypo

SEQ ID NO: 327006 - DNA, 221 bp, Homo sapiens; identical to SEQ ID NO: 205580
  chr19:53606354-53606575
  hypo

SEQ ID NO: 327007 - DNA, 31 bp, Homo sapiens; identical to SEQ ID NO: 274600
  chr19:53627570-53627601
  hypo

SEQ ID NO: 327008 - DNA, 87 bp, Homo sapiens; identical to SEQ ID NO: 274601
  chr19:53653017-53653104
  hypo

SEQ ID NO: 327009 - DNA, 93 bp, Homo sapiens; identical to SEQ ID NO: 219703
  chr19:53667653-53667746
  hypo

SEQ ID NO: 327010 - DNA, 159 bp, Homo sapiens; identical to SEQ ID NO: 274603
  chr19:53668465-53668624
  hypo

SEQ ID NO: 327011 - DNA, 100 bp, Homo sapiens; identical to SEQ ID NO: 219704
  chr19:53685270-53685370
  hypo

SEQ ID NO: 327012 - DNA, 159 bp, Homo sapiens; identical to SEQ ID NO: 219705
  chr19:53685610-53685769
  hypo

SEQ ID NO: 327013 - DNA, 38 bp, Homo sapiens; identical to SEQ ID NO: 274606
  chr19:53693899-53693937
  hypo

SEQ ID NO: 327014 - DNA, 103 bp, Homo sapiens
  chr19:53701715-53701818
  hypo
aattcaattctgacactgtgcgcctggagttagagtcagatccaacaggttaaggtcttagtcccacaagaccacccccctgcccccccgccgccacttcaga

SEQ ID NO: 327015 - DNA, 152 bp, Homo sapiens; identical to SEQ ID NO: 274609
  chr19:53703492-53703644
  hypo

SEQ ID NO: 327016 - DNA, 34 bp, Homo sapiens; identical to SEQ ID NO: 274611
  chr19:53728772-53728806
  hypo

SEQ ID NO: 327017 - DNA, 40 bp, Homo sapiens; identical to SEQ ID NO: 219706
  chr19:53756649-53756689
  hypo

SEQ ID NO: 327018 - DNA, 64 bp, Homo sapiens; identical to SEQ ID NO: 205588
  chr19:53758247-53758311
  hypo

SEQ ID NO: 327019 - DNA, 88 bp, Homo sapiens; identical to SEQ ID NO: 274613
  chr19:53764646-53764734
  hypo

SEQ ID NO: 327020 - DNA, 38 bp, Homo sapiens; identical to SEQ ID NO: 274614
  chr19:53786610-53786648
  hypo

SEQ ID NO: 327021 - DNA, 73 bp, Homo sapiens; identical to SEQ ID NO: 274615
  chr19:53793746-53793819
  hypo

SEQ ID NO: 327022 - DNA, 192 bp, Homo sapiens; identical to SEQ ID NO: 274616
  chr19:53794081-53794273
  hypo

SEQ ID NO: 327023 - DNA, 372 bp, Homo sapiens
  chr19:53794380-53794752
  hypo
ttatcttctcttgaatataggacttgtccaccgtctcgcgccaggatagcggctccaaccgcccaggcgatcggccttgtcccaacgggagggtcccgcggagggacggtccgagccccctaccattggaaatgccaaaccctgccctaagccgggcccagccacccaggctgacgacccacgattagcaccgcgcgctctggggagccgccaaggtgcagccacttcccagagctccgaagggtcagcaagaaaagaggaagccacgaacgctcccagcctccagctggaaaccacgcggtggagtgggcgcttgcgcagtgagcacctcgtgccccacgcccgtgtctcgttcttttttgtgcttgtttc

SEQ ID NO: 327024 - DNA, 165 bp, Homo sapiens; identical to SEQ ID NO: 274618
  chr19:53806011-53806176
  hypo

SEQ ID NO: 327025 - DNA, 97 bp, Homo sapiens; identical to SEQ ID NO: 274619
  chr19:53807087-53807184
  hypo

SEQ ID NO: 327026 - DNA, 240 bp, Homo sapiens; identical to SEQ ID NO: 274620
  chr19:53813501-53813741
  hypo

SEQ ID NO: 327027 - DNA, 34 bp, Homo sapiens; identical to SEQ ID NO: 219708
  chr19:53821074-53821108
  hypo

SEQ ID NO: 327028 - DNA, 31 bp, Homo sapiens; identical to SEQ ID NO: 274622
  chr19:53827529-53827560
  hypo

SEQ ID NO: 327029 - DNA, 33 bp, Homo sapiens; identical to SEQ ID NO: 274623
  chr19:53854271-53854304
  hypo

SEQ ID NO: 327030 - DNA, 93 bp, Homo sapiens; identical to SEQ ID NO: 274624
  chr19:53854364-53854457
  hypo

SEQ ID NO: 327031 - DNA, 58 bp, Homo sapiens; identical to SEQ ID NO: 274625
  chr19:53859528-53859586
  hypo

SEQ ID NO: 327032 - DNA, 36 bp, Homo sapiens; identical to SEQ ID NO: 219709
  chr19:53859893-53859929
  hypo

SEQ ID NO: 327033 - DNA, 120 bp, Homo sapiens; identical to SEQ ID NO: 274627
  chr19:53873291-53873411
  hypo

SEQ ID NO: 327034 - DNA, 290 bp, Homo sapiens; identical to SEQ ID NO: 219710
  chr19:53886631-53886921
  hypo

SEQ ID NO: 327035 - DNA, 172 bp, Homo sapiens; identical to SEQ ID NO: 274629
  chr19:53936945-53937117
  hypo

SEQ ID NO: 327036 - DNA, 197 bp, Homo sapiens; identical to SEQ ID NO: 274630
  chr19:53977470-53977667
  hypo

SEQ ID NO: 327037 - DNA, 198 bp, Homo sapiens
  chr19:53982539-53982737
  hypo
ggaggctgcaatgccgaatggaggaggcaggaaccggagtgtgagcagtagctgggtgggcaccatggctgggatcaccaccatcgaggcagtgaagcgcaagatccaggttctgcagctgcaggcagatgatgaggagtgagctgagcacctccagtgagaagctgagagagaaaggtgggcccgggaacaggctga

SEQ ID NO: 327038 - DNA, 162 bp, Homo sapiens; identical to SEQ ID NO: 274632
  chr19:54017723-54017885
  hypo

SEQ ID NO: 327039 - DNA, 42 bp, Homo sapiens; identical to SEQ ID NO: 274633
  chr19:54048834-54048876
  hypo

SEQ ID NO: 327040 - DNA, 42 bp, Homo sapiens; identical to SEQ ID NO: 274634
  chr19:54074926-54074968
  hypo

SEQ ID NO: 327041 - DNA, 397 bp, Homo sapiens; identical to SEQ ID NO: 274635
  chr19:54080852-54081249
  hypo

SEQ ID NO: 327042 - DNA, 97 bp, Homo sapiens; identical to SEQ ID NO: 274636
  chr19:54081309-54081406
  hypo

SEQ ID NO: 327043 - DNA, 42 bp, Homo sapiens; identical to SEQ ID NO: 274637
  chr19:54087417-54087459
  hypo

SEQ ID NO: 327044 - DNA, 99 bp, Homo sapiens; identical to SEQ ID NO: 219712
  chr19:54109746-54109845
  hypo

SEQ ID NO: 327045 - DNA, 306 bp, Homo sapiens; identical to SEQ ID NO: 219713
  chr19:54109903-54110209
  hypo

SEQ ID NO: 327046 - DNA, 39 bp, Homo sapiens; identical to SEQ ID NO: 274639
  chr19:54115655-54115694
  hypo

SEQ ID NO: 327047 - DNA, 140 bp, Homo sapiens; identical to SEQ ID NO: 219714
  chr19:54120021-54120161
  hypo

SEQ ID NO: 327048 - DNA, 108 bp, Homo sapiens; identical to SEQ ID NO: 274641
  chr19:54120403-54120511
  hypo

SEQ ID NO: 327049 - DNA, 446 bp, Homo sapiens; identical to SEQ ID NO: 274642
  chr19:54135108-54135554
  hypo

SEQ ID NO: 327050 - DNA, 37 bp, Homo sapiens; identical to SEQ ID NO: 274643
  chr19:54136228-54136265
  hypo

SEQ ID NO: 327051 - DNA, 36 bp, Homo sapiens; identical to SEQ ID NO: 274644
  chr19:54137676-54137712
  hypo

SEQ ID NO: 327052 - DNA, 42 bp, Homo sapiens; identical to SEQ ID NO: 274645
  chr19:54140111-54140153
  hypo

SEQ ID NO: 327053 - DNA, 86 bp, Homo sapiens; identical to SEQ ID NO: 274646
  chr19:54140568-54140654
  hypo

SEQ ID NO: 327054 - DNA, 34 bp, Homo sapiens; identical to SEQ ID NO: 274647
  chr19:54141502-54141536
  hypo

SEQ ID NO: 327055 - DNA, 303 bp, Homo sapiens; identical to SEQ ID NO: 274648
  chr19:54150800-54151103
  hypo

SEQ ID NO: 327056 - DNA, 225 bp, Homo sapiens; identical to SEQ ID NO: 274649
  chr19:54152258-54152483
  hypo

SEQ ID NO: 327057 - DNA, 45 bp, Homo sapiens; identical to SEQ ID NO: 219716
  chr19:54153203-54153248
  hypo

SEQ ID NO: 327058 - DNA, 33 bp, Homo sapiens; identical to SEQ ID NO: 219717
  chr19:54161842-54161875
  hypo

SEQ ID NO: 327059 - DNA, 161 bp, Homo sapiens; identical to SEQ ID NO: 274652
  chr19:54170239-54170400
  hypo

SEQ ID NO: 327060 - DNA, 40 bp, Homo sapiens; identical to SEQ ID NO: 274653
  chr19:54171164-54171204
  hypo

SEQ ID NO: 327061 - DNA, 240 bp, Homo sapiens; identical to SEQ ID NO: 274654
  chr19:54196084-54196324
  hypo

SEQ ID NO: 327062 - DNA, 80 bp, Homo sapiens; identical to SEQ ID NO: 205591
  chr19:54206968-54207048
  hypo

SEQ ID NO: 327063 - DNA, 33 bp, Homo sapiens; identical to SEQ ID NO: 274656
  chr19:54212284-54212317
  hypo

SEQ ID NO: 327064 - DNA, 76 bp, Homo sapiens
  chr19:54224684-54224760
  hypo
ggcgattctcccacctcagcctgccgaatagttgggaatagagatgcccgccatcgtgtcctgctagttattattt

SEQ ID NO: 327065 - DNA, 64 bp, Homo sapiens; identical to SEQ ID NO: 274658
  chr19:54254582-54254646
  hypo

SEQ ID NO: 327066 - DNA, 77 bp, Homo sapiens; identical to SEQ ID NO: 274659
  chr19:54256494-54256571
  hypo

SEQ ID NO: 327067 - DNA, 109 bp, Homo sapiens; identical to SEQ ID NO: 274660
  chr19:54268118-54268227
  hypo

SEQ ID NO: 327068 - DNA, 82 bp, Homo sapiens; identical to SEQ ID NO: 219719
  chr19:54271336-54271418
  hypo

SEQ ID NO: 327069 - DNA, 240 bp, Homo sapiens; identical to SEQ ID NO: 219720
  chr19:54271718-54271958
  hypo

SEQ ID NO: 327070 - DNA, 359 bp, Homo sapiens; identical to SEQ ID NO: 219721
  chr19:54313979-54314338
  hypo

SEQ ID NO: 327071 - DNA, 211 bp, Homo sapiens; identical to SEQ ID NO: 274664
  chr19:54317868-54318079
  hypo

SEQ ID NO: 327072 - DNA, 367 bp, Homo sapiens; identical to SEQ ID NO: 294363
  chr19:54371622-54371989
  hypo

SEQ ID NO: 327073 - DNA, 277 bp, Homo sapiens; identical to SEQ ID NO: 294364
  chr19:54372055-54372332
  hypo

SEQ ID NO: 327074 - DNA, 224 bp, Homo sapiens; identical to SEQ ID NO: 294365
  chr19:54372400-54372624
  hypo

SEQ ID NO: 327075 - DNA, 281 bp, Homo sapiens; identical to SEQ ID NO: 294366
  chr19:54372682-54372963
  hypo

SEQ ID NO: 327076 - DNA, 325 bp, Homo sapiens; identical to SEQ ID NO: 294367
  chr19:54382389-54382714
  hypo

SEQ ID NO: 327077 - DNA, 194 bp, Homo sapiens; identical to SEQ ID NO: 294368
  chr19:54382804-54382998
  hypo

SEQ ID NO: 327078 - DNA, 600 bp, Homo sapiens; identical to SEQ ID NO: 226022
  chr19:54385476-54386076
  hypo

SEQ ID NO: 327079 - DNA, 88 bp, Homo sapiens; identical to SEQ ID NO: 294370
  chr19:54412560-54412648
  hypo

SEQ ID NO: 327080 - DNA, 132 bp, Homo sapiens; identical to SEQ ID NO: 274665
  chr19:54487090-54487222
  hypo

SEQ ID NO: 327081 - DNA, 39 bp, Homo sapiens; identical to SEQ ID NO: 274666
  chr19:54498879-54498918
  hypo

SEQ ID NO: 327082 - DNA, 40 bp, Homo sapiens; identical to SEQ ID NO: 219727
  chr19:55609523-55609563
  hypo

SEQ ID NO: 327083 - DNA, 76 bp, Homo sapiens; identical to SEQ ID NO: 274668
  chr19:55631056-55631132
  hypo

SEQ ID NO: 327084 - DNA, 119 bp, Homo sapiens
  chr19:55721105-55721224
  hypo
ctgctgcacggatgcgggacgtggggcagaggatgagagcagggggtgctgagagaaaggccagctgactccctcgcctccctggtgggtgatcacacatcaagagcagcctggggctt

SEQ ID NO: 327085 - DNA, 35 bp, Homo sapiens
  chr19:55721254-55721289
  hypo
ctcttccattcagcctctgacgcctttcccctctc

SEQ ID NO: 327086 - DNA, 147 bp, Homo sapiens; identical to SEQ ID NO: 274670
  chr19:55732005-55732152
  hypo

SEQ ID NO: 327087 - DNA, 104 bp, Homo sapiens; identical to SEQ ID NO: 219728
  chr19:55740668-55740772
  hypo

SEQ ID NO: 327088 - DNA, 147 bp, Homo sapiens; identical to SEQ ID NO: 274672
  chr19:55750624-55750771
  hypo

SEQ ID NO: 327089 - DNA, 92 bp, Homo sapiens; identical to SEQ ID NO: 219729
  chr19:55775276-55775368
  hypo

SEQ ID NO: 327090 - DNA, 460 bp, Homo sapiens; identical to SEQ ID NO: 274674
  chr19:55785505-55785965
  hypo

SEQ ID NO: 327091 - DNA, 37 bp, Homo sapiens
  chr19:55798403-55798440
  hypo
acgggtcagaaggtcgccatcaagatcgtgaaccggg

SEQ ID NO: 327092 - DNA, 79 bp, Homo sapiens; identical to SEQ ID NO: 219730
  chr19:55799281-55799360
  hypo

SEQ ID NO: 327093 - DNA, 176 bp, Homo sapiens; identical to SEQ ID NO: 219731
  chr19:55824302-55824478
  hypo

SEQ ID NO: 327094 - DNA, 63 bp, Homo sapiens; identical to SEQ ID NO: 219732
  chr19:55838911-55838974
  hypo

SEQ ID NO: 327095 - DNA, 202 bp, Homo sapiens; identical to SEQ ID NO: 274679
  chr19:55842494-55842696
  hypo

SEQ ID NO: 327096 - DNA, 93 bp, Homo sapiens; identical to SEQ ID NO: 219733
  chr19:55848034-55848127
  hypo

SEQ ID NO: 327097 - DNA, 120 bp, Homo sapiens; identical to SEQ ID NO: 274681
  chr19:55849159-55849279
  hypo

SEQ ID NO: 327098 - DNA, 377 bp, Homo sapiens; identical to SEQ ID NO: 274682
  chr19:55856150-55856527
  hypo

SEQ ID NO: 327099 - DNA, 209 bp, Homo sapiens; identical to SEQ ID NO: 274683
  chr19:55857843-55858052
  hypo

SEQ ID NO: 327100 - DNA, 36 bp, Homo sapiens; identical to SEQ ID NO: 219734
  chr19:55858739-55858775
  hypo

SEQ ID NO: 327101 - DNA, 413 bp, Homo sapiens; identical to SEQ ID NO: 294385
  chr19:55866046-55866459
  hypo

SEQ ID NO: 327102 - DNA, 404 bp, Homo sapiens; identical to SEQ ID NO: 219736
  chr19:55872208-55872612
  hypo

SEQ ID NO: 327103 - DNA, 36 bp, Homo sapiens; identical to SEQ ID NO: 219737
  chr19:55912229-55912265
  hypo

SEQ ID NO: 327104 - DNA, 78 bp, Homo sapiens; identical to SEQ ID NO: 219738
  chr19:55912363-55912441
  hypo

SEQ ID NO: 327105 - DNA, 161 bp, Homo sapiens; identical to SEQ ID NO: 274687
  chr19:55944091-55944252
  hypo

SEQ ID NO: 327106 - DNA, 181 bp, Homo sapiens; identical to SEQ ID NO: 294390
  chr19:55953358-55953539
  hypo

SEQ ID NO: 327107 - DNA, 256 bp, Homo sapiens; identical to SEQ ID NO: 294391
  chr19:55962684-55962940
  hypo

SEQ ID NO: 327108 - DNA, 63 bp, Homo sapiens; identical to SEQ ID NO: 294392
  chr19:55963044-55963107
  hypo

SEQ ID NO: 327109 - DNA, 136 bp, Homo sapiens; identical to SEQ ID NO: 274688
  chr19:55976221-55976357
  hypo

SEQ ID NO: 327110 - DNA, 513 bp, Homo sapiens; identical to SEQ ID NO: 219740
  chr19:55986210-55986723
  hypo

SEQ ID NO: 327111 - DNA, 396 bp, Homo sapiens; identical to SEQ ID NO: 274691
  chr19:55990560-55990956
  hypo

SEQ ID NO: 327112 - DNA, 133 bp, Homo sapiens; identical to SEQ ID NO: 219741
  chr19:55993945-55994078
  hypo

SEQ ID NO: 327113 - DNA, 96 bp, Homo sapiens; identical to SEQ ID NO: 274693
  chr19:55995221-55995317
  hypo

SEQ ID NO: 327114 - DNA, 43 bp, Homo sapiens; identical to SEQ ID NO: 219742
  chr19:55998067-55998110
  hypo

SEQ ID NO: 327115 - DNA, 118 bp, Homo sapiens; identical to SEQ ID NO: 274695
  chr19:56047529-56047647
  hypo

SEQ ID NO: 327116 - DNA, 108 bp, Homo sapiens; identical to SEQ ID NO: 274696
  chr19:56089714-56089822
  hypo

SEQ ID NO: 327117 - DNA, 82 bp, Homo sapiens; identical to SEQ ID NO: 274697
  chr19:56104273-56104355
  hypo

SEQ ID NO: 327118 - DNA, 81 bp, Homo sapiens; identical to SEQ ID NO: 274698
  chr19:56104956-56105037
  hypo

SEQ ID NO: 327119 - DNA, 260 bp, Homo sapiens; identical to SEQ ID NO: 274699
  chr19:56108941-56109201
  hypo

SEQ ID NO: 327120 - DNA, 175 bp, Homo sapiens; identical to SEQ ID NO: 294399
  chr19:56112771-56112946
  hypo

SEQ ID NO: 327121 - DNA, 303 bp, Homo sapiens; identical to SEQ ID NO: 274700
  chr19:56113855-56114158
  hypo

SEQ ID NO: 327122 - DNA, 38 bp, Homo sapiens; identical to SEQ ID NO: 219743
  chr19:56115323-56115361
  hypo

SEQ ID NO: 327123 - DNA, 205 bp, Homo sapiens; identical to SEQ ID NO: 274702
  chr19:56125726-56125931
  hypo

SEQ ID NO: 327124 - DNA, 91 bp, Homo sapiens; identical to SEQ ID NO: 274703
  chr19:56126761-56126852
  hypo

SEQ ID NO: 327125 - DNA, 245 bp, Homo sapiens; identical to SEQ ID NO: 294401
  chr19:56159669-56159914
  hypo

SEQ ID NO: 327126 - DNA, 80 bp, Homo sapiens; identical to SEQ ID NO: 294402
  chr19:56159950-56160030
  hypo

SEQ ID NO: 327127 - DNA, 604 bp, Homo sapiens
  chr19:56163306-56163910
  hypo
cgtgagccaccgcgcatggcctgtcctgggtttacttttaagttttggtccaccgtcgagggcagggccaccttgggcacctccttaactttcatcagtaaggaggaggtgcgcagtaggacctacctcacggggagggtgagacttgaataagtgaattcacctgaggcagggagacgagggtgatggctcggggtgtcggggggtgctgggaccgcgtgggttgaacccggcctcttggctcattttgtctcctcactctccttcctgggcctgcctcttcccatttcccactggtccaagatctggctgcgattcttcccctcctctctgccccttccttgcctgttgttctccgtctccacctgcaccggcccgtgcctctgctcgccgagatcctttcttcccatggccgtttcccttcccgtgtccgccccctcagtcttgtgccctgcccctcactttcgtgtccccgcctccacccctcagtgaaggacgccgacggggtcctctgccggtacaagaagatcctgggcaccttccagaagctcaagagcatgtcgcgggccttcgagcaccaccgcgtggacaggaacaccgtggc

SEQ ID NO: 327128 - DNA, 241 bp, Homo sapiens; identical to SEQ ID NO: 219745
  chr19:56163943-56164184
  hypo

SEQ ID NO: 327129 - DNA, 87 bp, Homo sapiens; identical to SEQ ID NO: 274705
  chr19:56164403-56164490
  hypo

SEQ ID NO: 327130 - DNA, 139 bp, Homo sapiens; identical to SEQ ID NO: 219746
  chr19:56170493-56170632
  hypo

SEQ ID NO: 327131 - DNA, 54 bp, Homo sapiens; identical to SEQ ID NO: 219747
  chr19:56176622-56176676
  hypo

SEQ ID NO: 327132 - DNA, 78 bp, Homo sapiens; identical to SEQ ID NO: 219748
  chr19:56176926-56177004
  hypo

SEQ ID NO: 327133 - DNA, 213 bp, Homo sapiens; identical to SEQ ID NO: 219749
  chr19:56178938-56179151
  hypo

SEQ ID NO: 327134 - DNA, 197 bp, Homo sapiens; identical to SEQ ID NO: 219750
  chr19:56179451-56179648
  hypo

SEQ ID NO: 327135 - DNA, 577 bp, Homo sapiens
  chr19:56179687-56180264
  hypo
tgccactgcccaggaccctcactggtcagataaggctggggtggggtgggcacgtggcgacccctccctcgtcagatcaggcaggaagtgttctctttggcaattgaggagctcgccgtagactgtccaggttttgggagataacctggtactggaattgaagtcctcctcttctctacccataggggttgtgtccactgtggtccccgactctgcccacaagctgttcatcgggggcttacccaactacctgaacgatgaccaggtaacttccctgcctccctccagacccgtccccccaccccgccccacctcatcccagccctgatggactctcggctactgcaggtcaaagagctgctgacatcctttgggcccctcaaggccttcaacctggtcaaggacagtgccacggggctctccaagggctacgccttctgtgagtacgtggacatcaacgtcacggatcaggtgagtccccggtcgctggccgctgccgcgtctgtccttccctgccctgcgctgttgccaagccatggtctcccctcctcaggggacggggcgggaggcggccaac

SEQ ID NO: 327136 - DNA, 94 bp, Homo sapiens; identical to SEQ ID NO: 274711
  chr19:56190515-56190609
  hypo

SEQ ID NO: 327137 - DNA, 431 bp, Homo sapiens
  chr19:56198986-56199417
  hypo
ggggtgtggtcctccctgtgcgctggcctcacctgtgccccacgctgcccttccatctgcccatcccctcagaaggccgcttacccacccaagtccgtcaatccctgctggttctctcgtcctttcctcactcataaccccagatggtcacccttcggccccgctctgccacccacatgctccctggagcatcccatgcacccagccctgctgggcacaccacacgggggccagcctgggggcccctggacccggtgcaggtggggccgccagacagctgcctgctgcggctccgggcaaggggagccagggcctgctcgtcagggagaggcctgggcctggggagtgggttgggtggggacacaagtacaggacacaggtgcaaggcggcgtcttggagctggagcagacagaacttgctgaccagtgca

SEQ ID NO: 327138 - DNA, 147 bp, Homo sapiens; identical to SEQ ID NO: 219753
  chr19:56199619-56199766
  hypo

SEQ ID NO: 327139 - DNA, 211 bp, Homo sapiens
  chr19:56200285-56200496
  hypo
tggccgcagagcagcggggaggaggagctgcagctccagctggccctggccatgagcaaggaggaggccgaccaggtactgggcgtgcagctggggctgtctgtccgccacccgcctccacgcctcacttcaggctccctcccagccaggcgtgggcctggccctcactgtcgctgctccacatgctgtcactcgtctcctccccagtcct

SEQ ID NO: 327140 - DNA, 98 bp, Homo sapiens
  chr19:56200596-56200694
  hypo
ctggctctgcctctgactctgcctctggcccctcccgtcatgcccctcacactctctctcccccagcccccgtcctgcggccccgaggacgacgccca

SEQ ID NO: 327141 - DNA, 163 bp, Homo sapiens
  chr19:56201480-56201643
  hypo
tgctgggctgaggccggtgactgaccaggctgccctgcggccacctcctgtggtcagcgctggccatcccccttcgggctgagcaccgtgagggccaccaccggccgccacagctgaatggggaggcccagaataggccaacagcctggcatggccacaggga

SEQ ID NO: 327142 - DNA, 50 bp, Homo sapiens; identical to SEQ ID NO: 274716
  chr19:56223263-56223313
  hypo

SEQ ID NO: 327143 - DNA, 162 bp, Homo sapiens; identical to SEQ ID NO: 219755
  chr19:56227938-56228100
  hypo

SEQ ID NO: 327144 - DNA, 55 bp, Homo sapiens; identical to SEQ ID NO: 274718
  chr19:56320360-56320415
  hypo

SEQ ID NO: 327145 - DNA, 219 bp, Homo sapiens; identical to SEQ ID NO: 274719
  chr19:56369328-56369547
  hypo

SEQ ID NO: 327146 - DNA, 130 bp, Homo sapiens; identical to SEQ ID NO: 274720
  chr19:56372690-56372820
  hypo

SEQ ID NO: 327147 - DNA, 322 bp, Homo sapiens; identical to SEQ ID NO: 274721
  chr19:56461801-56462123
  hypo

SEQ ID NO: 327148 - DNA, 334 bp, Homo sapiens; identical to SEQ ID NO: 274722
  chr19:56465555-56465889
  hypo

SEQ ID NO: 327149 - DNA, 86 bp, Homo sapiens; identical to SEQ ID NO: 274723
  chr19:56467208-56467294
  hypo

SEQ ID NO: 327150 - DNA, 35 bp, Homo sapiens; identical to SEQ ID NO: 274724
  chr19:56475820-56475855
  hypo

SEQ ID NO: 327151 - DNA, 509 bp, Homo sapiens
  chr19:56538404-56538913
  hypo
cttttgattcagaccggtggggcttccggcctcgcacggtggttctgcacggaaagtcaggaattgggaaatcggctctagccagaaggatcgtgctgtgctgggcgcaaggtggactctaccagggaatgttctcctacgtcttcttcctccccgttagagagatgcagcggaagaaggagagcagtgtcacagagttcatctccagggagtggccagactcccaggctccggtgacggagatcatgtcccgaccagaaaggctgttgttcatcattgacggtttcgatgacctgggctctgtcctcaacaatgacacaaagctctgcaaagactgggctgagaagcagcctccgttcaccctcatacgcagtctgctgaggaaggtcctgctccctgagtccttcctgatcgtcaccgtcagagacgtgggcacagagaagctcaagtcagaggtcgtgtctccccgttacctgttagttagaggaatctccggggaacaaagaatc

SEQ ID NO: 327152 - DNA, 95 bp, Homo sapiens; identical to SEQ ID NO: 219757
  chr19:56539122-56539217
  hypo

SEQ ID NO: 327153 - DNA, 146 bp, Homo sapiens; identical to SEQ ID NO: 274726
  chr19:56543708-56543854
  hypo

SEQ ID NO: 327154 - DNA, 270 bp, Homo sapiens; identical to SEQ ID NO: 219758
  chr19:56564933-56565203
  hypo

SEQ ID NO: 327155 - DNA, 149 bp, Homo sapiens
  chr19:56602175-56602324
  hypo
gcaagactccatctcaaaacaaaacaaaaacgcttatgctcaggcctccctccagacgcactgtatgagaaagtgccgggccgggcctgtgcttcagcaagccccccaggtgattctgatgccagctccagtgtgagaatcactattcc

SEQ ID NO: 327156 - DNA, 155 bp, Homo sapiens; identical to SEQ ID NO: 219759
  chr19:56615755-56615910
  hypo

SEQ ID NO: 327157 - DNA, 481 bp, Homo sapiens; identical to SEQ ID NO: 219760
  chr19:56617360-56617841
  hypo

SEQ ID NO: 327158 - DNA, 388 bp, Homo sapiens; identical to SEQ ID NO: 274731
  chr19:56642159-56642547
  hypo

SEQ ID NO: 327159 - DNA, 228 bp, Homo sapiens; identical to SEQ ID NO: 219761
  chr19:56658488-56658716
  hypo

SEQ ID NO: 327160 - DNA, 271 bp, Homo sapiens; identical to SEQ ID NO: 274733
  chr19:56663680-56663951
  hypo

SEQ ID NO: 327161 - DNA, 462 bp, Homo sapiens; identical to SEQ ID NO: 274734
  chr19:56671132-56671594
  hypo

SEQ ID NO: 327162 - DNA, 165 bp, Homo sapiens; identical to SEQ ID NO: 219762
  chr19:56688203-56688368
  hypo

SEQ ID NO: 327163 - DNA, 405 bp, Homo sapiens; identical to SEQ ID NO: 274737
  chr19:56707986-56708391
  hypo

SEQ ID NO: 327164 - DNA, 52 bp, Homo sapiens; identical to SEQ ID NO: 219763
  chr19:56727917-56727969
  hypo

SEQ ID NO: 327165 - DNA, 64 bp, Homo sapiens; identical to SEQ ID NO: 274739
  chr19:56761106-56761170
  hypo

SEQ ID NO: 327166 - DNA, 79 bp, Homo sapiens; identical to SEQ ID NO: 274740
  chr19:56805613-56805692
  hypo

SEQ ID NO: 327167 - DNA, 61 bp, Homo sapiens
  chr19:56806261-56806322
  hypo
atgactctgtctctacgacatgtccacagcaggcaagtccacagatagggaaagcagctta

SEQ ID NO: 327168 - DNA, 216 bp, Homo sapiens; identical to SEQ ID NO: 219764
  chr19:56806989-56807205
  hypo

SEQ ID NO: 327169 - DNA, 107 bp, Homo sapiens; identical to SEQ ID NO: 219765
  chr19:56807587-56807694
  hypo

SEQ ID NO: 327170 - DNA, 42 bp, Homo sapiens; identical to SEQ ID NO: 274744
  chr19:56829441-56829483
  hypo

SEQ ID NO: 327171 - DNA, 79 bp, Homo sapiens; identical to SEQ ID NO: 274745
  chr19:56863413-56863492
  hypo

SEQ ID NO: 327172 - DNA, 31 bp, Homo sapiens; identical to SEQ ID NO: 274746
  chr19:56877557-56877588
  hypo

SEQ ID NO: 327173 - DNA, 32 bp, Homo sapiens; identical to SEQ ID NO: 205607
  chr19:56915935-56915967
  hypo

SEQ ID NO: 327174 - DNA, 33 bp, Homo sapiens; identical to SEQ ID NO: 274747
  chr19:56936856-56936889
  hypo

SEQ ID NO: 327175 - DNA, 213 bp, Homo sapiens; identical to SEQ ID NO: 274748
  chr19:56981663-56981876
  hypo

SEQ ID NO: 327176 - DNA, 120 bp, Homo sapiens; identical to SEQ ID NO: 205608
  chr19:56987582-56987702
  hypo

SEQ ID NO: 327177 - DNA, 172 bp, Homo sapiens; identical to SEQ ID NO: 205609
  chr19:56988112-56988284
  hypo

SEQ ID NO: 327178 - DNA, 663 bp, Homo sapiens; identical to SEQ ID NO: 274750
  chr19:57133006-57133669
  hypo

SEQ ID NO: 327179 - DNA, 170 bp, Homo sapiens; identical to SEQ ID NO: 219770
  chr19:57134013-57134183
  hypo

SEQ ID NO: 327180 - DNA, 1448 bp, Homo sapiens; identical to SEQ ID NO: 219771
  chr19:57175022-57176470
  hypo

SEQ ID NO: 327181 - DNA, 488 bp, Homo sapiens; identical to SEQ ID NO: 274753
  chr19:57181878-57182366
  hypo

SEQ ID NO: 327182 - DNA, 32 bp, Homo sapiens; identical to SEQ ID NO: 274754
  chr19:57189204-57189236
  hypo

SEQ ID NO: 327183 - DNA, 39 bp, Homo sapiens; identical to SEQ ID NO: 274755
  chr19:57190503-57190542
  hypo

SEQ ID NO: 327184 - DNA, 91 bp, Homo sapiens; identical to SEQ ID NO: 274756
  chr19:57254044-57254135
  hypo

SEQ ID NO: 327185 - DNA, 311 bp, Homo sapiens; identical to SEQ ID NO: 274757
  chr19:57328579-57328890
  hypo

SEQ ID NO: 327186 - DNA, 50 bp, Homo sapiens; identical to SEQ ID NO: 274758
  chr19:57349850-57349900
  hypo

SEQ ID NO: 327187 - DNA, 34 bp, Homo sapiens; identical to SEQ ID NO: 274759
  chr19:57349930-57349964
  hypo

SEQ ID NO: 327188 - DNA, 412 bp, Homo sapiens; identical to SEQ ID NO: 274760
  chr19:57350029-57350441
  hypo

SEQ ID NO: 327189 - DNA, 115 bp, Homo sapiens; identical to SEQ ID NO: 274761
  chr19:57388569-57388684
  hypo

SEQ ID NO: 327190 - DNA, 92 bp, Homo sapiens; identical to SEQ ID NO: 274762
  chr19:57425614-57425706
  hypo

SEQ ID NO: 327191 - DNA, 45 bp, Homo sapiens
  chr19:57477086-57477131
  hypo
tcaggtgatctgcccaccttggccgcctcccaacgtgccgctaat

SEQ ID NO: 327192 - DNA, 78 bp, Homo sapiens
  chr19:57477171-57477249
  hypo
gtgactggcttatttcacttagcctaatgtcctcaagcgtcatccacgttgcagcacgtgtcagaacttctttccttt

SEQ ID NO: 327193 - DNA, 105 bp, Homo sapiens; identical to SEQ ID NO: 219772
  chr19:57491412-57491517
  hypo

SEQ ID NO: 327194 - DNA, 32 bp, Homo sapiens; identical to SEQ ID NO: 274765
  chr19:57501950-57501982
  hypo

SEQ ID NO: 327195 - DNA, 87 bp, Homo sapiens; identical to SEQ ID NO: 274766
  chr19:57543653-57543740
  hypo

SEQ ID NO: 327196 - DNA, 42 bp, Homo sapiens; identical to SEQ ID NO: 274767
  chr19:57579643-57579685
  hypo

SEQ ID NO: 327197 - DNA, 42 bp, Homo sapiens; identical to SEQ ID NO: 274768
  chr19:57583563-57583605
  hypo

SEQ ID NO: 327198 - DNA, 76 bp, Homo sapiens; identical to SEQ ID NO: 219773
  chr19:57604471-57604547
  hypo

SEQ ID NO: 327199 - DNA, 75 bp, Homo sapiens; identical to SEQ ID NO: 219774
  chr19:57604847-57604922
  hypo

SEQ ID NO: 327200 - DNA, 35 bp, Homo sapiens; identical to SEQ ID NO: 274771
  chr19:57627883-57627918
  hypo

SEQ ID NO: 327201 - DNA, 86 bp, Homo sapiens; identical to SEQ ID NO: 274773
  chr19:57630721-57630807
  hypo

SEQ ID NO: 327202 - DNA, 386 bp, Homo sapiens; identical to SEQ ID NO: 274774
  chr19:57631107-57631493
  hypo

SEQ ID NO: 327203 - DNA, 32 bp, Homo sapiens; identical to SEQ ID NO: 274775
  chr19:57631762-57631794
  hypo

SEQ ID NO: 327204 - DNA, 90 bp, Homo sapiens; identical to SEQ ID NO: 219775
  chr19:57689867-57689957
  hypo

SEQ ID NO: 327205 - DNA, 32 bp, Homo sapiens; identical to SEQ ID NO: 205627
  chr19:58039267-58039299
  hypo

SEQ ID NO: 327206 - DNA, 50 bp, Homo sapiens; identical to SEQ ID NO: 205631
  chr19:58125365-58125415
  hypo

SEQ ID NO: 327207 - DNA, 41 bp, Homo sapiens; identical to SEQ ID NO: 274777
  chr19:58177292-58177333
  hypo

SEQ ID NO: 327208 - DNA, 42 bp, Homo sapiens; identical to SEQ ID NO: 274778
  chr19:58180749-58180791
  hypo

SEQ ID NO: 327209 - DNA, 42 bp, Homo sapiens; identical to SEQ ID NO: 274779
  chr19:58184721-58184763
  hypo

SEQ ID NO: 327210 - DNA, 32 bp, Homo sapiens; identical to SEQ ID NO: 274780
  chr19:58200878-58200910
  hypo

SEQ ID NO: 327211 - DNA, 32 bp, Homo sapiens; identical to SEQ ID NO: 274781
  chr19:58201150-58201182
  hypo

SEQ ID NO: 327212 - DNA, 81 bp, Homo sapiens; identical to SEQ ID NO: 274782
  chr19:58298051-58298132
  hypo

SEQ ID NO: 327213 - DNA, 266 bp, Homo sapiens; identical to SEQ ID NO: 274783
  chr19:58304691-58304957
  hypo

SEQ ID NO: 327214 - DNA, 39 bp, Homo sapiens; identical to SEQ ID NO: 219779
  chr19:58316856-58316895
  hypo

SEQ ID NO: 327215 - DNA, 38 bp, Homo sapiens; identical to SEQ ID NO: 219780
  chr19:58317135-58317173
  hypo

SEQ ID NO: 327216 - DNA, 58 bp, Homo sapiens; identical to SEQ ID NO: 274786
  chr19:58465096-58465154
  hypo

SEQ ID NO: 327217 - DNA, 33 bp, Homo sapiens; identical to SEQ ID NO: 219781
  chr19:58472252-58472285
  hypo

SEQ ID NO: 327218 - DNA, 44 bp, Homo sapiens; identical to SEQ ID NO: 274788
  chr19:58484262-58484306
  hypo

SEQ ID NO: 327219 - DNA, 54 bp, Homo sapiens
  chr19:58524545-58524599
  hypo
cagagggtcagggaggtgagcggcgtgcagctgagagctctgttgttggccccg

SEQ ID NO: 327220 - DNA, 120 bp, Homo sapiens; identical to SEQ ID NO: 274790
  chr19:58544602-58544722
  hypo

SEQ ID NO: 327221 - DNA, 250 bp, Homo sapiens; identical to SEQ ID NO: 219782
  chr19:58551437-58551687
  hypo

SEQ ID NO: 327222 - DNA, 289 bp, Homo sapiens
  chr19:58551717-58552006
  hypo
gcagggatgttcggggaaagtctgccctccccagaaggcctggagaattgggggctctgggaagaacaggcccctctcacgatccctttctcccgcacagttctggtatctctggactcggtcgaaccccaggactggagtttcggtgaggaggaagatgggaagagtccaaggtcccagaaagaaccatcgcaggtgagcccggggcccccagctccgtgctcctgcaccccagggcatgcgtgccgcttctgggacggcctcaaggatgccccatccaaggactgtg

SEQ ID NO: 327223 - DNA, 69 bp, Homo sapiens
  chr19:58552051-58552120
  hypo
ccgcctgccccacagattccccaagcttcctggggctcagtgctgggcgagggcagtcagtgcagctgt

SEQ ID NO: 327224 - DNA, 31 bp, Homo sapiens; identical to SEQ ID NO: 274792
  chr19:58555625-58555656
  hypo

SEQ ID NO: 327225 - DNA, 343 bp, Homo sapiens; identical to SEQ ID NO: 219784
  chr19:58556344-58556687
  hypo

SEQ ID NO: 327226 - DNA, 146 bp, Homo sapiens; identical to SEQ ID NO: 274794
  chr19:58556945-58557091
  hypo

SEQ ID NO: 327227 - DNA, 38 bp, Homo sapiens; identical to SEQ ID NO: 274795
  chr19:58557381-58557419
  hypo

SEQ ID NO: 327228 - DNA, 318 bp, Homo sapiens; identical to SEQ ID NO: 219785
  chr19:58557757-58558075
  hypo

SEQ ID NO: 327229 - DNA, 184 bp, Homo sapiens; identical to SEQ ID NO: 274797
  chr19:58563696-58563880
  hypo

SEQ ID NO: 327230 - DNA, 736 bp, Homo sapiens; identical to SEQ ID NO: 274798
  chr19:58564632-58565368
  hypo

SEQ ID NO: 327231 - DNA, 35 bp, Homo sapiens; identical to SEQ ID NO: 219787
  chr19:58593733-58593768
  hypo

SEQ ID NO: 327232 - DNA, 481 bp, Homo sapiens; identical to SEQ ID NO: 274800
  chr19:58595753-58596234
  hypo

SEQ ID NO: 327233 - DNA, 199 bp, Homo sapiens; identical to SEQ ID NO: 274801
  chr19:58596709-58596908
  hypo

SEQ ID NO: 327234 - DNA, 286 bp, Homo sapiens
  chr19:58598368-58598654
  hypo
tcagcttctgaaacattagtcgtggctgagacctcccacctgccctagagaagggaggacccgccgcagccccacagccacaggagcaggctaggagccagccctggccagggactctaacccaggtgcactgcaggaggcagcccccttcgcaccacaaagattccgccctcacgctcccaccagggtgggttctgggcctcagcgctgtggacgtttggggccacagccctctgctgagcactggtgatggggagggggatgcctctaagctgaggccaaggcc

SEQ ID NO: 327235 - DNA, 49 bp, Homo sapiens
  chr19:58598684-58598733
  hypo
gctcggtgttggcagggccgtcctcttcggtctttgcttctctgaccct

SEQ ID NO: 327236 - DNA, 42 bp, Homo sapiens; identical to SEQ ID NO: 274803
  chr19:58605134-58605176
  hypo

SEQ ID NO: 327237 - DNA, 188 bp, Homo sapiens; identical to SEQ ID NO: 205645
  chr19:58665953-58666141
  hypo

SEQ ID NO: 327238 - DNA, 224 bp, Homo sapiens; identical to SEQ ID NO: 205646
  chr19:58666733-58666957
  hypo

SEQ ID NO: 327239 - DNA, 355 bp, Homo sapiens; identical to SEQ ID NO: 294458
  chr19:58694197-58694552
  hypo

SEQ ID NO: 327240 - DNA, 156 bp, Homo sapiens; identical to SEQ ID NO: 274804
  chr19:58711831-58711987
  hypo

SEQ ID NO: 327241 - DNA, 816 bp, Homo sapiens; identical to SEQ ID NO: 219791
  chr19:58830534-58831350
  hypo

SEQ ID NO: 327242 - DNA, 197 bp, Homo sapiens; identical to SEQ ID NO: 205648
  chr19:58858560-58858757
  hypo

SEQ ID NO: 327243 - DNA, 157 bp, Homo sapiens; identical to SEQ ID NO: 219793
  chr19:58872591-58872748
  hypo

SEQ ID NO: 327244 - DNA, 332 bp, Homo sapiens; identical to SEQ ID NO: 294464
  chr19:58874184-58874516
  hypo

SEQ ID NO: 327245 - DNA, 118 bp, Homo sapiens; identical to SEQ ID NO: 219795
  chr19:58878556-58878674
  hypo

SEQ ID NO: 327246 - DNA, 32 bp, Homo sapiens; identical to SEQ ID NO: 219796
  chr19:58915038-58915070
  hypo

SEQ ID NO: 327247 - DNA, 71 bp, Homo sapiens; identical to SEQ ID NO: 226057
  chr19:58920316-58920387
  hypo

SEQ ID NO: 327248 - DNA, 63 bp, Homo sapiens; identical to SEQ ID NO: 219797
  chr19:58964117-58964180
  hypo

SEQ ID NO: 327249 - DNA, 99 bp, Homo sapiens; identical to SEQ ID NO: 274812
  chr19:58990990-58991089
  hypo

SEQ ID NO: 327250 - DNA, 160 bp, Homo sapiens; identical to SEQ ID NO: 274813
  chr19:59003735-59003895
  hypo

SEQ ID NO: 327251 - DNA, 401 bp, Homo sapiens; identical to SEQ ID NO: 294471
  chr19:59010487-59010888
  hypo

SEQ ID NO: 327252 - DNA, 50 bp, Homo sapiens; identical to SEQ ID NO: 294472
  chr19:59010962-59011012
  hypo

SEQ ID NO: 327253 - DNA, 105 bp, Homo sapiens; identical to SEQ ID NO: 219798
  chr20:276872-276977
  hypo

SEQ ID NO: 327254 - DNA, 61 bp, Homo sapiens; identical to SEQ ID NO: 274816
  chr20:309115-309176
  hypo

SEQ ID NO: 327255 - DNA, 242 bp, Homo sapiens; identical to SEQ ID NO: 274817
  chr20:371970-372212
  hypo

SEQ ID NO: 327256 - DNA, 100 bp, Homo sapiens
  chr20:400189-400289
  hypo
ctctgctcccaggtgggctggcagtgccccgggtgcaccttcatcaacaagcccacgcggcctggctgtgagatgtgctgccgggcgcgccccgaggcct

SEQ ID NO: 327257 - DNA, 99 bp, Homo sapiens
  chr20:400917-401016
  hypo
ccttagccctaccccgcccccatcgtgacacacgcactaatgacacagacattgatccccgagtgctccccattctgatctcacccctggccccacctg

SEQ ID NO: 327258 - DNA, 116 bp, Homo sapiens; identical to SEQ ID NO: 219801
  chr20:413054-413170
  hypo

SEQ ID NO: 327259 - DNA, 43 bp, Homo sapiens; identical to SEQ ID NO: 219802
  chr20:417445-417488
  hypo

SEQ ID NO: 327260 - DNA, 149 bp, Homo sapiens; identical to SEQ ID NO: 219803
  chr20:488507-488656
  hypo

SEQ ID NO: 327261 - DNA, 34 bp, Homo sapiens; identical to SEQ ID NO: 274825
  chr20:540395-540429
  hypo

SEQ ID NO: 327262 - DNA, 91 bp, Homo sapiens; identical to SEQ ID NO: 274826
  chr20:631995-632086
  hypo

SEQ ID NO: 327263 - DNA, 68 bp, Homo sapiens; identical to SEQ ID NO: 219804
  chr20:688357-688425
  hypo

SEQ ID NO: 327264 - DNA, 59 bp, Homo sapiens; identical to SEQ ID NO: 205656
  chr20:708541-708600
  hypo

SEQ ID NO: 327265 - DNA, 51 bp, Homo sapiens; identical to SEQ ID NO: 205657
  chr20:708851-708902
  hypo

SEQ ID NO: 327266 - DNA, 474 bp, Homo sapiens; identical to SEQ ID NO: 56810
  chr20:708944-709418
  hypo

SEQ ID NO: 327267 - DNA, 361 bp, Homo sapiens; identical to SEQ ID NO: 274828
  chr20:745878-746239
  hypo

SEQ ID NO: 327268 - DNA, 137 bp, Homo sapiens; identical to SEQ ID NO: 274829
  chr20:773017-773154
  hypo

SEQ ID NO: 327269 - DNA, 38 bp, Homo sapiens; identical to SEQ ID NO: 274830
  chr20:923177-923215
  hypo

SEQ ID NO: 327270 - DNA, 213 bp, Homo sapiens; identical to SEQ ID NO: 219808
  chr20:926439-926652
  hypo

SEQ ID NO: 327271 - DNA, 40 bp, Homo sapiens; identical to SEQ ID NO: 274832
  chr20:1094603-1094643
  hypo

SEQ ID NO: 327272 - DNA, 36 bp, Homo sapiens; identical to SEQ ID NO: 219809
  chr20:1276610-1276646
  hypo

SEQ ID NO: 327273 - DNA, 154 bp, Homo sapiens; identical to SEQ ID NO: 274834
  chr20:1277696-1277850
  hypo

SEQ ID NO: 327274 - DNA, 192 bp, Homo sapiens; identical to SEQ ID NO: 219810
  chr20:1435437-1435629
  hypo

SEQ ID NO: 327275 - DNA, 248 bp, Homo sapiens; identical to SEQ ID NO: 274837
  chr20:2104364-2104612
  hypo

SEQ ID NO: 327276 - DNA, 487 bp, Homo sapiens; identical to SEQ ID NO: 205664
  chr20:2188036-2188523
  hypo

SEQ ID NO: 327277 - DNA, 304 bp, Homo sapiens; identical to SEQ ID NO: 219812
  chr20:2308758-2309062
  hypo

SEQ ID NO: 327278 - DNA, 124 bp, Homo sapiens; identical to SEQ ID NO: 274840
  chr20:2321102-2321226
  hypo

SEQ ID NO: 327279 - DNA, 255 bp, Homo sapiens; identical to SEQ ID NO: 274841
  chr20:2397896-2398151
  hypo

SEQ ID NO: 327280 - DNA, 236 bp, Homo sapiens; identical to SEQ ID NO: 294500
  chr20:2444432-2444668
  hypo

SEQ ID NO: 327281 - DNA, 33 bp, Homo sapiens; identical to SEQ ID NO: 274843
  chr20:2489142-2489175
  hypo

SEQ ID NO: 327282 - DNA, 106 bp, Homo sapiens; identical to SEQ ID NO: 274844
  chr20:2636506-2636612
  hypo

SEQ ID NO: 327283 - DNA, 68 bp, Homo sapiens; identical to SEQ ID NO: 294507
  chr20:2674067-2674135
  hypo

SEQ ID NO: 327284 - DNA, 207 bp, Homo sapiens; identical to SEQ ID NO: 274845
  chr20:2739580-2739787
  hypo

SEQ ID NO: 327285 - DNA, 219 bp, Homo sapiens; identical to SEQ ID NO: 274846
  chr20:2797288-2797507
  hypo

SEQ ID NO: 327286 - DNA, 139 bp, Homo sapiens; identical to SEQ ID NO: 219814
  chr20:2820587-2820726
  hypo

SEQ ID NO: 327287 - DNA, 143 bp, Homo sapiens; identical to SEQ ID NO: 294514
  chr20:2820861-2821004
  hypo

SEQ ID NO: 327288 - DNA, 31 bp, Homo sapiens; identical to SEQ ID NO: 274848
  chr20:2907825-2907856
  hypo

SEQ ID NO: 327289 - DNA, 178 bp, Homo sapiens; identical to SEQ ID NO: 219815
  chr20:2939675-2939853
  hypo

SEQ ID NO: 327290 - DNA, 129 bp, Homo sapiens; identical to SEQ ID NO: 274850
  chr20:3003332-3003461
  hypo

SEQ ID NO: 327291 - DNA, 68 bp, Homo sapiens; identical to SEQ ID NO: 274851
  chr20:3017788-3017856
  hypo

SEQ ID NO: 327292 - DNA, 66 bp, Homo sapiens; identical to SEQ ID NO: 294519
  chr20:3063059-3063125
  hypo

SEQ ID NO: 327293 - DNA, 94 bp, Homo sapiens; identical to SEQ ID NO: 294520
  chr20:3063391-3063485
  hypo

SEQ ID NO: 327294 - DNA, 45 bp, Homo sapiens; identical to SEQ ID NO: 274852
  chr20:3109208-3109253
  hypo

SEQ ID NO: 327295 - DNA, 260 bp, Homo sapiens; identical to SEQ ID NO: 205673
  chr20:3154656-3154916
  hypo

SEQ ID NO: 327296 - DNA, 96 bp, Homo sapiens; identical to SEQ ID NO: 274853
  chr20:3199943-3200039
  hypo

SEQ ID NO: 327297 - DNA, 265 bp, Homo sapiens; identical to SEQ ID NO: 219817
  chr20:3202153-3202418
  hypo

SEQ ID NO: 327298 - DNA, 32 bp, Homo sapiens; identical to SEQ ID NO: 274855
  chr20:3203126-3203158
  hypo

SEQ ID NO: 327299 - DNA, 135 bp, Homo sapiens; identical to SEQ ID NO: 274856
  chr20:3208371-3208506
  hypo

SEQ ID NO: 327300 - DNA, 41 bp, Homo sapiens; identical to SEQ ID NO: 219818
  chr20:3208779-3208820
  hypo

SEQ ID NO: 327301 - DNA, 116 bp, Homo sapiens; identical to SEQ ID NO: 274858
  chr20:3209206-3209322
  hypo

SEQ ID NO: 327302 - DNA, 75 bp, Homo sapiens; identical to SEQ ID NO: 274859
  chr20:3211428-3211503
  hypo

SEQ ID NO: 327303 - DNA, 34 bp, Homo sapiens; identical to SEQ ID NO: 274860
  chr20:3211814-3211848
  hypo

SEQ ID NO: 327304 - DNA, 154 bp, Homo sapiens; identical to SEQ ID NO: 274861
  chr20:3214742-3214896
  hypo

SEQ ID NO: 327305 - DNA, 539 bp, Homo sapiens; identical to SEQ ID NO: 205674
  chr20:3220010-3220549
  hypo

SEQ ID NO: 327306 - DNA, 145 bp, Homo sapiens; identical to SEQ ID NO: 205675
  chr20:3229108-3229253
  hypo

SEQ ID NO: 327307 - DNA, 154 bp, Homo sapiens; identical to SEQ ID NO: 205676
  chr20:3229326-3229480
  hypo

SEQ ID NO: 327308 - DNA, 31 bp, Homo sapiens; identical to SEQ ID NO: 205677
  chr20:3229526-3229557
  hypo

SEQ ID NO: 327309 - DNA, 158 bp, Homo sapiens; identical to SEQ ID NO: 205678
  chr20:3229659-3229817
  hypo

SEQ ID NO: 327310 - DNA, 436 bp, Homo sapiens; identical to SEQ ID NO: 205679
  chr20:3451349-3451785
  hypo

SEQ ID NO: 327311 - DNA, 41 bp, Homo sapiens; identical to SEQ ID NO: 274862
  chr20:3635386-3635427
  hypo

SEQ ID NO: 327312 - DNA, 221 bp, Homo sapiens; identical to SEQ ID NO: 274863
  chr20:3635666-3635887
  hypo

SEQ ID NO: 327313 - DNA, 209 bp, Homo sapiens; identical to SEQ ID NO: 274864
  chr20:3637823-3638032
  hypo

SEQ ID NO: 327314 - DNA, 300 bp, Homo sapiens
  chr20:3763166-3763466
  hypo
gcacctgaccggaccgctgcctggtttctcatggctttacctaccttataggggctttgtgagcatctaaagcatttagcacagagcaggggccctattagtatcagctggtactatcattaatgagacagtctcagttccagcaagaactgttctttttcgcaggagacaaatggaagtaattcgtcttgttggaacctgcggtgaggtagctgggttaaacaggagcacctgggcaagcaggcaatgctcctcctgctcactcgagagcaggtggggcttccttgtggccttctggtc

SEQ ID NO: 327315 - DNA, 377 bp, Homo sapiens; identical to SEQ ID NO: 274866
  chr20:3781113-3781490
  hypo

SEQ ID NO: 327316 - DNA, 36 bp, Homo sapiens; identical to SEQ ID NO: 274867
  chr20:3797904-3797940
  hypo

SEQ ID NO: 327317 - DNA, 441 bp, Homo sapiens; identical to SEQ ID NO: 274869
  chr20:3838303-3838744
  hypo

SEQ ID NO: 327318 - DNA, 120 bp, Homo sapiens; identical to SEQ ID NO: 274870
  chr20:3857969-3858089
  hypo

SEQ ID NO: 327319 - DNA, 149 bp, Homo sapiens; identical to SEQ ID NO: 274871
  chr20:3909805-3909954
  hypo

SEQ ID NO: 327320 - DNA, 979 bp, Homo sapiens; identical to SEQ ID NO: 294543
  chr20:4129265-4130244
  hypo

SEQ ID NO: 327321 - DNA, 218 bp, Homo sapiens; identical to SEQ ID NO: 274873
  chr20:4270513-4270731
  hypo

SEQ ID NO: 327322 - DNA, 42 bp, Homo sapiens; identical to SEQ ID NO: 274874
  chr20:4786435-4786477
  hypo

SEQ ID NO: 327323 - DNA, 34 bp, Homo sapiens; identical to SEQ ID NO: 274875
  chr20:4786507-4786541
  hypo

SEQ ID NO: 327324 - DNA, 413 bp, Homo sapiens; identical to SEQ ID NO: 205684
  chr20:4804008-4804421
  hypo

SEQ ID NO: 327325 - DNA, 146 bp, Homo sapiens; identical to SEQ ID NO: 274876
  chr20:4869816-4869962
  hypo

SEQ ID NO: 327326 - DNA, 217 bp, Homo sapiens; identical to SEQ ID NO: 274877
  chr20:4951348-4951565
  hypo

SEQ ID NO: 327327 - DNA, 105 bp, Homo sapiens; identical to SEQ ID NO: 219827
  chr20:4966924-4967029
  hypo

SEQ ID NO: 327328 - DNA, 35 bp, Homo sapiens; identical to SEQ ID NO: 274879
  chr20:4968207-4968242
  hypo

SEQ ID NO: 327329 - DNA, 53 bp, Homo sapiens; identical to SEQ ID NO: 219828
  chr20:5072894-5072947
  hypo

SEQ ID NO: 327330 - DNA, 46 bp, Homo sapiens; identical to SEQ ID NO: 219829
  chr20:5178251-5178297
  hypo

SEQ ID NO: 327331 - DNA, 84 bp, Homo sapiens; identical to SEQ ID NO: 205687
  chr20:5297756-5297840
  hypo

SEQ ID NO: 327332 - DNA, 37 bp, Homo sapiens; identical to SEQ ID NO: 274882
  chr20:5593413-5593450
  hypo

SEQ ID NO: 327333 - DNA, 37 bp, Homo sapiens; identical to SEQ ID NO: 219831
  chr20:5610249-5610286
  hypo

SEQ ID NO: 327334 - DNA, 174 bp, Homo sapiens; identical to SEQ ID NO: 219832
  chr20:5610576-5610750
  hypo

SEQ ID NO: 327335 - DNA, 35 bp, Homo sapiens; identical to SEQ ID NO: 274885
  chr20:5649290-5649325
  hypo

SEQ ID NO: 327336 - DNA, 180 bp, Homo sapiens; identical to SEQ ID NO: 219833
  chr20:5734498-5734678
  hypo

SEQ ID NO: 327337 - DNA, 148 bp, Homo sapiens; identical to SEQ ID NO: 219834
  chr20:5762408-5762556
  hypo

SEQ ID NO: 327338 - DNA, 92 bp, Homo sapiens; identical to SEQ ID NO: 219835
  chr20:5765408-5765500
  hypo

SEQ ID NO: 327339 - DNA, 35 bp, Homo sapiens; identical to SEQ ID NO: 219836
  chr20:5801860-5801895
  hypo

SEQ ID NO: 327340 - DNA, 137 bp, Homo sapiens; identical to SEQ ID NO: 274890
  chr20:5812853-5812990
  hypo

SEQ ID NO: 327341 - DNA, 345 bp, Homo sapiens; identical to SEQ ID NO: 294552
  chr20:5892269-5892614
  hypo

SEQ ID NO: 327342 - DNA, 90 bp, Homo sapiens; identical to SEQ ID NO: 274891
  chr20:5934379-5934469
  hypo

SEQ ID NO: 327343 - DNA, 154 bp, Homo sapiens; identical to SEQ ID NO: 219839
  chr20:6021570-6021724
  hypo

SEQ ID NO: 327344 - DNA, 89 bp, Homo sapiens; identical to SEQ ID NO: 219840
  chr20:6022708-6022797
  hypo

SEQ ID NO: 327345 - DNA, 120 bp, Homo sapiens; identical to SEQ ID NO: 219841
  chr20:6302507-6302627
  hypo

SEQ ID NO: 327346 - DNA, 143 bp, Homo sapiens; identical to SEQ ID NO: 274895
  chr20:6663946-6664089
  hypo

SEQ ID NO: 327347 - DNA, 34 bp, Homo sapiens; identical to SEQ ID NO: 274896
  chr20:6732281-6732315
  hypo

SEQ ID NO: 327348 - DNA, 34 bp, Homo sapiens; identical to SEQ ID NO: 274897
  chr20:6732555-6732589
  hypo

SEQ ID NO: 327349 - DNA, 441 bp, Homo sapiens; identical to SEQ ID NO: 294558
  chr20:6747982-6748423
  hypo

SEQ ID NO: 327350 - DNA, 293 bp, Homo sapiens; identical to SEQ ID NO: 294559
  chr20:6748470-6748763
  hypo

SEQ ID NO: 327351 - DNA, 601 bp, Homo sapiens; identical to SEQ ID NO: 294560
  chr20:6749063-6749664
  hypo

SEQ ID NO: 327352 - DNA, 169 bp, Homo sapiens; identical to SEQ ID NO: 274898
  chr20:6759075-6759244
  hypo

SEQ ID NO: 327353 - DNA, 161 bp, Homo sapiens; identical to SEQ ID NO: 274899
  chr20:6837485-6837646
  hypo

SEQ ID NO: 327354 - DNA, 35 bp, Homo sapiens; identical to SEQ ID NO: 219844
  chr20:6861141-6861176
  hypo

SEQ ID NO: 327355 - DNA, 117 bp, Homo sapiens
  chr20:7958448-7958565
  hypo
agaaacacgtcaaagttgtacgagtcacacatatacagtgtcacagtctacataaagctttactgagaataagccatctgaagggcatgtcccgggctgaagcgatcaaagggcttt

SEQ ID NO: 327356 - DNA, 33 bp, Homo sapiens; identical to SEQ ID NO: 274902
  chr20:8731861-8731894
  hypo

SEQ ID NO: 327357 - DNA, 140 bp, Homo sapiens; identical to SEQ ID NO: 294561
  chr20:9048355-9048495
  hypo

SEQ ID NO: 327358 - DNA, 631 bp, Homo sapiens; identical to SEQ ID NO: 294562
  chr20:9048532-9049163
  hypo

SEQ ID NO: 327359 - DNA, 229 bp, Homo sapiens; identical to SEQ ID NO: 294563
  chr20:9049238-9049467
  hypo

SEQ ID NO: 327360 - DNA, 546 bp, Homo sapiens; identical to SEQ ID NO: 294564
  chr20:9049670-9050216
  hypo

SEQ ID NO: 327361 - DNA, 149 bp, Homo sapiens; identical to SEQ ID NO: 274903
  chr20:9546626-9546775
  hypo

SEQ ID NO: 327362 - DNA, 167 bp, Homo sapiens; identical to SEQ ID NO: 219845
  chr20:10515152-10515319
  hypo

SEQ ID NO: 327363 - DNA, 42 bp, Homo sapiens; identical to SEQ ID NO: 219846
  chr20:10571270-10571312
  hypo

SEQ ID NO: 327364 - DNA, 400 bp, Homo sapiens; identical to SEQ ID NO: 294582
  chr20:10653624-10654024
  hypo

SEQ ID NO: 327365 - DNA, 1019 bp, Homo sapiens; identical to SEQ ID NO: 205705
  chr20:10654669-10655688
  hypo

SEQ ID NO: 327366 - DNA, 32 bp, Homo sapiens; identical to SEQ ID NO: 274906
  chr20:10686677-10686709
  hypo

SEQ ID NO: 327367 - DNA, 205 bp, Homo sapiens; identical to SEQ ID NO: 274907
  chr20:10687193-10687398
  hypo

SEQ ID NO: 327368 - DNA, 209 bp, Homo sapiens
  chr20:10774348-10774557
  hypo
cagtggctgcaaagcggctttttgtcctcaaagtttaggctccttgaggccccagaatgacaaaatggagaggcagggccaggggaagagggcctggtgagacccgccctggctcccgccggccttctgccaatgcccgcagatggtgggggcccatggccgggacgcccgctcaggccctggcagcctcatgtgccccagcacctcct

SEQ ID NO: 327369 - DNA, 122 bp, Homo sapiens
  chr20:10774587-10774709
  hypo
gtgagccggctcattaccatttcattgtgtggtggcaattcttacccgcaccatgaatattgactttatgcttgcttttctacctgaattacaggcgggcaggccggcggctcgcattgctt

SEQ ID NO: 327370 - DNA, 42 bp, Homo sapiens; identical to SEQ ID NO: 274909
  chr20:11209700-11209742
  hypo

SEQ ID NO: 327371 - DNA, 181 bp, Homo sapiens; identical to SEQ ID NO: 219849
  chr20:11589406-11589587
  hypo

SEQ ID NO: 327372 - DNA, 67 bp, Homo sapiens; identical to SEQ ID NO: 219850
  chr20:11589753-11589820
  hypo

SEQ ID NO: 327373 - DNA, 1239 bp, Homo sapiens; identical to SEQ ID NO: 205706
  chr20:11871115-11872354
  hypo

SEQ ID NO: 327374 - DNA, 185 bp, Homo sapiens; identical to SEQ ID NO: 274911
  chr20:11903619-11903804
  hypo

SEQ ID NO: 327375 - DNA, 128 bp, Homo sapiens; identical to SEQ ID NO: 274912
  chr20:13279833-13279961
  hypo

SEQ ID NO: 327376 - DNA, 153 bp, Homo sapiens; identical to SEQ ID NO: 219852
  chr20:13417379-13417532
  hypo

SEQ ID NO: 327377 - DNA, 252 bp, Homo sapiens; identical to SEQ ID NO: 274914
  chr20:13881180-13881432
  hypo

SEQ ID NO: 327378 - DNA, 58 bp, Homo sapiens; identical to SEQ ID NO: 219853
  chr20:14812474-14812532
  hypo

SEQ ID NO: 327379 - DNA, 180 bp, Homo sapiens; identical to SEQ ID NO: 274916
  chr20:15011645-15011825
  hypo

SEQ ID NO: 327380 - DNA, 66 bp, Homo sapiens; identical to SEQ ID NO: 274917
  chr20:16431607-16431673
  hypo

SEQ ID NO: 327381 - DNA, 409 bp, Homo sapiens; identical to SEQ ID NO: 274918
  chr20:16510876-16511285
  hypo

SEQ ID NO: 327382 - DNA, 208 bp, Homo sapiens; identical to SEQ ID NO: 219855
  chr20:16543130-16543338
  hypo

SEQ ID NO: 327383 - DNA, 130 bp, Homo sapiens
  chr20:16555178-16555308
  hypo
gccattccaggaagccaagctataatgggagacgcaaggaatggaggcggaactcctgtttttaagtcctagctccaacactagccttgtcagcctgtaattctgaattactgggcgcctctgaggcttc

SEQ ID NO: 327384 - DNA, 207 bp, Homo sapiens; identical to SEQ ID NO: 274922
  chr20:16955527-16955734
  hypo

SEQ ID NO: 327385 - DNA, 38 bp, Homo sapiens; identical to SEQ ID NO: 274923
  chr20:17460141-17460179
  hypo

SEQ ID NO: 327386 - DNA, 266 bp, Homo sapiens; identical to SEQ ID NO: 219857
  chr20:17481118-17481384
  hypo

SEQ ID NO: 327387 - DNA, 384 bp, Homo sapiens; identical to SEQ ID NO: 274925
  chr20:17489362-17489746
  hypo

SEQ ID NO: 327388 - DNA, 42 bp, Homo sapiens; identical to SEQ ID NO: 274926
  chr20:17512774-17512816
  hypo

SEQ ID NO: 327389 - DNA, 478 bp, Homo sapiens; identical to SEQ ID NO: 294597
  chr20:17549573-17550051
  hypo

SEQ ID NO: 327390 - DNA, 64 bp, Homo sapiens; identical to SEQ ID NO: 274927
  chr20:17625935-17625999
  hypo

SEQ ID NO: 327391 - DNA, 187 bp, Homo sapiens; identical to SEQ ID NO: 205715
  chr20:17661564-17661751
  hypo

SEQ ID NO: 327392 - DNA, 383 bp, Homo sapiens; identical to SEQ ID NO: 274928
  chr20:17674235-17674618
  hypo

SEQ ID NO: 327393 - DNA, 31 bp, Homo sapiens; identical to SEQ ID NO: 219860
  chr20:17971881-17971912
  hypo

SEQ ID NO: 327394 - DNA, 36 bp, Homo sapiens; identical to SEQ ID NO: 274930
  chr20:17987479-17987515
  hypo

SEQ ID NO: 327395 - DNA, 87 bp, Homo sapiens; identical to SEQ ID NO: 294608
  chr20:18039560-18039647
  hypo

SEQ ID NO: 327396 - DNA, 91 bp, Homo sapiens; identical to SEQ ID NO: 205721
  chr20:18039936-18040027
  hypo

SEQ ID NO: 327397 - DNA, 36 bp, Homo sapiens; identical to SEQ ID NO: 274931
  chr20:18041677-18041713
  hypo

SEQ ID NO: 327398 - DNA, 107 bp, Homo sapiens; identical to SEQ ID NO: 274932
  chr20:18122802-18122909
  hypo

SEQ ID NO: 327399 - DNA, 71 bp, Homo sapiens
  chr20:18233558-18233629
  hypo
agcctcatcaaacctttgccatgaaagcacaatgccagaaacgcggctgcgtgcctggcttagccatactt

SEQ ID NO: 327400 - DNA, 72 bp, Homo sapiens; identical to SEQ ID NO: 219863
  chr20:18724827-18724899
  hypo

SEQ ID NO: 327401 - DNA, 33 bp, Homo sapiens; identical to SEQ ID NO: 274936
  chr20:19182182-19182215
  hypo

SEQ ID NO: 327402 - DNA, 267 bp, Homo sapiens; identical to SEQ ID NO: 294620
  chr20:19193616-19193883
  hypo

SEQ ID NO: 327403 - DNA, 44 bp, Homo sapiens; identical to SEQ ID NO: 274937
  chr20:19207656-19207700
  hypo

SEQ ID NO: 327404 - DNA, 90 bp, Homo sapiens; identical to SEQ ID NO: 274938
  chr20:19264552-19264642
  hypo

SEQ ID NO: 327405 - DNA, 184 bp, Homo sapiens; identical to SEQ ID NO: 274939
  chr20:19497029-19497213
  hypo

SEQ ID NO: 327406 - DNA, 199 bp, Homo sapiens; identical to SEQ ID NO: 274940
  chr20:19565476-19565675
  hypo

SEQ ID NO: 327407 - DNA, 131 bp, Homo sapiens
  chr20:19673882-19674013
  hypo
ggcctttttcatttttccagcgggtaaactggaaacagtgaaatgggcgttcacctggccgctgagtttcgtcttatacttcactgtacccaactgcaacaagccgcgctgggagaaatggttcatggtga

SEQ ID NO: 327408 - DNA, 49 bp, Homo sapiens
  chr20:19674053-19674102
  hypo
catgatggtgtggatggtgagtgcaatcgggaccccatggcactgttaa

SEQ ID NO: 327409 - DNA, 180 bp, Homo sapiens; identical to SEQ ID NO: 205724
  chr20:19738432-19738612
  hypo

SEQ ID NO: 327410 - DNA, 188 bp, Homo sapiens; identical to SEQ ID NO: 294625
  chr20:19997708-19997896
  hypo

SEQ ID NO: 327411 - DNA, 245 bp, Homo sapiens; identical to SEQ ID NO: 274942
  chr20:19999397-19999642
  hypo

SEQ ID NO: 327412 - DNA, 33 bp, Homo sapiens; identical to SEQ ID NO: 274943
  chr20:20367698-20367731
  hypo

SEQ ID NO: 327413 - DNA, 172 bp, Homo sapiens; identical to SEQ ID NO: 219865
  chr20:20372436-20372608
  hypo

SEQ ID NO: 327414 - DNA, 232 bp, Homo sapiens; identical to SEQ ID NO: 219866
  chr20:20376599-20376831
  hypo

SEQ ID NO: 327415 - DNA, 218 bp, Homo sapiens; identical to SEQ ID NO: 219867
  chr20:20376973-20377191
  hypo

SEQ ID NO: 327416 - DNA, 168 bp, Homo sapiens; identical to SEQ ID NO: 274946
  chr20:20378095-20378263
  hypo

SEQ ID NO: 327417 - DNA, 222 bp, Homo sapiens; identical to SEQ ID NO: 219868
  chr20:20392201-20392423
  hypo

SEQ ID NO: 327418 - DNA, 119 bp, Homo sapiens; identical to SEQ ID NO: 219869
  chr20:20392662-20392781
  hypo

SEQ ID NO: 327419 - DNA, 220 bp, Homo sapiens; identical to SEQ ID NO: 274949
  chr20:20394640-20394860
  hypo

SEQ ID NO: 327420 - DNA, 269 bp, Homo sapiens; identical to SEQ ID NO: 219870
  chr20:20421239-20421508
  hypo

SEQ ID NO: 327421 - DNA, 283 bp, Homo sapiens; identical to SEQ ID NO: 219871
  chr20:20435758-20436041
  hypo

SEQ ID NO: 327422 - DNA, 32 bp, Homo sapiens; identical to SEQ ID NO: 219872
  chr20:21115585-21115617
  hypo

SEQ ID NO: 327423 - DNA, 164 bp, Homo sapiens; identical to SEQ ID NO: 274953
  chr20:21213373-21213537
  hypo

SEQ ID NO: 327424 - DNA, 154 bp, Homo sapiens; identical to SEQ ID NO: 219873
  chr20:21371533-21371687
  hypo

SEQ ID NO: 327425 - DNA, 407 bp, Homo sapiens; identical to SEQ ID NO: 294638
  chr20:21495255-21495662
  hypo

SEQ ID NO: 327426 - DNA, 192 bp, Homo sapiens; identical to SEQ ID NO: 219874
  chr20:21555354-21555546
  hypo

SEQ ID NO: 327427 - DNA, 221 bp, Homo sapiens; identical to SEQ ID NO: 205736
  chr20:21686742-21686963
  hypo

SEQ ID NO: 327428 - DNA, 35 bp, Homo sapiens; identical to SEQ ID NO: 274956
  chr20:22324533-22324568
  hypo

SEQ ID NO: 327429 - DNA, 325 bp, Homo sapiens; identical to SEQ ID NO: 294657
  chr20:22563238-22563563
  hypo

SEQ ID NO: 327430 - DNA, 34 bp, Homo sapiens; identical to SEQ ID NO: 205743
  chr20:22563602-22563636
  hypo

SEQ ID NO: 327431 - DNA, 101 bp, Homo sapiens; identical to SEQ ID NO: 205744
  chr20:22563663-22563764
  hypo

SEQ ID NO: 327432 - DNA, 360 bp, Homo sapiens; identical to SEQ ID NO: 205745
  chr20:22563794-22564154
  hypo

SEQ ID NO: 327433 - DNA, 1028 bp, Homo sapiens; identical to SEQ ID NO: 294662
  chr20:22564265-22565293
  hypo

SEQ ID NO: 327434 - DNA, 31 bp, Homo sapiens; identical to SEQ ID NO: 274957
  chr20:22876830-22876861
  hypo

SEQ ID NO: 327435 - DNA, 31 bp, Homo sapiens; identical to SEQ ID NO: 274958
  chr20:22877101-22877132
  hypo

SEQ ID NO: 327436 - DNA, 299 bp, Homo sapiens; identical to SEQ ID NO: 274959
  chr20:23015050-23015349
  hypo

SEQ ID NO: 327437 - DNA, 301 bp, Homo sapiens; identical to SEQ ID NO: 274960
  chr20:23016426-23016727
  hypo

SEQ ID NO: 327438 - DNA, 123 bp, Homo sapiens; identical to SEQ ID NO: 274961
  chr20:23016803-23016926
  hypo

SEQ ID NO: 327439 - DNA, 79 bp, Homo sapiens; identical to SEQ ID NO: 219881
  chr20:23092302-23092381
  hypo

SEQ ID NO: 327440 - DNA, 120 bp, Homo sapiens; identical to SEQ ID NO: 219882
  chr20:23092426-23092546
  hypo

SEQ ID NO: 327441 - DNA, 215 bp, Homo sapiens
  chr20:23117579-23117794
  hypo
cagcagcagctgtggcctctcgcgggcaggcgggaaaccgacaccgttcactggtaggtattctgctggttaggcgtgagtcagcgcctggcccagattccaccctggaggggctgcaccagggcgtgaactctcggggcgtggctccccaaccctctttagaaacattaccttgaacaccatagctcagagcagtaatcaccagtccactgagg

SEQ ID NO: 327442 - DNA, 166 bp, Homo sapiens; identical to SEQ ID NO: 274964
  chr20:23137428-23137594
  hypo

SEQ ID NO: 327443 - DNA, 79 bp, Homo sapiens; identical to SEQ ID NO: 219883
  chr20:23138537-23138616
  hypo

SEQ ID NO: 327444 - DNA, 42 bp, Homo sapiens; identical to SEQ ID NO: 274966
  chr20:23283473-23283515
  hypo

SEQ ID NO: 327445 - DNA, 91 bp, Homo sapiens; identical to SEQ ID NO: 274967
  chr20:23336930-23337021
  hypo

SEQ ID NO: 327446 - DNA, 155 bp, Homo sapiens; identical to SEQ ID NO: 274968
  chr20:23337306-23337461
  hypo

SEQ ID NO: 327447 - DNA, 383 bp, Homo sapiens; identical to SEQ ID NO: 274969
  chr20:23346218-23346601
  hypo

SEQ ID NO: 327448 - DNA, 157 bp, Homo sapiens; identical to SEQ ID NO: 274970
  chr20:23380018-23380175
  hypo

SEQ ID NO: 327449 - DNA, 42 bp, Homo sapiens; identical to SEQ ID NO: 274971
  chr20:23426501-23426543
  hypo

SEQ ID NO: 327450 - DNA, 276 bp, Homo sapiens; identical to SEQ ID NO: 294669
  chr20:23617972-23618248
  hypo

SEQ ID NO: 327451 - DNA, 82 bp, Homo sapiens; identical to SEQ ID NO: 294670
  chr20:23618645-23618727
  hypo

SEQ ID NO: 327452 - DNA, 89 bp, Homo sapiens; identical to SEQ ID NO: 274972
  chr20:23669395-23669484
  hypo

SEQ ID NO: 327453 - DNA, 112 bp, Homo sapiens; identical to SEQ ID NO: 219885
  chr20:23969320-23969432
  hypo

SEQ ID NO: 327454 - DNA, 240 bp, Homo sapiens; identical to SEQ ID NO: 274974
  chr20:24188722-24188962
  hypo

SEQ ID NO: 327455 - DNA, 258 bp, Homo sapiens; identical to SEQ ID NO: 274975
  chr20:24189022-24189280
  hypo

SEQ ID NO: 327456 - DNA, 76 bp, Homo sapiens; identical to SEQ ID NO: 274976
  chr20:24236950-24237026
  hypo

SEQ ID NO: 327457 - DNA, 43 bp, Homo sapiens; identical to SEQ ID NO: 274978
  chr20:24484894-24484937
  hypo

SEQ ID NO: 327458 - DNA, 38 bp, Homo sapiens; identical to SEQ ID NO: 219886
  chr20:24524102-24524140
  hypo

SEQ ID NO: 327459 - DNA, 137 bp, Homo sapiens
  chr20:24646805-24646942
  hypo
cagctaccccgcagcaatacgcactcttgggacctcgctgatctaggatggggaggcaggccaccgcccctcccaagactcctcaagaaagagccccgcggttgctccggaaactcgaggcactgcagctatgggca

SEQ ID NO: 327460 - DNA, 406 bp, Homo sapiens; identical to SEQ ID NO: 274982
  chr20:24944573-24944979
  hypo

SEQ ID NO: 327461 - DNA, 173 bp, Homo sapiens; identical to SEQ ID NO: 219888
  chr20:24947029-24947202
  hypo

SEQ ID NO: 327462 - DNA, 37 bp, Homo sapiens; identical to SEQ ID NO: 219889
  chr20:24950217-24950254
  hypo

SEQ ID NO: 327463 - DNA, 109 bp, Homo sapiens; identical to SEQ ID NO: 274985
  chr20:24997316-24997425
  hypo

SEQ ID NO: 327464 - DNA, 239 bp, Homo sapiens; identical to SEQ ID NO: 274986
  chr20:25000500-25000739
  hypo

SEQ ID NO: 327465 - DNA, 465 bp, Homo sapiens; identical to SEQ ID NO: 274987
  chr20:25012785-25013250
  hypo

SEQ ID NO: 327466 - DNA, 281 bp, Homo sapiens; identical to SEQ ID NO: 274988
  chr20:25028526-25028807
  hypo

SEQ ID NO: 327467 - DNA, 55 bp, Homo sapiens; identical to SEQ ID NO: 274989
  chr20:25030308-25030363
  hypo

SEQ ID NO: 327468 - DNA, 51 bp, Homo sapiens; identical to SEQ ID NO: 274990
  chr20:25039530-25039581
  hypo

SEQ ID NO: 327469 - DNA, 212 bp, Homo sapiens; identical to SEQ ID NO: 274991
  chr20:25040600-25040812
  hypo

SEQ ID NO: 327470 - DNA, 488 bp, Homo sapiens; identical to SEQ ID NO: 274992
  chr20:25187625-25188113
  hypo

SEQ ID NO: 327471 - DNA, 127 bp, Homo sapiens; identical to SEQ ID NO: 274993
  chr20:25202580-25202707
  hypo

SEQ ID NO: 327472 - DNA, 87 bp, Homo sapiens; identical to SEQ ID NO: 219892
  chr20:25223054-25223141
  hypo

SEQ ID NO: 327473 - DNA, 331 bp, Homo sapiens; identical to SEQ ID NO: 274996
  chr20:25231671-25232002
  hypo

SEQ ID NO: 327474 - DNA, 79 bp, Homo sapiens; identical to SEQ ID NO: 274997
  chr20:25236291-25236370
  hypo

SEQ ID NO: 327475 - DNA, 103 bp, Homo sapiens; identical to SEQ ID NO: 274998
  chr20:25240119-25240222
  hypo

SEQ ID NO: 327476 - DNA, 148 bp, Homo sapiens
  chr20:25251560-25251708
  hypo
tggacattgatttgtatgcagccagctgccactgctgtgccggcttcactcaggagtagggtgaggcttgatgtgttgatgtgtccctgctgtcagaacagcctgggtttcagtggaacgtgcaagggattggcgaggcctcagcctc

SEQ ID NO: 327477 - DNA, 224 bp, Homo sapiens; identical to SEQ ID NO: 275000
  chr20:25254265-25254489
  hypo

SEQ ID NO: 327478 - DNA, 43 bp, Homo sapiens; identical to SEQ ID NO: 275001
  chr20:25254609-25254652
  hypo

SEQ ID NO: 327479 - DNA, 196 bp, Homo sapiens; identical to SEQ ID NO: 275002
  chr20:25255135-25255331
  hypo

SEQ ID NO: 327480 - DNA, 33 bp, Homo sapiens; identical to SEQ ID NO: 219893
  chr20:25278858-25278891
  hypo

SEQ ID NO: 327481 - DNA, 33 bp, Homo sapiens; identical to SEQ ID NO: 219894
  chr20:25284746-25284779
  hypo

SEQ ID NO: 327482 - DNA, 163 bp, Homo sapiens; identical to SEQ ID NO: 275005
  chr20:25290092-25290255
  hypo

SEQ ID NO: 327483 - DNA, 170 bp, Homo sapiens; identical to SEQ ID NO: 275006
  chr20:25300608-25300778
  hypo

SEQ ID NO: 327484 - DNA, 189 bp, Homo sapiens; identical to SEQ ID NO: 275007
  chr20:25310088-25310277
  hypo

SEQ ID NO: 327485 - DNA, 242 bp, Homo sapiens; identical to SEQ ID NO: 219895
  chr20:25320327-25320569
  hypo

SEQ ID NO: 327486 - DNA, 47 bp, Homo sapiens; identical to SEQ ID NO: 275009
  chr20:25322420-25322467
  hypo

SEQ ID NO: 327487 - DNA, 88 bp, Homo sapiens; identical to SEQ ID NO: 219896
  chr20:25344156-25344244
  hypo

SEQ ID NO: 327488 - DNA, 199 bp, Homo sapiens; identical to SEQ ID NO: 275011
  chr20:25377963-25378162
  hypo

SEQ ID NO: 327489 - DNA, 131 bp, Homo sapiens; identical to SEQ ID NO: 275012
  chr20:25434107-25434238
  hypo

SEQ ID NO: 327490 - DNA, 172 bp, Homo sapiens; identical to SEQ ID NO: 275013
  chr20:25459745-25459917
  hypo

SEQ ID NO: 327491 - DNA, 166 bp, Homo sapiens; identical to SEQ ID NO: 275014
  chr20:25470595-25470761
  hypo

SEQ ID NO: 327492 - DNA, 38 bp, Homo sapiens; identical to SEQ ID NO: 219897
  chr20:25605596-25605634
  hypo

SEQ ID NO: 327493 - DNA, 38 bp, Homo sapiens; identical to SEQ ID NO: 275016
  chr20:25605874-25605912
  hypo

SEQ ID NO: 327494 - DNA, 196 bp, Homo sapiens; identical to SEQ ID NO: 219898
  chr20:25971830-25972026
  hypo

SEQ ID NO: 327495 - DNA, 218 bp, Homo sapiens; identical to SEQ ID NO: 275018
  chr20:25972702-25972920
  hypo

SEQ ID NO: 327496 - DNA, 35 bp, Homo sapiens; identical to SEQ ID NO: 275019
  chr20:26062267-26062302
  hypo

SEQ ID NO: 327497 - DNA, 126 bp, Homo sapiens; identical to SEQ ID NO: 294682
  chr20:26190361-26190487
  hypo

SEQ ID NO: 327498 - DNA, 127 bp, Homo sapiens
  chr20:29873935-29874062
  hypo
ttccccgcttctgcacgaaccacagcattggcaacacctgctctgtggggctatcacacacaaaccccacagaggcctggtacacttcgatggcttcccccagggactgctgcgccgctgccccagt

SEQ ID NO: 327499 - DNA, 180 bp, Homo sapiens; identical to SEQ ID NO: 219899
  chr20:30134131-30134311
  hypo

SEQ ID NO: 327500 - DNA, 154 bp, Homo sapiens; identical to SEQ ID NO: 219900
  chr20:30139496-30139650
  hypo

SEQ ID NO: 327501 - DNA, 92 bp, Homo sapiens
  chr20:30153987-30154079
  hypo
ttcaccagcctgtgtcctctcatagcctgccctcctatacctggtccccgcctgcatcggttttcctgtcctggtggcgctggccaagggag

SEQ ID NO: 327502 - DNA, 35 bp, Homo sapiens; identical to SEQ ID NO: 275024
  chr20:30174477-30174512
  hypo

SEQ ID NO: 327503 - DNA, 77 bp, Homo sapiens; identical to SEQ ID NO: 275025
  chr20:30181219-30181296
  hypo

SEQ ID NO: 327504 - DNA, 1022 bp, Homo sapiens; identical to SEQ ID NO: 205755
  chr20:30192834-30193856
  hypo

SEQ ID NO: 327505 - DNA, 203 bp, Homo sapiens; identical to SEQ ID NO: 205756
  chr20:30193992-30194195
  hypo

SEQ ID NO: 327506 - DNA, 39 bp, Homo sapiens; identical to SEQ ID NO: 275027
  chr20:30306171-30306210
  hypo

SEQ ID NO: 327507 - DNA, 35 bp, Homo sapiens; identical to SEQ ID NO: 219903
  chr20:30334935-30334970
  hypo

SEQ ID NO: 327508 - DNA, 41 bp, Homo sapiens; identical to SEQ ID NO: 219904
  chr20:30468561-30468602
  hypo

SEQ ID NO: 327509 - DNA, 35 bp, Homo sapiens; identical to SEQ ID NO: 275030
  chr20:30521657-30521692
  hypo

SEQ ID NO: 327510 - DNA, 495 bp, Homo sapiens; identical to SEQ ID NO: 205761
  chr20:30555391-30555886
  hypo

SEQ ID NO: 327511 - DNA, 269 bp, Homo sapiens; identical to SEQ ID NO: 205762
  chr20:30556403-30556672
  hypo

SEQ ID NO: 327512 - DNA, 43 bp, Homo sapiens; identical to SEQ ID NO: 294694
  chr20:30583025-30583068
  hypo

SEQ ID NO: 327513 - DNA, 553 bp, Homo sapiens
  chr20:30584500-30585053
  hypo
ttttggcatcttcatcgtggcccactggtgcgtcatgaccttctgggtcatccaaggggagacggacttctgcatgtccaagtgggaggagatcatctacaacatggtcgtgggcatcatctacatcttctgctggttcaacgtcaaggagggccgcagccgccgccgcatgaccctctaccactgcatcgtcctgctggagaacgccgcgctcaccggcttctggtactccagccgcaacttctcaaccgacttctactcgctcatcatggtctgcgtagtggcctccagctttgcgctgggcatattcttcatgtgtgtctactactgtctcctgcaccccaatgggcccatgctgggtccccaggcacctggttgcatcttccgtaaggcctcagagccctgtggcccacccgctgacgccatcacgagtccccccaggtccctgccaaggactacaggtgctgagcgggatggggcctcggcgggagagcgtgcagggacccccaccccacctgtcttccaggtgcggcctggcttgcctcccacacca

SEQ ID NO: 327514 - DNA, 120 bp, Homo sapiens
  chr20:30585104-30585224
  hypo
cgcaagaagtacccggcctgggatgctcattttattgaccgccggctccggaagaccatcctggcactggagtactcctcacctgccacgccccggttgcagtaccggagtgtggggact

SEQ ID NO: 327515 - DNA, 40 bp, Homo sapiens; identical to SEQ ID NO: 219907
  chr20:30713763-30713803
  hypo

SEQ ID NO: 327516 - DNA, 188 bp, Homo sapiens; identical to SEQ ID NO: 219908
  chr20:30720874-30721062
  hypo

SEQ ID NO: 327517 - DNA, 100 bp, Homo sapiens; identical to SEQ ID NO: 275034
  chr20:30753240-30753340
  hypo

SEQ ID NO: 327518 - DNA, 87 bp, Homo sapiens
  chr20:30770377-30770464
  hypo
tctgtagtaggagtcgggaatgggctccgggacatttattgcctcaattccaagactgcctggaaaagggcggtactgccttgggca

SEQ ID NO: 327519 - DNA, 213 bp, Homo sapiens
  chr20:30770494-30770707
  hypo
ccccagaagggccttcagcaggcatctgatgccttcatacatgctgtcgcctcgcccaccaggaagaccctcctgaacctcaaagatgtgacacatgcattcattcatttcacaaagaactacttgtgccaggtgctgctctaggtaagggggatttagcaatgaataaaacaaagtgcctctgggtgtggcggctcacgcctgtaatcccag

SEQ ID NO: 327520 - DNA, 270 bp, Homo sapiens; identical to SEQ ID NO: 275036
  chr20:30772697-30772967
  hypo

SEQ ID NO: 327521 - DNA, 289 bp, Homo sapiens; identical to SEQ ID NO: 275037
  chr20:30810304-30810593
  hypo

SEQ ID NO: 327522 - DNA, 31 bp, Homo sapiens
  chr20:30864850-30864881
  hypo
gagccaccgcacctggccgcatgatctgttt

SEQ ID NO: 327523 - DNA, 171 bp, Homo sapiens; identical to SEQ ID NO: 275039
  chr20:30915287-30915458
  hypo

SEQ ID NO: 327524 - DNA, 37 bp, Homo sapiens; identical to SEQ ID NO: 219909
  chr20:30935781-30935818
  hypo

SEQ ID NO: 327525 - DNA, 96 bp, Homo sapiens; identical to SEQ ID NO: 205763
  chr20:30946058-30946154
  hypo

SEQ ID NO: 327526 - DNA, 112 bp, Homo sapiens; identical to SEQ ID NO: 205764
  chr20:30946218-30946330
  hypo

SEQ ID NO: 327527 - DNA, 290 bp, Homo sapiens; identical to SEQ ID NO: 12906
  chr20:30946345-30946635
  hypo

SEQ ID NO: 327528 - DNA, 83 bp, Homo sapiens; identical to SEQ ID NO: 205766
  chr20:30954186-30954269
  hypo

SEQ ID NO: 327529 - DNA, 109 bp, Homo sapiens; identical to SEQ ID NO: 205767
  chr20:30956817-30956926
  hypo

SEQ ID NO: 327530 - DNA, 386 bp, Homo sapiens; identical to SEQ ID NO: 205768
  chr20:30959966-30960352
  hypo

SEQ ID NO: 327531 - DNA, 50 bp, Homo sapiens; identical to SEQ ID NO: 275041
  chr20:30996046-30996096
  hypo

SEQ ID NO: 327532 - DNA, 295 bp, Homo sapiens; identical to SEQ ID NO: 205769
  chr20:31015930-31016225
  hypo

SEQ ID NO: 327533 - DNA, 104 bp, Homo sapiens; identical to SEQ ID NO: 205770
  chr20:31017140-31017244
  hypo

SEQ ID NO: 327534 - DNA, 153 bp, Homo sapiens; identical to SEQ ID NO: 205771
  chr20:31017703-31017856
  hypo

SEQ ID NO: 327535 - DNA, 359 bp, Homo sapiens; identical to SEQ ID NO: 205772
  chr20:31019123-31019482
  hypo

SEQ ID NO: 327536 - DNA, 106 bp, Homo sapiens; identical to SEQ ID NO: 205773
  chr20:31020682-31020788
  hypo

SEQ ID NO: 327537 - DNA, 634 bp, Homo sapiens; identical to SEQ ID NO: 205774
  chr20:31021086-31021720
  hypo

SEQ ID NO: 327538 - DNA, 4888 bp, Homo sapiens; identical to SEQ ID NO: 205775
  chr20:31022234-31027122
  hypo

SEQ ID NO: 327539 - DNA, 357 bp, Homo sapiens; identical to SEQ ID NO: 275042
  chr20:31051294-31051651
  hypo

SEQ ID NO: 327540 - DNA, 64 bp, Homo sapiens; identical to SEQ ID NO: 275043
  chr20:31081013-31081077
  hypo

SEQ ID NO: 327541 - DNA, 146 bp, Homo sapiens
  chr20:31108613-31108759
  hypo
ctttgggttccaggccattggagttaaagtgcatcctcttctgacactccgtacagctcatcaggaaccgggtcacggcctctctcgggaggaaggcataggtctctgcgatctggaggagagaagagcttcgcttgttatatgga

SEQ ID NO: 327542 - DNA, 88 bp, Homo sapiens; identical to SEQ ID NO: 219923
  chr20:31115869-31115957
  hypo

SEQ ID NO: 327543 - DNA, 159 bp, Homo sapiens
  chr20:31144446-31144605
  hypo
tccaggcatatcagcgaaggcatctggtgacacaagtgtcctcagccccaggggaaactgctctacctcctccattcattccactgggcaggtcgggtctgagccgaggtgggcctggcagaggtcctgggcctctgccactgagagcacgtgacctgc

SEQ ID NO: 327544 - DNA, 102 bp, Homo sapiens; identical to SEQ ID NO: 98847
  chr20:31144702-31144804
  hypo

SEQ ID NO: 327545 - DNA, 56 bp, Homo sapiens; identical to SEQ ID NO: 219924
  chr20:31146689-31146745
  hypo

SEQ ID NO: 327546 - DNA, 111 bp, Homo sapiens
  chr20:31152007-31152118
  hypo
agaagagaccattaacgtggccctgtcatccttcagagcactgcaggggaggtgtacagggagctaacgattgaaaaagcggatgattcccacgaacgttccagcatcttc

SEQ ID NO: 327547 - DNA, 106 bp, Homo sapiens; identical to SEQ ID NO: 275050
  chr20:31196057-31196163
  hypo

SEQ ID NO: 327548 - DNA, 347 bp, Homo sapiens; identical to SEQ ID NO: 275051
  chr20:31213874-31214221
  hypo

SEQ ID NO: 327549 - DNA, 31 bp, Homo sapiens; identical to SEQ ID NO: 275052
  chr20:31279910-31279941
  hypo

SEQ ID NO: 327550 - DNA, 35 bp, Homo sapiens; identical to SEQ ID NO: 219925
  chr20:31332339-31332374
  hypo

SEQ ID NO: 327551 - DNA, 34 bp, Homo sapiens; identical to SEQ ID NO: 275054
  chr20:31332614-31332648
  hypo

SEQ ID NO: 327552 - DNA, 180 bp, Homo sapiens; identical to SEQ ID NO: 275055
  chr20:31334705-31334885
  hypo

SEQ ID NO: 327553 - DNA, 588 bp, Homo sapiens; identical to SEQ ID NO: 294717
  chr20:31350975-31351563
  hypo

SEQ ID NO: 327554 - DNA, 68 bp, Homo sapiens; identical to SEQ ID NO: 219927
  chr20:31367769-31367837
  hypo

SEQ ID NO: 327555 - DNA, 59 bp, Homo sapiens; identical to SEQ ID NO: 275057
  chr20:31392269-31392328
  hypo

SEQ ID NO: 327556 - DNA, 88 bp, Homo sapiens; identical to SEQ ID NO: 275058
  chr20:31556103-31556191
  hypo

SEQ ID NO: 327557 - DNA, 305 bp, Homo sapiens; identical to SEQ ID NO: 275059
  chr20:31647792-31648097
  hypo

SEQ ID NO: 327558 - DNA, 81 bp, Homo sapiens; identical to SEQ ID NO: 219928
  chr20:31900463-31900544
  hypo

SEQ ID NO: 327559 - DNA, 253 bp, Homo sapiens; identical to SEQ ID NO: 275061
  chr20:31936115-31936368
  hypo

SEQ ID NO: 327560 - DNA, 37 bp, Homo sapiens; identical to SEQ ID NO: 219929
  chr20:32151830-32151867
  hypo

SEQ ID NO: 327561 - DNA, 173 bp, Homo sapiens; identical to SEQ ID NO: 275063
  chr20:32250055-32250228
  hypo

SEQ ID NO: 327562 - DNA, 258 bp, Homo sapiens; identical to SEQ ID NO: 275064
  chr20:32266840-32267098
  hypo

SEQ ID NO: 327563 - DNA, 42 bp, Homo sapiens; identical to SEQ ID NO: 275065
  chr20:32270661-32270703
  hypo

SEQ ID NO: 327564 - DNA, 210 bp, Homo sapiens; identical to SEQ ID NO: 275066
  chr20:32284902-32285112
  hypo

SEQ ID NO: 327565 - DNA, 160 bp, Homo sapiens; identical to SEQ ID NO: 219931
  chr20:32301637-32301797
  hypo

SEQ ID NO: 327566 - DNA, 100 bp, Homo sapiens; identical to SEQ ID NO: 219932
  chr20:32311064-32311164
  hypo

SEQ ID NO: 327567 - DNA, 248 bp, Homo sapiens; identical to SEQ ID NO: 275069
  chr20:32332873-32333121
  hypo

SEQ ID NO: 327568 - DNA, 164 bp, Homo sapiens; identical to SEQ ID NO: 219933
  chr20:32370539-32370703
  hypo

SEQ ID NO: 327569 - DNA, 200 bp, Homo sapiens; identical to SEQ ID NO: 219934
  chr20:32376690-32376890
  hypo

SEQ ID NO: 327570 - DNA, 427 bp, Homo sapiens; identical to SEQ ID NO: 219935
  chr20:32378463-32378890
  hypo

SEQ ID NO: 327571 - DNA, 342 bp, Homo sapiens
  chr20:32378966-32379308
  hypo
aaggacaaggacctgcaaacccggcggcccccccagaggagggcagccccccgcagttgcggcagtggtgggcgcaaggtgctgacccccttgcctgacccgctggggctggaggagctgaaggacacaggggctgggctggtgcccgaggctgtccccggcaagccgcccttcgcagagccggacgcggtgctgtccatcgttgtgggtggtgcggtgggcgcggaaactgagctggtggtacctggacacgctgaggggctgggctccaacctggctctggcggagctgcaggctggggccgagggcccatgtgccatgctcgctgtgcccgtctacatc

SEQ ID NO: 327572 - DNA, 93 bp, Homo sapiens
  chr20:32379338-32379431
  hypo
tgtttcctgggcaggcctgatgctcctgtttgggtccagggcccctgggggcagaccggtgatccttaccagtggaagcgagccatcgagcca

SEQ ID NO: 327573 - DNA, 35 bp, Homo sapiens; identical to SEQ ID NO: 219937
  chr20:32381768-32381803
  hypo

SEQ ID NO: 327574 - DNA, 214 bp, Homo sapiens; identical to SEQ ID NO: 219938
  chr20:32413015-32413229
  hypo

SEQ ID NO: 327575 - DNA, 255 bp, Homo sapiens; identical to SEQ ID NO: 219939
  chr20:32436253-32436508
  hypo

SEQ ID NO: 327576 - DNA, 223 bp, Homo sapiens; identical to SEQ ID NO: 219940
  chr20:32441362-32441585
  hypo

SEQ ID NO: 327577 - DNA, 31 bp, Homo sapiens; identical to SEQ ID NO: 219941
  chr20:32584928-32584959
  hypo

SEQ ID NO: 327578 - DNA, 35 bp, Homo sapiens; identical to SEQ ID NO: 275079
  chr20:32630021-32630056
  hypo

SEQ ID NO: 327579 - DNA, 99 bp, Homo sapiens; identical to SEQ ID NO: 275080
  chr20:32669099-32669198
  hypo

SEQ ID NO: 327580 - DNA, 51 bp, Homo sapiens; identical to SEQ ID NO: 219942
  chr20:32677610-32677661
  hypo

SEQ ID NO: 327581 - DNA, 213 bp, Homo sapiens
  chr20:32677691-32677904
  hypo
gtgacaagtgacatattcctctgcaaataaagcaacacacagaattacctggtggctgcagtgaggtagagaagtttctgccttcttaaatacatctacaaagaactccacaagcccaggctgagaatttagctgggcacccagaccagggaagcgcagctattcgaggggtaagaaaacacaagctgtctgctgtggcgcttccggcactaa

SEQ ID NO: 327582 - DNA, 42 bp, Homo sapiens; identical to SEQ ID NO: 275083
  chr20:32772602-32772644
  hypo

SEQ ID NO: 327583 - DNA, 60 bp, Homo sapiens; identical to SEQ ID NO: 275084
  chr20:32772952-32773012
  hypo

SEQ ID NO: 327584 - DNA, 100 bp, Homo sapiens; identical to SEQ ID NO: 219944
  chr20:33085651-33085751
  hypo

SEQ ID NO: 327585 - DNA, 139 bp, Homo sapiens; identical to SEQ ID NO: 219945
  chr20:33112448-33112587
  hypo

SEQ ID NO: 327586 - DNA, 229 bp, Homo sapiens
  chr20:33131642-33131871
  hypo
cgtttcagggaagtggcagcttctcgggaggtgccgcagctgccatctcccgtcagcactcatgcctccgcctcagccctggccacggctccctggaattctgatcctcctctgtgagctggtattgctgtttctccaaaaattaaaaatgctcaaaggattataggttttctcctctttcgtatgtttggctctgagacactgcatgttggcacgtttttcattgaga

SEQ ID NO: 327587 - DNA, 155 bp, Homo sapiens; identical to SEQ ID NO: 219946
  chr20:33183817-33183972
  hypo

SEQ ID NO: 327588 - DNA, 89 bp, Homo sapiens; identical to SEQ ID NO: 275091
  chr20:33265773-33265862
  hypo

SEQ ID NO: 327589 - DNA, 121 bp, Homo sapiens; identical to SEQ ID NO: 275092
  chr20:33265892-33266013
  hypo

SEQ ID NO: 327590 - DNA, 42 bp, Homo sapiens; identical to SEQ ID NO: 275093
  chr20:33410314-33410356
  hypo

SEQ ID NO: 327591 - DNA, 134 bp, Homo sapiens; identical to SEQ ID NO: 275094
  chr20:33447337-33447471
  hypo

SEQ ID NO: 327592 - DNA, 483 bp, Homo sapiens; identical to SEQ ID NO: 205787
  chr20:33464343-33464826
  hypo

SEQ ID NO: 327593 - DNA, 76 bp, Homo sapiens; identical to SEQ ID NO: 275096
  chr20:33544843-33544919
  hypo

SEQ ID NO: 327594 - DNA, 194 bp, Homo sapiens; identical to SEQ ID NO: 275098
  chr20:33572633-33572827
  hypo

SEQ ID NO: 327595 - DNA, 80 bp, Homo sapiens; identical to SEQ ID NO: 275099
  chr20:33579658-33579738
  hypo

SEQ ID NO: 327596 - DNA, 34 bp, Homo sapiens; identical to SEQ ID NO: 275100
  chr20:33696514-33696548
  hypo

SEQ ID NO: 327597 - DNA, 81 bp, Homo sapiens; identical to SEQ ID NO: 275101
  chr20:33803020-33803101
  hypo

SEQ ID NO: 327598 - DNA, 118 bp, Homo sapiens
  chr20:33834616-33834734
  hypo
atctttttctttcccgtgtctttcagaactggttaaagtcctatggctatctgcttccctatgactcacgggcatctgcgctgcactcagcgaaggccttgcagtcggcagtctccac

SEQ ID NO: 327599 - DNA, 102 bp, Homo sapiens
  chr20:33854997-33855099
  hypo
ctctctccaggacccccagccgagcctctggagcccacaaggccactccctacactccccgtccgcaggatccactcaccatcggagaggaaacacgagcgc

SEQ ID NO: 327600 - DNA, 85 bp, Homo sapiens
  chr20:33855140-33855225
  hypo
cacaccaggcaccaaacccaacatctgtgacggcaacttcaacacagtggccctcttccggggcgagatgtttgtctttaaggta

SEQ ID NO: 327601 - DNA, 117 bp, Homo sapiens; identical to SEQ ID NO: 275104
  chr20:33864189-33864306
  hypo

SEQ ID NO: 327602 - DNA, 111 bp, Homo sapiens; identical to SEQ ID NO: 275105
  chr20:33876236-33876347
  hypo

SEQ ID NO: 327603 - DNA, 184 bp, Homo sapiens; identical to SEQ ID NO: 219948
  chr20:33879776-33879960
  hypo

SEQ ID NO: 327604 - DNA, 145 bp, Homo sapiens
  chr20:33880280-33880425
  hypo
cccctggcctctggaacctgtcaggtcagccccacctgtctgcctgtgttgggactcgcctgcccagggaagcggcagtgccaggccctcggtgcacactcctgcctccctctcttcctcccagcaacgccgccccatccccacc

SEQ ID NO: 327605 - DNA, 191 bp, Homo sapiens; identical to SEQ ID NO: 219950
  chr20:34055202-34055393
  hypo

SEQ ID NO: 327606 - DNA, 49 bp, Homo sapiens; identical to SEQ ID NO: 275109
  chr20:34092136-34092185
  hypo

SEQ ID NO: 327607 - DNA, 43 bp, Homo sapiens; identical to SEQ ID NO: 275110
  chr20:34110881-34110924
  hypo

SEQ ID NO: 327608 - DNA, 86 bp, Homo sapiens
  chr20:34147085-34147171
  hypo
ctggcctctgcccacgggcacccaccgtgaggatgtacacattgccacccatgtctgtgaactccaggtcttctggccggcccttc

SEQ ID NO: 327609 - DNA, 128 bp, Homo sapiens
  chr20:34147230-34147358
  hypo
gtcctctgcctccttcagcttcactaccggccaccagcccctcaggcggcggcagcgaaacagattgcacctcggcccggccccattgcgggccagctgcacagagcagagctcggggccccgggccc

SEQ ID NO: 327610 - DNA, 38 bp, Homo sapiens
  chr20:34147940-34147978
  hypo
gcactgcaggctgccggaactccgcctcctccagggca

SEQ ID NO: 327611 - DNA, 96 bp, Homo sapiens; identical to SEQ ID NO: 275113
  chr20:34166313-34166409
  hypo

SEQ ID NO: 327612 - DNA, 171 bp, Homo sapiens; identical to SEQ ID NO: 275114
  chr20:34171852-34172023
  hypo

SEQ ID NO: 327613 - DNA, 36 bp, Homo sapiens; identical to SEQ ID NO: 219951
  chr20:34176526-34176562
  hypo

SEQ ID NO: 327614 - DNA, 73 bp, Homo sapiens; identical to SEQ ID NO: 275116
  chr20:34195358-34195431
  hypo

SEQ ID NO: 327615 - DNA, 44 bp, Homo sapiens; identical to SEQ ID NO: 275117
  chr20:34195461-34195505
  hypo

SEQ ID NO: 327616 - DNA, 83 bp, Homo sapiens; identical to SEQ ID NO: 219952
  chr20:34200333-34200416
  hypo

SEQ ID NO: 327617 - DNA, 469 bp, Homo sapiens; identical to SEQ ID NO: 205791
  chr20:34359742-34360211
  hypo

SEQ ID NO: 327618 - DNA, 40 bp, Homo sapiens; identical to SEQ ID NO: 275120
  chr20:34472079-34472119
  hypo

SEQ ID NO: 327619 - DNA, 550 bp, Homo sapiens; identical to SEQ ID NO: 226133
  chr20:34652340-34652890
  hypo

SEQ ID NO: 327620 - DNA, 94 bp, Homo sapiens; identical to SEQ ID NO: 275121
  chr20:34655043-34655137
  hypo

SEQ ID NO: 327621 - DNA, 86 bp, Homo sapiens; identical to SEQ ID NO: 219954
  chr20:34670678-34670764
  hypo

SEQ ID NO: 327622 - DNA, 237 bp, Homo sapiens; identical to SEQ ID NO: 205792
  chr20:34680127-34680364
  hypo

SEQ ID NO: 327623 - DNA, 987 bp, Homo sapiens; identical to SEQ ID NO: 294742
  chr20:34680573-34681560
  hypo

SEQ ID NO: 327624 - DNA, 82 bp, Homo sapiens; identical to SEQ ID NO: 219957
  chr20:35088673-35088755
  hypo

SEQ ID NO: 327625 - DNA, 36 bp, Homo sapiens; identical to SEQ ID NO: 275125
  chr20:35145389-35145425
  hypo

SEQ ID NO: 327626 - DNA, 430 bp, Homo sapiens; identical to SEQ ID NO: 275126
  chr20:35155297-35155727
  hypo

SEQ ID NO: 327627 - DNA, 66 bp, Homo sapiens
  chr20:35169055-35169121
  hypo
ctattttcaacacatcacccagaaggattccgtcaaaacccaagccaggtcgtcaccccctgctcg

SEQ ID NO: 327628 - DNA, 128 bp, Homo sapiens; identical to SEQ ID NO: 219958
  chr20:35441117-35441245
  hypo

SEQ ID NO: 327629 - DNA, 83 bp, Homo sapiens; identical to SEQ ID NO: 219959
  chr20:35442203-35442286
  hypo

SEQ ID NO: 327630 - DNA, 455 bp, Homo sapiens; identical to SEQ ID NO: 219960
  chr20:35443720-35444175
  hypo

SEQ ID NO: 327631 - DNA, 391 bp, Homo sapiens; identical to SEQ ID NO: 219961
  chr20:35444205-35444596
  hypo

SEQ ID NO: 327632 - DNA, 84 bp, Homo sapiens; identical to SEQ ID NO: 275131
  chr20:35467712-35467796
  hypo

SEQ ID NO: 327633 - DNA, 42 bp, Homo sapiens; identical to SEQ ID NO: 275132
  chr20:35470832-35470874
  hypo

SEQ ID NO: 327634 - DNA, 215 bp, Homo sapiens; identical to SEQ ID NO: 294750
  chr20:35491515-35491730
  hypo

SEQ ID NO: 327635 - DNA, 145 bp, Homo sapiens; identical to SEQ ID NO: 275133
  chr20:35506571-35506716
  hypo

SEQ ID NO: 327636 - DNA, 97 bp, Homo sapiens; identical to SEQ ID NO: 219962
  chr20:35615275-35615372
  hypo

SEQ ID NO: 327637 - DNA, 163 bp, Homo sapiens; identical to SEQ ID NO: 275135
  chr20:35753148-35753311
  hypo

SEQ ID NO: 327638 - DNA, 36 bp, Homo sapiens; identical to SEQ ID NO: 219963
  chr20:35788336-35788372
  hypo

SEQ ID NO: 327639 - DNA, 136 bp, Homo sapiens; identical to SEQ ID NO: 219964
  chr20:35812619-35812755
  hypo

SEQ ID NO: 327640 - DNA, 87 bp, Homo sapiens; identical to SEQ ID NO: 219965
  chr20:35833168-35833255
  hypo

SEQ ID NO: 327641 - DNA, 93 bp, Homo sapiens; identical to SEQ ID NO: 275139
  chr20:35860693-35860786
  hypo

SEQ ID NO: 327642 - DNA, 67 bp, Homo sapiens; identical to SEQ ID NO: 219966
  chr20:35874023-35874090
  hypo

SEQ ID NO: 327643 - DNA, 303 bp, Homo sapiens
  chr20:35874236-35874539
  hypo
aaaactaattggaagttgaaagagccctcggcttttgcttttgtcaggataggccaaggaaagagatgagcaggtgggtctgggaggaaggagggggtcttggggcaggccgggcgcgcctcccattcacagccccttcctttgtgcctgcctctcttggttgaagtgggccacctgccctctaaggccagccttttcctccgagggggcttttgtctcccattgttctgattgtctcctccgtggagccgcctcagtggccccctgcagacggtttcccaggcttcacgttttttttctcag

SEQ ID NO: 327644 - DNA, 321 bp, Homo sapiens; identical to SEQ ID NO: 275141
  chr20:35907656-35907977
  hypo

SEQ ID NO: 327645 - DNA, 137 bp, Homo sapiens; identical to SEQ ID NO: 275143
  chr20:35925946-35926083
  hypo

SEQ ID NO: 327646 - DNA, 93 bp, Homo sapiens; identical to SEQ ID NO: 219968
  chr20:35929626-35929719
  hypo

SEQ ID NO: 327647 - DNA, 102 bp, Homo sapiens; identical to SEQ ID NO: 275145
  chr20:35940186-35940288
  hypo

SEQ ID NO: 327648 - DNA, 282 bp, Homo sapiens; identical to SEQ ID NO: 275146
  chr20:35956277-35956559
  hypo

SEQ ID NO: 327649 - DNA, 123 bp, Homo sapiens; identical to SEQ ID NO: 219969
  chr20:35987182-35987305
  hypo

SEQ ID NO: 327650 - DNA, 34 bp, Homo sapiens; identical to SEQ ID NO: 219970
  chr20:36151088-36151122
  hypo

SEQ ID NO: 327651 - DNA, 346 bp, Homo sapiens
  chr20:36151161-36151507
  hypo
ggccccagctcccagccctgggcggccgtatcatcaggtgctcctgtgcatctcggccagcacgggagccagtgccgcgcaggaatgtggggtcccctgtgttccctcgccagaggagcacttggcaaggtcagtgaggggccagtagacccccggagaagcagtaccgacaatgacgaagataccagatcccttcccaacccctttgcaccggtcccactaaggggcagggtcgagagaggaggggggatagggggagcagacccctgagatctgggcataggcaccgcattctgatctggacaaagtcgggacagcaccatcccagccccgaagccagggccat

SEQ ID NO: 327652 - DNA, 50 bp, Homo sapiens; identical to SEQ ID NO: 275153
  chr20:36532325-36532375
  hypo

SEQ ID NO: 327653 - DNA, 208 bp, Homo sapiens; identical to SEQ ID NO: 275154
  chr20:36572548-36572756
  hypo

SEQ ID NO: 327654 - DNA, 205 bp, Homo sapiens; identical to SEQ ID NO: 275156
  chr20:36753455-36753660
  hypo

SEQ ID NO: 327655 - DNA, 552 bp, Homo sapiens
  chr20:36760841-36761393
  hypo
ttggactccgtaaggcagtcacggtatttctcatagaggatgcaaagaggaacgctcttctctgcagaaggggagaaaggagggtgctcatgatgcagaatcacccctcccaactctcttgcaactccaagaggcacagagaggggaaggaatgtgcttggggtcacacagcgggggaatggctgggcggatccctgaactccccactgtggctccagggttcccagcgaggagctggagagtggacactgagcagcgggtagaggacgcacttggactcccacgggccttggttctaatcctgcctttgcctcttctaatgggtgaccccgcgtgagccactccacctcccaggtcctcgatgtttggatctgcgtggcacaggcactcctaaggctgtgggaggatgagctgagcgagtgtcccggaagagcctggtgcgctcgggactcagggtgtgtgagccgcgggcccttcatcctggggaggatcagagccgacatctgcttgctgcaccaggcactgcacttcccacggcgggctcctacttca

SEQ ID NO: 327656 - DNA, 122 bp, Homo sapiens
  chr20:36764034-36764156
  hypo
ctgtctcggactctcggggcctggatgagcagcgagggccgggtcctttctacaccaccgaggtgtcagggacacaggaacccccgagcccagggctgacaccactgcctgggacagaaggt

SEQ ID NO: 327657 - DNA, 128 bp, Homo sapiens
  chr20:36764186-36764314
  hypo
cccacgcctcttagcactcgcactcagggaggagtgagggccccaccgtgtgctggtgctgctgtgccctttccagatacctcctgagcacgcatcctctccctcagtcctcacggctgcgggcgcat

SEQ ID NO: 327658 - DNA, 217 bp, Homo sapiens; identical to SEQ ID NO: 219973
  chr20:36765891-36766108
  hypo

SEQ ID NO: 327659 - DNA, 306 bp, Homo sapiens; identical to SEQ ID NO: 275160
  chr20:36766575-36766881
  hypo

SEQ ID NO: 327660 - DNA, 206 bp, Homo sapiens; identical to SEQ ID NO: 219974
  chr20:36767670-36767876
  hypo

SEQ ID NO: 327661 - DNA, 106 bp, Homo sapiens; identical to SEQ ID NO: 219975
  chr20:36767917-36768023
  hypo

SEQ ID NO: 327662 - DNA, 279 bp, Homo sapiens; identical to SEQ ID NO: 219976
  chr20:36770537-36770816
  hypo

SEQ ID NO: 327663 - DNA, 293 bp, Homo sapiens; identical to SEQ ID NO: 294758
  chr20:36774950-36775243
  hypo

SEQ ID NO: 327664 - DNA, 160 bp, Homo sapiens; identical to SEQ ID NO: 275164
  chr20:36779359-36779519
  hypo

SEQ ID NO: 327665 - DNA, 189 bp, Homo sapiens; identical to SEQ ID NO: 275165
  chr20:36802859-36803048
  hypo

SEQ ID NO: 327666 - DNA, 120 bp, Homo sapiens; identical to SEQ ID NO: 219977
  chr20:37036241-37036361
  hypo

SEQ ID NO: 327667 - DNA, 49 bp, Homo sapiens; identical to SEQ ID NO: 219978
  chr20:37054866-37054915
  hypo

SEQ ID NO: 327668 - DNA, 43 bp, Homo sapiens; identical to SEQ ID NO: 219979
  chr20:37114343-37114386
  hypo

SEQ ID NO: 327669 - DNA, 177 bp, Homo sapiens; identical to SEQ ID NO: 275170
  chr20:37145084-37145261
  hypo

SEQ ID NO: 327670 - DNA, 76 bp, Homo sapiens; identical to SEQ ID NO: 205801
  chr20:37274625-37274701
  hypo

SEQ ID NO: 327671 - DNA, 546 bp, Homo sapiens; identical to SEQ ID NO: 205802
  chr20:37274731-37275277
  hypo

SEQ ID NO: 327672 - DNA, 114 bp, Homo sapiens; identical to SEQ ID NO: 294767
  chr20:37303401-37303515
  hypo

SEQ ID NO: 327673 - DNA, 403 bp, Homo sapiens; identical to SEQ ID NO: 294769
  chr20:37433709-37434112
  hypo

SEQ ID NO: 327674 - DNA, 232 bp, Homo sapiens; identical to SEQ ID NO: 275171
  chr20:37536535-37536767
  hypo

SEQ ID NO: 327675 - DNA, 120 bp, Homo sapiens; identical to SEQ ID NO: 219984
  chr20:37540091-37540211
  hypo

SEQ ID NO: 327676 - DNA, 90 bp, Homo sapiens
  chr20:37549578-37549668
  hypo
gttctgagggaagccgcgtgctcctcaggagagagctgtttaggttttccgatctttttgctcaggggccaaacactgaaggcacgtact

SEQ ID NO: 327677 - DNA, 120 bp, Homo sapiens; identical to SEQ ID NO: 275174
  chr20:37588339-37588459
  hypo

SEQ ID NO: 327678 - DNA, 147 bp, Homo sapiens; identical to SEQ ID NO: 219985
  chr20:37596755-37596902
  hypo

SEQ ID NO: 327679 - DNA, 85 bp, Homo sapiens; identical to SEQ ID NO: 275176
  chr20:37622329-37622414
  hypo

SEQ ID NO: 327680 - DNA, 198 bp, Homo sapiens; identical to SEQ ID NO: 275177
  chr20:37632409-37632607
  hypo

SEQ ID NO: 327681 - DNA, 43 bp, Homo sapiens; identical to SEQ ID NO: 219986
  chr20:37632981-37633024
  hypo

SEQ ID NO: 327682 - DNA, 282 bp, Homo sapiens; identical to SEQ ID NO: 275179
  chr20:37646803-37647085
  hypo

SEQ ID NO: 327683 - DNA, 151 bp, Homo sapiens; identical to SEQ ID NO: 219987
  chr20:37656985-37657136
  hypo

SEQ ID NO: 327684 - DNA, 44 bp, Homo sapiens; identical to SEQ ID NO: 219988
  chr20:37659950-37659994
  hypo

SEQ ID NO: 327685 - DNA, 75 bp, Homo sapiens; identical to SEQ ID NO: 275182
  chr20:37671509-37671584
  hypo

SEQ ID NO: 327686 - DNA, 167 bp, Homo sapiens; identical to SEQ ID NO: 219989
  chr20:37673288-37673455
  hypo

SEQ ID NO: 327687 - DNA, 34 bp, Homo sapiens; identical to SEQ ID NO: 275184
  chr20:38483396-38483430
  hypo

SEQ ID NO: 327688 - DNA, 46 bp, Homo sapiens
  chr20:38809079-38809125
  hypo
gcgttaaagacctgtgattttatttcatagagatgatccattggct

SEQ ID NO: 327689 - DNA, 103 bp, Homo sapiens; identical to SEQ ID NO: 275186
  chr20:38888178-38888281
  hypo

SEQ ID NO: 327690 - DNA, 44 bp, Homo sapiens; identical to SEQ ID NO: 275187
  chr20:39054744-39054788
  hypo

SEQ ID NO: 327691 - DNA, 38 bp, Homo sapiens; identical to SEQ ID NO: 275188
  chr20:39076958-39076996
  hypo

SEQ ID NO: 327692 - DNA, 90 bp, Homo sapiens; identical to SEQ ID NO: 275189
  chr20:39436088-39436178
  hypo

SEQ ID NO: 327693 - DNA, 97 bp, Homo sapiens; identical to SEQ ID NO: 275190
  chr20:39632546-39632643
  hypo

SEQ ID NO: 327694 - DNA, 42 bp, Homo sapiens; identical to SEQ ID NO: 219990
  chr20:39672622-39672664
  hypo

SEQ ID NO: 327695 - DNA, 42 bp, Homo sapiens; identical to SEQ ID NO: 275192
  chr20:39695464-39695506
  hypo

SEQ ID NO: 327696 - DNA, 220 bp, Homo sapiens; identical to SEQ ID NO: 275193
  chr20:39791147-39791367
  hypo

SEQ ID NO: 327697 - DNA, 42 bp, Homo sapiens; identical to SEQ ID NO: 219991
  chr20:39831202-39831244
  hypo

SEQ ID NO: 327698 - DNA, 128 bp, Homo sapiens; identical to SEQ ID NO: 219992
  chr20:39989813-39989941
  hypo

SEQ ID NO: 327699 - DNA, 539 bp, Homo sapiens; identical to SEQ ID NO: 275196
  chr20:39990755-39991294
  hypo

SEQ ID NO: 327700 - DNA, 292 bp, Homo sapiens; identical to SEQ ID NO: 219993
  chr20:40020281-40020573
  hypo

SEQ ID NO: 327701 - DNA, 64 bp, Homo sapiens; identical to SEQ ID NO: 275198
  chr20:40161663-40161727
  hypo

SEQ ID NO: 327702 - DNA, 201 bp, Homo sapiens; identical to SEQ ID NO: 294778
  chr20:40321525-40321726
  hypo

SEQ ID NO: 327703 - DNA, 41 bp, Homo sapiens; identical to SEQ ID NO: 275199
  chr20:40352413-40352454
  hypo

SEQ ID NO: 327704 - DNA, 36 bp, Homo sapiens; identical to SEQ ID NO: 275200
  chr20:41967667-41967703
  hypo

SEQ ID NO: 327705 - DNA, 186 bp, Homo sapiens
  chr20:42088445-42088631
  hypo
ggcagagacaaatacggaccacctgttcgtacagaatacaggcttattgtagaaaatctttctagtcggtgcagttggcaagatttaaaggtatgttttgtaattcaagatagaaatgatatgactaatgctttaaagtaaactccttttatattcttatttctgggaatttattatggtatatag

SEQ ID NO: 327706 - DNA, 130 bp, Homo sapiens; identical to SEQ ID NO: 275202
  chr20:42142557-42142687
  hypo

SEQ ID NO: 327707 - DNA, 143 bp, Homo sapiens; identical to SEQ ID NO: 219995
  chr20:42192721-42192864
  hypo

SEQ ID NO: 327708 - DNA, 91 bp, Homo sapiens; identical to SEQ ID NO: 219996
  chr20:42193732-42193823
  hypo

SEQ ID NO: 327709 - DNA, 120 bp, Homo sapiens; identical to SEQ ID NO: 275206
  chr20:42215917-42216037
  hypo

SEQ ID NO: 327710 - DNA, 169 bp, Homo sapiens; identical to SEQ ID NO: 219997
  chr20:42314843-42315012
  hypo

SEQ ID NO: 327711 - DNA, 109 bp, Homo sapiens
  chr20:42345995-42346104
  hypo
tcttgatctaaagccgaggaggggcgggggctctgtgcttcccaccctgcaccccgcaccccgcagcccatgtggctgggctgcatgcacctgcaggttccatggatga

SEQ ID NO: 327712 - DNA, 122 bp, Homo sapiens
  chr20:42346134-42346256
  hypo
tgatttgtcagcatggagcctatcccctccccaacttcttccccaaggtctgtcactggccgctccctacagtccttggtcacccaaggtggatgacctgtgccccacggtgaggatggagg

SEQ ID NO: 327713 - DNA, 54 bp, Homo sapiens; identical to SEQ ID NO: 275210
  chr20:42712323-42712377
  hypo

SEQ ID NO: 327714 - DNA, 42 bp, Homo sapiens; identical to SEQ ID NO: 275211
  chr20:42774216-42774258
  hypo

SEQ ID NO: 327715 - DNA, 182 bp, Homo sapiens; identical to SEQ ID NO: 275212
  chr20:42804039-42804221
  hypo

SEQ ID NO: 327716 - DNA, 96 bp, Homo sapiens; identical to SEQ ID NO: 275213
  chr20:42826253-42826349
  hypo

SEQ ID NO: 327717 - DNA, 210 bp, Homo sapiens; identical to SEQ ID NO: 219998
  chr20:42833284-42833494
  hypo

SEQ ID NO: 327718 - DNA, 113 bp, Homo sapiens; identical to SEQ ID NO: 275215
  chr20:42885825-42885938
  hypo

SEQ ID NO: 327719 - DNA, 156 bp, Homo sapiens; identical to SEQ ID NO: 219999
  chr20:42924601-42924757
  hypo

SEQ ID NO: 327720 - DNA, 116 bp, Homo sapiens
  chr20:42931339-42931455
  hypo
gcaactctagccataaaataacccgtatatgacaagttaaattgagaaagaattacctactttcacgaagtgcgctgaggtttattgggctctgcgcttccttaagagtattagaa

SEQ ID NO: 327721 - DNA, 238 bp, Homo sapiens; identical to SEQ ID NO: 220000
  chr20:42965898-42966136
  hypo

SEQ ID NO: 327722 - DNA, 37 bp, Homo sapiens; identical to SEQ ID NO: 275219
  chr20:42980255-42980292
  hypo

SEQ ID NO: 327723 - DNA, 195 bp, Homo sapiens; identical to SEQ ID NO: 275220
  chr20:43019103-43019298
  hypo

SEQ ID NO: 327724 - DNA, 85 bp, Homo sapiens
  chr20:43052653-43052738
  hypo
gtagatgccaaggggctgagcgatccagggaagatcaagcggctgcgttcccaggtgcaggtgagcttggaggactacatcaacg

SEQ ID NO: 327725 - DNA, 40 bp, Homo sapiens; identical to SEQ ID NO: 275222
  chr20:43154801-43154841
  hypo

SEQ ID NO: 327726 - DNA, 154 bp, Homo sapiens; identical to SEQ ID NO: 275223
  chr20:43219720-43219874
  hypo

SEQ ID NO: 327727 - DNA, 165 bp, Homo sapiens; identical to SEQ ID NO: 275224
  chr20:43243175-43243340
  hypo

SEQ ID NO: 327728 - DNA, 83 bp, Homo sapiens; identical to SEQ ID NO: 275225
  chr20:43329106-43329189
  hypo

SEQ ID NO: 327729 - DNA, 199 bp, Homo sapiens; identical to SEQ ID NO: 275226
  chr20:43356086-43356285
  hypo

SEQ ID NO: 327730 - DNA, 222 bp, Homo sapiens; identical to SEQ ID NO: 275227
  chr20:43465519-43465741
  hypo

SEQ ID NO: 327731 - DNA, 135 bp, Homo sapiens; identical to SEQ ID NO: 275228
  chr20:43530111-43530246
  hypo

SEQ ID NO: 327732 - DNA, 199 bp, Homo sapiens; identical to SEQ ID NO: 275229
  chr20:43568748-43568947
  hypo

SEQ ID NO: 327733 - DNA, 52 bp, Homo sapiens; identical to SEQ ID NO: 275230
  chr20:43587085-43587137
  hypo

SEQ ID NO: 327734 - DNA, 101 bp, Homo sapiens; identical to SEQ ID NO: 275231
  chr20:43660156-43660257
  hypo

SEQ ID NO: 327735 - DNA, 31 bp, Homo sapiens; identical to SEQ ID NO: 220001
  chr20:43717047-43717078
  hypo

SEQ ID NO: 327736 - DNA, 227 bp, Homo sapiens; identical to SEQ ID NO: 294798
  chr20:43726868-43727095
  hypo

SEQ ID NO: 327737 - DNA, 53 bp, Homo sapiens; identical to SEQ ID NO: 220003
  chr20:43926537-43926590
  hypo

SEQ ID NO: 327738 - DNA, 226 bp, Homo sapiens; identical to SEQ ID NO: 294801
  chr20:43976986-43977212
  hypo

SEQ ID NO: 327739 - DNA, 138 bp, Homo sapiens; identical to SEQ ID NO: 275234
  chr20:43977555-43977693
  hypo

SEQ ID NO: 327740 - DNA, 261 bp, Homo sapiens
  chr20:44005912-44006173
  hypo
gcttatgcagttcttggatccggcggtttgagctcttgagtagcttcaagagcgacaagttttttaacacctgccagggtcaagaaaccaggtaaatagaagcttcagctttcctggacagcctccctctcccctgcctgcctctggctccgctcagccaagggccggcctgctggctcccctgggccactcagcctggcaaccaggggcagtactgcatgagtatatgagcttccccaagctggggccaaaacagggcgt

SEQ ID NO: 327741 - DNA, 46 bp, Homo sapiens
  chr20:44006209-44006255
  hypo
ctcacaggctgctctgtctcgtcccgcagtttctcatcttgcatct

SEQ ID NO: 327742 - DNA, 73 bp, Homo sapiens; identical to SEQ ID NO: 226157
  chr20:44462767-44462840
  hypo

SEQ ID NO: 327743 - DNA, 188 bp, Homo sapiens; identical to SEQ ID NO: 275236
  chr20:44463585-44463773
  hypo

SEQ ID NO: 327744 - DNA, 77 bp, Homo sapiens; identical to SEQ ID NO: 220004
  chr20:44469456-44469533
  hypo

SEQ ID NO: 327745 - DNA, 41 bp, Homo sapiens; identical to SEQ ID NO: 220005
  chr20:44502012-44502053
  hypo

SEQ ID NO: 327746 - DNA, 77 bp, Homo sapiens; identical to SEQ ID NO: 294810
  chr20:44519218-44519295
  hypo

SEQ ID NO: 327747 - DNA, 71 bp, Homo sapiens; identical to SEQ ID NO: 294811
  chr20:44540034-44540105
  hypo

SEQ ID NO: 327748 - DNA, 52 bp, Homo sapiens; identical to SEQ ID NO: 294812
  chr20:44540153-44540205
  hypo

SEQ ID NO: 327749 - DNA, 32 bp, Homo sapiens; identical to SEQ ID NO: 275239
  chr20:44560012-44560044
  hypo

SEQ ID NO: 327750 - DNA, 34 bp, Homo sapiens; identical to SEQ ID NO: 220006
  chr20:44560415-44560449
  hypo

SEQ ID NO: 327751 - DNA, 100 bp, Homo sapiens; identical to SEQ ID NO: 275241
  chr20:44573535-44573635
  hypo

SEQ ID NO: 327752 - DNA, 111 bp, Homo sapiens; identical to SEQ ID NO: 275242
  chr20:44574035-44574146
  hypo

SEQ ID NO: 327753 - DNA, 132 bp, Homo sapiens; identical to SEQ ID NO: 275243
  chr20:44578453-44578585
  hypo

SEQ ID NO: 327754 - DNA, 46 bp, Homo sapiens; identical to SEQ ID NO: 220007
  chr20:44601783-44601829
  hypo

SEQ ID NO: 327755 - DNA, 79 bp, Homo sapiens; identical to SEQ ID NO: 220008
  chr20:44602364-44602443
  hypo

SEQ ID NO: 327756 - DNA, 579 bp, Homo sapiens; identical to SEQ ID NO: 294816
  chr20:44642532-44643111
  hypo

SEQ ID NO: 327757 - DNA, 169 bp, Homo sapiens; identical to SEQ ID NO: 275246
  chr20:44707476-44707645
  hypo

SEQ ID NO: 327758 - DNA, 98 bp, Homo sapiens; identical to SEQ ID NO: 275247
  chr20:44707992-44708090
  hypo

SEQ ID NO: 327759 - DNA, 120 bp, Homo sapiens; identical to SEQ ID NO: 275248
  chr20:44720742-44720862
  hypo

SEQ ID NO: 327760 - DNA, 80 bp, Homo sapiens
  chr20:44893696-44893776
  hypo
ccggcagagccgtgctgtacatcatgttgacagtagaaattacatcccgagctgctgttttacaccgcgccctgtcagaa

SEQ ID NO: 327761 - DNA, 166 bp, Homo sapiens; identical to SEQ ID NO: 205826
  chr20:44935840-44936006
  hypo

SEQ ID NO: 327762 - DNA, 81 bp, Homo sapiens; identical to SEQ ID NO: 205827
  chr20:44937643-44937724
  hypo

SEQ ID NO: 327763 - DNA, 76 bp, Homo sapiens; identical to SEQ ID NO: 220011
  chr20:44978787-44978863
  hypo

SEQ ID NO: 327764 - DNA, 157 bp, Homo sapiens; identical to SEQ ID NO: 275251
  chr20:44982233-44982390
  hypo

SEQ ID NO: 327765 - DNA, 109 bp, Homo sapiens; identical to SEQ ID NO: 275252
  chr20:45242089-45242198
  hypo

SEQ ID NO: 327766 - DNA, 128 bp, Homo sapiens; identical to SEQ ID NO: 275254
  chr20:45343199-45343327
  hypo

SEQ ID NO: 327767 - DNA, 121 bp, Homo sapiens; identical to SEQ ID NO: 275255
  chr20:45380533-45380654
  hypo

SEQ ID NO: 327768 - DNA, 51 bp, Homo sapiens; identical to SEQ ID NO: 294830
  chr20:45523120-45523171
  hypo

SEQ ID NO: 327769 - DNA, 66 bp, Homo sapiens; identical to SEQ ID NO: 275256
  chr20:45628462-45628528
  hypo

SEQ ID NO: 327770 - DNA, 112 bp, Homo sapiens; identical to SEQ ID NO: 275257
  chr20:45803228-45803340
  hypo

SEQ ID NO: 327771 - DNA, 32 bp, Homo sapiens; identical to SEQ ID NO: 275258
  chr20:45829044-45829076
  hypo

SEQ ID NO: 327772 - DNA, 205 bp, Homo sapiens; identical to SEQ ID NO: 220012
  chr20:45833334-45833539
  hypo

SEQ ID NO: 327773 - DNA, 42 bp, Homo sapiens; identical to SEQ ID NO: 220013
  chr20:45833568-45833610
  hypo

SEQ ID NO: 327774 - DNA, 196 bp, Homo sapiens; identical to SEQ ID NO: 220014
  chr20:45837756-45837952
  hypo

SEQ ID NO: 327775 - DNA, 69 bp, Homo sapiens; identical to SEQ ID NO: 275261
  chr20:45878125-45878194
  hypo

SEQ ID NO: 327776 - DNA, 40 bp, Homo sapiens; identical to SEQ ID NO: 220015
  chr20:45880361-45880401
  hypo

SEQ ID NO: 327777 - DNA, 107 bp, Homo sapiens; identical to SEQ ID NO: 275263
  chr20:45885508-45885615
  hypo

SEQ ID NO: 327778 - DNA, 33 bp, Homo sapiens; identical to SEQ ID NO: 275264
  chr20:45908164-45908197
  hypo

SEQ ID NO: 327779 - DNA, 100 bp, Homo sapiens; identical to SEQ ID NO: 275265
  chr20:45938702-45938802
  hypo

SEQ ID NO: 327780 - DNA, 47 bp, Homo sapiens; identical to SEQ ID NO: 220016
  chr20:45949054-45949101
  hypo

SEQ ID NO: 327781 - DNA, 36 bp, Homo sapiens; identical to SEQ ID NO: 220017
  chr20:45968504-45968540
  hypo

SEQ ID NO: 327782 - DNA, 120 bp, Homo sapiens; identical to SEQ ID NO: 220018
  chr20:46011002-46011122
  hypo

SEQ ID NO: 327783 - DNA, 102 bp, Homo sapiens
  chr20:46013661-46013763
  hypo
cattcaacagataagcttttgcgtgcagtactattctgggtgctgggaccaccgaaatcagcagaacagacagaatctttgccttcacggatgcctcctgcc

SEQ ID NO: 327784 - DNA, 31 bp, Homo sapiens; identical to SEQ ID NO: 275270
  chr20:46175277-46175308
  hypo

SEQ ID NO: 327785 - DNA, 465 bp, Homo sapiens; identical to SEQ ID NO: 275271
  chr20:46234979-46235444
  hypo

SEQ ID NO: 327786 - DNA, 252 bp, Homo sapiens; identical to SEQ ID NO: 275272
  chr20:46305160-46305412
  hypo

SEQ ID NO: 327787 - DNA, 140 bp, Homo sapiens
  chr20:46315385-46315525
  hypo
ctggcctggtacgtcgggacttcagcagcgtctcagatatcacaatcgtccggggcagaaattgtgacgctgccgctggggtagcttggcagctgtggacaccgttgctatgtaaggcgggaggtgagtcactgtctcca

SEQ ID NO: 327788 - DNA, 162 bp, Homo sapiens
  chr20:46365437-46365599
  hypo
cctgctcacctgtccggtagccagtgctattgaggtacacggcaaaggtgcggctctcgtgctgtgcctgccaggagggcgaggagcagttctcattgttggtgtaggtgttgtggttgtggacgtacttgccagtgaggatggaggagcgtgaggggcagc

SEQ ID NO: 327789 - DNA, 139 bp, Homo sapiens
  chr20:46365635-46365774
  hypo
ccccgccctgctccatgatgcgccgggtcttgttcatcacctgcatggaacctgcaagtcaagggtggaagtaaggcgcagggcaggagacccgggcggcaccggcaccagggggctctcagcacgtggcatccctagg

SEQ ID NO: 327790 - DNA, 121 bp, Homo sapiens; identical to SEQ ID NO: 275275
  chr20:46390913-46391034
  hypo

SEQ ID NO: 327791 - DNA, 140 bp, Homo sapiens; identical to SEQ ID NO: 275276
  chr20:46429634-46429774
  hypo

SEQ ID NO: 327792 - DNA, 59 bp, Homo sapiens; identical to SEQ ID NO: 275277
  chr20:46489240-46489299
  hypo

SEQ ID NO: 327793 - DNA, 74 bp, Homo sapiens
  chr20:46798550-46798624
  hypo
cgcaccgcagacgcaggagtgctcagcgtctaacagagtgtacgtgccaagtcacatgacggtgcttcttaata

SEQ ID NO: 327794 - DNA, 92 bp, Homo sapiens; identical to SEQ ID NO: 220019
  chr20:46823583-46823675
  hypo

SEQ ID NO: 327795 - DNA, 207 bp, Homo sapiens; identical to SEQ ID NO: 275280
  chr20:46846106-46846313
  hypo

SEQ ID NO: 327796 - DNA, 105 bp, Homo sapiens; identical to SEQ ID NO: 275281
  chr20:46888889-46888994
  hypo

SEQ ID NO: 327797 - DNA, 143 bp, Homo sapiens
  chr20:46972101-46972244
  hypo
cagcctttccctttccctggggctcagcctcccaatcagtcaaatgggcagattaacacccatggccttgactccgtcagagactgggggaagaaatcgtgagtcagggcagcgaggtctgcggggagcgttgtgaaggtgtg

SEQ ID NO: 327798 - DNA, 84 bp, Homo sapiens; identical to SEQ ID NO: 275283
  chr20:47027449-47027533
  hypo

SEQ ID NO: 327799 - DNA, 260 bp, Homo sapiens; identical to SEQ ID NO: 275284
  chr20:47117551-47117811
  hypo

SEQ ID NO: 327800 - DNA, 46 bp, Homo sapiens; identical to SEQ ID NO: 275286
  chr20:47268239-47268285
  hypo

SEQ ID NO: 327801 - DNA, 36 bp, Homo sapiens
  chr20:47273537-47273573
  hypo
agagggagggctgccggacaccccgccctgggacac

SEQ ID NO: 327802 - DNA, 76 bp, Homo sapiens
  chr20:47273603-47273679
  hypo
gcgcagagggcggcgggagcagaaggactggttgaggatggactccacctctgaaaacggccgcaggaacaccagg

SEQ ID NO: 327803 - DNA, 155 bp, Homo sapiens; identical to SEQ ID NO: 275290
  chr20:47490312-47490467
  hypo

SEQ ID NO: 327804 - DNA, 43 bp, Homo sapiens; identical to SEQ ID NO: 275291
  chr20:47563131-47563174
  hypo

SEQ ID NO: 327805 - DNA, 219 bp, Homo sapiens; identical to SEQ ID NO: 275292
  chr20:47659758-47659977
  hypo

SEQ ID NO: 327806 - DNA, 158 bp, Homo sapiens; identical to SEQ ID NO: 220020
  chr20:47688821-47688979
  hypo

SEQ ID NO: 327807 - DNA, 120 bp, Homo sapiens; identical to SEQ ID NO: 275294
  chr20:47698961-47699081
  hypo

SEQ ID NO: 327808 - DNA, 78 bp, Homo sapiens; identical to SEQ ID NO: 220021
  chr20:47713209-47713287
  hypo

SEQ ID NO: 327809 - DNA, 157 bp, Homo sapiens; identical to SEQ ID NO: 275296
  chr20:47713759-47713916
  hypo

SEQ ID NO: 327810 - DNA, 95 bp, Homo sapiens; identical to SEQ ID NO: 275297
  chr20:47765230-47765325
  hypo

SEQ ID NO: 327811 - DNA, 60 bp, Homo sapiens; identical to SEQ ID NO: 220022
  chr20:47766303-47766363
  hypo

SEQ ID NO: 327812 - DNA, 38 bp, Homo sapiens; identical to SEQ ID NO: 220023
  chr20:47799076-47799114
  hypo

SEQ ID NO: 327813 - DNA, 31 bp, Homo sapiens; identical to SEQ ID NO: 275300
  chr20:47805438-47805469
  hypo

SEQ ID NO: 327814 - DNA, 39 bp, Homo sapiens; identical to SEQ ID NO: 275301
  chr20:47816848-47816887
  hypo

SEQ ID NO: 327815 - DNA, 34 bp, Homo sapiens
  chr20:47836968-47837002
  hypo
tccagtgtattcttcgcttagcagcagagggatc

SEQ ID NO: 327816 - DNA, 50 bp, Homo sapiens
  chr20:47837206-47837256
  hypo
tcagcccgctgcgtgggaggtcatgggccagtccccgaggagccaggccc

SEQ ID NO: 327817 - DNA, 67 bp, Homo sapiens; identical to SEQ ID NO: 275303
  chr20:47845272-47845339
  hypo

SEQ ID NO: 327818 - DNA, 272 bp, Homo sapiens; identical to SEQ ID NO: 275304
  chr20:47865551-47865823
  hypo

SEQ ID NO: 327819 - DNA, 59 bp, Homo sapiens; identical to SEQ ID NO: 205833
  chr20:47934765-47934824
  hypo

SEQ ID NO: 327820 - DNA, 545 bp, Homo sapiens; identical to SEQ ID NO: 294847
  chr20:48100505-48101050
  hypo

SEQ ID NO: 327821 - DNA, 105 bp, Homo sapiens; identical to SEQ ID NO: 275306
  chr20:48124419-48124524
  hypo

SEQ ID NO: 327822 - DNA, 97 bp, Homo sapiens; identical to SEQ ID NO: 226172
  chr20:48194980-48195077
  hypo

SEQ ID NO: 327823 - DNA, 229 bp, Homo sapiens; identical to SEQ ID NO: 275307
  chr20:48209645-48209874
  hypo

SEQ ID NO: 327824 - DNA, 99 bp, Homo sapiens
  chr20:48252796-48252895
  hypo
tcggactgctttcttggtggcggtgggtaaagcaaacgtacattctctcctctcagtactcgttcacctgagccagctcgggtgtcaggttgacagtta

SEQ ID NO: 327825 - DNA, 122 bp, Homo sapiens; identical to SEQ ID NO: 220026
  chr20:48259015-48259137
  hypo

SEQ ID NO: 327826 - DNA, 76 bp, Homo sapiens; identical to SEQ ID NO: 220027
  chr20:48300266-48300342
  hypo

SEQ ID NO: 327827 - DNA, 86 bp, Homo sapiens; identical to SEQ ID NO: 275311
  chr20:48350345-48350431
  hypo

SEQ ID NO: 327828 - DNA, 120 bp, Homo sapiens; identical to SEQ ID NO: 275312
  chr20:48395183-48395303
  hypo

SEQ ID NO: 327829 - DNA, 211 bp, Homo sapiens; identical to SEQ ID NO: 275313
  chr20:48477265-48477476
  hypo

SEQ ID NO: 327830 - DNA, 37 bp, Homo sapiens; identical to SEQ ID NO: 275314
  chr20:48489294-48489331
  hypo

SEQ ID NO: 327831 - DNA, 535 bp, Homo sapiens; identical to SEQ ID NO: 275315
  chr20:48498753-48499288
  hypo

SEQ ID NO: 327832 - DNA, 353 bp, Homo sapiens; identical to SEQ ID NO: 220028
  chr20:48504343-48504696
  hypo

SEQ ID NO: 327833 - DNA, 114 bp, Homo sapiens; identical to SEQ ID NO: 275317
  chr20:48520118-48520232
  hypo

SEQ ID NO: 327834 - DNA, 247 bp, Homo sapiens
  chr20:48524517-48524764
  hypo
gccgggccagaaacggttcagaggtgatgctggagagacggggaaggttcggagcccggaaggatctgagagcacaggatggatgggatcagactggcatagcctctcaggagggactgccaggggcaggaagagagaaggagggcctgtatggaggctgctccaggacctcaccttgatgcttctgaattccttcttccacgggtagaggaagaggttgatgcccaccgtctccagcatgctgaag

SEQ ID NO: 327835 - DNA, 371 bp, Homo sapiens
  chr20:48524818-48525189
  hypo
accacctcatagaactggatcagccggaatcgataaaagggatccaccttgtgcaggctgagcagggttgaggctgccacccgcaggcactcatcgctgccaggccgctgcctgctggtggtggtatccactttgctctcatggaactgcacgtacttccgaaataagtcatccttgaatttagtatccattgaactgggcttccccatccgatcgaggggggctaccttatctcctccatggcttctggattagaggcagggacatcactaaaagcatggacatgttgccgcctggaccagcggagtgctctggaaggaggggaacaagaagcatgtcattcctcgatacggtcgcgcttcggcttcagg

SEQ ID NO: 327836 - DNA, 39 bp, Homo sapiens; identical to SEQ ID NO: 275319
  chr20:48549957-48549996
  hypo

SEQ ID NO: 327837 - DNA, 1007 bp, Homo sapiens; identical to SEQ ID NO: 294850
  chr20:48598696-48599703
  hypo

SEQ ID NO: 327838 - DNA, 42 bp, Homo sapiens; identical to SEQ ID NO: 220030
  chr20:48673854-48673896
  hypo

SEQ ID NO: 327839 - DNA, 120 bp, Homo sapiens; identical to SEQ ID NO: 220031
  chr20:48707851-48707971
  hypo

SEQ ID NO: 327840 - DNA, 93 bp, Homo sapiens; identical to SEQ ID NO: 220032
  chr20:48720826-48720919
  hypo

SEQ ID NO: 327841 - DNA, 141 bp, Homo sapiens; identical to SEQ ID NO: 275324
  chr20:48744175-48744316
  hypo

SEQ ID NO: 327842 - DNA, 231 bp, Homo sapiens; identical to SEQ ID NO: 275325
  chr20:48755328-48755559
  hypo

SEQ ID NO: 327843 - DNA, 50 bp, Homo sapiens
  chr20:48767181-48767231
  hypo
tgtcaagtttatggcccggctatttactaaaatgccagctccgttttttt

SEQ ID NO: 327844 - DNA, 184 bp, Homo sapiens; identical to SEQ ID NO: 205841
  chr20:48771157-48771341
  hypo

SEQ ID NO: 327845 - DNA, 42 bp, Homo sapiens; identical to SEQ ID NO: 275328
  chr20:48791873-48791915
  hypo

SEQ ID NO: 327846 - DNA, 39 bp, Homo sapiens; identical to SEQ ID NO: 275329
  chr20:48853284-48853323
  hypo

SEQ ID NO: 327847 - DNA, 49 bp, Homo sapiens; identical to SEQ ID NO: 275330
  chr20:48860989-48861038
  hypo

SEQ ID NO: 327848 - DNA, 47 bp, Homo sapiens
  chr20:48863409-48863456
  hypo
attgccacggggtacggcggagcttggatgctgcacccaggactgaa

SEQ ID NO: 327849 - DNA, 79 bp, Homo sapiens; identical to SEQ ID NO: 275332
  chr20:48868294-48868373
  hypo

SEQ ID NO: 327850 - DNA, 42 bp, Homo sapiens; identical to SEQ ID NO: 275333
  chr20:48936571-48936613
  hypo

SEQ ID NO: 327851 - DNA, 140 bp, Homo sapiens; identical to SEQ ID NO: 275334
  chr20:48968284-48968424
  hypo

SEQ ID NO: 327852 - DNA, 87 bp, Homo sapiens; identical to SEQ ID NO: 275335
  chr20:48974138-48974225
  hypo

SEQ ID NO: 327853 - DNA, 54 bp, Homo sapiens; identical to SEQ ID NO: 275336
  chr20:49008038-49008092
  hypo

SEQ ID NO: 327854 - DNA, 98 bp, Homo sapiens; identical to SEQ ID NO: 275337
  chr20:49046546-49046644
  hypo

SEQ ID NO: 327855 - DNA, 65 bp, Homo sapiens; identical to SEQ ID NO: 220034
  chr20:49046944-49047009
  hypo

SEQ ID NO: 327856 - DNA, 141 bp, Homo sapiens; identical to SEQ ID NO: 275339
  chr20:49150322-49150463
  hypo

SEQ ID NO: 327857 - DNA, 199 bp, Homo sapiens; identical to SEQ ID NO: 275340
  chr20:49178934-49179133
  hypo

SEQ ID NO: 327858 - DNA, 144 bp, Homo sapiens; identical to SEQ ID NO: 220035
  chr20:49197043-49197187
  hypo

SEQ ID NO: 327859 - DNA, 195 bp, Homo sapiens; identical to SEQ ID NO: 275342
  chr20:49197873-49198068
  hypo

SEQ ID NO: 327860 - DNA, 204 bp, Homo sapiens; identical to SEQ ID NO: 220036
  chr20:49203141-49203345
  hypo

SEQ ID NO: 327861 - DNA, 125 bp, Homo sapiens; identical to SEQ ID NO: 220037
  chr20:49204054-49204179
  hypo

SEQ ID NO: 327862 - DNA, 313 bp, Homo sapiens; identical to SEQ ID NO: 220038
  chr20:49204449-49204762
  hypo

SEQ ID NO: 327863 - DNA, 255 bp, Homo sapiens; identical to SEQ ID NO: 220039
  chr20:49206899-49207154
  hypo

SEQ ID NO: 327864 - DNA, 81 bp, Homo sapiens
  chr20:49210377-49210458
  hypo
aggcaaattctggggaagaacgcagtccagccagcatttctagataccctcgtgggcccctgcctgcctcccttcccataa

SEQ ID NO: 327865 - DNA, 50 bp, Homo sapiens
  chr20:49210488-49210538
  hypo
ggaggcatggaatctgtccccagaaaaatgctctggcggccgggcgcagt

SEQ ID NO: 327866 - DNA, 42 bp, Homo sapiens; identical to SEQ ID NO: 275347
  chr20:49214096-49214138
  hypo

SEQ ID NO: 327867 - DNA, 83 bp, Homo sapiens
  chr20:49218808-49218891
  hypo
agccctgtggcaggctggggctctcccctcctaagttcctccagccaggctgctctgcaaacgggcctccagagaggtgggcc

SEQ ID NO: 327868 - DNA, 583 bp, Homo sapiens; identical to SEQ ID NO: 220040
  chr20:49223638-49224221
  hypo

SEQ ID NO: 327869 - DNA, 588 bp, Homo sapiens; identical to SEQ ID NO: 205842
  chr20:49224900-49225488
  hypo

SEQ ID NO: 327870 - DNA, 323 bp, Homo sapiens; identical to SEQ ID NO: 205843
  chr20:49225976-49226299
  hypo

SEQ ID NO: 327871 - DNA, 99 bp, Homo sapiens; identical to SEQ ID NO: 220043
  chr20:49230488-49230587
  hypo

SEQ ID NO: 327872 - DNA, 173 bp, Homo sapiens; identical to SEQ ID NO: 220044
  chr20:49236429-49236602
  hypo

SEQ ID NO: 327873 - DNA, 160 bp, Homo sapiens; identical to SEQ ID NO: 220045
  chr20:49240802-49240962
  hypo

SEQ ID NO: 327874 - DNA, 101 bp, Homo sapiens; identical to SEQ ID NO: 220046
  chr20:49244321-49244422
  hypo

SEQ ID NO: 327875 - DNA, 144 bp, Homo sapiens; identical to SEQ ID NO: 220047
  chr20:49247308-49247452
  hypo

SEQ ID NO: 327876 - DNA, 150 bp, Homo sapiens; identical to SEQ ID NO: 220048
  chr20:49264294-49264444
  hypo

SEQ ID NO: 327877 - DNA, 203 bp, Homo sapiens; identical to SEQ ID NO: 220049
  chr20:49282236-49282439
  hypo

SEQ ID NO: 327878 - DNA, 97 bp, Homo sapiens; identical to SEQ ID NO: 275360
  chr20:49284101-49284198
  hypo

SEQ ID NO: 327879 - DNA, 180 bp, Homo sapiens; identical to SEQ ID NO: 275362
  chr20:49289683-49289863
  hypo

SEQ ID NO: 327880 - DNA, 378 bp, Homo sapiens; identical to SEQ ID NO: 275363
  chr20:49290277-49290655
  hypo

SEQ ID NO: 327881 - DNA, 217 bp, Homo sapiens; identical to SEQ ID NO: 275364
  chr20:49294480-49294697
  hypo

SEQ ID NO: 327882 - DNA, 76 bp, Homo sapiens; identical to SEQ ID NO: 275365
  chr20:49302564-49302640
  hypo

SEQ ID NO: 327883 - DNA, 90 bp, Homo sapiens; identical to SEQ ID NO: 275366
  chr20:49318873-49318963
  hypo

SEQ ID NO: 327884 - DNA, 31 bp, Homo sapiens; identical to SEQ ID NO: 220051
  chr20:49323815-49323846
  hypo

SEQ ID NO: 327885 - DNA, 76 bp, Homo sapiens; identical to SEQ ID NO: 220052
  chr20:49331494-49331570
  hypo

SEQ ID NO: 327886 - DNA, 120 bp, Homo sapiens
  chr20:49345551-49345671
  hypo
cttatacaacccaggcgcacgggttgaaataattttccttaagaaatccaggaagctctggcctggccctccctctagaaaggaaagtccaagtaaagagggatgccacacctggggaag

SEQ ID NO: 327887 - DNA, 43 bp, Homo sapiens; identical to SEQ ID NO: 275371
  chr20:49355686-49355729
  hypo

SEQ ID NO: 327888 - DNA, 69 bp, Homo sapiens; identical to SEQ ID NO: 220053
  chr20:49406843-49406912
  hypo

SEQ ID NO: 327889 - DNA, 193 bp, Homo sapiens; identical to SEQ ID NO: 275377
  chr20:49467237-49467430
  hypo

SEQ ID NO: 327890 - DNA, 77 bp, Homo sapiens; identical to SEQ ID NO: 275378
  chr20:49468873-49468950
  hypo

SEQ ID NO: 327891 - DNA, 480 bp, Homo sapiens; identical to SEQ ID NO: 275379
  chr20:49487403-49487883
  hypo

SEQ ID NO: 327892 - DNA, 33 bp, Homo sapiens; identical to SEQ ID NO: 220054
  chr20:49556446-49556479
  hypo

SEQ ID NO: 327893 - DNA, 105 bp, Homo sapiens; identical to SEQ ID NO: 275381
  chr20:49620547-49620652
  hypo

SEQ ID NO: 327894 - DNA, 459 bp, Homo sapiens; identical to SEQ ID NO: 275382
  chr20:49620878-49621337
  hypo

SEQ ID NO: 327895 - DNA, 93 bp, Homo sapiens
  chr20:49948210-49948303
  hypo
cagcctgcccaggacgcgccgttctgcggggaccacagctcccactgcgagcagggccagccaggcagagccttggaaaaatgctgcggcggg

SEQ ID NO: 327896 - DNA, 59 bp, Homo sapiens
  chr20:49948333-49948392
  hypo
ccgccccaaatccgcccgtggcctcctgccaaccgagtgggattcggtacattggttta

SEQ ID NO: 327897 - DNA, 117 bp, Homo sapiens; identical to SEQ ID NO: 220055
  chr20:50084694-50084811
  hypo

SEQ ID NO: 327898 - DNA, 60 bp, Homo sapiens; identical to SEQ ID NO: 275386
  chr20:50104487-50104547
  hypo

SEQ ID NO: 327899 - DNA, 413 bp, Homo sapiens; identical to SEQ ID NO: 275387
  chr20:50150222-50150635
  hypo

SEQ ID NO: 327900 - DNA, 367 bp, Homo sapiens; identical to SEQ ID NO: 275388
  chr20:50199790-50200157
  hypo

SEQ ID NO: 327901 - DNA, 320 bp, Homo sapiens; identical to SEQ ID NO: 275389
  chr20:50208575-50208895
  hypo

SEQ ID NO: 327902 - DNA, 79 bp, Homo sapiens; identical to SEQ ID NO: 275390
  chr20:50213712-50213791
  hypo

SEQ ID NO: 327903 - DNA, 200 bp, Homo sapiens; identical to SEQ ID NO: 275391
  chr20:50293891-50294091
  hypo

SEQ ID NO: 327904 - DNA, 31 bp, Homo sapiens; identical to SEQ ID NO: 220056
  chr20:50326111-50326142
  hypo

SEQ ID NO: 327905 - DNA, 102 bp, Homo sapiens; identical to SEQ ID NO: 220057
  chr20:50337348-50337450
  hypo

SEQ ID NO: 327906 - DNA, 41 bp, Homo sapiens; identical to SEQ ID NO: 220058
  chr20:50346533-50346574
  hypo

SEQ ID NO: 327907 - DNA, 135 bp, Homo sapiens; identical to SEQ ID NO: 220059
  chr20:50378297-50378432
  hypo

SEQ ID NO: 327908 - DNA, 47 bp, Homo sapiens
  chr20:50378462-50378509
  hypo
aactcttccaacttctagagtcccccgcattccttggctcatggccc

SEQ ID NO: 327909 - DNA, 590 bp, Homo sapiens; identical to SEQ ID NO: 205847
  chr20:50383655-50384245
  hypo

SEQ ID NO: 327910 - DNA, 243 bp, Homo sapiens; identical to SEQ ID NO: 205849
  chr20:50384928-50385171
  hypo

SEQ ID NO: 327911 - DNA, 93 bp, Homo sapiens; identical to SEQ ID NO: 220062
  chr20:50390636-50390729
  hypo

SEQ ID NO: 327912 - DNA, 79 bp, Homo sapiens; identical to SEQ ID NO: 220063
  chr20:50405412-50405491
  hypo

SEQ ID NO: 327913 - DNA, 208 bp, Homo sapiens; identical to SEQ ID NO: 275398
  chr20:50406978-50407186
  hypo

SEQ ID NO: 327914 - DNA, 193 bp, Homo sapiens; identical to SEQ ID NO: 220064
  chr20:50407493-50407686
  hypo

SEQ ID NO: 327915 - DNA, 155 bp, Homo sapiens; identical to SEQ ID NO: 220065
  chr20:50407905-50408060
  hypo

SEQ ID NO: 327916 - DNA, 149 bp, Homo sapiens; identical to SEQ ID NO: 220066
  chr20:50408300-50408449
  hypo

SEQ ID NO: 327917 - DNA, 178 bp, Homo sapiens; identical to SEQ ID NO: 275402
  chr20:50408658-50408836
  hypo

SEQ ID NO: 327918 - DNA, 38 bp, Homo sapiens; identical to SEQ ID NO: 275403
  chr20:50411955-50411993
  hypo

SEQ ID NO: 327919 - DNA, 83 bp, Homo sapiens
  chr20:50419388-50419471
  hypo
acggctttatttggtagttacttgctccaaagattacttggtaaggttgatgtccaccagccgagaagggagatctcttcaca

SEQ ID NO: 327920 - DNA, 31 bp, Homo sapiens; identical to SEQ ID NO: 220067
  chr20:50430800-50430831
  hypo

SEQ ID NO: 327921 - DNA, 38 bp, Homo sapiens; identical to SEQ ID NO: 220068
  chr20:50441826-50441864
  hypo

SEQ ID NO: 327922 - DNA, 157 bp, Homo sapiens; identical to SEQ ID NO: 275407
  chr20:50451581-50451738
  hypo

SEQ ID NO: 327923 - DNA, 42 bp, Homo sapiens; identical to SEQ ID NO: 275408
  chr20:50591574-50591616
  hypo

SEQ ID NO: 327924 - DNA, 300 bp, Homo sapiens; identical to SEQ ID NO: 275409
  chr20:50602381-50602681
  hypo

SEQ ID NO: 327925 - DNA, 200 bp, Homo sapiens; identical to SEQ ID NO: 275410
  chr20:50633365-50633565
  hypo

SEQ ID NO: 327926 - DNA, 34 bp, Homo sapiens; identical to SEQ ID NO: 220070
  chr20:50805266-50805300
  hypo

SEQ ID NO: 327927 - DNA, 120 bp, Homo sapiens; identical to SEQ ID NO: 220071
  chr20:50805540-50805660
  hypo

SEQ ID NO: 327928 - DNA, 33 bp, Homo sapiens; identical to SEQ ID NO: 220072
  chr20:50805900-50805933
  hypo

SEQ ID NO: 327929 - DNA, 42 bp, Homo sapiens; identical to SEQ ID NO: 275414
  chr20:51794668-51794710
  hypo

SEQ ID NO: 327930 - DNA, 139 bp, Homo sapiens; identical to SEQ ID NO: 275415
  chr20:51870537-51870676
  hypo

SEQ ID NO: 327931 - DNA, 43 bp, Homo sapiens; identical to SEQ ID NO: 220073
  chr20:52179947-52179990
  hypo

SEQ ID NO: 327932 - DNA, 338 bp, Homo sapiens; identical to SEQ ID NO: 275417
  chr20:52198075-52198413
  hypo

SEQ ID NO: 327933 - DNA, 166 bp, Homo sapiens; identical to SEQ ID NO: 205855
  chr20:52209197-52209363
  hypo

SEQ ID NO: 327934 - DNA, 182 bp, Homo sapiens; identical to SEQ ID NO: 275418
  chr20:52214813-52214995
  hypo

SEQ ID NO: 327935 - DNA, 250 bp, Homo sapiens; identical to SEQ ID NO: 275419
  chr20:52234390-52234640
  hypo

SEQ ID NO: 327936 - DNA, 32 bp, Homo sapiens; identical to SEQ ID NO: 220075
  chr20:52281658-52281690
  hypo

SEQ ID NO: 327937 - DNA, 39 bp, Homo sapiens; identical to SEQ ID NO: 275421
  chr20:52305003-52305042
  hypo

SEQ ID NO: 327938 - DNA, 77 bp, Homo sapiens; identical to SEQ ID NO: 220076
  chr20:52311776-52311853
  hypo

SEQ ID NO: 327939 - DNA, 198 bp, Homo sapiens; identical to SEQ ID NO: 275424
  chr20:52374063-52374261
  hypo

SEQ ID NO: 327940 - DNA, 182 bp, Homo sapiens; identical to SEQ ID NO: 275425
  chr20:52481243-52481425
  hypo

SEQ ID NO: 327941 - DNA, 259 bp, Homo sapiens; identical to SEQ ID NO: 275426
  chr20:52538411-52538670
  hypo

SEQ ID NO: 327942 - DNA, 216 bp, Homo sapiens; identical to SEQ ID NO: 275427
  chr20:52685953-52686169
  hypo

SEQ ID NO: 327943 - DNA, 161 bp, Homo sapiens; identical to SEQ ID NO: 275428
  chr20:52758814-52758975
  hypo

SEQ ID NO: 327944 - DNA, 145 bp, Homo sapiens
  chr20:52773806-52773951
  hypo
ggatgtcgtatttgcggacaatctgtaatgcacacgcacacaaaaacagaattacccctctcttcttctgccttgtgaaacagcacagaacataattgcagaaaccggtaaaggttttacccaacaaagagccaaatgcagttga

SEQ ID NO: 327945 - DNA, 70 bp, Homo sapiens; identical to SEQ ID NO: 275431
  chr20:54681487-54681557
  hypo

SEQ ID NO: 327946 - DNA, 38 bp, Homo sapiens; identical to SEQ ID NO: 275432
  chr20:54747158-54747196
  hypo

SEQ ID NO: 327947 - DNA, 112 bp, Homo sapiens
  chr20:54880344-54880456
  hypo
cccacaacttggtaataattgggaggccagcgccagactgagtggattcaacagtcattaagcaaaatgcaaaagttaaaccagagcctcgctggatcgcacagctgttcct

SEQ ID NO: 327948 - DNA, 42 bp, Homo sapiens; identical to SEQ ID NO: 275434
  chr20:54931802-54931844
  hypo

SEQ ID NO: 327949 - DNA, 393 bp, Homo sapiens; identical to SEQ ID NO: 205861
  chr20:54934126-54934519
  hypo

SEQ ID NO: 327950 - DNA, 128 bp, Homo sapiens; identical to SEQ ID NO: 220079
  chr20:54944844-54944972
  hypo

SEQ ID NO: 327951 - DNA, 103 bp, Homo sapiens; identical to SEQ ID NO: 275436
  chr20:55026766-55026869
  hypo

SEQ ID NO: 327952 - DNA, 34 bp, Homo sapiens
  chr20:55071606-55071640
  hypo
atcagtcagtcaatcaatcaatcaatcaatctat

SEQ ID NO: 327953 - DNA, 50 bp, Homo sapiens; identical to SEQ ID NO: 275438
  chr20:55091876-55091926
  hypo

SEQ ID NO: 327954 - DNA, 135 bp, Homo sapiens; identical to SEQ ID NO: 205864
  chr20:55206463-55206598
  hypo

SEQ ID NO: 327955 - DNA, 109 bp, Homo sapiens; identical to SEQ ID NO: 205865
  chr20:55206774-55206883
  hypo

SEQ ID NO: 327956 - DNA, 113 bp, Homo sapiens; identical to SEQ ID NO: 275439
  chr20:55667945-55668058
  hypo

SEQ ID NO: 327957 - DNA, 32 bp, Homo sapiens; identical to SEQ ID NO: 275440
  chr20:55668445-55668477
  hypo

SEQ ID NO: 327958 - DNA, 140 bp, Homo sapiens
  chr20:55685233-55685373
  hypo
tctccagctgaccactgttccgtgaggctgtctgagcaggcttcgctatgcacgcataatagcgacagcgcaaacagcagcagcagcagcagcctcagctggctcggcggggcttggctcagcgtgtgcggggtgctgag

SEQ ID NO: 327959 - DNA, 49 bp, Homo sapiens
  chr20:55685803-55685852
  hypo
tccggctgcattcgcactctttccctccgactcaaccatggcagtgagg

SEQ ID NO: 327960 - DNA, 152 bp, Homo sapiens; identical to SEQ ID NO: 275442
  chr20:55692780-55692932
  hypo

SEQ ID NO: 327961 - DNA, 240 bp, Homo sapiens; identical to SEQ ID NO: 275443
  chr20:55740618-55740858
  hypo

SEQ ID NO: 327962 - DNA, 171 bp, Homo sapiens; identical to SEQ ID NO: 275444
  chr20:55742062-55742233
  hypo

SEQ ID NO: 327963 - DNA, 122 bp, Homo sapiens; identical to SEQ ID NO: 275445
  chr20:55748184-55748306
  hypo

SEQ ID NO: 327964 - DNA, 39 bp, Homo sapiens; identical to SEQ ID NO: 275446
  chr20:55797062-55797101
  hypo

SEQ ID NO: 327965 - DNA, 229 bp, Homo sapiens; identical to SEQ ID NO: 275447
  chr20:55904350-55904579
  hypo

SEQ ID NO: 327966 - DNA, 45 bp, Homo sapiens; identical to SEQ ID NO: 220082
  chr20:55925556-55925601
  hypo

SEQ ID NO: 327967 - DNA, 64 bp, Homo sapiens; identical to SEQ ID NO: 275449
  chr20:55936563-55936627
  hypo

SEQ ID NO: 327968 - DNA, 37 bp, Homo sapiens; identical to SEQ ID NO: 220083
  chr20:55959339-55959376
  hypo

SEQ ID NO: 327969 - DNA, 145 bp, Homo sapiens; identical to SEQ ID NO: 205870
  chr20:55966824-55966969
  hypo

SEQ ID NO: 327970 - DNA, 71 bp, Homo sapiens; identical to SEQ ID NO: 275452
  chr20:55969232-55969303
  hypo

SEQ ID NO: 327971 - DNA, 218 bp, Homo sapiens; identical to SEQ ID NO: 220085
  chr20:55969522-55969740
  hypo

SEQ ID NO: 327972 - DNA, 165 bp, Homo sapiens; identical to SEQ ID NO: 275454
  chr20:55981561-55981726
  hypo

SEQ ID NO: 327973 - DNA, 62 bp, Homo sapiens; identical to SEQ ID NO: 275455
  chr20:55996755-55996817
  hypo

SEQ ID NO: 327974 - DNA, 260 bp, Homo sapiens; identical to SEQ ID NO: 220086
  chr20:56001371-56001631
  hypo

SEQ ID NO: 327975 - DNA, 104 bp, Homo sapiens
  chr20:56031298-56031402
  hypo
gggcagaggcaagccaggcaggccacgtcggccacctccttggcgctccccaggtatgccgggcacatttcagccccggggcctttgcacggcctggaaggctc

SEQ ID NO: 327976 - DNA, 274 bp, Homo sapiens; identical to SEQ ID NO: 275458
  chr20:56076054-56076328
  hypo

SEQ ID NO: 327977 - DNA, 205 bp, Homo sapiens; identical to SEQ ID NO: 220087
  chr20:56099534-56099739
  hypo

SEQ ID NO: 327978 - DNA, 119 bp, Homo sapiens; identical to SEQ ID NO: 275460
  chr20:56115074-56115193
  hypo

SEQ ID NO: 327979 - DNA, 371 bp, Homo sapiens; identical to SEQ ID NO: 220088
  chr20:56126192-56126563
  hypo

SEQ ID NO: 327980 - DNA, 155 bp, Homo sapiens; identical to SEQ ID NO: 275462
  chr20:56167908-56168063
  hypo

SEQ ID NO: 327981 - DNA, 148 bp, Homo sapiens; identical to SEQ ID NO: 275463
  chr20:56186966-56187114
  hypo

SEQ ID NO: 327982 - DNA, 103 bp, Homo sapiens; identical to SEQ ID NO: 275464
  chr20:56227531-56227634
  hypo

SEQ ID NO: 327983 - DNA, 649 bp, Homo sapiens; identical to SEQ ID NO: 275465
  chr20:56239140-56239789
  hypo

SEQ ID NO: 327984 - DNA, 102 bp, Homo sapiens; identical to SEQ ID NO: 275466
  chr20:56262196-56262298
  hypo

SEQ ID NO: 327985 - DNA, 145 bp, Homo sapiens; identical to SEQ ID NO: 220089
  chr20:56264917-56265062
  hypo

SEQ ID NO: 327986 - DNA, 38 bp, Homo sapiens; identical to SEQ ID NO: 220090
  chr20:56265326-56265364
  hypo

SEQ ID NO: 327987 - DNA, 89 bp, Homo sapiens
  chr20:56266027-56266116
  hypo
cagagaagcagggttagagaaagctggtcctggtgcctcctcctcgtccctaccggcccctcggtcttttcctacgggacttctgaaaa

SEQ ID NO: 327988 - DNA, 140 bp, Homo sapiens; identical to SEQ ID NO: 275470
  chr20:56270430-56270570
  hypo

SEQ ID NO: 327989 - DNA, 95 bp, Homo sapiens; identical to SEQ ID NO: 275472
  chr20:56299650-56299745
  hypo

SEQ ID NO: 327990 - DNA, 77 bp, Homo sapiens; identical to SEQ ID NO: 275473
  chr20:56323232-56323309
  hypo

SEQ ID NO: 327991 - DNA, 67 bp, Homo sapiens; identical to SEQ ID NO: 275474
  chr20:56717706-56717773
  hypo

SEQ ID NO: 327992 - DNA, 93 bp, Homo sapiens
  chr20:56772299-56772392
  hypo
tgctaggtcagcagatctttgaggacggagccaggctcacacttctgtggcactgatgctgtcccaccagcacaccgtcgtaagcattcacga

SEQ ID NO: 327993 - DNA, 213 bp, Homo sapiens; identical to SEQ ID NO: 220091
  chr20:56780225-56780438
  hypo

SEQ ID NO: 327994 - DNA, 60 bp, Homo sapiens; identical to SEQ ID NO: 220092
  chr20:56780951-56781011
  hypo

SEQ ID NO: 327995 - DNA, 117 bp, Homo sapiens; identical to SEQ ID NO: 220093
  chr20:56781104-56781221
  hypo

SEQ ID NO: 327996 - DNA, 448 bp, Homo sapiens; identical to SEQ ID NO: 294906
  chr20:56784797-56785245
  hypo

SEQ ID NO: 327997 - DNA, 224 bp, Homo sapiens; identical to SEQ ID NO: 226188
  chr20:56811736-56811960
  hypo

SEQ ID NO: 327998 - DNA, 35 bp, Homo sapiens; identical to SEQ ID NO: 220095
  chr20:56941012-56941047
  hypo

SEQ ID NO: 327999 - DNA, 336 bp, Homo sapiens; identical to SEQ ID NO: 275478
  chr20:56941588-56941924
  hypo

SEQ ID NO: 328000 - DNA, 154 bp, Homo sapiens; identical to SEQ ID NO: 220097
  chr20:56977720-56977874
  hypo

SEQ ID NO: 328001 - DNA, 83 bp, Homo sapiens; identical to SEQ ID NO: 275480
  chr20:56999385-56999468
  hypo

SEQ ID NO: 328002 - DNA, 182 bp, Homo sapiens; identical to SEQ ID NO: 220098
  chr20:57009363-57009545
  hypo

SEQ ID NO: 328003 - DNA, 33 bp, Homo sapiens; identical to SEQ ID NO: 275482
  chr20:57036551-57036584
  hypo

SEQ ID NO: 328004 - DNA, 185 bp, Homo sapiens; identical to SEQ ID NO: 275483
  chr20:57037020-57037205
  hypo

SEQ ID NO: 328005 - DNA, 162 bp, Homo sapiens; identical to SEQ ID NO: 220099
  chr20:57041475-57041637
  hypo

SEQ ID NO: 328006 - DNA, 183 bp, Homo sapiens; identical to SEQ ID NO: 275485
  chr20:57070698-57070881
  hypo

SEQ ID NO: 328007 - DNA, 212 bp, Homo sapiens; identical to SEQ ID NO: 275486
  chr20:57154976-57155188
  hypo

SEQ ID NO: 328008 - DNA, 88 bp, Homo sapiens; identical to SEQ ID NO: 275487
  chr20:57213159-57213247
  hypo

SEQ ID NO: 328009 - DNA, 127 bp, Homo sapiens; identical to SEQ ID NO: 205874
  chr20:57225466-57225593
  hypo

SEQ ID NO: 328010 - DNA, 160 bp, Homo sapiens; identical to SEQ ID NO: 275488
  chr20:57240788-57240948
  hypo

SEQ ID NO: 328011 - DNA, 38 bp, Homo sapiens; identical to SEQ ID NO: 220101
  chr20:57241750-57241788
  hypo

SEQ ID NO: 328012 - DNA, 234 bp, Homo sapiens; identical to SEQ ID NO: 220102
  chr20:57244309-57244543
  hypo

SEQ ID NO: 328013 - DNA, 185 bp, Homo sapiens; identical to SEQ ID NO: 220103
  chr20:57268976-57269161
  hypo

SEQ ID NO: 328014 - DNA, 308 bp, Homo sapiens; identical to SEQ ID NO: 275492
  chr20:57375851-57376159
  hypo

SEQ ID NO: 328015 - DNA, 264 bp, Homo sapiens; identical to SEQ ID NO: 275493
  chr20:57386554-57386818
  hypo

SEQ ID NO: 328016 - DNA, 107 bp, Homo sapiens
  chr20:57392407-57392514
  hypo
agagagcctccggaaggggagcgggcaccggcgaggatggcaccgcatcctgcaggtgctcgtggctgagggtgggaggtaggtaaaactcccggcagtggggaccc

SEQ ID NO: 328017 - DNA, 208 bp, Homo sapiens; identical to SEQ ID NO: 226190
  chr20:57414593-57414801
  hypo

SEQ ID NO: 328018 - DNA, 158 bp, Homo sapiens; identical to SEQ ID NO: 205875
  chr20:57415180-57415338
  hypo

SEQ ID NO: 328019 - DNA, 302 bp, Homo sapiens; identical to SEQ ID NO: 205876
  chr20:57415539-57415841
  hypo

SEQ ID NO: 328020 - DNA, 2076 bp, Homo sapiens; identical to SEQ ID NO: 205877
  chr20:57428311-57430387
  hypo

SEQ ID NO: 328021 - DNA, 33 bp, Homo sapiens; identical to SEQ ID NO: 205879
  chr20:57470653-57470686
  hypo

SEQ ID NO: 328022 - DNA, 251 bp, Homo sapiens; identical to SEQ ID NO: 205880
  chr20:57478608-57478859
  hypo

SEQ ID NO: 328023 - DNA, 397 bp, Homo sapiens; identical to SEQ ID NO: 205881
  chr20:57484445-57484842
  hypo

SEQ ID NO: 328024 - DNA, 204 bp, Homo sapiens; identical to SEQ ID NO: 205882
  chr20:57485751-57485955
  hypo

SEQ ID NO: 328025 - DNA, 37 bp, Homo sapiens; identical to SEQ ID NO: 275496
  chr20:57547947-57547984
  hypo

SEQ ID NO: 328026 - DNA, 113 bp, Homo sapiens
  chr20:57554935-57555048
  hypo
gtaaaggctgaaaaagttgccgaaaggattagaagcatcacgcaatataccaatgtaacaaacctgcacacgcaccgaatctaaaattaaaacaaaacaaaaacacaacaacc

SEQ ID NO: 328027 - DNA, 59 bp, Homo sapiens
  chr20:57555078-57555137
  hypo
gctgtcatattctcaccccctacttcacgctgggaatcgagctgcgggctttacaacag

SEQ ID NO: 328028 - DNA, 437 bp, Homo sapiens; identical to SEQ ID NO: 275498
  chr20:57571497-57571934
  hypo

SEQ ID NO: 328029 - DNA, 230 bp, Homo sapiens; identical to SEQ ID NO: 220111
  chr20:57577637-57577867
  hypo

SEQ ID NO: 328030 - DNA, 269 bp, Homo sapiens; identical to SEQ ID NO: 220112
  chr20:57578208-57578477
  hypo

SEQ ID NO: 328031 - DNA, 202 bp, Homo sapiens; identical to SEQ ID NO: 220113
  chr20:57578998-57579200
  hypo

SEQ ID NO: 328032 - DNA, 183 bp, Homo sapiens
  chr20:57699822-57700005
  hypo
ggaataaaatggctcttatcgcagtgggcttggcagcccgccactcctcatctttgctggtggaacctctagttggtttcggtgtccaccctcctccacgctgggagtgtgttcaggatgaggatcccatccccgtgcacggggtcaagtctgattggaggcgatcatttctggctgtcacat

SEQ ID NO: 328033 - DNA, 60 bp, Homo sapiens
  chr20:57767483-57767543
  hypo
gcgctccacctggacgcccccagacaagtctcggcccctcttcttccactccgtccccac

SEQ ID NO: 328034 - DNA, 57 bp, Homo sapiens; identical to SEQ ID NO: 205883
  chr20:57797335-57797392
  hypo

SEQ ID NO: 328035 - DNA, 347 bp, Homo sapiens; identical to SEQ ID NO: 294928
  chr20:57797935-57798282
  hypo

SEQ ID NO: 328036 - DNA, 176 bp, Homo sapiens; identical to SEQ ID NO: 205885
  chr20:57875365-57875541
  hypo

SEQ ID NO: 328037 - DNA, 223 bp, Homo sapiens; identical to SEQ ID NO: 205886
  chr20:57875889-57876112
  hypo

SEQ ID NO: 328038 - DNA, 254 bp, Homo sapiens; identical to SEQ ID NO: 205887
  chr20:57978841-57979095
  hypo

SEQ ID NO: 328039 - DNA, 87 bp, Homo sapiens; identical to SEQ ID NO: 275505
  chr20:58045741-58045828
  hypo

SEQ ID NO: 328040 - DNA, 122 bp, Homo sapiens; identical to SEQ ID NO: 275506
  chr20:58166170-58166292
  hypo

SEQ ID NO: 328041 - DNA, 88 bp, Homo sapiens; identical to SEQ ID NO: 294936
  chr20:58180712-58180800
  hypo

SEQ ID NO: 328042 - DNA, 110 bp, Homo sapiens; identical to SEQ ID NO: 220120
  chr20:58397113-58397223
  hypo

SEQ ID NO: 328043 - DNA, 78 bp, Homo sapiens; identical to SEQ ID NO: 275508
  chr20:58407607-58407685
  hypo

SEQ ID NO: 328044 - DNA, 400 bp, Homo sapiens; identical to SEQ ID NO: 275509
  chr20:58507041-58507441
  hypo

SEQ ID NO: 328045 - DNA, 258 bp, Homo sapiens; identical to SEQ ID NO: 220122
  chr20:58508063-58508321
  hypo

SEQ ID NO: 328046 - DNA, 76 bp, Homo sapiens; identical to SEQ ID NO: 220123
  chr20:58514021-58514097
  hypo

SEQ ID NO: 328047 - DNA, 129 bp, Homo sapiens; identical to SEQ ID NO: 205890
  chr20:58514400-58514529
  hypo

SEQ ID NO: 328048 - DNA, 285 bp, Homo sapiens; identical to SEQ ID NO: 294939
  chr20:58514845-58515130
  hypo

SEQ ID NO: 328049 - DNA, 111 bp, Homo sapiens; identical to SEQ ID NO: 294940
  chr20:58515465-58515576
  hypo

SEQ ID NO: 328050 - DNA, 142 bp, Homo sapiens; identical to SEQ ID NO: 275512
  chr20:59225186-59225328
  hypo

SEQ ID NO: 328051 - DNA, 36 bp, Homo sapiens; identical to SEQ ID NO: 275513
  chr20:59330841-59330877
  hypo

SEQ ID NO: 328052 - DNA, 316 bp, Homo sapiens
  chr20:59598905-59599221
  hypo
acgcagccactcgcaggagcccgcctcccacacggccactggcaggagcctccgcccacgcggccactcgcagggagccccccacccacgcggccactcgcaggagcccccacccacgcggccactcgcaggagccccccacccacgcggccactcgcaggagcacgcggccactcgcaggagcccgcctcccacacggccactggcaggagcccccgcccacgcggccactcgcagggagccccccacccacgtggccactcgcaggagcccccgcccacgcggccactcgcagggagccccccacccacacggc

SEQ ID NO: 328053 - DNA, 38 bp, Homo sapiens; identical to SEQ ID NO: 294941
  chr20:59804278-59804316
  hypo

SEQ ID NO: 328054 - DNA, 103 bp, Homo sapiens; identical to SEQ ID NO: 275515
  chr20:59832949-59833052
  hypo

SEQ ID NO: 328055 - DNA, 82 bp, Homo sapiens; identical to SEQ ID NO: 275516
  chr20:59871230-59871312
  hypo

SEQ ID NO: 328056 - DNA, 467 bp, Homo sapiens; identical to SEQ ID NO: 275517
  chr20:59872750-59873217
  hypo

SEQ ID NO: 328057 - DNA, 519 bp, Homo sapiens; identical to SEQ ID NO: 275518
  chr20:59965387-59965906
  hypo

SEQ ID NO: 328058 - DNA, 252 bp, Homo sapiens; identical to SEQ ID NO: 220126
  chr20:60094624-60094876
  hypo

SEQ ID NO: 328059 - DNA, 195 bp, Homo sapiens; identical to SEQ ID NO: 275520
  chr20:60098286-60098481
  hypo

SEQ ID NO: 328060 - DNA, 287 bp, Homo sapiens
  chr20:60119294-60119581
  hypo
gtgtatgtatatggcggggtacggctgacatcgagcgggtggaggctgggtacggctaaacaccccacagcccaggacagcctcgcagcagaagcatccagctccatgtatcactcgtgtccaggccgagaaacccgacgtagaaatccagcttgcccaggagagaggggtgggactcctggtgttcacttcgtagctgttctgtggtgggagcgcagtgggagccgcagggcatcggggtcttcgaaggaaagcccgtggattatgcatccaggaattaaagcagt

SEQ ID NO: 328061 - DNA, 149 bp, Homo sapiens; identical to SEQ ID NO: 275523
  chr20:60173821-60173970
  hypo

SEQ ID NO: 328062 - DNA, 44 bp, Homo sapiens; identical to SEQ ID NO: 275524
  chr20:60176907-60176951
  hypo

SEQ ID NO: 328063 - DNA, 42 bp, Homo sapiens; identical to SEQ ID NO: 275525
  chr20:60194626-60194668
  hypo

SEQ ID NO: 328064 - DNA, 329 bp, Homo sapiens; identical to SEQ ID NO: 275526
  chr20:60198708-60199037
  hypo

SEQ ID NO: 328065 - DNA, 445 bp, Homo sapiens; identical to SEQ ID NO: 275528
  chr20:60226061-60226506
  hypo

SEQ ID NO: 328066 - DNA, 175 bp, Homo sapiens; identical to SEQ ID NO: 275529
  chr20:60236697-60236872
  hypo

SEQ ID NO: 328067 - DNA, 352 bp, Homo sapiens; identical to SEQ ID NO: 220128
  chr20:60238496-60238848
  hypo

SEQ ID NO: 328068 - DNA, 51 bp, Homo sapiens; identical to SEQ ID NO: 220129
  chr20:60261583-60261634
  hypo

SEQ ID NO: 328069 - DNA, 31 bp, Homo sapiens; identical to SEQ ID NO: 220130
  chr20:60261672-60261703
  hypo

SEQ ID NO: 328070 - DNA, 345 bp, Homo sapiens
  chr20:60273150-60273495
  hypo
tagccgcacgttgctggacagcacagacctggcacgtgtcgtccaccctcggaggggtccccttgcacgggctccactccggacggtccctgagactctcccgccctcacgcctgctctctaagccaagcacaaagccaagtgcagcccccactgaccattccagcccatgccggcgtctgccccaggccccagatccgtcctgctggtgcgattgagggcacagagtcgagccttcaagtaggtcttctaatatggctccattcatgcagaaacctcccagtggggctgtgccaggcacttggaaagtgggagccgcagccctgccgtccgggtgcttcccatt

SEQ ID NO: 328071 - DNA, 581 bp, Homo sapiens; identical to SEQ ID NO: 275533
  chr20:60275649-60276230
  hypo

SEQ ID NO: 328072 - DNA, 51 bp, Homo sapiens
  chr20:60304094-60304145
  hypo
tctccagccgtcctcgcccatgtgggaatgacaagcaaggctttgcccatt

SEQ ID NO: 328073 - DNA, 89 bp, Homo sapiens
  chr20:60304328-60304417
  hypo
ccactgtgcttcgttccagtgggcaccagtaggactggctaatgaggcgctcacagctcagtttctacggccactgtggaaaagaactt

SEQ ID NO: 328074 - DNA, 267 bp, Homo sapiens; identical to SEQ ID NO: 275536
  chr20:60313850-60314117
  hypo

SEQ ID NO: 328075 - DNA, 219 bp, Homo sapiens; identical to SEQ ID NO: 220132
  chr20:60316298-60316517
  hypo

SEQ ID NO: 328076 - DNA, 183 bp, Homo sapiens; identical to SEQ ID NO: 275538
  chr20:60329680-60329863
  hypo

SEQ ID NO: 328077 - DNA, 68 bp, Homo sapiens; identical to SEQ ID NO: 220133
  chr20:60334003-60334071
  hypo

SEQ ID NO: 328078 - DNA, 31 bp, Homo sapiens; identical to SEQ ID NO: 220134
  chr20:60352646-60352677
  hypo

SEQ ID NO: 328079 - DNA, 368 bp, Homo sapiens; identical to SEQ ID NO: 220135
  chr20:60352702-60353070
  hypo

SEQ ID NO: 328080 - DNA, 190 bp, Homo sapiens; identical to SEQ ID NO: 220136
  chr20:60361300-60361490
  hypo

SEQ ID NO: 328081 - DNA, 351 bp, Homo sapiens; identical to SEQ ID NO: 275542
  chr20:60373189-60373540
  hypo

SEQ ID NO: 328082 - DNA, 159 bp, Homo sapiens; identical to SEQ ID NO: 275543
  chr20:60445701-60445860
  hypo

SEQ ID NO: 328083 - DNA, 132 bp, Homo sapiens; identical to SEQ ID NO: 220137
  chr20:60448951-60449083
  hypo

SEQ ID NO: 328084 - DNA, 62 bp, Homo sapiens
  chr20:60470124-60470186
  hypo
agtgacgcatggcccgtgcagggcaggaatgcactggcgtgcggcacagcctcctctctctc

SEQ ID NO: 328085 - DNA, 91 bp, Homo sapiens
  chr20:60470257-60470348
  hypo
ggagtggctcgattcctgatgtgcgcagtaggagagaggccggggctcagtcagggaggggaccggcggcggaggtcggttgccacctggg

SEQ ID NO: 328086 - DNA, 213 bp, Homo sapiens; identical to SEQ ID NO: 275547
  chr20:60482670-60482883
  hypo

SEQ ID NO: 328087 - DNA, 263 bp, Homo sapiens; identical to SEQ ID NO: 220138
  chr20:60485425-60485688
  hypo

SEQ ID NO: 328088 - DNA, 204 bp, Homo sapiens; identical to SEQ ID NO: 220139
  chr20:60494908-60495112
  hypo

SEQ ID NO: 328089 - DNA, 107 bp, Homo sapiens; identical to SEQ ID NO: 220140
  chr20:60495161-60495268
  hypo

SEQ ID NO: 328090 - DNA, 107 bp, Homo sapiens; identical to SEQ ID NO: 220141
  chr20:60495298-60495405
  hypo

SEQ ID NO: 328091 - DNA, 266 bp, Homo sapiens
  chr20:60495440-60495706
  hypo
ggtgtcgcggtgattgtgtggaagtgtggtgtgattgcgtggaagcgtgtcttggtgattgcatggaaatgtgtgattgcatggaagcgcagtgtcacggtgattgtgtggaagcgtgtcatggtgattatgtggaagtgtggtgtcgtgatgattgcatggaagcaccgtgtcatggtgattgtgtggaaatgtggtgtgattgcgtggaagcgtggtgtcacagtgattgcatggaagtgtggtgtcacagtgattgcatggaa

SEQ ID NO: 328092 - DNA, 557 bp, Homo sapiens; identical to SEQ ID NO: 275553
  chr20:60495766-60496323
  hypo

SEQ ID NO: 328093 - DNA, 469 bp, Homo sapiens; identical to SEQ ID NO: 275554
  chr20:60500127-60500596
  hypo

SEQ ID NO: 328094 - DNA, 69 bp, Homo sapiens; identical to SEQ ID NO: 275555
  chr20:60502077-60502146
  hypo

SEQ ID NO: 328095 - DNA, 46 bp, Homo sapiens
  chr20:60502540-60502586
  hypo
tcatctggagcggccgcgcctgcttttctcacagacacttccaaaa

SEQ ID NO: 328096 - DNA, 171 bp, Homo sapiens; identical to SEQ ID NO: 220143
  chr20:60503295-60503466
  hypo

SEQ ID NO: 328097 - DNA, 406 bp, Homo sapiens
  chr20:60507697-60508103
  hypo
ctcctgcagatacacgtatgcatgcttacacagacgcatgaagcacctacatccacgactcctgcggatacacgtatgcatgcttacacagacatgcatgaagcacctacatccacgaatgcacacgcacgtgggccgcacatgtgcacagatgtgtccttgcacatccaggcctgcatgtgcagagacatgcgcgtgtgcagtacaggtgtgcatgcacacatgggcacagtcatgcttgtgtgccacctgcatgtacatgcccacatagacacatggcaaacacagaggcacacatgcgcacacccgcagcacaccctgctcacgggcagccctcccccacagccatggtcctgctgtttgtcatgtggatgaagcggcgagagaaggagcgccacacgaagca

SEQ ID NO: 328098 - DNA, 371 bp, Homo sapiens; identical to SEQ ID NO: 275559
  chr20:60511744-60512115
  hypo

SEQ ID NO: 328099 - DNA, 87 bp, Homo sapiens; identical to SEQ ID NO: 220145
  chr20:60544918-60545005
  hypo

SEQ ID NO: 328100 - DNA, 208 bp, Homo sapiens; identical to SEQ ID NO: 220146
  chr20:60545058-60545266
  hypo

SEQ ID NO: 328101 - DNA, 265 bp, Homo sapiens; identical to SEQ ID NO: 220147
  chr20:60545296-60545561
  hypo

SEQ ID NO: 328102 - DNA, 418 bp, Homo sapiens; identical to SEQ ID NO: 275561
  chr20:60549275-60549693
  hypo

SEQ ID NO: 328103 - DNA, 203 bp, Homo sapiens; identical to SEQ ID NO: 275562
  chr20:60551197-60551400
  hypo

SEQ ID NO: 328104 - DNA, 141 bp, Homo sapiens; identical to SEQ ID NO: 220149
  chr20:60551924-60552065
  hypo

SEQ ID NO: 328105 - DNA, 164 bp, Homo sapiens; identical to SEQ ID NO: 205891
  chr20:60552337-60552501
  hypo

SEQ ID NO: 328106 - DNA, 372 bp, Homo sapiens; identical to SEQ ID NO: 220151
  chr20:60563049-60563421
  hypo

SEQ ID NO: 328107 - DNA, 150 bp, Homo sapiens; identical to SEQ ID NO: 220152
  chr20:60563782-60563932
  hypo

SEQ ID NO: 328108 - DNA, 71 bp, Homo sapiens; identical to SEQ ID NO: 275567
  chr20:60580209-60580280
  hypo

SEQ ID NO: 328109 - DNA, 70 bp, Homo sapiens; identical to SEQ ID NO: 220153
  chr20:60581687-60581757
  hypo

SEQ ID NO: 328110 - DNA, 783 bp, Homo sapiens
  chr20:60615350-60616133
  hypo
accagctactggcacgcacacgacacaccacttgggcaccacgcagaagtatcccgccaagggaaagggccagatgtgaggctcccactacataatctcatttatacaaaattctagaagaggcaaaatcacagtgacagcagcagctcagtggctgccggggaggaagctggagcaggggctcacccccaggggcacgaggctacagaatgattccgatcctgtactcgacggtggtggtgacgtgactatcgttaaaactcacagacctacaggctgagaaaggtgcgctctgccacgcgccaactacgcctccataaacggagatttaaaaagtagtatgtgctaacactgcatgcccactagaataggcaaaacagaaaagcctggccacgccaagagccagcaagatctcacggcagcagcactgagcccgcggatgaaactaaattcgcagagccgctcaggaacacagcctggcagtttctgacaagaccaaactcacaccttccgtacgactcagcgattccactcctaacatttacccaaaagaaaaggacgtctacacgtatgttcgcacaaaggcttgaacacaaatgttcaaaaagaagctttattcgtaatagccaaaaactggaaacatgccagactcctcagctggcaaatgtatagcgtacatccaaacagaaaccattccccataaaaataacaaactgtggacacgtgttgcacacgatgcccctccaagtactctgagtaggaagccggacaccagggagcaca

SEQ ID NO: 328111 - DNA, 34 bp, Homo sapiens
  chr20:60635123-60635157
  hypo
tgaccagacgccgcctcccggcctccctgtgctg

SEQ ID NO: 328112 - DNA, 280 bp, Homo sapiens
  chr20:60662808-60663088
  hypo
gctctgtacactcacctgcatgcactcacacgcgctcctatacactcacctgcacacgcactcacacaagctcttgtacactcacctgcacacgcactcacacaagctcttgtacactcactgcagactcacccacacacgctcctgtacactcacctgcatgcactcacatgtactcctgtacactcacctgcacactcacctgcacacgcacgcacacgtgctcctgtacactcacctgcatgcacacacatgcgctcctgtacgctcacctgcactc

SEQ ID NO: 328113 - DNA, 203 bp, Homo sapiens; identical to SEQ ID NO: 275573
  chr20:60687903-60688106
  hypo

SEQ ID NO: 328114 - DNA, 414 bp, Homo sapiens; identical to SEQ ID NO: 275574
  chr20:60691753-60692167
  hypo

SEQ ID NO: 328115 - DNA, 436 bp, Homo sapiens; identical to SEQ ID NO: 220155
  chr20:60725126-60725562
  hypo

SEQ ID NO: 328116 - DNA, 224 bp, Homo sapiens; identical to SEQ ID NO: 275576
  chr20:60735522-60735746
  hypo

SEQ ID NO: 328117 - DNA, 113 bp, Homo sapiens; identical to SEQ ID NO: 275577
  chr20:60740452-60740565
  hypo

SEQ ID NO: 328118 - DNA, 149 bp, Homo sapiens
  chr20:60756218-60756367
  hypo
agaagtgtttattttgtaggcactaagggtttctaaaacccttaacactggtaagggctcaaaaataaacgtatgtgttcatattcgatcaccgaaatgagagttcttaattgctaattgacaaacgcgttagcaatttcagttaggga

SEQ ID NO: 328119 - DNA, 370 bp, Homo sapiens; identical to SEQ ID NO: 220156
  chr20:60773878-60774248
  hypo

SEQ ID NO: 328120 - DNA, 195 bp, Homo sapiens; identical to SEQ ID NO: 220157
  chr20:60781094-60781289
  hypo

SEQ ID NO: 328121 - DNA, 266 bp, Homo sapiens
  chr20:60781567-60781833
  hypo
attggcggtcctcgggctgaggagggcgggagggtggaggtagccgtggacacaaaagggccatgccagggtcctcagaccatcaccctgtgtgttggcggtggggccacgagtctgcacgtgcgaaagaatcctgttggcttagtgtttcaggctgggaagatgaccggctctgaaggtggagggtggtgatgggagagccactgaaccgcacacttcagatagctcaagtggtgaactttatgtttatcaccacgataaaaaat

SEQ ID NO: 328122 - DNA, 240 bp, Homo sapiens; identical to SEQ ID NO: 220159
  chr20:60791330-60791570
  hypo

SEQ ID NO: 328123 - DNA, 90 bp, Homo sapiens; identical to SEQ ID NO: 275582
  chr20:60805901-60805991
  hypo

SEQ ID NO: 328124 - DNA, 200 bp, Homo sapiens; identical to SEQ ID NO: 220160
  chr20:60816041-60816241
  hypo

SEQ ID NO: 328125 - DNA, 223 bp, Homo sapiens; identical to SEQ ID NO: 220161
  chr20:60816433-60816656
  hypo

SEQ ID NO: 328126 - DNA, 79 bp, Homo sapiens; identical to SEQ ID NO: 220162
  chr20:60816686-60816765
  hypo

SEQ ID NO: 328127 - DNA, 85 bp, Homo sapiens; identical to SEQ ID NO: 220163
  chr20:60842013-60842098
  hypo

SEQ ID NO: 328128 - DNA, 458 bp, Homo sapiens; identical to SEQ ID NO: 220164
  chr20:60842462-60842920
  hypo

SEQ ID NO: 328129 - DNA, 38 bp, Homo sapiens; identical to SEQ ID NO: 275587
  chr20:60843220-60843258
  hypo

SEQ ID NO: 328130 - DNA, 34 bp, Homo sapiens; identical to SEQ ID NO: 220165
  chr20:60845091-60845125
  hypo

SEQ ID NO: 328131 - DNA, 581 bp, Homo sapiens
  chr20:60855790-60856371
  hypo
tgccgtgtgtgtttcgtgaggtggcctttcttttgacgacttcacaggaaagccatttgtctttgttcagtcttctttgattgcttattaacttgtcttgacatttaagtagaaagctttgtagatgctacaaaggaaagaagaagtacatttcaaacgcatgctaaatacacagcctccgtcgcaggggcttcaaagcagcgtgctgctctcccgcgggtgccggttgctgtgacccagccccgcctggtcgttgcgtcttgggtcacgtcgtgtcttggcttttctggactctcactgcttgttttctggtgtcttcacagacataatgaagcctacacctggaccaaccccacctgctgcgtccacaacgtcatcatcgggaagctgtggatagagcagtatgggacagtggagattttaaaccacaggtgacagcaccccaccgttgggtgagagcgcgaggctccgggtggggatgggcgagccggggagcgtgagcatccgtgctcctggtgggttttagctcagcctcacgagctgctgccgtgtccccgccagcccaggcatagcagctgcct

SEQ ID NO: 328132 - DNA, 461 bp, Homo sapiens
  chr20:60856401-60856862
  hypo
atgctcctcgttcaagacctcgtttttcgtcacggttgttactttaaggctttgagctatgctgaagagctgtgtcattgccaggtgcagcgcagtggccgtccacggccgttggccactgtctaggcttgaatgccctattcctggaagctcatgactggtgggctttgccttttcaccactttagtgaggtataatcgatgcatcataagactcgcccattctgaatggacacttaagtgatttttagtaaattgaccgaatcatggagccgtccccacagcccatttcaaacacttccatcgccccaaaggcccaccacacccatttgcagtcaccccccgcctgccccaggggcctccaccgcgcttctcctgttacagagttaccctttccggctgtttgctgtcttgcagcagaaacctgtgtttgtttttctcacagaactggacataagtgtg

SEQ ID NO: 328133 - DNA, 169 bp, Homo sapiens
  chr20:60856892-60857061
  hypo
gaaaagaacttcacaaggtggaaggacacattcaagacaaaaagtaggtccttgccaagtgttcatggggcaccactacagcctgtgtgtccacgttagaagggctcaggtgctcctgggcctgcgtgtgcctacgtgcatgagacgcgggtacaccagtgccatctgt

SEQ ID NO: 328134 - DNA, 97 bp, Homo sapiens; identical to SEQ ID NO: 275590
  chr20:60866831-60866928
  hypo

SEQ ID NO: 328135 - DNA, 209 bp, Homo sapiens; identical to SEQ ID NO: 220166
  chr20:60868206-60868415
  hypo

SEQ ID NO: 328136 - DNA, 440 bp, Homo sapiens; identical to SEQ ID NO: 275592
  chr20:60868773-60869213
  hypo

SEQ ID NO: 328137 - DNA, 151 bp, Homo sapiens; identical to SEQ ID NO: 275593
  chr20:60875561-60875712
  hypo

SEQ ID NO: 328138 - DNA, 451 bp, Homo sapiens; identical to SEQ ID NO: 275594
  chr20:60880675-60881126
  hypo

SEQ ID NO: 328139 - DNA, 148 bp, Homo sapiens; identical to SEQ ID NO: 220168
  chr20:60891780-60891928
  hypo

SEQ ID NO: 328140 - DNA, 206 bp, Homo sapiens; identical to SEQ ID NO: 220169
  chr20:60891958-60892164
  hypo

SEQ ID NO: 328141 - DNA, 273 bp, Homo sapiens
  chr20:60892222-60892495
  hypo
ctgggtgtactgctcctgtcactctgggccccagcttgccgtggagctgaggaaggcctggcttctttgaggacaacggcctcagcccctaggagccttcccagaccagctggccctcccaaggccctgtctgcatccccagggtgggcccagggcccctcctctcctggccacccacctggacagattgagtgccagctggcccagctgctgtgcgtgggcctcggcggcctccactagacgcagcttgctgcccgccggggagaaggtctg

SEQ ID NO: 328142 - DNA, 222 bp, Homo sapiens
  chr20:60905729-60905951
  hypo
acctgccctgggttgggacccggagtcctgccctgacacccccgtccctctagagactatggccctcacctggggctcacgcagcagggtgggctctgcatcagggtccacagcggtggggggccgaggtcggggtccagctggggacatggctggagtgagatcctgcgcgtgggtcagcgggaggccgggcggcagcgggatcacctggcagtccctgag

SEQ ID NO: 328143 - DNA, 236 bp, Homo sapiens; identical to SEQ ID NO: 220172
  chr20:60906010-60906246
  hypo

SEQ ID NO: 328144 - DNA, 272 bp, Homo sapiens; identical to SEQ ID NO: 220173
  chr20:60912907-60913179
  hypo

SEQ ID NO: 328145 - DNA, 234 bp, Homo sapiens; identical to SEQ ID NO: 220174
  chr20:60913381-60913615
  hypo

SEQ ID NO: 328146 - DNA, 86 bp, Homo sapiens; identical to SEQ ID NO: 220175
  chr20:60925165-60925251
  hypo

SEQ ID NO: 328147 - DNA, 284 bp, Homo sapiens
  chr20:60925541-60925825
  hypo
gaacctttgtcctgtctgagctccacccgcctccccacctcccctgtaaactggagcgtggacagagcagtaaggccccacagaaggcaagggcgggtcccaaatccaagcgcatgaaagttgggctgctcggttgcaggcactagatgagccctgccagctccctgctgggggtccaggagcctcgtcacacactcagcctcagctgcaccactctgagtggcttctgtccagccccatgcctgcactgccaccctagggtgttacaccctccgggcaccacg

SEQ ID NO: 328148 - DNA, 125 bp, Homo sapiens; identical to SEQ ID NO: 220177
  chr20:60926049-60926174
  hypo

SEQ ID NO: 328149 - DNA, 562 bp, Homo sapiens; identical to SEQ ID NO: 275603
  chr20:60936962-60937524
  hypo

SEQ ID NO: 328150 - DNA, 243 bp, Homo sapiens; identical to SEQ ID NO: 205894
  chr20:60941671-60941914
  hypo

SEQ ID NO: 328151 - DNA, 284 bp, Homo sapiens; identical to SEQ ID NO: 275604
  chr20:60952096-60952380
  hypo

SEQ ID NO: 328152 - DNA, 87 bp, Homo sapiens
  chr20:60953031-60953118
  hypo
tggcacgcagtggccggcccgggggtgcaaccccatcccctctctggggtccctttgcagggcagccttaggatccattcactgtgg

SEQ ID NO: 328153 - DNA, 85 bp, Homo sapiens; identical to SEQ ID NO: 220180
  chr20:60953645-60953730
  hypo

SEQ ID NO: 328154 - DNA, 201 bp, Homo sapiens; identical to SEQ ID NO: 275606
  chr20:60963092-60963293
  hypo

SEQ ID NO: 328155 - DNA, 124 bp, Homo sapiens
  chr20:60976548-60976672
  hypo
ccatgagatggacccctgctcgccccgggccccacagagaggtgtcggtgtgtccggcagacatggagaggatcacgcatgtgcagatgtaccaccttacgcctagctggaagcagcacacacg

SEQ ID NO: 328156 - DNA, 135 bp, Homo sapiens
  chr20:60976778-60976913
  hypo
caggtcccctcagtgtgggggaggggctgaggaggggcaccagggagctgggggattggcctgtgtctccgcaggggagtggctccgtggggtgtgcccaggcaaatgcactgagctgcacgcaccttccatgtg

SEQ ID NO: 328157 - DNA, 267 bp, Homo sapiens
  chr20:60982952-60983219
  hypo
cagaacctgtgagcccgtggcaccgggatggtcagggcctgcctctggagcccgggagcctgtctgcagtctggaggggaacccgctgtatctttgtggagggactcaggaccttgcacccacctctgtgtcacctgcctgctctgtccagctttctttcatgggtttacgtatctttaaagaggggacaatgatttcagcctcagggtactgtcaggatgaaactggctcagtgagggggtcgggctgtggccggaggccaggcac

SEQ ID NO: 328158 - DNA, 211 bp, Homo sapiens
  chr20:60984130-60984341
  hypo
agccaacctggcctgcgggcagtgtgtagggaacacacggcttttgtttcgtgtgattctggagaaattaaagcaacctttaacacacctggacttccctcttgggagttcagtccctctggcctctcaggacaacaggcagacatgtcacaggctgcaggtgggaggcagtgccccctgagtcaggcccgcaccccagtctggcccaggc

SEQ ID NO: 328159 - DNA, 277 bp, Homo sapiens; identical to SEQ ID NO: 275610
  chr20:60988929-60989206
  hypo

SEQ ID NO: 328160 - DNA, 195 bp, Homo sapiens
  chr20:60992543-60992738
  hypo
gtctgtcccgtccacgcagcccccccagtcatctgcacgctcctctgtgacgtctgtcccgtccacgcaacgcccccccagtcatctgcacgctcctctgtgacgtctgttccgtccacgcaccaccccccccagtcatctgcacgctcctctgtgacgtctgtcccgtccacgcaccccccccagtcatctgca

SEQ ID NO: 328161 - DNA, 217 bp, Homo sapiens
  chr20:60992781-60992998
  hypo
gtcatctgcacgctcctctgtgacgtctgtcctgtccacacaccacccccccggtcatctgcacgctcctctgtgacgtctgtcctgtccacgcaacgcccccccagtcatctgcacgctcctctgtcacgtctgtcctgtccacgcaacgcccccccagtcatctgcacgctcctctgtgacgtctgtcctgtccacgcaacgcccccccagtcat

SEQ ID NO: 328162 - DNA, 349 bp, Homo sapiens; identical to SEQ ID NO: 275612
  chr20:60996144-60996493
  hypo

SEQ ID NO: 328163 - DNA, 201 bp, Homo sapiens; identical to SEQ ID NO: 220183
  chr20:60997210-60997411
  hypo

SEQ ID NO: 328164 - DNA, 621 bp, Homo sapiens; identical to SEQ ID NO: 275614
  chr20:61000251-61000872
  hypo

SEQ ID NO: 328165 - DNA, 133 bp, Homo sapiens; identical to SEQ ID NO: 275615
  chr20:61009827-61009960
  hypo

SEQ ID NO: 328166 - DNA, 37 bp, Homo sapiens; identical to SEQ ID NO: 275616
  chr20:61010380-61010417
  hypo

SEQ ID NO: 328167 - DNA, 81 bp, Homo sapiens
  chr20:61013033-61013114
  hypo
cttcccatagccaccgactgcccggggctcagcgggcaggcagggagatgcctcaggactcacgggtgaggggtgttgggc

SEQ ID NO: 328168 - DNA, 55 bp, Homo sapiens
  chr20:61013193-61013248
  hypo
gggagctggcagctgagtgccatccttccaaagacgtggtgctccagggcgcatg

SEQ ID NO: 328169 - DNA, 134 bp, Homo sapiens
  chr20:61013278-61013412
  hypo
cctgaatggagtcctcactgccggcccggcctgcgctgcctgctctcggcctccctgtgtgtcgcgtgatgttgtgtgccagggttgggcggtggctgtgtgaggcctgtgaggacacacgcaaatgggagagg

SEQ ID NO: 328170 - DNA, 222 bp, Homo sapiens; identical to SEQ ID NO: 275618
  chr20:61022050-61022272
  hypo

SEQ ID NO: 328171 - DNA, 105 bp, Homo sapiens; identical to SEQ ID NO: 275619
  chr20:61275877-61275982
  hypo

SEQ ID NO: 328172 - DNA, 201 bp, Homo sapiens; identical to SEQ ID NO: 220185
  chr20:61285585-61285786
  hypo

SEQ ID NO: 328173 - DNA, 324 bp, Homo sapiens; identical to SEQ ID NO: 275621
  chr20:61287386-61287710
  hypo

SEQ ID NO: 328174 - DNA, 242 bp, Homo sapiens
  chr20:61287740-61287982
  hypo
cactcccgctgaggccactcccactgcgtggctgaagcctcgaggtcaccaggcggaggcgcggagatgcccctgcatcagctgggggacaagccgctcaccttccccagccccaactcagccatggaaaacgggcttgaccacaccccacccagcaggagggcatccccgggcacacccctgagccccggctccctccgctccgctgcccatagccccctggacaccagcaagcagcccct

SEQ ID NO: 328175 - DNA, 81 bp, Homo sapiens; identical to SEQ ID NO: 220187
  chr20:61288557-61288638
  hypo

SEQ ID NO: 328176 - DNA, 206 bp, Homo sapiens; identical to SEQ ID NO: 275623
  chr20:61289971-61290177
  hypo

SEQ ID NO: 328177 - DNA, 113 bp, Homo sapiens
  chr20:61291018-61291131
  hypo
ccgcagcatttctgcgctggagcaagcaggtgccgcctggctgcagccttgcagggtgttggcgctccctgtgtcctctgtctgtctctgcggctctgctcccggcctttgct

SEQ ID NO: 328178 - DNA, 72 bp, Homo sapiens
  chr20:61291793-61291865
  hypo
ggtcggcgcctggtgggtcggcttcctgggctctggggccgctgctttcttcaccgccgttcccatccttgg

SEQ ID NO: 328179 - DNA, 306 bp, Homo sapiens; identical to SEQ ID NO: 275626
  chr20:61297760-61298066
  hypo

SEQ ID NO: 328180 - DNA, 313 bp, Homo sapiens; identical to SEQ ID NO: 275627
  chr20:61298975-61299288
  hypo

SEQ ID NO: 328181 - DNA, 128 bp, Homo sapiens
  chr20:61312775-61312903
  hypo
ttgtgtacacactcgtgtgtgtgtattaagccgtgtgtacacactcgtgtgtgtgttaagctgtgtgtacacactcatgtgtgcgcgtgtttattaagccgtgtgtacacactcgtgtgtgtattaaa

SEQ ID NO: 328182 - DNA, 171 bp, Homo sapiens; identical to SEQ ID NO: 220188
  chr20:61314706-61314877
  hypo

SEQ ID NO: 328183 - DNA, 241 bp, Homo sapiens
  chr20:61318783-61319024
  hypo
agtggcgtccagggcagggcaggtgcgtcatccgggcgggatgcagagacacgtccttccaccaaccatctgaggagcacttggcacccacacaatgagcccggcaagggccacgccaggaggcagcgcacggggcagagcctctgagccagagagggggaggtcccttgggaggcccctgccatcccccgctctgggtgggcctctccagccagactctgcgccccaagggcagggctgg

SEQ ID NO: 328184 - DNA, 102 bp, Homo sapiens; identical to SEQ ID NO: 275631
  chr20:61323378-61323480
  hypo

SEQ ID NO: 328185 - DNA, 118 bp, Homo sapiens; identical to SEQ ID NO: 275632
  chr20:61327484-61327602
  hypo

SEQ ID NO: 328186 - DNA, 129 bp, Homo sapiens
  chr20:61330791-61330920
  hypo
ttgttcaggagctccgcccagcctctggtgttgtgtgtcagcaccccgagtggaccgggacaggctcccaagtggactgagacaggctcccgagtggaccgggacaggctcccgagtggactggagaca

SEQ ID NO: 328187 - DNA, 203 bp, Homo sapiens; identical to SEQ ID NO: 275634
  chr20:61333200-61333403
  hypo

SEQ ID NO: 328188 - DNA, 147 bp, Homo sapiens; identical to SEQ ID NO: 275635
  chr20:61349792-61349939
  hypo

SEQ ID NO: 328189 - DNA, 115 bp, Homo sapiens
  chr20:61364297-61364412
  hypo
aacggcgctgacgtcgcctaaagggggttcccagctggcagcctccaggtgctggaatgtttctcggtgagaagccgccacgggagtctgtggacttgtcacatcacccgcaggc

SEQ ID NO: 328190 - DNA, 54 bp, Homo sapiens
  chr20:61364476-61364530
  hypo
aaattctgagtgaagtaaatgtcatcggcagtgtgtagacgttctttcggaaga

SEQ ID NO: 328191 - DNA, 154 bp, Homo sapiens; identical to SEQ ID NO: 275637
  chr20:61370412-61370566
  hypo

SEQ ID NO: 328192 - DNA, 426 bp, Homo sapiens; identical to SEQ ID NO: 275638
  chr20:61385884-61386310
  hypo

SEQ ID NO: 328193 - DNA, 99 bp, Homo sapiens
  chr20:61393666-61393765
  hypo
tggaggatccaccccggaacagacagaatggtgtctctcaggatggtgctctgagagagggcagagtggatgccccactgccctagaccctcggtagac

SEQ ID NO: 328194 - DNA, 54 bp, Homo sapiens; identical to SEQ ID NO: 275641
  chr20:61398117-61398171
  hypo

SEQ ID NO: 328195 - DNA, 36 bp, Homo sapiens; identical to SEQ ID NO: 275642
  chr20:61398433-61398469
  hypo

SEQ ID NO: 328196 - DNA, 124 bp, Homo sapiens; identical to SEQ ID NO: 275643
  chr20:61401677-61401801
  hypo

SEQ ID NO: 328197 - DNA, 145 bp, Homo sapiens; identical to SEQ ID NO: 275644
  chr20:61405559-61405704
  hypo

SEQ ID NO: 328198 - DNA, 62 bp, Homo sapiens
  chr20:61411118-61411180
  hypo
gattctttgaatgtgggtaaatctttttttttttttttcttttttttgtgatggagtcttgc

SEQ ID NO: 328199 - DNA, 118 bp, Homo sapiens; identical to SEQ ID NO: 275648
  chr20:61442868-61442986
  hypo

SEQ ID NO: 328200 - DNA, 61 bp, Homo sapiens; identical to SEQ ID NO: 205895
  chr20:61447609-61447670
  hypo

SEQ ID NO: 328201 - DNA, 346 bp, Homo sapiens; identical to SEQ ID NO: 294956
  chr20:61447763-61448109
  hypo

SEQ ID NO: 328202 - DNA, 421 bp, Homo sapiens; identical to SEQ ID NO: 220191
  chr20:61458920-61459341
  hypo

SEQ ID NO: 328203 - DNA, 350 bp, Homo sapiens
  chr20:61459926-61460276
  hypo
acctgtgcggtcaccgaggcagcactggttgccacacggccaccttggtcatgaaaccagataactgccagggtgtgggggcagacacagttttaggttgatggggaaggaggctgcccccagggcaggactgtagagggagggaggggggccactgcccgacgggccttactcatcccttgtccccagggcatgccgggcaaggacggccagaatggcgtgccaggactcgatggccagaaggttggcatggggctcagggtgtgacgggagggagggggctggaggggagttcggcctcccgaggcctcagcctccccttccgcaccccaatctctgtcctcacaggg

SEQ ID NO: 328204 - DNA, 205 bp, Homo sapiens; identical to SEQ ID NO: 275651
  chr20:61460570-61460775
  hypo

SEQ ID NO: 328205 - DNA, 38 bp, Homo sapiens; identical to SEQ ID NO: 220192
  chr20:61470101-61470139
  hypo

SEQ ID NO: 328206 - DNA, 43 bp, Homo sapiens; identical to SEQ ID NO: 275653
  chr20:61471674-61471717
  hypo

SEQ ID NO: 328207 - DNA, 172 bp, Homo sapiens; identical to SEQ ID NO: 220193
  chr20:61472199-61472371
  hypo

SEQ ID NO: 328208 - DNA, 180 bp, Homo sapiens; identical to SEQ ID NO: 275655
  chr20:61473183-61473363
  hypo

SEQ ID NO: 328209 - DNA, 98 bp, Homo sapiens; identical to SEQ ID NO: 275656
  chr20:61473725-61473823
  hypo

SEQ ID NO: 328210 - DNA, 97 bp, Homo sapiens; identical to SEQ ID NO: 275657
  chr20:61480530-61480627
  hypo

SEQ ID NO: 328211 - DNA, 57 bp, Homo sapiens; identical to SEQ ID NO: 275658
  chr20:61482263-61482320
  hypo

SEQ ID NO: 328212 - DNA, 587 bp, Homo sapiens; identical to SEQ ID NO: 220194
  chr20:61488410-61488997
  hypo

SEQ ID NO: 328213 - DNA, 639 bp, Homo sapiens; identical to SEQ ID NO: 294957
  chr20:61492377-61493016
  hypo

SEQ ID NO: 328214 - DNA, 35 bp, Homo sapiens; identical to SEQ ID NO: 220196
  chr20:61506536-61506571
  hypo

SEQ ID NO: 328215 - DNA, 93 bp, Homo sapiens; identical to SEQ ID NO: 220197
  chr20:61518345-61518438
  hypo

SEQ ID NO: 328216 - DNA, 59 bp, Homo sapiens
  chr20:61527425-61527484
  hypo
ccagtgcaacaatacgtgggcggcagaaggatcacagaggagaaagaaacgtcttagct

SEQ ID NO: 328217 - DNA, 68 bp, Homo sapiens
  chr20:61527514-61527582
  hypo
attggttgatccctttagcacccagcgaacagaacaggaatactccaatgcaccgacaccaggcacac

SEQ ID NO: 328218 - DNA, 55 bp, Homo sapiens; identical to SEQ ID NO: 220198
  chr20:61527972-61528027
  hypo

SEQ ID NO: 328219 - DNA, 138 bp, Homo sapiens; identical to SEQ ID NO: 220199
  chr20:61528147-61528285
  hypo

SEQ ID NO: 328220 - DNA, 130 bp, Homo sapiens; identical to SEQ ID NO: 275664
  chr20:61528807-61528937
  hypo

SEQ ID NO: 328221 - DNA, 206 bp, Homo sapiens; identical to SEQ ID NO: 275665
  chr20:61529148-61529354
  hypo

SEQ ID NO: 328222 - DNA, 92 bp, Homo sapiens; identical to SEQ ID NO: 275666
  chr20:61538594-61538686
  hypo

SEQ ID NO: 328223 - DNA, 92 bp, Homo sapiens; identical to SEQ ID NO: 275667
  chr20:61540950-61541042
  hypo

SEQ ID NO: 328224 - DNA, 135 bp, Homo sapiens; identical to SEQ ID NO: 220200
  chr20:61576504-61576639
  hypo

SEQ ID NO: 328225 - DNA, 103 bp, Homo sapiens; identical to SEQ ID NO: 294961
  chr20:61583882-61583985
  hypo

SEQ ID NO: 328226 - DNA, 316 bp, Homo sapiens; identical to SEQ ID NO: 294962
  chr20:61584015-61584331
  hypo

SEQ ID NO: 328227 - DNA, 172 bp, Homo sapiens; identical to SEQ ID NO: 275670
  chr20:61591489-61591661
  hypo

SEQ ID NO: 328228 - DNA, 130 bp, Homo sapiens; identical to SEQ ID NO: 220201
  chr20:61619034-61619164
  hypo

SEQ ID NO: 328229 - DNA, 72 bp, Homo sapiens
  chr20:61665975-61666047
  hypo
cgcagcgtgattccgtgccacggcgtcaggagcggcatgtagcatcttttggtttgagagtaaaattccgca

SEQ ID NO: 328230 - DNA, 210 bp, Homo sapiens; identical to SEQ ID NO: 275674
  chr20:61666077-61666287
  hypo

SEQ ID NO: 328231 - DNA, 454 bp, Homo sapiens; identical to SEQ ID NO: 220202
  chr20:61674870-61675324
  hypo

SEQ ID NO: 328232 - DNA, 75 bp, Homo sapiens; identical to SEQ ID NO: 220203
  chr20:61675700-61675775
  hypo

SEQ ID NO: 328233 - DNA, 44 bp, Homo sapiens
  chr20:61681328-61681372
  hypo
ccctcctggcctggcggcccttctggagcctgggagcagaggtg

SEQ ID NO: 328234 - DNA, 31 bp, Homo sapiens
  chr20:61681422-61681453
  hypo
caggggaagcgaccgacgtaggtgtgtggcc

SEQ ID NO: 328235 - DNA, 511 bp, Homo sapiens; identical to SEQ ID NO: 275677
  chr20:61692615-61693126
  hypo

SEQ ID NO: 328236 - DNA, 253 bp, Homo sapiens; identical to SEQ ID NO: 220205
  chr20:61693186-61693439
  hypo

SEQ ID NO: 328237 - DNA, 153 bp, Homo sapiens; identical to SEQ ID NO: 275680
  chr20:61715256-61715409
  hypo

SEQ ID NO: 328238 - DNA, 74 bp, Homo sapiens; identical to SEQ ID NO: 205901
  chr20:61734534-61734608
  hypo

SEQ ID NO: 328239 - DNA, 165 bp, Homo sapiens; identical to SEQ ID NO: 220207
  chr20:61748971-61749136
  hypo

SEQ ID NO: 328240 - DNA, 66 bp, Homo sapiens; identical to SEQ ID NO: 220208
  chr20:61749166-61749232
  hypo

SEQ ID NO: 328241 - DNA, 116 bp, Homo sapiens
  chr20:61749623-61749739
  hypo
cacacaggaaagcacatgcccgctgtgtcctgctgcattgctgggcagtgtccactgcacgtcgctcgctgcattgctgggcagtgtccgcggcatgtcgctctctgcattgctgg

SEQ ID NO: 328242 - DNA, 86 bp, Homo sapiens
  chr20:61749920-61750006
  hypo
ggatgctcaggctgcttcccgttggacgcgattgtgagtgacgctgctgtgagcctccaggtaccggccttggagccagcaaatgc

SEQ ID NO: 328243 - DNA, 96 bp, Homo sapiens; identical to SEQ ID NO: 275685
  chr20:61756482-61756578
  hypo

SEQ ID NO: 328244 - DNA, 249 bp, Homo sapiens; identical to SEQ ID NO: 294967
  chr20:61759828-61760077
  hypo

SEQ ID NO: 328245 - DNA, 183 bp, Homo sapiens
  chr20:61765425-61765608
  hypo
aagaatctaccaccaactggcagccaagattgcctgtgggtcatgcagcaggttcacgtccctgttttaacttttaagaaaccaccttagtaaaggttgtactgataaaccgagcaaagactgggcccgtgcccctgccccagcggactacagcctgaaggaggggccctggaaacccaggag

SEQ ID NO: 328246 - DNA, 60 bp, Homo sapiens; identical to SEQ ID NO: 220209
  chr20:61771324-61771384
  hypo

SEQ ID NO: 328247 - DNA, 53 bp, Homo sapiens; identical to SEQ ID NO: 220210
  chr20:61771414-61771467
  hypo

SEQ ID NO: 328248 - DNA, 168 bp, Homo sapiens
  chr20:61772545-61772713
  hypo
cacacagggggtgccgaggagcttgcacacccaggaggctccctggaagaggaaggtttcaagcagctgccctcaggcaccccacgcgtgttgacagccaagcgtgacttcttgtcaagggcatcgttaaaggagaacatgaggcctgctcgggggctgagaggagag

SEQ ID NO: 328249 - DNA, 37 bp, Homo sapiens
  chr20:61772743-61772780
  hypo
ccctgccactgccatgggatcccggcactgcagcctc

SEQ ID NO: 328250 - DNA, 212 bp, Homo sapiens; identical to SEQ ID NO: 294968
  chr20:61806196-61806408
  hypo

SEQ ID NO: 328251 - DNA, 247 bp, Homo sapiens; identical to SEQ ID NO: 205902
  chr20:61810310-61810557
  hypo

SEQ ID NO: 328252 - DNA, 285 bp, Homo sapiens; identical to SEQ ID NO: 133337
  chr20:61810632-61810917
  hypo

SEQ ID NO: 328253 - DNA, 525 bp, Homo sapiens; identical to SEQ ID NO: 275690
  chr20:61817151-61817676
  hypo

SEQ ID NO: 328254 - DNA, 154 bp, Homo sapiens; identical to SEQ ID NO: 275691
  chr20:61819884-61820038
  hypo

SEQ ID NO: 328255 - DNA, 131 bp, Homo sapiens; identical to SEQ ID NO: 275693
  chr20:61827956-61828087
  hypo

SEQ ID NO: 328256 - DNA, 143 bp, Homo sapiens; identical to SEQ ID NO: 220213
  chr20:61838281-61838424
  hypo

SEQ ID NO: 328257 - DNA, 383 bp, Homo sapiens; identical to SEQ ID NO: 275695
  chr20:61870767-61871150
  hypo

SEQ ID NO: 328258 - DNA, 165 bp, Homo sapiens; identical to SEQ ID NO: 275696
  chr20:61880358-61880523
  hypo

SEQ ID NO: 328259 - DNA, 36 bp, Homo sapiens; identical to SEQ ID NO: 205905
  chr20:61886327-61886363
  hypo

SEQ ID NO: 328260 - DNA, 55 bp, Homo sapiens; identical to SEQ ID NO: 220216
  chr20:61895763-61895818
  hypo

SEQ ID NO: 328261 - DNA, 37 bp, Homo sapiens; identical to SEQ ID NO: 220217
  chr20:61909562-61909599
  hypo

SEQ ID NO: 328262 - DNA, 58 bp, Homo sapiens; identical to SEQ ID NO: 220218
  chr20:61913595-61913653
  hypo

SEQ ID NO: 328263 - DNA, 79 bp, Homo sapiens
  chr20:61942752-61942831
  hypo
gcctccgccccgggcgctgaccctggccgcagtgacgcccagaaccgtccacctcacctggcagccctcggccggggcc

SEQ ID NO: 328264 - DNA, 195 bp, Homo sapiens; identical to SEQ ID NO: 275701
  chr20:61947782-61947977
  hypo

SEQ ID NO: 328265 - DNA, 73 bp, Homo sapiens; identical to SEQ ID NO: 275702
  chr20:61951425-61951498
  hypo

SEQ ID NO: 328266 - DNA, 96 bp, Homo sapiens; identical to SEQ ID NO: 220219
  chr20:61967699-61967795
  hypo

SEQ ID NO: 328267 - DNA, 95 bp, Homo sapiens; identical to SEQ ID NO: 220220
  chr20:61967915-61968010
  hypo

SEQ ID NO: 328268 - DNA, 77 bp, Homo sapiens; identical to SEQ ID NO: 275705
  chr20:61973525-61973602
  hypo

SEQ ID NO: 328269 - DNA, 54 bp, Homo sapiens
  chr20:61974409-61974463
  hypo
ctaaaacccagtgcaaacccctgacaatcccactaccaggtgttccgtcctaag

SEQ ID NO: 328270 - DNA, 150 bp, Homo sapiens
  chr20:61974493-61974643
  hypo
cagttttgtgggttgcatccagcctttcctacagactgaaatagaagacacttgaatagaaaatgcaaagcacggcacacgtggtgacggtgcgttttattcattgaagtctgtgcacacactgggagcacattccagggcttggcagac

SEQ ID NO: 328271 - DNA, 244 bp, Homo sapiens; identical to SEQ ID NO: 275708
  chr20:61979331-61979575
  hypo

SEQ ID NO: 328272 - DNA, 247 bp, Homo sapiens; identical to SEQ ID NO: 220221
  chr20:61981498-61981745
  hypo

SEQ ID NO: 328273 - DNA, 187 bp, Homo sapiens; identical to SEQ ID NO: 220222
  chr20:61982647-61982834
  hypo

SEQ ID NO: 328274 - DNA, 64 bp, Homo sapiens; identical to SEQ ID NO: 220223
  chr20:61991069-61991133
  hypo

SEQ ID NO: 328275 - DNA, 55 bp, Homo sapiens; identical to SEQ ID NO: 220224
  chr20:61991163-61991218
  hypo

SEQ ID NO: 328276 - DNA, 143 bp, Homo sapiens; identical to SEQ ID NO: 275714
  chr20:62005349-62005492
  hypo

SEQ ID NO: 328277 - DNA, 35 bp, Homo sapiens; identical to SEQ ID NO: 220225
  chr20:62018865-62018900
  hypo

SEQ ID NO: 328278 - DNA, 84 bp, Homo sapiens; identical to SEQ ID NO: 220226
  chr20:62019257-62019341
  hypo

SEQ ID NO: 328279 - DNA, 84 bp, Homo sapiens; identical to SEQ ID NO: 275717
  chr20:62019401-62019485
  hypo

SEQ ID NO: 328280 - DNA, 233 bp, Homo sapiens; identical to SEQ ID NO: 220227
  chr20:62031374-62031607
  hypo

SEQ ID NO: 328281 - DNA, 47 bp, Homo sapiens
  chr20:62037978-62038025
  hypo
cactggcccagcgccgcctcacttcctgggcccggcccagcccacgt

SEQ ID NO: 328282 - DNA, 43 bp, Homo sapiens; identical to SEQ ID NO: 275722
  chr20:62045905-62045948
  hypo

SEQ ID NO: 328283 - DNA, 39 bp, Homo sapiens
  chr20:62048274-62048313
  hypo
tgtccccactcaggcgtctctgagagaaagaaagaagcc

SEQ ID NO: 328284 - DNA, 881 bp, Homo sapiens
  chr20:62050045-62050926
  hypo
gcagcccacacgcccgtctccctctctggagctgccaacagtctccccgcaagcaccaacgcccccagaagcacacaagcagcaaagtcacagggagagggtggcatggagtcgcgggccccccatggagcagggtccgaagcatgcacggatgcagataggcagcatgcagccccaccagccctccaaggccagcaccaccggcggcatgcacatgccaaggagagccccacaggagcacgacacagccacctccaccttgctgggctgtgctggccaggagggaggggcccccagcgcaggcctgcacacacccaacagcagacaggggacgcggggacaggggaggtgcgggtcacggtgcaggccaggagcccacggtgcaaagggggcggctcctcccccgtcctatttccacctgccctaaaccaggcctgttgttgggagagggagccgcgggcctctggctttctggggcttctgatgcatcaggaccctgaggagcccggcacacacagacggagctgcctcccgcggtcgaggcagccaggaaggctcagtcatcctcaggtacgcagcagaggtgctagagtgacagccccaggggaaacgctccctgaagagcagtcggggaccccaggaggcacggacgccttgctgggttcagagcccctggctggcccctctggctgtgcgcaggacatcgcctggcgtggggagcaagaagaagcaccttcccccagctccgccctgcacgcagctgtcggctagaatagagggagctgagcccgcaccgccagggcggtgggtcagaattggggttggggcgccagcctccccctggctcctccagaacctctagtaagcagggaggggcagag

SEQ ID NO: 328285 - DNA, 113 bp, Homo sapiens
  chr20:62051966-62052079
  hypo
agacaccgatgtccctgcacgcacccgcaggcagctctccgagcggcgtcacagacacggctagctccagtcacggcagcactcagccgcccgggtaggctgagggctctgga

SEQ ID NO: 328286 - DNA, 227 bp, Homo sapiens
  chr20:62052955-62053182
  hypo
cactgaccgagacccgacaggacagacatgcaccaaaaacacgcggacacgtgtgcttgagaagaggagggggagcccgaacaggcacgggggagcccgcacaggcatgagggggcagccggtgttgggggctcctcctccagcacgggggcaggaggcagtgagatggggtgtcggacaagacagcacaagtcagaaccgccgtggccaaagagaccccccgggac

SEQ ID NO: 328287 - DNA, 227 bp, Homo sapiens
  chr20:62053339-62053566
  hypo
agccaggatgggggtgggggtctcagcagtgagtgagggtccctgtgtccacaccatccacctgccaagaccagctgacaccagcggggtcctgccatgcggggtgcgggctccacctccaaagggcaggcggaggcacaggtcccaccagactcacagagcccaggtcaggcagcagaggggcgccaggagccgagctccccatcaagcttcgcagagcaggcccc

SEQ ID NO: 328288 - DNA, 276 bp, Homo sapiens; identical to SEQ ID NO: 220228
  chr20:62056056-62056332
  hypo

SEQ ID NO: 328289 - DNA, 32 bp, Homo sapiens; identical to SEQ ID NO: 220229
  chr20:62083855-62083887
  hypo

SEQ ID NO: 328290 - DNA, 88 bp, Homo sapiens; identical to SEQ ID NO: 275733
  chr20:62097173-62097261
  hypo

SEQ ID NO: 328291 - DNA, 385 bp, Homo sapiens; identical to SEQ ID NO: 275734
  chr20:62098053-62098438
  hypo

SEQ ID NO: 328292 - DNA, 82 bp, Homo sapiens; identical to SEQ ID NO: 294976
  chr20:62103897-62103979
  hypo

SEQ ID NO: 328293 - DNA, 251 bp, Homo sapiens; identical to SEQ ID NO: 220230
  chr20:62110513-62110764
  hypo

SEQ ID NO: 328294 - DNA, 59 bp, Homo sapiens
  chr20:62117853-62117912
  hypo
ggtgtcggcagccacggcaaggggtgaagcagggaaccgactctcctggggcctccaga

SEQ ID NO: 328295 - DNA, 118 bp, Homo sapiens
  chr20:62117956-62118074
  hypo
ttttggcctgaccccaggaggcctcgccatttgccgtcattggtcgcagcatccctaagagactaaggcgctatgaggccctgcggtcagcctgcctgctctgcggaaccctccgagt

SEQ ID NO: 328296 - DNA, 170 bp, Homo sapiens; identical to SEQ ID NO: 275738
  chr20:62137321-62137491
  hypo

SEQ ID NO: 328297 - DNA, 151 bp, Homo sapiens; identical to SEQ ID NO: 275739
  chr20:62149573-62149724
  hypo

SEQ ID NO: 328298 - DNA, 42 bp, Homo sapiens; identical to SEQ ID NO: 226226
  chr20:62152087-62152129
  hypo

SEQ ID NO: 328299 - DNA, 111 bp, Homo sapiens; identical to SEQ ID NO: 220231
  chr20:62153098-62153209
  hypo

SEQ ID NO: 328300 - DNA, 149 bp, Homo sapiens; identical to SEQ ID NO: 220232
  chr20:62153462-62153611
  hypo

SEQ ID NO: 328301 - DNA, 576 bp, Homo sapiens; identical to SEQ ID NO: 275744
  chr20:62174493-62175069
  hypo

SEQ ID NO: 328302 - DNA, 75 bp, Homo sapiens; identical to SEQ ID NO: 275745
  chr20:62175657-62175732
  hypo

SEQ ID NO: 328303 - DNA, 68 bp, Homo sapiens; identical to SEQ ID NO: 275746
  chr20:62178216-62178284
  hypo

SEQ ID NO: 328304 - DNA, 143 bp, Homo sapiens; identical to SEQ ID NO: 275747
  chr20:62179512-62179655
  hypo

SEQ ID NO: 328305 - DNA, 77 bp, Homo sapiens; identical to SEQ ID NO: 220234
  chr20:62190624-62190701
  hypo

SEQ ID NO: 328306 - DNA, 181 bp, Homo sapiens
  chr20:62197205-62197386
  hypo
gccgcctgctcctcggccaggtcccctactggctctggggcagcctcccagttccccgctgccccagcctgtgtgcctcggggaggccagcgccgtctctgcgccacaccctgctcgacctgctccatggacaggccctcggggcagacactgtgccgctccacgcactcacggatgaagc

SEQ ID NO: 328307 - DNA, 350 bp, Homo sapiens
  chr20:62197416-62197766
  hypo
agcagagggccacggcgtcccccactaccaccagctgggactgggcgcgggtcaggacggtgttgagcacgcgggcgtcggtgaagaactcaggggccagtgccccagggctgagcaggctctggcaggtgtgcacagtgctgagcaccacgacccggaactgccgccctgcagggggcacgcagtcaggtcaggctgggtgcgcaagacggtgggaccagccccacccctgccgatgccaggctgaggagtgggccgagccacccggggtatcctggggcagctggcagcacctggccccgctggtcacccacctggcaggatctcaaaactgccgacagacacctggc

SEQ ID NO: 328308 - DNA, 102 bp, Homo sapiens
  chr20:62204126-62204228
  hypo
accagggcctcctcgcgactgcgggcaaaggtgcaccggtttcggtggcgccggcagccgagcccagggctgtagtagtggcagacttggtagcacaggggc

SEQ ID NO: 328309 - DNA, 110 bp, Homo sapiens
  chr20:62204387-62204497
  hypo
cacaggtccaccagggcacacagccgggccagggacggccctctggtggccgcggggctgttgggcagcagggtggaccctggaggcgccacctcgaacaccagcttggc

SEQ ID NO: 328310 - DNA, 184 bp, Homo sapiens; identical to SEQ ID NO: 275751
  chr20:62209403-62209587
  hypo

SEQ ID NO: 328311 - DNA, 38 bp, Homo sapiens; identical to SEQ ID NO: 220235
  chr20:62214176-62214214
  hypo

SEQ ID NO: 328312 - DNA, 278 bp, Homo sapiens; identical to SEQ ID NO: 275753
  chr20:62218275-62218553
  hypo

SEQ ID NO: 328313 - DNA, 856 bp, Homo sapiens
  chr20:62220463-62221319
  hypo
ccacatgggaatcctcgacctccatagtgactggttctgtttatgcctctgccccaggactgaagccctagggacacacctcatggatctcagacccctgggaggggccggctcagggacaggctgcccaggacctccgcacccggtcaagtgcactcacaggggctcaggggccacccaaagagctaactcgggaagcctaggcactcaccattattttggttgaaaatgctataaatctgactcttcctagaagcctactaagcaattcacttaaaaacaccctcagtacatgtgcaacaatgcctggaccacgcctcgtctgtgcggcccctgggccacctgagcaccggctgggggcgggggaggcaggcacccatcaggatctgcaccccaagctccgggtgcatgttcccaactggaggagaacggggcgccagccacactaaacctacagaaaactgtgggaagaaaccaaatccataggatccagaggtttcacacttgggcttagctcccaagtcatgagttagtaacgtccccagggacctggctgggtgcagacatgggggcctcgtgacctgctgcaccgcgtccagcacctgcagggtcgcgctcggcacctggctctgcttcctctgtctctgctgcacccaggctccccctagcccccgcccacctggctcctgatcaaggcccaatgtgtaaacagtattaataagcaacagatggaaaaatatatttcccaagaaaaaagggggaggaaacgtgggacctgaagaccgattttccaggttgctctcgctgttctgtccccttctctcttctcgtgatttgttttggcgattcctctctt

SEQ ID NO: 328314 - DNA, 634 bp, Homo sapiens; identical to SEQ ID NO: 220239
  chr20:62221442-62222076
  hypo

SEQ ID NO: 328315 - DNA, 76 bp, Homo sapiens; identical to SEQ ID NO: 220240
  chr20:62231698-62231774
  hypo

SEQ ID NO: 328316 - DNA, 255 bp, Homo sapiens; identical to SEQ ID NO: 220241
  chr20:62242305-62242560
  hypo

SEQ ID NO: 328317 - DNA, 506 bp, Homo sapiens; identical to SEQ ID NO: 275757
  chr20:62248630-62249136
  hypo

SEQ ID NO: 328318 - DNA, 263 bp, Homo sapiens
  chr20:62250723-62250986
  hypo
gtgcacactcacgtcgggagtcgccatggctcagcggaaggggacgcccaggccagcagcgtcagtcctccagggtcccaagtcctggaggaagcaaggcagggcacagggatggagtcatctccacatccacacaacatagcactcacaaaggcatctctaatcagctccaaagacccacccttgagtcccagactgctacctcctgacaaaaacgagcggcaacagaagggctactccaggctctggttccgagggcggtg

SEQ ID NO: 328319 - DNA, 128 bp, Homo sapiens
  chr20:62251016-62251144
  hypo
ataagccgaaacccttgggtagaaagcacagagccactccctccacgtggggctcagagcaggaggacaggaggggcctggaattccaagcaacttccctggacgcaggctcccggcttgccagttct

SEQ ID NO: 328320 - DNA, 376 bp, Homo sapiens; identical to SEQ ID NO: 275759
  chr20:62252079-62252455
  hypo

SEQ ID NO: 328321 - DNA, 120 bp, Homo sapiens; identical to SEQ ID NO: 275760
  chr20:62252635-62252755
  hypo

SEQ ID NO: 328322 - DNA, 393 bp, Homo sapiens; identical to SEQ ID NO: 205907
  chr20:62273400-62273793
  hypo

SEQ ID NO: 328323 - DNA, 189 bp, Homo sapiens
  chr20:62275082-62275271
  hypo
ggggtgggggatggaggactccttgccttcctccgctcctcggctgcctccagccgcttttgcagctcctccagggaggtgtccttcttcttgggtggggaggagagcatagggctctctggggacaggtcagaaggggacttgaggatgacctcgaagctctggcctgaggcccgcttgtccagctgc

SEQ ID NO: 328324 - DNA, 43 bp, Homo sapiens
  chr20:62281489-62281532
  hypo
gctgggattacaggcgtgagcccccgcgcccggcccctccctc

SEQ ID NO: 328325 - DNA, 307 bp, Homo sapiens
  chr20:62281695-62282002
  hypo
atgattcatgagcaggagtcagaaaaaggcaccaggttggcctcaagcagcagggtatagtagtgcccgctcccagggtcacacctcacgcccacccctcccgccgtccaggtggatggtgcccactcccagggtcacacctcacgcccacccctcccgccgtccaggtggatggtgcccactcccagggtcacacctcacgcccacccctcccgtcgcccaggtggatggtgcccactcccagggtcacacctcacgcccgcccctcccacccacccgggtggatggtgcccgctcccagggtcac

SEQ ID NO: 328326 - DNA, 651 bp, Homo sapiens; identical to SEQ ID NO: 294982
  chr20:62283836-62284487
  hypo

SEQ ID NO: 328327 - DNA, 69 bp, Homo sapiens; identical to SEQ ID NO: 294983
  chr20:62284615-62284684
  hypo

SEQ ID NO: 328328 - DNA, 148 bp, Homo sapiens; identical to SEQ ID NO: 275764
  chr20:62309944-62310092
  hypo

SEQ ID NO: 328329 - DNA, 117 bp, Homo sapiens; identical to SEQ ID NO: 275765
  chr20:62310122-62310239
  hypo

SEQ ID NO: 328330 - DNA, 162 bp, Homo sapiens; identical to SEQ ID NO: 275766
  chr20:62313528-62313690
  hypo

SEQ ID NO: 328331 - DNA, 32 bp, Homo sapiens
  chr20:62314816-62314848
  hypo
tctctccttctgtgcgtacccaggcacgtgca

SEQ ID NO: 328332 - DNA, 164 bp, Homo sapiens
  chr20:62314955-62315119
  hypo
cggcttctccgcatttctgtgaatgattccggcttcttggtgttcccagcagaactccctcaagtctgcggcggggctctgacggcggtggcttggctgacatggccacattgctgagcctgttgggggctttgcgttcctgttctggccgtttttggctcgtt

SEQ ID NO: 328333 - DNA, 211 bp, Homo sapiens; identical to SEQ ID NO: 220244
  chr20:62317398-62317609
  hypo

SEQ ID NO: 328334 - DNA, 283 bp, Homo sapiens; identical to SEQ ID NO: 220245
  chr20:62322022-62322305
  hypo

SEQ ID NO: 328335 - DNA, 733 bp, Homo sapiens; identical to SEQ ID NO: 275771
  chr20:62326137-62326870
  hypo

SEQ ID NO: 328336 - DNA, 230 bp, Homo sapiens
  chr20:62329296-62329526
  hypo
acatcaagtcaggtccggtccatctgcaggtcccaactcgccccttccgatggcccaggagccccaagcccttgcctgggcccccttgcctcttgcagccaaggtccgagtggccgctcctgccccctaggcctttgctccagctctctgaccgaaggctcctgccccttctccagtccccatcgttgcactgccctctccagcacggctcactgcacagggatttctct

SEQ ID NO: 328337 - DNA, 126 bp, Homo sapiens
  chr20:62329556-62329682
  hypo
aagcagggtacctggcagcccccgccagtgtgtgtgggtgaaatgatcggaccgctgcctccccaccccactgcaggagctgaggagtgtgagcgtgccgtcatcgactttgtggctttccaggac

SEQ ID NO: 328338 - DNA, 76 bp, Homo sapiens; identical to SEQ ID NO: 275774
  chr20:62333477-62333553
  hypo

SEQ ID NO: 328339 - DNA, 380 bp, Homo sapiens; identical to SEQ ID NO: 205909
  chr20:62384603-62384983
  hypo

SEQ ID NO: 328340 - DNA, 143 bp, Homo sapiens; identical to SEQ ID NO: 275777
  chr20:62388763-62388906
  hypo

SEQ ID NO: 328341 - DNA, 120 bp, Homo sapiens; identical to SEQ ID NO: 275778
  chr20:62392097-62392217
  hypo

SEQ ID NO: 328342 - DNA, 55 bp, Homo sapiens; identical to SEQ ID NO: 220248
  chr20:62398949-62399004
  hypo

SEQ ID NO: 328343 - DNA, 107 bp, Homo sapiens; identical to SEQ ID NO: 220249
  chr20:62401273-62401380
  hypo

SEQ ID NO: 328344 - DNA, 211 bp, Homo sapiens
  chr20:62406867-62407078
  hypo
ccaggctgtgacgccgcatcctcacctcccgcaacagggaggtcagcaggcggccgagcagcagggacagaccctcagcctcatctcatcttggcccgggacctgcaaccctcagccttcaaaaccacaccaaagccaagcggcccccagggcctgcacttacgggacagcgagtgggcccctctgggcaggtactcgaacagcagggagc

SEQ ID NO: 328345 - DNA, 229 bp, Homo sapiens
  chr20:62407155-62407384
  hypo
gcggtggcctgatgcagggcgtcgtccttctctggggtgaggggagggcccagatagctggcttctcctcccaggagaccctcctccacctgtgcatagagctcggccctctctcctcggctgtcggagctgctggcttcggtgacggacaggtccgcatctggggacagagggacacacgtcagaagacacgggtcgttcccagactctccaagtgggacaggcgaca

SEQ ID NO: 328346 - DNA, 73 bp, Homo sapiens
  chr20:62407704-62407777
  hypo
aatggatcaatgacgttagagctaaatctataaaattcttagaagaaaatccgcatgatctcagatttggcaa

SEQ ID NO: 328347 - DNA, 95 bp, Homo sapiens; identical to SEQ ID NO: 275784
  chr20:62412805-62412900
  hypo

SEQ ID NO: 328348 - DNA, 394 bp, Homo sapiens; identical to SEQ ID NO: 275785
  chr20:62413440-62413834
  hypo

SEQ ID NO: 328349 - DNA, 76 bp, Homo sapiens
  chr20:62422171-62422247
  hypo
agctcagcacagacagaggccgtgagaggacgccgggcggggcgcaggagggccatggggcacagagtgcggccag

SEQ ID NO: 328350 - DNA, 225 bp, Homo sapiens
  chr20:62422321-62422546
  hypo
agcaaacaccggagggcaccagtgcgtccagggtgggacgtctgccacgtgtttccgtgctcgaggctaatggggttctgaacagaatcccacatacggcaactggcatatcccaggaacgatgagaacacccagccgtggctgagcaactcttacccaaactgagaactcggttaaatgacctacactgtggccatccctcacgcttgaagaaacattcttaag

SEQ ID NO: 328351 - DNA, 165 bp, Homo sapiens
  chr20:62426999-62427164
  hypo
cccacccatcgtgccgtcctgtgctggcaccaggtcggccaatcctccctgggatccggggagcaaggtcatgcacctgtgtccccagcagaatgaccaccggcaaacaggctccgccaaacgtggcttctatcctcctcctccctgggtcagctggagtgaagg

SEQ ID NO: 328352 - DNA, 96 bp, Homo sapiens; identical to SEQ ID NO: 275788
  chr20:62432147-62432243
  hypo

SEQ ID NO: 328353 - DNA, 45 bp, Homo sapiens
  chr20:62440399-62440444
  hypo
agacctgggagctggcggctcggtgctccggtgctgcagaggcac

SEQ ID NO: 328354 - DNA, 66 bp, Homo sapiens
  chr20:62440540-62440606
  hypo
aggtgcagactcggtggagccaaggggggcaaggtcagcagccctgggggcgcagccctgggggcc

SEQ ID NO: 328355 - DNA, 265 bp, Homo sapiens; identical to SEQ ID NO: 294990
  chr20:62461639-62461904
  hypo

SEQ ID NO: 328356 - DNA, 97 bp, Homo sapiens; identical to SEQ ID NO: 275790
  chr20:62480661-62480758
  hypo

SEQ ID NO: 328357 - DNA, 45 bp, Homo sapiens; identical to SEQ ID NO: 220252
  chr20:62481642-62481687
  hypo

SEQ ID NO: 328358 - DNA, 217 bp, Homo sapiens; identical to SEQ ID NO: 275793
  chr20:62493115-62493332
  hypo

SEQ ID NO: 328359 - DNA, 117 bp, Homo sapiens; identical to SEQ ID NO: 275794
  chr20:62494226-62494343
  hypo

SEQ ID NO: 328360 - DNA, 339 bp, Homo sapiens; identical to SEQ ID NO: 205912
  chr20:62495239-62495578
  hypo

SEQ ID NO: 328361 - DNA, 315 bp, Homo sapiens
  chr20:62513508-62513823
  hypo
cactctgtgacgctcgttccccacagacgtggttgagcttgcattttctcccctcagcacagtctcatttgggaagaggaaagggaaacttgcacgcatgggccggtcagggcactgagaggcctttctgctctggcactgcctgccaggcgtgcacctcagggggcccgtccgctctagcaggcaaatggggcgtgttctctgtagtcagaggggctgtgagaagacaggaaagcgagcttagtgggtatcaggcaagggggtgaaattgggttgtgagatgagaaagcagcgtcattgcagggctggggggcc

SEQ ID NO: 328362 - DNA, 66 bp, Homo sapiens
  chr20:62513897-62513963
  hypo
gggccgaggggctctgggcctgcaccccctctgtagacacctggcgagtgtccaccccttggccca

SEQ ID NO: 328363 - DNA, 312 bp, Homo sapiens; identical to SEQ ID NO: 275796
  chr20:62518965-62519277
  hypo

SEQ ID NO: 328364 - DNA, 251 bp, Homo sapiens; identical to SEQ ID NO: 275797
  chr20:62520344-62520595
  hypo

SEQ ID NO: 328365 - DNA, 361 bp, Homo sapiens; identical to SEQ ID NO: 226233
  chr20:62525784-62526145
  hypo

SEQ ID NO: 328366 - DNA, 42 bp, Homo sapiens; identical to SEQ ID NO: 220254
  chr20:62544237-62544279
  hypo

SEQ ID NO: 328367 - DNA, 43 bp, Homo sapiens; identical to SEQ ID NO: 275799
  chr20:62550220-62550263
  hypo

SEQ ID NO: 328368 - DNA, 535 bp, Homo sapiens; identical to SEQ ID NO: 275800
  chr20:62550638-62551173
  hypo

SEQ ID NO: 328369 - DNA, 590 bp, Homo sapiens; identical to SEQ ID NO: 275801
  chr20:62551402-62551992
  hypo

SEQ ID NO: 328370 - DNA, 94 bp, Homo sapiens; identical to SEQ ID NO: 275802
  chr20:62556213-62556307
  hypo

SEQ ID NO: 328371 - DNA, 1175 bp, Homo sapiens; identical to SEQ ID NO: 220258
  chr20:62562217-62563392
  hypo

SEQ ID NO: 328372 - DNA, 244 bp, Homo sapiens; identical to SEQ ID NO: 275804
  chr20:62571650-62571894
  hypo

SEQ ID NO: 328373 - DNA, 45 bp, Homo sapiens; identical to SEQ ID NO: 220260
  chr20:62572479-62572524
  hypo

SEQ ID NO: 328374 - DNA, 125 bp, Homo sapiens; identical to SEQ ID NO: 275806
  chr20:62576162-62576287
  hypo

SEQ ID NO: 328375 - DNA, 325 bp, Homo sapiens; identical to SEQ ID NO: 220261
  chr20:62578679-62579004
  hypo

SEQ ID NO: 328376 - DNA, 139 bp, Homo sapiens; identical to SEQ ID NO: 220262
  chr20:62581868-62582007
  hypo

SEQ ID NO: 328377 - DNA, 386 bp, Homo sapiens; identical to SEQ ID NO: 220263
  chr20:62583701-62584087
  hypo

SEQ ID NO: 328378 - DNA, 207 bp, Homo sapiens; identical to SEQ ID NO: 275810
  chr20:62598913-62599120
  hypo

SEQ ID NO: 328379 - DNA, 759 bp, Homo sapiens; identical to SEQ ID NO: 205913
  chr20:62600809-62601568
  hypo

SEQ ID NO: 328380 - DNA, 79 bp, Homo sapiens; identical to SEQ ID NO: 205914
  chr20:62601569-62601648
  hypo

SEQ ID NO: 328381 - DNA, 238 bp, Homo sapiens; identical to SEQ ID NO: 226235
  chr20:62605238-62605476
  hypo

SEQ ID NO: 328382 - DNA, 125 bp, Homo sapiens; identical to SEQ ID NO: 220266
  chr20:62608161-62608286
  hypo

SEQ ID NO: 328383 - DNA, 170 bp, Homo sapiens; identical to SEQ ID NO: 220267
  chr20:62630918-62631088
  hypo

SEQ ID NO: 328384 - DNA, 120 bp, Homo sapiens; identical to SEQ ID NO: 220268
  chr20:62631831-62631951
  hypo

SEQ ID NO: 328385 - DNA, 41 bp, Homo sapiens; identical to SEQ ID NO: 275815
  chr20:62635239-62635280
  hypo

SEQ ID NO: 328386 - DNA, 104 bp, Homo sapiens; identical to SEQ ID NO: 220269
  chr20:62639423-62639527
  hypo

SEQ ID NO: 328387 - DNA, 86 bp, Homo sapiens; identical to SEQ ID NO: 275817
  chr20:62651736-62651822
  hypo

SEQ ID NO: 328388 - DNA, 68 bp, Homo sapiens; identical to SEQ ID NO: 220270
  chr20:62662105-62662173
  hypo

SEQ ID NO: 328389 - DNA, 206 bp, Homo sapiens; identical to SEQ ID NO: 220271
  chr20:62662271-62662477
  hypo

SEQ ID NO: 328390 - DNA, 205 bp, Homo sapiens; identical to SEQ ID NO: 294999
  chr20:62673632-62673837
  hypo

SEQ ID NO: 328391 - DNA, 322 bp, Homo sapiens; identical to SEQ ID NO: 295000
  chr20:62679894-62680216
  hypo

SEQ ID NO: 328392 - DNA, 214 bp, Homo sapiens; identical to SEQ ID NO: 295001
  chr20:62680443-62680657
  hypo

SEQ ID NO: 328393 - DNA, 251 bp, Homo sapiens; identical to SEQ ID NO: 205918
  chr20:62694767-62695018
  hypo

SEQ ID NO: 328394 - DNA, 199 bp, Homo sapiens; identical to SEQ ID NO: 295005
  chr20:62695048-62695247
  hypo

SEQ ID NO: 328395 - DNA, 34 bp, Homo sapiens; identical to SEQ ID NO: 275819
  chr20:62705149-62705183
  hypo

SEQ ID NO: 328396 - DNA, 148 bp, Homo sapiens; identical to SEQ ID NO: 205920
  chr20:62714866-62715014
  hypo

SEQ ID NO: 328397 - DNA, 102 bp, Homo sapiens; identical to SEQ ID NO: 205921
  chr20:62715069-62715171
  hypo

SEQ ID NO: 328398 - DNA, 175 bp, Homo sapiens; identical to SEQ ID NO: 205922
  chr20:62715621-62715796
  hypo

SEQ ID NO: 328399 - DNA, 81 bp, Homo sapiens
  chr20:62722947-62723028
  hypo
cggtgtgccgggagcccagctggggggtccgggccagtctgtccaaggctgtgtctccgtgtgagtcgtggtccccgtgtc

SEQ ID NO: 328400 - DNA, 575 bp, Homo sapiens; identical to SEQ ID NO: 220279
  chr20:62737169-62737744
  hypo

SEQ ID NO: 328401 - DNA, 301 bp, Homo sapiens; identical to SEQ ID NO: 220280
  chr20:62737790-62738091
  hypo

SEQ ID NO: 328402 - DNA, 91 bp, Homo sapiens; identical to SEQ ID NO: 275822
  chr20:62766352-62766443
  hypo

SEQ ID NO: 328403 - DNA, 120 bp, Homo sapiens; identical to SEQ ID NO: 275823
  chr20:62766923-62767043
  hypo

SEQ ID NO: 328404 - DNA, 51 bp, Homo sapiens; identical to SEQ ID NO: 275825
  chr20:62796671-62796722
  hypo

SEQ ID NO: 328405 - DNA, 71 bp, Homo sapiens; identical to SEQ ID NO: 275826
  chr20:62797053-62797124
  hypo

SEQ ID NO: 328406 - DNA, 388 bp, Homo sapiens; identical to SEQ ID NO: 275827
  chr20:62818172-62818560
  hypo

SEQ ID NO: 328407 - DNA, 121 bp, Homo sapiens; identical to SEQ ID NO: 220281
  chr20:62839658-62839779
  hypo

SEQ ID NO: 328408 - DNA, 182 bp, Homo sapiens; identical to SEQ ID NO: 275829
  chr20:62851114-62851296
  hypo

SEQ ID NO: 328409 - DNA, 263 bp, Homo sapiens; identical to SEQ ID NO: 275830
  chr20:62859283-62859546
  hypo

SEQ ID NO: 328410 - DNA, 71 bp, Homo sapiens
  chr20:62863328-62863399
  hypo
cttcacactcagcccggaagggccagttcttccctgaggctccaggacctcagcggccctccctgcctcac

SEQ ID NO: 328411 - DNA, 242 bp, Homo sapiens
  chr20:62863429-62863671
  hypo
ctccccttgtgtctggcttgagagagtctccaggcttctcctcccaacccttcgcccctgtactcaccccggcctctctgtacccaggtgcccagttccaggctgtgtggggctcggtcacatcagcgggaaatacgcctctcacaggagcgcatccggctgcccactggccgcccgcaggcagaaggaagggtccctcaatggctcgtcattctcctggaagtccctgaagaatgaaggac

SEQ ID NO: 328412 - DNA, 218 bp, Homo sapiens
  chr20:62868769-62868987
  hypo
ggctctttgcccacccaacccaaacattcgtcttggggacagtgaggcatccgtcggcactcatcaaggttgctgtcagggctgagctgacggacagcgcagtggctggcacacaggcacacttaggacgtgctggccgctcacaatgcggagtccgtgaagtcacactgtgagtgccagtgggccgccggagctggttgtcccgccagggctgtggt

SEQ ID NO: 328413 - DNA, 142 bp, Homo sapiens
  chr20:62871681-62871823
  hypo
tgcgaacagaatttcgatgcctatgtgagcaccctcaccgacatgtactccaaccaggacccggagaacaaggacctcctggagagcatcaagcaggctgtgaggggcatccaggtctaggccgtgtggtacccagaagtgt

SEQ ID NO: 328414 - DNA, 131 bp, Homo sapiens; identical to SEQ ID NO: 275834
  chr20:62873338-62873469
  hypo

SEQ ID NO: 328415 - DNA, 334 bp, Homo sapiens; identical to SEQ ID NO: 275835
  chr20:62899595-62899929
  hypo

SEQ ID NO: 328416 - DNA, 38 bp, Homo sapiens; identical to SEQ ID NO: 275836
  chr20:62912885-62912923
  hypo

SEQ ID NO: 328417 - DNA, 37 bp, Homo sapiens; identical to SEQ ID NO: 275837
  chr20:62914531-62914568
  hypo

SEQ ID NO: 328418 - DNA, 246 bp, Homo sapiens
  chr21:15443742-15443988
  hypo
tttgccagctaccaggaaaacgtccttgtgaacccggattcccattgctaccgacttcgtgtaaactcccgtcccgaggacacgagagagactcaggcctcaggcgaggattccctggattgcacccagggtgcgtgtctcgcccacaggagcaccccaaagcggcaagaagacaccgggtgatgggaacaggaagcctggctttgaagaggacgttgaggcagtccgtggaaaaacttcccaggg

SEQ ID NO: 328419 - DNA, 104 bp, Homo sapiens
  chr21:15444050-15444154
  hypo
ttgcacccagggtgcttgtctcgccctcagggggcaccccatagcggcaagaattcccccagagaaaggtaacaggatgccccgcttgaaagacatgcaccctg

SEQ ID NO: 328420 - DNA, 360 bp, Homo sapiens; identical to SEQ ID NO: 275839
  chr21:15445158-15445518
  hypo

SEQ ID NO: 328421 - DNA, 144 bp, Homo sapiens; identical to SEQ ID NO: 220283
  chr21:15448689-15448833
  hypo

SEQ ID NO: 328422 - DNA, 300 bp, Homo sapiens; identical to SEQ ID NO: 275841
  chr21:15449805-15450105
  hypo

SEQ ID NO: 328423 - DNA, 165 bp, Homo sapiens; identical to SEQ ID NO: 220285
  chr21:15455717-15455882
  hypo

SEQ ID NO: 328424 - DNA, 57 bp, Homo sapiens; identical to SEQ ID NO: 220286
  chr21:15455989-15456046
  hypo

SEQ ID NO: 328425 - DNA, 67 bp, Homo sapiens; identical to SEQ ID NO: 205923
  chr21:15588289-15588356
  hypo

SEQ ID NO: 328426 - DNA, 87 bp, Homo sapiens; identical to SEQ ID NO: 205924
  chr21:15588911-15588998
  hypo

SEQ ID NO: 328427 - DNA, 208 bp, Homo sapiens; identical to SEQ ID NO: 295013
  chr21:16130747-16130955
  hypo

SEQ ID NO: 328428 - DNA, 38 bp, Homo sapiens; identical to SEQ ID NO: 275844
  chr21:16383777-16383815
  hypo

SEQ ID NO: 328429 - DNA, 153 bp, Homo sapiens; identical to SEQ ID NO: 220290
  chr21:16408140-16408293
  hypo

SEQ ID NO: 328430 - DNA, 268 bp, Homo sapiens; identical to SEQ ID NO: 295016
  chr21:16438267-16438535
  hypo

SEQ ID NO: 328431 - DNA, 160 bp, Homo sapiens; identical to SEQ ID NO: 275846
  chr21:16580450-16580610
  hypo

SEQ ID NO: 328432 - DNA, 202 bp, Homo sapiens; identical to SEQ ID NO: 275847
  chr21:16747503-16747705
  hypo

SEQ ID NO: 328433 - DNA, 83 bp, Homo sapiens; identical to SEQ ID NO: 226247
  chr21:17102748-17102831
  hypo

SEQ ID NO: 328434 - DNA, 1361 bp, Homo sapiens; identical to SEQ ID NO: 295019
  chr21:18885047-18886408
  hypo

SEQ ID NO: 328435 - DNA, 35 bp, Homo sapiens; identical to SEQ ID NO: 275848
  chr21:18887830-18887865
  hypo

SEQ ID NO: 328436 - DNA, 34 bp, Homo sapiens; identical to SEQ ID NO: 275849
  chr21:18888105-18888139
  hypo

SEQ ID NO: 328437 - DNA, 36 bp, Homo sapiens; identical to SEQ ID NO: 275850
  chr21:18913418-18913454
  hypo

SEQ ID NO: 328438 - DNA, 98 bp, Homo sapiens; identical to SEQ ID NO: 295021
  chr21:18985373-18985471
  hypo

SEQ ID NO: 328439 - DNA, 60 bp, Homo sapiens; identical to SEQ ID NO: 275851
  chr21:19190791-19190851
  hypo

SEQ ID NO: 328440 - DNA, 56 bp, Homo sapiens; identical to SEQ ID NO: 220292
  chr21:19274772-19274828
  hypo

SEQ ID NO: 328441 - DNA, 214 bp, Homo sapiens; identical to SEQ ID NO: 275854
  chr21:20618217-20618431
  hypo

SEQ ID NO: 328442 - DNA, 120 bp, Homo sapiens; identical to SEQ ID NO: 275855
  chr21:20865924-20866044
  hypo

SEQ ID NO: 328443 - DNA, 66 bp, Homo sapiens; identical to SEQ ID NO: 275856
  chr21:21132337-21132403
  hypo

SEQ ID NO: 328444 - DNA, 37 bp, Homo sapiens; identical to SEQ ID NO: 275857
  chr21:22495685-22495722
  hypo

SEQ ID NO: 328445 - DNA, 122 bp, Homo sapiens; identical to SEQ ID NO: 205931
  chr21:27011487-27011609
  hypo

SEQ ID NO: 328446 - DNA, 133 bp, Homo sapiens; identical to SEQ ID NO: 205932
  chr21:27011639-27011772
  hypo

SEQ ID NO: 328447 - DNA, 32 bp, Homo sapiens; identical to SEQ ID NO: 275858
  chr21:27456835-27456867
  hypo

SEQ ID NO: 328448 - DNA, 97 bp, Homo sapiens; identical to SEQ ID NO: 275859
  chr21:30037461-30037558
  hypo

SEQ ID NO: 328449 - DNA, 83 bp, Homo sapiens; identical to SEQ ID NO: 220295
  chr21:30294961-30295044
  hypo

SEQ ID NO: 328450 - DNA, 213 bp, Homo sapiens; identical to SEQ ID NO: 275861
  chr21:30352359-30352572
  hypo

SEQ ID NO: 328451 - DNA, 35 bp, Homo sapiens; identical to SEQ ID NO: 275862
  chr21:30353854-30353889
  hypo

SEQ ID NO: 328452 - DNA, 190 bp, Homo sapiens; identical to SEQ ID NO: 220296
  chr21:30357057-30357247
  hypo

SEQ ID NO: 328453 - DNA, 42 bp, Homo sapiens; identical to SEQ ID NO: 220297
  chr21:30406901-30406943
  hypo

SEQ ID NO: 328454 - DNA, 99 bp, Homo sapiens; identical to SEQ ID NO: 220298
  chr21:30407636-30407735
  hypo

SEQ ID NO: 328455 - DNA, 42 bp, Homo sapiens; identical to SEQ ID NO: 275866
  chr21:30488430-30488472
  hypo

SEQ ID NO: 328456 - DNA, 236 bp, Homo sapiens; identical to SEQ ID NO: 226251
  chr21:30670774-30671010
  hypo

SEQ ID NO: 328457 - DNA, 146 bp, Homo sapiens; identical to SEQ ID NO: 275867
  chr21:30722368-30722514
  hypo

SEQ ID NO: 328458 - DNA, 97 bp, Homo sapiens; identical to SEQ ID NO: 220300
  chr21:30722544-30722641
  hypo

SEQ ID NO: 328459 - DNA, 112 bp, Homo sapiens; identical to SEQ ID NO: 275869
  chr21:31023452-31023564
  hypo

SEQ ID NO: 328460 - DNA, 85 bp, Homo sapiens; identical to SEQ ID NO: 275870
  chr21:32558510-32558595
  hypo

SEQ ID NO: 328461 - DNA, 187 bp, Homo sapiens; identical to SEQ ID NO: 205950
  chr21:32716048-32716235
  hypo

SEQ ID NO: 328462 - DNA, 89 bp, Homo sapiens; identical to SEQ ID NO: 13211
  chr21:32931770-32931859
  hypo

SEQ ID NO: 328463 - DNA, 154 bp, Homo sapiens; identical to SEQ ID NO: 205952
  chr21:32932326-32932480
  hypo

SEQ ID NO: 328464 - DNA, 150 bp, Homo sapiens; identical to SEQ ID NO: 220304
  chr21:33057409-33057559
  hypo

SEQ ID NO: 328465 - DNA, 45 bp, Homo sapiens; identical to SEQ ID NO: 205953
  chr21:33058221-33058266
  hypo

SEQ ID NO: 328466 - DNA, 32 bp, Homo sapiens; identical to SEQ ID NO: 220306
  chr21:33058553-33058585
  hypo

SEQ ID NO: 328467 - DNA, 111 bp, Homo sapiens; identical to SEQ ID NO: 275873
  chr21:33058885-33058996
  hypo

SEQ ID NO: 328468 - DNA, 101 bp, Homo sapiens; identical to SEQ ID NO: 220307
  chr21:33175427-33175528
  hypo

SEQ ID NO: 328469 - DNA, 139 bp, Homo sapiens; identical to SEQ ID NO: 275875
  chr21:33340684-33340823
  hypo

SEQ ID NO: 328470 - DNA, 429 bp, Homo sapiens; identical to SEQ ID NO: 275876
  chr21:33370941-33371370
  hypo

SEQ ID NO: 328471 - DNA, 202 bp, Homo sapiens; identical to SEQ ID NO: 275877
  chr21:33416034-33416236
  hypo

SEQ ID NO: 328472 - DNA, 120 bp, Homo sapiens; identical to SEQ ID NO: 275878
  chr21:33627820-33627940
  hypo

SEQ ID NO: 328473 - DNA, 78 bp, Homo sapiens
  chr21:33628733-33628811
  hypo
tggctgtcacactccggtagctaaggccacctttgttcaatggctctctaccgggaggcataaaaagtacggtgacac

SEQ ID NO: 328474 - DNA, 33 bp, Homo sapiens; identical to SEQ ID NO: 220308
  chr21:33641298-33641331
  hypo

SEQ ID NO: 328475 - DNA, 33 bp, Homo sapiens; identical to SEQ ID NO: 275882
  chr21:33698086-33698119
  hypo

SEQ ID NO: 328476 - DNA, 616 bp, Homo sapiens; identical to SEQ ID NO: 220309
  chr21:33707628-33708244
  hypo

SEQ ID NO: 328477 - DNA, 165 bp, Homo sapiens; identical to SEQ ID NO: 275884
  chr21:33708274-33708439
  hypo

SEQ ID NO: 328478 - DNA, 171 bp, Homo sapiens; identical to SEQ ID NO: 220310
  chr21:33711061-33711232
  hypo

SEQ ID NO: 328479 - DNA, 137 bp, Homo sapiens
  chr21:33721619-33721756
  hypo
ttggccaactccagcgaggccacggactccatgtccaggaagaggtcggcttcggcccgggcggcctcgcatctctgctggttctgggcatccagctgctcacagtggacaaccaggcgcctgaggagatccaggaa

SEQ ID NO: 328480 - DNA, 42 bp, Homo sapiens; identical to SEQ ID NO: 275888
  chr21:33754389-33754431
  hypo

SEQ ID NO: 328481 - DNA, 102 bp, Homo sapiens; identical to SEQ ID NO: 275889
  chr21:33759538-33759640
  hypo

SEQ ID NO: 328482 - DNA, 583 bp, Homo sapiens; identical to SEQ ID NO: 275890
  chr21:33760391-33760974
  hypo

SEQ ID NO: 328483 - DNA, 317 bp, Homo sapiens; identical to SEQ ID NO: 220312
  chr21:33781921-33782238
  hypo

SEQ ID NO: 328484 - DNA, 158 bp, Homo sapiens; identical to SEQ ID NO: 275892
  chr21:33791606-33791764
  hypo

SEQ ID NO: 328485 - DNA, 163 bp, Homo sapiens; identical to SEQ ID NO: 220313
  chr21:33812566-33812729
  hypo

SEQ ID NO: 328486 - DNA, 80 bp, Homo sapiens; identical to SEQ ID NO: 275894
  chr21:33824927-33825007
  hypo

SEQ ID NO: 328487 - DNA, 240 bp, Homo sapiens; identical to SEQ ID NO: 220314
  chr21:33844219-33844459
  hypo

SEQ ID NO: 328488 - DNA, 208 bp, Homo sapiens; identical to SEQ ID NO: 220315
  chr21:33845782-33845990
  hypo

SEQ ID NO: 328489 - DNA, 65 bp, Homo sapiens; identical to SEQ ID NO: 220316
  chr21:33849056-33849121
  hypo

SEQ ID NO: 328490 - DNA, 36 bp, Homo sapiens; identical to SEQ ID NO: 275898
  chr21:33857747-33857783
  hypo

SEQ ID NO: 328491 - DNA, 85 bp, Homo sapiens; identical to SEQ ID NO: 275899
  chr21:33870148-33870233
  hypo

SEQ ID NO: 328492 - DNA, 89 bp, Homo sapiens; identical to SEQ ID NO: 220317
  chr21:33875251-33875340
  hypo

SEQ ID NO: 328493 - DNA, 148 bp, Homo sapiens; identical to SEQ ID NO: 220318
  chr21:33876126-33876274
  hypo

SEQ ID NO: 328494 - DNA, 120 bp, Homo sapiens; identical to SEQ ID NO: 275902
  chr21:33879876-33879996
  hypo

SEQ ID NO: 328495 - DNA, 117 bp, Homo sapiens; identical to SEQ ID NO: 275903
  chr21:33905871-33905988
  hypo

SEQ ID NO: 328496 - DNA, 219 bp, Homo sapiens; identical to SEQ ID NO: 220319
  chr21:33924144-33924363
  hypo

SEQ ID NO: 328497 - DNA, 122 bp, Homo sapiens
  chr21:33954435-33954557
  hypo
aagcccacatctttatggggacgctatttttacataacgcaaacggtacaaaaacataaatgcgcttttggtaccagagtgtgcgattcttgccccgcgtgtggggacgctgcagatttctt

SEQ ID NO: 328498 - DNA, 109 bp, Homo sapiens; identical to SEQ ID NO: 275906
  chr21:33976772-33976881
  hypo

SEQ ID NO: 328499 - DNA, 120 bp, Homo sapiens; identical to SEQ ID NO: 220320
  chr21:34033543-34033663
  hypo

SEQ ID NO: 328500 - DNA, 165 bp, Homo sapiens; identical to SEQ ID NO: 275909
  chr21:34350778-34350943
  hypo

SEQ ID NO: 328501 - DNA, 149 bp, Homo sapiens; identical to SEQ ID NO: 275910
  chr21:34493986-34494135
  hypo

SEQ ID NO: 328502 - DNA, 176 bp, Homo sapiens; identical to SEQ ID NO: 275911
  chr21:34498741-34498917
  hypo

SEQ ID NO: 328503 - DNA, 34 bp, Homo sapiens
  chr21:34508599-34508633
  hypo
tagagggttagctgttttgtttgtttgtttgttt

SEQ ID NO: 328504 - DNA, 75 bp, Homo sapiens; identical to SEQ ID NO: 275913
  chr21:34630963-34631038
  hypo

SEQ ID NO: 328505 - DNA, 92 bp, Homo sapiens; identical to SEQ ID NO: 220321
  chr21:34710940-34711032
  hypo

SEQ ID NO: 328506 - DNA, 32 bp, Homo sapiens; identical to SEQ ID NO: 220322
  chr21:34711332-34711364
  hypo

SEQ ID NO: 328507 - DNA, 40 bp, Homo sapiens; identical to SEQ ID NO: 220323
  chr21:34745739-34745779
  hypo

SEQ ID NO: 328508 - DNA, 254 bp, Homo sapiens; identical to SEQ ID NO: 275917
  chr21:34757192-34757446
  hypo

SEQ ID NO: 328509 - DNA, 686 bp, Homo sapiens; identical to SEQ ID NO: 295068
  chr21:34776086-34776772
  hypo

SEQ ID NO: 328510 - DNA, 41 bp, Homo sapiens; identical to SEQ ID NO: 295069
  chr21:34776997-34777038
  hypo

SEQ ID NO: 328511 - DNA, 36 bp, Homo sapiens; identical to SEQ ID NO: 275918
  chr21:34921350-34921386
  hypo

SEQ ID NO: 328512 - DNA, 251 bp, Homo sapiens
  chr21:34927031-34927282
  hypo
ctgaacacaaatcacgcaagcgtaccagtgaatctcgttctagggcaagaaagagatcatctaagtccaagtctcatcgctctcagacacgttcacggtcacgttcaagacgcaggaggagaagcagcagatcaagatcaaagtctagaggaagaagatctgtatcaaaagagaagcgcaaaagatctccaaagcacagatccaagtctagggaaagaaaaagaaaaagatcaagctccagggataaccga

SEQ ID NO: 328513 - DNA, 180 bp, Homo sapiens
  chr21:34927363-34927543
  hypo
gtgggtagaagaaggagctttagcatttccccaagccgccgcagccgcacccccagccgccgcagccgcacccccagccgccgcagccgcacccccagccgccgcagccgcacccccagccgccggagccgcacccctagccgtcggagccgcaccccaagccgccggagaagatcaagg

SEQ ID NO: 328514 - DNA, 36 bp, Homo sapiens; identical to SEQ ID NO: 275920
  chr21:35045297-35045333
  hypo

SEQ ID NO: 328515 - DNA, 308 bp, Homo sapiens; identical to SEQ ID NO: 275921
  chr21:35204298-35204606
  hypo

SEQ ID NO: 328516 - DNA, 290 bp, Homo sapiens; identical to SEQ ID NO: 275922
  chr21:35258633-35258923
  hypo

SEQ ID NO: 328517 - DNA, 78 bp, Homo sapiens; identical to SEQ ID NO: 275923
  chr21:35286345-35286423
  hypo

SEQ ID NO: 328518 - DNA, 154 bp, Homo sapiens; identical to SEQ ID NO: 275924
  chr21:35453130-35453284
  hypo

SEQ ID NO: 328519 - DNA, 100 bp, Homo sapiens; identical to SEQ ID NO: 275925
  chr21:35954876-35954976
  hypo

SEQ ID NO: 328520 - DNA, 247 bp, Homo sapiens; identical to SEQ ID NO: 205971
  chr21:35986732-35986979
  hypo

SEQ ID NO: 328521 - DNA, 44 bp, Homo sapiens; identical to SEQ ID NO: 275926
  chr21:36072874-36072918
  hypo

SEQ ID NO: 328522 - DNA, 77 bp, Homo sapiens; identical to SEQ ID NO: 275927
  chr21:36073649-36073726
  hypo

SEQ ID NO: 328523 - DNA, 74 bp, Homo sapiens; identical to SEQ ID NO: 275928
  chr21:36074666-36074740
  hypo

SEQ ID NO: 328524 - DNA, 1781 bp, Homo sapiens; identical to SEQ ID NO: 205972
  chr21:36160097-36161878
  hypo

SEQ ID NO: 328525 - DNA, 3166 bp, Homo sapiens; identical to SEQ ID NO: 295078
  chr21:36161932-36165098
  hypo

SEQ ID NO: 328526 - DNA, 162 bp, Homo sapiens; identical to SEQ ID NO: 205974
  chr21:36171597-36171759
  hypo

SEQ ID NO: 328527 - DNA, 203 bp, Homo sapiens; identical to SEQ ID NO: 205975
  chr21:36206695-36206898
  hypo

SEQ ID NO: 328528 - DNA, 77 bp, Homo sapiens; identical to SEQ ID NO: 275930
  chr21:36221023-36221100
  hypo

SEQ ID NO: 328529 - DNA, 105 bp, Homo sapiens; identical to SEQ ID NO: 205976
  chr21:36231770-36231875
  hypo

SEQ ID NO: 328530 - DNA, 53 bp, Homo sapiens; identical to SEQ ID NO: 275931
  chr21:36236602-36236655
  hypo

SEQ ID NO: 328531 - DNA, 42 bp, Homo sapiens; identical to SEQ ID NO: 275932
  chr21:36242109-36242151
  hypo

SEQ ID NO: 328532 - DNA, 179 bp, Homo sapiens; identical to SEQ ID NO: 205977
  chr21:36252845-36253024
  hypo

SEQ ID NO: 328533 - DNA, 266 bp, Homo sapiens; identical to SEQ ID NO: 205978
  chr21:36259127-36259393
  hypo

SEQ ID NO: 328534 - DNA, 39 bp, Homo sapiens; identical to SEQ ID NO: 205980
  chr21:36265221-36265260
  hypo

SEQ ID NO: 328535 - DNA, 122 bp, Homo sapiens; identical to SEQ ID NO: 275933
  chr21:36394526-36394648
  hypo

SEQ ID NO: 328536 - DNA, 117 bp, Homo sapiens; identical to SEQ ID NO: 205981
  chr21:36421138-36421255
  hypo

SEQ ID NO: 328537 - DNA, 131 bp, Homo sapiens; identical to SEQ ID NO: 205982
  chr21:36421464-36421595
  hypo

SEQ ID NO: 328538 - DNA, 182 bp, Homo sapiens; identical to SEQ ID NO: 220336
  chr21:36437235-36437417
  hypo

SEQ ID NO: 328539 - DNA, 143 bp, Homo sapiens; identical to SEQ ID NO: 275935
  chr21:36696253-36696396
  hypo

SEQ ID NO: 328540 - DNA, 134 bp, Homo sapiens; identical to SEQ ID NO: 220337
  chr21:37259305-37259439
  hypo

SEQ ID NO: 328541 - DNA, 344 bp, Homo sapiens; identical to SEQ ID NO: 275937
  chr21:37405005-37405349
  hypo

SEQ ID NO: 328542 - DNA, 183 bp, Homo sapiens; identical to SEQ ID NO: 275938
  chr21:37411502-37411685
  hypo

SEQ ID NO: 328543 - DNA, 32 bp, Homo sapiens; identical to SEQ ID NO: 275939
  chr21:37413159-37413191
  hypo

SEQ ID NO: 328544 - DNA, 177 bp, Homo sapiens; identical to SEQ ID NO: 275940
  chr21:37417895-37418072
  hypo

SEQ ID NO: 328545 - DNA, 138 bp, Homo sapiens; identical to SEQ ID NO: 275941
  chr21:37431011-37431149
  hypo

SEQ ID NO: 328546 - DNA, 42 bp, Homo sapiens; identical to SEQ ID NO: 275942
  chr21:37514437-37514479
  hypo

SEQ ID NO: 328547 - DNA, 62 bp, Homo sapiens; identical to SEQ ID NO: 275943
  chr21:37527866-37527928
  hypo

SEQ ID NO: 328548 - DNA, 373 bp, Homo sapiens; identical to SEQ ID NO: 205983
  chr21:37528252-37528625
  hypo

SEQ ID NO: 328549 - DNA, 47 bp, Homo sapiens; identical to SEQ ID NO: 275944
  chr21:37571105-37571152
  hypo

SEQ ID NO: 328550 - DNA, 177 bp, Homo sapiens; identical to SEQ ID NO: 275945
  chr21:37571538-37571715
  hypo

SEQ ID NO: 328551 - DNA, 275 bp, Homo sapiens; identical to SEQ ID NO: 220340
  chr21:37582267-37582542
  hypo

SEQ ID NO: 328552 - DNA, 57 bp, Homo sapiens; identical to SEQ ID NO: 275947
  chr21:37612232-37612289
  hypo

SEQ ID NO: 328553 - DNA, 340 bp, Homo sapiens; identical to SEQ ID NO: 275948
  chr21:37617447-37617787
  hypo

SEQ ID NO: 328554 - DNA, 177 bp, Homo sapiens; identical to SEQ ID NO: 275949
  chr21:37618034-37618211
  hypo

SEQ ID NO: 328555 - DNA, 153 bp, Homo sapiens; identical to SEQ ID NO: 275950
  chr21:37650248-37650401
  hypo

SEQ ID NO: 328556 - DNA, 89 bp, Homo sapiens; identical to SEQ ID NO: 275951
  chr21:37718544-37718633
  hypo

SEQ ID NO: 328557 - DNA, 45 bp, Homo sapiens; identical to SEQ ID NO: 275952
  chr21:37727417-37727462
  hypo

SEQ ID NO: 328558 - DNA, 46 bp, Homo sapiens; identical to SEQ ID NO: 275953
  chr21:37747436-37747482
  hypo

SEQ ID NO: 328559 - DNA, 280 bp, Homo sapiens
  chr21:37750164-37750444
  hypo
tggggagttttttaaactcccaaagtcaggctgcacctcacgttaattaagtcagcgtccttggggttagacccagataacagtatttttcaaggcctcccgggttaattccagtgcaccatcagagccaagcactgttgagttgtgtcttctgttgagtatttataaatgttgaacttgagtggttcacgaaacaaacgggatcagcatatccactttctcactggggcaagcagggggagggaggggaagcagagcggtgccccggtagagatgtaaa

SEQ ID NO: 328560 - DNA, 63 bp, Homo sapiens; identical to SEQ ID NO: 220341
  chr21:37775172-37775235
  hypo

SEQ ID NO: 328561 - DNA, 101 bp, Homo sapiens
  chr21:37780744-37780845
  hypo
ggaattgcctggaggctcaacggtgccctatggcaaaggctcactatgttctcctcgcccaagatcagaaccaggtccccggggattgcccacaggtaggt

SEQ ID NO: 328562 - DNA, 40 bp, Homo sapiens; identical to SEQ ID NO: 220342
  chr21:37781692-37781732
  hypo

SEQ ID NO: 328563 - DNA, 35 bp, Homo sapiens; identical to SEQ ID NO: 275959
  chr21:37795935-37795970
  hypo

SEQ ID NO: 328564 - DNA, 431 bp, Homo sapiens; identical to SEQ ID NO: 275960
  chr21:37833298-37833729
  hypo

SEQ ID NO: 328565 - DNA, 206 bp, Homo sapiens; identical to SEQ ID NO: 220343
  chr21:37847275-37847481
  hypo

SEQ ID NO: 328566 - DNA, 79 bp, Homo sapiens; identical to SEQ ID NO: 275962
  chr21:37855513-37855592
  hypo

SEQ ID NO: 328567 - DNA, 64 bp, Homo sapiens; identical to SEQ ID NO: 275963
  chr21:38103483-38103547
  hypo

SEQ ID NO: 328568 - DNA, 94 bp, Homo sapiens; identical to SEQ ID NO: 275964
  chr21:38163560-38163654
  hypo

SEQ ID NO: 328569 - DNA, 158 bp, Homo sapiens; identical to SEQ ID NO: 275965
  chr21:38175731-38175889
  hypo

SEQ ID NO: 328570 - DNA, 202 bp, Homo sapiens; identical to SEQ ID NO: 275966
  chr21:38176469-38176671
  hypo

SEQ ID NO: 328571 - DNA, 87 bp, Homo sapiens; identical to SEQ ID NO: 275967
  chr21:38179973-38180060
  hypo

SEQ ID NO: 328572 - DNA, 73 bp, Homo sapiens; identical to SEQ ID NO: 275968
  chr21:38248311-38248384
  hypo

SEQ ID NO: 328573 - DNA, 200 bp, Homo sapiens; identical to SEQ ID NO: 275969
  chr21:38282807-38283007
  hypo

SEQ ID NO: 328574 - DNA, 244 bp, Homo sapiens; identical to SEQ ID NO: 275970
  chr21:38299536-38299780
  hypo

SEQ ID NO: 328575 - DNA, 40 bp, Homo sapiens; identical to SEQ ID NO: 275971
  chr21:38355344-38355384
  hypo

SEQ ID NO: 328576 - DNA, 199 bp, Homo sapiens; identical to SEQ ID NO: 295105
  chr21:38362192-38362391
  hypo

SEQ ID NO: 328577 - DNA, 121 bp, Homo sapiens
  chr21:38362977-38363098
  hypo
aatgcccgcatttctaccctgcccactagaaactgagggattgccacagctcccgtgaggttcagcaattccctgggacgacacagaactcagggagacactttactgttagaagattatt

SEQ ID NO: 328578 - DNA, 122 bp, Homo sapiens
  chr21:38383188-38383310
  hypo
gtgcacatttctgttctcgtgtttcattataaaatgtgaatatttagacatttccctcagcagacaaaggatccttttggaaaacaatcaggatatttatggcattttttttttttgaggcg

SEQ ID NO: 328579 - DNA, 120 bp, Homo sapiens; identical to SEQ ID NO: 220344
  chr21:38419197-38419317
  hypo

SEQ ID NO: 328580 - DNA, 415 bp, Homo sapiens; identical to SEQ ID NO: 295110
  chr21:38446375-38446790
  hypo

SEQ ID NO: 328581 - DNA, 73 bp, Homo sapiens; identical to SEQ ID NO: 220345
  chr21:38566696-38566769
  hypo

SEQ ID NO: 328582 - DNA, 182 bp, Homo sapiens; identical to SEQ ID NO: 275976
  chr21:38567963-38568145
  hypo

SEQ ID NO: 328583 - DNA, 115 bp, Homo sapiens; identical to SEQ ID NO: 275977
  chr21:38574613-38574728
  hypo

SEQ ID NO: 328584 - DNA, 270 bp, Homo sapiens; identical to SEQ ID NO: 275978
  chr21:38603098-38603368
  hypo

SEQ ID NO: 328585 - DNA, 180 bp, Homo sapiens; identical to SEQ ID NO: 275979
  chr21:38603576-38603756
  hypo

SEQ ID NO: 328586 - DNA, 269 bp, Homo sapiens; identical to SEQ ID NO: 275980
  chr21:38605419-38605688
  hypo

SEQ ID NO: 328587 - DNA, 35 bp, Homo sapiens; identical to SEQ ID NO: 220346
  chr21:38605997-38606032
  hypo

SEQ ID NO: 328588 - DNA, 44 bp, Homo sapiens; identical to SEQ ID NO: 220347
  chr21:38606095-38606139
  hypo

SEQ ID NO: 328589 - DNA, 120 bp, Homo sapiens; identical to SEQ ID NO: 220348
  chr21:38673107-38673227
  hypo

SEQ ID NO: 328590 - DNA, 50 bp, Homo sapiens
  chr21:38823585-38823635
  hypo
tcgaccgtagtagacggtttaatgtcctaggcctttgcattcattcactc

SEQ ID NO: 328591 - DNA, 397 bp, Homo sapiens; identical to SEQ ID NO: 220349
  chr21:38823665-38824062
  hypo

SEQ ID NO: 328592 - DNA, 154 bp, Homo sapiens; identical to SEQ ID NO: 275985
  chr21:38832660-38832814
  hypo

SEQ ID NO: 328593 - DNA, 77 bp, Homo sapiens
  chr21:38918382-38918459
  hypo
gtggatatgatgagcggttatgcgggctctgcttcttgccacctacttgcaggttgaaggatgtgcctattccacat

SEQ ID NO: 328594 - DNA, 183 bp, Homo sapiens
  chr21:38918561-38918744
  hypo
tactcacactctatacacctggattgagatcacagtattattattttcacaatcgaactgagcaaagatacggcagccactgaagactcactgtgaggtgcgtctaagggagaaaccatgggctgttgccgaagatctgggagaaaaagtgtggaaaaggcaaaaccgcgcctgggagctcct

SEQ ID NO: 328595 - DNA, 214 bp, Homo sapiens; identical to SEQ ID NO: 275988
  chr21:39021859-39022073
  hypo

SEQ ID NO: 328596 - DNA, 310 bp, Homo sapiens; identical to SEQ ID NO: 206000
  chr21:39288394-39288704
  hypo

SEQ ID NO: 328597 - DNA, 279 bp, Homo sapiens; identical to SEQ ID NO: 206001
  chr21:39288901-39289180
  hypo

SEQ ID NO: 328598 - DNA, 142 bp, Homo sapiens; identical to SEQ ID NO: 220352
  chr21:39726165-39726307
  hypo

SEQ ID NO: 328599 - DNA, 61 bp, Homo sapiens; identical to SEQ ID NO: 275990
  chr21:39800302-39800363
  hypo

SEQ ID NO: 328600 - DNA, 35 bp, Homo sapiens; identical to SEQ ID NO: 206002
  chr21:40032286-40032321
  hypo

SEQ ID NO: 328601 - DNA, 158 bp, Homo sapiens; identical to SEQ ID NO: 206003
  chr21:40032367-40032525
  hypo

SEQ ID NO: 328602 - DNA, 66 bp, Homo sapiens; identical to SEQ ID NO: 206004
  chr21:40032848-40032914
  hypo

SEQ ID NO: 328603 - DNA, 132 bp, Homo sapiens; identical to SEQ ID NO: 206005
  chr21:40032974-40033106
  hypo

SEQ ID NO: 328604 - DNA, 69 bp, Homo sapiens; identical to SEQ ID NO: 275991
  chr21:40047614-40047683
  hypo

SEQ ID NO: 328605 - DNA, 164 bp, Homo sapiens; identical to SEQ ID NO: 275992
  chr21:40049306-40049470
  hypo

SEQ ID NO: 328606 - DNA, 181 bp, Homo sapiens; identical to SEQ ID NO: 275993
  chr21:40056140-40056321
  hypo

SEQ ID NO: 328607 - DNA, 34 bp, Homo sapiens; identical to SEQ ID NO: 275994
  chr21:40082800-40082834
  hypo

SEQ ID NO: 328608 - DNA, 86 bp, Homo sapiens; identical to SEQ ID NO: 220357
  chr21:40117700-40117786
  hypo

SEQ ID NO: 328609 - DNA, 181 bp, Homo sapiens; identical to SEQ ID NO: 275996
  chr21:40146604-40146785
  hypo

SEQ ID NO: 328610 - DNA, 196 bp, Homo sapiens; identical to SEQ ID NO: 275997
  chr21:40168980-40169176
  hypo

SEQ ID NO: 328611 - DNA, 1243 bp, Homo sapiens; identical to SEQ ID NO: 295130
  chr21:40177485-40178728
  hypo

SEQ ID NO: 328612 - DNA, 329 bp, Homo sapiens; identical to SEQ ID NO: 275998
  chr21:40189392-40189721
  hypo

SEQ ID NO: 328613 - DNA, 243 bp, Homo sapiens; identical to SEQ ID NO: 275999
  chr21:40190268-40190511
  hypo

SEQ ID NO: 328614 - DNA, 183 bp, Homo sapiens; identical to SEQ ID NO: 220359
  chr21:40191659-40191842
  hypo

SEQ ID NO: 328615 - DNA, 43 bp, Homo sapiens; identical to SEQ ID NO: 220360
  chr21:40208390-40208433
  hypo

SEQ ID NO: 328616 - DNA, 36 bp, Homo sapiens; identical to SEQ ID NO: 276002
  chr21:40212524-40212560
  hypo

SEQ ID NO: 328617 - DNA, 44 bp, Homo sapiens; identical to SEQ ID NO: 220361
  chr21:40278582-40278626
  hypo

SEQ ID NO: 328618 - DNA, 784 bp, Homo sapiens; identical to SEQ ID NO: 276004
  chr21:40316174-40316958
  hypo

SEQ ID NO: 328619 - DNA, 74 bp, Homo sapiens; identical to SEQ ID NO: 276005
  chr21:40328293-40328367
  hypo

SEQ ID NO: 328620 - DNA, 132 bp, Homo sapiens; identical to SEQ ID NO: 276006
  chr21:40331566-40331698
  hypo

SEQ ID NO: 328621 - DNA, 33 bp, Homo sapiens; identical to SEQ ID NO: 276007
  chr21:40333255-40333288
  hypo

SEQ ID NO: 328622 - DNA, 152 bp, Homo sapiens; identical to SEQ ID NO: 276008
  chr21:40333528-40333680
  hypo

SEQ ID NO: 328623 - DNA, 284 bp, Homo sapiens; identical to SEQ ID NO: 276009
  chr21:40340040-40340324
  hypo

SEQ ID NO: 328624 - DNA, 196 bp, Homo sapiens; identical to SEQ ID NO: 276010
  chr21:40348653-40348849
  hypo

SEQ ID NO: 328625 - DNA, 144 bp, Homo sapiens; identical to SEQ ID NO: 276011
  chr21:40354427-40354571
  hypo

SEQ ID NO: 328626 - DNA, 427 bp, Homo sapiens; identical to SEQ ID NO: 276012
  chr21:40365999-40366426
  hypo

SEQ ID NO: 328627 - DNA, 40 bp, Homo sapiens; identical to SEQ ID NO: 276013
  chr21:40425340-40425380
  hypo

SEQ ID NO: 328628 - DNA, 145 bp, Homo sapiens; identical to SEQ ID NO: 276014
  chr21:40431056-40431201
  hypo

SEQ ID NO: 328629 - DNA, 54 bp, Homo sapiens; identical to SEQ ID NO: 276015
  chr21:40433691-40433745
  hypo

SEQ ID NO: 328630 - DNA, 201 bp, Homo sapiens; identical to SEQ ID NO: 220364
  chr21:40434519-40434720
  hypo

SEQ ID NO: 328631 - DNA, 42 bp, Homo sapiens; identical to SEQ ID NO: 276017
  chr21:40453322-40453364
  hypo

SEQ ID NO: 328632 - DNA, 46 bp, Homo sapiens; identical to SEQ ID NO: 276018
  chr21:40463109-40463155
  hypo

SEQ ID NO: 328633 - DNA, 229 bp, Homo sapiens; identical to SEQ ID NO: 276019
  chr21:40465400-40465629
  hypo

SEQ ID NO: 328634 - DNA, 136 bp, Homo sapiens; identical to SEQ ID NO: 276020
  chr21:40479891-40480027
  hypo

SEQ ID NO: 328635 - DNA, 148 bp, Homo sapiens; identical to SEQ ID NO: 220365
  chr21:40480501-40480649
  hypo

SEQ ID NO: 328636 - DNA, 62 bp, Homo sapiens; identical to SEQ ID NO: 220366
  chr21:40488784-40488846
  hypo

SEQ ID NO: 328637 - DNA, 83 bp, Homo sapiens; identical to SEQ ID NO: 276023
  chr21:40490344-40490427
  hypo

SEQ ID NO: 328638 - DNA, 348 bp, Homo sapiens; identical to SEQ ID NO: 220367
  chr21:40506196-40506544
  hypo

SEQ ID NO: 328639 - DNA, 41 bp, Homo sapiens; identical to SEQ ID NO: 276026
  chr21:40510983-40511024
  hypo

SEQ ID NO: 328640 - DNA, 112 bp, Homo sapiens; identical to SEQ ID NO: 276027
  chr21:40525158-40525270
  hypo

SEQ ID NO: 328641 - DNA, 59 bp, Homo sapiens; identical to SEQ ID NO: 276028
  chr21:40525300-40525359
  hypo

SEQ ID NO: 328642 - DNA, 65 bp, Homo sapiens; identical to SEQ ID NO: 276029
  chr21:40580603-40580668
  hypo

SEQ ID NO: 328643 - DNA, 216 bp, Homo sapiens; identical to SEQ ID NO: 276030
  chr21:40693346-40693562
  hypo

SEQ ID NO: 328644 - DNA, 34 bp, Homo sapiens; identical to SEQ ID NO: 220368
  chr21:40697450-40697484
  hypo

SEQ ID NO: 328645 - DNA, 36 bp, Homo sapiens; identical to SEQ ID NO: 276032
  chr21:40705587-40705623
  hypo

SEQ ID NO: 328646 - DNA, 101 bp, Homo sapiens; identical to SEQ ID NO: 295131
  chr21:40751585-40751686
  hypo

SEQ ID NO: 328647 - DNA, 523 bp, Homo sapiens; identical to SEQ ID NO: 276033
  chr21:40762267-40762790
  hypo

SEQ ID NO: 328648 - DNA, 245 bp, Homo sapiens; identical to SEQ ID NO: 276034
  chr21:40764919-40765164
  hypo

SEQ ID NO: 328649 - DNA, 193 bp, Homo sapiens; identical to SEQ ID NO: 276035
  chr21:40820653-40820846
  hypo

SEQ ID NO: 328650 - DNA, 236 bp, Homo sapiens; identical to SEQ ID NO: 276036
  chr21:40891427-40891663
  hypo

SEQ ID NO: 328651 - DNA, 89 bp, Homo sapiens; identical to SEQ ID NO: 220370
  chr21:40904967-40905056
  hypo

SEQ ID NO: 328652 - DNA, 70 bp, Homo sapiens; identical to SEQ ID NO: 206012
  chr21:40941233-40941303
  hypo

SEQ ID NO: 328653 - DNA, 86 bp, Homo sapiens; identical to SEQ ID NO: 276038
  chr21:40952126-40952212
  hypo

SEQ ID NO: 328654 - DNA, 36 bp, Homo sapiens; identical to SEQ ID NO: 276039
  chr21:41281950-41281986
  hypo

SEQ ID NO: 328655 - DNA, 35 bp, Homo sapiens; identical to SEQ ID NO: 276040
  chr21:41711102-41711137
  hypo

SEQ ID NO: 328656 - DNA, 61 bp, Homo sapiens
  chr21:42447732-42447793
  hypo
ctcccaccctccaccggtactgggtggctgccccgtgtgatgggaagcagcggtggccagg

SEQ ID NO: 328657 - DNA, 293 bp, Homo sapiens
  chr21:42447823-42448116
  hypo
tggcaggacccaacgggctgggacacgcccccgtttgcgaagcgtgcagatggtgggaatgaatgaactgtaacacgaacattgttattttatccagaatcagacacctcgaagaagctgcgacccttctggggcccagacctcaggactccctgagccagagccgtgacccactgtatcacccccttggagctccacagtggctgtcgtctctgagtttttaggcaccaccatgctccccttatctagatgctggctcccaaggcggacgccgcttgtggtatgcctggtcc

SEQ ID NO: 328658 - DNA, 81 bp, Homo sapiens
  chr21:42448155-42448236
  hypo
tggagctgtcggccccgccacagcagcgcgtgcctgacccacccttggcaggtgtgagatctgggccgcaggcacaagccg

SEQ ID NO: 328659 - DNA, 123 bp, Homo sapiens; identical to SEQ ID NO: 295136
  chr21:42539420-42539543
  hypo

SEQ ID NO: 328660 - DNA, 1593 bp, Homo sapiens; identical to SEQ ID NO: 133598
  chr21:42539583-42541176
  hypo

SEQ ID NO: 328661 - DNA, 272 bp, Homo sapiens; identical to SEQ ID NO: 220375
  chr21:42572214-42572486
  hypo

SEQ ID NO: 328662 - DNA, 172 bp, Homo sapiens; identical to SEQ ID NO: 276043
  chr21:42582372-42582544
  hypo

SEQ ID NO: 328663 - DNA, 39 bp, Homo sapiens; identical to SEQ ID NO: 220376
  chr21:42585677-42585716
  hypo

SEQ ID NO: 328664 - DNA, 57 bp, Homo sapiens; identical to SEQ ID NO: 276045
  chr21:42591778-42591835
  hypo

SEQ ID NO: 328665 - DNA, 94 bp, Homo sapiens; identical to SEQ ID NO: 220377
  chr21:42593386-42593480
  hypo

SEQ ID NO: 328666 - DNA, 213 bp, Homo sapiens; identical to SEQ ID NO: 220378
  chr21:42593780-42593993
  hypo

SEQ ID NO: 328667 - DNA, 43 bp, Homo sapiens; identical to SEQ ID NO: 220379
  chr21:42596858-42596901
  hypo

SEQ ID NO: 328668 - DNA, 180 bp, Homo sapiens; identical to SEQ ID NO: 220380
  chr21:42608632-42608812
  hypo

SEQ ID NO: 328669 - DNA, 85 bp, Homo sapiens; identical to SEQ ID NO: 220381
  chr21:42609014-42609099
  hypo

SEQ ID NO: 328670 - DNA, 85 bp, Homo sapiens; identical to SEQ ID NO: 276051
  chr21:42609399-42609484
  hypo

SEQ ID NO: 328671 - DNA, 110 bp, Homo sapiens; identical to SEQ ID NO: 220382
  chr21:42613646-42613756
  hypo

SEQ ID NO: 328672 - DNA, 103 bp, Homo sapiens; identical to SEQ ID NO: 220383
  chr21:42613819-42613922
  hypo

SEQ ID NO: 328673 - DNA, 166 bp, Homo sapiens; identical to SEQ ID NO: 220384
  chr21:42617797-42617963
  hypo

SEQ ID NO: 328674 - DNA, 113 bp, Homo sapiens; identical to SEQ ID NO: 220385
  chr21:42617995-42618108
  hypo

SEQ ID NO: 328675 - DNA, 252 bp, Homo sapiens; identical to SEQ ID NO: 276054
  chr21:42629054-42629306
  hypo

SEQ ID NO: 328676 - DNA, 139 bp, Homo sapiens
  chr21:42649202-42649341
  hypo
ggcttgtcatggtgtcctggaagactctccagcagccagaagaaccttctgtgctgttttcactagagaagatttgagttgcagcctcttggaaagaacatgacggcacggaacgggaggagggggctcttgtatcagg

SEQ ID NO: 328677 - DNA, 307 bp, Homo sapiens; identical to SEQ ID NO: 276056
  chr21:42676099-42676406
  hypo

SEQ ID NO: 328678 - DNA, 42 bp, Homo sapiens; identical to SEQ ID NO: 276057
  chr21:42700241-42700283
  hypo

SEQ ID NO: 328679 - DNA, 183 bp, Homo sapiens; identical to SEQ ID NO: 276058
  chr21:42710365-42710548
  hypo

SEQ ID NO: 328680 - DNA, 180 bp, Homo sapiens; identical to SEQ ID NO: 220387
  chr21:42780052-42780232
  hypo

SEQ ID NO: 328681 - DNA, 152 bp, Homo sapiens; identical to SEQ ID NO: 276060
  chr21:42838262-42838414
  hypo

SEQ ID NO: 328682 - DNA, 56 bp, Homo sapiens; identical to SEQ ID NO: 276061
  chr21:42860318-42860374
  hypo

SEQ ID NO: 328683 - DNA, 120 bp, Homo sapiens; identical to SEQ ID NO: 220388
  chr21:42896357-42896477
  hypo

SEQ ID NO: 328684 - DNA, 158 bp, Homo sapiens
  chr21:42953485-42953643
  hypo
ctccctacaccctacgcacacggcggctgttccccacgacacagcggggggcaaatgaccaccaggagccagggagtcccagggaaaggacgcagatggctcgtgtcctggaatttcatgggagccatttgaaatcatcagcaaatgacgcccgagtc

SEQ ID NO: 328685 - DNA, 54 bp, Homo sapiens; identical to SEQ ID NO: 220390
  chr21:42953673-42953727
  hypo

SEQ ID NO: 328686 - DNA, 164 bp, Homo sapiens; identical to SEQ ID NO: 220391
  chr21:43021070-43021234
  hypo

SEQ ID NO: 328687 - DNA, 140 bp, Homo sapiens; identical to SEQ ID NO: 220392
  chr21:43026399-43026539
  hypo

SEQ ID NO: 328688 - DNA, 38 bp, Homo sapiens
  chr21:43033366-43033404
  hypo
tctcctacagcgtgcgtgaacgggaggccaggatggcc

SEQ ID NO: 328689 - DNA, 398 bp, Homo sapiens
  chr21:43033434-43033832
  hypo
aagaggttgcagtttcagcttctggctgtggatgctccgggcaatttcatgcatttccatgagttcagagaatggaagctcccctggcccctccctaccactctttgtaaatcagctcgctccttctgttcattcatccgctcattcatccattccgcacacgtgccttattgaatccctgctatgaccaggcacagggttagatactccatggagaccagaccagtcttagcctctgcactgatgaactcaacccagaagacacacgaaaagataagccacggtgtgacgggcggacgacagagcctgcgccgagacacgggcacttcagcttgatatgtggagagtgtcggctgcaaacctccctggtctctgccgccagacgcatgccaagatgg

SEQ ID NO: 328690 - DNA, 338 bp, Homo sapiens; identical to SEQ ID NO: 276067
  chr21:43050298-43050636
  hypo

SEQ ID NO: 328691 - DNA, 87 bp, Homo sapiens; identical to SEQ ID NO: 226286
  chr21:43067058-43067145
  hypo

SEQ ID NO: 328692 - DNA, 94 bp, Homo sapiens; identical to SEQ ID NO: 276068
  chr21:43069862-43069956
  hypo

SEQ ID NO: 328693 - DNA, 56 bp, Homo sapiens; identical to SEQ ID NO: 276069
  chr21:43083100-43083156
  hypo

SEQ ID NO: 328694 - DNA, 243 bp, Homo sapiens; identical to SEQ ID NO: 220393
  chr21:43088944-43089187
  hypo

SEQ ID NO: 328695 - DNA, 62 bp, Homo sapiens; identical to SEQ ID NO: 220394
  chr21:43090566-43090628
  hypo

SEQ ID NO: 328696 - DNA, 193 bp, Homo sapiens; identical to SEQ ID NO: 276072
  chr21:43102605-43102798
  hypo

SEQ ID NO: 328697 - DNA, 39 bp, Homo sapiens; identical to SEQ ID NO: 276073
  chr21:43108231-43108270
  hypo

SEQ ID NO: 328698 - DNA, 254 bp, Homo sapiens; identical to SEQ ID NO: 220395
  chr21:43109376-43109630
  hypo

SEQ ID NO: 328699 - DNA, 826 bp, Homo sapiens; identical to SEQ ID NO: 220396
  chr21:43160962-43161788
  hypo

SEQ ID NO: 328700 - DNA, 336 bp, Homo sapiens; identical to SEQ ID NO: 220397
  chr21:43161818-43162154
  hypo

SEQ ID NO: 328701 - DNA, 346 bp, Homo sapiens; identical to SEQ ID NO: 276077
  chr21:43162542-43162888
  hypo

SEQ ID NO: 328702 - DNA, 644 bp, Homo sapiens; identical to SEQ ID NO: 220399
  chr21:43164044-43164688
  hypo

SEQ ID NO: 328703 - DNA, 366 bp, Homo sapiens; identical to SEQ ID NO: 220400
  chr21:43165725-43166091
  hypo

SEQ ID NO: 328704 - DNA, 326 bp, Homo sapiens; identical to SEQ ID NO: 276080
  chr21:43166637-43166963
  hypo

SEQ ID NO: 328705 - DNA, 192 bp, Homo sapiens; identical to SEQ ID NO: 220402
  chr21:43168156-43168348
  hypo

SEQ ID NO: 328706 - DNA, 162 bp, Homo sapiens; identical to SEQ ID NO: 276082
  chr21:43171157-43171319
  hypo

SEQ ID NO: 328707 - DNA, 161 bp, Homo sapiens; identical to SEQ ID NO: 276083
  chr21:43176654-43176815
  hypo

SEQ ID NO: 328708 - DNA, 389 bp, Homo sapiens
  chr21:43239693-43240082
  hypo
acactcccagttctcgctcacatcccctcccagcgccctgcagcagctgagcggcctggctgagcctggcccgtggccctggcgcctgtacccacctttcccacactcggcccgtggccccggcccccgcccccgccacacccaccttccccacactcccagttctcgctcatgtccccttccagcaccctgcagcagggtggcctggctgagcctggcccatgtccccagcacccgtacccacctttcccacactcggcacacaggtactcgcggacattgtcgtgcacacgcatgtgctccttcagcatgtccttcctggcaaaggacttcccacactgctcgcaggcgtggctcttcacacctgagaacacaggcatctgccactc

SEQ ID NO: 328709 - DNA, 257 bp, Homo sapiens
  chr21:43240112-43240369
  hypo
gcaaagaggatgcaccaaggagaggggcccagcctccccagcagctagaagcgcagtaacaggggtggggtcgcctcttcagcggcctccacagagccctcccggggatcctgtgactccagtagatccctgaggacctggaggggtgagggggctgggggcgctgggctgtgagtggcagggctgataaggacgggaaaagctggagaaacagaggaaggcatgggggaggcaaggtgcgacggctctgtgtgtag

SEQ ID NO: 328710 - DNA, 111 bp, Homo sapiens; identical to SEQ ID NO: 220405
  chr21:43245253-43245364
  hypo

SEQ ID NO: 328711 - DNA, 263 bp, Homo sapiens; identical to SEQ ID NO: 276086
  chr21:43245662-43245925
  hypo

SEQ ID NO: 328712 - DNA, 86 bp, Homo sapiens
  chr21:43248405-43248491
  hypo
ggagcaggcggcaccgaactgctccccaaaggccctgctgactgctccatgccgccctgccccaccccgcaggagctgcctctccc

SEQ ID NO: 328713 - DNA, 104 bp, Homo sapiens; identical to SEQ ID NO: 276088
  chr21:43251938-43252042
  hypo

SEQ ID NO: 328714 - DNA, 153 bp, Homo sapiens; identical to SEQ ID NO: 276090
  chr21:43269265-43269418
  hypo

SEQ ID NO: 328715 - DNA, 564 bp, Homo sapiens; identical to SEQ ID NO: 276091
  chr21:43271129-43271693
  hypo

SEQ ID NO: 328716 - DNA, 242 bp, Homo sapiens; identical to SEQ ID NO: 276092
  chr21:43273197-43273439
  hypo

SEQ ID NO: 328717 - DNA, 239 bp, Homo sapiens; identical to SEQ ID NO: 220408
  chr21:43290514-43290753
  hypo

SEQ ID NO: 328718 - DNA, 39 bp, Homo sapiens; identical to SEQ ID NO: 276094
  chr21:43340738-43340777
  hypo

SEQ ID NO: 328719 - DNA, 89 bp, Homo sapiens; identical to SEQ ID NO: 220409
  chr21:43347890-43347979
  hypo

SEQ ID NO: 328720 - DNA, 33 bp, Homo sapiens; identical to SEQ ID NO: 220410
  chr21:43348009-43348042
  hypo

SEQ ID NO: 328721 - DNA, 149 bp, Homo sapiens; identical to SEQ ID NO: 276097
  chr21:43364211-43364360
  hypo

SEQ ID NO: 328722 - DNA, 979 bp, Homo sapiens; identical to SEQ ID NO: 295149
  chr21:43373386-43374365
  hypo

SEQ ID NO: 328723 - DNA, 60 bp, Homo sapiens
  chr21:43376434-43376494
  hypo
gagggcccagtgttccccgtgccatgtgtgcacacaggccgcctgcggctgtgtgggcag

SEQ ID NO: 328724 - DNA, 60 bp, Homo sapiens; identical to SEQ ID NO: 220412
  chr21:43386123-43386183
  hypo

SEQ ID NO: 328725 - DNA, 278 bp, Homo sapiens; identical to SEQ ID NO: 276100
  chr21:43392888-43393166
  hypo

SEQ ID NO: 328726 - DNA, 65 bp, Homo sapiens; identical to SEQ ID NO: 220413
  chr21:43481098-43481163
  hypo

SEQ ID NO: 328727 - DNA, 100 bp, Homo sapiens; identical to SEQ ID NO: 276103
  chr21:43506200-43506300
  hypo

SEQ ID NO: 328728 - DNA, 63 bp, Homo sapiens
  chr21:43526203-43526266
  hypo
gtgacgcctcaggccgtgcatggccggggaggcggccctgcctctgcactcttttgactccat

SEQ ID NO: 328729 - DNA, 103 bp, Homo sapiens
  chr21:43526309-43526412
  hypo
ggggcaccgcccctgcctggggaggcagcacgaggcctgagcccagcttacagggggacatccacccccgctgagagccccaccttcacggcgaggatctgta

SEQ ID NO: 328730 - DNA, 96 bp, Homo sapiens; identical to SEQ ID NO: 276105
  chr21:43544448-43544544
  hypo

SEQ ID NO: 328731 - DNA, 234 bp, Homo sapiens; identical to SEQ ID NO: 220414
  chr21:43546441-43546675
  hypo

SEQ ID NO: 328732 - DNA, 390 bp, Homo sapiens; identical to SEQ ID NO: 220415
  chr21:43547671-43548061
  hypo

SEQ ID NO: 328733 - DNA, 148 bp, Homo sapiens; identical to SEQ ID NO: 276108
  chr21:43570325-43570473
  hypo

SEQ ID NO: 328734 - DNA, 233 bp, Homo sapiens; identical to SEQ ID NO: 276109
  chr21:43573759-43573992
  hypo

SEQ ID NO: 328735 - DNA, 71 bp, Homo sapiens; identical to SEQ ID NO: 276110
  chr21:43638119-43638190
  hypo

SEQ ID NO: 328736 - DNA, 44 bp, Homo sapiens; identical to SEQ ID NO: 276111
  chr21:43675552-43675596
  hypo

SEQ ID NO: 328737 - DNA, 193 bp, Homo sapiens; identical to SEQ ID NO: 276112
  chr21:43699162-43699355
  hypo

SEQ ID NO: 328738 - DNA, 114 bp, Homo sapiens; identical to SEQ ID NO: 276113
  chr21:43699804-43699918
  hypo

SEQ ID NO: 328739 - DNA, 339 bp, Homo sapiens
  chr21:43725921-43726260
  hypo
tcctgcttatcggccgcgcggcatccccttgtcgcagcactccagcatccatgcagccgcgcggcaccccgtcttcggagcactccagaatccatgcagagcgcagcaccccacatccagagcgctccagaatccatgaagcacgcggcaccccctcgtcagagtgctccagaatccatgaagtgcgcagcaccccttaatcggagcgctctagaacccgtgcagcgagcagcaccccacacccggagcgctccagaatccatgaagccagcagcaccccacacccggagtgctccagaatccacgcagcacgtggcatctcctcgtcatagcgttcta

SEQ ID NO: 328740 - DNA, 237 bp, Homo sapiens; identical to SEQ ID NO: 220416
  chr21:43736993-43737230
  hypo

SEQ ID NO: 328741 - DNA, 32 bp, Homo sapiens; identical to SEQ ID NO: 276116
  chr21:43767096-43767128
  hypo

SEQ ID NO: 328742 - DNA, 424 bp, Homo sapiens; identical to SEQ ID NO: 276117
  chr21:43767524-43767948
  hypo

SEQ ID NO: 328743 - DNA, 197 bp, Homo sapiens; identical to SEQ ID NO: 276118
  chr21:43772764-43772961
  hypo

SEQ ID NO: 328744 - DNA, 50 bp, Homo sapiens; identical to SEQ ID NO: 276119
  chr21:43785262-43785312
  hypo

SEQ ID NO: 328745 - DNA, 550 bp, Homo sapiens; identical to SEQ ID NO: 276121
  chr21:43791372-43791922
  hypo

SEQ ID NO: 328746 - DNA, 227 bp, Homo sapiens; identical to SEQ ID NO: 276122
  chr21:43815455-43815682
  hypo

SEQ ID NO: 328747 - DNA, 460 bp, Homo sapiens; identical to SEQ ID NO: 276123
  chr21:43825720-43826180
  hypo

SEQ ID NO: 328748 - DNA, 49 bp, Homo sapiens
  chr21:43864679-43864728
  hypo
tggactcctgcacgcggccactgctcgggctgccgccccgggaatgtgg

SEQ ID NO: 328749 - DNA, 36 bp, Homo sapiens; identical to SEQ ID NO: 276125
  chr21:43867444-43867480
  hypo

SEQ ID NO: 328750 - DNA, 42 bp, Homo sapiens; identical to SEQ ID NO: 276126
  chr21:43968301-43968343
  hypo

SEQ ID NO: 328751 - DNA, 93 bp, Homo sapiens; identical to SEQ ID NO: 276127
  chr21:43969268-43969361
  hypo

SEQ ID NO: 328752 - DNA, 122 bp, Homo sapiens; identical to SEQ ID NO: 220417
  chr21:43981535-43981657
  hypo

SEQ ID NO: 328753 - DNA, 61 bp, Homo sapiens; identical to SEQ ID NO: 220418
  chr21:43981687-43981748
  hypo

SEQ ID NO: 328754 - DNA, 214 bp, Homo sapiens; identical to SEQ ID NO: 276129
  chr21:43983784-43983998
  hypo

SEQ ID NO: 328755 - DNA, 48 bp, Homo sapiens; identical to SEQ ID NO: 276130
  chr21:43986296-43986344
  hypo

SEQ ID NO: 328756 - DNA, 183 bp, Homo sapiens; identical to SEQ ID NO: 276131
  chr21:43988059-43988242
  hypo

SEQ ID NO: 328757 - DNA, 251 bp, Homo sapiens
  chr21:43991049-43991300
  hypo
gtcctgactgtccgcggagctgccgcgcccaccttgatggctgctgcgttacaccagaggcaggaccaggacctgactcctccaggctccactgcccatcagtgcctgctgcctgctcagtgaatggtcaccatggaaacggcgctcaggcctacccacccccaccaccacgccttggtcattgttccttccatgagtgagtgctgcccagcaagacaaagtacaggctccagtgggaaggccaccatgtc

SEQ ID NO: 328758 - DNA, 219 bp, Homo sapiens
  chr21:43991493-43991712
  hypo
ttctgtacatttcatgcagagcaattaaatagggcactgcatttttcttcaagttaatttttatttattaaagtaaaacataatgtaccttagaagctagacagtcctacaagcttattatgttgtacagcggcgttccgtccccctccccagccctctctttctagaggcagccaatttcagctgcctctctctgcttacctacgtatttccatgttt

SEQ ID NO: 328759 - DNA, 133 bp, Homo sapiens; identical to SEQ ID NO: 276133
  chr21:44003047-44003180
  hypo

SEQ ID NO: 328760 - DNA, 171 bp, Homo sapiens; identical to SEQ ID NO: 276134
  chr21:44042062-44042233
  hypo

SEQ ID NO: 328761 - DNA, 160 bp, Homo sapiens; identical to SEQ ID NO: 276135
  chr21:44042441-44042601
  hypo

SEQ ID NO: 328762 - DNA, 223 bp, Homo sapiens; identical to SEQ ID NO: 276136
  chr21:44046313-44046536
  hypo

SEQ ID NO: 328763 - DNA, 134 bp, Homo sapiens; identical to SEQ ID NO: 276137
  chr21:44053075-44053209
  hypo

SEQ ID NO: 328764 - DNA, 147 bp, Homo sapiens; identical to SEQ ID NO: 220421
  chr21:44057645-44057792
  hypo

SEQ ID NO: 328765 - DNA, 109 bp, Homo sapiens; identical to SEQ ID NO: 220422
  chr21:44065364-44065473
  hypo

SEQ ID NO: 328766 - DNA, 82 bp, Homo sapiens; identical to SEQ ID NO: 220423
  chr21:44065918-44066000
  hypo

SEQ ID NO: 328767 - DNA, 274 bp, Homo sapiens; identical to SEQ ID NO: 276141
  chr21:44069369-44069643
  hypo

SEQ ID NO: 328768 - DNA, 298 bp, Homo sapiens; identical to SEQ ID NO: 276142
  chr21:44077994-44078292
  hypo

SEQ ID NO: 328769 - DNA, 205 bp, Homo sapiens; identical to SEQ ID NO: 220424
  chr21:44082373-44082578
  hypo

SEQ ID NO: 328770 - DNA, 308 bp, Homo sapiens; identical to SEQ ID NO: 276144
  chr21:44088802-44089110
  hypo

SEQ ID NO: 328771 - DNA, 373 bp, Homo sapiens; identical to SEQ ID NO: 276145
  chr21:44099305-44099678
  hypo

SEQ ID NO: 328772 - DNA, 94 bp, Homo sapiens; identical to SEQ ID NO: 276146
  chr21:44102122-44102216
  hypo

SEQ ID NO: 328773 - DNA, 122 bp, Homo sapiens; identical to SEQ ID NO: 276147
  chr21:44110038-44110160
  hypo

SEQ ID NO: 328774 - DNA, 128 bp, Homo sapiens; identical to SEQ ID NO: 276148
  chr21:44110392-44110520
  hypo

SEQ ID NO: 328775 - DNA, 572 bp, Homo sapiens; identical to SEQ ID NO: 276149
  chr21:44112761-44113333
  hypo

SEQ ID NO: 328776 - DNA, 34 bp, Homo sapiens; identical to SEQ ID NO: 276150
  chr21:44129779-44129813
  hypo

SEQ ID NO: 328777 - DNA, 42 bp, Homo sapiens; identical to SEQ ID NO: 276151
  chr21:44156220-44156262
  hypo

SEQ ID NO: 328778 - DNA, 155 bp, Homo sapiens; identical to SEQ ID NO: 276152
  chr21:44159325-44159480
  hypo

SEQ ID NO: 328779 - DNA, 150 bp, Homo sapiens; identical to SEQ ID NO: 276153
  chr21:44164005-44164155
  hypo

SEQ ID NO: 328780 - DNA, 136 bp, Homo sapiens; identical to SEQ ID NO: 276154
  chr21:44176666-44176802
  hypo

SEQ ID NO: 328781 - DNA, 473 bp, Homo sapiens; identical to SEQ ID NO: 276155
  chr21:44180220-44180693
  hypo

SEQ ID NO: 328782 - DNA, 153 bp, Homo sapiens; identical to SEQ ID NO: 276156
  chr21:44188342-44188495
  hypo

SEQ ID NO: 328783 - DNA, 429 bp, Homo sapiens; identical to SEQ ID NO: 276157
  chr21:44190665-44191094
  hypo

SEQ ID NO: 328784 - DNA, 145 bp, Homo sapiens; identical to SEQ ID NO: 276158
  chr21:44191718-44191863
  hypo

SEQ ID NO: 328785 - DNA, 337 bp, Homo sapiens; identical to SEQ ID NO: 276159
  chr21:44205101-44205438
  hypo

SEQ ID NO: 328786 - DNA, 445 bp, Homo sapiens; identical to SEQ ID NO: 276160
  chr21:44275677-44276122
  hypo

SEQ ID NO: 328787 - DNA, 225 bp, Homo sapiens
  chr21:44283356-44283581
  hypo
acagaccgggcagacgttgattcagcctgtaccccacataccatgtcccccacgtactgcgtctaacagcatggacaggtgcctgagccttgacagggtagacattgactcagcgtatgccccacgtgccacgtcccccatgtaccgtgtcccacacctgccatgtcccccacctaccacgtcccccacctaccacatctaacagcatagacaggtgccccagct

SEQ ID NO: 328788 - DNA, 129 bp, Homo sapiens
  chr21:44338552-44338681
  hypo
tggacacattcatggtaagcacaatggttctcctagatctacaaacagattttttcctggcttaggaagggatgcatctgcttatagtttttgtataaaggaatggaaatgccgcgggcgattttcagg

SEQ ID NO: 328789 - DNA, 44 bp, Homo sapiens; identical to SEQ ID NO: 276163
  chr21:44390976-44391020
  hypo

SEQ ID NO: 328790 - DNA, 120 bp, Homo sapiens; identical to SEQ ID NO: 276164
  chr21:44439927-44440047
  hypo

SEQ ID NO: 328791 - DNA, 246 bp, Homo sapiens; identical to SEQ ID NO: 220427
  chr21:44440492-44440738
  hypo

SEQ ID NO: 328792 - DNA, 293 bp, Homo sapiens; identical to SEQ ID NO: 276166
  chr21:44441270-44441563
  hypo

SEQ ID NO: 328793 - DNA, 237 bp, Homo sapiens; identical to SEQ ID NO: 220428
  chr21:44444700-44444937
  hypo

SEQ ID NO: 328794 - DNA, 390 bp, Homo sapiens; identical to SEQ ID NO: 220429
  chr21:44448042-44448432
  hypo

SEQ ID NO: 328795 - DNA, 46 bp, Homo sapiens; identical to SEQ ID NO: 220430
  chr21:44448696-44448742
  hypo

SEQ ID NO: 328796 - DNA, 203 bp, Homo sapiens; identical to SEQ ID NO: 276170
  chr21:44448964-44449167
  hypo

SEQ ID NO: 328797 - DNA, 145 bp, Homo sapiens; identical to SEQ ID NO: 276171
  chr21:44451416-44451561
  hypo

SEQ ID NO: 328798 - DNA, 662 bp, Homo sapiens; identical to SEQ ID NO: 276172
  chr21:44479014-44479676
  hypo

SEQ ID NO: 328799 - DNA, 46 bp, Homo sapiens
  chr21:44480610-44480656
  hypo
tgcgcggccttcacggccaccgccaccgtgctgccagcactgccac

SEQ ID NO: 328800 - DNA, 35 bp, Homo sapiens
  chr21:44482537-44482572
  hypo
gggagccgctcccacgtgaccaagagggtgaacag

SEQ ID NO: 328801 - DNA, 205 bp, Homo sapiens
  chr21:44482687-44482892
  hypo
aaaactgcccgccagccccactgagcatccgtgtgacccacaccggcccttcggtctctgctctccctcaggccaaagtcagctttttggctcttaacagacttttccggggccttaattttcacacgttttccctgctccctgcctgtgccacctgggctacatcccttggtgaggtcaggccacgtgtgcggacatcgtcccc

SEQ ID NO: 328802 - DNA, 165 bp, Homo sapiens; identical to SEQ ID NO: 220432
  chr21:44482954-44483119
  hypo

SEQ ID NO: 328803 - DNA, 456 bp, Homo sapiens; identical to SEQ ID NO: 276175
  chr21:44483490-44483946
  hypo

SEQ ID NO: 328804 - DNA, 65 bp, Homo sapiens; identical to SEQ ID NO: 295154
  chr21:44496297-44496362
  hypo

SEQ ID NO: 328805 - DNA, 110 bp, Homo sapiens; identical to SEQ ID NO: 206026
  chr21:44513219-44513329
  hypo

SEQ ID NO: 328806 - DNA, 176 bp, Homo sapiens; identical to SEQ ID NO: 206027
  chr21:44514586-44514762
  hypo

SEQ ID NO: 328807 - DNA, 80 bp, Homo sapiens; identical to SEQ ID NO: 276176
  chr21:44562056-44562136
  hypo

SEQ ID NO: 328808 - DNA, 78 bp, Homo sapiens; identical to SEQ ID NO: 276177
  chr21:44578931-44579009
  hypo

SEQ ID NO: 328809 - DNA, 73 bp, Homo sapiens; identical to SEQ ID NO: 276178
  chr21:44579210-44579283
  hypo

SEQ ID NO: 328810 - DNA, 229 bp, Homo sapiens; identical to SEQ ID NO: 220435
  chr21:44601206-44601435
  hypo

SEQ ID NO: 328811 - DNA, 34 bp, Homo sapiens; identical to SEQ ID NO: 276180
  chr21:44617829-44617863
  hypo

SEQ ID NO: 328812 - DNA, 34 bp, Homo sapiens; identical to SEQ ID NO: 276181
  chr21:44618103-44618137
  hypo

SEQ ID NO: 328813 - DNA, 535 bp, Homo sapiens; identical to SEQ ID NO: 276182
  chr21:44630080-44630615
  hypo

SEQ ID NO: 328814 - DNA, 233 bp, Homo sapiens; identical to SEQ ID NO: 276183
  chr21:44725369-44725602
  hypo

SEQ ID NO: 328815 - DNA, 111 bp, Homo sapiens; identical to SEQ ID NO: 276184
  chr21:44764101-44764212
  hypo

SEQ ID NO: 328816 - DNA, 82 bp, Homo sapiens; identical to SEQ ID NO: 276185
  chr21:44792954-44793036
  hypo

SEQ ID NO: 328817 - DNA, 201 bp, Homo sapiens; identical to SEQ ID NO: 220437
  chr21:44799064-44799265
  hypo

SEQ ID NO: 328818 - DNA, 322 bp, Homo sapiens; identical to SEQ ID NO: 276187
  chr21:44806801-44807123
  hypo

SEQ ID NO: 328819 - DNA, 826 bp, Homo sapiens; identical to SEQ ID NO: 276188
  chr21:44816265-44817091
  hypo

SEQ ID NO: 328820 - DNA, 49 bp, Homo sapiens; identical to SEQ ID NO: 220438
  chr21:44830890-44830939
  hypo

SEQ ID NO: 328821 - DNA, 324 bp, Homo sapiens; identical to SEQ ID NO: 220439
  chr21:44830969-44831293
  hypo

SEQ ID NO: 328822 - DNA, 165 bp, Homo sapiens
  chr21:44837213-44837378
  hypo
tcacccacccagggactttaaaggacacgcccgcctgctgcacccccatggctcagcacctaggacctacgccccacacatctccctggctgggagcgggggtgtgcactgggctacagagaggagggaaccacttagcagatgaggttcctcgaggagataacc

SEQ ID NO: 328823 - DNA, 350 bp, Homo sapiens
  chr21:44837631-44837981
  hypo
ctgctgccgaaaggccttcagccctgcagggagaatgaatcaggaggtcaacggccacccggctctcagcccagcatccacggcccttggcttaaggggtttccaagcctcaggttgggggtaaggaaaggacgggtgacacaagcacgtctggacaggagtctggcacctaagccccaggatggcgtggaggcagccggcagccaggggccctccctcctccaagtcgggaggtgctgcccagcacagagtcgtctcctgtgctttcagaaccagccatggaggccgcgtgctcagggacccatgtgtgtctatcccagcaggccgtgacgccccgagccaccagagca

SEQ ID NO: 328824 - DNA, 392 bp, Homo sapiens; identical to SEQ ID NO: 276193
  chr21:44839042-44839434
  hypo

SEQ ID NO: 328825 - DNA, 48 bp, Homo sapiens; identical to SEQ ID NO: 276194
  chr21:44839755-44839803
  hypo

SEQ ID NO: 328826 - DNA, 341 bp, Homo sapiens; identical to SEQ ID NO: 220441
  chr21:44840059-44840400
  hypo

SEQ ID NO: 328827 - DNA, 180 bp, Homo sapiens
  chr21:44840676-44840856
  hypo
gcggggacggcaggcgcaaggcacaagcctgtgcagcaagggcacccgtccaccctcgaaatagggcactgagaaggcatccatgggctgggtttctcccgcagcccacagtaacctgggcctgattcccagactcaacaaggactcagaagccagccacgaaggggctgcaggagacac

SEQ ID NO: 328828 - DNA, 80 bp, Homo sapiens
  chr21:44841527-44841607
  hypo
gatgtccatgttgccatccagcaggaggttctcggtcttgaggtcccggtggacgatgtgatggtcgtgacagtactcca

SEQ ID NO: 328829 - DNA, 38 bp, Homo sapiens; identical to SEQ ID NO: 206028
  chr21:44847473-44847511
  hypo

SEQ ID NO: 328830 - DNA, 228 bp, Homo sapiens; identical to SEQ ID NO: 220443
  chr21:44856274-44856502
  hypo

SEQ ID NO: 328831 - DNA, 372 bp, Homo sapiens; identical to SEQ ID NO: 276198
  chr21:44865715-44866087
  hypo

SEQ ID NO: 328832 - DNA, 193 bp, Homo sapiens; identical to SEQ ID NO: 276200
  chr21:44871136-44871329
  hypo

SEQ ID NO: 328833 - DNA, 198 bp, Homo sapiens
  chr21:44871641-44871839
  hypo
tgttgtgacctggggtcccccgtggtgggcccgccccttgagcctgggatccagcctcagcgaggctccagaagtgtcgtctccgccggccaggcgtcagcgcctccacccaggatcacacactcctatctctgcacttctgccctccatcctgctccacgccgcctctgcttgttattccagcacattccagggtga

SEQ ID NO: 328834 - DNA, 466 bp, Homo sapiens
  chr21:44871869-44872335
  hypo
caccctaccccccatctgacccaccggccccttccgcacgctggaagcctgcccggcctgaagtgtcctcacctgtcgccctatcctcccctccactccagcccaccggtgactcagccctcacagctctctcctccccgagggagccggtgacttggctctgatggtgccgggacccagccccggcatgttcagaatccttgtcctttaacctgcgtccacatgtagtcgcctccacctccctgcctgaacctccaggccctgcagagcaaacactgctgcctgcaggagacccctggggccttctccgtcccctcatcctcctaaggagcctcccctgccaccgtgccagaatgtgccggaggaacagaggcccgagcctcccgtggccccagcgaggcttcctctggggaagacagtgagcccaacgccctggctctcgaggggtggacggagtccagctggc

SEQ ID NO: 328835 - DNA, 111 bp, Homo sapiens; identical to SEQ ID NO: 276203
  chr21:44888677-44888788
  hypo

SEQ ID NO: 328836 - DNA, 80 bp, Homo sapiens; identical to SEQ ID NO: 276204
  chr21:44920331-44920411
  hypo

SEQ ID NO: 328837 - DNA, 369 bp, Homo sapiens
  chr21:45078407-45078776
  hypo
cacctcgggaggtcgcctagacaactgagcggagcaactgagataacccccgctacgtgtggagtgacctagtccattaacttgccccagcacgcccgctgagtccgcaaaatataggatggcctcgggttttagatgaacccaaagctaagatttcttccctctctggaattagcaagcagcccgccctgcccaactcccctggaagcgcgcgtgctcgccaggcctcgggacgcctgcgcgggcgcccttgcactggcaccagggctccggggtaggggcgcaccgatctgcccaagcctctgcaggcactggaggaaggcgagccctccacccgctcaacaggccccagtgccggcctttccttcc

SEQ ID NO: 328838 - DNA, 456 bp, Homo sapiens; identical to SEQ ID NO: 276206
  chr21:45114160-45114616
  hypo

SEQ ID NO: 328839 - DNA, 213 bp, Homo sapiens
  chr21:45140276-45140489
  hypo
ggaggacaggaagaggggagcagagcttcagtggaatttgagggctgacctaggcgtgcccccaggaggaccaagctgagcagagttgagcgtggaaaggcagggggttcgagtccgaagtaagtggaggtcctgttgggaaggatgcggtgcttcacaggtggtcttacttgagaccctgttccatccagctgcaggcagaccctgcctggg

SEQ ID NO: 328840 - DNA, 50 bp, Homo sapiens
  chr21:45140781-45140831
  hypo
gtttccttctttggctcactcgggatcccccagcaatgtcctttgttctc

SEQ ID NO: 328841 - DNA, 146 bp, Homo sapiens
  chr21:45140928-45141074
  hypo
cacggcatccttacctgtgggctccacagggttccatgcaggcattttgctcccataccccgatgtccaagcccggctggacaaggagaagcaatgtgatgaccgaggggctgagatggctggagacccagcgagcctggaccagc

SEQ ID NO: 328842 - DNA, 424 bp, Homo sapiens; identical to SEQ ID NO: 276209
  chr21:45167196-45167620
  hypo

SEQ ID NO: 328843 - DNA, 144 bp, Homo sapiens
  chr21:45170075-45170219
  hypo
atgctgagaccctgcgctgtggcatgggccttaagtgggggccgtggctgctgtccatcaccacggttacgtataaacagcagccatgattgggccttacgtgactcctgtaatgtgagggtcccctttagaaccaaaccccac

SEQ ID NO: 328844 - DNA, 232 bp, Homo sapiens
  chr21:45170408-45170640
  hypo
caggaggaagccttgcgggtaaggaggccctctggggcctgtgcggggcacatgtgccgctcacggtggggacgggagacaggctgcctgagtggcaccactgtgtcatttctccccagcagtgactgaacagtctgtaccagtcggggcctccagagatcagcaggatatatgtgtgtgtgtacatgtgtggacatgtttgtgcatgtgtgtgtgtgtgtgcatgtgtgcg

SEQ ID NO: 328845 - DNA, 1446 bp, Homo sapiens; identical to SEQ ID NO: 276211
  chr21:45175374-45176820
  hypo

SEQ ID NO: 328846 - DNA, 179 bp, Homo sapiens; identical to SEQ ID NO: 226295
  chr21:45182012-45182191
  hypo

SEQ ID NO: 328847 - DNA, 156 bp, Homo sapiens; identical to SEQ ID NO: 295162
  chr21:45182669-45182825
  hypo

SEQ ID NO: 328848 - DNA, 100 bp, Homo sapiens; identical to SEQ ID NO: 276213
  chr21:45184714-45184814
  hypo

SEQ ID NO: 328849 - DNA, 32 bp, Homo sapiens
  chr21:45187154-45187186
  hypo
gacatgggaaccttgcgggcacacacatgcaa

SEQ ID NO: 328850 - DNA, 545 bp, Homo sapiens; identical to SEQ ID NO: 276215
  chr21:45187450-45187995
  hypo

SEQ ID NO: 328851 - DNA, 421 bp, Homo sapiens; identical to SEQ ID NO: 276216
  chr21:45188555-45188976
  hypo

SEQ ID NO: 328852 - DNA, 33 bp, Homo sapiens; identical to SEQ ID NO: 220447
  chr21:45194488-45194521
  hypo

SEQ ID NO: 328853 - DNA, 40 bp, Homo sapiens; identical to SEQ ID NO: 276219
  chr21:45208439-45208479
  hypo

SEQ ID NO: 328854 - DNA, 469 bp, Homo sapiens; identical to SEQ ID NO: 276220
  chr21:45223510-45223979
  hypo

SEQ ID NO: 328855 - DNA, 598 bp, Homo sapiens; identical to SEQ ID NO: 220449
  chr21:45224195-45224793
  hypo

SEQ ID NO: 328856 - DNA, 147 bp, Homo sapiens
  chr21:45233002-45233149
  hypo
ggagtcctggccgctgtccccagccctacgcccctctcagagcttgagccaggggcagcgcaatgggcagctccttccctctcctgtccctggaaaactgctctgggtgatttggcggagagtgagaggattcgaaaacgctggtac

SEQ ID NO: 328857 - DNA, 106 bp, Homo sapiens; identical to SEQ ID NO: 220450
  chr21:45233494-45233600
  hypo

SEQ ID NO: 328858 - DNA, 137 bp, Homo sapiens; identical to SEQ ID NO: 276224
  chr21:45245440-45245577
  hypo

SEQ ID NO: 328859 - DNA, 282 bp, Homo sapiens; identical to SEQ ID NO: 276226
  chr21:45252134-45252416
  hypo

SEQ ID NO: 328860 - DNA, 31 bp, Homo sapiens
  chr21:45268737-45268768
  hypo
gaggcacggcacctcgccctgcattctagcg

SEQ ID NO: 328861 - DNA, 238 bp, Homo sapiens; identical to SEQ ID NO: 276228
  chr21:45271700-45271938
  hypo

SEQ ID NO: 328862 - DNA, 42 bp, Homo sapiens; identical to SEQ ID NO: 276229
  chr21:45276200-45276242
  hypo

SEQ ID NO: 328863 - DNA, 42 bp, Homo sapiens; identical to SEQ ID NO: 220451
  chr21:45281601-45281643
  hypo

SEQ ID NO: 328864 - DNA, 76 bp, Homo sapiens
  chr21:45289938-45290014
  hypo
cccaactgtgactcattatgcggcacgggcgggcgggattttggattagttttaggaagcgaaccacagccgtcct

SEQ ID NO: 328865 - DNA, 90 bp, Homo sapiens
  chr21:45290044-45290134
  hypo
gctggtgcagggaggcgaagtgctggtgttctgggaattttcaaatgcactacagcgatcaggacacacgtgtttcagtgcacacaggtt

SEQ ID NO: 328866 - DNA, 50 bp, Homo sapiens; identical to SEQ ID NO: 220452
  chr21:45299401-45299451
  hypo

SEQ ID NO: 328867 - DNA, 186 bp, Homo sapiens; identical to SEQ ID NO: 276234
  chr21:45299787-45299973
  hypo

SEQ ID NO: 328868 - DNA, 317 bp, Homo sapiens; identical to SEQ ID NO: 276235
  chr21:45318873-45319190
  hypo

SEQ ID NO: 328869 - DNA, 731 bp, Homo sapiens; identical to SEQ ID NO: 220453
  chr21:45345793-45346524
  hypo

SEQ ID NO: 328870 - DNA, 307 bp, Homo sapiens
  chr21:45349836-45350143
  hypo
aggtgacagacgcgttctctggagcaccgacagcccaggcgtgccggagagagaggacttgagtgactgtcctcctggaacccagggtgccttgtcctggcacttctgtgtacatcatccagccccgttttcacgttcaggaagtcacgaatccacagtgtctttgaagaaagtggggaatagagttatcaaccgtcactccacggagagtctaaggcagagagaagttgggttccccttccacggttccctgcccccggggacacagttgtgggaggtctcagggcagagacgccgcacggtgggg

SEQ ID NO: 328871 - DNA, 71 bp, Homo sapiens; identical to SEQ ID NO: 220454
  chr21:45352875-45352946
  hypo

SEQ ID NO: 328872 - DNA, 500 bp, Homo sapiens; identical to SEQ ID NO: 220455
  chr21:45353002-45353502
  hypo

SEQ ID NO: 328873 - DNA, 358 bp, Homo sapiens; identical to SEQ ID NO: 220456
  chr21:45353564-45353922
  hypo

SEQ ID NO: 328874 - DNA, 78 bp, Homo sapiens; identical to SEQ ID NO: 220457
  chr21:45354855-45354933
  hypo

SEQ ID NO: 328875 - DNA, 113 bp, Homo sapiens; identical to SEQ ID NO: 276240
  chr21:45355818-45355931
  hypo

SEQ ID NO: 328876 - DNA, 99 bp, Homo sapiens; identical to SEQ ID NO: 276241
  chr21:45358107-45358206
  hypo

SEQ ID NO: 328877 - DNA, 256 bp, Homo sapiens; identical to SEQ ID NO: 220458
  chr21:45360447-45360703
  hypo

SEQ ID NO: 328878 - DNA, 186 bp, Homo sapiens; identical to SEQ ID NO: 276243
  chr21:45364365-45364551
  hypo

SEQ ID NO: 328879 - DNA, 246 bp, Homo sapiens; identical to SEQ ID NO: 276244
  chr21:45364876-45365122
  hypo

SEQ ID NO: 328880 - DNA, 115 bp, Homo sapiens; identical to SEQ ID NO: 220459
  chr21:45374890-45375005
  hypo

SEQ ID NO: 328881 - DNA, 369 bp, Homo sapiens; identical to SEQ ID NO: 276246
  chr21:45379437-45379806
  hypo

SEQ ID NO: 328882 - DNA, 429 bp, Homo sapiens; identical to SEQ ID NO: 295164
  chr21:45381212-45381641
  hypo

SEQ ID NO: 328883 - DNA, 205 bp, Homo sapiens; identical to SEQ ID NO: 276248
  chr21:45393402-45393607
  hypo

SEQ ID NO: 328884 - DNA, 221 bp, Homo sapiens; identical to SEQ ID NO: 220461
  chr21:45396665-45396886
  hypo

SEQ ID NO: 328885 - DNA, 219 bp, Homo sapiens; identical to SEQ ID NO: 220462
  chr21:45399689-45399908
  hypo

SEQ ID NO: 328886 - DNA, 676 bp, Homo sapiens; identical to SEQ ID NO: 220463
  chr21:45400148-45400824
  hypo

SEQ ID NO: 328887 - DNA, 292 bp, Homo sapiens; identical to SEQ ID NO: 220464
  chr21:45400854-45401146
  hypo

SEQ ID NO: 328888 - DNA, 71 bp, Homo sapiens; identical to SEQ ID NO: 276252
  chr21:45402471-45402542
  hypo

SEQ ID NO: 328889 - DNA, 810 bp, Homo sapiens; identical to SEQ ID NO: 220465
  chr21:45403410-45404220
  hypo

SEQ ID NO: 328890 - DNA, 156 bp, Homo sapiens
  chr21:45411685-45411841
  hypo
atgtttggggcccacgaagaccttgagctgccttcaggaaggattgtcacgcggggcagggtgtgtaagcagatgagctgcgctgtgccagcctgtgctcctctgcccacgcagcaggccgtacattccgcacccgggatgcctgggacgcccaca

SEQ ID NO: 328891 - DNA, 135 bp, Homo sapiens; identical to SEQ ID NO: 220466
  chr21:45446230-45446365
  hypo

SEQ ID NO: 328892 - DNA, 281 bp, Homo sapiens; identical to SEQ ID NO: 276256
  chr21:45478824-45479105
  hypo

SEQ ID NO: 328893 - DNA, 256 bp, Homo sapiens; identical to SEQ ID NO: 276257
  chr21:45479408-45479664
  hypo

SEQ ID NO: 328894 - DNA, 64 bp, Homo sapiens; identical to SEQ ID NO: 276258
  chr21:45483497-45483561
  hypo

SEQ ID NO: 328895 - DNA, 239 bp, Homo sapiens; identical to SEQ ID NO: 276259
  chr21:45494378-45494617
  hypo

SEQ ID NO: 328896 - DNA, 133 bp, Homo sapiens; identical to SEQ ID NO: 276260
  chr21:45499832-45499965
  hypo

SEQ ID NO: 328897 - DNA, 52 bp, Homo sapiens
  chr21:45508565-45508617
  hypo
gctcagcaggagcgcgcagcactggtggcacctgtgctatgtgccgtgttat

SEQ ID NO: 328898 - DNA, 238 bp, Homo sapiens
  chr21:45508695-45508933
  hypo
tgctgtgtgccatgttatcccactcttccctgacactggcggcacctgtgctatgtgccgtgttatcctctcttccctggcgctggcggcacctgtgctgtgtgccgtgttatcccactcttctctggcgctggcggcacctgtgctgtgtgccgtgttatcctcttttccctggcactggcggcacctgtgctgtgtgccgtgttaccccgctcttccctggcgctggtggcacctg

SEQ ID NO: 328899 - DNA, 162 bp, Homo sapiens; identical to SEQ ID NO: 276262
  chr21:45511963-45512125
  hypo

SEQ ID NO: 328900 - DNA, 325 bp, Homo sapiens; identical to SEQ ID NO: 220467
  chr21:45513669-45513994
  hypo

SEQ ID NO: 328901 - DNA, 367 bp, Homo sapiens; identical to SEQ ID NO: 276265
  chr21:45518811-45519178
  hypo

SEQ ID NO: 328902 - DNA, 165 bp, Homo sapiens; identical to SEQ ID NO: 220469
  chr21:45546680-45546845
  hypo

SEQ ID NO: 328903 - DNA, 63 bp, Homo sapiens; identical to SEQ ID NO: 206032
  chr21:45553436-45553499
  hypo

SEQ ID NO: 328904 - DNA, 192 bp, Homo sapiens; identical to SEQ ID NO: 220471
  chr21:45558785-45558977
  hypo

SEQ ID NO: 328905 - DNA, 70 bp, Homo sapiens; identical to SEQ ID NO: 220472
  chr21:45583677-45583747
  hypo

SEQ ID NO: 328906 - DNA, 76 bp, Homo sapiens; identical to SEQ ID NO: 276269
  chr21:45586573-45586649
  hypo

SEQ ID NO: 328907 - DNA, 164 bp, Homo sapiens; identical to SEQ ID NO: 276270
  chr21:45605771-45605935
  hypo

SEQ ID NO: 328908 - DNA, 139 bp, Homo sapiens; identical to SEQ ID NO: 276271
  chr21:45617227-45617366
  hypo

SEQ ID NO: 328909 - DNA, 75 bp, Homo sapiens; identical to SEQ ID NO: 276272
  chr21:45621744-45621819
  hypo

SEQ ID NO: 328910 - DNA, 229 bp, Homo sapiens
  chr21:45626013-45626242
  hypo
ccgacactagcacccgtgtggaaggaacgagagggagatttggggtccgcagaggcaaaccacaggaggacggagtcggagactggagcaccgcggccttgatcgggggacaccagggctgccggctgtgccagaaggggctgaggctggaccggattctctccgagttcccagaaggagccagtcctgccgacgccttgatgctggactctggcctccagaaatgtgc

SEQ ID NO: 328911 - DNA, 83 bp, Homo sapiens
  chr21:45626286-45626369
  hypo
gttgcagcagcctggacagtctggactgcctggacagcatgcagatgggctctgcccgcggctgcccacgagttcccaccgcc

SEQ ID NO: 328912 - DNA, 265 bp, Homo sapiens; identical to SEQ ID NO: 220473
  chr21:45628849-45629114
  hypo

SEQ ID NO: 328913 - DNA, 283 bp, Homo sapiens; identical to SEQ ID NO: 276275
  chr21:45653663-45653946
  hypo

SEQ ID NO: 328914 - DNA, 155 bp, Homo sapiens
  chr21:45656873-45657028
  hypo
gccccgcagcatgccggccggtgacatcagggctcggttccggtagcggctgtccacgttttccaaggagctgttctgtgggatgtggtaggtcaccacggttttcgactcactggtttgccaatatacgtaaacatcatttaaatcaaaacggc

SEQ ID NO: 328915 - DNA, 31 bp, Homo sapiens
  chr21:45657058-45657089
  hypo
cgtcgctgcctaccatcgctctgacttcctt

SEQ ID NO: 328916 - DNA, 164 bp, Homo sapiens; identical to SEQ ID NO: 206033
  chr21:45660235-45660399
  hypo

SEQ ID NO: 328917 - DNA, 540 bp, Homo sapiens; identical to SEQ ID NO: 295171
  chr21:45662515-45663055
  hypo

SEQ ID NO: 328918 - DNA, 100 bp, Homo sapiens; identical to SEQ ID NO: 276277
  chr21:45676496-45676596
  hypo

SEQ ID NO: 328919 - DNA, 132 bp, Homo sapiens; identical to SEQ ID NO: 220475
  chr21:45678289-45678421
  hypo

SEQ ID NO: 328920 - DNA, 110 bp, Homo sapiens; identical to SEQ ID NO: 220476
  chr21:45709581-45709691
  hypo

SEQ ID NO: 328921 - DNA, 277 bp, Homo sapiens; identical to SEQ ID NO: 206034
  chr21:45713496-45713773
  hypo

SEQ ID NO: 328922 - DNA, 41 bp, Homo sapiens; identical to SEQ ID NO: 276281
  chr21:45730210-45730251
  hypo

SEQ ID NO: 328923 - DNA, 83 bp, Homo sapiens; identical to SEQ ID NO: 220478
  chr21:45736416-45736499
  hypo

SEQ ID NO: 328924 - DNA, 218 bp, Homo sapiens; identical to SEQ ID NO: 276283
  chr21:45744630-45744848
  hypo

SEQ ID NO: 328925 - DNA, 269 bp, Homo sapiens
  chr21:45750126-45750395
  hypo
cggctgcccacagtctgctgcacggcctccagcccctctgcatccagctcccgcagcagcagcaggatggcagtcaggacgttctgagggcagaggggtgcggactaagcccacccggcacggcgaggctgcttccctccacaagggctggggcctggccagcggtgccccaccacggagcgactggtcccgggggtgtgggccgtccaagtgactgaccggcacactcggagaatctgagcagaggagccccgcctgtggacgcgtgt

SEQ ID NO: 328926 - DNA, 210 bp, Homo sapiens; identical to SEQ ID NO: 276285
  chr21:45751583-45751793
  hypo

SEQ ID NO: 328927 - DNA, 331 bp, Homo sapiens
  chr21:45753905-45754236
  hypo
ctcatgcagctcctagctatgaggccgccccattttaccaagagcaaaactccggctgtgggactctttccaggatggggtctgcctcaggcacaggcagcagcgtgatgtaccgaccgcgtccgcggcctcgaggcttcctgctccgctccagtgcagtcaggcgtgcaggcaccacgcacctgagctcggtcaacacccctggggtcctgtccctcccgagatgtgacagaaatggccccacacacgagcggcctgatgctcggaggccctgtggcccctgggtgactcagtgagcggcagggatagggctggatccacagccccgccc

SEQ ID NO: 328928 - DNA, 192 bp, Homo sapiens; identical to SEQ ID NO: 276287
  chr21:45754286-45754478
  hypo

SEQ ID NO: 328929 - DNA, 241 bp, Homo sapiens; identical to SEQ ID NO: 276288
  chr21:45768305-45768546
  hypo
